United States Patent Application Publication US 2024/0327476 A1 - sequence listing, part 44

SEQ ID NO: 80776 - DNA, 3096 bp, synthetic construct
  misc_feature 1..3096: note = Description of Artificial Sequence: Synthetic coding sequence
  source 1..3096: mol_type = other DNA
agctgccactgcacccccagctggccccccgtgcccgagaagagaccccccgagatccagcacttcagaatgagcgacgacgtgcacagcctgggcaaggtgaccagcgacctggccaagagaagaaagctgaacagcggcggcggcctgagcgaggagctgggcagcgccagaagaagcggcgaggtgaccctgaccaagggcgaccccggcagcctggaggagtgggagaccgtggtgggcgacgacttcagcctgtactacgacagctacagcgtggacgagagagtggacagcgacagcaagagcgaggtggaggccctgaccgagcagctgagcgaggaggaggaggaggaggaggaggaggaggaggaggaggaggaggaggaggaggaggaggaggaggaggaggacgaggagagcggcaaccagagcgacagaagcggcagcagcggcagaagaaaggccaagaagaagtggagaaaggacagcccctgggtgaagcccagcagaaagagaagaaagagagagccccccagagccaaggagcccagaggcgtgaacggcgtgggcagcagcggccccagcgagtacatggaggtgcccctgggcagcctggagctgcccagcgagggcaccctgagccccaaccacgccggcgtgagcaacgacaccagcagcctggagaccgagagaggcttcgaggagctgcccctgtgcagctgcagaatggaggcccccaagatcgacagaatcagcgagagagccggccacaagtgcatggccaccgagagcgtggacggcgagctgagcggctgcaacgccgccatcctgaagagagagaccatgagacccagcagcagagtggccctgatggtgctgtgcgagacccacagagccagaatggtgaagcaccactgctgccccggctgcggctacttctgcaccgccggcaccttcctggagtgccaccccgacttcagagtggcccacagattccacaaggcctgcgtgagccagctgaacggcatggtgttctgcccccactgcggcgaggacgccagcgaggcccaggaggtgaccatccccagaggcgacggcgtgaccccccccgccggcaccgccgcccccgcccccccccccctgagccaggacgtgcccggcagagccgacaccagccagcccagcgccagaatgagaggccacggcgagcccagaagacccccctgcgaccccctggccgacaccatcgacagcagcggccccagcctgaccctgcccaacggcggctgcctgagcgccgtgggcctgcccctgggccccggcagagaggccctggagaaggccctggtgatccaggagagcgagagaagaaagaagctgagattccaccccagacagctgtacctgagcgtgaagcagggcgagctgcagaaggtgatcctgatgctgctggacaacctggaccccaacttccagagcgaccagcagagcaagagaacccccctgcacgccgccgcccagaagggcagcgtggagatctgccacgtgctgctgcaggccggcgccaacatcaacgccgtggacaagcagcagagaacccccctgatggaggccgtggtgaacaaccacctggaggtggccagatacatggtgcagagaggcggctgcgtgtacagcaaggaggaggacggcagcacctgcctgcaccacgccgccaagatcggcaacctggagatggtgagcctgctgctgagcaccggccaggtggacgtgaacgcccaggacagcggcggctggacccccatcatctgggccgccgagcacaagcacatcgaggtgatcagaatgctgctgaccagaggcgccgacgtgaccctgaccgacaacgtgagcgagagactggtggaggaggagaacatctgcctgcactgggccagcttcaccggcagcgccgccatcgccgaggtgctgctgaacgccagatgcgacctgcacgccgtgaactaccacggcgacacccccctgcacatcgccgccagagagagctaccacgactgcgtgctgctgttcctgagcagaggcgccaaccccgagctgagaaacaaggagggcgacaccgcctgggacctgacccccgagagaagcgacgtgtggttcgccctgcagctgaacagaaagctgagactgggcgtgggcaacagagccatcagaaccgagaagatcatctgcagagacgtggccagaggctacgagaacgtgcccatcccctgcgtgaacggcgtggacggcgagccctgccccgaggactacaagtacatcagcgagaactgcgagaccagcaccatgaacatcgacagaaacatcacccacctgcagcactgcacctgcgtggacgactgcagcagcagcaactgcctgtgcggccagctgagcatcagatgctggtacgacaaggacggcagactgctgcaggagttcaacaagatcgagccccccctgatcttcgagtgcaaccaggcctgcagctgctggagaaactgcaagaacagagtggtgcagagcggcatcaaggtgagactgcagctgtacagaaccgccaagatgggctggggcgtgagagccctgcagaccatcccccagggcaccttcatctgcgagtacgtgggcgagctgatcagcgacgccgaggccgacgtgagagaggacgacagctacctgttcgacctggacaacaaggacggcgaggtgtactgcatcgacgccagatactacggcaacatcagcagattcatcaaccacctgtgcgaccccaacatcatccccgtgagagtgttcatgctgcaccaggacctgagattccccagaatcgccttcttcagcagcagagacatcagaaccggcgaggagctgggcttcgactacggcgacagattctgggacatcaagagcaagtacttcacctgccagtgcggcagcgagaagtgcaagcacagcgccgaggccatcgccctggagcagagcagactggccagactggacccccaccccgagctgctgcccgagctgggcagcctgccccccgtgaacacctag

SEQ ID NO: 80777 - DNA, 3702 bp, synthetic construct; identical to SEQ ID NO: 80752
  misc_feature 1..3702: note = Description of Artificial Sequence: Synthetic coding sequence
  source 1..3702: mol_type = other DNA

SEQ ID NO: 80778 - DNA, 3804 bp, synthetic construct; identical to SEQ ID NO: 80760
  misc_feature 1..3804: note = Description of Artificial Sequence: Synthetic coding sequence
  source 1..3804: mol_type = other DNA

SEQ ID NO: 80779 - DNA, 897 bp, synthetic construct; identical to SEQ ID NO: 80761
  misc_feature 1..897: note = Description of Artificial Sequence: Synthetic coding sequence
  source 1..897: mol_type = other DNA

SEQ ID NO: 80780 - DNA, 897 bp, synthetic construct; identical to SEQ ID NO: 80761
  misc_feature 1..897: note = Description of Artificial Sequence: Synthetic coding sequence
  source 1..897: mol_type = other DNA

SEQ ID NO: 80781 - DNA, 3633 bp, synthetic construct; identical to SEQ ID NO: 80754
  misc_feature 1..3633: note = Description of Artificial Sequence: Synthetic coding sequence
  source 1..3633: mol_type = other DNA

SEQ ID NO: 80782 - DNA, 3531 bp, synthetic construct; identical to SEQ ID NO: 80753
  misc_feature 1..3531: note = Description of Artificial Sequence: Synthetic coding sequence
  source 1..3531: mol_type = other DNA

SEQ ID NO: 80783 - DNA, 3702 bp, synthetic construct; identical to SEQ ID NO: 80769
  misc_feature 1..3702: note = Description of Artificial Sequence: Synthetic coding sequence
  source 1..3702: mol_type = other DNA

SEQ ID NO: 80784 - DNA, 897 bp, synthetic construct; identical to SEQ ID NO: 80761
  misc_feature 1..897: note = Description of Artificial Sequence: Synthetic coding sequence
  source 1..897: mol_type = other DNA

SEQ ID NO: 80785 - DNA, 3531 bp, synthetic construct; identical to SEQ ID NO: 80775
  misc_feature 1..3531: note = Description of Artificial Sequence: Synthetic coding sequence
  source 1..3531: mol_type = other DNA

SEQ ID NO: 80786 - DNA, 2667 bp, synthetic construct; identical to SEQ ID NO: 80774
  misc_feature 1..2667: note = Description of Artificial Sequence: Synthetic coding sequence
  source 1..2667: mol_type = other DNA

SEQ ID NO: 80787 - DNA, 2769 bp, synthetic construct; identical to SEQ ID NO: 80768
  misc_feature 1..2769: note = Description of Artificial Sequence: Synthetic coding sequence
  source 1..2769: mol_type = other DNA

SEQ ID NO: 80788 - DNA, 3096 bp, synthetic construct
  misc_feature 1..3096: note = Description of Artificial Sequence: Synthetic coding sequence
  source 1..3096: mol_type = other DNA
agctgccactgcacccccagcagaccccccgtgcccgagaagagaccccccgagatccagcacttcagaatgagcgacgacgtgcacagcctgggcaaggtgaccagcgacctggccaagagaagaaagctgaacagcggcggcggcctgagcgaggagctgggcagcgccagaagaagcggcgaggtgaccctgaccaagggcgaccccggcagcctggaggagtgggagaccgtggtgggcgacgacttcagcctgtactacgacagctacagcgtggacgagagagtggacagcgacagcaagagcgaggtggaggccctgaccgagcagctgagcgaggaggaggaggaggaggaggaggaggaggaggaggaggaggaggaggaggaggaggaggaggaggaggaggacgaggagagcggcaaccagagcgacagaagcggcagcagcggcagaagaaaggccaagaagaagtggagaaaggacagcccctgggtgaagcccagcagaaagagaagaaagagagagccccccagagccaaggagcccagaggcgtgaacggcgtgggcagcagcggccccagcgagtacatggaggtgcccctgggcagcctggagctgcccagcgagggcaccctgagccccaaccacgccggcgtgagcaacgacaccagcagcctggagaccgagagaggcttcgaggagctgcccctgtgcagctgcagaatggaggcccccaagatcgacagaatcagcgagagagccggccacaagtgcatggccaccgagagcgtggacggcgagctgagcggctgcaacgccgccatcctgaagagagagaccatgagacccagcagcagagtggccctgatggtgctgtgcgagacccacagagccagaatggtgaagcaccactgctgccccggctgcggctacttctgcaccgccggcaccttcctggagtgccaccccgacttcagagtggcccacagattccacaaggcctgcgtgagccagctgaacggcatggtgttctgcccccactgcggcgaggacgccagcgaggcccaggaggtgaccatccccagaggcgacggcgtgaccccccccgccggcaccgccgcccccgcccccccccccctgagccaggacgtgcccggcagagccgacaccagccagcccagcgccagaatgagaggccacggcgagcccagaagacccccctgcgaccccctggccgacaccatcgacagcagcggccccagcctgaccctgcccaacggcggctgcctgagcgccgtgggcctgcccctgggccccggcagagaggccctggagaaggccctggtgatccaggagagcgagagaagaaagaagctgagattccaccccagacagctgtacctgagcgtgaagcagggcgagctgcagaaggtgatcctgatgctgctggacaacctggaccccaacttccagagcgaccagcagagcaagagaacccccctgcacgccgccgcccagaagggcagcgtggagatctgccacgtgctgctgcaggccggcgccaacatcaacgccgtggacaagcagcagagaacccccctgatggaggccgtggtgaacaaccacctggaggtggccagatacatggtgcagagaggcggctgcgtgtacagcaaggaggaggacggcagcacctgcctgcaccacgccgccaagatcggcaacctggagatggtgagcctgctgctgagcaccggccaggtggacgtgaacgcccaggacagcggcggctggacccccatcatctgggccgccgagcacaagcacatcgaggtgatcagaatgctgctgaccagaggcgccgacgtgaccctgaccgacaacgtgagcgagagactggtggaggaggagaacatctgcctgcactgggccagcttcaccggcagcgccgccatcgccgaggtgctgctgaacgccagatgcgacctgcacgccgtgaactaccacggcgacacccccctgcacatcgccgccagagagagctaccacgactgcgtgctgctgttcctgagcagaggcgccaaccccgagctgagaaacaaggagggcgacaccgcctgggacctgacccccgagagaagcgacgtgtggttcgccctgcagctgaacagaaagctgagactgggcgtgggcaacagagccatcagaaccgagaagatcatctgcagagacgtggccagaggctacgagaacgtgcccatcccctgcgtgaacggcgtggacggcgagccctgccccgaggactacaagtacatcagcgagaactgcgagaccagcaccatgaacatcgacagaaacatcacccacctgcagcactgcacctgcgtggacgactgcagcagcagcaactgcctgtgcggccagctgagcatcagatgctggtacgacaaggacggcagactgctgcaggagttcaacaagatcgagccccccctgatcttcgagtgcaaccaggcctgcagctgctggagaaactgcaagaacagagtggtgcagagcggcatcaaggtgagactgcagctgtacagaaccgccaagatgggctggggcgtgagagccctgcagaccatcccccagggcaccttcatctgcgagtacgtgggcgagctgatcagcgacgccgaggccgacgtgagagaggacgacagctacctgttcgacctggacaacaaggacggcgaggtgtactgcatcgacgccagatactacggcaacatcagcagattcatcaaccacctgtgcgaccccaacatcatccccgtgagagtgttcatgctgcaccaggacctgagattccccagaatcgccttcttcagcagcagagacatcagaaccggcgaggagctgggcttcgactacggcgacagattctgggacatcaagagcaagtacttcacctgccagtgcggcagcgagaagtgcaagcacagcgccgaggccatcgccctggagcagagcagactggccagactggacccccaccccgagctgctgcccgagctgggcagcctgccccccgtgaacacctag

SEQ ID NO: 80789 - DNA, 3096 bp, synthetic construct; identical to SEQ ID NO: 80776
  misc_feature 1..3096: note = Description of Artificial Sequence: Synthetic coding sequence
  source 1..3096: mol_type = other DNA

SEQ ID NO: 80790 - DNA, 3096 bp, synthetic construct; identical to SEQ ID NO: 80776
  misc_feature 1..3096: note = Description of Artificial Sequence: Synthetic coding sequence
  source 1..3096: mol_type = other DNA

SEQ ID NO: 80791 - DNA, 3096 bp, synthetic construct; identical to SEQ ID NO: 80788
  misc_feature 1..3096: note = Description of Artificial Sequence: Synthetic coding sequence
  source 1..3096: mol_type = other DNA

SEQ ID NO: 80792 - DNA, 3096 bp, synthetic construct; identical to SEQ ID NO: 80776
  misc_feature 1..3096: note = Description of Artificial Sequence: Synthetic coding sequence
  source 1..3096: mol_type = other DNA

SEQ ID NO: 80793 - DNA, 2178 bp, synthetic construct
  misc_feature 1..2178: note = Description of Artificial Sequence: Synthetic coding sequence
  source 1..2178: mol_type = other DNA
atggccgacgaggacctgatcttcagactggagggcgtggacggcggccagagccccagagccggccacgacggcgacagcgacggcgacagcgacgacgaggagggctacttcatctgccccatcaccgacgaccccagcagcaaccagaacgtgaacagcaaggtgaacaagtactacagcaacctgaccaagagcgagagatacagcagcagcggcagccccgccaacagcttccacttcaaggaggcctggaagcacgccatccagaaggccaagcacatgcccgacccctgggccgagttccacctggaggacatcgccaccgagagagccaccagacacagatacaacgccgtgaccggcgagtggctggacgacgaggtgctgatcaagatggccagccagcccttcggcagaggcgccatgagagagtgcttcagaaccaagaagctgagcaacttcctgcacgcccagcagtggaagggcgccagcaactacgtggccaagagatacatcgagcccgtggacagagacgtgtacttcgaggacgtgagactgcagatggaggccaagctgtggggcgaggagtacaacagacacaagccccccaagcaggtggacatcatgcagatgtgcatcatcgagctgaaggacagacccggcaagcccctgttccacctggagcactacatcgagggcaagtacatcaagtacaacagcaacagcggcttcgtgagagacgacaacatcagactgaccccccaggccttcagccacttcaccttcgagagaagcggccaccagctgatcgtggtggacatccagggcgtgggcgacctgtacaccgacccccagatccacaccgagaccggcaccgacttcggcgacggcaacctgggcgtgagaggcatggccctgttcttctacagccacgcctgcaacagaatctgcgagagcatgggcctggcccccttcgacctgagccccagagagagagacgccgtgaaccagaacaccaagctgctgcagagcgccaagaccatcctgagaggcaccgaggagaagtgcggcagcccccaggtgagaaccctgagcggcagcagaccccccctgctgagacccctgagcgagaacagcggcgacgagaacatgagcgacgtgaccttcgacagcctgcccagcagccccagcagcgccaccccccacagccagaagctggaccacctgcactggcccgtgttcagcgacctggacaacatggccagcagagaccacgaccacctggacaaccacagagagagcgagaacagcggcgacagcggctaccccagcgagaagagaggcgagctggacgaccccgagcccagagagcacggccacagctacagcaacagaaagtacgagagcgacgaggacagcctgggcagcagcggcagagtgtgcgtggagaagtggaacctgctgaacagcagcagactgcacctgcccagagccagcgccgtggccctggaggtgcagagactgaacgccctggacctggagaagaagatcggcaagagcatcctgggcaaggtgcacctggccatggtgagataccacgagggcggcagattctgcgagaagggcgaggagtgggaccaggagagcgccgtgttccacctggagcacgccgccaacctgggcgagctggaggccatcgtgggcctgggcctgatgtacagccagctgccccaccacatcctggccgacgtgagcctgaaggagaccgaggagaacaagaccaagggcttcgactacctgctgaaggccgccgaggccggcgacagacagagcatgatcctggtggccagagccttcgacagcggccagaacctgagccccgacagatgccaggactggctggaggccctgcactggtacaacaccgccctggagatgaccgactgcgacgagggcggcgagtacgacggcatgcaggacgagcccagatacatgatgctggccagagaggccgagatgctgttcaccggcggctacggcctggagaaggacccccagagaagcggcgacctgtacacccaggccgccgaggccgccatggaggccatgaagggcagactggccaaccagtactaccagaaggccgaggaggcctgggcccagatggaggagtag

SEQ ID NO: 80794 - DNA, 1389 bp, synthetic construct
  misc_feature 1..1389: note = Description of Artificial Sequence: Synthetic coding sequence
  source 1..1389: mol_type = other DNA
atgggcaaggagaagacccacatcaacatcgtggtgatcggccacgtggacagcggcaagagcaccaccaccggccacctgatctacaagtgcggcggcatcgacaagagaaccatcgagaagttcgagaaggaggccgccgagatgggcaagggcagcttcaagtacgcctgggtgctggacaagctgaaggccgagagagagagaggcatcaccatcgacatcagcctgtggaagttcgagaccagcaagtactacgtgaccatcatcgacgcccccggccacagagacttcatcaagaacatgatcaccggcaccagccaggccgactgcgccgtgctgatcgtggccgccggcgtgggcgagttcgaggccggcatcagcaagaacggccagaccagagagcacgccctgctggcctacaccctgggcgtgaagcagctgatcgtgggcgtgaacaagatggacagcaccgagcccccctacagccagaagagatacgaggagatcgtgaaggaggtgagcacctacatcaagaagatcggctacaaccccgacaccgtggccttcgtgcccatcagcggctggaacggcgacaacatgctggagcccagcgccaacatgccctggttcaagggctggaaggtgaccagaaaggacggcaacgccagcggcaccaccctgctggaggccctggactgcatcctgccccccaccagacccaccgacaagcccctgagactgcccctgcaggacgtgtacaagatcggcggcatcggcaccgtgcccgtgggcagagtggagaccggcgtgctgaagcccggcatggtggtgaccttcgcccccgtgaacgtgaccaccgaggtgaagagcgtggagatgcaccacgaggccctgagcgaggccctgcccggcgacaacgtgggcttcaacgtgaagaacgtgagcgtgaaggacgtgagaagaggcaacgtggccggcgacagcaagaacgacccccccatggaggccgccggcttcaccgcccaggtgatcatcctgaaccaccccggccagatcagcgccggctacgcccccgtgctggactgccacaccgcccacatcgcctgcaagttcgccgagctgaaggagaagatcgacagaagaagcggcaagaagctggaggacggccccaagttcctgaagagcggcgacgccgccatcgtggacatggtgcccggcaagcccatgtgcgtggagagcttcagcgactacccccccctgggcagattcgccgtgagagacatgagacagaccgtggccgtgggcgtgatcaaggccgtggacaagaaggccgccggcgccggcaaggtgaccaagagcgcccagaaggcccagaaggccaagtag

SEQ ID NO: 80795 - DNA, 1389 bp, synthetic construct; identical to SEQ ID NO: 80794
  misc_feature 1..1389: note = Description of Artificial Sequence: Synthetic coding sequence
  source 1..1389: mol_type = other DNA

SEQ ID NO: 80796 - DNA, 1389 bp, synthetic construct; identical to SEQ ID NO: 80794
  misc_feature 1..1389: note = Description of Artificial Sequence: Synthetic coding sequence
  source 1..1389: mol_type = other DNA

SEQ ID NO: 80797 - DNA, 438 bp, synthetic construct
  misc_feature 1..438: note = Description of Artificial Sequence: Synthetic coding sequence
  source 1..438: mol_type = other DNA
atgggcaaggagaagacccacatcaacatcgtggtgatcggccacgtggacagcggcaagagcaccaccaccggccacctgatctacaagtgcggcggcatcgacaagagaaccatcgagaagttcgagaaggaggccgccgagatgggcaagggcagcttcaagtacgcctgggtgctggacaagctgaaggccgagagagagagaggcatcaccatcgacatcagcctgtggaagttcgagaccagcaagtactacgtgaccatcatcgacgcccccggccacagagacttcatcaagaacatgatcaccggcaccagccaggccgactgcgccgtgctgatcgtggccgccggcgtgggcgagttcgaggccggcatcagcaagaacggccagaccagagagcacgccctgctggcctacaccctgggcgtgtag

SEQ ID NO: 80798 - DNA, 1281 bp, synthetic construct
  misc_feature 1..1281: note = Description of Artificial Sequence: Synthetic coding sequence
  source 1..1281: mol_type = other DNA
atgggcaaggagaagacccacatcaacatcgtggtgatcggccacgtggacagcggcaagagcaccaccaccggccacctgatctacaagtgcggcggcatcgacaagagaaccatcgagaagttcgagaaggaggccgccgagatgggcaagggcagcttcaagtacgcctgggtgctggacaagctgaaggccgagagagagagaggcatcaccatcgacatcagcctgtggaagttcgagaccagcaagtactacgtgaccatcatcgacgcccccggccacagagacttcatcaagaacatgatcaccggcaccagccaggccgactgcgccgtgctgatcgtggccgccggcgtgggcgagttcgaggccggcatcagcaagaacggccagaccagagagcacgccctgctggcctacaccctgggcgtgaagcagctgatcgtgggcgtgaacaagatggacagcaccgagcccccctacagccagaagagatacgaggagatcgtgaaggaggtgagcacctacatcaagaagatcggctacaaccccgacaccgtggccttcgtgcccatcagcggctggaacggcgacaacatgctggagcccagcgccaacatgccctggttcaagggctggaaggtgaccagaaaggacggcaacgccagcggcaccaccctgctggaggccctggactgcatcctgccccccaccagacccaccgacaagcccctgagactgcccctgcaggacgtgtacaagatcggcggcatcggcaccgtgcccgtgcccagcggcgactggtgcagccccggcatggtggtgaccttcgcccccgtgaacgtgaccaccgaggtgaagagcgtggagatgcaccacgaggccctgagcgaggccctgcccggcgacaacgtgggcttcaacgtgaagaacgtgagcgtgaaggacgtgagaagaggcaacgtggccggcgacagcaagaacgacccccccatggaggccgccggcttcaccgcccaggtgatcatcctgaaccaccccggccagatcagcgccggctacgcccccgtgctggactgccacaccgcccacatcgcctgcaagttcgccgagctgaaggagaagatcgacagaagaagcggcaagaagctggaggacggccccaagttcctgaagagcggcgacgccgccatcgtggacatggtgcccggcaagcccatgtgcgtggagagcttcagcgactacccccccctgggcaagagcctgtgctgcagctag

SEQ ID NO: 80799 - DNA, 1326 bp, synthetic construct
  misc_feature 1..1326: note = Description of Artificial Sequence: Synthetic coding sequence
  source 1..1326: mol_type = other DNA
atgggcaaggagaagacccacatcaacatcgtggtgatcggccacgtggacagcggcaagagcaccaccaccggccacctgatctacaagtgcggcggcatcgacaagagaaccatcgagaagttcgagaaggaggccgccgagatgggcaagggcagcttcaagtacgcctgggtgctggacaagctgaaggccgagagagagagaggcatcaccatcgacatcagcctgtggaagttcgagaccagcaagtactacgtgaccatcatcgacgcccccggccacagagacttcatcaagaacatgatcaccggcaccagccaggccgactgcgccgtgctgatcgtggccgccggcgtgggcgagttcgaggccggcatcagcaagaacggccagaccagagagcacgccctgctggcctacagccagaagagatacgaggagatcgtgaaggaggtgagcacctacatcaagaagatcggctacaaccccgacaccgtggccttcgtgcccatcagcggctggaacggcgacaacatgctggagcccagcgccaacatgccctggttcaagggctggaaggtgaccagaaaggacggcaacgccagcggcaccaccctgctggaggccctggactgcatcctgccccccaccagacccaccgacaagcccctgagactgcccctgcaggacgtgtacaagatcggcggcatcggcaccgtgcccgtgggcagagtggagaccggcgtgctgaagcccggcatggtggtgaccttcgcccccgtgaacgtgaccaccgaggtgaagagcgtggagatgcaccacgaggccctgagcgaggccctgcccggcgacaacgtgggcttcaacgtgaagaacgtgagcgtgaaggacgtgagaagaggcaacgtggccggcgacagcaagaacgacccccccatggaggccgccggcttcaccgcccaggtgatcatcctgaaccaccccggccagatcagcgccggctacgcccccgtgctggactgccacaccgcccacatcgcctgcaagttcgccgagctgaaggagaagatcgacagaagaagcggcaagaagctggaggacggccccaagttcctgaagagcggcgacgccgccatcgtggacatggtgcccggcaagcccatgtgcgtggagagcttcagcgactacccccccctgggcagattcgccgtgagagacatgagacagaccgtggccgtgggcgtgatcaaggccgtggacaagaaggccgccggcgccggcaaggtgaccaagagcgcccagaaggcccagaaggccaagtag

SEQ ID NO: 80800 - DNA, 324 bp, synthetic construct
  misc_feature 1..324: note = Description of Artificial Sequence: Synthetic coding sequence
  source 1..324: mol_type = other DNA
atgggcaaggagaagacccacatcaacatcgtggtgatcggccacgtggacagcggcaagagcaccaccaccggccacctgatctacaagtgcggcggcatcgacaagagaaccatcgagaagttcgagaaggaggccgccgagatgggcaagggcagcttcaagtacgcctgggtgctggacaagctgaaggccgagagagagagaggcatcaccatcgacatcagcctgtggaagttcgagaccagcaagtactacgtgaccatcatcgacgcccccggccacagagacttcatcaagaacatgatcaccggcaccagctag

SEQ ID NO: 80801 - DNA, 336 bp, synthetic construct
  misc_feature 1..336: note = Description of Artificial Sequence: Synthetic coding sequence
  source 1..336: mol_type = other DNA
atgggcaaggagaagacccacatcaacatcgtggtgatcggccacgtggacagcggcaagagcaccaccaccggccacctgatctacaagtgcggcggcatcgacaagagaaccatcgagaagttcgagaaggaggccgccgagatgggcaagggcagcttcaagtacgcctgggtgctggacaagctgaaggccgagagagagagaggcatcaccatcgacatcagcctgtggaagttcgagaccaccaagcagtggaccagaagactgctggagctggccagaagccccagcctgcccagaaagctgagaagactgaacgagtactacccctag

SEQ ID NO: 80802 - DNA, 1626 bp, synthetic construct
  misc_feature 1..1626: note = Description of Artificial Sequence: Synthetic coding sequence
  source 1..1626: mol_type = other DNA
atggtgatcaacctgtgcctgccccagttcagacccagaatccactgcaacaagatcagcgccgacggctacgaggtggagaacctgatcagcgaggacctgaccaagagaagccacggcttcagaaccgagtacttcatcaagccccccgtgtacgtgaccgtgagcttccccttcaacgtggagatctgcagaatcaacatcgacctgaccgccggcggcggccagaacgtgaccggcctggagatgtacaccagcgccagcagcagcagagtgagctggaacaccccccagtgcagaaccctgggccccgccgagcccagcgtgcccgacaaggaggccttcaccctggtgggcaaggtgctgctgaagaaccagagccaggtggtgttcagccacagaggcttcaaggccagaccccccttcggcgccatggaggccaccctgcccagccccgccgtggtggcccaggagctgtggaacaagggcgccctgagcctgagccacgtggcccacctgagaatctgcatcacccacgtgaccggcggcggcatcccctgcatcaagagactggaggtgtggggccagcccgccaagacctgcagccaggaggtgatcgacagcatcctgctggtgaccagcgagaacctgccccaggacgtggccctgcaggcccccgccctgcccatggagagcgactgcgaccccggcgaccagcccgagagccagcaggcccccagcagcctgcagaagctggccgagatcatccaggacgtgcccgaggagttcctggaccccatcaccctggagatcatgccctgccccatgctgctgcccagcggcaaggtgatcgaccagagcaccctggagaagtgcaacagaagcgaggccacctggggcagagtgcccagcgaccccttcaccggcgtggccttcaccccccacagccagcccctgccccaccccagcctgaaggccagaatcgaccacttcctgctgcagcacagcatccccggctgccacctgctgggcagagcccagaccgccctggccgtgatccccagcagcatcgtgctgcccagccagaagagaaagatcgagcaggccgagcacgtgcccgacagcaacttcggcgtgaacgccagctgcttcagcgccaccagccccctggtgctgcccaccaccagcgagcacaccgccaagaagatgaaggccaccaacgagcccagcctgacccacatggactgcagcaccggccccctgagccacgagcagaagctgagccagagcctggagatcgccctggccagcaccctgggcagcatgcccagcttcaccgccagactgaccagaggccagctgcagcacctgggcaccagaggcagcaacaccagctggagacccggcaccggcagcgagcagcccggcagcatcctgggccccgagtgcgccagctgcaagagagtgttcagcccctacttcaagaaggagcccgtgtaccagctgccctgcggccacctgctgtgcagaccctgcctgggcgagaagcagagaagcctgcccatgacctgcaccgcctgccagagacccgtggccagccaggacgtgctgagagtgcacttctag

SEQ ID NO: 80803 - DNA, 1392 bp, synthetic construct
  misc_feature 1..1392: note = Description of Artificial Sequence: Synthetic coding sequence
  source 1..1392: mol_type = other DNA
atgggcaaggagaagacccacatcaacatcgtggtgatcggccacgtggacagcggcaagagcaccaccaccggccacctgatctacaagtgcggcggcatcgacaagagaaccatcgagaagttcgagaaggaggccgccgagatgggcaagggcagcttcaagtacgcctgggtgctggacaagctgaaggccgagagagagagaggcatcaccatcgacatcagcctgtggaagttcgagaccaccaagtactacatcaccatcatcgacgcccccggccacagagacttcatcaagaacatgatcaccggcaccagccaggccgactgcgccgtgctgatcgtggccgccggcgtgggcgagttcgaggccggcatcagcaagaacggccagaccagagagcacgccctgctggcctacaccctgggcgtgaagcagctgatcgtgggcgtgaacaagatggacagcaccgagcccgcctacagcgagaagagatacgacgagatcgtgaaggaggtgagcgcctacatcaagaagatcggctacaaccccgccaccgtgcccttcgtgcccatcagcggctggcacggcgacaacatgctggagcccagccccaacatgccctggttcaagggctggaaggtggagagaaaggagggcaacgccagcggcgtgagcctgctggaggccctggacaccatcctgccccccaccagacccaccgacaagcccctgagactgcccctgcaggacgtgtacaagatcggcggcatcggcaccgtgcccgtgggcagagtggagaccggcatcctgagacccggcatggtggtgaccttcgcccccgtgaacatcaccaccgaggtgaagagcgtggagatgcaccacgaggccctgagcgaggccctgcccggcgacaacgtgggcttcaacgtgaagaacgtgagcgtgaaggacatcagaagaggcaacgtgtgcggcgacagcaagagcgaccccccccaggaggccgcccagttcaccagccaggtgatcatcctgaaccaccccggccagatcagcgccggctacagccccgtgatcgactgccacaccgcccacatcgcctgcaagttcgccgagctgaaggagaagatcgacagaagaagcggcaagaagctggaggacaaccccaagagcctgaagagcggcgacgccgccatcgtggagatggtgcccggcaagcccatgtgcgtggagagcttcagccagtacccccccctgggcagattcgccgtgagagacatgagacagaccgtggccgtgggcgtgatcaagaacgtggagaagaagagcggcggcgccggcaaggtgaccaagagcgcccagaaggcccagaaggccggcaagtag

SEQ ID NO: 80804 - DNA, 678 bp, synthetic construct
  misc_feature 1..678: note = Description of Artificial Sequence: Synthetic coding sequence
  source 1..678: mol_type = other DNA
atgggcttcggcgacctgaagagccccgccggcctgcaggtgctgaacgactacctggccgacaagagctacatcgagggctacgtgcccagccaggccgacgtggccgtgttcgaggccgtgagcagccccccccccgccgacctgtgccacgccctgagatggtacaaccacatcaagagctacgagaaggagaaggccagcctgcccggcgtgaagaaggccctgggcaagtacggccccgccgacgtggaggacaccaccggcagcggcgccaccgacagcaaggacgacgacgacatcgacctgttcggcagcgacgacgaggaggagagcgaggaggccaagagactgagagaggagagactggcccagtacgagagcaagaaggccaagaagcccgccctggtggccaagagcagcatcctgctggacgtgaagccctgggacgacgagaccgacatggccaagctggaggagtgcgtgagaagcatccaggccgacggcctggtgtggggcagcagcaagctggtgcccgtgggctacggcatcaagaagctgcagatccagtgcgtggtggaggacgacaaggtgggcaccgacatgctggaggagcagatcaccgccttcgaggactacgtgcagagcatggacgtggccgccttcaacaagatctag

SEQ ID NO: 80805 - DNA, 678 bp, synthetic construct; identical to SEQ ID NO: 80804
  misc_feature 1..678: note = Description of Artificial Sequence: Synthetic coding sequence
  source 1..678: mol_type = other DNA

SEQ ID NO: 80806 - DNA, 678 bp, synthetic construct; identical to SEQ ID NO: 80804
  misc_feature 1..678: note = Description of Artificial Sequence: Synthetic coding sequence
  source 1..678: mol_type = other DNA

SEQ ID NO: 80807 - DNA, 372 bp, synthetic construct
  misc_feature 1..372: note = Description of Artificial Sequence: Synthetic coding sequence
  source 1..372: mol_type = other DNA
atgggcttcggcgacctgaagagccccgccggcctgcaggtgctgaacgactacctggccgacaagagctacatcgagggctacgtgcccagccaggccgacgtggccgtgttcgaggccgtgagcagccccccccccgccgacctgtgccacgccctgagatggtacaaccacatcaagagctacgagaaggagaaggccagcctgcccggcgtgaagaaggccctgggcaagtacggccccgccgacgtggaggacaccaccggcagcggcgccaccgacagcaaggacgacgacgacatcgacctgttcggcagcgacgacgaggaggagagcgaggaggccaagagactgagagaggagagactgtag

SEQ ID NO: 80808 - DNA, 846 bp, synthetic construct
  misc_feature 1..846: note = Description of Artificial Sequence: Synthetic coding sequence
  source 1..846: mol_type = other DNA
atggccaccaacttcctggcccacgagaagatctggttcgacaagttcaagtacgacgacgccgagagaagattctacgagcagatgaacggccccgtggccggcgccagcagacaggagaacggcgccagcgtgatcctgagagacatcgccagagccagagagaacatccagaagagcctggccggcagcagcggccccggcgccagcagcggcaccagcggcgaccacggcgagctggtggtgagaatcgccagcctggaggtggagaaccagagcctgagaggcgtggtgcaggagctgcagcaggccatcagcaagctggaggccagactgaacgtgctggagaagagcagccccggccacagagccaccgccccccagacccagcacgtgagccccatgagacaggtggagccccccgccaagaagcccgccacccccgccgaggacgacgaggacgacgacatcgacctgttcggcagcgacaacgaggaggaggacaaggaggccgcccagctgagagaggagagactgagacagtacgccgagaagaaggccaagaagcccgccctggtggccaagagcagcatcctgctggacgtgaagccctgggacgacgagaccgacatggcccagctggaggcctgcgtgagaagcatccagctggacggcctggtgtggggcgccagcaagctggtgcccgtgggctacggcatcagaaagctgcagatccagtgcgtggtggaggacgacaaggtgggcaccgacctgctggaggaggagatcaccaagttcgaggagcacgtgcagagcgtggacatcgccgccttcaacaagatctag

SEQ ID NO: 80809 - DNA, 1896 bp, synthetic construct
  misc_feature 1..1896: note = Description of Artificial Sequence: Synthetic coding sequence
  source 1..1896: mol_type = other DNA
atgagaagcggcaaggccagctgcaccctggagaccgtgtgggaggacaagcacaagtacgaggaggccgagagaagattctacgagcacgaggccacccaggccgccgccagcgcccagcagctgcccgccgagggccccgccatgaacggccccggccaggacgaccccgaggacgccgacgaggccgaggcccccgacggcggcagcagaagagaccccagaaagagccaggacagcagaaagcccctgcagaagaagagaaagagaagccccaagagcggcctgggccccgccgacctggccctgctgggcctgagcgccgagagagtgtggctggacaagagcctgttcgaccaggccgagagcagctacagacagaagctggccgacgtggccgcccaggccgcctggccccccgccctggccccctggggcctgtgcacccacggcaaccaggtggcctgccaccacgtgacctggggcatctgggtgaacaagagcagcttcgaccaggccgagagagccttcgtggagtggagccaggccctgctgctggcccccgacggcagcagaagacagggcacccccaacaccggccagcaggtggccgtgcccgacctggcccaccagcccagcccccccgtgaacggccagccccccctgggcagcctgcaggccctggtgagagaggtgtggctggagaagcccagatacgacgccgccgagagaggcttctacgaggccctgttcgacggccacccccccggcaaggtgagactgcaggagagagccggcctggccgagggcgccagaagaggcagaagagacagaagaggcagaaacatcctgggcaacaagagagccggcctgagaagagccgacggcgaggcccccagcgccctgccctactgctacttcctgcagaaggacgccgaggccccctggctgagcaagcccgcctacgacagcgccgagtgcagacaccacgccgccgaggccctgagagtggcctggtgcctggaggccgccagcctgagccacagacccggccccagaagcggcctgagcgtgagcagcctgagacccaacagaaagatggccaccaacttcctggcccacgagaagatctggttcgacaagttcaagtacgacgacgccgagagaagattctacgagcagatgaacggccccgtggccggcgccagcagacaggagaacggcgccagcgtgatcctgagagacatcgccagagccagagagaacatccagaagagcctggccggcagcagcggccccggcgccagcagcggcaccagcggcgaccacggcgagctggtggtgagaatcgccagcctggaggtggagaaccagagcctgagaggcgtggtgcaggagctgcagcaggccatcagcaagctggaggccagactgaacgtgctggagaagagcagccccggccacagagccaccgccccccagacccagcacgtgagccccatgagacaggtggagccccccgccaagaagcccgccacccccgccgaggacgacgaggacgacgacatcgacctgttcggcagcgacaacgaggaggaggacaaggaggccgcccagctgagagaggagagactgagacagtacgccgagaagaaggccaagaagcccgccctggtggccaagagcagcatcctgctggacgtgaagccctgggacgacgagaccgacatggcccagctggaggcctgcgtgagaagcatccagctggacggcctggtgtggggcgccagcaagctggtgcccgtgggctacggcatcagaaagctgcagatccagtgcgtgggcggcagacagggcggcgacagactggccggcggcggcgaccaccaggtgtag

SEQ ID NO: 80810 - DNA, 1728 bp, synthetic construct
  misc_feature 1..1728: note = Description of Artificial Sequence: Synthetic coding sequence
  source 1..1728: mol_type = other DNA
atgaacggccccggccaggacgaccccgaggacgccgacgaggccgaggcccccgacggcggcagcagaagagaccccagaaagagccaggacagcagaaagcccctgcagaagaagagaaagagaagccccaagagcggcctgggccccgccgacctggccctgctgggcctgagcgccgagagagtgtggctggacaagagcctgttcgaccaggccgagagcagctacagacagaagctggccgacgtggccgcccaggccgcctggccccccgccctggccccctggggcctgtgcacccacggcaaccaggtggcctgccaccacgtgacctggggcatctgggtgaacaagagcagcttcgaccaggccgagagagccttcgtggagtggagccaggccctgctgctggcccccgacggcagcagaagacagggcacccccaacaccggccagcaggtggccgtgcccgacctggcccaccagcccagcccccccgtgaacggccagccccccctgggcagcctgcaggccctggtgagagaggtgtggctggagaagcccagatacgacgccgccgagagaggcttctacgaggccctgttcgacggccacccccccggcaaggtgagactgcaggagagagccggcctggccgagggcgccagaagaggcagaagagacagaagaggcagaaacatcctgggcaacaagagagccggcctgagaagagccgacggcgaggcccccagcgccctgccctactgctacttcctgcagaaggacgccgaggccccctggctgagcaagcccgcctacgacagcgccgagtgcagacaccacgccgccgaggccctgagagtggcctggtgcctggaggccgccagcctgagccacagacccggccccagaagcggcctgagcgtgagcagcctgagacccaacagaaagatggccaccaacttcctggcccacgagaagatctggttcgacaagttcaagtacgacgacgccgagagaagattctacgagcagatgaacggccccgtggccggcgccagcagacagagcagcggccccggcgccagcagcggcaccagcggcgaccacggcgagctggtggtgagaatcgccagcctggaggtggagaaccagagcctgagaggcgtggtgcaggagctgcagcaggccatcagcaagctggaggccagactgaacgtgctggagaagagcagccccggccacagagccaccgccccccagacccagcacgtgagccccatgagacaggtggagccccccgccaagaagcccgccacccccgccgaggacgacgaggacgacgacatcgacctgttcggcagcgacaacgaggaggaggacaaggaggccgcccagctgagagaggagagactgagacagtacgccgagaagaaggccaagaagcccgccctggtggccaagagcagcatcctgctggacgtgaagccctgggacgacgagaccgacatggcccagctggaggcctgcgtgagaagcatccagctggacggcctggtgtggggcgccagcaagctggtgcccgtgggctacggcatcagaaagctgcagatccagtgcgtggtggaggacgacaaggtgggcaccgacctgctggaggaggagatcaccaagttcgaggagcacgtgcagagcgtggacatcgccgccttcaacaagatctag

SEQ ID NO: 80811 - DNA, 846 bp, synthetic construct; identical to SEQ ID NO: 80808
  misc_feature 1..846: note = Description of Artificial Sequence: Synthetic coding sequence
  source 1..846: mol_type = other DNA

SEQ ID NO: 80812 - DNA, 846 bp, synthetic construct; identical to SEQ ID NO: 80808
  misc_feature 1..846: note = Description of Artificial Sequence: Synthetic coding sequence
  source 1..846: mol_type = other DNA

SEQ ID NO: 80813 - DNA, 1944 bp, synthetic construct
  misc_feature 1..1944: note = Description of Artificial Sequence: Synthetic coding sequence
  source 1..1944: mol_type = other DNA
atgagaagcggcaaggccagctgcaccctggagaccgtgtgggaggacaagcacaagtacgaggaggccgagagaagattctacgagcacgaggccacccaggccgccgccagcgcccagcagctgcccgccgagggccccgccatgaacggccccggccaggacgaccccgaggacgccgacgaggccgaggcccccgacggcggcagcagaagagaccccagaaagagccaggacagcagaaagcccctgcagaagaagagaaagagaagccccaagagcggcctgggccccgccgacctggccctgctgggcctgagcgccgagagagtgtggctggacaagagcctgttcgaccaggccgagagcagctacagacagaagctggccgacgtggccgcccaggccgcctggccccccgccctggccccctggggcctgtgcacccacggcaaccaggtggcctgccaccacgtgacctggggcatctgggtgaacaagagcagcttcgaccaggccgagagagccttcgtggagtggagccaggccctgctgctggcccccgacggcagcagaagacagggcacccccaacaccggccagcaggtggccgtgcccgacctggcccaccagcccagcccccccgtgaacggccagccccccctgggcagcctgcaggccctggtgagagaggtgtggctggagaagcccagatacgacgccgccgagagaggcttctacgaggccctgttcgacggccacccccccggcaaggtgagactgcaggagagagccggcctggccgagggcgccagaagaggcagaagagacagaagaggcagaaacatcctgggcaacaagagagccggcctgagaagagccgacggcgaggcccccagcgccctgccctactgctacttcctgcagaaggacgccgaggccccctggctgagcaagcccgcctacgacagcgccgagtgcagacaccacgccgccgaggccctgagagtggcctggtgcctggaggccgccagcctgagccacagacccggccccagaagcggcctgagcgtgagcagcctgagacccaacagaaagatggccaccaacttcctggcccacgagaagatctggttcgacaagttcaagtacgacgacgccgagagaagattctacgagcagatgaacggccccgtggccggcgccagcagacaggagaacggcgccagcgtgatcctgagagacatcgccagagccagagagaacatccagaagagcctggccggcagcagcggccccggcgccagcagcggcaccagcggcgaccacggcgagctggtggtgagaatcgccagcctggaggtggagaaccagagcctgagaggcgtggtgcaggagctgcagcaggccatcagcaagctggaggccagactgaacgtgctggagaagagcagccccggccacagagccaccgccccccagacccagcacgtgagccccatgagacaggtggagccccccgccaagaagcccgccacccccgccgaggacgacgaggacgacgacatcgacctgttcggcagcgacaacgaggaggaggacaaggaggccgcccagctgagagaggagagactgagacagtacgccgagaagaaggccaagaagcccgccctggtggccaagagcagcatcctgctggacgtgaagccctgggacgacgagaccgacatggcccagctggaggcctgcgtgagaagcatccagctggacggcctggtgtggggcgccagcaagctggtgcccgtgggctacggcatcagaaagctgcagatccagtgcgtggtggaggacgacaaggtgggcaccgacctgctggaggaggagatcaccaagttcgaggagcacgtgcagagcgtggacatcgccgccttcaacaagatctag

SEQ ID NO: 80814 - DNA, 1944 bp, synthetic construct; identical to SEQ ID NO: 80813
  misc_feature 1..1944: note = Description of Artificial Sequence: Synthetic coding sequence
  source 1..1944: mol_type = other DNA

SEQ ID NO: 80815 - DNA, 774 bp, synthetic construct
  misc_feature 1..774: note = Description of Artificial Sequence: Synthetic coding sequence
  source 1..774: mol_type = other DNA
atggccaccaacttcctggcccacgagaagatctggttcgacaagttcaagtacgacgacgccgagagaagattctacgagcagatgaacggccccgtggccggcgccagcagacagagcagcggccccggcgccagcagcggcaccagcggcgaccacggcgagctggtggtgagaatcgccagcctggaggtggagaaccagagcctgagaggcgtggtgcaggagctgcagcaggccatcagcaagctggaggccagactgaacgtgctggagaagagcagccccggccacagagccaccgccccccagacccagcacgtgagccccatgagacaggtggagccccccgccaagaagcccgccacccccgccgaggacgacgaggacgacgacatcgacctgttcggcagcgacaacgaggaggaggacaaggaggccgcccagctgagagaggagagactgagacagtacgccgagaagaaggccaagaagcccgccctggtggccaagagcagcatcctgctggacgtgaagccctgggacgacgagaccgacatggcccagctggaggcctgcgtgagaagcatccagctggacggcctggtgtggggcgccagcaagctggtgcccgtgggctacggcatcagaaagctgcagatccagtgcgtggtggaggacgacaaggtgggcaccgacctgctggaggaggagatcaccaagttcgaggagcacgtgcagagcgtggacatcgccgccttcaacaagatctag

SEQ ID NO: 80816 - DNA, 546 bp, synthetic construct
  misc_feature 1..546: note = Description of Artificial Sequence: Synthetic coding sequence
  source 1..546: mol_type = other DNA
atgagaagcggcaaggccagctgcaccctggagaccgtgtgggaggacaagcacaagtacgaggaggccgagagaagattctacgagcacgaggccacccaggccgccgccagcgcccagcagctgcccgccgagggccccgccatgaacggccccggccaggacgaccccgaggacgccgacgaggccgaggcccccgacggcggcagcagaagagaccccagaaagagccaggacagcagaaagcccctgcagaagaagagaaagagaagccccaagagcggcctgggccccgccgacctggccctgctgggcctgagcgccgagagagtgtggctggacaagagcctgttcgaccaggccgagagcagctacagacagaagctggccgacgtggccgcccaggccgcctggccccccgccctggccccctggggcctgtgcacccacggcaaccaggtggcctgccaccacgtgacctggggcatctgggtgaacaagagcagcttcgaccaggccgagagagccttcgtggagtggagctag

SEQ ID NO: 80817 - DNA, 192 bp, synthetic construct
  misc_feature 1..192: note = Description of Artificial Sequence: Synthetic coding sequence
  source 1..192: mol_type = other DNA
atgagaagcggcaaggccagctgcaccctggagaccgtgtgggaggacaagcacaagtacgaggaggccgagagaagattctacgagcacgaggccacccaggccgccgccagcgcccagcagctgcccgccgagggccccgccatgaacggccccggccaggacgaccccgaggacgccgacgaggcctag

SEQ ID NO: 80818 - DNA, 120 bp, synthetic construct
  misc_feature 1..120: note = Description of Artificial Sequence: Synthetic coding sequence
  source 1..120: mol_type = other DNA
atggccaccaacttcctggcccacgagaagatctggttcgacaagttcaagtacgacgacgccgagagaagattctacgagcagatgaacggccccgtggccggcgccagcagacagtag

SEQ ID NO: 80819 - DNA, 246 bp, synthetic construct
  misc_feature 1..246: note = Description of Artificial Sequence: Synthetic coding sequence
  source 1..246: mol_type = other DNA
atgagaagcggcaaggccagctgcaccctggagaccgtgtgggaggacaagcacaagtacgaggaggccgagagaagattctacgagcacgaggccacccaggccgccgccagcgcccagcagctgcccgccgagggccccgccatgaacggccccggccaggacgaccccgaggacgccgacgaggccgaggcccccgacggcggcagcagaagagaccccagaaagagccaggacagcagatag

SEQ ID NO: 80820 - DNA, 114 bp, synthetic construct
  misc_feature 1..114: note = Description of Artificial Sequence: Synthetic coding sequence
  source 1..114: mol_type = other DNA
atgagaagcggcaaggccagctgcaccctggagaccgtgtgggaggacaagcacaagtacgaggaggccgagagaagattctacgagcacgaggccacccaggccgccgcctag

SEQ ID NO: 80821 - DNA, 162 bp, synthetic construct
  misc_feature 1..162: note = Description of Artificial Sequence: Synthetic coding sequence
  source 1..162: mol_type = other DNA
atgagaagcggcaaggccagctgcaccctggagaccgtgtgggaggacaagcacaagtacgaggaggccgagagaagattctacgagcacgaggccacccaggccgccgccagcgcccagcagctgcccgccgagggccccgccatgaacggccccggctag

SEQ ID NO: 80822 - DNA, 192 bp, synthetic construct
  misc_feature 1..192: note = Description of Artificial Sequence: Synthetic coding sequence
  source 1..192: mol_type = other DNA
atggccaccaacttcctggcccacgagaagatctggttcgacaagttcaagtacgacgacgccgagagaagattctacgagcagatgaacggccccgtggccggcgccagcagacaggagaacggcgccagcgtgatcctgagagacatcgccagagccagagagaacatccagaagagcctggccggctag

SEQ ID NO: 80823 - DNA, 903 bp, synthetic construct
  misc_feature 1..903: note = Description of Artificial Sequence: Synthetic coding sequence
  source 1..903: mol_type = other DNA
atgagaagcggcaaggccagctgcaccctggagaccgtgtgggaggacaagcacaagtacgaggaggccgagagaagattctacgagcacgaggccacccaggccgccgccagcgcccagcagctgcccgccgagggccccgccatgaacggccccggccaggacgaccccgaggacgccgacgaggccgaggcccccgacggcggcagcagaagagaccccagaaagagccaggacagcagaaagcccctgcagaagaagagaaagagaagccccaagagcggcctgggccccgccgacctggccctgctgggcctgagcgccgagagagtgtggctggacaagagcctgttcgaccaggccgagagcagctacagacagaagctggccgacgtggccgcccaggccgcctggccccccgccctggccccctggggcctgtgcacccacggcaaccaggtggcctgccaccacgtgacctggggcatctgggtgaacaagagcagcttcgaccaggccgagagagccttcgtggagtggagccaggccctgctgctggcccccgacggcagcagaagacagggcacccccaacaccggccagcaggtggccgtgcccgacctggcccaccagcccagcccccccgtgaacggccagccccccctgggcagcctgcaggccctggtgagagaggtgtggctggagaagcccagatacgacgccgccgagagaggcttctacgaggccctgttcgacggccacccccccggcaaggtgagactgcaggagagagccggcctggccgagggcgccagaagaggcagaagagacagaagaggcagaaacatcctgggcaacaagagagccggcctgagaagagccgacggcgaggcccccagctag

SEQ ID NO: 80824 - DNA, 66 bp, synthetic construct
  misc_feature 1..66: note = Description of Artificial Sequence: Synthetic coding sequence
  source 1..66: mol_type = other DNA
atgagaagcggcaaggccagctgcaccctggagaccgtgtgggaggacaagcacaagtacgagtag

SEQ ID NO: 80825 - DNA, 474 bp, synthetic construct
  misc_feature 1..474: note = Description of Artificial Sequence: Synthetic coding sequence
  source 1..474: mol_type = other DNA
atgagaagcggcaaggccagctgcaccctggagaccgtgtgggaggacaagcacaagtacgaggaggccgagagaagattctacgagcacgaggccacccaggccgccgccagcgcccagcagctgcccgccgagggccccgccatgaacggccccggccaggacgaccccgaggacgccgacgaggccgaggcccccgacggcggcagcagaagagaccccagaaagagccaggacagcagaaagcccctgcagaagaagagaaagagaagccccaagagcggcctgggccccgccgacctggccctgctgggcctgagcgccgagagagtgtggctggacaagagcctgttcgaccaggccgagagcagctacagacagaagctggccgacgtggccgcccaggccgcctggccccccgccctggccccctggggcctgtgcacccacggcaaccaggtggcctgccactag

SEQ ID NO: 80826 - DNA, 774 bp, synthetic construct; identical to SEQ ID NO: 80815
  misc_feature 1..774: note = Description of Artificial Sequence: Synthetic coding sequence
  source 1..774: mol_type = other DNA

SEQ ID NO: 80827 - DNA, 846 bp, synthetic construct; identical to SEQ ID NO: 80808
  misc_feature 1..846: note = Description of Artificial Sequence: Synthetic coding sequence
  source 1..846: mol_type = other DNA

SEQ ID NO: 80828 - DNA, 441 bp, synthetic construct
  misc_feature 1..441: note = Description of Artificial Sequence: Synthetic coding sequence
  source 1..441: mol_type = other DNA
atgagaagcggcaaggccagctgcaccctggagaccgtgtgggaggacaagcacaagtacgaggaggccgagagaagattctacgagcacgaggccacccaggccgccgccagcgcccagcagctgcccgccgagggccccgccatgaacggccccggccaggacgaccccgaggacgccgacgaggccgaggcccccgacggcggcagcagaagagaccccagaaagagccaggacagcagaaagcccctgcagaagaagagaaagagaagccccaagagcggcctgggccccgccgacctggccctgctgggcctgagcgccgagagagtgtggctggacaagagcctgttcgaccaggccgagagcagctacagacagaagctggccgacgtggccgcccaggccgcctggccccccgccctggccccctggggctag

SEQ ID NO: 80829 - DNA, 615 bp, synthetic construct
  misc_feature 1..615: note = Description of Artificial Sequence: Synthetic coding sequence
  source 1..615: mol_type = other DNA
atggccaccaacttcctggcccacgagaagatctggttcgacaagttcaagtacgacgacgccgagagaagattctacgagcagatgaacggccccgtggccggcgccagcagacaggagaacggcgccagcgtgatcctgagagacatcgccagagccagagagaacatccagaagagcctggccggcagcagcggccccggcgccagcagcggcaccagcggcgaccacggcgagctggtggtgagaatcgccagcctggaggtggagaaccagagcctgagaggcgtggtgcaggagctgcagcaggccatcagcaagctggaggccagactgaacgtgctggagaagagcagccccggccacagagccaccgccccccagacccagcacgtgagccccatgagacaggtggagccccccgccaagaagcccgccacccccgccgaggacgacgaggacgacgacatcgacctgttcggcagcgacaacgaggaggaggacaaggaggccgcccagctgagagaggagagactgagacagtacgccgagaagaaggccaagaagcccgccctggtggccaagagcagcatcctgctggacgtgaagccctag

SEQ ID NO: 80830 - DNA, 390 bp, synthetic construct
  misc_feature 1..390: note = Description of Artificial Sequence: Synthetic coding sequence
  source 1..390: mol_type = other DNA
atgagaagcggcaaggccagctgcaccctggagaccgtgtgggaggacaagcacaagtacgaggaggccgagagaagattctacgagcacgaggccacccaggccgccgccagcgcccagcagctgcccgccgagggccccgccatgaacggccccggccaggacgaccccgaggacgccgacgaggccgaggcccccgacggcggcagcagaagagaccccagaaagagccaggacagcagaaagcccctgcagaagaagagaaagagaagccccaagagcggcctgggccccgccgacctggccctgctgggcctgagcgccgagagagtgtggctggacaagagcctgttcgaccaggccgagagcagctacagacagaagctgtag

SEQ ID NO: 80831 - DNA, 501 bp, synthetic construct
  misc_feature 1..501: note = Description of Artificial Sequence: Synthetic coding sequence
  source 1..501: mol_type = other DNA
atggccaccaacttcctggcccacgagaagatctggttcgacaagttcaagtacgacgacgccgagagaagattctacgagcagatgaacggccccgtggccggcgccagcagacaggagaacggcgccagcgtgatcctgagagacatcgccagagccagagagaacatccagaagagcctggccggcagcagcggccccggcgccagcagcggcaccagcggcgaccacggcgagctggtggtgagaatcgccagcctggaggtggagaaccagagcctgagaggcgtggtgcaggagctgcagcaggccatcagcaagctggaggccagactgaacgtgctggagaagagcagccccggccacagagccaccgccccccagacccagcacgtgagccccatgagacaggtggagccccccgccaagaagcccgccacccccgccgaggacgacgaggacgacgacatcgacctgttcggcagcgacaacgaggagtag

SEQ ID NO: 80832 - DNA, 255 bp, synthetic construct
  misc_feature 1..255: note = Description of Artificial Sequence: Synthetic coding sequence
  source 1..255: mol_type = other DNA
atgagaagcggcaaggccagctgcaccctggagaccgtgtgggaggacaagcacaagtacgaggaggccgagagaagattctacgagcacgaggccacccaggccgccgccagcgcccagcagctgcccgccgagggccccgccatgaacggccccggccaggacgaccccgaggacgccgacgaggccgaggcccccgacggcggcagcagaagagaccccagaaagagccaggacagcagaaagcccctgtag

SEQ ID NO: 80833 - DNA, 600 bp, synthetic construct
  misc_feature 1..600: note = Description of Artificial Sequence: Synthetic coding sequence
  source 1..600: mol_type = other DNA
atggccaccaacttcctggcccacgagaagatctggttcgacaagttcaagtacgacgacgccgagagaagattctacgagcagatgaacggccccgtggccggcgccagcagacaggagaacggcgccagcgtgatcctgagagacatcgccagagccagagagaacatccagaagagcctggccggcagcagcggccccggcgccagcagcggcaccagcggcgaccacggcgagctggtggtgagaatcgccagcctggaggtggagaaccagagcctgagaggcgtggtgcaggagctgcagcaggccatcagcaagctggaggccagactgaacgtgctggagaagagcagccccggccacagagccaccgccccccagacccagcacgtgagccccatgagacaggtggagccccccgccaagaagcccgccacccccgccgaggacgacgaggacgacgacatcgacctgttcggcagcgacaacgaggaggaggacaaggaggccgcccagctgagagaggagagactgagacagtacgccgagaagaaggccaagaagcccgccctggtggccaagagcagcatcctgtag

SEQ ID NO: 80834 - DNA, 774 bp, synthetic construct
  misc_feature 1..774: note = Description of Artificial Sequence: Synthetic coding sequence
  source 1..774: mol_type = other DNA
atgagaagcggcaaggccagctgcaccctggagaccgtgtgggaggacaagcacaagtacgaggaggccgagagaagattctacgagcacgaggccacccaggccgccgccagcgcccagcagctgcccgccgagggccccgccatgaacggccccggccaggacgaccccgaggacgccgacgaggccgaggcccccgacggcggcagcagaagagaccccagaaagagccaggacagcagaaagcccctgcagaagaagagaaagagaagccccaagagcggcctgggccccgccgacctggccctgctgggcctgagcgccgagagagtgtggctggacaagagcctgttcgaccaggccgagagcagctacagacagaagctggccgacgtggccgcccaggccgcctggccccccgccctggccccctggggcctgtgcacccacggcaaccaggtggcctgccaccacgtgacctggggcatctgggtgaacaagagcagcttcgaccaggccgagagagccttcgtggagtggagccaggccctgctgctggcccccgacggcagcagaagacagggcacccccaacaccggccagcaggtggccgtgcccgacctggcccaccagcccagcccccccgtgaacggccagccccccctgggcagcctgcaggccctggtgagagaggtgtggctggagaagcccagatacgacgccgccgagagaggcttctacgaggccctgttcgacggccacccccccggctag

SEQ ID NO: 80835 - DNA, 540 bp, synthetic construct
  misc_feature 1..540: note = Description of Artificial Sequence: Synthetic coding sequence
  source 1..540: mol_type = other DNA
atgagaagcggcaaggccagctgcaccctggagaccgtgtgggaggacaagcacaagtacgaggaggccgagagaagattctacgagcacgaggccacccaggccgccgccagcgcccagcagctgcccgccgagggccccgccatgaacggccccggccaggacgaccccgaggacgccgacgaggccgaggcccccgacggcggcagcagaagagaccccagaaagagccaggacagcagaaagcccctgcagaagaagagaaagagaagccccaagagcggcctgggccccgccgacctggccctgctgggcctgagcgccgagagagtgtggctggacaagagcctgttcgaccaggccgagagcagctacagacagaagctggccgacgtggccgcccaggccgcctggccccccgccctggccccctggggcctgtgcacccacggcaaccaggtggcctgccaccacgtgacctggggcatctgggtgaacaagagcagcttcgaccaggccgagagagccttcgtggagtag

SEQ ID NO: 80836 - DNA, 108 bp, synthetic construct
  misc_feature 1..108: note = Description of Artificial Sequence: Synthetic coding sequence
  source 1..108: mol_type = other DNA
atggccaccaacttcctggcccacgagaagatctggttcgacaagttcaagtacgacgacgccgagagaagattctacgagcagatgaacggccccgtggccggctag

SEQ ID NO: 80837 - DNA, 150 bp, synthetic construct
  misc_feature 1..150: note = Description of Artificial Sequence: Synthetic coding sequence
  source 1..150: mol_type = other DNA
atgagaagcggcaaggccagctgcaccctggagaccgtgtgggaggacaagcacaagtacgaggaggccgagagaagattctacgagcacgaggccacccaggccgccgccagcgcccagcagctgcccgccgagggccccgccatgtag

SEQ ID NO: 80838 - DNA, 120 bp, synthetic construct; identical to SEQ ID NO: 80818
  misc_feature 1..120: note = Description of Artificial Sequence: Synthetic coding sequence
  source 1..120: mol_type = other DNA

SEQ ID NO: 80839 - DNA, 573 bp, synthetic construct
  misc_feature 1..573: note = Description of Artificial Sequence: Synthetic coding sequence
  source 1..573: mol_type = other DNA
atgagaagcggcaaggccagctgcaccctggagaccgtgtgggaggacaagcacaagtacgaggaggccgagagaagattctacgagcacgaggccacccaggccgccgccagcgcccagcagctgcccgccgagggccccgccatgaacggccccggccaggacgaccccgaggacgccgacgaggccgaggcccccgacggcggcagcagaagagaccccagaaagagccaggacagcagaaagcccctgcagaagaagagaaagagaagccccaagagcggcctgggccccgccgacctggccctgctgggcctgagcgccgagagagtgtggctggacaagagcctgttcgaccaggccgagagcagctacagacagaagctggccgacgtggccgcccaggccgcctggccccccgccctggccccctggggcctgtgcacccacggcaaccaggtggcctgccaccacgtgacctggggcatctgggtgaacaagagcagcttcgaccaggccgagagagccttcgtggagtggagccaggccctgctgctggcccccgacggctag

SEQ ID NO: 80840 - DNA, 2094 bp, synthetic construct
  misc_feature 1..2094: note = Description of Artificial Sequence: Synthetic coding sequence
  source 1..2094: mol_type = other DNA
atggaggcccccctgggcagcatcctgagcccctgccccggcagagccgccaccggcagagccggcaccggcagagtgggcaccggcctgagaccccccgccgtgctgcagctgtgccccctgctggccttctacagatgcgtgagaaagatgagaagcggcaaggccagctgcaccctggagaccgtgtgggaggacaagcacaagtacgaggaggccgagagaagattctacgagcacgaggccacccaggccgccgccagcgcccagcagctgcccgccgagggccccgccatgaacggccccggccaggacgaccccgaggacgccgacgaggccgaggcccccgacggcggcagcagaagagaccccagaaagagccaggacagcagaaagcccctgcagaagaagagaaagagaagccccaagagcggcctgggccccgccgacctggccctgctgggcctgagcgccgagagagtgtggctggacaagagcctgttcgaccaggccgagagcagctacagacagaagctggccgacgtggccgcccaggccgcctggccccccgccctggccccctggggcctgtgcacccacggcaaccaggtggcctgccaccacgtgacctggggcatctgggtgaacaagagcagcttcgaccaggccgagagagccttcgtggagtggagccaggccctgctgctggcccccgacggcagcagaagacagggcacccccaacaccggccagcaggtggccgtgcccgacctggcccaccagcccagcccccccgtgaacggccagccccccctgggcagcctgcaggccctggtgagagaggtgtggctggagaagcccagatacgacgccgccgagagaggcttctacgaggccctgttcgacggccacccccccggcaaggtgagactgcaggagagagccggcctggccgagggcgccagaagaggcagaagagacagaagaggcagaaacatcctgggcaacaagagagccggcctgagaagagccgacggcgaggcccccagcgccctgccctactgctacttcctgcagaaggacgccgaggccccctggctgagcaagcccgcctacgacagcgccgagtgcagacaccacgccgccgaggccctgagagtggcctggtgcctggaggccgccagcctgagccacagacccggccccagaagcggcctgagcgtgagcagcctgagacccaacagaaagatggccaccaacttcctggcccacgagaagatctggttcgacaagttcaagtacgacgacgccgagagaagattctacgagcagatgaacggccccgtggccggcgccagcagacaggagaacggcgccagcgtgatcctgagagacatcgccagagccagagagaacatccagaagagcctggccggcagcagcggccccggcgccagcagcggcaccagcggcgaccacggcgagctggtggtgagaatcgccagcctggaggtggagaaccagagcctgagaggcgtggtgcaggagctgcagcaggccatcagcaagctggaggccagactgaacgtgctggagaagagcagccccggccacagagccaccgccccccagacccagcacgtgagccccatgagacaggtggagccccccgccaagaagcccgccacccccgccgaggacgacgaggacgacgacatcgacctgttcggcagcgacaacgaggaggaggacaaggaggccgcccagctgagagaggagagactgagacagtacgccgagaagaaggccaagaagcccgccctggtggccaagagcagcatcctgctggacgtgaagccctgggacgacgagaccgacatggcccagctggaggcctgcgtgagaagcatccagctggacggcctggtgtggggcgccagcaagctggtgcccgtgggctacggcatcagaaagctgcagatccagtgcgtggtggaggacgacaaggtgggcaccgacctgctggaggaggagatcaccaagttcgaggagcacgtgcagagcgtggacatcgccgccttcaacaagatctag

SEQ ID NO: 80841 - DNA, 615 bp, synthetic construct; identical to SEQ ID NO: 80829
  misc_feature 1..615: note = Description of Artificial Sequence: Synthetic coding sequence
  source 1..615: mol_type = other DNA

SEQ ID NO: 80842 - DNA, 507 bp, synthetic construct
  misc_feature 1..507: note = Description of Artificial Sequence: Synthetic coding sequence
  source 1..507: mol_type = other DNA
atggccaccaacttcctggcccacgagaagatctggttcgacaagttcaagtacgacgacgccgagagaagattctacgagcagatgaacggccccgtggccggcgccagcagacaggagaacggcgccagcgtgatcctgagagacatcgccagagccagagagaacatccagaagagcctggccggcagcagcggccccggcgccagcagcggcaccagcggcgaccacggcgagctggtggtgagaatcgccagcctggaggtggagaaccagagcctgagaggcgtggtgcaggagctgcagcaggccatcagcaagctggaggccagactgaacgtgctggagaagagcagccccggccacagagccaccgccccccagacccagcacgtgagccccatgagacaggtggagccccccgccaagaagcccgccacccccgccgaggacgacgaggacgacgacatcgacctgttcggcagcgacaacgaggaggaggactag

SEQ ID NO: 80843 - DNA, 786 bp, synthetic construct
  misc_feature 1..786: note = Description of Artificial Sequence: Synthetic coding sequence
  source 1..786: mol_type = other DNA
atggccaccaacttcctggcccacgagaagatctggttcgacaagttcaagtacgacgacgccgagagaagattctacgagcagatgaacggccccgtggccggcgccagcagacaggagaacggcgccagcgtgatcctgagagacatcgccagagccagagagaacatccagaagagcctggccggcagcagcggccccggcgccagcagcggcaccagcggcgaccacggcgagctggtggtgagaatcgccagcctggaggtggagaaccagagcctgagaggcgtggtgcaggagctgcagcaggccatcagcaagctggaggccagactgaacgtgctggagaagagcagccccggccacagagccaccgccccccagacccagcacgtgagccccatgagacaggtggagccccccgccaagaagcccgccacccccgccgaggacgacgaggacgacgacatcgacctgttcggcagcgacaacgaggaggaggacaaggaggccgcccagctgagagaggagagactgagacagtacgccgagaagaaggccaagaagcccgccctggtggccaagagcagcatcctgctggacgtgaagccctgggacgacgagaccgacatggcccagctggaggcctgcgtgagaagcatccagctggacggcctggtgtggggcgccagcaagctggtgcccgtgggctacggcatcagaaagctgcagatccagtgcgtggtggaggacgacaaggtgggcaccgacctgctggaggagtag

SEQ ID NO: 80844 - DNA, 96 bp, synthetic construct
  misc_feature 1..96: note = Description of Artificial Sequence: Synthetic coding sequence
  source 1..96: mol_type = other DNA
atgagaagcggcaaggccagctgcaccctggagaccgtgtgggaggacaagcacaagtacgaggaggccgagagaagattctacgagcacgagtag

SEQ ID NO: 80845 - DNA, 207 bp, synthetic construct
  misc_feature 1..207: note = Description of Artificial Sequence: Synthetic coding sequence
  source 1..207: mol_type = other DNA
atgagaagcggcaaggccagctgcaccctggagaccgtgtgggaggacaagcacaagtacgaggaggccgagagaagattctacgagcacgaggccacccaggccgccgccagcgcccagcagctgcccgccgagggccccgccatgaacggccccggccaggacgaccccgaggacgccgacgaggccgaggcccccgacggctag

SEQ ID NO: 80846 - DNA, 789 bp, synthetic construct
  misc_feature 1..789: note = Description of Artificial Sequence: Synthetic coding sequence
  source 1..789: mol_type = other DNA
atggccaccaacttcctggcccacgagaagatctggttcgacaagttcaagtacgacgacgccgagagaagattctacgagcagatgaacggccccgtggccggcgccagcagacaggagaacggcgccagcgtgatcctgagagacatcgccagagccagagagaacatccagaagagcctggccggcagcagcggccccggcgccagcagcggcaccagcggcgaccacgtggtgcaggagctgcagcaggccatcagcaagctggaggccagactgaacgtgctggagaagagcagccccggccacagagccaccgccccccagacccagcacgtgagccccatgagacaggtggagccccccgccaagaagcccgccacccccgccgaggacgacgaggacgacgacatcgacctgttcggcagcgacaacgaggaggaggacaaggaggccgcccagctgagagaggagagactgagacagtacgccgagaagaaggccaagaagcccgccctggtggccaagagcagcatcctgctggacgtgaagccctgggacgacgagaccgacatggcccagctggaggcctgcgtgagaagcatccagctggacggcctggtgtggggcgccagcaagctggtgcccgtgggctacggcatcagaaagctgcagatccagtgcgtggtggaggacgacaaggtgggcaccgacctgctggaggaggagatcaccaagttcgaggagcacgtgcagagcgtggacatcgccgccttcaacaagatctag

SEQ ID NO: 80847 - DNA, 525 bp, synthetic construct
  misc_feature 1..525: note = Description of Artificial Sequence: Synthetic coding sequence
  source 1..525: mol_type = other DNA
atggccgccgccgccgagctgagcctgctggagaagagcctgggcctgagcaagggcaacaagtacagcgcccagggcgagagacagatccccgtgctgcagaccaacaacggccccagcctgaccggcctgaccaccatcgccgcccacctggtgaagcaggccaacaaggagtacctgctgggcagcaccgccgaggagaaggccatcgtgcagcagtggctggagtacagagtgacccaggtggacggccacagcagcaagaacgacatccacaccctgctgaaggacctgaacagctacctggaggacaaggtgtacctgaccggctacaacttcaccctggccgacatcctgctgtactacggcctgcacagattcatcgtggacctgaccgtgcaggagaaggagaagtacctgaacgtgagcagatggttctgccacatccagcactaccccggcatcagacagcacctgagcagcgtggtgttcatcaagaacagactgtacaccaacagccactag

SEQ ID NO: 80848 - DNA, 420 bp, synthetic construct
  misc_feature 1..420: note = Description of Artificial Sequence: Synthetic coding sequence
  source 1..420: mol_type = other DNA
atggccgccgccgccgagctgagcctgctggagaagagcctgggcctgagcaagggcaacaagtacagcgcccagggcgagagacagatccccgtgctgcagaccaacaacggccccagcctgaccggcctgaccaccatcgccgcccacctggtgaagcaggccaacaaggagtacctgctgggcagcaccgccgaggagaaggccatcgtgcagcagtggctggagtacagagtgacccaggtggacggccacagcagcaagaacgacatccacaccctgctgaaggacctgaacagctacctggaggacaaggtgtacctgaccggctacaacttcaccctggccgacatcctgctgtactacggcctgcacagattcatcatcagaaagctgagacacaccgaggtgggcaactag

SEQ ID NO: 80849 - DNA, 1314 bp, synthetic construct
  misc_feature 1..1314: note = Description of Artificial Sequence: Synthetic coding sequence
  source 1..1314: mol_type = other DNA
atggccgccggcaccctgtacacctaccccgagaactggagagccttcaaggccctgatcgccgcccagtacagcggcgcccaggtgagagtgctgagcgcccccccccacttccacttcggccagaccaacagaacccccgagttcctgagaaagttccccgccggcaaggtgcccgccttcgagggcgacgacggcttctgcgtgttcgagagcaacgccatcgcctactacgtgagcaacgaggagctgagaggcagcacccccgaggccgccgcccaggtggtgcagtgggtgagcttcgccgacagcgacatcgtgccccccgccagcacctgggtgttccccaccctgggcatcatgcaccacaacaagcaggccaccgagaacgccaaggaggaggtgagaagaatcctgggcctgctggacgcctacctgaagaccagaaccttcctggtgggcgagagagtgaccctggccgacatcaccgtggtgtgcaccctgctgtggctgtacaagcaggtgctggagcccagcttcagacaggccttccccaacaccaacagatggttcctgacctgcatcaaccagccccagttcagagccgtgctgggcgaggtgaagctgtgcgagaagatggcccagttcgacgccaagaagttcgccgagacccagcccaagaaggacacccccagaaaggagaagggcagcagagaggagaagcagaagccccaggccgagagaaaggaggagaagaaggccgccgcccccgcccccgaggaggagatggacgagtgcgagcaggccctggccgccgagcccaaggccaaggaccccttcgcccacctgcccaagagcaccttcgtgctggacgagttcaagagaaagtacagcaacgaggacaccctgagcgtggccctgccctacttctgggagcacttcgacaaggacggctggagcctgtggtacagcgagtacagattccccgaggagctgacccagaccttcatgagctgcaacctgatcaccggcatgttccagagactggacaagctgagaaagaacgccttcgccagcgtgatcctgttcggcaccaacaacagcagcagcatcagcggcgtgtgggtgttcagaggccaggagctggccttccccctgagccccgactggcaggtggactacgagagctacacctggagaaagctggaccccggcagcgaggagacccagaccctggtgagagagtacttcagctgggagggcgccttccagcacgtgggcaaggccttcaaccagggcaagatcttcaagtag

SEQ ID NO: 80850 - DNA, 1464 bp, synthetic construct
  misc_feature 1..1464: note = Description of Artificial Sequence: Synthetic coding sequence
  source 1..1464: mol_type = other DNA
atggccgagagatgggtggcccccgccgtgctgagaagagccagattcgccagcaccttcttcctgagcccccagatctacgcccacaaggacggcgacctgagaagcgccttcttcatcctgagcttcaagagaggcgagttcatccccttcctgaactggaccctgtacacctaccccgagaactggagagccttcaaggccctgatcgccgcccagtacagcggcgcccaggtgagagtgctgagcgcccccccccacttccacttcggccagaccaacagaacccccgagttcctgagaaagttccccgccggcaaggtgcccgccttcgagggcgacgacggcttctgcgtgttcgagagcaacgccatcgcctactacgtgagcaacgaggagctgagaggcagcacccccgaggccgccgcccaggtggtgcagtgggtgagcttcgccgacagcgacatcgtgccccccgccagcacctgggtgttccccaccctgggcatcatgcaccacaacaagcaggccaccgagaacgccaaggaggaggtgagaagaatcctgggcctgctggacgcctacctgaagaccagaaccttcctggtgggcgagagagtgaccctggccgacatcaccgtggtgtgcaccctgctgtggctgtacaagcaggtgctggagcccagcttcagacaggccttccccaacaccaacagatggttcctgacctgcatcaaccagccccagttcagagccgtgctgggcgaggtgaagctgtgcgagaagatggcccagttcgacgccaagaagttcgccgagacccagcccaagaaggacacccccagaaaggagaagggcagcagagaggagaagcagaagccccaggccgagagaaaggaggagaagaaggccgccgcccccgcccccgaggaggagatggacgagtgcgagcaggccctggccgccgagcccaaggccaaggaccccttcgcccacctgcccaagagcaccttcgtgctggacgagttcaagagaaagtacagcaacgaggacaccctgagcgtggccctgccctacttctgggagcacttcgacaaggacggctggagcctgtggtacagcgagtacagattccccgaggagctgacccagaccttcatgagctgcaacctgatcaccggcatgttccagagactggacaagctgagaaagaacgccttcgccagcgtgatcctgttcggcaccaacaacagcagcagcatcagcggcgtgtgggtgttcagaggccaggagctggccttccccctgagccccgactggcaggtggactacgagagctacacctggagaaagctggaccccggcagcgaggagacccagaccctggtgagagagtacttcagctgggagggcgccttccagcacgtgggcaaggccttcaaccagggcaagatcttcaagtag

SEQ ID NO: 80851 - DNA, 621 bp, synthetic construct
  misc_feature 1..621: note = Description of Artificial Sequence: Synthetic coding sequence
  source 1..621: mol_type = other DNA
atgcaccacaacaagcaggccaccgagaacgccaaggaggaggtgagaagaatcctgggcctgctggacgcctacctgaagaccagaaccttcctggtgggcgagagagtgaccctggccgccgagcccaaggccaaggaccccttcgcccacctgcccaagagcaccttcgtgctggacgagttcaagagaaagtacagcaacgaggacaccctgagcgtggccctgccctacttctgggagcacttcgacaaggacggctggagcctgtggtacagcgagtacagattccccgaggagctgacccagaccttcatgagctgcaacctgatcaccggcatgttccagagactggacaagctgagaaagaacgccttcgccagcgtgatcctgttcggcaccaacaacagcagcagcatcagcggcgtgtgggtgttcagaggccaggagctggccttccccctgagccccgactggcaggtggactacgagagctacacctggagaaagctggaccccggcagcgaggagacccagaccctggtgagagagtacttcagctgggagggcgccttccagcacgtgggcaaggccttcaaccagggcaagatcttcaagtag

SEQ ID NO: 80852 - DNA, 2577 bp, synthetic construct
  misc_feature 1..2577: note = Description of Artificial Sequence: Synthetic coding sequence
  source 1..2577: mol_type = other DNA
atggtgaacttcaccgtggaccagatcagagccatcatggacaagaaggccaacatcagaaacatgagcgtgatcgcccacgtggaccacggcaagagcaccctgaccgacagcctggtgtgcaaggccggcatcatcgccagcgccagagccggcgagaccagattcaccgacaccagaaaggacgagcaggagagatgcatcaccatcaagagcaccgccatcagcctgttctacgagctgagcgagaacgacctgaacttcatcaagcagagcaaggacggcgccggcttcctgatcaacctgatcgacagccccggccacgtggacttcagcagcgaggtgaccgccgccctgagagtgaccgacggcgccctggtggtggtggactgcgtgagcggcgtgtgcgtgcagaccgagaccgtgctgagacaggccatcgccgagagaatcaagcccgtgctgatgatgaacaagatggacagagccctgctggagctgcagctggagcccgaggagctgtaccagaccttccagagaatcgtggagaacgtgaacgtgatcatcagcacctacggcgagggcgagagcggccccatgggcaacatcatgatcgaccccgtgctgggcaccgtgggcttcggcagcggcctgcacggctgggccttcaccctgaagcagttcgccgagatgtacgtggccaagttcgccgccaagggcgagggccagctgggccccgccgagagagccaagaaggtggaggacatgatgaagaagctgtggggcgacagatacttcgaccccgccaacggcaagttcagcaagagcgccaccagccccgagggcaagaagctgcccagaaccttctgccagctgatcctggaccccatcttcaaggtgttcgacgccatcatgaacttcaagaaggaggagaccgccaagctgatcgagaagctggacatcaagctggacagcgaggacaaggacaaggagggcaagcccctgctgaaggccgtgatgagaagatggctgcccgccggcgacgccctgctgcagatgatcaccatccacctgcccagccccgtgaccgcccagaagtacagatgcgagctgctgtacgagggcccccccgacgacgaggccgccatgggcatcaagagctgcgaccccaagggccccctgatgatgtacatcagcaagatggtgcccaccagcgacaagggcagattctacgccttcggcagagtgttcagcggcctggtgagcaccggcctgaaggtgagaatcatgggccccaactacacccccggcaagaaggaggacctgtacctgaagcccatccagagaaccatcctgatgatgggcagatacgtggagcccatcgaggacgtgccctgcggcaacatcgtgggcctggtgggcgtggaccagttcctggtgaagaccggcaccatcaccaccttcgagcacgcccacaacatgagagtgatgaagttcagcgtgagccccgtggtgagagtggccgtggaggccaagaaccccgccgacctgcccaagctggtggagggcctgaagagactggccaagagcgaccccatggtgcagtgcatcatcgaggagagcggcgagcacatcatcgccggcgccggcgagctgcacctggagatctgcctgaaggacctggaggaggaccacgcctgcatccccatcaagaagagcgaccccgtggtgagctacagagagaccgtgagcgaggagagcaacgtgctgtgcctgagcaagagccccaacaagcacaacagactgtacatgaaggccagacccttccccgacggcctggccgaggacatcgacaagggcgaggtgagcgccagacaggagctgaagcagagagccagatacctggccgagaagtacgagtgggacgtggccgaggccagaaagatctggtgcttcggccccgacggcaccggccccaacatcctgaccgacatcaccaagggcgtgcagtacctgaacgagatcaaggacagcgtggtggccggcttccagtgggccaccaaggagggcgccctgtgcgaggagaacatgagaggcgtgagattcgacgtgcacgacgtgaccctgcacgccgacgccatccacagaggcggcggccagatcatccccaccgccagaagatgcctgtacgccagcgtgctgaccgcccagcccagactgatggagcccatctacctggtggagatccagtgccccgagcaggtggtgggcggcatctacggcgtgctgaacagaaagagaggccacgtgttcgaggagagccaggtggccggcacccccatgttcgtggtgaaggcctacctgcccgtgaacgagagcttcggcttcaccgccgacctgagaagcaacaccggcggccaggccttcccccagtgcgtgttcgaccactggcagatcctgcccggcgaccccttcgacaacagcagcagacccagccaggtggtggccgagaccagaaagagaaagggcctgaaggagggcatccccgccctggacaacttcctggacaagctgtag

SEQ ID NO: 80853 - DNA, 1752 bp, synthetic construct
  misc_feature 1..1752: note = Description of Artificial Sequence: Synthetic coding sequence
  source 1..1752: mol_type = other DNA
atggtgaacttcaccgtggaccagatcagagccatcatggacaagaaggccaacatcagaaacatgagcgtgatcgcccacgtggaccacggcaagagcaccctgaccgacagcctggtgtgcaaggccggcatcatcgccagcgccagagccggcgagaccagattcaccgacaccagaaaggacgagcaggagagatgcatcaccatcaagagcaccgccatcagcctgttctacgagctgagcgagaacgacctgaacttcatcaagcagagcaaggacggcgccggcttcctgatcaacctgatcgacagccccggccacgtggacttcagcagcgaggtgaccgccgccctgagagtgaccgacggcgccctggtggtggtggactgcgtgagcggcgtgtgcgtgcagaccgagaccgtgctgagacaggccatcgccgagagaatcaagcccgtgctgatgatgaacaagatggacagagccctgctggagctgcagctggagcccgaggagctgtaccagaccttccagagaatcgtggagaacgtgaacgtgatcatcagcacctacggcgagggcgagagcggccccatgggcaacatcatgatcgaccccgtgctgggcaccgtgggcttcggcagcggcctgcacggctgggccttcaccctgaagcagttcgccgagatgtacgtggccaagttcgccgccaagggcgagggccagctgggccccgccgagagagccaagaaggtggaggacatgatgaagaagctgtggggcgacagatacttcgaccccgccaacggcaagttcagcaagagcgccaccagccccgagggcaagaagctgcccagaaccttctgccagctgatcctggaccccatcttcaaggtgttcgacgccatcatgaacttcaagaaggaggagaccgccaagctgatcgagaagctggacatcaagctggacagcgaggacaaggacaaggagggcaagcccctgctgaaggccgtgatgagaagatggctgcccgccggcgacgccctgctgcagatgatcaccatccacctgcccagccccgtgaccgcccagaagtacagatgcgagctgctgtacgagggcccccccgacgacgaggccgccatgggcatcaagagctgcgaccccaagggccccctgatgatgtacatcagcaagatggtgcccaccagcgacaagggcagattctacgccttcggcagagtgttcagcggcctggtgagcaccggcctgaaggtgagaatcatgggccccaactacacccccggcaagaaggaggacctgtacctgaagcccatccagagaaccatcctgatgatgggcagatacgtggagcccatcgaggacgtgccctgcggcaacatcgtgggcctggtgggcgtggaccagttcctggtgaagaccggcaccatcaccaccttcgagcacgcccacaacatgagagtgatgaagttcagcgtgagccccgtggtgagagtggccgtggaggccaagaaccccgccgacctgcccaagctggtggagggcctgaagagactggccaagagcgaccccatggtgcagtgcatcatcgaggagagcggcgagcacatcatcgccggcgccggcgagctgcacctggagatctgcctgaaggacctggaggaggaccacgcctgcatccccatcaagaaggagaccgtgagcaagaagaagaagaagaagaagtag

SEQ ID NO: 80854 - DNA, 351 bp, synthetic construct
  misc_feature 1..351: note = Description of Artificial Sequence: Synthetic coding sequence
  source 1..351: mol_type = other DNA
atgcccaagaacaaggagtacgcccaggtgatcaagatgctgggcaacggcagactggaggccatgtgcttcgacggcgtgaagagactgtgccacatcagaggcaagctgagaaagaaggtgtggatcaacaccagcgacatcatcctggtgggcctgagagactaccaggacaacaaggccgacgtgatcctgaagtacaacgccgacgaggccagaagcctgaaggcctacggcgagctgcccgagcacgccaagatcaacgagaccgacaccttcggccccggcgacgacgacgagatccagttcgacgacatcggcgacgacgacgaggacatcgacgacatctag

SEQ ID NO: 80855 - DNA, 435 bp, synthetic construct
  misc_feature 1..435: note = Description of Artificial Sequence: Synthetic coding sequence
  source 1..435: mol_type = other DNA
atgcccaagaacaagggcaagggcggcaagaacagaagaagaggcaagaacgagaacgagagcgagaagagagagctggtgttcaaggaggacggccaggagtacgcccaggtgatcaagatgctgggcaacggcagactggaggccatgtgcttcgacggcgtgaagagactgtgccacatcagaggcaagctgagaaagaaggtgtggatcaacaccagcgacatcatcctggtgggcctgagagactaccaggacaacaaggccgacgtgatcctgaagtacaacgccgacgaggccagaagcctgaaggcctacggcgagctgcccgagcacgccaagatcaacgagaccgacaccttcggccccggcgacgacgacgagatccagttcgacgacatcggcgacgacgacgaggacatcgacgacatctag

SEQ ID NO: 80856 - DNA, 435 bp, synthetic construct
  misc_feature 1..435: note = Description of Artificial Sequence: Synthetic coding sequence
  source 1..435: mol_type = other DNA
atgcccaagaacaagggcaagggcggcaagaacagaagaagaggcaagaacgagaacgagagcgagaagagagagctggtgttcaaggaggacggccaggagtacgcccaggtgatcaagatgctgggcaacggcagactggaggccctgtgcttcgacggcgtgaagagactgtgccacatcagaggcaagctgagaaagaaggtgtggatcaacaccagcgacatcatcctggtgggcctgagagactaccaggacaacaaggccgacgtgatcctgaagtacaacgccgacgaggccagaagcctgaaggcctacggcgagctgcccgagcacgccaagatcaacgagaccgacaccttcggccccggcgacgacgacgagatccagttcgacgacatcggcgacgacgacgaggacatcgacgacatctag

SEQ ID NO: 80857 - DNA, 384 bp, synthetic construct
  misc_feature 1..384: note = Description of Artificial Sequence: Synthetic coding sequence
  source 1..384: mol_type = other DNA
atgcccaagaacaagggcaagggcggcaagaacagaagaagaggcaagaacgagaacgagagcgagaagagagagctggtgttcaaggaggacggccaggagtacgcccaggtgatcaagatgctgggcaacggcagactggaggccctgtgcttcgacggcgtgaagagactgtgccacatcagaggcaagctgagaaagaaggacaacaaggccgacgtgatcctgaagtacaacgccgacgaggccagaagcctgaaggcctacggcgagctgcccgagcacgccaagatcaacgagaccgacaccttcggccccggcgacgacgacgagatccagttcgacgacatcggcgacgacgacgaggacatcgacgacatctag

SEQ ID NO: 80858 - DNA, 1419 bp, synthetic construct
  misc_feature 1..1419: note = Description of Artificial Sequence: Synthetic coding sequence
  source 1..1419: mol_type = other DNA
atggccggcggcgaggccggcgtgaccctgggccagccccacctgagcagacaggacctgaccaccctggacgtgaccaagctgacccccctgagccacgaggtgatcagcagacaggccaccatcaacatcggcaccatcggccacgtggcccacggcaagagcaccgtggtgaaggccatcagcggcgtgcacaccgtgagattcaagaacgagctggagagaaacatcaccatcaagctgggctacgccaacgccaagatctacaagctggacgaccccagctgccccagacccgagtgctacagaagctgcggcagcagcacccccgacgagttccccaccgacatccccggcaccaagggcaacttcaagctggtgagacacgtgagcttcgtggactgccccggccacgacatcctgatggccaccatgctgaacggcgccgccgtgatggacgccgccctgctgctgatcgccggcaacgagagctgcccccagccccagaccagcgagcacctggccgccatcgagatcatgaagctgaagcacatcctgatcctgcagaacaagatcgacctggtgaaggagagccaggccaaggagcagtacgagcagatcctggccttcgtgcagggcaccgtggccgagggcgcccccatcatccccatcagcgcccagctgaagtacaacatcgaggtggtgtgcgagtacatcgtgaagaagatccccgtgccccccagagacttcaccagcgagcccagactgatcgtgatcagaagcttcgacgtgaacaagcccggctgcgaggtggacgacctgaagggcggcgtggccggcggcagcatcctgaagggcgtgctgaaggtgggccaggagatcgaggtgagacccggcatcgtgagcaaggacagcgagggcaagctgatgtgcaagcccatcttcagcaagatcgtgagcctgttcgccgagcacaacgacctgcagtacgccgcccccggcggcctgatcggcgtgggcaccaagatcgaccccaccctgtgcagagccgacagaatggtgggccaggtgctgggcgccgtgggcgccctgcccgagatcttcaccgagctggagatcagctacttcctgctgagaagactgctgggcgtgagaaccgagggcgacaagaaggccgccaaggtgcagaagctgagcaagaacgaggtgctgatggtgaacatcggcagcctgagcaccggcggcagagtgagcgccgtgaaggccgacctgggcaagatcgtgctgaccaaccccgtgtgcaccgaggtgggcgagaagatcgccctgagcagaagagtggagaagcactggagactgatcggctggggccagatcagaagaggcgtgaccatcaagcccaccgtggacgacgactag

SEQ ID NO: 80859 - DNA, 552 bp, synthetic construct
  misc_feature 1..552: note = Description of Artificial Sequence: Synthetic coding sequence
  source 1..552: mol_type = other DNA
tgagccggcggcgaggccggcgtgaccctgggccagccccacctgagcagacaggacctgaccaccctggacgtgaccaagctgacccccctgagccacgaggtgatcagcagacaggccaccatcaacatcggcaccatcggccacgtggcccacggcaagagcaccgtggtgaaggccatcagcggcgtgcacaccgtgagattcaagaacgagctggagagaaacatcaccatcaagctgggctacgccaacgccaagatctacaagctggacgaccccagctgccccagacccgagtgctacagaagctgcggcagcagcacccccgacgagttccccaccgacatccccggcaccaagggcaacttcaagctggtgagacacgtgagcttcgtggactgccccggccacgacatcctgatggccaccatgctgaacggcgccgccgtgatggacgccgccctgctgctgatcggcaagtacctgaccatcggcctggacaagagcatgtggaacaagagcaagatgaagtacctgaagggcaactag

SEQ ID NO: 80860 - DNA, 1116 bp, synthetic construct
  misc_feature 1..1116: note = Description of Artificial Sequence: Synthetic coding sequence
  source 1..1116: mol_type = other DNA
atgttccaggaggtgaaggccgacaaggtgaccatgctgtggaacaagaaggccaccgccgtgctggtgatcgccagcaccgacgtggacaagaccggcgccagctactacggcgagcagaccctgcactacatcgccaccaacggcgagagcgccgtggtgcagctgcccaagaacggccccatctacgacgtggtgtggaacagcagcagcaccgagttctgcgccgtgtacggcttcatgcccgccaaggccaccatcttcaacctgaagtgcgaccccgtgttcgacttcggcaccggccccagaaacgccgcctactacagcccccacggccacatcctggtgctggccggcttcggcaacctgagaggccagatggaggtgtgggacgtgaagaactacaagctgatcagcaagcccgtggccagcgacagcacctacttcgcctggtgccccgacggcgagcacatcctgaccgccacctgcgcccccagactgagagtgaacaacggctacaagatctggcactacaccggcagcatcctgcacaagtacgacgtgcccagcaacgccgagctgtggcaggtgagctggcagcccttcctggacggcatcttccccgccaagaccatcacctaccaggccgtgcccagcgaggtgcccaacgaggagcccaaggtggccaccgcctacagaccccccgccctgagaaacaagcccatcaccaacagcaagctgcacgaggaggagcccccccagaacatgaagccccagagcggcaacgacaagcccctgagcaagaccgccctgaagaaccagagaaagcacgaggccaagaaggccgccaagcaggaggccagaagcgacaagagccccgacctggcccccacccccgccccccagagcacccccagaaacaccgtgagccagagcatcagcggcgaccccgagatcgacaagaagatcaagaacctgaagaagaagctgaaggccatcgagcagctgaaggagcaggccgccaccggcaagcagctggagaagaaccagctggagaagatccagaaggagaccgccctgctgcaggagctggaggacctggagctgggcatctag

SEQ ID NO: 80861 - DNA, 1758 bp, synthetic construct
  misc_feature 1..1758: note = Description of Artificial Sequence: Synthetic coding sequence
  source 1..1758: mol_type = other DNA
atggcccccagcacccccctgctgaccgtgagaggcagcgagggcctgtacatggtgaacggccccccccacttcaccgagagcaccgtgttccccagagagagcggcaagaactgcaaggtgtgcatcttcagcaaggacggcaccctgttcgcctggggcaacggcgagaaggtgaacatcatcagcgtgaccaacaagggcctgctgcacagcttcgacctgctgaaggccgtgtgcctggagttcagccccaagaacaccgtgctggccacctggcagccctacaccaccagcaaggacggcaccgccggcatccccaacctgcagctgtacgacgtgaagaccggcacctgcctgaagagcttcatccagaagaagatgcagaactggtgccccagctggagcgaggacgagaccctgtgcgccagaaacgtgaacaacgaggtgcacttcttcgagaacaacaacttcaacaccatcgccaacaagctgcacctgcagaagatcaacgacttcgtgctgagccccggcccccagccctacaaggtggccgtgtacgtgcccggcagcaagggcgcccccagcttcgtgagactgtaccagtaccccaacttcgccggcccccacgccgccctggccaacaagagcttcttcaaggccgacaaggtgaccatgctgtggaacaagaaggccaccgccgtgctggtgatcgccagcaccgacgtggacaagaccggcgccagctactacggcgagcagaccctgcactacatcgccaccaacggcgagagcgccgtggtgcagctgcccaagaacggccccatctacgacgtggtgtggaacagcagcagcaccgagttctgcgccgtgtacggcttcatgcccgccaaggccaccatcttcaacctgaagtgcgaccccgtgttcgacttcggcaccggccccagaaacgccgcctactacagcccccacggccacatcctggtgctggccggcttcggcaacctgagaggccagatggaggtgtgggacgtgaagaactacaagctgatcagcaagcccgtggccagcgacagcacctacttcgcctggtgccccgacggcgagcacatcctgaccgccacctgcgcccccagactgagagtgaacaacggctacaagatctggcactacaccggcagcatcctgcacaagtacgacgtgcccagcaacgccgagctgtggcaggtgagctggcagcccttcctggacggcatcttccccgccaagaccatcacctaccaggccgtgcccagcgaggtgcccaacgaggagcccaaggtggccaccgcctacagaccccccgccctgagaaacaagcccatcaccaacagcaagctgcacgaggaggagcccccccagaacatgaagccccagagcggcaacgacaagcccctgagcaagaccgccctgaagaaccagagaaagcacgaggccaagaaggccgccaagcaggaggccagaagcgacaagagccccgacctggcccccacccccgccccccagagcacccccagaaacaccgtgagccagagcatcagcggcgaccccgagatcgacaagaagatcaagaacctgaagaagaagctgaaggccatcgagcagctgaaggagcaggccgccaccggcaagcagctggagaagaaccagctggagaagatccagaaggagaccgccctgctgcaggagctggaggacctggagctgggcatctag

SEQ ID NO: 80862 - DNA, 1893 bp, synthetic construct
  misc_feature 1..1893: note = Description of Artificial Sequence: Synthetic coding sequence
  source 1..1893: mol_type = other DNA
atgcagggcggcaacagcggcgtgagaaagagagaggaggagggcgacggcgccggcgccgtggccgccccccccgccatcgacttccccgccgagggccccgaccccgagtacgacgagagcgacgtgcccgccgagatccaggtgctgaaggagcccctgcagcagcccaccttccccttcgccgtggccaaccagctgctgctggtgagcctgctggagcacctgagccacgtgcacgagcccaaccccctgagaagcagacaggtgttcaagctgctgtgccagaccttcatcaagatgggcctgctgagcagcttcacctgcagcgacgagttcagcagcctgagactgcaccacaacagagccatcacccacctgatgagaagcgccaaggagagagtgagacaggacccctgcgaggacatcagcagaatccagaagatcagaagcagagaggtggccctggaggcccagaccagcagatacctgaacgagttcgaggagctggccatcctgggcaagggcggctacggcagagtgtacaaggtgagaaacaagctggacggccagtactacgccatcaagaagatcctgatcaagggcgccaccaagaccgtgtgcatgaaggtgctgagagaggtgaaggtgctggccggcctgcagcaccccaacatcgtgggctaccacaccgcctggatcgagcacgtgcacgtgatccagcccagagccgacagagccgccatcgagctgcccagcctggaggtgctgagcgaccaggaggaggacagagagcagtgcggcgtgaagaacgacgagagcagcagcagcagcatcatcttcgccgagcccacccccgagaaggagaagagattcggcgagagcgacaccgagaaccagaacaacaagagcgtgaagtacaccaccaacctggtgatcagagagagcggcgagctggagagcaccctggagctgcaggagaacggcctggccggcctgagcgccagcagcatcgtggagcagcagctgcccctgagaagaaacagccacctggaggagagcttcaccagcaccgaggagagcagcgaggagaacgtgaacttcctgggccagaccgaggcccagtaccacctgatgctgcacatccagatgcagctgtgcgagctgagcctgtgggactggatcgtggagagaaacaagagaggcagagagtacgtggacgagagcgcctgcccctacgtgatggccaacgtggccaccaagatcttccaggagctggtggagggcgtgttctacatccacaacatgggcatcgtgcacagagacctgaagcccagaaacatcttcctgcacggccccgaccagcaggtgaagatcggcgacttcggcctggcctgcaccgacatcctgcagaagaacaccgactggaccaacagaaacggcaagagaacccccacccacaccagcagagtgggcacctgcctgtacgccagccccgagcagctggagggcagcgagtacgacgccaagagcgacatgtacagcctgggcgtggtgctgctggagctgttccagcccttcggcaccgagatggagagagccgaggtgctgaccggcctgagaaccggccagctgcccgagagcctgagaaagagatgccccgtgcaggccaagtacatccagcacctgaccagaagaaacagcagccagagacccagcgccatccagctgctgcagagcgagctgttccagaacagcggcaacgtgaacctgaccctgcagatgaagatcatcgagcaggagaaggagatcgccgagctgaagaagcagctgaacctgctgagccaggacaagggcgtgagagacgacggcaaggacggcggcgtgggctag

SEQ ID NO: 80863 - DNA, 1734 bp, synthetic construct
  misc_feature 1..1734: note = Description of Artificial Sequence: Synthetic coding sequence
  source 1..1734: mol_type = other DNA
atgaaccagacccacttcgtgcaggacagatgcctgagcgacccctgcgaggacatcagcagaatccagaagatcagaagcagagaggtggccctggaggcccagaccagcagatacctgaacgagttcgaggagctggccatcctgggcaagggcggctacggcagagtgtacaaggtgagaaacaagctggacggccagtactacgccatcaagaagatcctgatcaagggcgccaccaagaccgtgtgcatgaaggtgctgagagaggtgaaggtgctggccggcctgcagcaccccaacatcgtgggctaccacaccgcctggatcgagcacgtgcacgtgatccagcccagagccgacagagccgccatcgagctgcccagcctggaggtgctgagcgaccaggaggaggacagagagcagtgcggcgtgaagaacgacgagagcagcagcagcagcatcatcttcgccgagcccacccccgagaaggagaagagattcggcgagagcgacaccgagaaccagaacaacaagagcgtgaagtacaccaccaacctggtgatcagagagagcggcgagctggagagcaccctggagctgcaggagaacggcctggccggcctgagcgccagcagcatcgtggagcagcagctgcccctgagaagaaacagccacctggaggagagcttcaccagcaccgaggagagcagcgaggagaacgtgaacttcctgggccagaccgaggcccagtaccacctgatgctgcacatccagatgcagctgtgcgagctgagcctgtgggactggatcgtggagagaaacaagagaggcagagagtacgtggacgagagcgcctgcccctacgtgatggccaacgtggccaccaagatcttccaggagctggtggagggcgtgttctacatccacaacatgggcatcgtgcacagagacctgaagcccagaaacatcttcctgcacggccccgaccagcaggtgaagatcggcgacttcggcctggcctgcaccgacatcctgcagaagaacaccgactggaccaacagaaacggcaagagaacccccacccacaccagcagagtgggcacctgcctgtacgccagccccgagcagctggagggcagcgagtacgacgccaagagcgacatgtacagcctgggcgtggtgctgctggagctgttccagcccttcggcaccgagatggagagagccgaggtgctgaccggcctgagaaccggccagctgcccgagagcctgagaaagagatgccccgtgcaggccaagtacatccagcacctgaccagaagaaacagcagccagagacccagcgccatccagctgctgcagagcgagctgttccagaacagcggcaacgtgaacctgaccctgcagatgaagatcatcgagcaggagaaggagatcgccgagctgaagaagcagctgaacctgctgagccaggacaagggcttcagcgtgatccccaagccccacccctgcaaggccctgtacagcgccccccagatgatcagcagacagctgagaagcctgagctgcctgtgccccgccctgttccccggcaccagcagcttcatcgtggccctgagcagccccgccaacctgtacatcccccagagacagagaagcgacgagctggtgttcgagagccagaagggcagcgccatggagctggccgtgatcaccgtggacggcgtgtag

SEQ ID NO: 80864 - DNA, 3351 bp, synthetic construct
  misc_feature 1..3351: note = Description of Artificial Sequence: Synthetic coding sequence
  source 1..3351: mol_type = other DNA
atggagagagccatcagccccggcctgctggtgagagccctgctgctgctgctgctgctgctgggcctggccgccagaaccgtggccgccggcagagccagaggcctgcccgcccccaccgccgaggccgccttcggcctgggcgccgccgccgcccccaccagcgccaccagagtgcccgccgccggcgccgtggccgccgccgaggtgaccgtggaggacgccgaggccctgcccgccgccgccggcgagcaggagcccagaggccccgagcccgacgacgagaccgagctgagacccagaggcagaagcctggtgatcatcagcaccctggacggcagaatcgccgccctggaccccgagaaccacggcaagaagcagtgggacctggacgtgggcagcggcagcctggtgagcagcagcctgagcaagcccgaggtgttcggcaacaagatgatcatccccagcctggacggcgccctgttccagtgggaccaggacagagagagcatggagaccgtgcccttcaccgtggagagcctgctggagagcagctacaagttcggcgacgacgtggtgctggtgggcggcaagagcctgaccacctacggcctgagcgcctacagcggcaaggtgagatacatctgcagcgccctgggctgcagacagtgggacagcgacgagatggagcaggaggaggacatcctgctgctgcagagaacccagaagaccgtgagagccgtgggccccagaagcggcaacgagaagtggaacttcagcgtgggccacttcgagctgagatacatccccgacatggagaccagagccggcttcatcgagagcaccttcaagcccaacgagaacaccgaggagagcaagatcatcagcgacgtggaggagcaggaggccgccatcatggacatcgtgatcaaggtgagcgtggccgactggaaggtgatggccttcagcaagaagggcggccacctggagtgggagtaccagttctgcacccccatcgccagcgcctggctgctgaaggacggcaaggtgatccccatcagcctgttcgacgacaccagctacaccagcaacgacgacgtgctggaggacgaggaggacatcgtggaggccgccagaggcgccaccgagaacagcgtgtacctgggcatgtacagaggccagctgtacctgcagagcagcgtgagaatcagcgagaagttccccagcagccccaaggccctggagagcgtgaccaacgagaacgccatcatccccctgcccaccatcaagtggaagcccctgatccacagccccagcagaacccccgtgctggtgggcagcgacgagttcgacaagtgcctgagcaacgacaagttcagccacgaggagtacagcaacggcgccctgagcatcctgcagtacccctacgacaacggctactacctgccctactacaagagagagagaaacaagagaagcacccagatcaccgtgagattcctggacaacccccactacaacaagaacatcagaaagaaggaccccgtgctgctgctgcactggtggaaggagatcgtggccaccatcctgttctgcatcatcgccaccaccttcatcgtgagaagactgttccacccccacccccacagacagagaaaggagagcgagacccagtgccagaccgagaacaagtacgacagcgtgagcggcgaggccaacgacagcagctggaacgacatcaagaacagcggctacatcagcagatacctgaccgacttcgagcccatccagtgcctgggcagaggcggcttcggcgtggtgttcgaggccaagaacaaggtggacgactgcaactacgccatcaagagaatcagactgcccaacagagagctggccagagagaaggtgatgagagaggtgaaggccctggccaagctggagcaccccggcatcgtgagatacttcaacgcctggctggaggccccccccgagaagtggcaggagaagatggacgagatctggctgaaggacgagagcaccgactggcccctgagcagccccagccccatggacgcccccagcgtgaagatcagaagaatggaccccttcgccaccaaggagcacatcgagatcatcgcccccagcccccagagaagcagaagcttcagcgtgggcatcagctgcgaccagaccagcagcagcgagagccagttcagccccctggagttcagcggcatggaccacgaggacatcagcgagagcgtggacgccgcctacaacctgcaggacagctgcctgaccgactgcgacgtggaggacggcaccatggacggcaacgacgagggccacagcttcgagctgtgccccagcgaggccagcccctacgtgagaagcagagagagaaccagcagcagcatcgtgttcgaggacagcggctgcgacaacgccagcagcaaggaggagcccaagaccaacagactgcacatcggcaaccactgcgccaacaagctgaccgccttcaagcccaccagcagcaagagcagcagcgaggccaccctgagcatcagcccccccagacccaccaccctgagcctggacctgaccaagaacaccaccgagaagctgcagcccagcagccccaaggtgtacctgtacatccagatgcagctgtgcagaaaggagaacctgaaggactggatgaacggcagatgcaccatcgaggagagagagagaagcgtgtgcctgcacatcttcctgcagatcgccgaggccgtggagttcctgcacagcaagggcctgatgcacagagacctgaagcccagcaacatcttcttcaccatggacgacgtggtgaaggtgggcgacttcggcctggtgaccgccatggaccaggacgaggaggagcagaccgtgctgacccccatgcccgcctacgccagacacaccggccaggtgggcaccaagctgtacatgagccccgagcagatccacggcaacagctacagccacaaggtggacatcttcagcctgggcctgatcctgttcgagctgctgtaccccttcagcacccagatggagagagtgagaaccctgaccgacgtgagaaacctgaagttcccccccctgttcacccagaagtacccctgcgagtacgtgatggtgcaggacatgctgagccccagccccatggagagacccgaggccatcaacatcatcgagaacgccgtgttcgaggacctggacttccccggcaagaccgtgctgagacagagaagcagaagcctgagcagcagcggcaccaagcacagcagacagagcaacaacagccacagccccctgcccagcaactag

SEQ ID NO: 80865 - DNA, 2898 bp, synthetic construct
  misc_feature 1..2898: note = Description of Artificial Sequence: Synthetic coding sequence
  source 1..2898: mol_type = other DNA
atgatcatccccagcctggacggcgccctgttccagtgggaccaggacagagagagcatggagaccgtgcccttcaccgtggagagcctgctggagagcagctacaagttcggcgacgacgtggtgctggtgggcggcaagagcctgaccacctacggcctgagcgcctacagcggcaaggtgagatacatctgcagcgccctgggctgcagacagtgggacagcgacgagatggagcaggaggaggacatcctgctgctgcagagaacccagaagaccgtgagagccgtgggccccagaagcggcaacgagaagtggaacttcagcgtgggccacttcgagctgagatacatccccgacatggagaccagagccggcttcatcgagagcaccttcaagcccaacgagaacaccgaggagagcaagatcatcagcgacgtggaggagcaggaggccgccatcatggacatcgtgatcaaggtgagcgtggccgactggaaggtgatggccttcagcaagaagggcggccacctggagtgggagtaccagttctgcacccccatcgccagcgcctggctgctgaaggacggcaaggtgatccccatcagcctgttcgacgacaccagctacaccagcaacgacgacgtgctggaggacgaggaggacatcgtggaggccgccagaggcgccaccgagaacagcgtgtacctgggcatgtacagaggccagctgtacctgcagagcagcgtgagaatcagcgagaagttccccagcagccccaaggccctggagagcgtgaccaacgagaacgccatcatccccctgcccaccatcaagtggaagcccctgatccacagccccagcagaacccccgtgctggtgggcagcgacgagttcgacaagtgcctgagcaacgacaagttcagccacgaggagtacagcaacggcgccctgagcatcctgcagtacccctacgacaacggctactacctgccctactacaagagagagagaaacaagagaagcacccagatcaccgtgagattcctggacaacccccactacaacaagaacatcagaaagaaggaccccgtgctgctgctgcactggtggaaggagatcgtggccaccatcctgttctgcatcatcgccaccaccttcatcgtgagaagactgttccacccccacccccacagacagagaaaggagagcgagacccagtgccagaccgagaacaagtacgacagcgtgagcggcgaggccaacgacagcagctggaacgacatcaagaacagcggctacatcagcagatacctgaccgacttcgagcccatccagtgcctgggcagaggcggcttcggcgtggtgttcgaggccaagaacaaggtggacgactgcaactacgccatcaagagaatcagactgcccaacagagagctggccagagagaaggtgatgagagaggtgaaggccctggccaagctggagcaccccggcatcgtgagatacttcaacgcctggctggaggccccccccgagaagtggcaggagaagatggacgagatctggctgaaggacgagagcaccgactggcccctgagcagccccagccccatggacgcccccagcgtgaagatcagaagaatggaccccttcgccaccaaggagcacatcgagatcatcgcccccagcccccagagaagcagaagcttcagcgtgggcatcagctgcgaccagaccagcagcagcgagagccagttcagccccctggagttcagcggcatggaccacgaggacatcagcgagagcgtggacgccgcctacaacctgcaggacagctgcctgaccgactgcgacgtggaggacggcaccatggacggcaacgacgagggccacagcttcgagctgtgccccagcgaggccagcccctacgtgagaagcagagagagaaccagcagcagcatcgtgttcgaggacagcggctgcgacaacgccagcagcaaggaggagcccaagaccaacagactgcacatcggcaaccactgcgccaacaagctgaccgccttcaagcccaccagcagcaagagcagcagcgaggccaccctgagcatcagcccccccagacccaccaccctgagcctggacctgaccaagaacaccaccgagaagctgcagcccagcagccccaaggtgtacctgtacatccagatgcagctgtgcagaaaggagaacctgaaggactggatgaacggcagatgcaccatcgaggagagagagagaagcgtgtgcctgcacatcttcctgcagatcgccgaggccgtggagttcctgcacagcaagggcctgatgcacagagacctgaagcccagcaacatcttcttcaccatggacgacgtggtgaaggtgggcgacttcggcctggtgaccgccatggaccaggacgaggaggagcagaccgtgctgacccccatgcccgcctacgccagacacaccggccaggtgggcaccaagctgtacatgagccccgagcagatccacggcaacagctacagccacaaggtggacatcttcagcctgggcctgatcctgttcgagctgctgtaccccttcagcacccagatggagagagtgagaaccctgaccgacgtgagaaacctgaagttcccccccctgttcacccagaagtacccctgcgagtacgtgatggtgcaggacatgctgagccccagccccatggagagacccgaggccatcaacatcatcgagaacgccgtgttcgaggacctggacttccccggcaagaccgtgctgagacagagaagcagaagcctgagcagcagcggcaccaagcacagcagacagagcaacaacagccacagccccctgcccagcaactag

SEQ ID NO: 80866 - DNA, 1569 bp, synthetic construct
  misc_feature 1..1569: note = Description of Artificial Sequence: Synthetic coding sequence
  source 1..1569: mol_type = other DNA
atggccgccgtggccgtggccgtgagagaggacagcggcagcggcatgaaggccgagctgccccccggccccggcgccgtgggcagagagatgaccaaggaggagaagctgcagctgagaaaggagaagaagcagcagaagaagaagagaaaggaggagaagggcgccgagcccgagaccggcagcgccgtgagcgccgcccagtgccagggccccaccagagagctgcccgagagcggcatccagctgggcacccccagagagaaggtgcccgccggcagaagcaaggccgagctgagagccgagagaagagccaagcaggaggccgagagagccctgaagcaggccagaaagggcgagcagggcggccccccccccaaggccagccccagcaccgccggcgagacccccagcggcgtgaagagactgcccgagtacccccaggtggacgacctgctgctgagaagactggtgaagaagcccgagagacagcaggtgcccaccagaaaggactacggcagcaaggtgagcctgttcagccacctgccccagtacagcagacagaacagcctgacccagttcatgagcatccccagcagcgtgatccaccccgccatggtgagactgggcctgcagtacagccagggcctggtgagcggcagcaacgccagatgcatcgccctgctgagagccctgcagcaggtgatccaggactacaccaccccccccaacgaggagctgagcagagacctggtgaacaagctgaagccctacatgagcttcctgacccagtgcagacccctgagcgccagcatgcacaacgccatcaagttcctgaacaaggagatcaccagcgtgggcagcagcaagagagaggaggaggccaagagcgagctgagagccgccatcgacagatacgtgcaggagaagatcgtgctggccgcccaggccatcagcagattcgcctaccagaagatcagcaacggcgacgtgatcctggtgtacggctgcagcagcctggtgagcagaatcctgcaggaggcctggaccgagggcagaagattcagagtggtggtggtggacagcagaccctggctggagggcagacacaccctgagaagcctggtgcacgccggcgtgcccgccagctacctgctgatccccgccgccagctacgtgctgcccgaggtgagcaaggtgctgctgggcgcccacgccctgctggccaacggcagcgtgatgagcagagtgggcaccgcccagctggccctggtggccagagcccacaacgtgcccgtgctggtgtgctgcgagacctacaagttctgcgagagagtgcagaccgacgccttcgtgagcaacgagctggacgaccccgacgacctgcagtgcaagagaggcgagcacgtggccctggccaactggcagaaccacgccagcctgagactgctgaacctggtgtacgacgtgaccccccccgagctggtggacctggtgatcaccgagctgggcatgatcccctgcagcagcgtgcccgtggtgctgagagtgaagagcagcgaccagtag

SEQ ID NO: 80867 - DNA, 1632 bp, synthetic construct
  misc_feature 1..1632: note = Description of Artificial Sequence: Synthetic coding sequence
  source 1..1632: mol_type = other DNA
atgcccacccagcagcccgccgcccccagcaccagagcccccaagcccagcagaagcctgagcggcagcctgtgcgccctgttcagcgacgccgacagcggcagcggcatgaaggccgagctgccccccggccccggcgccgtgggcagagagatgaccaaggaggagaagctgcagctgagaaaggagaagaagcagcagaagaagaagagaaaggaggagaagggcgccgagcccgagaccggcagcgccgtgagcgccgcccagtgccagggccccaccagagagctgcccgagagcggcatccagctgggcacccccagagagaaggtgcccgccggcagaagcaaggccgagctgagagccgagagaagagccaagcaggaggccgagagagccctgaagcaggccagaaagggcgagcagggcggccccccccccaaggccagccccagcaccgccggcgagacccccagcggcgtgaagagactgcccgagtacccccaggtggacgacctgctgctgagaagactggtgaagaagcccgagagacagcaggtgcccaccagaaaggactacggcagcaaggtgagcctgttcagccacctgccccagtacagcagacagaacagcctgacccagttcatgagcatccccagcagcgtgatccaccccgccatggtgagactgggcctgcagtacagccagggcctggtgagcggcagcaacgccagatgcatcgccctgctgagagccctgcagcaggtgatccaggactacaccaccccccccaacgaggagctgagcagagacctggtgaacaagctgaagccctacatgagcttcctgacccagtgcagacccctgagcgccagcatgcacaacgccatcaagttcctgaacaaggagatcaccagcgtgggcagcagcaagagagaggaggaggccaagagcgagctgagagccgccatcgacagatacgtgcaggagaagatcgtgctggccgcccaggccatcagcagattcgcctaccagaagatcagcaacggcgacgtgatcctggtgtacggctgcagcagcctggtgagcagaatcctgcaggaggcctggaccgagggcagaagattcagagtggtggtggtggacagcagaccctggctggagggcagacacaccctgagaagcctggtgcacgccggcgtgcccgccagctacctgctgatccccgccgccagctacgtgctgcccgaggtgagcaaggtgctgctgggcgcccacgccctgctggccaacggcagcgtgatgagcagagtgggcaccgcccagctggccctggtggccagagcccacaacgtgcccgtgctggtgtgctgcgagacctacaagttctgcgagagagtgcagaccgacgccttcgtgagcaacgagctggacgaccccgacgacctgcagtgcaagagaggcgagcacgtggccctggccaactggcagaaccacgccagcctgagactgctgaacctggtgtacgacgtgaccccccccgagctggtggacctggtgatcaccgagctgggcatgatcccctgcagcagcgtgcccgtggtgctgagagtgaagagcagcgaccagtag

SEQ ID NO: 80868 - DNA, 918 bp, synthetic construct
  misc_feature 1..918: note = Description of Artificial Sequence: Synthetic coding sequence
  source 1..918: mol_type = other DNA
atggacgacaaggagctgatcgagtacttcaagagccagatgaaggaggaccccgacatggccagcgccgtggccgccatcagaaccctgctggagttcctgaagagagacaagggcgagaccatccagggcctgagagccaacctgaccagcgccatcgagaccctgtgcggcgtggacagcagcgtggccgtgagcagcggcggcgagctgttcctgagattcatcagcctggccagcctggagtacagcgactacagcaagtgcaagaagatcatgatcgagagaggcgagctgttcctgagaagaatcagcctgagcagaaacaagatcgccgacctgtgccacaccttcatcaaggacggcgccaccatcctgacccacgcctacagcagagtggtgctgagagtgctggaggccgccgtggccgccaagaagagattcagcgtgtacgtgaccgagagccagcccgacctgagcggcaagaagatggccaaggccctgtgccacctgaacgtgcccgtgaccgtggtgctggacgccgccgtgggctacatcatggagaaggccgacctggtgatcgtgggcgccgagggcgtggtggagaacggcggcatcatcaacaagatcggcaccaaccagatggccgtgtgcgccaaggcccagaacaagcccttctacgtggtggccgagagcttcaagttcgtgagactgttccccctgaaccagcaggacgtgcccgacaagttcaagtacaaggccgacaccctgaaggtggcccagaccggccaggacctgaaggaggagcacccctgggtggactacaccgcccccagcctgatcaccctgctgttcaccgacctgggcgtgctgacccccagcgccgtgagcgacgagctgatcaagctgtacctgtag

SEQ ID NO: 80869 - DNA, 1056 bp, synthetic construct
  misc_feature 1..1056: note = Description of Artificial Sequence: Synthetic coding sequence
  source 1..1056: mol_type = other DNA
atgcccggcagcgccgccaagggcagcgagctgagcgagagaatcgagagcttcgtggagaccctgaagagaggcggcggccccagaagcagcgaggagatggccagagagaccctgggcctgctgagacagatcatcaccgaccacagatggagcaacgccggcgagctgatggagctgatcagaagagagggcagaagaatgaccgccgcccagcccagcgagaccaccgtgggcaacatggtgagaagagtgctgaagatcatcagagaggagtacggcagactgcacggcagaagcgacgagagcgaccagcaggagagcctgcacaagctgctgaccagcggcggcctgaacgaggacttcagcttccactacgcccagctgcagagcaacatcatcgaggccatcaacgagctgctggtggagctggagggcaccatggagaacatcgccgcccaggccctggagcacatccacagcaacgaggtgatcatgaccatcggcttcagcagaaccgtggaggccttcctgaaggaggccgccagaaagagaaagttccacgtgatcgtggccgagtgcgcccccttctgccagggccacgagatggccgtgaacctgagcaaggccggcatcgagaccaccgtgatgaccgacgccgccatcttcgccgtgatgagcagagtgaacaaggtgatcatcggcaccaagaccatcctggccaacggcgccctgagagccgtgaccggcacccacaccctggccctggccgccaagcaccacagcacccccctgatcgtgtgcgcccccatgttcaagctgagcccccagttccccaacgaggaggacagcttccacaagttcgtggcccccgaggaggtgctgcccttcaccgagggcgacatcctggagaaggtgagcgtgcactgccccgtgttcgactacgtgccccccgagctgatcaccctgttcatcagcaacatcggcggcaacgcccccagctacatctacagactgatgagcgagctgtaccaccccgacgaccacgtgctgtag

SEQ ID NO: 80870 - DNA, 1359 bp, synthetic construct
  misc_feature 1..1359: note = Description of Artificial Sequence: Synthetic coding sequence
  source 1..1359: mol_type = other DNA
atggagttccaggccgtggtgatggccgtgggcggcggcagcagaatgaccgacctgaccagcagcatccccaagcccctgctgcccgtgggcaacaagcccctgatctggtaccccctgaacctgctggagagagtgggcttcgaggaggtgatcgtggtgaccaccagagacgtgcagaaggccctgtgcgccgagttcaagatgaagatgaagcccgacatcgtgtgcatccccgacgacgccgacatgggcaccgccgacagcctgagatacatctaccccaagctgaagaccgacgtgctggtgctgagctgcgacctgatcaccgacgtggccctgcacgaggtggtggacctgttcagagcctacgacgccagcctggccatgctgatgagaaagggccaggacagcatcgagcccgtgcccggccagaagggcaagaagaaggccgtggagcagagagacttcatcggcgtggacagcaccggcaagagactgctgttcatggccaacgaggccgacctggacgaggagctggtgatcaagggcagcatcctgcagaagcaccccagaatcagattccacaccggcctggtggacgcccacctgtactgcctgaagaagtacatcgtggacttcctgatggagaacggcagcatcaccagcatcagaagcgagctgatcccctacctggtgagaaagcagttcagcagcgccagcagccagcagggccaggaggagaaggaggaggacctgaagaagaaggagctgaagagcctggacatctacagcttcatcaaggaggccaacaccctgaacctggccccctacgacgcctgctggaacgcctgcagaggcgacagatgggaggacctgagcagaagccaggtgagatgctacgtgcacatcatgaaggagggcctgtgcagcagagtgagcaccctgggcctgtacatggaggccaacagacaggtgcccaagctgctgagcgccctgtgccccgaggagccccccgtgcacagcagcgcccagatcgtgagcaagcacctggtgggcgtggacagcctgatcggccccgagacccagatcggcgagaagagcagcatcaagagaagcgtgatcggcagcagctgcctgatcaaggacagagtgaccatcaccaactgcctgctgatgaacagcgtgaccgtggaggagggcagcaacatccagggcagcgtgatctgcaacaacgccgtgatcgagaagggcgccgacatcaaggactgcctgatcggcagcggccagagaatcgaggccaaggccaagagagtgaacgaggtgatcgtgggcaacgaccagctgatggagatctag

SEQ ID NO: 80871 - DNA, 594 bp, synthetic construct
  misc_feature 1..594: note = Description of Artificial Sequence: Synthetic coding sequence
  source 1..594: mol_type = other DNA
atggagttccaggccgtggtgatggccgtgggcggcggcagcagaatgaccgacctgaccagcagcatccccaagcccctgctgcccgtgggcaacaagcccctgatctggtaccccctgaacctgctggagagagtgggcttcgaggaggtgatcgtggtgaccaccagagacgtgcagaaggccctgtgcgccgagttcaagatgaagatgaagcccgacatcgtgtgcatccccgacgacgccgacatgggcaccgccgacagcctgagatacatctaccccaagctgaagaccgacgtgctggtgctgagctgcgacctgatcaccgacgtggccctgcacgaggtggtggacctgttcagagcctacgacgccagcctggccatgctgatgagaaagggccaggacagcatcgagcccgtgcccggccagaagggcaagaagaaggccgacggcgacagcctgtgctgccaggccggcgtgcagtggcaccacctgggcagcctgcagagccccccccccggcttcaagcacttcacctgcctgagcctgcccagcagctgggactacatgcacatgcccccccactag

SEQ ID NO: 80872 - DNA, 1239 bp, synthetic construct
  misc_feature 1..1239: note = Description of Artificial Sequence: Synthetic coding sequence
  source 1..1239: mol_type = other DNA
atggagttccaggccgtggtgatggccgtgggcggcggcagcagaatgaccgacctgaccagcagcatccccaagcccctgctgcccgtgggcaacaagcccctgatctggtaccccctgaacctgctggagagagtgggcttcgaggaggtgatcgtggtgaccaccagagacgtgcagaaggccctgtgcgccgagttcaagatgaagatgaagcccgacatcgtgtgcatccccgacgacgccgacatgggcaccgccgacagcctgagatacatctaccccaagctgaagaccgacgtgctggtgctgagctgcgacctgatcaccgacgtggccctgcacgaggtggtggacctgttcagagcctacgacgccagcctggccatgctgatgagaaagggccaggacagcatcgagcccgtgcccggccagaagggcaagaagaaggccgtggagcagagagacttcatcggcgtggacagcaccggcaagagactgctgttcatggccaacgaggccgacctggacgaggagctggtgatcaagggcagcatcctgcagaagcaccccagaatcagattccacaccggcctggtggacgcccacctgtactgcctgaagaagtacatcgtggacttcctgatggagaacggcagcatcaccagcatcagaagcgagctgatcccctacctggtgagaaagcagttcagcagcgccagcagccagcagggccaggaggagaaggaggaggacctgaagaagaaggagctgaagagcctggacatctacagcttcatcaaggaggccaacaccctgaacctggccccctacgacgcctgctggaacgcctgcagaggcgacagatgggaggacctgagcagaagccaggtgagatgctacgtgcacatcatgaaggagggcctgtgcagcagagtgagcaccctgggcctgtacatggaggccaacagacaggtgcccaagctgctgagcgccctgtgccccgaggagccccccgtgcacagcagcgcccagatcgtgagcaagcacctggtgggcgtggacagcctgatcggccccgagacccagatcggcgagaagagcagcatcaagagaagcgtgatcggcagcagctgcctgatcaaggacagagtgaccatcaccaactgcctgctgatgaacagcgtgaccgtggaggagggctacgtgagcccctgcacccacctgagacagagatag

SEQ ID NO: 80873 - DNA, 669 bp, synthetic construct
  misc_feature 1..669: note = Description of Artificial Sequence: Synthetic coding sequence
  source 1..669: mol_type = other DNA
tgagtgatcaagggcagcatcctgcagaagcaccccagaatcagattccacaccggcctggtggacgcccacctgtactgcctgaagaagtacatcgtggacttcctgatggagaacggcagcatcaccagcatcagaagcgagctgatcccctacctggtgagaaagcagttcagcagcgccagcagccagcagggccaggaggagaaggaggaggacctgaagaagaaggagctgaagagcctggacatctacagcttcatcaaggaggccaacaccctgaacctggccccctacgacgcctgctggaacgcctgcagaggcgacagatgggaggacctgagcagaagccaggtgagatgctacgtgcacatcatgaaggagggcctgtgcagcagagtgagcaccctgggcctgtacatggaggccaacagacaggtgcccaagctgctgagcgccctgtgccccgaggagccccccgtgcacagcagcgcccagatcgtgagcaagcacctggtgggcgtggacagcctgatcggccccgagacccagatcggcgagaagagcagcatcaagagaagcgtgatcggcagcagctgcctgatcaaggacagagtgaccatcaccaactgcctgctgatgaacagcgtgaccgtggaggagggctag

SEQ ID NO: 80874 - DNA, 1572 bp, synthetic construct
  misc_feature 1..1572: note = Description of Artificial Sequence: Synthetic coding sequence
  source 1..1572: mol_type = other DNA
atggccgccgtggccgtggccgtgagagaggacagcggcagcggcatgaaggccgagctgccccccggccccggcgccgtgggcagagagatgaccaaggaggagaagctgcagctgagaaaggagaagaagcagcagaagaagaagagaaaggaggagaagggcgccgagcccgagaccggcagcgccgtgagcgccgcccagtgccaggtgggccccaccagagagctgcccgagagcggcatccagctgggcacccccagagagaaggtgcccgccggcagaagcaaggccgagctgagagccgagagaagagccaagcaggaggccgagagagccctgaagcaggccagaaagggcgagcagggcggccccccccccaaggccagccccagcaccgccggcgagacccccagcggcgtgaagagactgcccgagtacccccaggtggacgacctgctgctgagaagactggtgaagaagcccgagagacagcaggtgcccaccagaaaggactacggcagcaaggtgagcctgttcagccacctgccccagtacagcagacagaacagcctgacccagttcatgagcatccccagcagcgtgatccaccccgccatggtgagactgggcctgcagtacagccagggcctggtgagcggcagcaacgccagatgcatcgccctgctgagagccctgcagcaggtgatccaggactacaccaccccccccaacgaggagctgagcagagacctggtgaacaagctgaagccctacatgagcttcctgacccagtgcagacccctgagcgccagcatgcacaacgccatcaagttcctgaacaaggagatcaccagcgtgggcagcagcaagagagaggaggaggccaagagcgagctgagagccgccatcgacagatacgtgcaggagaagatcgtgctggccgcccaggccatcagcagattcgcctaccagaagatcagcaacggcgacgtgatcctggtgtacggctgcagcagcctggtgagcagaatcctgcaggaggcctggaccgagggcagaagattcagagtggtggtggtggacagcagaccctggctggagggcagacacaccctgagaagcctggtgcacgccggcgtgcccgccagctacctgctgatccccgccgccagctacgtgctgcccgaggtgagcaaggtgctgctgggcgcccacgccctgctggccaacggcagcgtgatgagcagagtgggcaccgcccagctggccctggtggccagagcccacaacgtgcccgtgctggtgtgctgcgagacctacaagttctgcgagagagtgcagaccgacgccttcgtgagcaacgagctggacgaccccgacgacctgcagtgcaagagaggcgagcacgtggccctggccaactggcagaaccacgccagcctgagactgctgaacctggtgtacgacgtgaccccccccgagctggtggacctggtgatcaccgagctgggcatgatcccctgcagcagcgtgcccgtggtgctgagagtgaagagcagcgaccagtag

SEQ ID NO: 80875 - DNA, 1563 bp, synthetic construct
  misc_feature 1..1563: note = Description of Artificial Sequence: Synthetic coding sequence
  source 1..1563: mol_type = other DNA
atggccgccgtggccgtggccgtgagagaggacagcggcagcggcatgaaggccgagagcccctgggcctgggtgggcagagagatgaccaaggaggagaagctgcagctgagaaaggagaagaagcagcagaagaagaagagaaaggaggagaagggcgccgagcccgagaccggcagcgccgtgagcgccgcccagtgccagggccccaccagagagctgcccgagagcggcatccagctgggcacccccagagagaaggtgcccgccggcagaagcaaggccgagctgagagccgagagaagagccaagcaggaggccgagagagccctgaagcaggccagaaagggcgagcagggcggccccccccccaaggccagccccagcaccgccggcgagacccccagcggcgtgaagagactgcccgagtacccccaggtggacgacctgctgctgagaagactggtgaagaagcccgagagacagcaggtgcccaccagaaaggactacggcagcaaggtgagcctgttcagccacctgccccagtacagcagacagaacagcctgacccagttcatgagcatccccagcagcgtgatccaccccgccatggtgagactgggcctgcagtacagccagggcctggtgagcggcagcaacgccagatgcatcgccctgctgagagccctgcagcaggtgatccaggactacaccaccccccccaacgaggagctgagcagagacctggtgaacaagctgaagccctacatgagcttcctgacccagtgcagacccctgagcgccagcatgcacaacgccatcaagttcctgaacaaggagatcaccagcgtgggcagcagcaagagagaggaggaggccaagagcgagctgagagccgccatcgacagatacgtgcaggagaagatcgtgctggccgcccaggccatcagcagattcgcctaccagaagatcagcaacggcgacgtgatcctggtgtacggctgcagcagcctggtgagcagaatcctgcaggaggcctggaccgagggcagaagattcagagtggtggtggtggacagcagaccctggctggagggcagacacaccctgagaagcctggtgcacgccggcgtgcccgccagctacctgctgatccccgccgccagctacgtgctgcccgaggtgagcaaggtgctgctgggcgcccacgccctgctggccaacggcagcgtgatgagcagagtgggcaccgcccagctggccctggtggccagagcccacaacgtgcccgtgctggtgtgctgcgagacctacaagttctgcgagagagtgcagaccgacgccttcgtgagcaacgagctggacgaccccgacgacctgcagtgcaagagaggcgagcacgtggccctggccaactggcagaaccacgccagcctgagactgctgaacctggtgtacgacgtgaccccccccgagctggtggacctggtgatcaccgagctgggcatgatcccctgcagcagcgtgcccgtggtgctgagagtgaagagcagcgaccagtag

SEQ ID NO: 80876 - DNA, 2166 bp, synthetic construct
  misc_feature 1..2166: note = Description of Artificial Sequence: Synthetic coding sequence
  source 1..2166: mol_type = other DNA
atggccgcccccgtggtggccccccccggcgtggtggtgagcagagccaacaagagaagcggcgccggccccggcggcagcggcggcggcggcgccagaggcgccgaggaggagccccccccccccctgcaggccgtgctggtggccgacagcttcgacagaagattcttccccatcagcaaggaccagcccagagtgctgctgcccctggccaacgtggccctgatcgactacaccctggagttcctgaccgccaccggcgtgcaggagaccttcgtgttctgctgctggaaggccgcccagatcaaggagcacctgctgaagagcaagtggtgcagacccaccagcctgaacgtggtgagaatcatcaccagcgagctgtacagaagcctgggcgacgtgctgagagacgtggacgccaaggccctggtgagaagcgacttcctgctggtgtacggcgacgtgatcagcaacatcaacatcaccagagccctggaggagcacagactgagaagaaagctggagaagaacgtgagcgtgatgaccatgatcttcaaggagagcagccccagccaccccaccagatgccacgaggacaacgtggtggtggccgtggacagcaccaccaacagagtgctgcacttccagaagacccagggcctgagaagattcgccttccccctgagcctgttccagggcagcagcgacggcgtggaggtgagatacgacctgctggactgccacatcagcatctgcagcccccaggtggcccagctgttcaccgacaacttcgactaccagaccagagacgacttcgtgagaggcctgctggtgaacgaggagatcctgggcaaccagatccacatgcacgtgaccgccaaggagtacggcgccagagtgagcaacctgcacatgtacagcgccgtgtgcgccgacgtgatcagaagatgggtgtaccccctgacccccgaggccaacttcaccgacagcaccacccagagctgcacccacagcagacacaacatctacagaggccccgaggtgagcctgggccacggcagcatcctggaggagaacgtgctgctgggcagcggcaccgtgatcggcagcaactgcttcatcaccaacagcgtgatcggccccggctgccacatcggcgacaacgtggtgctggaccagacctacctgtggcagggcgtgagagtggccgccggcgcccagatccaccagagcctgctgtgcgacaacgccgaggtgaaggagagagtgaccctgaagcccagaagcgtgctgaccagccaggtggtggtgggccccaacatcaccctgcccgagggcagcgtgatcagcctgcacccccccgacgccgaggaggacgaggacgacggcgagttcagcgacgacagcggcgccgaccaggagaaggacaaggtgaagatgaagggctacaaccccgccgaggtgggcgccgccggcaagggctacctgtggaaggccgccggcatgaacatggaggaggaggaggagctgcagcagaacctgtggggcctgaagatcaacatggaggaggagagcgagagcgagagcgagcagagcatggacagcgaggagcccgacagcagaggcggcagcccccagatggacgacatcaaggtgttccagaacgaggtgctgggcaccctgcagagaggcaaggaggagaacatcagctgcgacaacctggtgctggagatcaacagcctgaagtacgcctacaacatcagcctgaaggaggtgatgcaggtgctgagccacgtggtgctggagttccccctgcagcagatggacagccccctggacagcagcagatactgcgccctgctgctgcccctgctgaaggcctggagccccgtgttcagaaactacatcaagagagccgccgaccacctggaggccctggccgccatcgaggacttcttcctggagcacgaggccctgggcatcagcatggccaaggtgctgatggccttctaccagctggagatcctggccgaggagaccatcctgagctggttcagccagagagacaccaccgacaagggccagcagctgagaaagaaccagcagctgcagagattcatccagtggctgaaggaggccgaggaggagagcagcgaggacgactag

SEQ ID NO: 80877 - DNA, 1014 bp, synthetic construct
  misc_feature 1..1014: note = Description of Artificial Sequence: Synthetic coding sequence
  source 1..1014: mol_type = other DNA
cccccccagcccagcaagatgctgggcctgcaggtggcccagctgttcaccgacaacttcgactaccagaccagagacgacttcgtgagaggcctgctggtgaacgaggagatcctgggcaaccagatccacatgcacgtgaccgccaaggagtacggcgccagagtgagcaacctgcacatgtacagcgccgtgtgcgccgacgtgatcagaagatgggtgtaccccctgacccccgaggccaacttcaccgacagcaccacccagagctgcacccacagcagacacaacatctacagaggccccgaggtgagcctgggccacggcagcatcctggaggagaacgtgctgctgggcagcggcaccgtgatcggcagcaactgcttcatcaccaacagcgtgatcggccccggctgccacatcggcgacaacgtggtgctggaccagacctacctgtggcagggcgtgagagtggccgccggcgcccagatccaccagagcctgctgtgcgacaacgccgaggtgaaggagagagtgaccctgaagcccagaagcgtgctgaccagccaggtggtggtgggccccaacatcaccctgcccgagggcagcgtgatcagcctgcacccccccgacgccgaggaggacgaggacgacggcgagttcagcgacgacagcggcgccgaccaggagaaggacaaggtgaagatgaagggctacaaccccgccgaggtgggcgccgccggcaagggctacctgtggaaggccgccggcatgaacatggaggaggaggaggagctgcagcagaacctgtggggcctgaagatcaacatggaggaggagagcgagagcgagagcgagcagagcatggacagcgaggagcccgacagcagaggcggcagcccccagatggacgacatcaaggtgttccagaacgaggtgctgggcaccctgcagagaggcaaggaggagaacatcagctgcgacaacctggtgctggagatcaacagcctgtag

SEQ ID NO: 80878 - DNA, 2574 bp, synthetic construct
  misc_feature 1..2574: note = Description of Artificial Sequence: Synthetic coding sequence
  source 1..2574: mol_type = other DNA
atggaggccggccccagcggcgccgccgccggcgcctacctgccccccctgcagcaggtgttccaggcccccagaagacccggcatcggcaccgtgggcaagcccatcaagctgctggccaactacttcgaggtggacatccccaagatcgacgtgtaccactacgaggtggacatcaagcccgacaagtgccccagaagagtgaacagagaggtggtggagtacatggtgcagcacttcaagccccagatcttcggcgacagaaagcccgtgtacgacggcaagaagaacatctacaccgtgaccgccctgcccatcggcaacgagagagtggacttcgaggtgaccatccccggcgagggcaaggacagaatcttcaaggtgagcatcaagtggctggccatcgtgagctggagaatgctgcacgaggccctggtgagcggccagatccccgtgcccctggagagcgtgcaggccctggacgtggccatgagacacctggccagcatgagatacacccccgtgggcagaagcttcttcagcccccccgagggctactaccaccccctgggcggcggcagagaggtgtggttcggcttccaccagagcgtgagacccgccatgtggaagatgatgctgaacatcgacgtgagcgccaccgccttctacaaggcccagcccgtgatcgagttcatgtgcgaggtgctggacatcagaaacatcgacgagcagcccaagcccctgaccgacagccagagagtgagattcaccaaggagatcaagggcctgaaggtggaggtgacccactgcggccagatgaagagaaagtacagagtgtgcaacgtgaccagaagacccgccagccaccagaccttccccctgcagctggagagcggccagaccgtggagtgcaccgtggcccagtacttcaagcagaagtacaacctgcagctgaagtacccccacctgccctgcctgcaggtgggccaggagcagaagcacacctacctgcccctggaggtgtgcaacatcgtggccggccagagatgcatcaagaagctgaccgacaaccagaccagcaccatgatcaaggccaccgccagaagcgcccccgacagacaggaggagatcagcagactgatgaagaacgccagctacaacctggacccctacatccaggagttcggcatcaaggtgaaggacgacatgaccgaggtgaccggcagagtgctgcccgcccccatcctgcagtacggcggcagaaacagagccatcgccacccccaaccagggcgtgtgggacatgagaggcaagcagttctacaacggcatcgagatcaaggtgtgggccatcgcctgcttcgccccccagaagcagtgcagagaggaggtgctgaagaacttcaccgaccagctgagaaagatcagcaaggacgccggcatgcccatccagggccagccctgcttctgcaagtacgcccagggcgccgacagcgtggagcccatgttcagacacctgaagaacacctacagcggcctgcagctgatcatcgtgatcctgcccggcaagacccccgtgtacgccgaggtgaagagagtgggcgacaccctgctgggcatggccacccagtgcgtgcaggtgaagaacgtggtgaagaccagcccccagaccctgagcaacctgtgcctgaagatcaacgtgaagctgggcggcatcaacaacatcctggtgccccaccagagaagcgccgtgttccagcagcccgtgatcttcctgggcgccgacgtgacccacccccccgccggcgacggcaagaagcccagcatcaccgccgtggtgggcagcatggacgcccaccccagcagatactgcgccaccgtgagagtgcagagacccagacaggagatcatcgaggacctgagctacatggtgagagagctgctgatccagttctacaagagcaccagattcaagcccaccagaatcatcttctacagagacggcgtgcccgagggccagctgccccagatcctgcactacgagctgctggccatcagagacgcctgcatcaagctggagaaggactaccagcccggcatcacctacatcgtggtgcagaagagacaccacaccagactgttctgcgccgacaagaacgagagaatcggcaagagcggcaacatccccgccggcaccaccgtggacaccaacatcacccaccccttcgagttcgacttctacctgtgcagccacgccggcatccagggcaccagcagacccagccactactacgtgctgtgggacgacaacagattcaccgccgacgagctgcagatcctgacctaccagctgtgccacacctacgtgagatgcaccagaagcgtgagcatccccgcccccgcctactacgccagactggtggccttcagagccagataccacctggtggacaaggagcacgacagcggcgagggcagccacatcagcggccagagcaacggcagagacccccaggccctggccaaggccgtgcaggtgcaccaggacaccctgagaaccatgtacttcgcctag

SEQ ID NO: 80879 - DNA, 2349 bp, synthetic construct
  misc_feature 1..2349: note = Description of Artificial Sequence: Synthetic coding sequence
  source 1..2349: mol_type = other DNA
atggtgcagcacttcaagccccagatcttcggcgacagaaagcccgtgtacgacggcaagaagaacatctacaccgtgaccgccctgcccatcggcaacgagagagtggacttcgaggtgaccatccccggcgagggcaaggacagaatcttcaaggtgagcatcaagtggctggccatcgtgagctggagaatgctgcacgaggccctggtgagcggccagatccccgtgcccctggagagcgtgcaggccctggacgtggccatgagacacctggccagcatgagatacacccccgtgggcagaagcttcttcagcccccccgagggctactaccaccccctgggcggcggcagagaggtgtggttcggcttccaccagagcgtgagacccgccatgtggaagatgatgctgaacatcgacgtgagcgccaccgccttctacaaggcccagcccgtgatcgagttcatgtgcgaggtgctggacatcagaaacatcgacgagcagcccaagcccctgaccgacagccagagagtgagattcaccaaggagatcaagggcctgaaggtggaggtgacccactgcggccagatgaagagaaagtacagagtgtgcaacgtgaccagaagacccgccagccaccagaccttccccctgcagctggagagcggccagaccgtggagtgcaccgtggcccagtacttcaagcagaagtacaacctgcagctgaagtacccccacctgccctgcctgcaggtgggccaggagcagaagcacacctacctgcccctggaggtgtgcaacatcgtggccggccagagatgcatcaagaagctgaccgacaaccagaccagcaccatgatcaaggccaccgccagaagcgcccccgacagacaggaggagatcagcagactgatgaagaacgccagctacaacctggacccctacatccaggagttcggcatcaaggtgaaggacgacatgaccgaggtgaccggcagagtgctgcccgcccccatcctgcagtacggcggcagaaacagagccatcgccacccccaaccagggcgtgtgggacatgagaggcaagcagttctacaacggcatcgagatcaaggtgtgggccatcgcctgcttcgccccccagaagcagtgcagagaggaggtgctgaagaacttcaccgaccagctgagaaagatcagcaaggacgccggcatgcccatccagggccagccctgcttctgcaagtacgcccagggcgccgacagcgtggagcccatgttcagacacctgaagaacacctacagcggcctgcagctgatcatcgtgatcctgcccggcaagacccccgtgtacgccgaggtgaagagagtgggcgacaccctgctgggcatggccacccagtgcgtgcaggtgaagaacgtggtgaagaccagcccccagaccctgagcaacctgtgcctgaagatcaacgtgaagctgggcggcatcaacaacatcctggtgccccaccagagaagcgccgtgttccagcagcccgtgatcttcctgggcgccgacgtgacccacccccccgccggcgacggcaagaagcccagcatcaccgccgtggtgggcagcatggacgcccaccccagcagatactgcgccaccgtgagagtgcagagacccagacaggagatcatcgaggacctgagctacatggtgagagagctgctgatccagttctacaagagcaccagattcaagcccaccagaatcatcttctacagagacggcgtgcccgagggccagctgccccagatcctgcactacgagctgctggccatcagagacgcctgcatcaagctggagaaggactaccagcccggcatcacctacatcgtggtgcagaagagacaccacaccagactgttctgcgccgacaagaacgagagaatcggcaagagcggcaacatccccgccggcaccaccgtggacaccaacatcacccaccccttcgagttcgacttctacctgtgcagccacgccggcatccagggcaccagcagacccagccactactacgtgctgtgggacgacaacagattcaccgccgacgagctgcagatcctgacctaccagctgtgccacacctacgtgagatgcaccagaagcgtgagcatccccgcccccgcctactacgccagactggtggccttcagagccagataccacctggtggacaaggagcacgacagcggcgagggcagccacatcagcggccagagcaacggcagagacccccaggccctggccaaggccgtgcaggtgcaccaggacaccctgagaaccatgtacttcgcctag

SEQ ID NO: 80880 - DNA, 1254 bp, synthetic construct
  misc_feature 1..1254: note = Description of Artificial Sequence: Synthetic coding sequence
  source 1..1254: mol_type = other DNA
atggagttcgtgaagtgcctgggccaccccgaggagttctacaacctggtgagattcagaatcggcggcaagagaaaggtgatgcccaagatggaccaggacagcctgagcagcagcctgaagacctgctacaagtacctgaaccagaccagcagaagcttcgccgccgtgatccaggccctggacggcgagatgagaaacgccgtgtgcatcttctacctggtgctgagagccctggacaccctggaggacgacatgaccatcagcgtggagaagaaggtgcccctgctgcacaacttccacagcttcctgtaccagcccgactggagattcatggagagcaaggagaaggacagacaggtgctggaggacttccccaccatcagcctggagttcagaaacctggccgagaagtaccagaccgtgatcgccgacatctgcagaagaatgggcatcggcatggccgagttcctggacaagcacgtgaccagcgagcaggagtgggacaagtactgccactacgtggccggcctggtgggcatcggcctgagcagactgttcagcgccagcgagttcgaggaccccctggtgggcgaggacaccgagagagccaacagcatgggcctgttcctgcagaagaccaacatcatcagagactacctggaggaccagcagggcggcagagagttctggccccaggaggtgtggagcagatacgtgaagaagctgggcgacttcgccaagcccgagaacatcgacctggccgtgcagtgcctgaacgagctgatcaccaacgccctgcaccacatccccgacgtgatcacctacctgagcagactgagaaaccagagcgtgttcaacttctgcgccatcccccaggtgatggccatcgccaccctggccgcctgctacaacaaccagcaggtgttcaagggcgccgtgaagatcagaaagggccaggccgtgaccctgatgatggacgccaccaacatgcccgccgtgaaggccatcatctaccagtacatggaggagatctaccacagaatccccgacagcgaccccagcagcagcaagaccagacagatcatcagcaccatcagaacccagaacctgcccaactgccagctgatcagcagaagccactacagccccatctacctgagcttcgtgatgctgctggccgccctgagctggcagtacctgaccaccctgagccaggtgaccgaggactacgtgcagaccggcgagcactag

SEQ ID NO: 80881 - DNA, 2478 bp, synthetic construct
  misc_feature 1..2478: note = Description of Artificial Sequence: Synthetic coding sequence
  source 1..2478: mol_type = other DNA
atgtacagcggcgccggccccgccctggccccccccgccccccccccccccatccagggctacgccttcaagcccccccccagacccgacttcggcaccagcggcagaaccatcaagctgcaggccaacttcttcgagatggacatccccaagatcgacatctaccactacgagctggacatcaagcccgagaagtgccccagaagagtgaacagagagatcgtggagcacatggtgcagcacttcaagacccagatcttcggcgacagaaagcccgtgttcgacggcagaaagaacctgtacaccgccatgcccctgcccatcggcagagacaaggtggagctggaggtgaccctgcccggcgagggcaaggacagaatcttcaaggtgagcatcaagtgggtgagctgcgtgagcctgcaggccctgcacgacgccctgagcggcagactgcccagcgtgcccttcgagaccatccaggccctggacgtggtgatgagacacctgcccagcatgagatacacccccgtgggcagaagcttcttcaccgccagcgagggctgcagcaaccccctgggcggcggcagagaggtgtggttcggcttccaccagagcgtgagacccagcctgtggaagatgatgctgaacatcgacgtgagcgccaccgccttctacaaggcccagcccgtgatcgagttcgtgtgcgaggtgctggacttcaagagcatcgaggagcagcagaagcccctgaccgacagccagagagtgaagttcaccaaggagatcaagggcctgaaggtggagatcacccactgcggccagatgaagagaaagtacagagtgtgcaacgtgaccagaagacccgccagccaccagaccttccccctgcagcaggagagcggccagaccgtggagtgcaccgtggcccagtacttcaaggacagacacaagctggtgctgagatacccccacctgccctgcctgcaggtgggccaggagcagaagcacacctacctgcccctggaggtgtgcaacatcgtggccggccagagatgcatcaagaagctgaccgacaaccagaccagcaccatgatcagagccaccgccagaagcgcccccgacagacaggaggagatcagcaagctgatgagaagcgccagcttcaacaccgacccctacgtgagagagttcggcatcatggtgaaggacgagatgaccgacgtgaccggcagagtgctgcagccccccagcatcctgtacggcggcagaaacaaggccatcgccacccccgtgcagggcgtgtgggacatgagaaacaagcagttccacaccggcatcgagatcaaggtgtgggccatcgcctgcttcgccccccagagacagtgcaccgaggtgcacctgaagagcttcaccgagcagctgagaaagatcagcagagacgccggcatgcccatccagggccagccctgcttctgcaagtacgcccagggcgccgacagcgtggagcccatgttcagacacctgaagaacacctacgccggcctgcagctggtggtggtgatcctgcccggcaagacccccgtgtacgccgaggtgaagagagtgggcgacaccgtgctgggcatggccacccagtgcgtgcagatgaagaacgtgcagagaaccaccccccagaccctgagcaacctgtgcctgaagatcaacgtgaagctgggcggcgtgaacaacatcctgctgccccagggcagaccccccgtgttccagcagcccgtgatcttcctgggcgccgacgtgacccacccccccgccggcgacggcaagaagcccagcatcgccgccgtggtgggcagcatggacgcccaccccaacagatactgcgccaccgtgagagtgcagcagcacagacaggagatcatccaggacctggccgccatggtgagagagctgctgatccagttctacaagagcaccagattcaagcccaccagaatcatcttctacagagacggcgtgagcgagggccagttccagcaggtgctgcaccacgagctgctggccatcagagaggcctgcatcaagctggagaaggactaccagcccggcatcaccttcatcgtggtgcagaagagacaccacaccagactgttctgcaccgacaagaacgagagaggcaccagcagacccagccactaccacgtgctgtgggacgacaacagattcagcagcgacgagctgcagatcctgacctaccagctgtgccacacctacgtgagatgcaccagaagcgtgagcatccccgcccccgcctactacgcccacctggtggccttcagagccagataccacctggtggacaaggagcacgacagcgccgagggcagccacaccagcggccagagcaacggcagagaccaccaggccctggccaaggccgtgcaggtgcaccaggacaccctgagaaccatgtacttcgcctag

SEQ ID NO: 80882 - DNA, 1881 bp, synthetic construct
  misc_feature 1..1881: note = Description of Artificial Sequence: Synthetic coding sequence
  source 1..1881: mol_type = other DNA
atgtgcgaggtgctggacatccacaacatcgacgagcagcccagacccctgaccgacagccacagagtgaagttcaccaaggagatcaagggcctgaaggtggaggtgacccactgcggcaccatgagaagaaagtacagagtgtgcaacgtgaccagaagacccgccagccaccagaccttccccctgcagctggagaacggccagaccgtggagagaaccgtggcccagtacttcagagagaagtacaccctgcagctgaagtacccccacctgccctgcctgcaggtgggccaggagcagaagcacacctacctgcccctggaggtgtgcaacatcgtggccggccagagatgcatcaagaagctgaccgacaaccagaccagcaccatgatcaaggccaccgccagaagcgcccccgacagacaggaggagatcagcagactggtgagaagcgccaactacgagaccgaccccttcgtgcaggagttccagttcaaggtgagagacgagatggcccacgtgaccggcagagtgctgcccgcccccatgctgcagtacggcggcagaaacagaaccgtggccacccccagccacggcgtgtgggacatgagaggcaagcagttccacaccggcgtggagatcaagatgtgggccatcgcctgcttcgccacccagagacagtgcagagaggagatcctgaagggcttcaccgaccagctgagaaagatcagcaaggacgccggcatgcccatccagggccagccctgcttctgcaagtacgcccagggcgccgacagcgtggagcccatgttcagacacctgaagaacacctacagcggcctgcagctgatcatcgtgatcctgcccggcaagacccccgtgtacgccgaggtgaagagagtgggcgacaccctgctgggcatggccacccagtgcgtgcaggtgaagaacgtgatcaagaccagcccccagaccctgagcaacctgtgcctgaagatcaacgtgaagctgggcggcatcaacaacatcctggtgccccaccagagacccagcgtgttccagcagcccgtgatcttcctgggcgccgacgtgacccacccccccgccggcgacggcaagaagcccagcatcgccgccgtggtgggcagcatggacgcccaccccagcagatactgcgccaccgtgagagtgcagagacccagacaggagatcatccaggacctggccagcatggtgagagagctgctgatccagttctacaagagcaccagattcaagcccaccagaatcatcttctacagagacggcgtgagcgagggccagttcagacaggtgctgtactacgagctgctggccatcagagaggcctgcatcagcctggagaaggactaccagcccggcatcacctacatcgtggtgcagaagagacaccacaccagactgttctgcgccgacagaaccgagagagtgggcagaagcggcaacatccccgccggcaccaccgtggacaccgacatcacccacccctacgagttcgacttctacctgtgcagccacgccggcatccagggcaccagcagacccagccactaccacgtgctgtgggacgacaactgcttcaccgccgacgagctgcagctgctgacctaccagctgtgccacacctacgtgagatgcaccagaagcgtgagcatccccgcccccgcctactacgcccacctggtggccttcagagccagataccacctggtggacaaggagcacgacagcgccgagggcagccacgtgagcggccagagcaacggcagagacccccaggccctggccaaggccgtgcagatccaccaggacaccctgagaaccatgtacttcgcctag

SEQ ID NO: 80883 - DNA, 690 bp, synthetic construct
  misc_feature 1..690: note = Description of Artificial Sequence: Synthetic coding sequence
  source 1..690: mol_type = other DNA
atggagatcggcagcgccggccccgccggcgcccagcccctgctgatggtgcccagaagacccggctacggcaccatgggcaagcccatcaagctgctggccaactgcttccaggtggagatccccaagatcgacgtgtacctgtacgaggtggacatcaagcccgacaagtgccccagaagagtgaacagagaggtggtggacagcatggtgcagcacttcaaggtgaccatcttcggcgacagaagacccgtgtacgacggcaagagaagcctgtacaccgccaaccccctgcccgtggccaccaccggcgtggacctggacgtgaccctgcccggcgagggcggcaaggacagacccttcaaggtgagcatcaagttcgtgagcagagtgagctggcacctgctgcacgaggtgctgaccggcagaaccctgcccgagcccctggagctggacaagcccatcagcaccaaccccgtgcacgccgtggacgtggtgctgagacacctgcccagcatgaagtacacccccgtgggcagaagcttcttcagcgcccccgagggctacgaccaccccctgggcggcggcagagaggtgtggttcggcttccaccagagcgtgagacccgccatgtggaagatgatgctgaacatcgacgagagagacctgtggcagcagtgcggcgagtag

SEQ ID NO: 80884 - DNA, 2583 bp, synthetic construct
  misc_feature 1..2583: note = Description of Artificial Sequence: Synthetic coding sequence
  source 1..2583: mol_type = other DNA
atggagatcggcagcgccggccccgccggcgcccagcccctgctgatggtgcccagaagacccggctacggcaccatgggcaagcccatcaagctgctggccaactgcttccaggtggagatccccaagatcgacgtgtacctgtacgaggtggacatcaagcccgacaagtgccccagaagagtgaacagagaggtggtggacagcatggtgcagcacttcaaggtgaccatcttcggcgacagaagacccgtgtacgacggcaagagaagcctgtacaccgccaaccccctgcccgtggccaccaccggcgtggacctggacgtgaccctgcccggcgagggcggcaaggacagacccttcaaggtgagcatcaagttcgtgagcagagtgagctggcacctgctgcacgaggtgctgaccggcagaaccctgcccgagcccctggagctggacaagcccatcagcaccaaccccgtgcacgccgtggacgtggtgctgagacacctgcccagcatgaagtacacccccgtgggcagaagcttcttcagcgcccccgagggctacgaccaccccctgggcggcggcagagaggtgtggttcggcttccaccagagcgtgagacccgccatgtggaagatgatgctgaacatcgacgtgagcgccaccgccttctacaaggcccagcccgtgatccagttcatgtgcgaggtgctggacatccacaacatcgacgagcagcccagacccctgaccgacagccacagagtgaagttcaccaaggagatcaagggcctgaaggtggaggtgacccactgcggcaccatgagaagaaagtacagagtgtgcaacgtgaccagaagacccgccagccaccagaccttccccctgcagctggagaacggccagaccgtggagagaaccgtggcccagtacttcagagagaagtacaccctgcagctgaagtacccccacctgccctgcctgcaggtgggccaggagcagaagcacacctacctgcccctggaggtgtgcaacatcgtggccggccagagatgcatcaagaagctgaccgacaaccagaccagcaccatgatcaaggccaccgccagaagcgcccccgacagacaggaggagatcagcagactggtgagaagcgccaactacgagaccgaccccttcgtgcaggagttccagttcaaggtgagagacgagatggcccacgtgaccggcagagtgctgcccgcccccatgctgcagtacggcggcagaaacagaaccgtggccacccccagccacggcgtgtgggacatgagaggcaagcagttccacaccggcgtggagatcaagatgtgggccatcgcctgcttcgccacccagagacagtgcagagaggagatcctgaagggcttcaccgaccagctgagaaagatcagcaaggacgccggcatgcccatccagggccagccctgcttctgcaagtacgcccagggcgccgacagcgtggagcccatgttcagacacctgaagaacacctacagcggcctgcagctgatcatcgtgatcctgcccggcaagacccccgtgtacgccgaggtgaagagagtgggcgacaccctgctgggcatggccacccagtgcgtgcaggtgaagaacgtgatcaagaccagcccccagaccctgagcaacctgtgcctgaagatcaacgtgaagctgggcggcatcaacaacatcctggtgccccaccagagacccagcgtgttccagcagcccgtgatcttcctgggcgccgacgtgacccacccccccgccggcgacggcaagaagcccagcatcgccgccgtggtgggcagcatggacgcccaccccagcagatactgcgccaccgtgagagtgcagagacccagacaggagatcatccaggacctggccagcatggtgagagagctgctgatccagttctacaagagcaccagattcaagcccaccagaatcatcttctacagagacggcgtgagcgagggccagttcagacaggtgctgtactacgagctgctggccatcagagaggcctgcatcagcctggagaaggactaccagcccggcatcacctacatcgtggtgcagaagagacaccacaccagactgttctgcgccgacagaaccgagagagtgggcagaagcggcaacatccccgccggcaccaccgtggacaccgacatcacccacccctacgagttcgacttctacctgtgcagccacgccggcatccagggcaccagcagacccagccactaccacgtgctgtgggacgacaactgcttcaccgccgacgagctgcagctgctgacctaccagctgtgccacacctacgtgagatgcaccagaagcgtgagcatccccgcccccgcctactacgcccacctggtggccttcagagccagataccacctggtggacaaggagcacgacagcgccgagggcagccacgtgagcggccagagcaacggcagagacccccaggccctggccaaggccgtgcagatccaccaggacaccctgagaaccatgtacttcgcctag

SEQ ID NO: 80885 - DNA, 690 bp, synthetic construct; identical to SEQ ID NO: 80883
  misc_feature 1..690: note = Description of Artificial Sequence: Synthetic coding sequence
  source 1..690: mol_type = other DNA

SEQ ID NO: 80886 - DNA, 2586 bp, synthetic construct
  misc_feature 1..2586: note = Description of Artificial Sequence: Synthetic coding sequence
  source 1..2586: mol_type = other DNA
atggaggccctgggccccggcccccccgccagcctgttccagccccccagaagacccggcctgggcaccgtgggcaagcccatcagactgctggccaaccacttccaggtgcagatccccaagatcgacgtgtaccactacgacgtggacatcaagcccgagaagagacccagaagagtgaacagagaggtggtggacaccatggtgagacacttcaagatgcagatcttcggcgacagacagcccggctacgacggcaagagaaacatgtacaccgcccaccccctgcccatcggcagagacagagtggacatggaggtgaccctgcccggcgagggcaaggaccagaccttcaaggtgagcgtgcagtgggtgagcgtggtgagcctgcagctgctgctggaggccctggccggccacctgaacgaggtgcccgacgacagcgtgcaggccctggacgtgatcaccagacacctgcccagcatgagatacacccccgtgggcagaagcttcttcagcccccccgagggctactaccaccccctgggcggcggcagagaggtgtggttcggcttccaccagagcgtgagacccgccatgtggaacatgatgctgaacatcgacgtgagcgccaccgccttctacagagcccagcccatcatcgagttcatgtgcgaggtgctggacatccagaacatcaacgagcagaccaagcccctgaccgacagccagagagtgaagttcaccaaggagatcagaggcctgaaggtggaggtgacccactgcggccagatgaagagaaagtacagagtgtgcaacgtgaccagaagacccgccagccaccagaccttccccctgcagctggagaacggccaggccatggagtgcaccgtggcccagtacttcaagcagaagtacagcctgcagctgaagtacccccacctgccctgcctgcaggtgggccaggagcagaagcacacctacctgcccctggaggtgtgcaacatcgtggccggccagagatgcatcaagaagctgaccgacaaccagaccagcaccatgatcaaggccaccgccagaagcgcccccgacagacaggaggagatcagcagactggtgaagagcaacagcatggtgggcggccccgacccctacctgaaggagttcggcatcgtggtgcacaacgagatgaccgagctgaccggcagagtgctgcccgcccccatgctgcagtacggcggcagaaacaagaccgtggccacccccaaccagggcgtgtgggacatgagaggcaagcagttctacgccggcatcgagatcaaggtgtgggccgtggcctgcttcgccccccagaagcagtgcagagaggacctgctgaagagcttcaccgaccagctgagaaagatcagcaaggacgccggcatgcccatccagggccagccctgcttctgcaagtacgcccagggcgccgacagcgtggagcccatgttcaagcacctgaagatgacctacgtgggcctgcagctgatcgtggtgatcctgcccggcaagacccccgtgtacgccgaggtgaagagagtgggcgacaccctgctgggcatggccacccagtgcgtgcaggtgaagaacgtggtgaagaccagcccccagaccctgagcaacctgtgcctgaagatcaacgccaagctgggcggcatcaacaacgtgctggtgccccaccagagacccagcgtgttccagcagcccgtgatcttcctgggcgccgacgtgacccacccccccgccggcgacggcaagaagcccagcatcgccgccgtggtgggcagcatggacggccaccccagcagatactgcgccaccgtgagagtgcagaccagcagacaggagatcagccaggagctgctgtacagccaggaggtgatccaggacctgaccaacatggtgagagagctgctgatccagttctacaagagcaccagattcaagcccaccagaatcatctactacagaggcggcgtgagcgagggccagatgaagcaggtggcctggcccgagctgatcgccatcagaaaggcctgcatcagcctggaggaggactacagacccggcatcacctacatcgtggtgcagaagagacaccacaccagactgttctgcgccgacaagaccgagagagtgggcaagagcggcaacgtgcccgccggcaccaccgtggacagcaccatcacccaccccagcgagttcgacttctacctgtgcagccacgccggcatccagggcaccagcagacccagccactaccaggtgctgtgggacgacaactgcttcaccgccgacgagctgcagctgctgacctaccagctgtgccacacctacgtgagatgcaccagaagcgtgagcatccccgcccccgcctactacgccagactggtggccttcagagccagataccacctggtggacaaggaccacgacagcgccgagggcagccacgtgagcggccagagcaacggcagagacccccaggccctggccaaggccgtgcagatccaccacgacacccagcacaccatgtacttcgcctag

SEQ ID NO: 80887 - DNA, 1755 bp, synthetic construct
  misc_feature 1..1755: note = Description of Artificial Sequence: Synthetic coding sequence
  source 1..1755: mol_type = other DNA
atgttcgccaaggccttcagagtgaagagcaacaccgccatcaagggcagcgacagaagaaagctgagagccgacgtgaccaccgccttccccaccctgggcaccgaccaggtgagcgagctggtgcccggcaaggaggagctgaacatcgtgaagctgtacgcccacaagggcgacgccgtgaccgtgtacgtgagcggcggcaaccccatcctgttcgagctggagaagaacctgtaccccaccgtgtacaccctgtggagctaccccgacctgctgcccaccttcaccacctggcccctggtgctggagaagctggtgggcggcgccgacctgatgctgcccggcctggtgatgccccccgccggcctgccccaggtgcagaagggcgacctgtgcgccatcagcctggtgggcaacagagcccccgtggccatcggcgtggccgccatgagcaccgccgagatgctgaccagcggcctgaagggcagaggcttcagcgtgctgcacacctaccaggaccacctgtggagaagcggcaacaagagcagcccccccagcatcgcccccctggccctggacagcgccgacctgagcgaggagaagggcagcgtgcagatggacagcaccctgcagggcgacatgagacacatgaccctggagggcgaggaggagaacggcgaggtgcaccaggccagagaggacaagagcctgagcgaggcccccgaggacaccagcaccagaggcctgaaccaggacagcaccgacagcaagaccctgcaggagcagatggacgagctgctgcagcagtgcttcctgcacgccctgaagtgcagagtgaagaaggccgacctgcccctgctgaccagcaccttcctgggcagccacatgttcagctgctgccccgagggcagacagctggacatcaagaagagcagctacaagaagctgagcaagttcctgcagcagatgcagcaggagcagatcatccaggtgaaggagctgagcaagggcgtggagagcatcgtggccgtggactggaagcaccccagaatcaccagcttcgtgatccccgagcccagccccaccagccagaccatccaggagggcagcagagagcagccctaccacccccccgacatcaagcccctgtactgcgtgcccgccagcatgaccctgctgttccaggagagcggccacaagaagggcagcttcctggagggcagcgaggtgagaaccatcgtgatcaactacgccaagaagaacgacctggtggacgccgacaacaagaacctggtgagactggaccccatcctgtgcgactgcatcctggagaagaacgagcagcacaccgtgatgaagctgccctgggacagcctgctgaccagatgcctggagaagctgcagcccgcctaccaggtgaccctgcccggccaggagcccatcgtgaagaagggcagaatctgccccatcgacatcaccctggcccagagagccagcaacaagaaggtgaccgtggtgagaaacctggaggcctacggcctggacccctacagcgtggccgccatcctgcagcagagatgccaggccagcaccaccgtgaaccccgcccccggcgccaaggacagcctgcaggtgcagatccagggcaaccaggtgcaccacctgggctggctgctgctggaggagtaccagctgcccagaaagcacatccagggcctggagaaggccctgaagcccggcaagaagaagtag

SEQ ID NO: 80888 - DNA, 816 bp, synthetic construct
  misc_feature 1..816: note = Description of Artificial Sequence: Synthetic coding sequence
  source 1..816: mol_type = other DNA
atgttcgccaaggccttcagagtgaagagcaacaccgccatcaagggcagcgacagaagaaagctgagagccgacgtgaccaccgccttccccaccctgggcaccgaccaggtgagcgagctggtgcccggcaaggaggagctgaacatcgtgaagctgtacgcccacaagggcgacgccgtgaccgtgtacgtgagcggcggcaaccccatcctgttcgagctggagaagaacctgtaccccaccgacctgatgctgcccggcctggtgatgccccccgccggcctgccccaggtgcagaagggcgacctgtgcgccatcagcctggtgggcaacagagcccccgtggccatcggcgtggccgccatgagcaccgccgagatgctgaccagcggcctgaagggcagaggcttcagcgtgctgcacacctaccaggaccacctgtggagaagcggcaacaagagcagcccccccagcatcgcccccctggccctggacagcgccgacctgagcgaggagaagggcagcgtgcagatggacagcaccctgcagggcgacatgagacacatgaccctggagggcgaggaggagaacggcgaggtgcaccaggccagagaggacaagagcctgagcgaggcccccgaggacaccagcaccagaggcctgaaccaggacagcaccgacagcaagaccctgcaggagcagatggacgagctgctgcagcagtgcttcctgcacgccctgaagtgcagagtgaagaaggccgacctgcccctgctgaccagcaccttcctgggcagccacatgttcagctag

SEQ ID NO: 80889 - DNA, 1383 bp, synthetic construct
  misc_feature 1..1383: note = Description of Artificial Sequence: Synthetic coding sequence
  source 1..1383: mol_type = other DNA
atgttcgccaaggccttcagagtgaagagcaacaccgccatcaagggcagcgacagaagaaagctgagagccgacgtgaccaccgccttccccaccctgggcaccgaccaggtgagcgagctggtgcccggcaaggaggagctgaacatcgtgaagctgtacgcccacaagggcgacgccgtgaccgtgtacgtgagcggcggcaaccccatcctgttcgagctggagaagaacctgtaccccaccgtgtacaccctgtggagctaccccgacctgctgcccaccttcaccacctggcccctggtgctggagaagctggtgggcggcgccgacctgatgctgcccggcctggtgatgccccccgccggcctgccccaggtgcagaagggcgacctgtgcgccatcagcctggtgggcaacagagcccccgtggccatcggcgtggccgccatgagcaccgccgagatgctgaccagcggcctgaagggcagaggcttcagcgtgctgcacacctaccaggaccacctgtgccccgagggcagacagctggacatcaagaagagcagctacaagaagctgagcaagttcctgcagcagatgcagcaggagcagatcatccaggtgaaggagctgagcaagggcgtggagagcatcgtggccgtggactggaagcaccccagaatcaccagcttcgtgatccccgagcccagccccaccagccagaccatccaggagggcagcagagagcagccctaccacccccccgacatcaagcccctgtactgcgtgcccgccagcatgaccctgctgttccaggagagcggccacaagaagggcagcttcctggagggcagcgaggtgagaaccatcgtgatcaactacgccaagaagaacgacctggtggacgccgacaacaagaacctggtgagactggaccccatcctgtgcgactgcatcctggagaagaacgagcagcacaccgtgatgaagctgccctgggacagcctgctgaccagatgcctggagaagctgcagcccgcctaccaggtgaccctgcccggccaggagcccatcgtgaagaagggcagaatctgccccatcgacatcaccctggcccagagagccagcaacaagaaggtgaccgtggtgagaaacctggaggcctacggcctggacccctacagcgtggccgccatcctgcagcagagatgccaggccagcaccaccgtgaaccccgcccccggcgccaaggacagcctgcaggtgcagatccagggcaaccaggtgcaccacctgggctggctgctgctggaggagtaccagctgcccagaaagcacatccagggcctggagaaggccctgaagcccggcaagaagaagtag

SEQ ID NO: 80890 - DNA, 816 bp, synthetic construct; identical to SEQ ID NO: 80888
  misc_feature 1..816: note = Description of Artificial Sequence: Synthetic coding sequence
  source 1..816: mol_type = other DNA

SEQ ID NO: 80891 - DNA, 2742 bp, synthetic construct
  misc_feature 1..2742: note = Description of Artificial Sequence: Synthetic coding sequence
  source 1..2742: mol_type = other DNA
atgagcagattcttcaccaccggcagcgacagcgagagcgagagcagcctgagcggcgaggagctggtgaccaagcccgtgggcggcaactacggcaagcagcccctgctgctgagcgaggacgaggaggacaccaagagagtggtgagaagcgccaaggacaagagattcgaggagctgaccaacctgatcagaaccatcagaaacgccatgaagatcagagacgtgaccaagtgcctggaggagttcgagctgctgggcaaggcctacggcaaggccaagagcatcgtggacaaggagggcgtgcccagattctacatcagaatcctggccgacctggaggactacctgaacgagctgtgggaggacaaggagggcaagaagaagatgaacaagaacaacgccaaggccctgagcaccctgagacagaagatcagaaagtacaacagagacttcgagagccacatcaccagctacaagcagaaccccgagcagagcgccgacgaggacgccgagaagaacgaggaggacagcgagggcagcagcgacgaggacgaggacgaggacggcgtgagcgccgccaccttcctgaagaagaagagcgaggcccccagcggcgagagcagaaagttcctgaagaagatggacgacgaggacgaggacagcgaggacagcgaggacgacgaggactgggacaccggcagcaccagcagcgacagcgacagcgaggaggaggagggcaagcagaccgccctggccagcagattcctgaagaaggcccccaccaccgacgaggacaagaaggccgccgagaagaagagagaggacaaggccaagaagaagcacgacagaaagagcaagagactggacgaggaggaggaggacaacgagggcggcgagtgggagagagtgagaggcggcgtgcccctggtgaaggagaagcccaagatgttcgccaagggcaccgagatcacccacgccgtggtgatcaagaagctgaacgagatcctgcaggccagaggcaagaagggcaccgacagagccgcccagatcgagctgctgcagctgctggtgcagatcgccgccgagaacaacctgggcgagggcgtgatcgtgaagatcaagttcaacatcatcgccagcctgtacgactacaaccccaacctggccacctacatgaagcccgagatgtggggcaagtgcctggactgcatcaacgagctgatggacatcctgttcgccaaccccaacatcttcgtgggcgagaacatcctggaggagagcgagaacctgcacaacgccgaccagcccctgagagtgagaggctgcatcctgaccctggtggagagaatggacgaggagttcaccaagatcatgcagaacaccgacccccacagccaggagtacgtggagcacctgaaggacgaggcccaggtgtgcgccatcatcgagagagtgcagagatacctggaggagaagggcaccaccgaggaggtgtgcagaatctacctgctgagaatcctgcacacctactacaagttcgactacaaggcccaccagagacagctgaccccccccgagggcagcagcaagagcgagcaggaccaggccgagaacgagggcgaggacagcgccgtgctgatggagagactgtgcaagtacatctacgccaaggacagaaccgacagaatcagaacctgcgccatcctgtgccacatctaccaccacgccctgcacagcagatggtaccaggccagagacctgatgctgatgagccacctgcaggacaacatccagcacgccgacccccccgtgcagatcctgtacaacagaaccatggtgcagctgggcatctgcgccttcagacagggcctgaccaaggacgcccacaacgccctgctggacatccagagcagcggcagagccaaggagctgctgggccagggcctgctgctgagaagcctgcaggagagaaaccaggagcaggagaaggtggagagaagaagacaggtgcccttccacctgcacatcaacctggagctgctggagtgcgtgtacctggtgagcgccatgctgctggagatcccctacatggccgcccacgagagcgacgccagaagaagaatgatcagcaagcagttccaccaccagctgagagtgggcgagagacagcccctgctgggcccccccgagagcatgagagagcacgtggtggccgccagcaaggccatgaagatgggcgactggaagacctgccacagcttcatcatcaacgagaagatgaacggcaaggtgtgggacctgttccccgaggccgacaaggtgagaaccatgctggtgagaaagatccaggaggagagcctgagaacctacctgttcacctacagcagcgtgtacgacagcatcagcatggagaccctgagcgacatgttcgagctggacctgcccaccgtgcacagcatcatcagcaagatgatcatcaacgaggagctgatggccagcctggaccagcccacccagaccgtggtgatgcacagaaccgagcccaccgcccagcagaacctggccctgcagctggccgagaagctgggcagcctggtggagaacaacgagagagtgttcgaccacaagcagggcacctacggcggctacttcagagaccagaaggacggctacagaaagaacgagggctacatgagaagaggcggctacagacagcagcagagccagaccgcctactag

SEQ ID NO: 80892 - DNA, 4149 bp, synthetic construct
  misc_feature 1..4149: note = Description of Artificial Sequence: Synthetic coding sequence
  source 1..4149: mol_type = other DNA
atgcccgcctacttccagagacccgagaacgccctgaagagagccaacgagttcctggaggtgggcaagaagcagcccgccctggacgtgctgtacgacgtgatgaagagcaagaagcacagaacctggcagaagatccacgagcccatcatgctgaagtacctggagctgtgcgtggacctgagaaagagccacctggccaaggagggcctgtaccagtacaagaacatctgccagcaggtgaacatcaagagcctggaggacgtggtgagagcctacctgaagatggccgaggagaagaccgaggccgccaaggaggagagccagcagatggtgctggacatcgaggacctggacaacatccagacccccgagagcgtgctgctgagcgccgtgagcggcgaggacacccaggacagaaccgacagactgctgctgaccccctgggtgaagttcctgtgggagagctacagacagtgcctggacctgctgagaaacaacagcagagtggagagactgtaccacgacatcgcccagcaggccttcaagttctgcctgcagtacaccagaaaggccgagttcagaaagctgtgcgacaacctgagaatgcacctgagccagatccagagacaccacaaccagagcaccgccatcaacctgaacaaccccgagagccagagcatgcacctggagaccagactggtgcagctggacagcgccatcagcatggagctgtggcaggaggccttcaaggccgtggaggacatccacggcctgttcagcctgagcaagaagccccccaagccccagctgatggccaactactacaacaaggtgagcaccgtgttctggaagagcggcaacgccctgttccacgccagcaccctgcacagactgtaccacctgagcagagagatgagaaagaacctgacccaggacgagatgcagagaatgagcaccagagtgctgctggccaccctgagcatccccatcacccccgagagaaccgacatcgccagactgctggacatggacggcatcatcgtggagaagcagagaagactggccaccctgctgggcctgcaggccccccccaccagaatcggcctgatcaacgacatggtgagattcaacgtgctgcagtacgtggtgcccgaggtgaaggacctgtacaactggctggaggtggagttcaaccccctgaagctgtgcgagagagtgaccaaggtgctgaactgggtgagagagcagcccgagaaggagcccgagctgcagcagtacgtgccccagctgcagaacaacaccatcctgagactgctgcagcaggtgagccagatctaccagagcatcgagttcagcagactgaccagcctggtgcccttcgtggacgccttccagctggagagagccatcgtggacgccgccagacactgcgacctgcaggtgagaatcgaccacaccagcagaaccctgagcttcggcagcgacctgaactacgccaccagagaggacgcccccatcggcccccacctgcagagcatgcccagcgagcagatcagaaaccagctgaccgccatgagcagcgtgctggccaaggccctggaggtgatcaagcccgcccacatcctgcaggagaaggaggagcagcaccagctggccgtgaccgcctacctgaagaacagcagaaaggagcaccagagaatcctggccagaagacagaccatcgaggagagaaaggagagactggagagcctgaacatccagagagagaaggaggagctggagcagagagaggccgagctgcagaaggtgagaaaggccgaggaggagagactgagacaggaggccaaggagagagagaaggagagaatcctgcaggagcacgagcagatcaagaagaagaccgtgagagagagactggagcagatcaagaagaccgagctgggcgccaaggccttcaaggacatcgacatcgaggacctggaggagctggaccccgacttcatcatggccaagcaggtggagcagctggagaaggagaagaaggagctgcaggagagactgaagaaccaggagaagaagatcgactacttcgagagagccaagagactggaggagatccccctgatcaagagcgcctacgaggagcagagaatcaaggacatggacctgtgggagcagcaggaggaggagagaatcaccaccatgcagctggagagagagaaggccctggagcacaagaacagaatgagcagaatgctggaggacagagacctgttcgtgatgagactgaaggccgccagacagagcgtgtacgaggagaagctgaagcagttcgaggagagactggccgaggagagacacaacagactggaggagagaaagagacagagaaaggaggagagaagaatcacctactacagagagaaggaggaggaggagcagagaagagccgaggagcagatgctgaaggagagagaggagagagagagagccgagagagccaagagagaggaggagctgagagagtaccaggagagagtgaagaagctggaggaggtggagagaaagaagagacagagagagctggagatcgaggagagagagagaagaagagaggaggagagaagactgggcgacagcagcctgagcagaaaggacagcagatggggcgacagagacagcgagggcacctggagaaagggccccgaggccgacagcgagtggagaagaggcccccccgagaaggagtggagaagaggcgagggcagagacgaggacagaagccacagaagagacgaggagagacccagaagactgggcgacgacgaggacagagagcccagcctgagacccgacgacgacagagtgcccagaagaggcatggacgacgacagaggccccagaagaggccccgaggaggacagattcagcagaagaggcgccgacgacgacagacccagctggagaaacaccgacgacgacagaccccccagaagaatcgccgacgaggacagaggcaactggagacacgccgacgacgacagaccccccagaagaggcctggacgaggacagaggcagctggagaaccgccgacgaggacagaggccccagaagaggcatggacgacgacagaggccccagaagaggcggcgccgacgacgagagaagcagctggagaaacgccgacgacgacagaggccccagaagaggcctggacgacgacagaggccccagaagaggcatggacgacgacagaggccccagaagaggcatggacgacgacagaggccccagaagaggcatggacgacgacagaggccccagaagaggcctggacgacgacagaggcccctggagaaacgccgacgacgacagaatccccagaagaggcgccgaggacgacagaggcccctggagaaacatggacgacgacagactgagcagaagagccgacgacgacagattccccagaagaggcgacgacagcagacccggcccctggagacccctggtgaagcccggcggctggagagagaaggagaaggccagagaggagagctggggcccccccagagagagcagacccagcgaggagagagagtgggacagagagaaggagagagacagagacaaccaggacagagaggagaacgacaaggaccccgagagagagagagacagagagagagacgtggacagagaggacagattcagaagacccagagacgagggcggctggagaagaggccccgccgaggagagcagcagctggagagacagcagcagaagagacgacagagacagagacgacagaagaagagagagagacgacagaagagacctgagagagagaagagacctgagagacgacagagacagaagaggcccccccctgagaagcgagagagaggaggtgagcagctggagaagagccgacgacagaaaggacgacagagtggaggagagagacccccccagaagagtgcccccccccgccctgagcagagacagagagagagacagagacagagagagagagggcgagaaggagaaggccagctggagagccgagaaggacagagagagcctgagaagaaccaagaacgagaccgacgaggacggctggaccaccgtgagaagatag

SEQ ID NO: 80893 - DNA, 4047 bp, synthetic construct
  misc_feature 1..4047: note = Description of Artificial Sequence: Synthetic coding sequence
  source 1..4047: mol_type = other DNA
atgaagagcaagaagcacagaacctggcagaagatccacgagcccatcatgctgaagtacctggagctgtgcgtggacctgagaaagagccacctggccaaggagggcctgtaccagtacaagaacatctgccagcaggtgaacatcaagagcctggaggacgtggtgagagcctacctgaagatggccgaggagaagaccgaggccgccaaggaggagagccagcagatggtgctggacatcgaggacctggacaacatccagacccccgagagcgtgctgctgagcgccgtgagcggcgaggacacccaggacagaaccgacagactgctgctgaccccctgggtgaagttcctgtgggagagctacagacagtgcctggacctgctgagaaacaacagcagagtggagagactgtaccacgacatcgcccagcaggccttcaagttctgcctgcagtacaccagaaaggccgagttcagaaagctgtgcgacaacctgagaatgcacctgagccagatccagagacaccacaaccagagcaccgccatcaacctgaacaaccccgagagccagagcatgcacctggagaccagactggtgcagctggacagcgccatcagcatggagctgtggcaggaggccttcaaggccgtggaggacatccacggcctgttcagcctgagcaagaagccccccaagccccagctgatggccaactactacaacaaggtgagcaccgtgttctggaagagcggcaacgccctgttccacgccagcaccctgcacagactgtaccacctgagcagagagatgagaaagaacctgacccaggacgagatgcagagaatgagcaccagagtgctgctggccaccctgagcatccccatcacccccgagagaaccgacatcgccagactgctggacatggacggcatcatcgtggagaagcagagaagactggccaccctgctgggcctgcaggccccccccaccagaatcggcctgatcaacgacatggtgagattcaacgtgctgcagtacgtggtgcccgaggtgaaggacctgtacaactggctggaggtggagttcaaccccctgaagctgtgcgagagagtgaccaaggtgctgaactgggtgagagagcagcccgagaaggagcccgagctgcagcagtacgtgccccagctgcagaacaacaccatcctgagactgctgcagcaggtgagccagatctaccagagcatcgagttcagcagactgaccagcctggtgcccttcgtggacgccttccagctggagagagccatcgtggacgccgccagacactgcgacctgcaggtgagaatcgaccacaccagcagaaccctgagcttcggcagcgacctgaactacgccaccagagaggacgcccccatcggcccccacctgcagagcatgcccagcgagcagatcagaaaccagctgaccgccatgagcagcgtgctggccaaggccctggaggtgatcaagcccgcccacatcctgcaggagaaggaggagcagcaccagctggccgtgaccgcctacctgaagaacagcagaaaggagcaccagagaatcctggccagaagacagaccatcgaggagagaaaggagagactggagagcctgaacatccagagagagaaggaggagctggagcagagagaggccgagctgcagaaggtgagaaaggccgaggaggagagactgagacaggaggccaaggagagagagaaggagagaatcctgcaggagcacgagcagatcaagaagaagaccgtgagagagagactggagcagatcaagaagaccgagctgggcgccaaggccttcaaggacatcgacatcgaggacctggaggagctggaccccgacttcatcatggccaagcaggtggagcagctggagaaggagaagaaggagctgcaggagagactgaagaaccaggagaagaagatcgactacttcgagagagccaagagactggaggagatccccctgatcaagagcgcctacgaggagcagagaatcaaggacatggacctgtgggagcagcaggaggaggagagaatcaccaccatgcagctggagagagagaaggccctggagcacaagaacagaatgagcagaatgctggaggacagagacctgttcgtgatgagactgaaggccgccagacagagcgtgtacgaggagaagctgaagcagttcgaggagagactggccgaggagagacacaacagactggaggagagaaagagacagagaaaggaggagagaagaatcacctactacagagagaaggaggaggaggagcagagaagagccgaggagcagatgctgaaggagagagaggagagagagagagccgagagagccaagagagaggaggagctgagagagtaccaggagagagtgaagaagctggaggaggtggagagaaagaagagacagagagagctggagatcgaggagagagagagaagaagagaggaggagagaagactgggcgacagcagcctgagcagaaaggacagcagatggggcgacagagacagcgagggcacctggagaaagggccccgaggccgacagcgagtggagaagaggcccccccgagaaggagtggagaagaggcgagggcagagacgaggacagaagccacagaagagacgaggagagacccagaagactgggcgacgacgaggacagagagcccagcctgagacccgacgacgacagagtgcccagaagaggcatggacgacgacagaggccccagaagaggccccgaggaggacagattcagcagaagaggcgccgacgacgacagacccagctggagaaacaccgacgacgacagaccccccagaagaatcgccgacgaggacagaggcaactggagacacgccgacgacgacagaccccccagaagaggcctggacgaggacagaggcagctggagaaccgccgacgaggacagaggccccagaagaggcatggacgacgacagaggccccagaagaggcggcgccgacgacgagagaagcagctggagaaacgccgacgacgacagaggccccagaagaggcctggacgacgacagaggccccagaagaggcatggacgacgacagaggccccagaagaggcatggacgacgacagaggccccagaagaggcatggacgacgacagaggccccagaagaggcctggacgacgacagaggcccctggagaaacgccgacgacgacagaatccccagaagaggcgccgaggacgacagaggcccctggagaaacatggacgacgacagactgagcagaagagccgacgacgacagattccccagaagaggcgacgacagcagacccggcccctggagacccctggtgaagcccggcggctggagagagaaggagaaggccagagaggagagctggggcccccccagagagagcagacccagcgaggagagagagtgggacagagagaaggagagagacagagacaaccaggacagagaggagaacgacaaggaccccgagagagagagagacagagagagagacgtggacagagaggacagattcagaagacccagagacgagggcggctggagaagaggccccgccgaggagagcagcagctggagagacagcagcagaagagacgacagagacagagacgacagaagaagagagagagacgacagaagagacctgagagagagaagagacctgagagacgacagagacagaagaggcccccccctgagaagcgagagagaggaggtgagcagctggagaagagccgacgacagaaaggacgacagagtggaggagagagacccccccagaagagtgcccccccccgccctgagcagagacagagagagagacagagacagagagagagagggcgagaaggagaaggccagctggagagccgagaaggacagagagagcctgagaagaaccaagaacgagaccgacgaggacggctggaccaccgtgagaagatag

SEQ ID NO: 80894 - DNA, 2619 bp, synthetic construct
  misc_feature 1..2619: note = Description of Artificial Sequence: Synthetic coding sequence
  source 1..2619: mol_type = other DNA
atgcaggacgccgagaacgtggccgtgcccgaggccgccgaggagagagccgagcccggccagcagcagcccgccgccgagcccccccccgccgagggcctgctgagacccgccggccccggcgcccccgaggccgccggcaccgaggccagcagcgaggaggtgggcatcgccgaggccggccccgagagcgaggtgagaaccgagcccgccgccgaggccgaggccgccagcggccccagcgagagccccagcccccccgccgccgaggagctgcccggcagccacgccgagccccccgtgcccgcccagggcgaggcccccggcgagcaggccagagacgagagaagcgacagcagagcccaggccgtgagcgaggacgccggcggcaacgagggcagagccgccgaggccgagcccagagccctggagaacggcgacgccgacgagcccagcttcagcgaccccgaggacttcgtggacgacgtgagcgaggaggagctgctgggcgacgtgctgaaggacagaccccaggaggccgacggcatcgacagcgtgatcgtggtggacaacgtgccccaggtgggccccgacagactggagaagctgaagaacgtgatccacaagatcttcagcaagttcggcaagatcaccaacgacttctaccccgaggaggacggcaagaccaagggctacatcttcctggagtacgccagccccgcccacgccgtggacgccgtgaagaacgccgacggctacaagctggacaagcagcacaccttcagagtgaacctgttcaccgacttcgacaagtacatgaccatcagcgacgagtgggacatccccgagaagcagcccttcaaggacctgggcaacctgagatactggctggaggaggccgagtgcagagaccagtacagcgtgatcttcgagagcggcgacagaaccagcatcttctggaacgacgtgaaggaccccgtgagcatcgaggagagagccagatggaccgagacctacgtgagatggagccccaagggcacctacctggccaccttccaccagagaggcatcgccctgtggggcggcgagaagttcaagcagatccagagattcagccaccagggcgtgcagctgatcgacttcagcccctgcgagagatacctggtgaccttcagccccctgatggacacccaggacgacccccaggccatcatcatctgggacatcctgaccggccacaagaagagaggcttccactgcgagagcagcgcccactggcccatcttcaagtggagccacgacggcaagttcttcgccagaatgaccctggacaccctgagcatctacgagacccccagcatgggcctgctggacaagaagagcctgaagatcagcggcatcaaggacttcagctggagccccggcggcaacatcatcgccttctgggtgcccgaggacaaggacatccccgccagagtgaccctgatgcagctgcccaccagacaggagatcagagtgagaaacctgttcaacgtggtggactgcaagctgcactggcagaagaacggcgactacctgtgcgtgaaggtggacagaacccccaagggcacccagggcgtggtgaccaacttcgagatcttcagaatgagagagaagcaggtgcccgtggacgtggtggagatgaaggagaccatcatcgccttcgcctgggagcccaacggcagcaagttcgccgtgctgcacggcgaggcccccagaatcagcgtgagcttctaccacgtgaagaacaacggcaagatcgagctgatcaagatgttcgacaagcagcaggccaacaccatcttctggagcccccagggccagttcgtggtgctggccggcctgagaagcatgaacggcgccctggccttcgtggacaccagcgactgcaccgtgatgaacatcgccgagcactacatggccagcgacgtggagtgggaccccaccggcagatacgtggtgaccagcgtgagctggtggagccacaaggtggacaacgcctactggctgtggaccttccagggcagactgctgcagaagaacaacaaggacagattctgccagctgctgtggagacccagaccccccaccctgctgagccaggagcagatcaagcagatcaagaaggacctgaagaagtacagcaagatcttcgagcagaaggacagactgagccagagcaaggccagcaaggagctggtggagagaagaagaaccatgatggaggacttcagaaagtacagaaagatggcccaggagctgtacatggagcagaagaacgagagactggagctgagaggcggcgtggacaccgacgagctggacagcaacgtggacgactgggaggaggagaccatcgagttcttcgtgaccgaggagatcatccccggcatcagaagcgacctggagcactgcgcccagccctgcgtgctgtggagcagaggcagacccgccggcagcagagtgacccccgccagcagcctgtgcagcctggccctggactgcgactgcgcctggatcctgcccctgagacacatcttcgtgcccttcagcccctggtgcctgcagtggggcatctag

SEQ ID NO: 80895 - DNA, 2445 bp, synthetic construct
  misc_feature 1..2445: note = Description of Artificial Sequence: Synthetic coding sequence
  source 1..2445: mol_type = other DNA
atgcaggacgccgagaacgtggccgtgcccgaggccgccgaggagagagccgagcccggccagcagcagcccgccgccgagcccccccccgccgagggcctgctgagacccgccggccccggcgcccccgaggccgccggcaccgaggccagcagcgaggaggtgggcatcgccgaggccggccccgagagcgaggtgagaaccgagcccgccgccgaggccgaggccgccagcggccccagcgagagccccagcccccccgccgccgaggagctgcccggcagccacgccgagccccccgtgcccgcccagggcgaggcccccggcgagcaggccagagacgagagaagcgacagcagagcccaggccgtgagcgaggacgccggcggcaacgagggcagagccgccgaggccgagcccagagccctggagaacggcgacgccgacgagcccagcttcagcgaccccgaggacttcgtggacgacgtgagcgaggaggagctgctgggcgacgtgctgaaggacagaccccaggaggccgacggcatcgacagcgtgatcgtggtggacaacgtgccccaggtgggccccgacagactggagaagctgaagaacgtgatccacaagatcttcagcaagttcggcaagatcaccaacgacttctaccccgaggaggacggcaagaccaagggctacatcttcctggagtacgccagccccgcccacgccgtggacgccgtgaagaacgccgacggctacaagctggacaagcagcacaccttcagagtgaacctgttcaccgacttcgacaagtacatgaccatcagcgacgagtgggacatccccgagaagcagcccttcaaggacctgggcaacctgagatactggctggaggaggccgagtgcagagaccagtacagcgtgatcttcgagagcggcgacagaaccagcatcttctggaacgacgtgaaggaccccgtgagcatcgaggagagagccagatggaccgagacctacgtgagatggagccccaagggcacctacctggccaccttccaccagagaggcatcgccctgtggggcggcgagaagttcaagcagatccagagattcagccaccagggcgtgcagctgatcgacttcagcccctgcgagagatacctggtgaccttcagccccctgatggacacccaggacgacccccaggccatcatcatctgggacatcctgaccggccacaagaagagaggcttccactgcgagagcagcgcccactggcccatcttcaagtggagccacgacggcaagttcttcgccagaatgaccctggacaccctgagcatctacgagacccccagcatgggcctgctggacaagaagagcctgaagatcagcggcatcaaggacttcagctggagccccggcggcaacatcatcgccttctgggtgcccgaggacaaggacatccccgccagagtgaccctgatgcagctgcccaccagacaggagatcagagtgagaaacctgttcaacgtggtggactgcaagctgcactggcagaagaacggcgactacctgtgcgtgaaggtggacagaacccccaagggcacccagggcgtggtgaccaacttcgagatcttcagaatgagagagaagcaggtgcccgtggacgtggtggagatgaaggagaccatcatcgccttcgcctgggagcccaacggcagcaagttcgccgtgctgcacggcgaggcccccagaatcagcgtgagcttctaccacgtgaagaacaacggcaagatcgagctgatcaagatgttcgacaagcagcaggccaacaccatcttctggagcccccagggccagttcgtggtgctggccggcctgagaagcatgaacggcgccctggccttcgtggacaccagcgactgcaccgtgatgaacatcgccgagcactacatggccagcgacgtggagtgggaccccaccggcagatacgtggtgaccagcgtgagctggtggagccacaaggtggacaacgcctactggctgtggaccttccagggcagactgctgcagaagaacaacaaggacagattctgccagctgctgtggagacccagaccccccaccctgctgagccaggagcagatcaagcagatcaagaaggacctgaagaagtacagcaagatcttcgagcagaaggacagactgagccagagcaaggccagcaaggagctggtggagagaagaagaaccatgatggaggacttcagaaagtacagaaagatggcccaggagctgtacatggagcagaagaacgagagactggagctgagaggcggcgtggacaccgacgagctggacagcaacgtggacgactgggaggaggagaccatcgagttcttcgtgaccgaggagatcatccccctgggcaaccaggagtag

SEQ ID NO: 80896 - DNA, 2445 bp, synthetic construct; identical to SEQ ID NO: 80895
  misc_feature 1..2445: note = Description of Artificial Sequence: Synthetic coding sequence
  source 1..2445: mol_type = other DNA

SEQ ID NO: 80897 - DNA, 2217 bp, synthetic construct
  misc_feature 1..2217: note = Description of Artificial Sequence: Synthetic coding sequence
  source 1..2217: mol_type = other DNA
atgcaggacgccgagaacgtggccgtgcccgaggccgccgaggagagagccggcagccacgccgagccccccgtgcccgcccagggcgaggcccccggcgagcaggccagagacgagagaagcgacagcagagcccaggccgtgagcgaggacgccggcggcaacgagggcagagccgccgaggccgagcccagagccctggagaacggcgacgccgacgagcccagcttcagcgaccccgaggacttcgtggacgacgtgagcgaggaggagctgctgggcgacgtgctgaaggacagaccccaggaggccgacggcatcgacagcgtgatcgtggtggacaacgtgccccaggtgggccccgacagactggagaagctgaagaacgtgatccacaagatcttcagcaagttcggcaagatcaccaacgacttctaccccgaggaggacggcaagaccaagggctacatcttcctggagtacgccagccccgcccacgccgtggacgccgtgaagaacgccgacggctacaagctggacaagcagcacaccttcagagtgaacctgttcaccgacttcgacaagtacatgaccatcagcgacgagtgggacatccccgagaagcagcccttcaaggacctgggcaacctgagatactggctggaggaggccgagtgcagagaccagtacagcgtgatcttcgagagcggcgacagaaccagcatcttctggaacgacgtgaaggaccccgtgagcatcgaggagagagccagatggaccgagacctacgtgagatggagccccaagggcacctacctggccaccttccaccagagaggcatcgccctgtggggcggcgagaagttcaagcagatccagagattcagccaccagggcgtgcagctgatcgacttcagcccctgcgagagatacctggtgaccttcagccccctgatggacacccaggacgacccccaggccatcatcatctgggacatcctgaccggccacaagaagagaggcttccactgcgagagcagcgcccactggcccatcttcaagtggagccacgacggcaagttcttcgccagaatgaccctggacaccctgagcatctacgagacccccagcatgggcctgctggacaagaagagcctgaagatcagcggcatcaaggacttcagctggagccccggcggcaacatcatcgccttctgggtgcccgaggacaaggacatccccgccagagtgaccctgatgcagctgcccaccagacaggagatcagagtgagaaacctgttcaacgtggtggactgcaagctgcactggcagaagaacggcgactacctgtgcgtgaaggtggacagaacccccaagggcacccagggcgtggtgaccaacttcgagatcttcagaatgagagagaagcaggtgcccgtggacgtggtggagatgaaggagaccatcatcgccttcgcctgggagcccaacggcagcaagttcgccgtgctgcacggcgaggcccccagaatcagcgtgagcttctaccacgtgaagaacaacggcaagatcgagctgatcaagatgttcgacaagcagcaggccaacaccatcttctggagcccccagggccagttcgtggtgctggccggcctgagaagcatgaacggcgccctggccttcgtggacaccagcgactgcaccgtgatgaacatcgccgagcactacatggccagcgacgtggagtgggaccccaccggcagatacgtggtgaccagcgtgagctggtggagccacaaggtggacaacgcctactggctgtggaccttccagggcagactgctgcagaagaacaacaaggacagattctgccagctgctgtggagacccagaccccccaccctgctgagccaggagcagatcaagcagatcaagaaggacctgaagaagtacagcaagatcttcgagcagaaggacagactgagccagagcaaggccagcaaggagctggtggagagaagaagaaccatgatggaggacttcagaaagtacagaaagatggcccaggagctgtacatggagcagaagaacgagagactggagctgagaggcggcgtggacaccgacgagctggacagcaacgtggacgactgggaggaggagaccatcgagttcttcgtgaccgaggagatcatccccctgggcaaccaggagtag

SEQ ID NO: 80898 - DNA, 2742 bp, synthetic construct; identical to SEQ ID NO: 80891
  misc_feature 1..2742: note = Description of Artificial Sequence: Synthetic coding sequence
  source 1..2742: mol_type = other DNA

SEQ ID NO: 80899 - DNA, 2286 bp, synthetic construct
  misc_feature 1..2286: note = Description of Artificial Sequence: Synthetic coding sequence
  source 1..2286: mol_type = other DNA
atgagcagattcttcaccaccggcagcgacagcgagagcgagagcagcctgagcggcgaggagctggtgaccaagcccgtgggcggcaactacggcaagcagcccctgctgctgagcgaggacgaggaggacaccaagagagtggtgagaagcgccaaggacaagagattcgaggagctgaccaacctgatcagaaccatcagaaacgccatgaagatcagagacgtgaccaagtgcctggaggagttcgagctgctgggcaaggcctacggcaaggccaagagcatcgtggacaaggagggcgtgcccagattctacatcagaatcctggccgacctggaggactacctgaacgagctgtgggaggacaaggagggcaagaagaagcacgacagaaagagcaagagactggacgaggaggaggaggacaacgagggcggcgagtgggagagagtgagaggcggcgtgcccctggtgaaggagaagcccaagatgttcgccaagggcaccgagatcacccacgccgtggtgatcaagaagctgaacgagatcctgcaggccagaggcaagaagggcaccgacagagccgcccagatcgagctgctgcagctgctggtgcagatcgccgccgagaacaacctgggcgagggcgtgatcgtgaagatcaagttcaacatcatcgccagcctgtacgactacaaccccaacctggccacctacatgaagcccgagatgtggggcaagtgcctggactgcatcaacgagctgatggacatcctgttcgccaaccccaacatcttcgtgggcgagaacatcctggaggagagcgagaacctgcacaacgccgaccagcccctgagagtgagaggctgcatcctgaccctggtggagagaatggacgaggagttcaccaagatcatgcagaacaccgacccccacagccaggagtacgtggagcacctgaaggacgaggcccaggtgtgcgccatcatcgagagagtgcagagatacctggaggagaagggcaccaccgaggaggtgtgcagaatctacctgctgagaatcctgcacacctactacaagttcgactacaaggcccaccagagacagctgaccccccccgagggcagcagcaagagcgagcaggaccaggccgagaacgagggcgaggacagcgccgtgctgatggagagactgtgcaagtacatctacgccaaggacagaaccgacagaatcagaacctgcgccatcctgtgccacatctaccaccacgccctgcacagcagatggtaccaggccagagacctgatgctgatgagccacctgcaggacaacatccagcacgccgacccccccgtgcagatcctgtacaacagaaccatggtgcagctgggcatctgcgccttcagacagggcctgaccaaggacgcccacaacgccctgctggacatccagagcagcggcagagccaaggagctgctgggccagggcctgctgctgagaagcctgcaggagagaaaccaggagcaggagaaggtggagagaagaagacaggtgcccttccacctgcacatcaacctggagctgctggagtgcgtgtacctggtgagcgccatgctgctggagatcccctacatggccgcccacgagagcgacgccagaagaagaatgatcagcaagcagttccaccaccagctgagagtgggcgagagacagcccctgctgggcccccccgagagcatgagagagcacgtggtggccgccagcaaggccatgaagatgggcgactggaagacctgccacagcttcatcatcaacgagaagatgaacggcaaggtgtgggacctgttccccgaggccgacaaggtgagaaccatgctggtgagaaagatccaggaggagagcctgagaacctacctgttcacctacagcagcgtgtacgacagcatcagcatggagaccctgagcgacatgttcgagctggacctgcccaccgtgcacagcatcatcagcaagatgatcatcaacgaggagctgatggccagcctggaccagcccacccagaccgtggtgatgcacagaaccgagcccaccgcccagcagaacctggccctgcagctggccgagaagctgggcagcctggtggagaacaacgagagagtgttcgaccacaagcagggcacctacggcggctacttcagagaccagaaggacggctacagaaagaacgagggctacatgagaagaggcggctacagacagcagcagagccagaccgcctactag

SEQ ID NO: 80900 - DNA, 2742 bp, synthetic construct; identical to SEQ ID NO: 80891
  misc_feature 1..2742: note = Description of Artificial Sequence: Synthetic coding sequence
  source 1..2742: mol_type = other DNA

SEQ ID NO: 80901 - DNA, 2208 bp, synthetic construct
  misc_feature 1..2208: note = Description of Artificial Sequence: Synthetic coding sequence
  source 1..2208: mol_type = other DNA
atgagcagattcttcaccaccggcagcgacagcgagagcgagagcagcctgagcggcgaggagctggtgaccaagcccgtgggcggcaactacggcaagcagcccctgctgctgagcgaggacgaggaggacaccaagagagtggtgagaagcgccaaggacaagagattcgaggagctgaccaacctgatcagaaccatcagaaacgccatgaagatcagagacgtgaccaagtgcctggaggagttcgagctgctgggcaaggcctacggcaaggccaagagcatcgtggacaaggccaagaagaagcacgacagaaagagcaagagactggacgaggaggaggaggacaacgagggcggcgagtgggagagagtgagaggcggcgtgcccctggtgaaggagaagcccaagatgttcgccaagggcaccgagatcacccacgccgtggtgatcaagaagctgaacgagatcctgcaggccagaggcaagaagggcaccgacagagccgcccagatcgagctgctgcagctgctggtgcagatcgccgccgagaacaacctgggcgagggcgtgatcgtgaagatcaagttcaacatcatcgccagcctgtacgactacaaccccaacctggccacctacatgaagcccgagatgtggggcaagtgcctggactgcatcaacgagctgatggacatcctgttcgccaaccccaacatcttcgtgggcgagaacatcctggaggagagcgagaacctgcacaacgccgaccagcccctgagagtgagaggctgcatcctgaccctggtggagagaatggacgaggagttcaccaagatcatgcagaacaccgacccccacagccaggagtacgtggagcacctgaaggacgaggcccaggtgtgcgccatcatcgagagagtgcagagatacctggaggagaagggcaccaccgaggaggtgtgcagaatctacctgctgagaatcctgcacacctactacaagttcgactacaaggcccaccagagacagctgaccccccccgagggcagcagcaagagcgagcaggaccaggccgagaacgagggcgaggacagcgccgtgctgatggagagactgtgcaagtacatctacgccaaggacagaaccgacagaatcagaacctgcgccatcctgtgccacatctaccaccacgccctgcacagcagatggtaccaggccagagacctgatgctgatgagccacctgcaggacaacatccagcacgccgacccccccgtgcagatcctgtacaacagaaccatggtgcagctgggcatctgcgccttcagacagggcctgaccaaggacgcccacaacgccctgctggacatccagagcagcggcagagccaaggagctgctgggccagggcctgctgctgagaagcctgcaggagagaaaccaggagcaggagaaggtggagagaagaagacaggtgcccttccacctgcacatcaacctggagctgctggagtgcgtgtacctggtgagcgccatgctgctggagatcccctacatggccgcccacgagagcgacgccagaagaagaatgatcagcaagcagttccaccaccagctgagagtgggcgagagacagcccctgctgggcccccccgagagcatgagagagcacgtggtggccgccagcaaggccatgaagatgggcgactggaagacctgccacagcttcatcatcaacgagaagatgaacggcaaggtgtgggacctgttccccgaggccgacaaggtgagaaccatgctggtgagaaagatccaggaggagagcctgagaacctacctgttcacctacagcagcgtgtacgacagcatcagcatggagaccctgagcgacatgttcgagctggacctgcccaccgtgcacagcatcatcagcaagatgatcatcaacgaggagctgatggccagcctggaccagcccacccagaccgtggtgatgcacagaaccgagcccaccgcccagcagaacctggccctgcagctggccgagaagctgggcagcctggtggagaacaacgagagagtgttcgaccacaagcagggcacctacggcggctacttcagagaccagaaggacggctacagaaagaacgagggctacatgagaagaggcggctacagacagcagcagagccagaccgcctactag

SEQ ID NO: 80902 - DNA, 2697 bp, synthetic construct
  misc_feature 1..2697: note = Description of Artificial Sequence: Synthetic coding sequence
  source 1..2697: mol_type = other DNA
atgagcagattcttcaccaccggcagcgacagcgagagcgagagcagcctgagcggcgaggagctggtgaccaagcccgtgggcggcaactacggcaagcagcccctgctgctgagcgaggacgaggaggacaccaagagagtggtgagaagcgccaaggacaagagattcgaggagctgaccaacctgatcagaaccatcagaaacgccatgaagatcagagacgtgaccaagtgcctggaggagttcgagctgctgggcaaggcctacggcaaggccaagagcatcgtggacaaggagggcgtgcccagattctacatcagaatcctggccgacctggaggactacctgaacgagctgtgggaggacaaggagggcaagaagaagatcagaaagtacaacagagacttcgagagccacatcaccagctacaagcagaaccccgagcagagcgccgacgaggacgccgagaagaacgaggaggacagcgagggcagcagcgacgaggacgaggacgaggacggcgtgagcgccgccaccttcctgaagaagaagagcgaggcccccagcggcgagagcagaaagttcctgaagaagatggacgacgaggacgaggacagcgaggacagcgaggacgacgaggactgggacaccggcagcaccagcagcgacagcgacagcgaggaggaggagggcaagcagaccgccctggccagcagattcctgaagaaggcccccaccaccgacgaggacaagaaggccgccgagaagaagagagaggacaaggccaagaagaagcacgacagaaagagcaagagactggacgaggaggaggaggacaacgagggcggcgagtgggagagagtgagaggcggcgtgcccctggtgaaggagaagcccaagatgttcgccaagggcaccgagatcacccacgccgtggtgatcaagaagctgaacgagatcctgcaggccagaggcaagaagggcaccgacagagccgcccagatcgagctgctgcagctgctggtgcagatcgccgccgagaacaacctgggcgagggcgtgatcgtgaagatcaagttcaacatcatcgccagcctgtacgactacaaccccaacctggccacctacatgaagcccgagatgtggggcaagtgcctggactgcatcaacgagctgatggacatcctgttcgccaaccccaacatcttcgtgggcgagaacatcctggaggagagcgagaacctgcacaacgccgaccagcccctgagagtgagaggctgcatcctgaccctggtggagagaatggacgaggagttcaccaagatcatgcagaacaccgacccccacagccaggagtacgtggagcacctgaaggacgaggcccaggtgtgcgccatcatcgagagagtgcagagatacctggaggagaagggcaccaccgaggaggtgtgcagaatctacctgctgagaatcctgcacacctactacaagttcgactacaaggcccaccagagacagctgaccccccccgagggcagcagcaagagcgagcaggaccaggccgagaacgagggcgaggacagcgccgtgctgatggagagactgtgcaagtacatctacgccaaggacagaaccgacagaatcagaacctgcgccatcctgtgccacatctaccaccacgccctgcacagcagatggtaccaggccagagacctgatgctgatgagccacctgcaggacaacatccagcacgccgacccccccgtgcagatcctgtacaacagaaccatggtgcagctgggcatctgcgccttcagacagggcctgaccaaggacgcccacaacgccctgctggacatccagagcagcggcagagccaaggagctgctgggccagggcctgctgctgagaagcctgcaggagagaaaccaggagcaggagaaggtggagagaagaagacaggtgcccttccacctgcacatcaacctggagctgctggagtgcgtgtacctggtgagcgccatgctgctggagatcccctacatggccgcccacgagagcgacgccagaagaagaatgatcagcaagcagttccaccaccagctgagagtgggcgagagacagcccctgctgggcccccccgagagcatgagagagcacgtggtggccgccagcaaggccatgaagatgggcgactggaagacctgccacagcttcatcatcaacgagaagatgaacggcaaggtgtgggacctgttccccgaggccgacaaggtgagaaccatgctggtgagaaagatccaggaggagagcctgagaacctacctgttcacctacagcagcgtgtacgacagcatcagcatggagaccctgagcgacatgttcgagctggacctgcccaccgtgcacagcatcatcagcaagatgatcatcaacgaggagctgatggccagcctggaccagcccacccagaccgtggtgatgcacagaaccgagcccaccgcccagcagaacctggccctgcagctggccgagaagctgggcagcctggtggagaacaacgagagagtgttcgaccacaagcagggcacctacggcggctacttcagagaccagaaggacggctacagaaagaacgagggctacatgagaagaggcggctacagacagcagcagagccagaccgcctactag

SEQ ID NO: 80903 - DNA, 2055 bp, synthetic construct
  misc_feature 1..2055: note = Description of Artificial Sequence: Synthetic coding sequence
  source 1..2055: mol_type = other DNA
atgggcctgagcgccgccgcccccctgtggggcccccccggcctgctgctggccatcgccctgcaccccgccctgagcgtgccccccagaagagactactgcgtgctgggcgccggccccgccggcctgcagatggcctacttcctgcagagagccggcagagactacgccgtgttcgagagagcccccagacccggcagcttcttcaccagataccccagacacagaaagctgatcagcatcaacaagagatacaccggcaaggccaacgccgagttcaacctgagacacgactggaacagcctgctgagccacgaccccagactgctgttcagacactacagcagagcctacttccccgacgccagagacatggtgagatacctgggcgacttcgccgacaccctgggcctgagagtgcagtacaacaccaccatcgcccacgtgaccctggacaaggacagacaggcctggaacggccactacttcatcctgaccgaccagaagggccaggtgcaccagtgcagcgtgctgttcgtggccaccggcctgagcgtgcccaaccaggtggacttccccggcagcgagtacgccgagggctacgagagcgtgagcgtggaccccgaggacttcgtgggccagaacgtgctgatcctgggcagaggcaacagcgccttcgagaccgccgagaacatcctgggcgtgaccaacttcatccacatgctgagcagaagcagagtgagactgagctgggccacccactacgtgggcgacctgagagccatcaacaacggcctgctggacacctaccagctgaagagcctggacggcctgctggagagcgacctgaccgacctggccatcctgaaggacagcaagggcaagttccacgtgacccccaagttcttcctggaggaggccaacaccaaccagagcgccgacagcatcaccctgccccaggacgacaacgacaacttcgccatgagagtgccctacgacagagtgatcagatgcctgggctggaacttcgacttcagcatcttcaacaagagcctgagactgaacagcggcaacgccttcggcaagaagtaccccctgatcagagccagctacgagagcaagggcagcagaggcctgttcatcctgggcaccgccagccacagcgtggactacagaaagagcgccggcggcttcatccacggcttcagatacaccgtgagagccgtgcacagactgctggagcacagacaccacagcgtgacctggcccgccaccgagctgcccatcacccagctgaccagcagcatcgtgagaagagtgaacgaggccagcggcctgtaccagatgttcggcgtgctggccgacgtgatcctgctgaaggagaacagcaccgccttcgagtacctggaggagttccccatccagatgctggcccagctggagaccctgaccggcagaaaggccaagcacggcctgttcgtgatcaacatggagtacggcagaaacttcagcggccccgacaaggacgtgttcttcgacgacagaagcgtgggccacaccgaggacgcctggcagagcaacttcctgcaccccgtgatctactactacagatacctgcccaccgagcaggaggtgagattcagacccgcccactggcccctgcccagacccaccgccatccaccacatcgtggaggacttcctgaccgactggaccgcccccatcggccacatcctgcccctgagaagattcctggagaactgcctggacaccgacctgagaagcttctacgccgagagctgcttcctgttcgccctgaccagacagaagctgccccccttctgccagcagggctacctgagaatgcagggcctggtgagcaccgagagcctgtggcagcacagagtggagagcagactgctgagagactacgcccccaccggcagaagactggaggacagcagccagcagctgggcgaccaggagcccctgggcagccccctggcccccggccccctggcccagagcgtggacagcaacaaggaggagctgtag

SEQ ID NO: 80904 - DNA, 1602 bp, synthetic construct
  misc_feature 1..1602: note = Description of Artificial Sequence: Synthetic coding sequence
  source 1..1602: mol_type = other DNA
atggccaagttcatgacccccgtgatccaggacaaccccagcggctggggcccctgcgccgtgcccgagcagttcagagacatgccctaccagcccttcagcaagggcgacagactgggcaaggtggccgactggaccggcgccacctaccaggacaagagatacaccaacaagtacagcagccagttcggcggcggcagccagtacgcctacttccacgaggaggacgagagcagcttccagctggtggacaccgccagaacccagaagaccgcctaccagagaaacagaatgagattcgcccagagaaacctgagaagagacaaggacagaagaaacatgctgcagttcaacctgcagatcctgcccaagagcgccaagcagaaggagagagagagaatcagactgcagaagagccagaagcccagagacagcagcgtggaggtgagaagcgactgggaggtgaaggaggagatggacttcccccagctgatgaagatgagatacctggaggtgagcgagccccaggacatcgagtgctgcggcgccctggagtactacgacaaggccttcgacagaatcaccaccagaagcgagaagcccctgagaagcatcaagagaatcttccacaccgtgaccaccaccgacgaccccgtgatcagaaagctggccaagacccagggcaacgtgttcgccaccgacgccatcctggccaccctgatgagctgcaccagaagcgtgtacagctgggacatcgtggtgcagagagtgggcagcaagctgttcttcgacaagagagacaacagcgacttcgacctgctgaccgtgagcgagaccgccaacgagcccccccaggacgagggcaacagcttcaacagccccagaaacctggccatggaggccacctacatcaaccacaacttcagccagcagtgcctgagaatgggcaaggagagatacaacttccccaaccccaaccccttcgtggaggacgacatggacaagaacgagatcgccagcgtggcctacagatacagaagatggaagctgggcgacgacatcgacctgatcgtgagatgcgagcacgacggcgtgatgaccggcgccaacggcgaggtgagcttcatcaacatcaagaccctgaacgagtgggacagcagacactgcaacggcgtggactggagacagaagctggacagccagagaggcgccgtgatcgccaccgagctgaagaacaacagctacaagctggccagatggacctgctgcgccctgctggccggcagcgagtacctgaagctgggctacgtgagcagataccacgtgaaggacagcagcagacacgtgatcctgggcacccagcagttcaagcccaacgagttcgccagccagatcaacctgagcgtggagaacgcctggggcatcctgagatgcgtgatcgacatctgcatgaagctggaggagggcaagtacctgatcctgaaggaccccaacaagcaggtgatcagagtgtacagcctgcccgacggcaccttcagcagcgacgaggacgaggaggaggaggaggaggaggaggaggaggaggaggaggaggagacctag

SEQ ID NO: 80905 - DNA, 372 bp, synthetic construct
  misc_feature 1..372: note = Description of Artificial Sequence: Synthetic coding sequence
  source 1..372: mol_type = other DNA
atggccaagttcatgacccccgtgatccaggacaaccccagcggctggggcccctgcgccgtgcccgagcagttcagagacatgccctaccagcccttcagcaagggcgacagactgggcaaggtggccgactggaccggcgccacctaccaggacaagagatacaccaacaagtacagcagccagttcggcggcggcagccagtacgcctacttccacgaggaggacgagagcagcttccagctggtggacaccgccagaacccagaagaccgcctaccagagaaacagaatgagattcgcccagagaaacctgagaagagacaaggacagaagaaacatgctgcagttcaacctgcagatcctgccctag

SEQ ID NO: 80906 - DNA, 1647 bp, synthetic construct; identical to SEQ ID NO: 72129
  misc_feature 1..1647: note = Description of Artificial Sequence: Synthetic coding sequence
  source 1..1647: mol_type = other DNA

SEQ ID NO: 80907 - DNA, 519 bp, synthetic construct
  misc_feature 1..519: note = Description of Artificial Sequence: Synthetic coding sequence
  source 1..519: mol_type = other DNA
atggacaagaacgagatcgccagcgtggcctacagatacagaagatggaagctgggcgacgacatcgacctgatcgtgagatgcgagcacgacggcgtgatgaccggcgccaacggcgaggtgagcttcatcaacatcaagaccctgaacgagtgggacagcagacactgcaacggcgtggactggagacagaagctggacagccagagaggcgccgtgatcgccaccgagctgaagaacaacagctacaagctggccagatggacctgctgcgccctgctggccggcagcgagtacctgaagctgggctacgtgagcagataccacgtgaaggacagcagcagacacgtgatcctgggcacccagcagttcaagcccaacgagttcgccagccagatcaacctgagcgtggagaacgcctggggcatcctgagatgcgtgatcgacatctgcatgaagctggaggagggcaagtacctgatcctgaaggaccccaacaagcaggtgatcagagtgtag

SEQ ID NO: 80908 - DNA, 561 bp, synthetic construct
  misc_feature 1..561: note = Description of Artificial Sequence: Synthetic coding sequence
  source 1..561: mol_type = other DNA
atggccaagttcatgacccccgtgatccaggacaaccccagcggctggggcccctgcgccgtgcccgagcagttcagagacatgccctaccagcccttcagcaagggcgacagactgggcaaggtggccgactggaccggcgccacctaccaggacaagagatacaccaacaagtacagcagccagttcggcggcggcagccagtacgcctacttccacgaggaggacgagagcagcttccagctggtggacaccgccagaacccagaagaccgcctaccagagaaacagaatgagattcgcccagagaaacctgagaagagacaaggacagaagaaacatgctgcagttcaacctgcagatcctgcccaagagcgccaagcagaaggagagagagagaatcagactgcagaagaagttccagaagcagttcggcgtgagacagaagtgggaccagaagagccaggtgatgtacctgtaccagaacagcgccctggagttcggcagcgtgtacctggtggtgttcatcaacagcctggacgagatctacttcacctactag

SEQ ID NO: 80909 - DNA, 810 bp, synthetic construct
  misc_feature 1..810: note = Description of Artificial Sequence: Synthetic coding sequence
  source 1..810: mol_type = other DNA
atggccaagttcatgacccccgtgatccaggacaaccccagcggctggggcccctgcgccgtgcccgagcagttcagagacatgccctaccagcccttcagcaagggcgacagactgggcaaggtggccgactggaccggcgccacctaccaggacaagagatacaccaacaagtacagcagccagttcggcggcggcagccagtacgcctacttccacgaggaggacgagagcagcttccagctggtggacaccgccagaacccagaagaccgcctaccagagaaacagaatgagattcgcccagagaaacctgagaagagacaaggacagaagaaacatgctgcagttcaacctgcagatcctgcccaagagcgccaagcagaaggagagagagagaatcagactgcagaagaagttccagaagcagttcggcgtgagacagaagtgggaccagaagagccagaagcccagagacagcagcgtggaggtgagaagcgactgggaggtgaaggaggagatggacttcccccagctgatgaagatgagatacctggaggtgagcgagccccaggacatcgagtgctgcggcgccctggagtactacgacaaggccttcgacagaatcaccaccagaagcgagaagcccctgagaagcatcaagagaatcttccacaccgtgaccaccaccgacgaccccgtgatcagaaagctggccaagacccagggcaacgtgttcgccaccgacgccatcctggccaccctgatgagctgcaccagaagcgtgtacagctgggacatcgtggtgtag

SEQ ID NO: 80910 - DNA, 522 bp, synthetic construct
  misc_feature 1..522: note = Description of Artificial Sequence: Synthetic coding sequence
  source 1..522: mol_type = other DNA
atggccaagttcatgacccccgtgatccaggacaaccccagcggctggggcccctgcgccgtgcccgagcagttcagagacatgccctaccagcccttcagcaagggcgacagactgggcaaggtggccgactggaccggcgccacctaccaggacaagagatacaccaacaagtacagcagccagttcggcggcggcagccagtacgcctacttccacgaggaggacgagagcagcttccagctggtggacaccgccagaacccagaagaccgcctaccagagaaacagaatgagattcgcccagagaaacctgagaagagacaaggacagaagaaacatgctgcagttcaacctgcagatcctgcccaagagcgccaagcagaaggagagagagagaatcagactgcagaagaagttccagaagcagttcggcgtgagacagaagtgggaccagaagagccagaagcccagagacagcagcgtggaggtgagaagcgactgggaggtgaaggaggagtag

SEQ ID NO: 80911 - DNA, 498 bp, synthetic construct
  misc_feature 1..498: note = Description of Artificial Sequence: Synthetic coding sequence
  source 1..498: mol_type = other DNA
atggaggccacctacatcaaccacaacttcagccagcagtgcctgagaatgggcaaggagagatacaacttccccaaccccaaccccttcgtggaggacgacatggacaagaacgagatcgccagcgtggcctacagatacagaagatggaagctgggcgacgacatcgacctgatcgtgagatgcgagcacgacggcgtgatgaccggcgccaacggcgaggtgagcttcatcaacatcaagaccctgaacgagtgggacagcagacactgcaacggcgtggactggagacagaagctggacagccagagaggcgccgtgatcgccaccgagctgaagaacaacagctacaagctggccagatggacctgctgcgccctgctggccggcagcgagtacctgaagctgggctacgtgagcagataccacgtgaaggacagcagcagacacgtgatcctgggcacccagcagttcaagcccaacgagttcgccagctag

SEQ ID NO: 80912 - DNA, 1500 bp, synthetic construct
  misc_feature 1..1500: note = Description of Artificial Sequence: Synthetic coding sequence
  source 1..1500: mol_type = other DNA
atggccaagttcatgacccccgtgatccaggacaaccccagcggctggggcccctgcgccgtgcccgagcagttcagagacatgccctaccagcccttcagcaagggcgacagactgggcaaggtggccgactggaccggcgccacctaccaggacaagagaaacctgagaagagacaaggacagaagaaacatgctgcagttcaacctgcagatcctgcccaagagcgccaagcagaaggagagagagagaatcagactgcagaagaagttccagaagcagttcggcgtgagacagaagtgggaccagaagagccagaagcccagagacagcagcgtggaggtgagaagcgactgggaggtgaaggaggagatggacttcccccagctgatgaagatgagatacctggaggtgagcgagccccaggacatcgagtgctgcggcgccctggagtactacgacaaggccttcgacagaatcaccaccagaagcgagaagcccctgagaagcatcaagagaatcttccacaccgtgaccaccaccgacgaccccgtgatcagaaagctggccaagacccagggcaacgtgttcgccaccgacgccatcctggccaccctgatgagctgcaccagaagcgtgtacagctgggacatcgtggtgcagagagtgggcagcaagctgttcttcgacaagagagacaacagcgacttcgacctgctgaccgtgagcgagaccgccaacgagcccccccaggacgagggcaacagcttcaacagccccagaaacctggccatggaggccacctacatcaaccacaacttcagccagcagtgcctgagaatgggcaaggagagatacaacttccccaaccccaaccccttcgtggaggacgacatggacaagaacgagatcgccagcgtggcctacagatacagaagatggaagctgggcgacgacatcgacctgatcgtgagatgcgagcacgacggcgtgatgaccggcgccaacggcgaggtgagcttcatcaacatcaagaccctgaacgagtgggacagcagacactgcaacggcgtggactggagacagaagctggacagccagagaggcgccgtgatcgccaccgagctgaagaacaacagctacaagctggccagatggacctgctgcgccctgctggccggcagcgagtacctgaagctgggctacgtgagcagataccacgtgaaggacagcagcagacacgtgatcctgggcacccagcagttcaagcccaacgagttcgccagccagatcaacctgagcgtggagaacgcctggggcatcctgagatgcgtgatcgacatctgcatgaagctggaggagggcaagtacctgatcctgaaggaccccaacaagcaggtgatcagagtgtacagcctgcccgacggcaccttcagcagcgacgaggacgaggaggaggaggaggaggaggaggaggaggaggaggaggaggagacctag

SEQ ID NO: 80913 - DNA, 1215 bp, synthetic construct
  misc_feature 1..1215: note = Description of Artificial Sequence: Synthetic coding sequence
  source 1..1215: mol_type = other DNA
atgttcaccgagaagaccaccacctaccagtaccccagagccatcctgagcgtggacctgagcggcgagaacctgagcgacgtggacttcctggacgacagcagcaccgagagcctgctgctgagcggcgacgagtacaaccaggacttcgacagcaccaacttcgaggagagccaggacgaggacgacgccctgaacgagatcgtgagatgcatctgcgagatggacgaggagaacggcttcatgatccagtgcgaggagtgcctgtgctggcagcacagcgtgtgcatgggcctgctggaggagagcatccccgagcagtacatctgctacatctgcagagacccccccggccagagatggagcgccaagtacagatacgacaaggagtggctgaacaacggcagaatgtgcggcctgagcttcttcaaggagaactacagccacctgaacgccaagaagatcgtgagcacccaccacctgctggccgacgtgtacggcgtgaccgaggtgctgcacggcctgcagctgaagatcggcatcctgaagaacaagcaccaccccgacctgcacctgtgggcctgcagcggcaagagaaaggaccaggaccagatcatcgccggcgtggagaagaagatcgcccaggacaccgtgaacagagaggagaagaagtacgtgcagaaccacaaggagccccccagactgcccctgaagatggagggcacctacatcaccagcgagcacagctaccagaagccccagagcttcggccaggactgcaagagcctggccgaccccggcagcagcgacgacgacgacgtgagcagcctggaggaggagcaggagttccacatgagaagcaagaacagcctgcagtacagcgccaaggagcacggcatgcccgagaagaaccccgccgagggcaacaccgtgttcgtgtacaacgacaagaagggcaccgaggaccccggcgacagccacctgcagtggcagctgaacctgctgacccacatcgagaacgtgcagaacgaggtgaccagcagaatggacctgatcgagaaggaggtggacgtgctggagagctggctggacttcaccggcgagctggagccccccgaccccctggccagactgccccagctgaagagacacatcaagcagctgctgatcgacatgggcaaggtgcagcagatcgccaccctgtgcagcgtgtag

SEQ ID NO: 80914 - DNA, 1074 bp, synthetic construct
  misc_feature 1..1074: note = Description of Artificial Sequence: Synthetic coding sequence
  source 1..1074: mol_type = other DNA
atggccacccccgccgtgcccgtgagcgccccccccgccacccccacccccgtgcccgccgccgcccccgccagcgtgcccgcccccacccccgcccccgccgccgcccccgtgcccgccgccgcccccgccagcagcagcgaccccgccgccgccgccgccgccaccgccgcccccggccagacccccgccagcgcccaggcccccgcccagacccccgcccccgccctgcccggccccgccctgcccggccccttccccggcggcagagtggtgagactgcaccccgtgatcctggccagcatcgtggacagctacgagagaagaaacgagggcgccgccagagtgatcggcaccctgctgggcaccgtggacaagcacagcgtggaggtgaccaactgcttcagcgtgccccacaacgagagcgaggacgaggtggccgtggacatggagttcgccaagaacatgtacgagctgcacaagaaggtgagccccaacgagctgatcctgggctggtacgccaccggccacgacatcaccgagcacagcgtgctgatccacgagtactacagcagagaggcccccaaccccatccacctgaccgtggacaccagcctgcagaacggcagaatgagcatcaaggcctacgtgagcaccctgatgggcgtgcccggcagaaccatgggcgtgatgttcacccccctgaccgtgaagtacgcctactacgacaccgagagaatcggcgtggacctgatcatgaagacctgcttcagccccaacagagtgatcggcctgagcagcgacctgcagcaggtgggcggcgccagcgccagaatccaggacgccctgagcaccgtgctgcagtacgccgaggacgtgctgagcggcaaggtgagcgccgacaacaccgtgggcagattcctgatgagcctggtgaaccaggtgcccaagatcgtgcccgacgacttcgagaccatgctgaacagcaacatcaacgacctgctgatggtgacctacctggccaacctgacccagagccagatcgccctgaacgagaagctggtgaacctgtag

SEQ ID NO: 80915 - DNA, 627 bp, synthetic construct
  misc_feature 1..627: note = Description of Artificial Sequence: Synthetic coding sequence
  source 1..627: mol_type = other DNA
atggagttcgccaagaacatgtacgagctgcacaagaaggtgagccccaacgagctgatcctgggctggtacgccaccggccacgacatcaccgagcacagcgtgctgatccacgagtactacagcagagaggcccccaaccccatccacctgaccgtggacaccagcctgcagaacggcagaatgagcatcaaggcctacgtgagcaccctgatgggcgtgcccggcagaaccatgggcgtgatgttcacccccctgaccgtgaagtacgcctactacgacaccgagagaatcggcgtggacctgatcatgaagacctgcttcagccccaacagagtgatcggcctgagcagcgacctgcagcaggtgggcggcgccagcgccagaatccaggacgccctgagcaccgtgctgcagtacgccgaggacgtgctgagcggcaaggtgagcgccgacaacaccgtgggcagattcctgatgagcctggtgaaccaggtgcccaagatcgtgcccgacgacttcgagaccatgctgaacagcaacatcaacgacctgctgatggtgacctacctggccaacctgacccagagccagatcgccctgaacgagaagctggtgaacctgtag

SEQ ID NO: 80916 - DNA, 1074 bp, synthetic construct; identical to SEQ ID NO: 80914
  misc_feature 1..1074: note = Description of Artificial Sequence: Synthetic coding sequence
  source 1..1074: mol_type = other DNA

SEQ ID NO: 80917 - DNA, 1119 bp, synthetic construct
  misc_feature 1..1119: note = Description of Artificial Sequence: Synthetic coding sequence
  source 1..1119: mol_type = other DNA
atgaacgccgtgatcagcgccagcgccagcttcttcctggacaagatggccacccccgccgtgcccgtgagcgccccccccgccacccccacccccgtgcccgccgccgcccccgccagcgtgcccgcccccacccccgcccccgccgccgcccccgtgcccgccgccgcccccgccagcagcagcgaccccgccgccgccgccgccgccaccgccgcccccggccagacccccgccagcgcccaggcccccgcccagacccccgcccccgccctgcccggccccgccctgcccggccccttccccggcggcagagtggtgagactgcaccccgtgatcctggccagcatcgtggacagctacgagagaagaaacgagggcgccgccagagtgatcggcaccctgctgggcaccgtggacaagcacagcgtggaggtgaccaactgcttcagcgtgccccacaacgagagcgaggacgaggtggccgtggacatggagttcgccaagaacatgtacgagctgcacaagaaggtgagccccaacgagctgatcctgggctggtacgccaccggccacgacatcaccgagcacagcgtgctgatccacgagtactacagcagagaggcccccaaccccatccacctgaccgtggacaccagcctgcagaacggcagaatgagcatcaaggcctacgtgagcaccctgatgggcgtgcccggcagaaccatgggcgtgatgttcacccccctgaccgtgaagtacgcctactacgacaccgagagaatcggcgtggacctgatcatgaagacctgcttcagccccaacagagtgatcggcctgagcagcgacctgcagcaggtgggcggcgccagcgccagaatccaggacgccctgagcaccgtgctgcagtacgccgaggacgtgctgagcggcaaggtgagcgccgacaacaccgtgggcagattcctgatgagcctggtgaaccaggtgcccaagatcgtgcccgacgacttcgagaccatgctgaacagcaacatcaacgacctgctgatggtgacctacctggccaacctgacccagagccagatcgccctgaacgagaagctggtgaacctgtag

SEQ ID NO: 80918 - DNA, 924 bp, synthetic construct
  misc_feature 1..924: note = Description of Artificial Sequence: Synthetic coding sequence
  source 1..924: mol_type = other DNA
atggccacccccgccgtgcccgtgagcgccccccccgccacccccacccccgtgcccgccgccgcccccgcccccgccctgcccggccccgccctgcccggccccttccccggcggcagagtggtgagactgcaccccgtgatcctggccagcatcgtggacagctacgagagaagaaacgagggcgccgccagagtgatcggcaccctgctgggcaccgtggacaagcacagcgtggaggtgaccaactgcttcagcgtgccccacaacgagagcgaggacgaggtggccgtggacatggagttcgccaagaacatgtacgagctgcacaagaaggtgagccccaacgagctgatcctgggctggtacgccaccggccacgacatcaccgagcacagcgtgctgatccacgagtactacagcagagaggcccccaaccccatccacctgaccgtggacaccagcctgcagaacggcagaatgagcatcaaggcctacgtgagcaccctgatgggcgtgcccggcagaaccatgggcgtgatgttcacccccctgaccgtgaagtacgcctactacgacaccgagagaatcggcgtggacctgatcatgaagacctgcttcagccccaacagagtgatcggcctgagcagcgacctgcagcaggtgggcggcgccagcgccagaatccaggacgccctgagcaccgtgctgcagtacgccgaggacgtgctgagcggcaaggtgagcgccgacaacaccgtgggcagattcctgatgagcctggtgaaccaggtgcccaagatcgtgcccgacgacttcgagaccatgctgaacagcaacatcaacgacctgctgatggtgacctacctggccaacctgacccagagccagatcgccctgaacgagaagctggtgaacctgtag

SEQ ID NO: 80919 - DNA, 963 bp, synthetic construct
  misc_feature 1..963: note = Description of Artificial Sequence: Synthetic coding sequence
  source 1..963: mol_type = other DNA
atgcccaccggcgacttcgacagcaagcccagctgggccgaccaggtggaggaggagggcgaggacgacaagtgcgtgaccagcgagctgctgaagggcatccccctggccaccggcgacaccagccccgagcccgagctgctgcccggcgcccccctgcccccccccaaggaggtgatcaacggcaacatcaagaccgtgaccgagtacaagatcgacgaggacggcaagaagttcaagatcgtgagaaccttcagaatcgagaccagaaaggccagcaaggccgtggccagaagaaagaactggaagaagttcggcaacagcgagttcgacccccccggccccaacgtggccaccaccaccgtgagcgacgacgtgagcatgaccttcatcaccagcaaggaggacctgaactgccaggaggaggaggaccccatgaacaagctgaagggccagaagatcgtgagctgcagaatctgcaagggcgaccactggaccaccagatgcccctacaaggacaccctgggccccatgcagaaggagctggccgagcagctgggcctgagcaccggcgagaaggagaagctgcccggcgagctggagcccgtgcaggccacccagaacaagaccggcaagtacgtgccccccagcctgagagacggcgccagcagaagaggcgagagcatgcagcccaacagaagagccgacgacaacgccaccatcagagtgaccaacctgagcgaggacaccagagagaccgacctgcaggagctgttcagacccttcggcagcatcagcagaatctacctggccaaggacaagaccaccggccagagcaagggcttcgccttcatcagcttccacagaagagaggacgccgccagagccatcgccggcgtgagcggcttcggctacgaccacctgatcctgaacgtggagtgggccaagcccagcaccaactag

SEQ ID NO: 80920 - DNA, 1101 bp, synthetic construct
  misc_feature 1..1101: note = Description of Artificial Sequence: Synthetic coding sequence
  source 1..1101: mol_type = other DNA
atgtacagcagacacgcccagagaatcccccccggcaagaagatggccagcagaaaggagggcaccggcagcaccgccaccagcagcagcagcaccgccggcgccgccggcaagggcaagggcaagggcggcagcggcgacagcgccgtgaagcaggtgcagatcgacggcctggtggtgctgaagatcatcaagcactaccaggaggagggccagggcaccgaggtggtgcagggcgtgctgctgggcctggtggtggaggacagactggagatcaccaactgcttccccttcccccagcacaccgaggacgacgccgacttcgacgaggtgcagtaccagatggagatgatgagaagcctgagacacgtgaacatcgaccacctgcacgtgggctggtaccagagcacctactacggcagcttcgtgaccagagccctgctggacagccagttcagctaccagcacgccatcgaggagagcgtggtgctgatctacgaccccatcaagaccgcccagggcagcctgagcctgaaggcctacagactgacccccaagctgatggaggtgtgcaaggagaaggacttcagccccgaggccctgaagaaggccaacatcaccttcgagtacatgttcgaggaggtgcccatcgtgatcaagaacagccacctgatcaacgtgctgatgtgggagctggagaagaagagcgccgtggccgacaagcacgagctgctgagcctggccagcagcaaccacctgggcaagaacctgcagctgctgatggacagagtggacgagatgagccaggacatcgtgaagtacaacacctacatgagaaacaccagcaagcagcagcagcagaagcaccagtaccagcagagaagacagcaggagaacatgcagagacagagcagaggcgagccccccctgcccgaggaggacctgagcaagctgttcaagcccccccagccccccgccagaatggacagcctgctgatcgccggccagatcaacacctactgccagaacatcaaggagttcaccgcccagaacctgggcaagctgttcatggcccaggccctgcaggagtacaacaactag

SEQ ID NO: 80921 - DNA, 1059 bp, synthetic construct
  misc_feature 1..1059: note = Description of Artificial Sequence: Synthetic coding sequence
  source 1..1059: mol_type = other DNA
atggccagcagaaaggagggcaccggcagcaccgccaccagcagcagcagcaccgccggcgccgccggcaagggcaagggcaagggcggcagcggcgacagcgccgtgaagcaggtgcagatcgacggcctggtggtgctgaagatcatcaagcactaccaggaggagggccagggcaccgaggtggtgcagggcgtgctgctgggcctggtggtggaggacagactggagatcaccaactgcttccccttcccccagcacaccgaggacgacgccgacttcgacgaggtgcagtaccagatggagatgatgagaagcctgagacacgtgaacatcgaccacctgcacgtgggctggtaccagagcacctactacggcagcttcgtgaccagagccctgctggacagccagttcagctaccagcacgccatcgaggagagcgtggtgctgatctacgaccccatcaagaccgcccagggcagcctgagcctgaaggcctacagactgacccccaagctgatggaggtgtgcaaggagaaggacttcagccccgaggccctgaagaaggccaacatcaccttcgagtacatgttcgaggaggtgcccatcgtgatcaagaacagccacctgatcaacgtgctgatgtgggagctggagaagaagagcgccgtggccgacaagcacgagctgctgagcctggccagcagcaaccacctgggcaagaacctgcagctgctgatggacagagtggacgagatgagccaggacatcgtgaagtacaacacctacatgagaaacaccagcaagcagcagcagcagaagcaccagtaccagcagagaagacagcaggagaacatgcagagacagagcagaggcgagccccccctgcccgaggaggacctgagcaagctgttcaagcccccccagccccccgccagaatggacagcctgctgatcgccggccagatcaacacctactgccagaacatcaaggagttcaccgcccagaacctgggcaagctgttcatggcccaggccctgcaggagtacaacaactag

SEQ ID NO: 80922 - DNA, 378 bp, synthetic construct
  misc_feature 1..378: note = Description of Artificial Sequence: Synthetic coding sequence
  source 1..378: mol_type = other DNA
atgaagcccatcctgctgcagggccacgagagaagcatcacccagatcaagtacaacagagagggcgacctgctgttcaccgtggccaaggaccccatcgtgaacgtgtggtacagcgtgaacggcgagagactgggcacctacatgggccacaccggcgccgtgtggtgcgtggacgccgactgggacaccaagcacgtgctgaccggcagcgccgacaacagctgcagactgtgggactgcgagaccggcaagcagctggccctgctgaagaccaacagcgccgtgagaacctgcggcttcgacttcggcggcaacatcatcatgttcagcaccgacaagcagatgggctaccagtgcttcgtgagcttcttctag

SEQ ID NO: 80923 - DNA, 978 bp, synthetic construct
  misc_feature 1..978: note = Description of Artificial Sequence: Synthetic coding sequence
  source 1..978: mol_type = other DNA
atgaagcccatcctgctgcagggccacgagagaagcatcacccagatcaagtacaacagagagggcgacctgctgttcaccgtggccaaggaccccatcgtgaacgtgtggtacagcgtgaacggcgagagactgggcacctacatgggccacaccggcgccgtgtggtgcgtggacgccgactgggacaccaagcacgtgctgaccggcagcgccgacaacagctgcagactgtgggactgcgagaccggcaagcagctggccctgctgaagaccaacagcgccgtgagaacctgcggcttcgacttcggcggcaacatcatcatgttcagcaccgacaagcagatgggctaccagtgcttcgtgagcttcttcgacctgagagaccccagccagatcgacaacaacgagccctacatgaagatcccctgcaacgacagcaagatcaccagcgccgtgtggggccccctgggcgagtgcatcatcgccggccacgagagcggcgagctgaaccagtacagcgccaagagcggcgaggtgctggtgaacgtgaaggagcacagcagacagatcaacgacatccagctgagcagagacatgaccatgttcgtgaccgccagcaaggacaacaccgccaagctgttcgacagcaccaccctggagcaccagaagaccttcagaaccgagagacccgtgaacagcgccgccctgagccccaactacgaccacgtggtgctgggcggcggccaggaggccatggacgtgaccaccaccagcaccagaatcggcaagttcgaggccagattcttccacctggccttcgaggaggagttcggcagagtgaagggccacttcggccccatcaacagcgtggccttccaccccgacggcaagagctacagcagcggcggcgaggacggctacgtgagaatccactacttcgacccccagtacttcgagttcgagttcgaggcctag

SEQ ID NO: 80924 - DNA, 777 bp, synthetic construct
  misc_feature 1..777: note = Description of Artificial Sequence: Synthetic coding sequence
  source 1..777: mol_type = other DNA
atggccgccgccgccgccgccgccggcgacagcgacagctgggacgccgacgccttcagcgtggaggaccccgtgagaaaggtgggcggcggcggcaccgccggcggcgacagatgggagggcgaggacgaggacgaggacgtgaaggacaactgggacgacgacgacgacgagaagaaggaggaggccgaggtgaagcccgaggtgaagatcagcgagaagaagaagatcgccgagaagatcaaggagaaggagagacagcagaagaagagacaggaggagatcaagaagagactggaggagcccgaggagcccaaggtgctgacccccgaggagcagctggccgacaagctgagactgaagaagctgcaggaggagagcgacctggagctggccaaggagaccttcggcgtgaacaacgccgtgtacggcatcgacgccatgaaccccagcagcagagacgacttcaccgagttcggcaagctgctgaaggacaagatcacccagtacgagaagagcctgtactacgccagcttcctggaggtgctggtgagagacgtgtgcatcagcctggagatcgacgacctgaagaagatcaccaacagcctgaccgtgctgtgcagcgagaagcagaagcaggagaagcagagcaaggccaagaagaagaagaagggcgtggtgcccggcggcggcctgaaggccaccatgaaggacgacctggccgactacggcggctacgacggcggctacgtgcaggactacgaggacttcatgtag

SEQ ID NO: 80925 - DNA, 657 bp, synthetic construct
  misc_feature 1..657: note = Description of Artificial Sequence: Synthetic coding sequence
  source 1..657: mol_type = other DNA
atggccatgttcgagcagatgagagccaacgtgggcaagctgctgaagggcatcgacagatacaaccccgagaacctggccaccctggagagatacgtggagacccaggccaaggagaacgcctacgacctggaggccaacctggccgtgctgaagctgtaccagttcaaccccgccttcttccagaccaccgtgaccgcccagatcctgctgaaggccctgaccaacctgccccacaccgacttcaccctgtgcaagtgcatgatcgaccaggcccaccaggaggagagacccatcagacagatcctgtacctgggcgacctgctggagacctgccacttccaggccttctggcaggccctggacgagaacatggacctgctggagggcatcaccggcttcgaggacagcgtgagaaagttcatctgccacgtggtgggcatcacctaccagcacatcgacagatggctgctggccgagatgctgggcgacctgagcgacagccagctgaaggtgtggatgagcaagtacggctggagcgccgacgagagcggccagatcttcatctgcagccaggaggagagcatcaagcccaagaacatcgtggagaagatcgacttcgacagcgtgagcagcatcatggccagcagccagtag

SEQ ID NO: 80926 - DNA, 375 bp, synthetic construct
  misc_feature 1..375: note = Description of Artificial Sequence: Synthetic coding sequence
  source 1..375: mol_type = other DNA
atgatcgaccaggcccaccaggaggagagacccatcagacagatcctgtacctgggcgacctgctggagacctgccacttccaggccttctggcaggccctggacgagaacatggacctgctggagggcatcaccggcttcgaggacagcgtgagaaagttcatctgccacgtggtgggcatcacctaccagcacatcgacagatggctgctggccgagatgctgggcgacctgagcgacagccagctgaaggtgtggatgagcaagtacggctggagcgccgacgagagcggccagatcttcatctgcagccaggaggagagcatcaagcccaagaacatcgtggagaagatcgacttcgacagcgagtggtag

SEQ ID NO: 80927 - DNA, 636 bp, synthetic construct
  misc_feature 1..636: note = Description of Artificial Sequence: Synthetic coding sequence
  source 1..636: mol_type = other DNA
atggccatgttcgagcagatgagagccaacgtgggcaagctgctgaagggcatcgacagatacaaccccgagaacctggccaccctggagagatacgtggagacccaggccaaggagaacgcctacgacctggaggccaacctggccgtgctgaagctgtaccagttcaaccccgccttcttccagaccaccgtgaccgcccagatcctgctgaaggccctgaccaacctgccccacaccgacttcaccctgtgcaagtgcatgatcgaccaggcccaccaggaggagagacccatcagacagatcctgtacctgggcgacctgctggagacctgccacttccaggccttctggcaggccctggacgagaacatggacctgctggagggcatcaccggcttcgaggacagcgtgagaaagttcatctgccacgtggtgggcatcacctaccagcacatcgacagatggctgctggccgagatgctgggcgacctgagcgacagccagctgaaggtgtggatgagcaagtacggctggagcgccgacgagagcggccagatcttcatctgcagccaggaggagagcatcaagcccaagaacatcgtggagaagatcgacttcgacagcgagtggtag

SEQ ID NO: 80928 - DNA, 1125 bp, synthetic construct
  misc_feature 1..1125: note = Description of Artificial Sequence: Synthetic coding sequence
  source 1..1125: mol_type = other DNA
atgagcgtgcccgccttcatcgacatcagcgaggaggaccaggccgccgagctgagagcctacctgaagagcaagggcgccgagatcagcgaggagaacagcgagggcggcctgcacgtggacctggcccagatcatcgaggcctgcgacgtgtgcctgaaggaggacgacaaggacgtggagagcgtgatgaacagcgtggtgagcctgctgctgatcctggagcccgacaagcaggaggccctgatcgagagcctgtgcgagaagctggtgaagttcagagagggcgagagacccagcctgagactgcagctgctgagcaacctgttccacggcatggacaagaacacccccgtgagatacaccgtgtactgcagcctgatcaaggtggccgccagctgcggcgccatccagtacatccccaccgagctggaccaggtgagaaagtggatcagcgactggaacctgaccaccgagaagaagcacaccctgctgagactgctgtacgaggccctggtggactgcaagaagagcgacgccgccagcaaggtgatggtggagctgctgggcagctacaccgaggacaacgccagccaggccagagtggacgcccacagatgcatcgtgagagccctgaaggaccccaacgccttcctgttcgaccacctgctgaccctgaagcccgtgaagttcctggagggcgagctgatccacgacctgctgaccatcttcgtgagcgccaagctggccagctacgtgaagttctaccagaacaacaaggacttcatcgacagcctgggcctgctgcacgagcagaacatggccaagatgagactgctgaccttcatgggcatggccgtggagaacaaggagatcagcttcgacaccatgcagcaggagctgcagatcggcgccgacgacgtggaggccttcgtgatcgacgccgtgagaaccaagatggtgtactgcaagatcgaccagacccagagaaaggtggtggtgagccacagcacccacagaaccttcggcaagcagcagtggcagcagctgtacgacaccctgaacgcctggaagcagaacctgaacaaggtgaagaacagcctgctgagcctgagcgacacctag

SEQ ID NO: 80929 - DNA, 2724 bp, synthetic construct
  misc_feature 1..2724: note = Description of Artificial Sequence: Synthetic coding sequence
  source 1..2724: mol_type = other DNA
gtggagagcgccatcgccgagggcggcgccagcagattcagcgccagcagcggcggcggcggcagcagaggcgccccccagcactaccccaagaccgccggcaacagcgagttcctgggcaagacccccggccagaacgcccagaagtggatccccgccagaagcaccagaagagacgacaacagcgccgccaacaacagcgccaacgagaaggagagacacgacgccatcttcagaaaggtgagaggcatcctgaacaagctgacccccgagaagttcgacaagctgtgcctggagctgctgaacgtgggcgtggagagcaagctgatcctgaagggcgtgatcctgctgatcgtggacaaggccctggaggagcccaagtacagcagcctgtacgcccagctgtgcctgagactggccgaggacgcccccaacttcgacggccccgccgccgagggccagcccggccagaagcagagcaccaccttcagaagactgctgatcagcaagctgcaggacgagttcgagaacagaaccagaaacgtggacgtgtacgacaagagagagaaccccctgctgcccgaggaggaggagcagagagccatcgccaagatcaagatgctgggcaacatcaagttcatcggcgagctgggcaagctggacctgatccacgagagcatcctgcacaagtgcatcaagaccctgctggagaagaagaagagagtgcagctgaaggacatgggcgaggacctggagtgcctgtgccagatcatgagaaccgtgggccccagactggaccacgagagagccaagagcctgatggaccagtacttcgccagaatgtgcagcctgatgctgagcaaggagctgcccgccagaatcagattcctgctgcaggacaccgtggagctgagagagcaccactgggtgcccagaaaggccttcctggacaacggccccaagaccatcaaccagatcagacaggacgccgtgaaggacctgggcgtgttcatccccgcccccatggcccagggcatgagaagcgacttcttcctggagggccccttcatgccccccagaatgaagatggacagagaccccctgggcggcctggccgacatgttcggccagatgcccggcagcggcatcggcaccggccccggcgtgatccaggacagattcagccccaccatgggcagacacagaagcaaccagctgttcaacggccacggcggccacatcatgccccccacccagagccagttcggcgagatgggcggcaagttcatgaagagccagggcctgagccagctgtaccacaaccagagccagggcctgctgagccagctgcagggccagagcaaggacatgccccccagattcagcaagaagggccagctgaacgccgacgagatcagcctgagacccgcccagagcttcctgatgaacaagaaccaggtgcccaagctgcagccccagatcaccatgatcccccccagcgcccagccccccagaacccagaccccccccctgggccagaccccccagctgggcctgaagaccaacccccccctgatccaggagaagcccgccaagaccagcaagaagcccccccccagcaaggaggagctgctgaagctgaccgagaccgtggtgaccgagtacctgaacagcggcaacgccaacgaggccgtgaacggcgtgagagagatgagagcccccaagcacttcctgcccgagatgctgagcaaggtgatcatcctgagcctggacagaagcgacgaggacaaggagaaggccagcagcctgatcagcctgctgaagcaggagggcatcgccaccagcgacaacttcatgcaggccttcctgaacgtgctggaccagtgccccaagctggaggtggacatccccctggtgaagagctacctggcccagttcgccgccagagccatcatcagcgagctggtgagcatcagcgagctggcccagcccctggagagcggcacccacttccccctgttcctgctgtgcctgcagcagctggccaagctgcaggacagagagtggctgaccgagctgttccagcagagcaaggtgaacatgcagaagatgctgcccgagatcgaccagaacaaggacagaatgctggagatcctggagggcaagggcctgagcttcctgttccccctgctgaagctggagaaggagctgctgaagcagatcaagctggaccccagcccccagaccatctacaagtggatcaaggacaacatcagccccaagctgcacgtggacaagggcttcgtgaacatcctgatgaccagcttcctgcagtacatcagcagcgaggtgaacccccccagcgacgagaccgacagcagcagcgcccccagcaaggagcagctggagcaggagaagcagctgctgctgagcttcaagcccgtgatgcagaagttcctgcacgaccacgtggacctgcaggtgagcgccctgtacgccctgcaggtgcactgctacaacagcaacttccccaagggcatgctgctgagattcttcgtgcacttctacgacatggagatcatcgaggaggaggccttcctggcctggaaggaggacatcacccaggagttccccggcaagggcaaggccctgttccaggtgaaccagtggctgacctggctggagaccgccgaggaggaggagagcgaggaggaggccgactag

SEQ ID NO: 80930 - DNA, 762 bp, synthetic construct
  misc_feature 1..762: note = Description of Artificial Sequence: Synthetic coding sequence
  source 1..762: mol_type = other DNA
atgcaggccttcctgaacgtgctggaccagtgccccaagctggaggtggacatccccctggtgaagagctacctggcccagttcgccgccagagccatcatcagcgagctggtgagcatcagcgagctggcccagcccctggagagcggcacccacttccccctgttcctgctgtgcctgcagcagctggccaagctgcaggacagagagtggctgaccgagctgttccagcagagcaaggtgaacatgcagaagatgctgcccgagatcgaccagaacaaggacagaatgctggagatcctggagggcaagggcctgagcttcctgttccccctgctgaagctggagaaggagctgctgaagcagatcaagctggaccccagcccccagaccatctacaagtggatcaaggacaacatcagccccaagctgcacgtggacaagggcttcgtgaacatcctgatgaccagcttcctgcagtacatcagcagcgaggtgaacccccccagcgacgagaccgacagcagcagcgcccccagcaaggagcagctggagcaggagaagcagctgctgctgagcttcaagcccgtgatgcagaagttcctgcacgaccacgtggacctgcaggtgagcgccctgtacgccctgcaggtgcactgctacaacagcaacttccccaagggcatgctgctgttcctgtgcaccagcatgacctggaagctgctgaagaagaagctgagctggctgggcaagaagatctag

SEQ ID NO: 80931 - DNA, 2610 bp, synthetic construct
  misc_feature 1..2610: note = Description of Artificial Sequence: Synthetic coding sequence
  source 1..2610: mol_type = other DNA
gtggagagcgccatcgccgagggcggcgccagcagattcagcgccagcagcggcggcggcggcagcagaggcgccccccagcactaccccaagaccgccggcaacagcgagttcctgggcaagacccccggccagaacgcccagaagtggatccccgccagaagcaccagaagagacgacaacagcgccgccaacaacagcgccaacgagaaggagagacacgacgccatcttcagaaaggtgagaggcatcctgaacaagctgacccccgagaagttcgacaagctgtgcctggagctgctgaacgtgggcgtggagagcaagctgatcctgaagggcgtgatcctgctgatcgtggacaaggccctggaggagcccaagtacagcagcctgtacgcccagctgtgcctgagactggccgaggacgcccccaacttcgacggccccgccgccgagggccagcccggccagaagcagagcaccaccttcagaagactgctgatcagcaagctgcaggacgagttcgagaacagaaccagaaacgtggacgtgtacgacaagagagagaaccccctgctgcccgaggaggaggagcagagagccatcgccaagatcaagatgctgggcaacatcaagttcatcggcgagctgggcaagctggacctgatccacgagagcatcctgcacaagtgcatcaagaccctgctggagaagaagaagagagtgcagctgaaggacatgggcgaggacctggagtgcctgtgccagatcatgagaaccgtgggccccagactggaccacgagagagccaagagcctgatggaccagtacttcgccagaatgtgcagcctgatgctgagcaaggagctgcccgccagaatcagattcctgctgcaggacaccgtggagctgagagagcaccactgggtgcccagaaaggccttcctggacaacggccccaagaccatcaaccagatcagacaggacgccgtgaaggacctgggcgtgttcatccccgcccccatggcccagggcatgagaagcgacttcttcctggagggccccttcatgccccccagaatgaagatggacagagaccccctgggcggcctggccgacatgttcggccagatgcccggcagcggcatcggcaccggccccggcgtgatccaggacagattcagccccaccatgggcagacacagaagcaaccagctgttcaacggccacggcggccacatcatgccccccacccagagccagttcggcgagatgggcggcaagttcatgaagagccagatcagcctgagacccgcccagagcttcctgatgaacaagaaccaggtgcccaagctgcagccccagatcaccatgatcccccccagcgcccagccccccagaacccagaccccccccctgggccagaccccccagctgggcctgaagaccaacccccccctgatccaggagaagcccgccaagaccagcaagaagcccccccccagcaaggaggagctgctgaagctgaccgagaccgtggtgaccgagtacctgaacagcggcaacgccaacgaggccgtgaacggcgtgagagagatgagagcccccaagcacttcctgcccgagatgctgagcaaggtgatcatcctgagcctggacagaagcgacgaggacaaggagaaggccagcagcctgatcagcctgctgaagcaggagggcatcgccaccagcgacaacttcatgcaggccttcctgaacgtgctggaccagtgccccaagctggaggtggacatccccctggtgaagagctacctggcccagttcgccgccagagccatcatcagcgagctggtgagcatcagcgagctggcccagcccctggagagcggcacccacttccccctgttcctgctgtgcctgcagcagctggccaagctgcaggacagagagtggctgaccgagctgttccagcagagcaaggtgaacatgcagaagatgctgcccgagatcgaccagaacaaggacagaatgctggagatcctggagggcaagggcctgagcttcctgttccccctgctgaagctggagaaggagctgctgaagcagatcaagctggaccccagcccccagaccatctacaagtggatcaaggacaacatcagccccaagctgcacgtggacaagggcttcgtgaacatcctgatgaccagcttcctgcagtacatcagcagcgaggtgaacccccccagcgacgagaccgacagcagcagcgcccccagcaaggagcagctggagcaggagaagcagctgctgctgagcttcaagcccgtgatgcagaagttcctgcacgaccacgtggacctgcaggtgagcgccctgtacgccctgcaggtgcactgctacaacagcaacttccccaagggcatgctgctgagattcttcgtgcacttctacgacatggagatcatcgaggaggaggccttcctggcctggaaggaggacatcacccaggagttccccggcaagggcaaggccctgttccaggtgaaccagtggctgacctggctggagaccgccgaggaggaggagagcgaggaggaggccgactag

SEQ ID NO: 80932 - DNA, 2943 bp, synthetic construct
  misc_feature 1..2943: note = Description of Artificial Sequence: Synthetic coding sequence
  source 1..2943: mol_type = other DNA
atggccggctggcccacccccgccggcaccagaccctggagaaccgaggccagactgtgcagcgacggcgagggcgcctggctgggccccctggccccctggagagaggccagactggccagcagaagaggcggcatcagcttcctgctgagcccccccctgcccacccccagcatcaacatcatcctgctgaagatcctgagatgccaggccgccaaggtggagagcgccatcgccgagggcggcgccagcagattcagcgccagcagcggcggcggcggcagcagaggcgccccccagcactaccccaagaccgccggcaacagcgagttcctgggcaagacccccggccagaacgcccagaagtggatccccgccagaagcaccagaagagacgacaacagcgccgccaacaacagcgccaacgagaaggagagacacgacgccatcttcagaaaggtgagaggcatcctgaacaagctgacccccgagaagttcgacaagctgtgcctggagctgctgaacgtgggcgtggagagcaagctgatcctgaagggcgtgatcctgctgatcgtggacaaggccctggaggagcccaagtacagcagcctgtacgcccagctgtgcctgagactggccgaggacgcccccaacttcgacggccccgccgccgagggccagcccggccagaagcagagcaccaccttcagaagactgctgatcagcaagctgcaggacgagttcgagaacagaaccagaaacgtggacgtgtacgacaagagagagaaccccctgctgcccgaggaggaggagcagagagccatcgccaagatcaagatgctgggcaacatcaagttcatcggcgagctgggcaagctggacctgatccacgagagcatcctgcacaagtgcatcaagaccctgctggagaagaagaagagagtgcagctgaaggacatgggcgaggacctggagtgcctgtgccagatcatgagaaccgtgggccccagactggaccacgagagagccaagagcctgatggaccagtacttcgccagaatgtgcagcctgatgctgagcaaggagctgcccgccagaatcagattcctgctgcaggacaccgtggagctgagagagcaccactgggtgcccagaaaggccttcctggacaacggccccaagaccatcaaccagatcagacaggacgccgtgaaggacctgggcgtgttcatccccgcccccatggcccagggcatgagaagcgacttcttcctggagggccccttcatgccccccagaatgaagatggacagagaccccctgggcggcctggccgacatgttcggccagatgcccggcagcggcatcggcaccggccccggcgtgatccaggacagattcagccccaccatgggcagacacagaagcaaccagctgttcaacggccacggcggccacatcatgccccccacccagagccagttcggcgagatgggcggcaagttcatgaagagccagggcctgagccagctgtaccacaaccagagccagggcctgctgagccagctgcagggccagagcaaggacatgccccccagattcagcaagaagggccagctgaacgccgacgagatcagcctgagacccgcccagagcttcctgatgaacaagaaccaggtgcccaagctgcagccccagatcaccatgatcccccccagcgcccagccccccagaacccagaccccccccctgggccagaccccccagctgggcctgaagaccaacccccccctgatccaggagaagcccgccaagaccagcaagaagcccccccccagcaaggaggagctgctgaagctgaccgagaccgtggtgaccgagtacctgaacagcggcaacgccaacgaggccgtgaacggcgtgagagagatgagagcccccaagcacttcctgcccgagatgctgagcaaggtgatcatcctgagcctggacagaagcgacgaggacaaggagaaggccagcagcctgatcagcctgctgaagcaggagggcatcgccaccagcgacaacttcatgcaggccttcctgaacgtgctggaccagtgccccaagctggaggtggacatccccctggtgaagagctacctggcccagttcgccgccagagccatcatcagcgagctggtgagcatcagcgagctggcccagcccctggagagcggcacccacttccccctgttcctgctgtgcctgcagcagctggccaagctgcaggacagagagtggctgaccgagctgttccagcagagcaaggtgaacatgcagaagatgctgcccgagatcgaccagaacaaggacagaatgctggagatcctggagggcaagggcctgagcttcctgttccccctgctgaagctggagaaggagctgctgaagcagatcaagctggaccccagcccccagaccatctacaagtggatcaaggacaacatcagccccaagctgcacgtggacaagggcttcgtgaacatcctgatgaccagcttcctgcagtacatcagcagcgaggtgaacccccccagcgacgagaccgacagcagcagcgcccccagcaaggagcagctggagcaggagaagcagctgctgctgagcttcaagcccgtgatgcagaagttcctgcacgaccacgtggacctgcaggtgagcgccctgtacgccctgcaggtgcactgctacaacagcaacttccccaagggcatgctgctgagattcttcgtgcacttctacgacatggagatcatcgaggaggaggccttcctggcctggaaggaggacatcacccaggagttccccggcaagggcaaggccctgttccaggtgaaccagtggctgacctggctggagaccgccgaggaggaggagagcgaggaggaggccgactag

SEQ ID NO: 80933 - DNA, 735 bp, synthetic construct
  misc_feature 1..735: note = Description of Artificial Sequence: Synthetic coding sequence
  source 1..735: mol_type = other DNA
gtggagagcgccatcgccgagggcggcgccagcagattcagcgccagcagcggcggcggcggcagcagaggcgccccccagcactaccccaagaccgccggcaacagcgagttcctgggcaagacccccggccagaacgcccagaagtggatccccgccagaagcaccagaagagacgacaacagcgccgccaacaacagcgccaacgagaaggagagacacgacgccatcttcagaaaggtgagaggcatcctgaacaagctgacccccgagaagttcgacaagctgtgcctggagctgctgaacgtgggcgtggagagcaagctgatcctgaagggcgtgatcctgctgatcgtggacaaggccctggaggagcccaagtacagcagcctgtacgcccagctgtgcctgagactggccgaggacgcccccaacttcgacggccccgccgccgagggccagcccggccagaagcagagcaccaccttcagaagactgctgatcagcaagctgcaggacgagttcgagaacagaaccagaaacgtggacgtgtacgacaagagagagaaccccctgctgcccgaggaggaggagcagagagccatcgccaagatcaagatgctgggcaacatcaagttcatcggcgagctgggcaagctggacctgatccacgagagcatcctgcacaagtgcatcaagaccctgctggagaagaagaagagagtgcagctgtag

SEQ ID NO: 80934 - DNA, 2724 bp, synthetic construct; identical to SEQ ID NO: 80929
  misc_feature 1..2724: note = Description of Artificial Sequence: Synthetic coding sequence
  source 1..2724: mol_type = other DNA

SEQ ID NO: 80935 - DNA, 2724 bp, synthetic construct; identical to SEQ ID NO: 80929
  misc_feature 1..2724: note = Description of Artificial Sequence: Synthetic coding sequence
  source 1..2724: mol_type = other DNA

SEQ ID NO: 80936 - DNA, 375 bp, synthetic construct
  misc_feature 1..375: note = Description of Artificial Sequence: Synthetic coding sequence
  source 1..375: mol_type = other DNA
gtggagagcgccatcgccgagggcggcgccagcagattcagcgccagcagcggcggcggcggcagcagaggcgccccccagcactaccccaagaccgccggcaacagcgagttcctgggcaagacccccggccagaacgcccagaagtggatccccgccagaagcaccagaagagacgacaacagcgccgccaacaacagcgccaacgagaaggagagacacgacgccatcttcagaaaggtgagaggcatcctgaacaagctgacccccgagaagttcgacaagctgtgcctggagctgctgaacgtgggcgtggagagcaagctgatcctgaagggcgtgatcctgctgatcgtggacaaggccctggagtag

SEQ ID NO: 80937 - DNA, 339 bp, synthetic construct
  misc_feature 1..339: note = Description of Artificial Sequence: Synthetic coding sequence
  source 1..339: mol_type = other DNA
gtggagagcgccatcgccgagggcggcgccagcagattcagcgccagcagcggcggcggcggcagcagaggcgccccccagcactaccccaagaccgccggcaacagcgagttcctgggcaagacccccggccagaacgcccagaagtggatccccgccagaagcaccagaagagacgacaacagcgccgccaacaacagcgccaacgagaaggagagacacgacgccatcttcagaaaggtgagaggcatcctgaacaagctgacccccgagaagttcgacaagctgtgcctggagctgctgaacgtgggcgtggagagcaagctgatcctgaagtag

SEQ ID NO: 80938 - DNA, 351 bp, synthetic construct
  misc_feature 1..351: note = Description of Artificial Sequence: Synthetic coding sequence
  source 1..351: mol_type = other DNA
gtggagagcgccatcgccgagggcggcgccagcagattcagcgccagcagcggcggcggcggcagcagaggcgccccccagcactaccccaagaccgccggcaacagcgagttcctgggcaagacccccggccagaacgcccagaagtggatccccgccagaagcaccagaagagacgacaacagcgccgccaacaacagcgccaacgagaaggagagacacgacgccatcttcagaaaggtgagaggcatcctgaacaagctgacccccgagaagttcgacaagctgtgcctggagctgctgaacgtgggcgtggagagcaagctgatcctgaagggcgtgatcctgtag

SEQ ID NO: 80939 - DNA, 1335 bp, synthetic construct
  misc_feature 1..1335: note = Description of Artificial Sequence: Synthetic coding sequence
  source 1..1335: mol_type = other DNA
gtggagagcgccatcgccgagggcggcgccagcagattcagcgccagcagcggcggcggcggcagcagaggcgccccccagcactaccccaagaccgccggcaacagcgagttcctgggcaagacccccggccagaacgcccagaagtggatccccgccagaagcaccagaagagacgacaacagcgccgccaacaacagcgccaacgagaaggagagacacgacgccatcttcagaaaggtgagaggcatcctgaacaagctgacccccgagaagttcgacaagctgtgcctggagctgctgaacgtgggcgtggagagcaagctgatcctgaagggcgtgatcctgctgatcgtggacaaggccctggaggagcccaagtacagcagcctgtacgcccagctgtgcctgagactggccgaggacgcccccaacttcgacggccccgccgccgagggccagcccggccagaagcagagcaccaccttcagaagactgctgatcagcaagctgcaggacgagttcgagaacagaaccagaaacgtggacgtgtacgacaagagagagaaccccctgctgcccgaggaggaggagcagagagccatcgccaagatcaagatgctgggcaacatcaagttcatcggcgagctgggcaagctggacctgatccacgagagcatcctgcacaagtgcatcaagaccctgctggagaagaagaagagagtgcagctgaaggacatgggcgaggacctggagtgcctgtgccagatcatgagaaccgtgggccccagactggaccacgagagagccaagagcctgatggaccagtacttcgccagaatgtgcagcctgatgctgagcaaggagctgcccgccagaatcagattcctgctgcaggacaccgtggagctgagagagcaccactgggtgcccagaaaggccttcctggacaacggccccaagaccatcaaccagatcagacaggacgccgtgaaggacctgggcgtgttcatccccgcccccatggcccagggcatgagaagcgacttcttcctggagggccccttcatgccccccagaatgaagatggacagagaccccctgggcggcctggccgacatgttcggccagatgcccggcagcggcatcggcaccggccccggcgtgatccaggacagattcagccccaccatgggcagacacagaagcaaccagctgttcaacggccacggcggccacatcatgccccccacccagagccagttcggcgagatgggcggcaagttcatgaagagccagatcagcctgagacccgcccagagcttcctgatgtag

SEQ ID NO: 80940 - DNA, 849 bp, synthetic construct
  misc_feature 1..849: note = Description of Artificial Sequence: Synthetic coding sequence
  source 1..849: mol_type = other DNA
gtggagagcgccatcgccgagggcggcgccagcagattcagcgccagcagcggcggcggcggcagcagaggcgccccccagcactaccccaagaccgccggcaacagcgagttcctgggcaagacccccggccagaacgcccagaagtggatccccgccagaagcaccagaagagacgacaacagcgccgccaacaacagcgccaacgagaaggagagacacgacgccatcttcagaaaggtgagaggcatcctgaacaagctgacccccgagaagttcgacaagctgtgcctggagctgctgaacgtgggcgtggagagcaagctgatcctgaagggcgtgatcctgctgatcgtggacaaggccctggaggagcccaagtacagcagcctgtacgcccagctgtgcctgagactggccgaggacgcccccaacttcgacggccccgccgccgagggccagcccggccagaagcagagcaccaccttcagaagactgctgatcagcaagctgcaggacgagttcgagaacagaaccagaaacgtggacgtgtacgacaagagagagaaccccctgctgcccgaggaggaggagcagagagccatcgccaagatcaagatgctgggcaacatcaagttcatcggcgagctgggcaagctggacctgatccacgagagcatcctgcacaagtgcatcaagaccctgctggagaagaagaagagagtgcagctgaaggacatgggcgaggacctggagtgcctgtgccagatcatgagaaccgtgggccccagactggaccacgagagagccaagagcctgatggaccagtacttcgccagaatgtgctag

SEQ ID NO: 80941 - DNA, 393 bp, synthetic construct
  misc_feature 1..393: note = Description of Artificial Sequence: Synthetic coding sequence
  source 1..393: mol_type = other DNA
gtggagagcgccatcgccgagggcggcgccagcagattcagcgccagcagcggcggcggcggcagcagaggcgccccccagcactaccccaagaccgccggcaacagcgagttcctgggcaagacccccggccagaacgcccagaagtggatccccgccagaagcaccagaagagacgacaacagcgccgccaacaacagcgccaacgagaaggagagacacgacgccatcttcagaaaggtgagaggcatcctgaacaagctgacccccgagaagttcgacaagctgtgcctggagctgctgaacgtgggcgtggagagcaagctgatcctgaagggcgtgatcctgctgatcgtggacaaggccctggaggagcccaagtacagcagctag

SEQ ID NO: 80942 - DNA, 1221 bp, synthetic construct
  misc_feature 1..1221: note = Description of Artificial Sequence: Synthetic coding sequence
  source 1..1221: mol_type = other DNA
atgagcgccagccaggacagcagaagcagagacaacggccccgacggcatggagcccgagggcgtgatcgagagcaactggaacgagatcgtggacagcttcgacgacatgaacctgagcgagagcctgctgagaggcatctacgcctacggcttcgagaagcccagcgccatccagcagagagccatcctgccctgcatcaagggctacgacgtgatcgcccaggcccagagcggcaccggcaagaccgccaccttcgccatcagcatcctgcagcagatcgagctggacctgaaggccacccaggccctggtgctggcccccaccagagagctggcccagcagatccagaaggtggtgatggccctgggcgactacatgggcgccagctgccacgcctgcatcggcggcaccaacgtgagagccgaggtgcagaagctgcagatggaggccccccacatcatcgtgggcacccccggcagagtgttcgacatgctgaacagaagatacctgagccccaagtacatcaagatgttcgtgctggacgaggccgacgagatgctgagcagaggcttcaaggaccagatctacgacatcttccagaagctgaacagcaacacccaggtggtgctgctgagcgccaccatgcccagcgacgtgctggaggtgaccaagaagttcatgagagaccccatcagaatcctggtgaagaaggaggagctgaccctggagggcatcagacagttctacatcaacgtggagagagaggagtggaagctggacaccctgtgcgacctgtacgagaccctgaccatcacccaggccgtgatcttcatcaacaccagaagaaaggtggactggctgaccgagaagatgcacgccagagacttcaccgtgagcgccatgcacggcgacatggaccagaaggagagagacgtgatcatgagagagttcagaagcggcagcagcagagtgctgatcaccaccgacctgctggccagaggcatcgacgtgcagcaggtgagcctggtgatcaactacgacctgcccaccaacagagagaactacatccacagaatcggcagaggcggcagattcggcagaaagggcgtggccatcaacatggtgaccgaggaggacaagagaaccctgagagacatcgagaccttctacaacaccagcatcgaggagatgcccctgaacgtggccgacctgatctag

SEQ ID NO: 80943 - DNA, 441 bp, synthetic construct
  misc_feature 1..441: note = Description of Artificial Sequence: Synthetic coding sequence
  source 1..441: mol_type = other DNA
atggagcccgagggcgtgatcgagagcaactggaacgagatcgtggacagcttcgacgacatgaacctgagcgagagcctgctgagaggcatctacgcctacggcttcgagaagcccagcgccatccagcagagagccatcctgccctgcatcaagggctacgacgtgatcgcccaggcccagagcggcaccggcaagaccgccaccttcgccatcagcatcctgcagcagatcgagctggacctgaaggccacccaggccctggtgctggcccccaccagagagctggcccagcaggtgagagtggccagcatccccagcttcagagccgacctgggcatgatgagcatcatccagggccccgagaagagcagcctgatcaccaccctgggcggcagacacggctgccccaacaccctggagacctgctgggtgaactag

SEQ ID NO: 80944 - DNA, 603 bp, synthetic construct
  misc_feature 1..603: note = Description of Artificial Sequence: Synthetic coding sequence
  source 1..603: mol_type = other DNA
atgttcgtgctggacgaggccgacgagatgctgagcagaggcttcaaggaccagatctacgacatcttccagaagctgaacagcaacacccaggtggtgctgctgagcgccaccatgcccagcgacgtgctggaggtgaccaagaagttcatgagagaccccatcagaatcctggtgaagaaggaggagctgaccctggagggcatcagacagttctacatcaacgtggagagagaggagtggaagctggacaccctgtgcgacctgtacgagaccctgaccatcacccaggccgtgatcttcatcaacaccagaagaaaggtggactggctgaccgagaagatgcacgccagagacttcaccgtgagcgccatggtgtgcctgcccgccgccagcctgctgtgggtgtgccccagcgaggtgagctacctgaagcccggcttcctggagcccagatgcctgcccggcctgctgcacatctgcttcctgttccagcacggcgacatggaccagaaggagagagacgtgatcatgagagagttcagaagcggcagcagcagagtgctgatcaccaccgacctgctggtgagcagaggcaactag

SEQ ID NO: 80945 - DNA, 1026 bp, synthetic construct
  misc_feature 1..1026: note = Description of Artificial Sequence: Synthetic coding sequence
  source 1..1026: mol_type = other DNA
atgagcgccagccaggacagcagaagcagagacaacggccccgacggcatggagcccgagggcgtgatcgagagcaactggaacgagatcgtggacagcttcgacgacatgaacctgagcgagagcctgctgagaggcatctacgcctacggcttcgagaagcccagcgccatccagcagagagccatcctgccctgcatcaagggctacgacgtgatcgcccaggcccagagcggcaccggcaagaccgccaccttcgccatcagcatcctgcagcagatcgagctggacctgaaggccacccaggccctggtgctggcccccaccagagagctggcccagcagatccagaaggtggtgatggccctgggcgactacatgggcgccagctgccacgcctgcatcggcggcaccaacgtgagagccgaggtgcagaagctgcagatggaggccccccacatcatcgtgggcacccccggcagagtgttcgacatgctgaacagaagatacctgagccccaagtacatcaagatgttcgtgctggacgaggccgacgagatgctgagcagaggcttcaaggaccagatctacgacatcttccagaagctgaacagcaacacccaggtggtgctgctgagcgccaccatgcccagcgacgtgctggaggtgaccaagaagttcatgagagaccccatcagaatcctggtgaagaaggaggagctgaccctggagggcatcagacagttctacatcaacgtggagagagaggagtggaagctggacaccctgtgcgacctgtacgagaccctgaccatcacccaggccgtgatcttcatcaacaccagaagaaaggtggactggctgaccgagaagatgcacgccagagacttcaccgtgagcgccatgcacggcgacatggaccagaaggagagagacgtgatcatgagagagttcagaagcggcagcagcagagtgctgatcaccaccgacctgctgaacagaagcagatggaccgtgtggccctag

SEQ ID NO: 80946 - DNA, 1224 bp, synthetic construct
  misc_feature 1..1224: note = Description of Artificial Sequence: Synthetic coding sequence
  source 1..1224: mol_type = other DNA
atgagcggcggcagcgccgactacaacagagagcacggcggccccgagggcatggaccccgacggcgtgatcgagagcaactggaacgagatcgtggacaacttcgacgacatgaacctgaaggagagcctgctgagaggcatctacgcctacggcttcgagaagcccagcgccatccagcagagagccatcatcccctgcatcaagggctacgacgtgatcgcccaggcccagagcggcaccggcaagaccgccaccttcgccatcagcatcctgcagcagctggagatcgagttcaaggagacccaggccctggtgctggcccccaccagagagctggcccagcagatccagaaggtgatcctggccctgggcgactacatgggcgccacctgccacgcctgcatcggcggcaccaacgtgagaaacgagatgcagaagctgcaggccgaggccccccacatcgtggtgggcacccccggcagagtgttcgacatgctgaacagaagatacctgagccccaagtggatcaagatgttcgtgctggacgaggccgacgagatgctgagcagaggcttcaaggaccagatctacgagatcttccagaagctgaacaccagcatccaggtggtgctgctgagcgccaccatgcccaccgacgtgctggaggtgaccaagaagttcatgagagaccccatcagaatcctggtgaagaaggaggagctgaccctggagggcatcaagcagttctacatcaacgtggagagagaggagtggaagctggacaccctgtgcgacctgtacgagaccctgaccatcacccaggccgtgatcttcctgaacaccagaagaaaggtggactggctgaccgagaagatgcacgccagagacttcaccgtgagcgccctgcacggcgacatggaccagaaggagagagacgtgatcatgagagagttcagaagcggcagcagcagagtgctgatcaccaccgacctgctggccagaggcatcgacgtgcagcaggtgagcctggtgatcaactacgacctgcccaccaacagagagaactacatccacagaatcggcagaggcggcagattcggcagaaagggcgtggccatcaacttcgtgaccgaggaggacaagagaatcctgagagacatcgagaccttctacaacaccaccgtggaggagatgcccatgaacgtggccgacctgatctag

SEQ ID NO: 80947 - DNA, 939 bp, synthetic construct
  misc_feature 1..939: note = Description of Artificial Sequence: Synthetic coding sequence
  source 1..939: mol_type = other DNA
atgctgaccgtgctgagaagcctgcccctgttcagcagagagctgctgttccccgtgctgaagatccagaaggtgatcctggccctgggcgactacatgggcgccacctgccacgcctgcatcggcggcaccaacgtgagaaacgagatgcagaagctgcaggccgaggccccccacatcgtggtgggcacccccggcagagtgttcgacatgctgaacagaagatacctgagccccaagtggatcaagatgttcgtgctggacgaggccgacgagatgctgagcagaggcttcaaggaccagatctacgagatcttccagaagctgaacaccagcatccaggtggtgctgctgagcgccaccatgcccaccgacgtgctggaggtgaccaagaagttcatgagagaccccatcagaatcctggtgaagaaggaggagctgaccctggagggcatcaagcagttctacatcaacgtggagagagaggagtggaagctggacaccctgtgcgacctgtacgagaccctgaccatcacccaggccgtgatcttcctgaacaccagaagaaaggtggactggctgaccgagaagatgcacgccagagacttcaccgtgagcgccctgcacggcgacatggaccagaaggagagagacgtgatcatgagagagttcagaagcggcagcagcagagtgctgatcaccaccgacctgctggccagaggcatcgacgtgcagcaggtgagcctggtgatcaactacgacctgcccaccaacagagagaactacatccacagaatcggcagaggcggcagattcggcagaaagggcgtggccatcaacttcgtgaccgaggaggacaagagaatcctgagagacatcgagaccttctacaacaccaccgtggaggagatgcccatgaacgtggccgacctgatctag

SEQ ID NO: 80948 - DNA, 1227 bp, synthetic construct
  misc_feature 1..1227: note = Description of Artificial Sequence: Synthetic coding sequence
  source 1..1227: mol_type = other DNA
atgagcggcggcagcgccgactacaacagcagagagcacggcggccccgagggcatggaccccgacggcgtgatcgagagcaactggaacgagatcgtggacaacttcgacgacatgaacctgaaggagagcctgctgagaggcatctacgcctacggcttcgagaagcccagcgccatccagcagagagccatcatcccctgcatcaagggctacgacgtgatcgcccaggcccagagcggcaccggcaagaccgccaccttcgccatcagcatcctgcagcagctggagatcgagttcaaggagacccaggccctggtgctggcccccaccagagagctggcccagcagatccagaaggtgatcctggccctgggcgactacatgggcgccacctgccacgcctgcatcggcggcaccaacgtgagaaacgagatgcagaagctgcaggccgaggccccccacatcgtggtgggcacccccggcagagtgttcgacatgctgaacagaagatacctgagccccaagtggatcaagatgttcgtgctggacgaggccgacgagatgctgagcagaggcttcaaggaccagatctacgagatcttccagaagctgaacaccagcatccaggtggtgctgctgagcgccaccatgcccaccgacgtgctggaggtgaccaagaagttcatgagagaccccatcagaatcctggtgaagaaggaggagctgaccctggagggcatcaagcagttctacatcaacgtggagagagaggagtggaagctggacaccctgtgcgacctgtacgagaccctgaccatcacccaggccgtgatcttcctgaacaccagaagaaaggtggactggctgaccgagaagatgcacgccagagacttcaccgtgagcgccctgcacggcgacatggaccagaaggagagagacgtgatcatgagagagttcagaagcggcagcagcagagtgctgatcaccaccgacctgctggccagaggcatcgacgtgcagcaggtgagcctggtgatcaactacgacctgcccaccaacagagagaactacatccacagaatcggcagaggcggcagattcggcagaaagggcgtggccatcaacttcgtgaccgaggaggacaagagaatcctgagagacatcgagaccttctacaacaccaccgtggaggagatgcccatgaacgtggccgacctgatctag

SEQ ID NO: 80949 - DNA, 174 bp, synthetic construct
  misc_feature 1..174: note = Description of Artificial Sequence: Synthetic coding sequence
  source 1..174: mol_type = other DNA
atgagcggcggcagcgccgactacaacagagagcacggcggccccgagggcatggaccccgacggcgtgatcgagagcaactggaacgagatcgtggacaacttcgacgacatgaacctgaaggagagcctgctgagaggcatctacgcctacggcttcgagaagcccagctag

SEQ ID NO: 80950 - DNA, 297 bp, synthetic construct
  misc_feature 1..297: note = Description of Artificial Sequence: Synthetic coding sequence
  source 1..297: mol_type = other DNA
atgagcggcggcagcgccgactacaacagagagcacggcggccccgagggcatggaccccgacggcgtgatcgagagcaactggaacgagatcgtggacaacttcgacgacatgaacctgaaggagagcctgctgagaggcatctacgcctacggcttcgagaagcccagcgccatccagcagagagccatcatcccctgcatcaagggctacgacgtgatcgcccaggcccagagcggcaccggcaagaccgccaccttcgccatcagcatcctgcagcagctggagatcgagtag

SEQ ID NO: 80951 - DNA, 363 bp, synthetic construct
  misc_feature 1..363: note = Description of Artificial Sequence: Synthetic coding sequence
  source 1..363: mol_type = other DNA
atgagcagcagcgccggcagcggccaccagcccagccagagcagagccatccccaccagaaccgtggccatcagcgacgccgcccagctgccccacgactactgcaccacccccggcggcaccctgttcagcaccacccccggcggcaccagaatcatctacgacagaaagttcctgctggacagaagaaacagccccatggcccagacccccccctgccacctgcccaacatccccggcgtgaccagccccggcaccctgatcgaggacagcaaggtggaggtgaacaacctgaacaacctgaacaaccacgacagaaagcacgccgtgggcgacgacgcccagttcgagatggacatctag

SEQ ID NO: 80952 - DNA, 738 bp, synthetic construct
  misc_feature 1..738: note = Description of Artificial Sequence: Synthetic coding sequence
  source 1..738: mol_type = other DNA
atgaacaacaagttcgacgccctgaaggacgacgacagcggcgaccacgaccagaacgaggagaacagcacccagaaggacggcgagaaggagaagaccgagagagacaagaaccagagcagcagcaagagaaaggccgtggtgcccggccccgccgagcaccccctgcagtacaactacaccttctggtacagcagaagaacccccggcagacccaccagcagccagagctacgagcagaacatcaagcagatcggcaccttcgccagcgtggagcagttctggagattctacagccacatggtgagacccggcgacctgaccggccacagcgacttccacctgttcaaggagggcatcaagcccatgtgggaggacgacgccaacaagaacggcggcaagtggatcatcagactgagaaagggcctggccagcagatgctgggagaacctgatcctggccatgctgggcgagcagttcatggtgggcgaggagatctgcggcgccgtggtgagcgtgagattccaggaggacatcatcagcatctggaacaagaccgccagcgaccaggccaccaccgccagaatcagagacaccctgagaagagtgctgaacctgccccccaacaccatcatggagtacaagacccacaccgacagcatcaagatgcccggcagactgggcccccagagactgctgttccagaacctgtggaagcccagactgaacgtgccctag

SEQ ID NO: 80953 - DNA, 705 bp, synthetic construct
  misc_feature 1..705: note = Description of Artificial Sequence: Synthetic coding sequence
  source 1..705: mol_type = other DNA
atgaacaacaagttcgacgccctgaaggacgacgacagcggcgaccacgaccagaacgaggagaacagcacccagaaggacggcgagaaggagaagaccgagagagacaagaaccagagcagcagcaagagaaaggccgtggtgcccggccccgccgagcaccccctgcagtacaactacaccttctggtacagcagaagaacccccggcagacccaccagcagccagagctacgagcagaacatcaagcagatcggcaccttcgccagcgtggagcagttctggagattctacagccacatggtgagacccggcgacctgaccggccacagcgacttccacctgttcaaggagggcatcaagcccatgtgggaggacgacgccaacaagaacggcggcaagtggatcatcagactgagaaagggcctggccagcagatgctgggagaacctgatcctggccatgctgggcgagcagttcatggtgggcgaggagatctgcggcgccgtggtgagcgtgagattccaggaggacatcatcagcatctggaacaagaccgccagcgaccaggccaccaccgccagaatcagagacaccctgagaagagtgctgaacctgccccccaacaccatcatggagtacaagacccacaccgacagcatcaaggacaacagcagcttcagaaacaccaagatcaccctgtag

SEQ ID NO: 80954 - DNA, 567 bp, synthetic construct
  misc_feature 1..567: note = Description of Artificial Sequence: Synthetic coding sequence
  source 1..567: mol_type = other DNA
atgaacaacaagttcgacgccctgaaggacgacgacagcggcgaccacgaccagaacgaggagaacagcacccagaaggacggcgagaaggagaagaccgagagagacaagaaccagagcagcagcaagagaaaggtggagcagttctggagattctacagccacatggtgagacccggcgacctgaccggccacagcgacttccacctgttcaaggagggcatcaagcccatgtgggaggacgacgccaacaagaacggcggcaagtggatcatcagactgagaaagggcctggccagcagatgctgggagaacctgatcctggccatgctgggcgagcagttcatggtgggcgaggagatctgcggcgccgtggtgagcgtgagattccaggaggacatcatcagcatctggaacaagaccgccagcgaccaggccaccaccgccagaatcagagacaccctgagaagagtgctgaacctgccccccaacaccatcatggagtacaagacccacaccgacagcatcaagtacgtgctgggcggctacggcagaacctgcccctag

SEQ ID NO: 80955 - DNA, 357 bp, synthetic construct
  misc_feature 1..357: note = Description of Artificial Sequence: Synthetic coding sequence
  source 1..357: mol_type = other DNA
atgagaggcgagagaagacccctgtgggaggaggagagcaacgccaagggcggcgtgtggaagatgaaggtgcccaaggacagcaccagcaccgtgtggaaggagctgctgctggccaccatcggcgagcagttcaccgactgcgccgccgccgacgacgaggtgatcggcgtgagcgtgagcgtgagagacagagaggacgtggtgcaggtgtggaacgtgaacgccagcctggtgggcgaggccaccgtgctggagaagatctacgagctgctgccccacatcaccttcaaggccgtgttctacaagccccacgaggagcaccacgccttcgagggcggcagaggcaagcactag

SEQ ID NO: 80956 - DNA, 357 bp, synthetic construct; identical to SEQ ID NO: 80955
  misc_feature 1..357: note = Description of Artificial Sequence: Synthetic coding sequence
  source 1..357: mol_type = other DNA

SEQ ID NO: 80957 - DNA, 357 bp, synthetic construct; identical to SEQ ID NO: 80955
  misc_feature 1..357: note = Description of Artificial Sequence: Synthetic coding sequence
  source 1..357: mol_type = other DNA

SEQ ID NO: 80958 - DNA, 675 bp, synthetic construct
  misc_feature 1..675: note = Description of Artificial Sequence: Synthetic coding sequence
  source 1..675: mol_type = other DNA
atggccctgccccccgccgccgccccccccgccggcgccagagagccccccggcagcagagccgccgccgccgccgccgcccccgagccccccctgggcctgcagcagctgagcgccctgcagcccgagcccggcggcgtgcccctgcacagcagctggaccttctggctggacagaagcctgcccggcgccaccgccgccgagtgcgccagcaacctgaagaagatctacaccgtgcagaccgtgcagatcttctggagcgtgtacaacaacatcccccccgtgaccagcctgcccctgagatgcagctaccacctgatgagaggcgagagaagacccctgtgggaggaggagagcaacgccaagggcggcgtgtggaagatgaaggtgcccaaggacagcaccagcaccgtgtggaaggagctgctgctggccaccatcggcgagcagttcaccgactgcgccgccgccgacgacgaggtgatcggcgtgagcgtgagcgtgagagacagagaggacgtggtgcaggtgtggaacgtgaacgccagcctggtgggcgaggccaccgtgctggagaagatctacgagctgctgccccacatcaccttcaaggccgtgttctacaagccccacgaggagcaccacgccttcgagggcggcagaggcaagcactag

SEQ ID NO: 80959 - DNA, 357 bp, synthetic construct; identical to SEQ ID NO: 80955
  misc_feature 1..357: note = Description of Artificial Sequence: Synthetic coding sequence
  source 1..357: mol_type = other DNA

SEQ ID NO: 80960 - DNA, 135 bp, synthetic construct
  misc_feature 1..135: note = Description of Artificial Sequence: Synthetic coding sequence
  source 1..135: mol_type = other DNA
atgagaggcgagagaagacccctgtgggaggaggagagcaacgccaagggcggcgtgtggaagatgaaggtgcccaaggacagcaccagcaccgtgtggaaggagctgctgctggccaccatcggcgagcagtag

SEQ ID NO: 80961 - DNA, 156 bp, synthetic construct
  misc_feature 1..156: note = Description of Artificial Sequence: Synthetic coding sequence
  source 1..156: mol_type = other DNA
atgagaggcgagagaagacccctgtgggaggaggagagcaacgccaagggcggcgtgtggaagatgaaggtgcccaaggacagcaccagcaccgtgtggaaggagctgctgctggccaccatcggcgagcagttcaccgactgcgccgccgcctag

SEQ ID NO: 80962 - DNA, 282 bp, synthetic construct
  misc_feature 1..282: note = Description of Artificial Sequence: Synthetic coding sequence
  source 1..282: mol_type = other DNA
atgagaggcgagagaagacccctgtgggaggaggagagcaacgccaagggcggcgtgtggaagatgaaggtgcccaaggacagcaccagcaccgtgtggaaggagctgctgctggccaccatcggcgagcagttcaccgactgcgccgccgccgacgacgaggtgatcggcgtgagcgtgagcgtgagagacagagaggacgtggtgcaggtgtggaacgtgaacgccagcctggtgggcgaggccaccgtgctggagaagatctacgagctgctgccctag

SEQ ID NO: 80963 - DNA, 2958 bp, synthetic construct
  misc_feature 1..2958: note = Description of Artificial Sequence: Synthetic coding sequence
  source 1..2958: mol_type = other DNA
atggacagaagaagcatgggcgagaccgagagcggcgacgccttcctggacctgaagaagccccccgccagcaagtgcccccacagatacaccaaggaggagctgctggacatcaaggagctgccccacagcaagcagagacccagctgcctgagcgagaagtacgacagcgacggcgtgtgggaccccgagaagtggcacgccagcctgtaccccgccagcggcagaagcagccccgtggagagcctgaagaaggagctggacaccgacagacccagcctggtgagaagaatcgtggaccccagagagagagtgaaggaggacgacctggacgtggtgctgagcccccagagaagaagcttcggcggcggctgccacgtgaccgccgccgtgagcagcagaagaagcggcagccccctggagaaggacagcgacggcctgagactgctgggcggcagaagaatcggcagcggcagaatcatcagcgccagaaccttcgagaaggaccacagactgagcgacaaggacctgagagacctgagagacagagacagagagagagacttcaaggacaagagattcagaagagagttcggcgacagcaagagagtgttcggcgagagaagaagaaacgacagctacaccgaggaggagcccgagtggttcagcgccggccccaccagccagagcgagaccatcgagctgaccggcttcgacgacaagatcctggaggaggaccacaagggcagaaagagaaccagaagaagaaccgccagcgtgaaggagggcatcgtggagtgcaacggcggcgtggccgaggaggacgaggtggaggtgatcctggcccaggagcccgccgccgaccaggaggtgcccagagacgccgtgctgcccgagcagagccccggcgacttcgacttcaacgagttcttcaacctggacaaggtgccctgcctggccagcatgatcgaggacgtgctgggcgagggcagcgtgagcgccagcagattcagcagatggttcagcaaccccagcagaagcggcagcagaagcagcagcctgggcagcaccccccacgaggagctggagagactggccggcctggagcaggccatcctgagccccggccagaacagcggcaactacttcgcccccatccccctggaggaccacgccgagaacaaggtggacatcctggagatgctgcagaaggccaaggtggacctgaagcccctgctgagcagcctgagcgccaacaaggagaagctgaaggagagcagccacagcggcgtggtgctgagcgtggaggaggtggaggccggcctgaagggcctgaaggtggaccagcaggtgaagaacagcacccccttcatggccgagcacctggaggagaccctgagcgccgtgaccaacaacagacagctgaagaaggacggcgacatgaccgccttcaacaagctggtgagcaccatgaaggccagcggcaccctgcccagccagcccaaggtgagcagaaacctggagagccacctgatgagccccgccgagatccccggccagcccgtgcccaagaacatcctgcaggagctgctgggccagcccgtgcagagacccgccagcagcaacctgctgagcggcctgatgggcagcctggagcccaccaccagcctgctgggccagagagcccccagcccccccctgagccaggtgttccagaccagagccgccagcgccgactacctgagacccagaatccccagccccatcggcttcacccccggcccccagcagctgctgggcgaccccttccagggcatgagaaagcccatgagccccatcaccgcccagatgagccagctggagctgcagcaggccgccctggagggcctggccctgccccacgacctggccgtgcaggccgccaacttctaccagcccggcttcggcaagccccaggtggacagaaccagagacggcttcagaaacagacagcagagagtgaccaagagccccgcccccgtgcacagaggcaacagcagcagccccgcccccgccgccagcatcaccagcatgctgagccccagcttcacccccaccagcgtgatcagaaagatgtacgagagcaaggagaagagcaaggaggagcccgccagcggcaaggccgccctgggcgacagcaaggaggacacccagaaggccagcgaggagaacctgctgagcagcagcagcgtgcccagcgccgacagagacagcagccccaccaccaacagcaagctgagcgccctgcagagaagcagctgcagcacccccctgagccaggccaacagatacaccaaggagcaggactacagacccaaggccaccggcagaaagacccccaccctggccagccccgtgcccaccacccccttcctgagacccgtgcaccaggtgcccctggtgccccacgtgcccatggtgagacccgcccaccagctgcaccccggcctggtgcagagaatgctggcccagggcgtgcacccccagcacctgcccagcctgctgcagaccggcgtgctgccccccggcatggacctgagccacctgcagggcatcagcggccccatcctgggccagcccttctaccccctgcccgccgccagccaccccctgctgaaccccagacccggcacccccctgcacctggccatggtgcagcagcagctgcagagaagcgtgctgcacccccccggcagcggcagccacgccgccgccgtgagcgtgcagaccaccccccagaacgtgcccagcagaagcggcctgccccacatgcacagccagctggagcacagacccagccagagaagcagcagccccgtgggcctggccaagtggttcggcagcgacgtgctgcagcagcccctgcccagcatgcccgccaaggtgatcagcgtggacgagctggagtacagacagtag

SEQ ID NO: 80964 - DNA, 2436 bp, synthetic construct
  misc_feature 1..2436: note = Description of Artificial Sequence: Synthetic coding sequence
  source 1..2436: mol_type = other DNA
atggacagaagaagcatgggcgagaccgagagcggcgacgccttcctggacctgaagaagccccccgccagcaagtgcccccacagatacaccaaggaggagctgctggacatcaaggagctgccccacagcaagcagagacccagctgcctgagcgagaagtacgacagcgacggcgtgtgggaccccgagaagtggcacgccagcctgtaccccgccagcggcagaagcagccccgtggagagcctgaagaaggagctggacaccgacagacccagcctggtgagaagaatcgtgggcatcgtggagtgcaacggcggcgtggccgaggaggacgaggtggaggtgatcctggcccaggagcccgccgccgaccaggaggtgcccagagacgccgtgctgcccgagcagagccccggcgacttcgacttcaacgagttcttcaacctggacaaggtgccctgcctggccagcatgatcgaggacgtgctgggcgagggcagcgtgagcgccagcagattcagcagatggttcagcaaccccagcagaagcggcagcagaagcagcagcctgggcagcaccccccacgaggagctggagagactggccggcctggagcaggccatcctgagccccggccagaacagcggcaactacttcgcccccatccccctggaggaccacgccgagaacaaggtggacatcctggagatgctgcagaaggccaaggtggacctgaagcccctgctgagcagcctgagcgccaacaaggagaagctgaaggagagcagccacagcggcgtggtgctgagcgtggaggaggtggaggccggcctgaagggcctgaaggtggaccagcaggtgaagaacagcacccccttcatggccgagcacctggaggagaccctgagcgccgtgaccaacaacagacagctgaagaaggacggcgacatgaccgccttcaacaagctggtgagcaccatgaagagaaacctggagagccacctgatgagccccgccgagatccccggccagcccgtgcccaagaacatcctgcaggagctgctgggccagcccgtgcagagacccgccagcagcaacctgctgagcggcctgatgggcagcctggagcccaccaccagcctgctgggccagagagcccccagcccccccctgagccaggtgttccagaccagagccgccagcgccgactacctgagacccagaatccccagccccatcggcttcacccccggcccccagcagctgctgggcgaccccttccagggcatgagaaagcccatgagccccatcaccgcccagcagatgagccagctggagctgcagcaggccgccctggagggcctggccctgccccacgacctggccgtgcaggccgccaacttctaccagcccggcttcggcaagccccaggtggacagaaccagagacggcttcagaaacagacagcagagagtgaccaagagccccgcccccgtgcacagaggcaacagcagcagccccgcccccgccgccagcatcaccagcatgctgagccccagcttcacccccaccagcgtgatcagaaagatgtacgagagcaaggagaagagcaaggaggagcccgccagcggcaaggccgccctgggcgacagcaaggaggacacccagaaggccagcgaggagaacctgctgagcagcagcagcgtgcccagcgccgacagagacagcagccccaccaccaacagcaagctgagcgccctgcagagaagcagctgcagcacccccctgagccaggccaacagatacaccaaggagcaggactacagacccaaggccaccggcagaaagacccccaccctggccagccccgtgcccaccacccccttcctgagacccgtgcaccaggtgcccctggtgccccacgtgcccatggtgagacccgcccaccagctgcaccccggcctggtgcagagaatgctggcccagggcgtgcacccccagcacctgcccagcctgctgcagaccggcgtgctgccccccggcatggacctgagccacctgcagggcatcagcggccccatcctgggccagcccttctaccccctgcccgccgccagccaccccctgctgaaccccagacccggcacccccctgcacctggccatggtgcagcagcagctgcagagaagcgtgctgcacccccccggcagcggcagccacgccgccgccgtgagcgtgcagaccaccccccagaacgtgcccagcagaagcggcctgccccacatgcacagccagctggagcacagacccagccagagaagcagcagccccgtgggcctggccaagtggttcggcagcgacgtgctgcagcagcccctgcccagcatgcccgccaaggtgatcagcgtggacgagctggagtacagacagtag

SEQ ID NO: 80965 - DNA, 1923 bp, synthetic construct
  misc_feature 1..1923: note = Description of Artificial Sequence: Synthetic coding sequence
  source 1..1923: mol_type = other DNA
atgatcgaggacgtgctgggcgagggcagcgtgagcgccagcagattcagcagatggttcagcaaccccagcagaagcggcagcagaagcagcagcctgggcagcaccccccacgaggagctggagagactggccggcctggagcaggccatcctgagccccggccagaacagcggcaactacttcgcccccatccccctggaggaccacgccgagaacaaggtggacatcctggagatgctgcagaaggccaaggtggacctgaagcccctgctgagcagcctgagcgccaacaaggagaagctgaaggagagcagccacagcggcgtggtgctgagcgtggaggaggtggaggccggcctgaagggcctgaaggtggaccagcaggtgaagaacagcacccccttcatggccgagcacctggaggagaccctgagcgccgtgaccaacaacagacagctgaagaaggacggcgacatgaccgccttcaacaagctggtgagcaccatgaaggccagcggcaccctgcccagccagcccaaggtgagcgagctgctgggccagcccgtgcagagacccgccagcagcaacctgctgagcggcctgatgggcagcctggagcccaccaccagcctgctgggccagagagcccccagcccccccctgagccaggtgttccagaccagagccgccagcgccgactacctgagacccagaatccccagccccatcggcttcacccccggcccccagcagctgctgggcgaccccttccagggcatgagaaagcccatgagccccatcaccgcccagatgagccagctggagctgcagcaggccgccctggagggcctggccctgccccacgacctggccgtgcaggccgccaacttctaccagcccggcttcggcaagccccaggtggacagaaccagagacggcttcagaaacagacagcagagagtgaccaagagccccgcccccgtgcacagaggcaacagcagcagccccgcccccgccgccagcatcaccagcatgctgagccccagcttcacccccaccagcgtgatcagaaagatgtacgagagcaaggagaagagcaaggaggagcccgccagcggcaaggccgccctgggcgacagcaaggaggacacccagaaggccagcgaggagaacctgctgagcagcagcagcgtgcccagcgccgacagagacagcagccccaccaccaacagcaagctgagcgccctgcagagaagcagctgcagcacccccctgagccaggccaacagatacaccaaggagcaggactacagacccaaggccaccggcagaaagacccccaccctggccagccccgtgcccaccacccccttcctgagacccgtgcaccaggtgcccctggtgccccacgtgcccatggtgagacccgcccaccagctgcaccccggcctggtgcagagaatgctggcccagggcgtgcacccccagcacctgcccagcctgctgcagaccggcgtgctgccccccggcatggacctgagccacctgcagggcatcagcggccccatcctgggccagcccttctaccccctgcccgccgccagccaccccctgctgaaccccagacccggcacccccctgcacctggccatggtgcagcagcagctgcagagaagcgtgctgcacccccccggcagcggcagccacgccgccgccgtgagcgtgcagaccaccccccagaacgtgcccagcagaagcggcctgccccacatgcacagccagctggagcacagacccagccagagaagcagcagccccgtgggcctggccaagtggttcggcagcgacgtgctgcagcagcccctgcccagcatgcccgccaaggtgatcagcgtggacgagctggagtacagacagtag

SEQ ID NO: 80966 - DNA, 192 bp, synthetic construct
  misc_feature 1..192: note = Description of Artificial Sequence: Synthetic coding sequence
  source 1..192: mol_type = other DNA
atggacagaagaagcatgggcgagaccgagagcggcgacgccttcctggacctgaagaagccccccgccagcaagtgcccccacagatacaccaaggaggagctgctggacatcaaggagctgccccacagcaagcagagacccagctgcctgagcgagaagtacgacagcgacggcgtgtgggacccctag

SEQ ID NO: 80967 - DNA, 192 bp, synthetic construct; identical to SEQ ID NO: 80966
  misc_feature 1..192: note = Description of Artificial Sequence: Synthetic coding sequence
  source 1..192: mol_type = other DNA

SEQ ID NO: 80968 - DNA, 2886 bp, synthetic construct
  misc_feature 1..2886: note = Description of Artificial Sequence: Synthetic coding sequence
  source 1..2886: mol_type = other DNA
atggacagaagaagcatgggcgagaccgagagcggcgacgccttcctggacctgaagaagccccccgccagcaagtgcccccacagatacaccaaggaggagctgctggacatcaaggagctgccccacagcaagcagagacccagctgcctgagcgagaagtacgacagcgacggcgtgtgggaccccgagaagtggcacgccagcctgtaccccgccagcggcagaagcagccccgtggagagcctgaagaaggagctggacaccgacagacccagcctggtgagaagaatcgtggaccccagagagagagtgaaggaggacgacctggacgtggtgctgagcccccagagaagaagcttcggcggcggctgccacgtgaccgccgccgtgagcagcagaagaagcggcagccccctggagaaggacagcgacggcctgagactgctgggcggcagaagaatcggcagcggcagaatcatcagcgccagaaccttcgagaaggaccacagactgagcgacaaggacctgagagacctgagagacagagacagagagagagacttcaaggacaagagattcagaagagagttcggcgacagcaagagagtgttcggcgagagaagaagaaacgacagctacaccgaggaggagcccgagtggttcagcgccggccccaccagccagagcgagaccatcgagctgaccggcttcgacgacaagatcctggaggaggaccacaagggcagaaagagaaccagaagaagaaccgccagcgtgaaggagggcatcgtggagtgcaacggcggcgtggccgaggaggacgaggtggaggtgatcctggcccaggagcccgccgccgaccaggaggtgcccagagacgccgtgctgcccgagcagagccccggcgacttcgacttcaacgagttcttcaacctggacaaggtgccctgcctggccagcatgatcgaggacgtgctgggcgagggcagcgtgagcgccagcagattcagcagatggttcagcaaccccagcagaagcggcagcagaagcagcagcctgggcagcaccccccacgaggagctggagagactggccggcctggagcaggccatcctgagccccggccagaacagcggcaactacttcgcccccatccccctggaggaccacgccgagaacaaggtggacatcctggagatgctgcagaaggccaaggtggacctgaagcccctgctgagcagcctgagcgccaacaaggagaagctgaaggagagcagccacagcggcgtggtgctgagcgtggaggaggtggaggccggcctgaagggcctgaaggtggaccagcaggtgaagaacagcacccccttcatggccgagcacctggaggagaccctgagcgccgtgaccaacaacagacagctgaagaaggacggcgacatgaccgccttcaacaagctggtgagcaccatgaaggccagcggcaccctgcccagccagcccaaggtgagcgagctgctgggccagcccgtgcagagacccgccagcagcaacctgctgagcggcctgatgggcagcctggagcccaccaccagcctgctgggccagagagcccccagcccccccctgagccaggtgttccagaccagagccgccagcgccgactacctgagacccagaatccccagccccatcggcttcacccccggcccccagcagctgctgggcgaccccttccagggcatgagaaagcccatgagccccatcaccgcccagatgagccagctggagctgcagcaggccgccctggagggcctggccctgccccacgacctggccgtgcaggccgccaacttctaccagcccggcttcggcaagccccaggtggacagaaccagagacggcttcagaaacagacagcagagagtgaccaagagccccgcccccgtgcacagaggcaacagcagcagccccgcccccgccgccagcatcaccagcatgctgagccccagcttcacccccaccagcgtgatcagaaagatgtacgagagcaaggagaagagcaaggaggagcccgccagcggcaaggccgccctgggcgacagcaaggaggacacccagaaggccagcgaggagaacctgctgagcagcagcagcgtgcccagcgccgacagagacagcagccccaccaccaacagcaagctgagcgccctgcagagaagcagctgcagcacccccctgagccaggccaacagatacaccaaggagcaggactacagacccaaggccaccggcagaaagacccccaccctggccagccccgtgcccaccacccccttcctgagacccgtgcaccaggtgcccctggtgccccacgtgcccatggtgagacccgcccaccagctgcaccccggcctggtgcagagaatgctggcccagggcgtgcacccccagcacctgcccagcctgctgcagaccggcgtgctgccccccggcatggacctgagccacctgcagggcatcagcggccccatcctgggccagcccttctaccccctgcccgccgccagccaccccctgctgaaccccagacccggcacccccctgcacctggccatggtgcagcagcagctgcagagaagcgtgctgcacccccccggcagcggcagccacgccgccgccgtgagcgtgcagaccaccccccagaacgtgcccagcagaagcggcctgccccacatgcacagccagctggagcacagacccagccagagaagcagcagccccgtgggcctggccaagtggttcggcagcgacgtgctgcagcagcccctgcccagcatgcccgccaaggtgatcagcgtggacgagctggagtacagacagtag

SEQ ID NO: 80969 - DNA, 2958 bp, synthetic construct; identical to SEQ ID NO: 80963
  misc_feature 1..2958: note = Description of Artificial Sequence: Synthetic coding sequence
  source 1..2958: mol_type = other DNA

SEQ ID NO: 80970 - DNA, 1311 bp, synthetic construct
  misc_feature 1..1311: note = Description of Artificial Sequence: Synthetic coding sequence
  source 1..1311: mol_type = other DNA
atggacagaagaagcatgggcgagaccgagagcggcgacgccttcctggacctgaagaagccccccgccagcaagtgcccccacagatacaccaaggaggagctgctggacatcaaggagctgccccacagcaagcagagacccagctgcctgagcgagaagtacgacagcgacggcgtgtgggaccccgagaagtggcacgccagcctgtaccccgccagcggcagaagcagccccgtggagagcctgaagaaggagctggacaccgacagacccagcctggtgagaagaatcgtggaccccagagagagagtgaaggaggacgacctggacgtggtgctgagcccccagagaagaagcttcggcggcggctgccacgtgaccgccgccgtgagcagcagaagaagcggcagccccctggagaaggacagcgacggcctgagactgctgggcggcagaagaatcggcagcggcagaatcatcagcgccagaaccttcgagaaggaccacagactgagcgacaaggacctgagagacctgagagacagagacagagagagagacttcaaggacaagagattcagaagagagttcggcgacagcaagagagtgttcggcgagagaagaagaaacgacagctacaccgaggaggagcccgagtggttcagcgccggccccaccagccagagcgagaccatcgagctgaccggcttcgacgacaagatcctggaggaggaccacaagggcagaaagagaaccagaagaagaaccgccagcgtgaaggagggcatcgtggagtgcaacggcggcgtggccgaggaggacgaggtggaggtgatcctggcccaggagcccgccgccgaccaggaggtgcccagagacgccgtgctgcccgagcagagccccggcgacttcgacttcaacgagttcttcaacctggacaaggtgccctgcctggccagcatgatcgaggacgtgctgggcgagggcagcgtgagcgccagcagattcagcagatggttcagcaaccccagcagaagcggcagcagaagcagcagcctgggcagcaccccccacgaggagctggagagactggccggcctggagcaggccatcctgagccccggccagaacagcggcaactacttcgcccccatccccctggaggaccacgccgagaacaaggtggacatcctggagatgctgcagaaggccaaggtggacctgaagcccctgctgagcagcctgagcgccaacaaggagaagctgaaggagagcctgagactgagccccaagaagaagaagaagtag

SEQ ID NO: 80971 - DNA, 567 bp, synthetic construct
  misc_feature 1..567: note = Description of Artificial Sequence: Synthetic coding sequence
  source 1..567: mol_type = other DNA
atggacagaagaagcatgggcgagaccgagagcggcgacgccttcctggacctgaagaagccccccgccagcaagtgcccccacagatacaccaaggaggagctgctggacatcaaggagctgccccacagcaagcagagacccagctgcctgagcgagaagtacgacagcgacggcgtgtgggaccccgagaagtggcacgccagcctgtaccccgccagcggcagaagcagccccgtggagagcctgaagaaggagctggacaccgacagacccagcctggtgagaagaatcgtggaccccagagagagagtgaaggaggacgacctggacgtggtgctgagcccccagagaagaagcttcggcggcggctgccacgtgaccgccgccgtgagcagcagaagaagcggcagccccctggagaaggacagcgacggcctgagactgctgggcggcagaagaatcggcagcggcagaatcatcagcgccagaaccttcgagaaggaccacagactgagcgacaaggacctgagagacctgagagacagagacagagagagagactag

SEQ ID NO: 80972 - DNA, 747 bp, synthetic construct
  misc_feature 1..747: note = Description of Artificial Sequence: Synthetic coding sequence
  source 1..747: mol_type = other DNA
atggccgacttcgacacctacgacgacagagcctacagcagcttcggcggcggcagaggcagcagaggcagcgccggcggccacggcagcagaagccagaaggagctgcccaccgagcccccctacaccgcctacgtgggcaacctgcccttcaacaccgtgcagggcgacatcgacgccatcttcaaggacctgagcatcagaagcgtgagactggtgagagacaaggacaccgacaagttcaagggcttctgctacgtggagttcgacgaggtggacagcctgaaggaggccctgacctacgacggcgccctgctgggcgacagaagcctgagagtggacatcgccgagggcagaaagcaggacaagggcggcttcggcttcagaaagggcggccccgacgacagaggcatgggcagcagcagagagagcagaggcggctgggacagcagagacgacttcaacagcggcttcagagacgacttcctgggcggcagaggcggcagcagacccggcgacagaagaaccggcccccccatgggcagcagattcagagacggcccccccctgagaggcagcaacatggacttcagagagcccaccgaggaggagagagcccagagacccagactgcagctgaagcccagaaccgtggccacccccctgaaccaggtggccaaccccaacagcgccatcttcggcggcgccagacccagagaggaggtggtgcagaaggagcaggagtag

SEQ ID NO: 80973 - DNA, 687 bp, synthetic construct
  misc_feature 1..687: note = Description of Artificial Sequence: Synthetic coding sequence
  source 1..687: mol_type = other DNA
atggccgacttcgacacctacgacgacagagcctacagcagcttcggcggcggcagaggcagcagaggcagcgccggcggccacggcagcagaagccagaaggagctgcccaccgagcccccctacaccgcctacgtgggcaacctgcccttcaacaccgtgcagggcgacatcgacgccatcttcaaggacctgagcatcagaagcgtgagactggtgagagacaaggacaccgacaagttcaagggcttctgctacgtggagttcgacgaggtggacagcctgaaggaggccctgacctacgacggcgccctgctgggcgacagaagcctgagagtggacatcgccgagggcagaaagcaggacaagggcggcttcggcttcagaaagggcggccccgacgacagaggcttcagagacgacttcctgggcggcagaggcggcagcagacccggcgacagaagaaccggcccccccatgggcagcagattcagagacggcccccccctgagaggcagcaacatggacttcagagagcccaccgaggaggagagagcccagagacccagactgcagctgaagcccagaaccgtggccacccccctgaaccaggtggccaaccccaacagcgccatcttcggcggcgccagacccagagaggaggtggtgcagaaggagcaggagtag

SEQ ID NO: 80974 - DNA, 1050 bp, synthetic construct
  misc_feature 1..1050: note = Description of Artificial Sequence: Synthetic coding sequence
  source 1..1050: mol_type = other DNA
atggaggcccacaacgccagcgcccccttcaacttcaccctgccccccaacttcggcaagagacccaccgacctggccctgagcgtgatcctggtgttcatgctgttcttcatcatgctgagcctgggctgcaccatggagttcagcaagatcaaggcccacctgtggaagcccaagggcctggccatcgccctggtggcccagtacggcatcatgcccctgaccgccttcgtgctgggcaaggtgttcagactgaagaacatcgaggccctggccatcctggtgtgcggctgcagccccggcggcaacctgagcaacgtgttcagcctggccatgaagggcgacatgaacctgagcatcgtgatgaccacctgcagcaccttctgcgccctgggcatgatgcccctgctgctgtacatctacagcagaggcatctacgacggcgacctgaaggacaaggtgccctacaagggcatcgtgatcagcctggtgctggtgctgatcccctgcaccatcggcatcgtgctgaagagcaagagaccccagtacatgagatacgtgatcaagggcggcatgatcatcatcctgctgtgcagcgtggccgtgaccgtgctgagcgccatcaacgtgggcaagagcatcatgttcgccatgacccccctgctgatcgccaccagcagcctgatgcccttcatcggcttcctgctgggctacgtgctgagcgccctgttctgcctgaacggcagatgcagaagaaccgtgagcatggagaccggctgccagaacgtgcagctgtgcagcaccatcctgaacgtggccttcccccccgaggtgatcggccccctgttcttcttccccctgctgtacatgatcttccagctgggcgagggcctgctgctgatcgccatcttctggtgctacgagaagttcaagacccccaaggacaagaccaagatgatctacaccgccgccaccaccgaggagaccatccccggcgccctgggcaacggcacctacaagggcgaggactgcagcccctgcaccgcctag

SEQ ID NO: 80975 - DNA, 1296 bp, synthetic construct
  misc_feature 1..1296: note = Description of Artificial Sequence: Synthetic coding sequence
  source 1..1296: mol_type = other DNA
atgagcgtgaacgtgaacagaagcgtgagcgaccagttctacagatacaagatgcccagactgatcgccaaggtggagggcaagggcaacggcatcaagaccgtgatcgtgaacatggtggacgtggccaaggccctgaacagaccccccacctaccccaccaagtacttcggctgcgagctgggcgcccagacccagttcgacgtgaagaacgacagatacatcgtgaacggcagccacgaggccaacaagctgcaggacatgctggacggcttcatcaagaagttcgtgctgtgccccgagtgcgagaaccccgagaccgacctgcacgtgaaccccaagaagcagaccatcggcaacagctgcaaggcctgcggctacagaggcatgctggacacccaccacaagctgtgcaccttcatcctgaagaacccccccgagaacagcgacagcggcaccggcaagaaggagaaggagaagaagaacagaaagggcaaggacaaggagaacggcagcgtgagcagcagcgagacccccccccccccccccccccccaacgagatcaacccccccccccacaccatggaggaggaggaggacgacgactggggcgaggacaccaccgaggaggcccagagaagaagaatggacgagatcagcgaccacgccaaggtgctgaccctgagcgacgacctggagagaaccatcgaggagagagtgaacatcctgttcgacttcgtgaagaagaagaaggaggagggcgtgatcgacagcagcgacaaggagatcgtggccgaggccgagagactggacgtgaaggccatgggccccctggtgctgaccgaggtgctgttcaacgagaagatcagagagcagatcaagaagtacagaagacacttcctgagattctgccacaacaacaagaaggcccagagatacctgctgcacggcctggagtgcgtggtggccatgcaccaggcccagctgatcagcaagatcccccacatcctgaaggagatgtacgacgccgacctgctggaggaggaggtgatcatcagctggagcgagaaggccagcaagaagtacgtgagcaaggagctggccaaggagatcagagtgaaggccgagcccttcatcaagtggctgaaggaggccgaggaggagagcagcggcggcgaggaggaggacgaggacgagaacatcgaggtggtgtacagcaaggccgccagcgtgcccaaggtggagaccgtgaagagcgacaacaaggacgacgacatcgacatcgacgccatctag

SEQ ID NO: 80976 - DNA, 603 bp, synthetic construct
  misc_feature 1..603: note = Description of Artificial Sequence: Synthetic coding sequence
  source 1..603: mol_type = other DNA
atgagcgtgaacgtgaacagaagcgtgagcgaccagttctacagatacaagatgcccagactgatcgccaaggtggagggcaagggcaacggcatcaagaccgtgatcgtgaacatggtggacgtggccaaggccctgaacagaccccccacctaccccaccaagtacttcggctgcgagctgggcgcccagacccagttcgacgtgaagaacgacagatacatcgtgaacggcagccacgaggccaacaagctgcaggacatgctggacggcttcatcaagaagttcgtgctgtgccccgagtgcgagaaccccgagaccgacctgcacgtgaaccccaagaagcagaccatcggcaacagctgcaaggcctgcggctacagaggcatgctggacacccaccacaagctgtgcaccttcatcctgaagaacccccccgagaacagcgacagcggcaccggcaagaaggagaaggagaagaagaacagaaagggcaaggacaaggagaacggcagcgtgagcagcagcgagacccccccccccccccccccccccaacgagatcaacccccccccccacaccatggaggaggaggaggactag

SEQ ID NO: 80977 - DNA, 441 bp, synthetic construct
  misc_feature 1..441: note = Description of Artificial Sequence: Synthetic coding sequence
  source 1..441: mol_type = other DNA
atgagcgtgaacgtgaacagaagcgtgagcgaccagttctacagatacaagatgcccagactgatcgccaaggtggagggcaagggcaacggcatcaagaccgtgatcgtgaacatggtggacgtggccaaggccctgaacagaccccccacctaccccaccaagtacttcggctgcgagctgggcgcccagacccagttcgacgtgaagaacgacagatacatcgtgaacggcagccacgaggccaacaagctgcaggacatgctggacggcttcatcaagaagttcgtgctgtgccccgagtgcgagaaccccgagaccgacctgcacgtgaaccccaagaagcagaccatcggcaacagctgcaaggcctgcggctacagaggcatgctggacacccaccacaagctgtgcaccttcatcctgaagaaccccccctag

SEQ ID NO: 80978 - DNA, 1296 bp, synthetic construct; identical to SEQ ID NO: 80975
  misc_feature 1..1296: note = Description of Artificial Sequence: Synthetic coding sequence
  source 1..1296: mol_type = other DNA

SEQ ID NO: 80979 - DNA, 210 bp, synthetic construct
  misc_feature 1..210: note = Description of Artificial Sequence: Synthetic coding sequence
  source 1..210: mol_type = other DNA
atgagcgtgaacgtgaacagaagcgtgagcgaccagttctacagatacaagatgcccagactgatcgccaaggtggagggcaagggcaacggcatcaagaccgtgatcgtgaacatggtggacgtggccaaggccctgaacagaccccccacctaccccaccaagtacttcggctgcgagctgggcgcccagacccagttcgacgtgtag

SEQ ID NO: 80980 - DNA, 330 bp, synthetic construct
  misc_feature 1..330: note = Description of Artificial Sequence: Synthetic coding sequence
  source 1..330: mol_type = other DNA
atgagcgtgaacgtgaacagaagcgtgagcgaccagttctacagatacaagatgcccagactgatcgccaaggtggagggcaagggcaacggcatcaagaccgtgatcgtgaacatggtggacgtggccaaggccctgaacagaccccccacctaccccaccaagtacttcggctgcgagctgggcgcccagacccagttcgacgtgaagaacgacagatacatcgtgaacggcagccacgaggccaacaagctgcaggacatgctggacggcttcatcaagaagttcgtgctgtgccccgagtgcgagaaccccgagaccgacctgtag

SEQ ID NO: 80981 - DNA, 306 bp, synthetic construct
  misc_feature 1..306: note = Description of Artificial Sequence: Synthetic coding sequence
  source 1..306: mol_type = other DNA
atgagcgtgaacgtgaacagaagcgtgagcgaccagttctacagatacaagatgcccagactgatcgccaaggtggagggcaagggcaacggcatcaagaccgtgatcgtgaacatggtggacgtggccaaggccctgaacagaccccccacctaccccaccaagtacttcggctgcgagctgggcgcccagacccagttcgacgtgaagaacgacagatacatcgtgaacggcagccacgaggccaacaagctgcaggacatgctggacggcttcatcaagaagttcgtgctgtgccccgagtag

SEQ ID NO: 80982 - DNA, 156 bp, synthetic construct
  misc_feature 1..156: note = Description of Artificial Sequence: Synthetic coding sequence
  source 1..156: mol_type = other DNA
atgagcgtgaacgtgaacagaagcgtgagcgaccagttctacagatacaagatgcccagactgatcgccaaggtggagggcaagggcaacggcatcaagaccgtgatcgtgaacatggtggacgtggccaaggccctgaacagaccccccacctag

SEQ ID NO: 80983 - DNA, 330 bp, synthetic construct; identical to SEQ ID NO: 80980
  misc_feature 1..330: note = Description of Artificial Sequence: Synthetic coding sequence
  source 1..330: mol_type = other DNA

SEQ ID NO: 80984 - DNA, 555 bp, synthetic construct
  misc_feature 1..555: note = Description of Artificial Sequence: Synthetic coding sequence
  source 1..555: mol_type = other DNA
atgtgcggcaccggcggcaccgacagcaagaccagaagacccccccacagagccagcttcctgaagagactggagagcaagcccctgaagatggccgacgacctggacttcgagaccggcgacgccggcgccagcgccaccttccccatgcagtgcagcgccctgagaaagaacggcttcgtggtgctgaagggcagaccctgcaagatcgtggagatgagcaccagcaagaccggcaagcacggccacgccaaggtgcacctggtgggcatcgacatcttcaccggcaagaagtacgaggacatctgccccagcacccacaacatggacgtgcccaacatcaagagaaacgacttccagctgatcggcatccaggacggctacctgagcctgctgcaggacagcggcgaggtgagagaggacctgagactgcccgagggcgacctgggcaaggagatcgagcagaagtacgactgcggcgaggagatcctgatcaccgtgctgagcgccatgaccgaggaggccgccgtggccatcaaggccatggccaagtag

SEQ ID NO: 80985 - DNA, 465 bp, synthetic construct
  misc_feature 1..465: note = Description of Artificial Sequence: Synthetic coding sequence
  source 1..465: mol_type = other DNA
atggccgacgacctggacttcgagaccggcgacgccggcgccagcgccaccttccccatgcagtgcagcgccctgagaaagaacggcttcgtggtgctgaagggcagaccctgcaagatcgtggagatgagcaccagcaagaccggcaagcacggccacgccaaggtgcacctggtgggcatcgacatcttcaccggcaagaagtacgaggacatctgccccagcacccacaacatggacgtgcccaacatcaagagaaacgacttccagctgatcggcatccaggacggctacctgagcctgctgcaggacagcggcgaggtgagagaggacctgagactgcccgagggcgacctgggcaaggagatcgagcagaagtacgactgcggcgaggagatcctgatcaccgtgctgagcgccatgaccgaggaggccgccgtggccatcaaggccatggccaagtag

SEQ ID NO: 80986 - DNA, 645 bp, synthetic construct
  misc_feature 1..645: note = Description of Artificial Sequence: Synthetic coding sequence
  source 1..645: mol_type = other DNA
atgacctggaccagcagacaggagatgcagggcccccagccccccagccagtgcagcgcccagcactacgtgagaatggccctgtggtgcagcaaggccggccacgtgagaagcagcagatgcctgctgagaagactggccagcaccgccacccccagactggagttccacctgagaatcctgcccagcccctgcctgcagtacctgtggagaagccagcagcaggccgccaacagcgccgacttccccctgaccctgctgctgctgagcgactgcttctgcctggccctgagcctgcacacccacagcgacaactacacctgcagccccgtgttcagcctgttctgcggctaccccagcgtgcccgccagcttcagcggcagccccagcgtgagccccgccctgtgccagagcctgcagttcatcggcctgtacgccctggccatccagctgctgctgccctacagctggttcagcctgttcctgagcagcctggagcccctgctgagcggctgcttccaccacgtggcccagggcttcagcaacagcacccccagccccggcggcacccccgccagcatcctgagcttccaggtgaccctgctgctgagaagccccgtgctggccttccccctggagctgtag

SEQ ID NO: 80987 - DNA, 465 bp, synthetic construct; identical to SEQ ID NO: 80985
  misc_feature 1..465: note = Description of Artificial Sequence: Synthetic coding sequence
  source 1..465: mol_type = other DNA

SEQ ID NO: 80988 - DNA, 465 bp, synthetic construct; identical to SEQ ID NO: 80985
  misc_feature 1..465: note = Description of Artificial Sequence: Synthetic coding sequence
  source 1..465: mol_type = other DNA

SEQ ID NO: 80989 - DNA, 462 bp, synthetic construct
  misc_feature 1..462: note = Description of Artificial Sequence: Synthetic coding sequence
  source 1..462: mol_type = other DNA
atggccgacgagatcgacttcaccaccggcgacgccggcgccagcagcacctaccccatgcagtgcagcgccctgagaaagaacggcttcgtggtgctgaagggcagaccctgcaagatcgtggagatgagcaccagcaagaccggcaagcacggccacgccaaggtgcacctggtgggcatcgacatcttcaccggcaagaagtacgaggacatctgccccagcacccacaacatggacgtgcccaacatcaagagaaacgactaccagctgatctgcatccaggacggctacctgagcctgctgaccgagaccggcgaggtgagagaggacctgaagctgcccgagggcgagctgggcaaggagatcgagggcaagtacaacgccggcgaggacgtgcaggtgagcgtgatgtgcgccatgagcgaggagtacgccgtggccatcaagccctgcaagtag

SEQ ID NO: 80990 - DNA, 738 bp, synthetic construct
  misc_feature 1..738: note = Description of Artificial Sequence: Synthetic coding sequence
  source 1..738: mol_type = other DNA
atggccgtgagagccagcttcgagaacaactgcgagatcggctgcttcgccaagctgaccaacacctactgcctggtggccatcggcggcagcgagaacttctacagcgtgttcgagggcgagctgagcgacaccatccccgtggtgcacgccagcatcgccggctgcagaatcatcggcagaatgtgcgtgggcaacagacacggcctgctggtgcccaacaacaccaccgaccaggagctgcagcacatcagaaacagcctgcccgacaccgtgcagatcagaagagtggaggagagactgagcgccctgggcaacgtgaccacctgcaacgactacgtggccctggtgcaccccgacctggacagagagaccgaggagatcctggccgacgtgctgaaggtggaggtgttcagacagaccgtggccgaccaggtgctggtgggcagctactgcgtgttcagcaaccagggcggcctggtgcaccccaagaccagcatcgaggaccaggacgagctgagcagcctgctgcaggtgcccctggtggccggcaccgtgaacagaggcagcgaggtgatcgccgccggcatggtggtgaacgactggtgcgccttctgcggcctggacaccaccagcaccgagctgagcgtggtggagagcgtgttcaagctgaacgaggcccagcccagcaccatcgccaccagcatgagagacagcctgatcgacagcctgacctag

SEQ ID NO: 80991 - DNA, 681 bp, synthetic construct
  misc_feature 1..681: note = Description of Artificial Sequence: Synthetic coding sequence
  source 1..681: mol_type = other DNA
atggccgtgagagccagcttcgagaacaactgcgagatcggctgcttcgccaagctgaccaacacctactgcctggtggccatcggcggcagcgagaacttctacagatgcggcggcagccccggcgcctacggcggcggcgaggcctgcgccggcgtgaagagcagcggcagcggcagagtgcccgcccccctgcccagacaccacagagtgcacgtgcccaccgtgtgcagcagagccagcagccccatccccagcccctggtgcaccagactgagccccgccgccgccagcagcggcgcctgcgtgtgggagaccgaggagatcctggccgacgtgctgaaggtggaggtgttcagacagaccgtggccgaccaggtgctggtgggcagctactgcgtgttcagcaaccagggcggcctggtgcaccccaagaccagcatcgaggaccaggacgagctgagcagcctgctgcaggtgcccctggtggccggcaccgtgaacagaggcagcgaggtgatcgccgccggcatggtggtgaacgactggtgcgccttctgcggcctggacaccaccagcaccgagctgagcgtggtggagagcgtgttcaagctgaacgaggcccagcccagcaccatcgccaccagcatgagagacagcctgatcgacagcctgacctag

SEQ ID NO: 80992 - DNA, 738 bp, synthetic construct; identical to SEQ ID NO: 80990
  misc_feature 1..738: note = Description of Artificial Sequence: Synthetic coding sequence
  source 1..738: mol_type = other DNA

SEQ ID NO: 80993 - DNA, 327 bp, synthetic construct
  misc_feature 1..327: note = Description of Artificial Sequence: Synthetic coding sequence
  source 1..327: mol_type = other DNA
atggccgtgagagccagcttcgagaacaactgcgagatcggctgcttcgccaagctgaccaacacctactgcctggtggccatcggcggcagcgagaacttctacagcgtgttcgagggcgagctgagcgacaccatccccgtggtgcacgccagcatcgccggctgcagaatcatcggcagaatgtgcgtgggcaacagacacggcctgctggtgcccaacaacaccaccgaccaggagctgcagcacatcagaaacagcctgcccgacaccgtgcagatcagaagagtggaggagagactgagcgccctgggcaacgtgacctag

SEQ ID NO: 80994 - DNA, 1314 bp, synthetic construct
  misc_feature 1..1314: note = Description of Artificial Sequence: Synthetic coding sequence
  source 1..1314: mol_type = other DNA
atggccgacgaccccagcgccgccgacagaaacgtggagatctggaagatcaagaagctgatcaagagcctggaggccgccagaggcaacggcaccagcatgatcagcctgatcatcccccccaaggaccagatcagcagagtggccaagatgctggccgacgagttcggcaccgccagcaacatcaagagcagagtgaacagactgagcgtgctgggcgccatcaccagcgtgcagcagagactgaagctgtacaacaaggtgccccccaacggcctggtggtgtactgcggcaccatcgtgaccgaggagggcaaggagaagaaggtgaacatcgacttcgagcccttcaagcccatcaacaccagcctgtacctgtgcgacaacaagttccacaccgaggccctgaccgccctgctgagcgacgacagcaagttcggcttcatcgtgatcgacggcagcggcgccctgttcggcaccctgcagggcaacaccagagaggtgctgcacaagttcaccgtggacctgcccaagaagcacggcagaggcggccagagcgccctgagattcgccagactgagaatggagaagagacacaactacgtgagaaaggtggccgagaccgccgtgcagctgttcatcagcggcgacaaggtgaacgtggccggcctggtgctggccggcagcgccgacttcaagaccgagctgagccagagcgacatgttcgaccagagactgcagagcaaggtgctgaagctggtggacatcagctacggcggcgagaacggcttcaaccaggccatcgagctgagcaccgaggtgctgagcaacgtgaagttcatccaggagaagaagctgatcggcagatacttcgacgagatcagccaggacaccggcaagtactgcttcggcgtggaggacaccctgaaggccctggagatgggcgccgtggagatcctgatcgtgtacgagaacctggacatcatgagatacgtgctgcactgccagggcaccgaggaggagaagatcctgtacctgacccccgagcaggagaaggacaagagccacttcaccgacaaggagaccggccaggagcacgagctgatcgagagcatgcccctgctggagtggttcgccaacaactacaagaagttcggcgccaccctggagatcgtgaccgacaagagccaggagggcagccagttcgtgaagggcttcggcggcatcggcggcatcctgagatacagagtggacttccagggcatggagtaccagggcggcgacgacgagttcttcgacctggacgactactag

SEQ ID NO: 80995 - DNA, 1215 bp, synthetic construct
  misc_feature 1..1215: note = Description of Artificial Sequence: Synthetic coding sequence
  source 1..1215: mol_type = other DNA
atgatcagcctgatcatcccccccaaggaccagatcagcagagtggccaagatgctggccgacgagttcggcaccgccagcaacatcaagagcagagtgaacagactgagcgtgctgggcgccatcaccagcgtgcagcagagactgaagctgtacaacaaggtgccccccaacggcctggtggtgtactgcggcaccatcgtgaccgaggagggcaaggagaagaaggtgaacatcgacttcgagcccttcaagcccatcaacaccagcctgtacctgtgcgacaacaagttccacaccgaggccctgaccgccctgctgagcgacgacagcaagttcggcttcatcgtgatcgacggcagcggcgccctgttcggcaccctgcagggcaacaccagagaggtgctgcacaagttcaccgtggacctgcccaagaagcacggcagaggcggccagagcgccctgagattcgccagactgagaatggagaagagacacaactacgtgagaaaggtggccgagaccgccgtgcagctgttcatcagcggcgacaaggtgaacgtggccggcctggtgctggccggcagcgccgacttcaagaccgagctgagccagagcgacatgttcgaccagagactgcagagcaaggtgctgaagctggtggacatcagctacggcggcgagaacggcttcaaccaggccatcgagctgagcaccgaggtgctgagcaacgtgaagttcatccaggagaagaagctgatcggcagatacttcgacgagatcagccaggacaccggcaagtactgcttcggcgtggaggacaccctgaaggccctggagatgggcgccgtggagatcctgatcgtgtacgagaacctggacatcatgagatacgtgctgcactgccagggcaccgaggaggagaagatcctgtacctgacccccgagcaggagaaggacaagagccacttcaccgacaaggagaccggccaggagcacgagctgatcgagagcatgcccctgctggagtggttcgccaacaactacaagaagttcggcgccaccctggagatcgtgaccgacaagagccaggagggcagccagttcgtgaagggcttcggcggcatcggcggcatcctgagatacagagtggacttccagggcatggagtaccagggcggcgacgacgagttcttcgacctggacgactactag

SEQ ID NO: 80996 - DNA, 1272 bp, synthetic construct
  misc_feature 1..1272: note = Description of Artificial Sequence: Synthetic coding sequence
  source 1..1272: mol_type = other DNA
atgaagcaggacgtgctgaactgcaccgagggccccatccacagcaacggcaccagcatgatcagcctgatcatcccccccaaggaccagatcagcagagtggccaagatgctggccgacgagttcggcaccgccagcaacatcaagagcagagtgaacagactgagcgtgctgggcgccatcaccagcgtgcagcagagactgaagctgtacaacaaggtgccccccaacggcctggtggtgtactgcggcaccatcgtgaccgaggagggcaaggagaagaaggtgaacatcgacttcgagcccttcaagcccatcaacaccagcctgtacctgtgcgacaacaagttccacaccgaggccctgaccgccctgctgagcgacgacagcaagttcggcttcatcgtgatcgacggcagcggcgccctgttcggcaccctgcagggcaacaccagagaggtgctgcacaagttcaccgtggacctgcccaagaagcacggcagaggcggccagagcgccctgagattcgccagactgagaatggagaagagacacaactacgtgagaaaggtggccgagaccgccgtgcagctgttcatcagcggcgacaaggtgaacgtggccggcctggtgctggccggcagcgccgacttcaagaccgagctgagccagagcgacatgttcgaccagagactgcagagcaaggtgctgaagctggtggacatcagctacggcggcgagaacggcttcaaccaggccatcgagctgagcaccgaggtgctgagcaacgtgaagttcatccaggagaagaagctgatcggcagatacttcgacgagatcagccaggacaccggcaagtactgcttcggcgtggaggacaccctgaaggccctggagatgggcgccgtggagatcctgatcgtgtacgagaacctggacatcatgagatacgtgctgcactgccagggcaccgaggaggagaagatcctgtacctgacccccgagcaggagaaggacaagagccacttcaccgacaaggagaccggccaggagcacgagctgatcgagagcatgcccctgctggagtggttcgccaacaactacaagaagttcggcgccaccctggagatcgtgaccgacaagagccaggagggcagccagttcgtgaagggcttcggcggcatcggcggcatcctgagatacagagtggacttccagggcatggagtaccagggcggcgacgacgagttcttcgacctggacgactactag

SEQ ID NO: 80997 - DNA, 1224 bp, synthetic construct
  misc_feature 1..1224: note = Description of Artificial Sequence: Synthetic coding sequence
  source 1..1224: mol_type = other DNA
atggagagcagaaaggacatggtggtgttcctggacggcggccagctgggcaccctggtgggcaagagagtgagcaacctgagcgaggccgtgggcagccccctgcccgagccccccgagaagatggtgcccagaggctgcctgagccccagagccgtgccccccgccaccagagagagaggcggcggcggccccgaggaggagcccgtggacggcctggccggcagcgccgccggccccggcgccgagccccaggtggccggcgccgccatgctgggccccggcccccccgcccccagcgtggacagcctgagcggccagggccagcccagcagcagcgacaccgagagcgacttctacgaggagatcgaggtgagctgcacccccgactgcgccaccggcaacgccgagtaccagcacagcaagggcagcggcagcgaggccctggtgggcagccccaacggcggcagcgagacccccaagagcaacggcggcagcggcggcggcggcagccagggcaccctggcctgcagcgccagcgaccagatgagaagatacagaaccgccttcaccagagagcagatcgccagactggagaaggagttctacagagagaactacgtgagcagacccagaagatgcgagctggccgccgccctgaacctgcccgagaccaccatcaaggtgtggttccagaacagaagaatgaaggacaagagacagagactggccatgacctggccccaccccgccgaccccgccttctacacctacatgatgagccacgccgccgccgccggcggcctgccctaccccttccccagccacctgcccctgccctactacagccccgtgggcctgggcgccgccagcgccgccagcgccgccgccagccccttcagcggcagcctgagacccctggacaccttcagagtgctgagccagccctaccccagacccgagctgctgtgcgccttcagacacccccccctgtaccccggccccgcccacggcctgggcgccagcgccggcggcccctgcagctgcctggcctgccacagcggccccgccaacggcctggcccccagagccgccgccgccagcgacttcacctgcgccagcaccagcagaagcgacagcttcctgaccttcgcccccagcgtgctgagcaaggccagcagcgtggccctggaccagagagaggaggtgcccctgaccagatag

SEQ ID NO: 80998 - DNA, 678 bp, synthetic construct
  misc_feature 1..678: note = Description of Artificial Sequence: Synthetic coding sequence
  source 1..678: mol_type = other DNA
atgagaagatacagaaccgccttcaccagagagcagatcgccagactggagaaggagttctacagagagaactacgtgagcagacccagaagatgcgagctggccgccgccctgaacctgcccgagaccaccatcaaggtgtggttccagaacagaagaatgaaggacaagagacagagactggccatgacctggccccaccccgccgaccccgccttctacacctacatgatgagccacgccgccgccgccggcggcctgccctaccccttccccagccacctgcccctgccctactacagccccgtgggcctgggcgccgccagcgccgccagcgccgccgccagccccttcagcggcagcctgagacccctggacaccttcagagtgctgagccagccctaccccagacccgagctgctgtgcgccttcagacacccccccctgtaccccggccccgcccacggcctgggcgccagcgccggcggcccctgcagctgcctggcctgccacagcggccccgccaacggcctggcccccagagccgccgccgccagcgacttcacctgcgccagcaccagcagaagcgacagcttcctgaccttcgcccccagcgtgctgagcaaggccagcagcgtggccctggaccagagagaggaggtgcccctgaccagatag

SEQ ID NO: 80999 - DNA, 1431 bp, synthetic construct
  misc_feature 1..1431: note = Description of Artificial Sequence: Synthetic coding sequence
  source 1..1431: mol_type = other DNA
atgatggagagaatcagaaaggagatgatcctgatggagagaggcctgcacagccccaccgccggcaagagattcagcaacctgagcaacagcgccggcaacgccgtgctggaggccctggagaacagccagcaccccgccagactgagccccagactgcccagcgcccccctgcacagcgccctgggcgagctgcccgccaagggcaagttcgagatcgacaccctgttcaacctgcagcacaccggcagcgagagcaccgtgagcagcgagatcagcagcgccgccgagagcagaaagaagcccggccactacagcgaggccgccgccgaggccgacatgagcagcgacgtggaggtgggctgcagcgccctgagaagccccggcggcctgggcgccgcccagctgaaggagaacaacggcaagggctacgccgagagcggcagcgccgccggcaccaccaccagcgccagcggcagcggcctgggcagcctgcacggcggcagcggcggcagcggcggcagcgccgccctgggcggcagcggcagcggcgccgaccaggtgagaagatacagaaccgccttcaccagagagcagatcgccagactggagaaggagttctacagagagaactacgtgagcagacccagaagatgcgagctggccgccgccctgaacctgcccgagaccaccatcaaggtgtggttccagaacagaagaatgaaggacaagagacagagactggccatgagctggccccaccccgccgaccccagcttctacacctacatgatgacccacgccgccgccaccggcagcctgccctaccccttccacagccacgtgcccctgcactactacccccacgtgggcgtgaccgccgccgccgccgccgccgccgccagcggcgccgccgccgccgccagcagccccttcgccaccagcatcagacccctggacaccttcagagccctgagccacccctacagcagacccgagctgctgtgcagcttcagacaccccggcctgtaccaggcccccgccgccgccgccggcctgaacagcgccgccagcgccgccgccgccgccgccgccgccgccgccgccgccagcagcgccgccgccgccggcgccccccccagcggcggcagcgccccctgcagctgcctgagctgccacagcagccagagcgccgccgccgccgccgccgccgccgccgccgccctgggcagcagaggcggcggcggcggcggcggcggcggcggcggcggcggcggcggcggcgccggcgccggcggcggcagcgacttcggctgcagcgccgccgcccccagaagcgagagcggcttcctgccctacagcgccgccgtgctgagcaagaccgccgtgagcccccccgaccagagagacgaggcccccctgaccagatag

SEQ ID NO: 81000 - DNA, 2781 bp, synthetic construct
  misc_feature 1..2781: note = Description of Artificial Sequence: Synthetic coding sequence
  source 1..2781: mol_type = other DNA
atgagcagaagaagaaagcacgacgacagccccagccccaagaagaccccccacaagaccgtggccgccgaggagtgcggcagcgtggtggagcccggcagaagaagactgagaagcgccagaggcagctggccctgcggcgccagagagggcccccccggccccgtgagacagagagagcagccccccaccgccgccctgtgcagcaagagcaaccccgaggagagatacgagacccccaagagagccctgaagatggacagcctgagcagcagcttcagcagccccaacgaccccgacggccagaacgacatcttctgggaccagaacagccccctgaccaagcagctgggcaagggcagaaagaagcagatctacaccaccgacagcgacgagatcagccacatcgtgaacagaatcgccccccaggacgagaagcccaccaccaacagcatgctggacatgtggatcggcgagaccgccatcccctgcacccccagcgtggccaagggcaagagcagagccaagatcagctgcaccaagctgaagacccagagccaggaggaggagctgatgaagctggccaagcagttcgacaagaacatggaggagctggacgtgatccaggagcagaacaagagaaactacgacttcacccagatgatcagcgagaccgagatcctgagcaactacaaggacaacatccagatgtggagcctgcacaacatcgtgcccgagatcgacaacgccaccaagaagcccatcaagggcaacaccaagatcagcgtggccaacaaccagaacagcagccagaagcccttcgaccagatcgccgaggccgccttcaacgccatcttcgacggcagcacccagaagtgcagcggccagctgagccaggagctgcccgaggccttctggagcaccagcaacaccaccttcgtgaagaccaacgccctgaaggaggagaagatcatcaccaacgagaccctggtgatcgagaagctgagcaacaagacccccagaagcctgagcagccaggtggacacccccatcatgaccaagagctgcgtgaccagctgcaccaaggagcccgagaccagcaacaagtacatcgacgccttcaccaccagcgacttcgaggacgactgggagaacctgctgggcagcgagcccttcgccatgcagaacatcgacatgcccgagctgttccccagcaagaccgcccacgtgaccgaccagaaggagatctgcaccttcaacagcaagaccgtgaagaacaccagcagagccaacaccagccccgacgccagactgggcgacagcaaggtgctgcaggacctgagcagcaagacctacgacagagagctgatcgacgccgagtacagattcagccccaacagcaacaagagcaacaagctgagcaccggcaacaagatgaagttcgagaacagcagcaacaagatcgtgatccaggacgagatccagaactgcatcgtgaccagcaacctgaccaagatcaaggaggacatcctgaccaacagcaccgaggccagcgagagaaagagcgccctgaacaccagatacagcaacgagcagaagaacaagtgcatcctgaaccagagcatcaaggcccccgtgaacaccgacctgttcggcagcgccaacctgggcagcaagaccagcgtgagcaaccccaaccagaccagcgccagcaaggtgggcagcttcttcgacgactggaacgaccccagcttcgccaacgagatcatcaaggcctgccaccagctggacaacacctgggaggccgacgacgtggacgacgacctgctgtaccaggcctgcgacgacatcgagagactgacccagcagcaggacatcagaaaggacagcaagaccagcgagagcatctgcgagatcaacaacaacagcgagcacggcgccaagctgacccagcagcaggacatcagaaaggacagcaagaccagcgagagcatctgcgagatcaacaacaacagcgagcacggcgccaagaacatgttcgccatcagcaagcagggcagcaacctggtgcagagcaagcacctgaaccccggcagcatcagcgtgcagaccagcctgaccaacagcagccagatcgacaagcccatgaagatggagaagggcgagatgtacggcaacagccccagattcctgggcgccaccaacctgaccatgtacagcaagatcagcaactgccagatcaacaacctgcacgtgagctacaccaacaccgacgtgcccatccaggtgaacagcagcaagctggtgctgcccggcagcagcagcctgaacgtgaccagcgaccacatgaacaccgagatcaccacctacaagaagaagctgagcaccaaccagccctgccacaagaccgtgaccgacgaggcccagagcaacctgaacaccaccgtgggcttcagcaagttcaccttcaccagaatgaagaacagccagatcctgagccagttcaaccagaactgcatcaccggcagcatgagcgacaccaagatcacccagggcgtggagaagaagaagggcgtgaaccccctgctggaggaggccgtgggccagcagagcctggtgaagctgagcgagagcctgaagcagagcagcaaggaggaggaggagaagaacagaaagtgcagccccgaggagatccagagaaagagacaggaggccctggtgagaagaatggccaaggccagagccagcagcgtgaacgccgcccccaccagcttcctgtag

SEQ ID NO: 81001 - DNA, 2349 bp, synthetic construct
  misc_feature 1..2349: note = Description of Artificial Sequence: Synthetic coding sequence
  source 1..2349: mol_type = other DNA
atgggcaagagagacagagccgacagagacaagaagaagagcagaaagagacactacgaggacgaggaggacgacgaggaggacgcccccggcaacgacccccaggaggccgtgcccagcgccgccggcaagcaggtggacgagagcggcaccaaggtggacgagtacggcgccaaggactacagactgcagatgcccctgaaggacgaccacaccagcagacccctgtgggtggcccccgacggccacatcttcctggaggccttcagccccgtgtacaagtacgcccaggacttcctggtggccatcgccgagcccgtgtgcagacccacccacgtgcacgagtacaagctgaccgcctacagcctgtacgccgccgtgagcgtgggcctgcagaccagcgacatcaccgagtacctgagaaagctgagcaagaccggcgtgcccgacggcatcatgcagttcatcaagctgtgcaccgtgagctacggcaaggtgaagctggtgctgaagcacaacagatacttcgtggagagctgccaccccgacgtgatccagcacctgctgcaggaccccgtgatcagagagtgcagactgagaaacagcgagggcgaggccaccgagctgatcaccgagaccttcaccagcaagagcgccatcagcaagaccgccgagagcagcggcggccccagcaccagcagagtgaccgacccccagggcaagagcgacatccccatggacctgttcgacttctacgagcagatggacaaggacgaggaggaggaggaggagacccagaccgtgagcttcgaggtgaagcaggagatgatcgaggagctgcagaagagatgcatccacctggagtaccccctgctggccgagtacgacttcagaaacgacagcgtgaaccccgacatcaacatcgacctgaagcccaccgccgtgctgagaccctaccaggagaagagcctgagaaagatgttcggcaacggcagagccagaagcggcgtgatcgtgctgccctgcggcgccggcaagagcctggtgggcgtgaccgccgcctgcaccgtgagaaagagatgcctggtgctgggcaacagcgccgtgagcgtggagcagtggaaggcccagttcaagatgtggagcaccatcgacgacagccagatctgcagattcaccagcgacgccaaggacaagcccatcggctgcagcgtggccatcagcacctacagcatgctgggccacaccaccaagagaagctgggaggccgagagagtgatggagtggctgaagacccaggagtggggcctgatgatcctggacgaggtgcacaccatccccgccaagatgttcagaagagtgctgaccatcgtgcaggcccactgcaagctgggcctgaccgccaccctggtgagagaggacgacaagatcgtggacctgaacttcctgatcggccccaagctgtacgaggccaactggatggagctgcagaacaacggctacatcgccaaggtgcagtgcgccgaggtgtggtgccccatgagccccgagttctacagagagtacgtggccatcaagaccaagaagagaatcctgctgtacaccatgaaccccaacaagttcagagcctgccagttcctgatcaagttccacgagagaagaaacgacaagatcatcgtgttcgccgacaacgtgttcgccctgaaggagtacgccatcagactgaacaagccctacatctacggccccaccagccagggcgagagaatgcagatcctgcagaacttcaagcacaaccccaagatcaacaccatcttcatcagcaaggtgggcgacaccagcttcgacctgcccgaggccaacgtgctgatccagatcagcagccacggcggcagcagaagacaggaggcccagagactgggcagagtgctgagagccaagaagggcatggtggccgaggagtacaacgccttcttctacagcctggtgagccaggacacccaggagatggcctacagcaccaagagacagagattcctggtggaccagggctacagcttcaaggtgatcaccaagctggccggcatggaggaggaggacctggccttcagcaccaaggaggagcagcagcagctgctgcagaaggtgctggccgccaccgacctggacgccgaggaggaggtggtggccggcgagttcggcagcagaagcagccaggccagcagaagattcggcaccatgagcagcatgagcggcgccgacgacaccgtgtacatggagtaccacagcagcagaagcaaggcccccagcaagcacgtgcaccccctgttcaagagattcagaaagtag

SEQ ID NO: 81002 - DNA, 2157 bp, synthetic construct
  misc_feature 1..2157: note = Description of Artificial Sequence: Synthetic coding sequence
  source 1..2157: mol_type = other DNA
atgcccctgaaggacgaccacaccagcagacccctgtgggtggcccccgacggccacatcttcctggaggccttcagccccgtgtacaagtacgcccaggacttcctggtggccatcgccgagcccgtgtgcagacccacccacgtgcacgagtacaagctgaccgcctacagcctgtacgccgccgtgagcgtgggcctgcagaccagcgacatcaccgagtacctgagaaagctgagcaagaccggcgtgcccgacggcatcatgcagttcatcaagctgtgcaccgtgagctacggcaaggtgaagctggtgctgaagcacaacagatacttcgtggagagctgccaccccgacgtgatccagcacctgctgcaggaccccgtgatcagagagtgcagactgagaaacagcgagggcgaggccaccgagctgatcaccgagaccttcaccagcaagagcgccatcagcaagaccgccgagagcagcggcggccccagcaccagcagagtgaccgacccccagggcaagagcgacatccccatggacctgttcgacttctacgagcagatggacaaggacgaggaggaggaggaggagacccagaccgtgagcttcgaggtgaagcaggagatgatcgaggagctgcagaagagatgcatccacctggagtaccccctgctggccgagtacgacttcagaaacgacagcgtgaaccccgacatcaacatcgacctgaagcccaccgccgtgctgagaccctaccaggagaagagcctgagaaagatgttcggcaacggcagagccagaagcggcgtgatcgtgctgccctgcggcgccggcaagagcctggtgggcgtgaccgccgcctgcaccgtgagaaagagatgcctggtgctgggcaacagcgccgtgagcgtggagcagtggaaggcccagttcaagatgtggagcaccatcgacgacagccagatctgcagattcaccagcgacgccaaggacaagcccatcggctgcagcgtggccatcagcacctacagcatgctgggccacaccaccaagagaagctgggaggccgagagagtgatggagtggctgaagacccaggagtggggcctgatgatcctggacgaggtgcacaccatccccgccaagatgttcagaagagtgctgaccatcgtgcaggcccactgcaagctgggcctgaccgccaccctggtgagagaggacgacaagatcgtggacctgaacttcctgatcggccccaagctgtacgaggccaactggatggagctgcagaacaacggctacatcgccaaggtgcagtgcgccgaggtgtggtgccccatgagccccgagttctacagagagtacgtggccatcaagaccaagaagagaatcctgctgtacaccatgaaccccaacaagttcagagcctgccagttcctgatcaagttccacgagagaagaaacgacaagatcatcgtgttcgccgacaacgtgttcgccctgaaggagtacgccatcagactgaacaagccctacatctacggccccaccagccagggcgagagaatgcagatcctgcagaacttcaagcacaaccccaagatcaacaccatcttcatcagcaaggtgggcgacaccagcttcgacctgcccgaggccaacgtgctgatccagatcagcagccacggcggcagcagaagacaggaggcccagagactgggcagagtgctgagagccaagaagggcatggtggccgaggagtacaacgccttcttctacagcctggtgagccaggacacccaggagatggcctacagcaccaagagacagagattcctggtggaccagggctacagcttcaaggtgatcaccaagctggccggcatggaggaggaggacctggccttcagcaccaaggaggagcagcagcagctgctgcagaaggtgctggccgccaccgacctggacgccgaggaggaggtggtggccggcgagttcggcagcagaagcagccaggccagcagaagattcggcaccatgagcagcatgagcggcgccgacgacaccgtgtacatggagtaccacagcagcagaagcaaggcccccagcaagcacgtgcaccccctgttcaagagattcagaaagtag

SEQ ID NO: 81003 - DNA, 3753 bp, synthetic construct
  misc_feature 1..3753: note = Description of Artificial Sequence: Synthetic coding sequence
  source 1..3753: mol_type = other DNA
atggaggccagcagaagattccccgaggccgaggccctgagccccgagcaggccgcccactacctgagatacgtgaaggaggccaaggaggccaccaagaacggcgacctggaggaggccttcaagctgttcaacctggccaaggacatcttccccaacgagaaggtgctgagcagaatccagaagatccaggaggccctggaggagctggccgagcagggcgacgacgagttcaccgacgtgtgcaacagcggcctgctgctgtacagagagctgcacaaccagctgttcgagcaccagaaggagggcatcgccttcctgtacagcctgtacagagacggcagaaagggcggcatcctggccgacgacatgggcctgggcaagaccgtgcagatcatcgccttcctgagcggcatgttcgacgccagcctggtgaaccacgtgctgctgatcatgcccaccaacctgatcaacacctgggtgaaggagttcatcaagtggacccccggcatgagagtgaagaccttccacggccccagcaaggacgagagaaccagaaacctgaacagaatccagcagagaaacggcgtgatcatcaccacctaccagatgctgatcaacaactggcagcagctgagcagcttcagaggccaggagttcgtgtgggactacgtgatcctggacgaggcccacaagatcaagaccagcagcaccaagagcgccatctgcgccagagccatccccgccagcaacagactgctgctgaccggcacccccatccagaacaacctgcaggagctgtggagcctgttcgacttcgcctgccagggcagcctgctgggcaccctgaagaccttcaagatggagtacgagaaccccatcaccagagccagagagaaggacgccacccccggcgagaaggccctgggcttcaagatcagcgagaacctgatggccatcatcaagccctacttcctgagaagaaccaaggaggacgtgcagaagaagaagagcagcaaccccgaggccagactgaacgagaagaaccccgacgtggacgccatctgcgagatgcccagcctgagcagaaagaacgacctgatcatctggatcagactggtgcccctgcaggaggagatctacagaaagttcgtgagcctggaccacatcaaggagctgctgatggagaccagaagccccctggccgagctgggcgtgctgaagaagctgtgcgaccaccccagactgctgagcgccagagcctgctgcctgctgaacctgggcaccttcagcgcccaggacggcaacgagggcgaggacagccccgacgtggaccacatcgaccaggtgaccgacgacaccctgatggaggagagcggcaagatgatcttcctgatggacctgctgaagagactgagagacgagggccaccagaccctggtgttcagccagagcagacagatcctgaacatcatcgagagactgctgaagaacagacacttcaagaccctgagaatcgacggcaccgtgacccacctgctggagagagagaagagaatcaacctgttccagcagaacaaggactacagcgtgttcctgctgaccacccaggtgggcggcgtgggcctgaccctgaccgccgccaccagagtggtgatcttcgaccccagctggaaccccgccaccgacgcccaggccgtggacagagtgtacagaatcggccagaaggagaacgtggtggtgtacagactgatcacctgcggcaccgtggaggagaagatctacagaagacaggtgttcaaggacagcctgatcagacagaccaccggcgagaagaagaaccccttcagatacttcagcaagcaggagctgagagagctgttcaccatcgaggacctgcagaacagcgtgacccagctgcagctgcagagcctgcacgccgcccagagaaagagcgacatcaagctggacgagcacatcgcctacctgcagagcctgggcatcgccggcatcagcgaccacgacctgatgtacacctgcgacctgagcgtgaaggaggagctggacgtggtggaggagagccactacatccagcagagagtgcagaaggcccagttcctggtggagttcgagagccagaacaaggagttcctgatggagcagcagagaaccagaaacgagggcgcctggctgagagagcccgtgttccccagcagcaccaagaagaagtgccccaagctgaacaagccccagccccagcccagccccctgctgagcacccaccacacccaggaggaggacatcagcagcaagatggccagcgtggtgatcgacgacctgcccaaggagggcgagaagcaggacctgagcagcatcaaggtgaacgtgaccaccctgcaggacggcaagggcaccggcagcgccgacagcatcgccaccctgcccaagggcttcggcagcgtggaggagctgtgcaccaacagcagcctgggcatggagaagagcttcgccaccaagaacgaggccgtgcagaaggagaccctgcaggagggccccaagcaggaggccctgcaggaggaccccctggagagcttcaactacgtgctgagcaagagcaccaaggccgacatcggccccaacctggaccagctgaaggacgacgagatcctgagacactgcaacccctggcccatcatcagcatcaccaacgagagccagaacgccgagagcaacgtgagcatcatcgagatcgccgacgacctgagcgccagccacagcgccctgcaggacgcccaggccagcgaggccaagctggaggaggagcccagcgccagcagcccccagtacgcctgcgacttcaacctgttcctggaggacagcgccgacaacagacagaacttcagcagccagagcctggagcacgtggagaaggagaacagcctgtgcggcagcgcccccaacagcagagccggcttcgtgcacagcaagacctgcctgagctgggagttcagcgagaaggacgacgagcccgaggaggtggtggtgaaggccaagatcagaagcaaggccagaagaatcgtgagcgacggcgaggacgaggacgacagcttcaaggacaccagcagcatcaaccccttcaacaccagcctgttccagttcagcagcgtgaagcagttcgacgccagcacccccaagaacgacatcagcccccccggcagattcttcagcagccagatccccagcagcgtgaacaagagcatgaacagcagaagaagcctggccagcagaagaagcctgatcaacatggtgctggaccacgtggaggacatggaggagagactggacgacagcagcgaggccaagggccccgaggactaccccgaggagggcgtggaggagagcagcggcgaggccagcaagtacaccgaggaggaccccagcggcgagaccctgagcagcgagaacaagagcagctggctgatgaccagcaagcccagcgccctggcccaggagaccagcctgggcgcccccgagcccctgagcggcgagcagctggtgggcagcccccaggacaaggccgccgaggccaccaacgactacgagaccctggtgaagagaggcaaggagctgaaggagtgcggcaagatccaggaggccctgaactgcctggtgaaggccctggacatcaagagcgccgaccccgaggtgatgctgctgaccctgagcctgtacaagcagctgaacaacaactag

SEQ ID NO: 81004 - DNA, 2685 bp, synthetic construct
  misc_feature 1..2685: note = Description of Artificial Sequence: Synthetic coding sequence
  source 1..2685: mol_type = other DNA
atgaccgccatcaagcacgccctgcagagagacatcttcacccccaacgacgagagactgctgagcatcgtgaacgtgtgcaaggccggcaagaagaagaagaactgcttcctgtgcgccaccgtgaccaccgagagacccgtgcaggtgaaggtggtgaaggtgaagaagagcgacaagggcgacttctacaagagacagatcgcctgggccctgagagacctggccgtggtggacgccaaggacgccatcaaggagaaccccgagttcgacctgcacttcgagaagatctacaagtgggtggccagcagcaccgccgagaagaacgccttcatcagctgcatctggaagctgaaccagagatacctgagaaagaagatcgacttcgtgaacgtgagcagccagctgctggaggagagcgtgcccagcggcgagaaccagagcgtgaccggcggcgacgaggaggtggtggacgagtaccaggagctgaacgccagagaggagcaggacatcgagatcatgatggagggctgcgagtacgccatcagcaacgccgaggccttcgccgagaagctgagcagagagctgcaggtgctggacggcgccaacatccagagcatcatggccagcgagaagcaggtgaacatcctgatgaagctgctggacgaggccctgaaggaggtggaccagatcgagctgaagctgagcagctacgaggagatgctgcagagcgtgaaggagcagatggaccagatcagcgagagcaaccacctgatccacctgagcaacaccaacaacgtgaagctgctgagcgagatcgagttcctggtgaaccacatggacctggccaagggccacatcaaggccctgcaggagggcgacctggccagcagcagaggcatcgaggcctgcaccaacgccgccgacgccctgctgcagtgcatgaacgtggccctgagacccggccacgacctgctgctggccgtgaagcagcagcagcagagattcagcgacctgagagagctgttcgccagaagactggccagccacctgaacaacgtgttcgtgcagcagggccacgaccagagcagcaccctggcccagcacagcgtggagctgaccctgcccaaccaccaccccttccacagagacctgctgagatacgccaagctgatggagtggctgaagagcaccgactacggcaagtacgagggcctgaccaagaactacatggactacctgagcagactgtacgagagagagatcaaggacttcttcgaggtggccaagatcaagatgaccggcaccaccaaggagagcaagaagttcgccaccctgcccagaaaggagagcgccgtgaagcaggagaccgagagcctgcacggcagcagcggcaagctgaccggcagcaccagcagcctgaacaagctgagcgtgcagagcagcggcaacagaagaagccagagcagcagcctgctggacatgggcaacatgagcgccagcgacctggacgtggccgacagaaccaagttcgacaagatcttcgagcaggtgctgagcgagctggagcccctgtgcctggccgagcaggacttcatcagcaagttcttcaagctgcagcagcaccagagcatgcccggcaccatggccgaggccgaggacctggacggcggcaccctgagcagacagcacaactgcggcacccccctgcccgtgagcagcgagaaggacatgatcagacagatgatgatcaagatcttcagatgcatcgagcccgagctgaacaacctgatcgccctgggcgacaagatcgacagcttcaacagcctgtacatgctggtgaagatgagccaccacgtgtggaccgcccagaacgtggaccccgccagcttcctgagcaccaccctgggcaacgtgctggtgaccgtgaagagaaacttcgacaagtgcatcagcaaccagatcagacagatggaggaggtgaagatcagcaagaagagcaaggtgggcatcctgcccttcgtggccgagttcgaggagttcgccggcctggccgagagcatcttcaagaacgccgagagaagaggcgacctggacaaggcctacaccaagctgatcagaggcgtgttcgtgaacgtggagaaggtggccaacgagagccagaagacccccagagacgtggtgatgatggagaacttccaccacatcttcgccaccctgagcagactgaagatcagctgcctggaggccgagaagaaggaggccaagcagaagtacaccgaccacctgcagagctacgtgatctacagcctgggccagcccctggagaagctgaaccacttcttcgagggcgtggaggccagagtggcccagggcatcagagaggaggaggtgagctaccagctggccttcaacaagcaggagctgagaaaggtgatcaaggagtaccccggcaaggaggtgaagaagggcctggacaacctgtacaagaaggtggacaagcacctgtgcgaggaggagaacctgctgcaggtggtgtggcacagcatgcaggacgagttcatcagacagtacaagcacttcgagggcctgatcgccagatgctaccccggcagcggcgtgaccatggagttcaccatccaggacatcctggactactgcagcagcatcgcccagagccactag

SEQ ID NO: 81005 - DNA, 2640 bp, synthetic construct
  misc_feature 1..2640: note = Description of Artificial Sequence: Synthetic coding sequence
  source 1..2640: mol_type = other DNA
atgaccgccatcaagcacgccctgcagagagacatcttcacccccaacgacgagagactgctgagcatcgtgaacgtgtgcaaggccggcaagaagaagaagaactgcttcctgtgcgccaccgtgaccaccgagagacccgtgcaggtgaaggtggtgaaggtgaagaagagcgacaagggcgacttctacaagagacagatcgcctgggccctgagagacctggccgtggtggacgccaaggacgccatcaaggagaaccccgagttcgacctgcacttcgagaagatctacaagtgggtggccagcagcaccgccgagaagaacgccttcatcagctgcatctggaagctgaaccagagatacctgagaaagaagatcgacttcgtgaacgtgagcagccagctgctggaggagagcgtgcccagcggcgagaaccagagcgtgaccggcggcgacgaggaggtggtggacgagtaccaggagctgaacgccagagaggagcaggacatcgagatcatgatggagggctgcgagtacgccatcagcaacgccgaggccttcgccgagaagctgagcagagagctgcaggtgctggacggcgccaacatccagagcatcatggccagcgagaagcaggtgaacatcctgatgaagctgctggacgaggccctgaaggaggtggaccagatcgagctgaagctgagcagctacgaggagatgctgcagagcgtgaaggagcagatggaccagatcagcgagagcaaccacctgatccacctgagcaacaccaacaacgtgaagctgctgagcgagatcgagttcctggtgaaccacatggacctggccaagggccacatcaaggccctgcaggagggcgacctggccagcagcagaggcatcgaggcctgcaccaacgccgccgacgccctgctgcagtgcatgaacgtggccctgagacccggccacgacctgctgctggccgtgaagcagcagcagcagagattcagcgacctgagagagctgttcgccagaagactggccagccacctgaacaacgtgttcgtgcagcagggccacgaccagagcagcaccctggcccagcacagcgtggagctgaccctgcccaaccaccaccccttccacagagacctgctgagatacgccaagctgatggagtggctgaagagcaccgactacggcaagtacgagggcctgaccaagaactacatggactacctgagcagactgtacgagagagagatcaaggacttcttcgaggtggccaagatcaagatgaccggcaccaccaaggagagcaagaagttcggcctgcacggcagcagcggcaagctgaccggcagcaccagcagcctgaacaagctgagcgtgcagagcagcggcaacagaagaagccagagcagcagcctgctggacatgggcaacatgagcgccagcgacctggacgtggccgacagaaccaagttcgacaagatcttcgagcaggtgctgagcgagctggagcccctgtgcctggccgagcaggacttcatcagcaagttcttcaagctgcagcagcaccagagcatgcccggcaccatggccgaggccgaggacctggacggcggcaccctgagcagacagcacaactgcggcacccccctgcccgtgagcagcgagaaggacatgatcagacagatgatgatcaagatcttcagatgcatcgagcccgagctgaacaacctgatcgccctgggcgacaagatcgacagcttcaacagcctgtacatgctggtgaagatgagccaccacgtgtggaccgcccagaacgtggaccccgccagcttcctgagcaccaccctgggcaacgtgctggtgaccgtgaagagaaacttcgacaagtgcatcagcaaccagatcagacagatggaggaggtgaagatcagcaagaagagcaaggtgggcatcctgcccttcgtggccgagttcgaggagttcgccggcctggccgagagcatcttcaagaacgccgagagaagaggcgacctggacaaggcctacaccaagctgatcagaggcgtgttcgtgaacgtggagaaggtggccaacgagagccagaagacccccagagacgtggtgatgatggagaacttccaccacatcttcgccaccctgagcagactgaagatcagctgcctggaggccgagaagaaggaggccaagcagaagtacaccgaccacctgcagagctacgtgatctacagcctgggccagcccctggagaagctgaaccacttcttcgagggcgtggaggccagagtggcccagggcatcagagaggaggaggtgagctaccagctggccttcaacaagcaggagctgagaaaggtgatcaaggagtaccccggcaaggaggtgaagaagggcctggacaacctgtacaagaaggtggacaagcacctgtgcgaggaggagaacctgctgcaggtggtgtggcacagcatgcaggacgagttcatcagacagtacaagcacttcgagggcctgatcgccagatgctaccccggcagcggcgtgaccatggagttcaccatccaggacatcctggactactgcagcagcatcgcccagagccactag

SEQ ID NO: 81006 - DNA, 2685 bp, synthetic construct; identical to SEQ ID NO: 81004
  misc_feature 1..2685: note = Description of Artificial Sequence: Synthetic coding sequence
  source 1..2685: mol_type = other DNA

SEQ ID NO: 81007 - DNA, 2238 bp, synthetic construct
  misc_feature 1..2238: note = Description of Artificial Sequence: Synthetic coding sequence
  source 1..2238: mol_type = other DNA
atgaaggagaccgacagagaggccgtggccaccgccgtgcagagagtggccggcatgctgcagagacccgaccagctggacaaggtggagcagtacagaagaagagaggccagaaagaaggccagcgtggaggccagactgaaggccgccatccagagccagctggacggcgtgagaaccggcctgagccagctgcacaacgccctgaacgacgtgaaggacatccagcagagcctggccgacgtgagcaaggactggagacagagcatcaacaccatcgagagcctgaaggacgtgaaggacgccgtggtgcagcacagccagctggccgccgccgtggagaacctgaagaacatcttcagcgtgcccgagatcgtgagagagacccaggacctgatcgagcagggcgccctgctgcaggcccacagaaagctgatggacctggagtgcagcagagacggcctgatgtacgagcagtacagaatggacagcggcaacaccagagacatgaccctgatccacggctacttcggcagcacccagggcctgagcgacgagctggccaagcagctgtggatggtgctgcagagaagcctggtgaccgtgagaagagaccccaccctgctggtgagcgtggtgagaatcatcgagagagaggagaagatcgacagaagaatcctggacagaaagaagcagaccggcttcgtgccccccggcagacccaagaactggaaggagaagatgttcaccatcctggagagaaccgtgaccaccagaatcgagggcacccaggccgacaccagagagagcgacaagatgtggctggtgagacacctggagatcatcagaaagtacgtgctggacgacctgatcgtggccaagaacctgatggtgcagtgcttccccccccactacgagatcttcaagaacctgctgaacatgtaccaccaggccctgagcaccagaatgcaggacctggccagcgaggacctggaggccaacgagatcgtgagcctgctgacctgggtgctgaacacctacaccagcaccgagatgatgagaaacgtggagctggcccccgaggtggacgtgggcaccctggagcccctgctgagcccccacgtggtgagcgagctgctggacacctacatgagcaccctgaccagcaacatcatcgcctggctgagaaaggccctggagaccgacaagaaggactgggtgaaggagaccgagcccgaggccgaccaggacggctactaccagaccaccctgcccgccatcgtgttccagatgttcgagcagaacctgcaggtggccgcccagatcagcgaggacctgaagaccaaggtgctggtgctgtgcctgcagcagatgaacagcttcctgagcagatacaaggacgaggcccagctgtacaaggaggagcacctgagaaacagacagcacccccactgctacgtgcagtacatgatcgccatcatcaacaactgccagaccttcaaggagagcatcgtgagcctgaagagaaagtacctgaagaacgaggtggaggagggcgtgagccccagccagcccagcatggacggcatcctggacgccatcgccaaggagggctgcagcggcctgctggaggaggtgttcctggacctggagcagcacctgaacgagctgatgaccaagaagtggctgctgggcagcaacgccgtggacatcatctgcgtgaccgtggaggactacttcaacgacttcgccaagatcaagaagccctacaagaagagaatgaccgccgaggcccacagaagagtggtggtggagtacctgagagccgtgatgcagaagagaatcagcttcagaagccccgaggagagaaaggagggcgccgagaagatggtgagagaggccgagcagctgagattcctgttcagaaagctggccagcggcttcggcgaggacgtggacggctactgcgacaccatcgtggccgtggccgaggtgatcaagctgaccgaccccagcctgctgtacctggaggtgagcaccctggtgagcaagtaccccgacatcagagacgaccacatcggcgccctgctggccgtgagaggcgacgccagcagagacatgaagcagaccatcatggagaccctggagcagggccccgcccaggccagccccagctacgtgcccctgttcaaggacatcgtggtgcccagcctgaacgtggccaagctgctgaagtag

SEQ ID NO: 81008 - DNA, 1923 bp, synthetic construct
  misc_feature 1..1923: note = Description of Artificial Sequence: Synthetic coding sequence
  source 1..1923: mol_type = other DNA
cagtgcgaggacagcaccagcttcttcaccatgaaggagaccgacagagaggccgtggccaccgccgtgcagagagtggccggcatgctgcagagacccgaccagctggacaaggtggagcagtacagaagaagagaggccagaaagaaggccagcgtggaggccagactgaaggccgccatccagagccagctggacggcgtgagaaccggcctgagccagctgcacaacgccctgaacgacgtgaaggacatccagcagagcctggccgacgtgagcaaggactggagacagagcatcaacaccatcgagagcctgaaggacgtgaaggacgccgtggtgcagcacagccagctggccgccgccgtggagaacctgaagaacatcttcagcgtgcccgagatcgtgagagagacccaggacctgatcgagcagggcgccctgctgcaggcccacagaaagctgatggacctggagtgcagcagagacggcctgatgtacgagcagtacagaatggacagcggcaacaccagagacatgaccctgatccacggctacttcggcagcacccagggcctgagcgacgagctggccaagcagctgtggatggtgctgcagagaagcctggtgaccgtgagaagagaccccaccctgctggtgagcgtggtgagaatcatcgagagagaggagaagatcgacagaagaatcctggacagaaagaagcagaccggcttcgtgccccccggcagacccaagaactggaaggagaagatgttcaccatcctggagagaaccgtgaccaccagaatcgagggcacccaggccgacaccagagagagcgacaagatgtggctggtgagacacctggagatcatcagaaagtacgtgctggacgacctgatcgtggccaagaacctgatggtgcagtgcttccccccccactacgagatcttcaagaacctgctgaacatgtaccaccaggccctgagcaccagaatgcaggacctggccagcgaggacctggaggccaacgagatcgtgagcctgctgacctgggtgctgaacacctacaccagatacaaggacgaggcccagctgtacaaggaggagcacctgagaaacagacagcacccccactgctacgtgcagtacatgatcgccatcatcaacaactgccagaccttcaaggagagcatcgtgagcctgaagagaaagtacctgaagaacgaggtggaggagggcgtgagccccagccagcccagcatggacggcatcctggacgccatcgccaaggagggctgcagcggcctgctggaggaggtgttcctggacctggagcagcacctgaacgagctgatgaccaagaagtggctgctgggcagcaacgccgtggacatcatctgcgtgaccgtggaggactacttcaacgacttcgccaagatcaagaagccctacaagaagagaatgaccgccgaggcccacagaagagtggtggtggagtacctgagagccgtgatgcagaagagaatcagcttcagaagccccgaggagagaaaggagggcgccgagaagatggtgagagaggccgagcagctgagattcctgttcagaaagctggccagcggcttcggcgaggacgtggacggctactgcgacaccatcgtggccgtggccgaggtgatcaagctgaccgaccccagcctgctgtacctggaggtgagcaccctggtgagcaagtaccccgacatcagagacgaccacatcggcgccctgctggccgtgagaggcgacgccagcagagacatgaagcagaccatcatggagaccctggagcagggccccgcccaggccagccccagctacgtgcccctgttcaaggacatcgtggtgcccagcctgaacgtggccaagctgctgaagtag

SEQ ID NO: 81009 - DNA, 210 bp, synthetic construct
  misc_feature 1..210: note = Description of Artificial Sequence: Synthetic coding sequence
  source 1..210: mol_type = other DNA
atgaaggagaccgacagagaggccgtggccaccgccgtgcagagagtggccggcatgctgcagagacccgaccagctggacaaggtggagcagtacagaagaagagaggccagaaagaaggccagcgtggaggccagactgaaggccgccatccagagccagctggacggcgtgagaaccggcctgagccagctgcacaacgccctgtag

SEQ ID NO: 81010 - DNA, 2238 bp, synthetic construct; identical to SEQ ID NO: 81007
  misc_feature 1..2238: note = Description of Artificial Sequence: Synthetic coding sequence
  source 1..2238: mol_type = other DNA

SEQ ID NO: 81011 - DNA, 2034 bp, synthetic construct
  misc_feature 1..2034: note = Description of Artificial Sequence: Synthetic coding sequence
  source 1..2034: mol_type = other DNA
atggacagcgccgccaaggacgagatgcagcccgccctgagccccggcagcagcttccccggccccgagtggcccgagcaggagagagccgagcagctggccagaggcgccgccctgaagtgggccagcggcatcttctacagacccgagcagctggccagactgggccagtacagaagcagagaggtgcagagaacctgcagcctggagagcagactgaagagcgtgatgcagagctacctggagggcgtgcagaccgtgcccgccgccgtgagccacacccagaccctgatcgacggccagcagttcctggaggcctacgtgagcctgagagagctggagcagctgagagaggacacctgggcccccctgggcggcctggagctgcccgtgttccagggcctggacctgctgttcgaggccctgggccaggccgtggaggccgccgccggcgccgccggcaagctggccagagaggaccccgccctgctggtggccgccgtgagagtggccgaggtggagaccggcagaaccacccccctgggccaggtgcccagagactggagacagagatgcctgagagccctgcaggagggcctggagcaggcccacttcggcagccccctgctgcccgcccccggcgccctgcccggctggctggaggccctgagagtggccctgcccgtggagctggccaccgccgaggccctggtggccccctgctgccccccccagtacaacgtggtgcagctgtgggcccacaccctgcacagcggcctgagaagaagcctgcagaacctgctggccggccccgagctggaggccgccgacgccttcgccctgctgcactgggccctgcacgtgtacctgggccaggagatgatgggcagcctggagctgggccccgaggccgacgtgagccagctggagcccctgctgaccctggagaacatcgagcagctggaggccaccttcgtggccaacatccagatcctggaggagaacatcagagtggccagcctggtgagcgagagcctgcagcagagagtgcacggcatggccctgagcgagctgggcaccttcctgagaagcttcagcgacgccctgatcagattcagcagagaccacttcagaggcaagagcatggccccccactacgtgccctacctgctggccgccctgaaccacaagagcgccctgagcagcagcgtgagcgtgctgcagctggacggcgcccccagcggcgccctggcccccgtggaggccgccctggacgagctgcagagaagaatctacagactggtgctggaggccctgcaggccgagctgcagcccctgttcgccgacctgcccagcagacagtggctgagcagccccgagctgctgcagagcgtgtgcgagagaaccggcagattctgcagagacttctggagagtgagaaaccccaccgtgcagctgctgctggccgaggccgagagagccgtggtgctgcagtacctgagcgccctgatgcagggcagactggtgtgcagaggcgccgacgagagaacccaggccgccgagagactgagacacgacgccgcccagctgcagcagctgttcctgagcctggtgagagccagctgggccggcagaagagccagagtgagcgtggccggctgggagagaggcctggccagagaccccacccccacctgcagcggccccggcggcgagagagccctgagagccggcgccgccagacccgagggcgccgccaagccccccagacccagagccgccggccccggcggcggctggcccgccgccaccatcagcagaagagagagaggccccagactgagacccctgggccccgccagaggcctggtgcccggcgccgcccccggcagagcccagctgcccgccggctgcgccgccgccgtggcccccagagagccccccagacccctgcagcccagcgccagagccagagcccccgccagctgcctgcccagcggcagctgcgccagagccctgctgctggccgagtag

SEQ ID NO: 81012 - DNA, 2241 bp, synthetic construct
  misc_feature 1..2241: note = Description of Artificial Sequence: Synthetic coding sequence
  source 1..2241: mol_type = other DNA
atggacagcgccgccaaggacgagatgcagcccgccctgagccccggccccgagtggcccgagcaggagagagccgagcagctggccagaggcgccgccctgaagtgggccagcggcatcttctacagacccgagcagctggccagactgggccagtacagaagcagagaggtgcagagaacctgcagcctggagagcagactgaagagcgtgatgcagagctacctggagggcgtgcagaccggcgtgtggcagctggcccaggccatcgaggtggtgcagggcaccagagaggccctgagccaggccagaggcctgctgcagggcatgagccaggccctgcagaccctggagcccctgagagagagagtggcccagcacaagcagctgcaggccctgagccacctgctgcccagactgagagccgtgcccgccgccgtgagccacacccagaccctgatcgacggccagcagttcctggaggcctacgtgagcctgagagagctggagcagctgagagaggacacctgggcccccctgggcggcctggagctgcccgtgttccagggcctggacctgctgttcgaggccctgggccaggccgtggaggccgccgccggcgccgccggcaagctggccagagaggaccccgccctgctggtggccgccgtgagagtggccgaggtggagaccggcagaaccacccccctgggccaggtgcccagagactggagacagagatgcctgagagccctgcaggagggcctggagcaggcccacttcggcagccccctgctgcccgcccccggcgccctgcccggctggctggaggccctgagagtggccctgcccgtggagctggccaccgccgaggccctggtggccccctgctgccccccccagtacaacgtggtgcagctgtgggcccacaccctgcacagcggcctgagaagaagcctgcagaacctgctggccggccccgagctggaggccgccgacgccttcgccctgctgcactgggccctgcacgtgtacctgggccaggagatgatgggcagcctggagctgggccccgaggccgacgtgagccagctggagcccctgctgaccctggagaacatcgagcagctggaggccaccttcgtggccaacatccaggccagcgtgagccagtggctgcagaacgccctggacggcgaggtggccgagtggggcagagagcacggccccaacaccgaccccagcggcagctactacagccccatgcccgccatcgtgctgcagatcctggaggagaacatcagagtggccagcctggtgagcgagagcctgcagcagagagtgcacggcatggccctgagcgagctgggcaccttcctgagaagcttcagcgacgccctgatcagattcagcagagaccacttcagaggcaagagcatggccccccactacgtgccctacctgctggccgccctgaaccacaagagcgccctgagcagcagcgtgagcgtgctgcagctggacggcgcccccagcggcgccctggcccccgtggaggccgccctggacgagctgcagagaagaatctacagactggtgctggaggccctgcaggccgagctgcagcccctgttcgccgacctgcccagcagacagtggctgagcagccccgagctgctgcagagcgtgtgcgagagaaccggcagattctgcagagacttctggagagtgagaaaccccaccgtgcagctgctgctggccgaggccgagagagccgtggtgctgcagtacctgagcgccctgatgcagggcagactggtgtgcagaggcgccgacgagagaacccaggccgccgagagactgagacacgacgccgcccagctgcagcagctgttcctgagcctgggcctggaggagaacgcccactgcgcccccgtgctgctggccctgagagagctgctgaacctgagagaccccgccctgctgggcctggaggtggccggcctgagacagcagttccccgacgtgagcgaggaccacgtgagcgccctgctgggcctgagaggcgacctgagcagagagcagcacctggccgccctgagcagcctgcaggccgccctgccccccagccccagagccagcagaagagtgctgttcagcctggtgcccgcccccgccctggcccccgccagctgcctgcccagcggcagctgcgccagagccctgctgctggccgagtag

SEQ ID NO: 81013 - DNA, 2040 bp, synthetic construct
  misc_feature 1..2040: note = Description of Artificial Sequence: Synthetic coding sequence
  source 1..2040: mol_type = other DNA
atggacagcgccgccaaggacgagatgcagcccgccctgagccccggccccgagtggcccgagcaggagagagccgagcagctggccagaggcgccgccctgaagtgggccagcggcatcttctacagacccgagcagctggccagactgggccagtacagaagcagagaggtgcagagaacctgcagcctggagagcagactgaagagcgtgatgcagagctacctggagggcgtgcagaccgtgcccgccgccgtgagccacacccagaccctgatcgacggccagcagttcctggaggcctacgtgagcctgagagagctggagcagctgagagaggacacctgggcccccctgggcggcctggagctgcccgtgttccagggcctggacctgctgttcgaggccctgggccaggccgtggaggccgccgccggcgccgccggcaagctggccagagaggaccccgccctgctggtggccgccgtgagagtggccgaggtggagaccggcagaaccacccccctgggccaggtgcccagagactggagacagagatgcctgagagccctgcaggagggcctggagcaggcccacttcggcagccccctgctgcccgcccccggcgccctgcccggctggctggaggccctgagagtggccctgcccgtggagctggccaccgccgaggccctggtggccccctgctgccccccccagtacaacgtggtgcagctgtgggcccacaccctgcacagcggcctgagaagaagcctgcagaacctgctggccggccccgagctggaggccgccgacgccttcgccctgctgcactgggccctgcacgtgtacctgggccaggagatgatgggcagcctggagctgggccccgaggccgacgtgagccagctggagcccctgctgaccctggagaacatcgagcagctggaggccaccttcgtggccaacatccagatcctggaggagaacatcagagtggccagcctggtgagcgagagcctgcagcagagagtgcacggcatggccctgagcgagctgggcaccttcctgagaagcttcagcgacgccctgatcagattcagcagagaccacttcagaggcaagagcatggccccccactacgtgccctacctgctggccgccctgaaccacaagagcgccctgagcagcagcgtgagcgtgctgcagctggacggcgcccccagcggcgccctggcccccgtggaggccgccctggacgagctgcagagaagaatctacagactggtgctggaggccctgcaggccgagctgcagcccctgttcgccgacctgcccagcagacagtggctgagcagccccgagctgctgcagagcgtgtgcgagagaaccggcagattctgcagagacttctggagagtgagaaaccccaccgtgcagctgctgctggccgaggccgagagagccgtggtgctgcagtacctgagcgccctgatgcagggcagactggtgtgcagaggcgccgacgagagaacccaggccgccgagagactgagacacgacgccgcccagctgcagcagctgttcctgagcctggtgagagccagctgggccggcagaagagccagagtgagcgtggccggctgggagagaggcctggccagagaccccacccccacctgcagcggccccggcggcgagagagccctgagagccggcgccgccagacccgagggcgccgccaagccccccagacccagagccgccggccccggcggcggctggcccgccgccaccatcagcagaagagagagaggccccagactgagacccctgggccccgccagaggcctggtgcccggcgccgcccccggcagagcccagctgcccgccggctgcgccgccgccgtggcccccagagagccccccagacccctgcagcccagcgccagagccagagccagagccggcctgctgcccgccctgggcgtgctgagacccagccccgccgccagaagaatcaaccacggctgcagatag

SEQ ID NO: 81014 - DNA, 2925 bp, synthetic construct
  misc_feature 1..2925: note = Description of Artificial Sequence: Synthetic coding sequence
  source 1..2925: mol_type = other DNA
atggccgccgaggccgccggcggcaagtacagaagcaccgtgagcaagagcaaggaccccagcggcctgctgatcagcgtgatcagaaccctgagcaccagcgacgacgtggaggacagagagaacgagaagggcagactggaggaggcctacgagaagtgcgacagagacctggacgagctgatcgtgcagcactacaccgagctgaccaccgccatcagaacctaccagagcatcaccgagagaatcaccaacagcagaaacaagatcaagcaggtgaaggagaacctgctgagctgcaagatgctgctgcactgcaagagagacgagctgagaaagctgtggatcgagggcatcgagcacaagcacgtgctgaacctgctggacgagatcgagaacatcaagcaggtgccccagaagctggagcagtgcatggccagcaagcactacctgagcgccaccgacatgctggtgagcgccgtggagagcctggagggccccctgctgcaggtggagggcctgagcgacctgagactggagctgcacagcaagaagatgaacctgcacctggtgctgatcgacgagctgcacagacacctgtacatcaagagcaccagcagagtggtgcagagaaacaaggagaagggcaagatcagcagcctggtgaaggacgccagcgtgcccctgatcgacgtgaccaacctgcccacccccagaaagttcctggacaccagccactacagcaccgccggcagcagcagcgtgagagagatcaacctgcaggacatcaaggaggacctggagctggaccccgaggagaacagcaccctgttcatgggcatcctgatcaagggcctggccaagctgaagaagatccccgagaccgtgaaggccatcatcgagagactggagcaggagctgaagcagatcgtgaagagaagcaccacccaggtggccgacagcggctaccagagaggcgagaacgtgaccgtggagaaccagcccagactgctgctggagctgctggagctgctgttcgacaagttcaacgccgtggccgccgcccacagcgtggtgctgggctacctgcaggacaccgtggtgacccccctgacccagcaggaggacatcaagctgtacgacatggccgacgtgtgggtgaagatccaggacgtgctgcagatgctgctgaccgagtacctggacatgaagaacaccagaaccgccagcgagcccagcgcccagctgagctacgccagcaccggcagagagttcgccgccttcttcgccaagaagaagccccagagacccaagaacagcctgttcaagttcgagagcagcagccacgccatcagcatgagcgcctacctgagagagcagagaagagagctgtacagcagaagcggcgagctgcagggcggccccgacgacaacctgatcgagggcggcggcaccaagttcgtgtgcaagcccggcgccagaaacatcaccgtgatcttccaccccctgctgagattcatccaggagatcgagcacgccctgggcctgggccccgccaagcagtgccccctgagagagttcctgaccgtgtacatcaagaacatcttcctgaaccaggtgctggccgagatcaacaaggagatcgagggcgtgaccaagaccagcgaccccctgaagatcctggccaacgccgacaccatgaaggtgctgggcgtgcagagacccctgctgcagagcaccatcatcgtggagaagaccgtgcaggacctgctgaacctgatgcacgacctgagcgcctacagcgaccagttcctgaacatggtgtgcgtgaagctgcaggagtacaaggacacctgcaccgccgcctacagaggcatcgtgcagagcgaggagaagctggtgatcagcgccagctgggccaaggacgacgacatcagcagactgctgaagagcctgcccaactggatgaacatggcccagcccaagcagctgagacccaagagagaggaggaggaggacttcatcagagccgccttcggcaaggagagcgaggtgctgatcggcaacctgggcgacaagctgatccccccccaggacatcctgagagacgtgagcgacctgaaggccctggccaacatgcacgagagcctggagtggctggccagcagaaccaagagcgccttcagcaacctgagcaccagccagatgctgagccccgcccaggacagccacaccaacaccgacctgccccccgtgagcgagcagatcatgcagaccctgagcgagctggccaagagcttccaggacatggccgacagatgcctgctggtgctgcacctggaggtgagagtgcactgcttccactacctgatccccctggccaaggagggcaactacgccatcgtggccaacgtggagagcatggactacgaccccctggtggtgaagctgaacaaggacatcagcgccatcgaggaggccatgagcgccagcctgcagcagcacaagttccagtacatcttcgagggcctgggccacctgatcagctgcatcctgatcaacggcgcccagtacttcagaagaatcagcgagagcggcatcaagaagatgtgcagaaacatcttcgtgctgcagcagaacctgaccaacatcaccatgagcagagaggccgacctggacttcgccagacagtactacgagatgctgtacaacaccgccgacgagctgctgaacctggtggtggaccagggcgtgaagtacaccgagctggagtacatccacgccctgaccctgctgcacagaagccagaccggcgtgggcgagctgaccacccagaacaccagactgcagagactgaaggagatcatctgcgagcaggccgccatcaagcaggccaccaaggacaagaagatcaccaccgtgtag

SEQ ID NO: 81015 - DNA, 1422 bp, synthetic construct
  misc_feature 1..1422: note = Description of Artificial Sequence: Synthetic coding sequence
  source 1..1422: mol_type = other DNA
atggccgccgaggccgccggcggcaagtacagaagcaccgtgagcaagagcaaggaccccagcggcctgctgatcagcgtgatcagaaccctgagcaccagcgacgacgtggaggacagagagaacgagaagggcagactggaggaggcctacgagaagtgcgacagagacctggacgagctgatcgtgcagcactacaccgagctgaccaccgccatcagaacctaccagagcatcaccgagagaatcaccaacagcagaaacaagatcaagcaggtgaaggagaacctgctgagctgcaagatgctgctgcactgcaagagagacgagctgagaaagctgtggatcgagggcatcgagcacaagcacgtgctgaacctgctggacgagatcgagaacatcaagcaggtgccccagaagctggagcagtgcatggccagcaagcactacctgagcgccaccgacatgctggtgagcgccgtggagagcctggagggccccctgctgcaggtggagggcctgagcgacctgagactggagctgcacagcaagaagatgaacctgcacctggtgctgatcgacgagctgcacagacacctgtacatcaagagcaccagcagagtggtgcagagaaacaaggagaagggcaagatcagcagcctggtgaaggacgccagcgtgcccctgatcgacgtgaccaacctgcccacccccagaaagttcctggacaccagccactacagcaccgccggcagcagcagcgtgagagagatcaacctgcaggacatcaaggaggacctggagctggaccccgaggagaacagcaccctgttcatgggcatcctgatcaagggcctggccaagctgaagaagatccccgagaccgtgaaggccatcatcgagagactggagcaggagctgaagcagatcgtgaagagaagcaccacccaggtggccgacagcggctaccagagaggcgagaacgtgaccgtggagaaccagcccagactgctgctggagctgctggagctgctgttcgacaagttcaacgccgtggccgccgcccacagcgtggtgctgggctacctgcaggacaccgtggtgacccccctgacccagcaggaggacatcaagctgtacgacatggccgacgtgtgggtgaagatccaggacgtgctgcagatgctgctgaccgagtacctggacatgaagaacaccagaaccgccagcgagcccagcgcccagctgagctacgccagcaccggcagagagttcgccgccttcttcgccaagaagaagccccagagacccaagaacagcctgttcaagttcgagagcagcagccacgccatcagcatgagcgcctacctgagagagcagagaagagagctgtacagcagaagcggcgagctgcagggctag

SEQ ID NO: 81016 - DNA, 2622 bp, synthetic construct
  misc_feature 1..2622: note = Description of Artificial Sequence: Synthetic coding sequence
  source 1..2622: mol_type = other DNA
atgctgctgcactgcaagagagacgagctgagaaagctgtggatcgagggcatcgagcacaagcacgtgctgaacctgctggacgagatcgagaacatcaagcaggtgccccagaagctggagcagtgcatggccagcaagcactacctgagcgccaccgacatgctggtgagcgccgtggagagcctggagggccccctgctgcaggtggagggcctgagcgacctgagactggagctgcacagcaagaagatgaacctgcacctggtgctgatcgacgagctgcacagacacctgtacatcaagagcaccagcagagtggtgcagagaaacaaggagaagggcaagatcagcagcctggtgaaggacgccagcgtgcccctgatcgacgtgaccaacctgcccacccccagaaagttcctggacaccagccactacagcaccgccggcagcagcagcgtgagagagatcaacctgcaggacatcaaggaggacctggagctggaccccgaggagaacagcaccctgttcatgggcatcctgatcaagggcctggccaagctgaagaagatccccgagaccgtgaaggccatcatcgagagactggagcaggagctgaagcagatcgtgaagagaagcaccacccaggtggccgacagcggctaccagagaggcgagaacgtgaccgtggagaaccagcccagactgctgctggagctgctggagctgctgttcgacaagttcaacgccgtggccgccgcccacagcgtggtgctgggctacctgcaggacaccgtggtgacccccctgacccagcaggaggacatcaagctgtacgacatggccgacgtgtgggtgaagatccaggacgtgctgcagatgctgctgaccgagtacctggacatgaagaacaccagaaccgccagcgagcccagcgcccagctgagctacgccagcaccggcagagagttcgccgccttcttcgccaagaagaagccccagagacccaagaacagcctgttcaagttcgagagcagcagccacgccatcagcatgagcgcctacctgagagagcagagaagagagctgtacagcagaagcggcgagctgcagggcggccccgacgacaacctgatcgagggcggcggcaccaagttcgtgtgcaagcccggcgccagaaacatcaccgtgatcttccaccccctgctgagattcatccaggagatcgagcacgccctgggcctgggccccgccaagcagtgccccctgagagagttcctgaccgtgtacatcaagaacatcttcctgaaccaggtgctggccgagatcaacaaggagatcgagggcgtgaccaagaccagcgaccccctgaagatcctggccaacgccgacaccatgaaggtgctgggcgtgcagagacccctgctgcagagcaccatcatcgtggagaagaccgtgcaggacctgctgaacctgatgcacgacctgagcgcctacagcgaccagttcctgaacatggtgtgcgtgaagctgcaggagtacaaggacacctgcaccgccgcctacagaggcatcgtgcagagcgaggagaagctggtgatcagcgccagctgggccaaggacgacgacatcagcagactgctgaagagcctgcccaactggatgaacatggcccagcccaagcagctgagacccaagagagaggaggaggaggacttcatcagagccgccttcggcaaggagagcgaggtgctgatcggcaacctgggcgacaagctgatccccccccaggacatcctgagagacgtgagcgacctgaaggccctggccaacatgcacgagagcctggagtggctggccagcagaaccaagagcgccttcagcaacctgagcaccagccagatgctgagccccgcccaggacagccacaccaacaccgacctgccccccgtgagcgagcagatcatgcagaccctgagcgagctggccaagagcttccaggacatggccgacagatgcctgctggtgctgcacctggaggtgagagtgcactgcttccactacctgatccccctggccaaggagggcaactacgccatcgtggccaacgtggagagcatggactacgaccccctggtggtgaagctgaacaaggacatcagcgccatcgaggaggccatgagcgccagcctgcagcagcacaagttccagtacatcttcgagggcctgggccacctgatcagctgcatcctgatcaacggcgcccagtacttcagaagaatcagcgagagcggcatcaagaagatgtgcagaaacatcttcgtgctgcagcagaacctgaccaacatcaccatgagcagagaggccgacctggacttcgccagacagtactacgagatgctgtacaacaccgccgacgagctgctgaacctggtggtggaccagggcgtgaagtacaccgagctggagtacatccacgccctgaccctgctgcacagaagccagaccggcgtgggcgagctgaccacccagaacaccagactgcagagactgaaggagatcatctgcgagcaggccgccatcaagcaggccaccaaggacaagaagatcaccaccgtgtag

SEQ ID NO: 81017 - DNA, 789 bp, synthetic construct
  misc_feature 1..789: note = Description of Artificial Sequence: Synthetic coding sequence
  source 1..789: mol_type = other DNA
atgcacgagagcctggagtggctggccagcagaaccaagagcgccttcagcaacctgagcaccagccagatgctgagccccgcccaggacagccacaccaacaccgacctgccccccgtgagcgagcagatcatgcagaccctgagcgagctggccaagagcttccaggacatggccgacagatgcctgctggtgctgcacctggaggtgagagtgcactgcttccactacctgatccccctggccaaggagggcaactacgccatcgtggccaacgtggagagcatggactacgaccccctggtggtgaagctgaacaaggacatcagcgccatcgaggaggccatgagcgccagcctgcagcagcacaagttccagtacatcttcgagggcctgggccacctgatcagctgcatcctgatcaacggcgcccagtacttcagaagaatcagcgagagcggcatcaagaagatgtgcagaaacatcttcgtgctgcagcagaacctgaccaacatcaccatgagcagagaggccgacctggacttcgccagacagtactacgagatgctgtacaacaccgccgacgagctgctgaacctggtggtggaccagggcgtgaagtacaccgagctggagtacatccacgccctgaccctgctgcacagaagccagaccggcgtgggcgagctgaccacccagaacaccagactgcagagactgaaggagatcatctgcgagcaggccgccatcaagcaggccaccaaggacaagaagatcaccaccgtgtag

SEQ ID NO: 81018 - DNA, 1755 bp, synthetic construct
  misc_feature 1..1755: note = Description of Artificial Sequence: Synthetic coding sequence
  source 1..1755: mol_type = other DNA
atggccaacctggtgaccgccagcaagaccaagatgagcaagggcgaggaccccaacaaccccagaagcatcaagagaatcagccagggcggcagagacaaccacctggccatcgccaagtgcgacctgacccagctgaagaagaagcagagcgaggtgagcaacggcagcagagagaccatcagcatgaagacctgctgccagcacggcgacagaggctactggagcaccggctactactggagaggcggccccgacgacaacctgatcgagggcggcggcaccaagttcgtgtgcaagcccggcgccagaaacatcaccgtgatcttccaccccctgctgagattcatccaggagatcgagcacgccctgggcctgggccccgccaagcagtgccccctgagagagttcctgaccgtgtacatcaagaacatcttcctgaaccaggtgctggccgagatcaacaaggagatcgagggcgtgaccaagaccagcgaccccctgaagatcctggccaacgccgacaccatgaaggtgctgggcgtgcagagacccctgctgcagagcaccatcatcgtggagaagaccgtgcaggacctgctgaacctgatgcacgacctgagcgcctacagcgaccagttcctgaacatggtgtgcgtgaagctgcaggagtacaaggacacctgcaccgccgcctacagaggcatcgtgcagagcgaggagaagctggtgatcagcgccagctgggccaaggacgacgacatcagcagactgctgaagagcctgcccaactggatgaacatggcccagcccaagcagctgagacccaagagagaggaggaggaggacttcatcagagccgccttcggcaaggagagcgaggtgctgatcggcaacctgggcgacaagctgatccccccccaggacatcctgagagacgtgagcgacctgaaggccctggccaacatgcacgagagcctggagtggctggccagcagaaccaagagcgccttcagcaacctgagcaccagccagatgctgagccccgcccaggacagccacaccaacaccgacctgccccccgtgagcgagcagatcatgcagaccctgagcgagctggccaagagcttccaggacatggccgacagatgcctgctggtgctgcacctggaggtgagagtgcactgcttccactacctgatccccctggccaaggagggcaactacgccatcgtggccaacgtggagagcatggactacgaccccctggtggtgaagctgaacaaggacatcagcgccatcgaggaggccatgagcgccagcctgcagcagcacaagttccagtacatcttcgagggcctgggccacctgatcagctgcatcctgatcaacggcgcccagtacttcagaagaatcagcgagagcggcatcaagaagatgtgcagaaacatcttcgtgctgcagcagaacctgaccaacatcaccatgagcagagaggccgacctggacttcgccagacagtactacgagatgctgtacaacaccgccgacgagctgctgaacctggtggtggaccagggcgtgaagtacaccgagctggagtacatccacgccctgaccctgctgcacagaagccagaccggcgtgggcgagctgaccacccagaacaccagactgcagagactgaaggagatcatctgcgagcaggccgccatcaagcaggccaccaaggacaagaagatcaccaccgtgtag

SEQ ID NO: 81019 - DNA, 1782 bp, synthetic construct
  misc_feature 1..1782: note = Description of Artificial Sequence: Synthetic coding sequence
  source 1..1782: mol_type = other DNA
atggccgacgtgtgggtgaagatccaggacgtgctgcagatgctgctgaccgagtacctggacatgaagaacaccagaaccgccagcgagcccagcgcccagctgagctacgccagcaccggcagagagttcgccgccttcttcgccaagaagaagccccagagacccaagaacagcctgttcaagttcgagagcagcagccacgccatcagcatgagcgcctacctgagagagcagagaagagagctgtacagcagaagcggcgagctgcagggcggccccgacgacaacctgatcgagggcggcggcaccaagttcgtgtgcaagcccggcgccagaaacatcaccgtgatcttccaccccctgctgagattcatccaggagatcgagcacgccctgggcctgggccccgccaagcagtgccccctgagagagttcctgaccgtgtacatcaagaacatcttcctgaaccaggtgctggccgagatcaacaaggagatcgagggcgtgaccaagaccagcgaccccctgaagatcctggccaacgccgacaccatgaaggtgctgggcgtgcagagacccctgctgcagagcaccatcatcgtggagaagaccgtgcaggacctgctgaacctgatgcacgacctgagcgcctacagcgaccagttcctgaacatggtgtgcgtgaagctgcaggagtacaaggacacctgcaccgccgcctacagaggcatcgtgcagagcgaggagaagctggtgatcagcgccagctgggccaaggacgacgacatcagcagactgctgaagagcctgcccaactggatgaacatggcccagcccaagcagctgagacccaagagagaggaggaggaggacttcatcagagccgccttcggcaaggagagcgaggtgctgatcggcaacctgggcgacaagctgatccccccccaggacatcctgagagacgtgagcgacctgaaggccctggccaacatgcacgagagcctggagtggctggccagcagaaccaagagcgccttcagcaacctgagcaccagccagatgctgagccccgcccaggacagccacaccaacaccgacctgccccccgtgagcgagcagatcatgcagaccctgagcgagctggccaagagcttccaggacatggccgacagatgcctgctggtgctgcacctggaggtgagagtgcactgcttccactacctgatccccctggccaaggagggcaactacgccatcgtggccaacgtggagagcatggactacgaccccctggtggtgaagctgaacaaggacatcagcgccatcgaggaggccatgagcgccagcctgcagcagcacaagttccagtacatcttcgagggcctgggccacctgatcagctgcatcctgatcaacggcgcccagtacttcagaagaatcagcgagagcggcatcaagaagatgtgcagaaacatcttcgtgctgcagcagaacctgaccaacatcaccatgagcagagaggccgacctggacttcgccagacagtactacgagatgctgtacaacaccgccgacgagctgctgaacctggtggtggaccagggcgtgaagtacaccgagctggagtacatccacgccctgaccctgctgcacagaagccagaccggcgtgggcgagctgaccacccagaacaccagactgcagagactgaaggagatcatctgcgagcaggccgccatcaagcaggccaccaaggacaagaagatcaccaccgtgtag

SEQ ID NO: 81020 - DNA, 1932 bp, synthetic construct
  misc_feature 1..1932: note = Description of Artificial Sequence: Synthetic coding sequence
  source 1..1932: mol_type = other DNA
atggccaccaccgccgagctgttcgaggagcccttcgtggccgacgagtacatcgagagactggtgtggagaacccccggcggcggcagcagaggcggccccgaggccttcgaccccaagagactgctggaggagttcgtgaaccacatccaggagctgcagatcatggacgagagaatccagagaaaggtggagaagctggagcagcagtgccagaaggaggccaaggagttcgccaagaaggtgcaggagctgcagaagagcaaccagatcaaggaggccgccgacatcatccagaagctgcacctgatcgcccaggagctgcccttcgacagattcagcgaggtgaagagcaagatcgccagcaagtaccacgacctggagtgccagctgatccaggagttcaccagcgcccagagaagaggcgagatcagcagaatgagagaggtggccgccgtgctgctgcacttcaagggctacagccactgcgtggacgtgtacatcaagcagtgccaggagggcgcctacctgagaaacgacatcttcgaggacgccggcatcctgtgccagagagtgaacaagcaggtgggcgacatcttcagcaaccccgagaccgtgctggccaagctgatccagaacgtgttcgagatcaagctgcagagcttcgtgaaggagcagctggaggagtgcagaaagagcgacgccgagcagtacctgaagaacctgtacgacctgtacaccagaaccaccaacctgagcagcaagctgatggagttcaacctgggcaccgacaagcagaccttcctgagcaagctgatcaagagcatcttcatcagctacctggagaactacatcgaggtggagaccggctacctgaagagcagaagcgccatgatcctgcagagatactacgacagcaagaaccaccagaagagaagcatcggcaccggcggcatccaggacctgaaggagagaatcagacagagaaccaacctgcccctgggccccagcatcgacacccacggcgagaccttcctgagccaggaggtggtggtgaacctgctgcaggagaccaagcaggccttcgagagatgccacagactgagcgaccccagcgacctgcccagaaacgccttcagaatcttcaccatcctggtggagttcctgtgcatcgagcacatcgactacgccctggagaccggcctggccggcatccccagcagcgacagcagaaacgccaacctgtacttcctggacgtggtgcagcaggccaacaccatcttccacctgttcgacaagcagttcaacgaccacctgatgcccctgatcagcagcagccccaagctgagcgagtgcctgcagaagaagaaggagatcatcgagcagatggagatgaagctggacaccggcatcgacagaaccctgaactgcatgatcggccagatgaagcacatcctggccgccgagcagaagaagaccgacttcaagcccgaggacgagaacaacgtgctgatccagtacaccaacgcctgcgtgaaggtgtgcgcctacgtgagaaagcaggtggagaagatcaagaacagcatggacggcaagaacgtggacaccgtgctgatggagctgggcgtgagattccacagactgatctacgagcacctgcagcagtacagctacagctgcatgggcggcatgctggccatctgcgacgtggccgagtacagaaagtgcgccaaggacttcaagatccccatggtgctgcacctgttcgacaccctgcacgccctgtgcaacctgctggtggtggcccccgacaacctgaagcaggtgtgcagcggcgagcagctggccaacctggacaagaacatcctgcacagcttcgtgcagctgagagccgactacagaagcgccagactggccagacacttcagctag

SEQ ID NO: 81021 - DNA, 2127 bp, synthetic construct
  misc_feature 1..2127: note = Description of Artificial Sequence: Synthetic coding sequence
  source 1..2127: mol_type = other DNA
atggccaccaccgccgagctgttcgaggagcccttcgtggccgacgagtacatcgagagactggtgtggagaacccccggcggcggcagcagaggcggccccgaggccttcgaccccaagagactgctggaggagttcgtgaaccacatccaggagctgcagatcatggacgagagaatccagagaaaggtggagaagctggagcagcagtgccagaaggaggccaaggagttcgccaagaaggtgcaggagctgcagaagagcaaccaggtggccttccagcacttccaggagctggacgagcacatcagctacgtggccaccaaggtgtgccacctgggcgaccagctggagggcgtgaacacccccagacagagagccgtggaggcccagaagctgatgaagtacttcaacgagttcctggacggcgagctgaagagcgacgtgttcaccaacagcgagaagatcaaggaggccgccgacatcatccagaagctgcacctgatcgcccaggagctgcccttcgacagattcagcgaggtgaagagcaagatcgccagcaagtaccacgacctggagtgccagctgatccaggagttcaccagcgcccagagaagaggcgagatcagcagaatgagagaggtggccgccgtgctgctgcacttcaagggctacagccactgcgtggacgtgtacatcaagcagtgccaggagggcgcctacctgagaaacgacatcttcgaggacgccggcatcctgtgccagagagtgaacaagcaggtgggcgacatcttcagcaaccccgagaccgtgctggccaagctgatccagaacgtgttcgagatcaagctgcagagcttcgtgaaggagcagctggaggagtgcagaaagagcgacgccgagcagtacctgaagaacctgtacgacctgtacaccagaaccaccaacctgagcagcaagctgatggagttcaacctgggcaccgacaagcagaccttcctgagcaagctgatcaagagcatcttcatcagctacctggagaactacatcgaggtggagaccggctacctgaagagcagaagcgccatgatcctgcagagatactacgacagcaagaaccaccagaagagaagcatcggcaccggcggcatccaggacctgaaggagagaatcagacagagaaccaacctgcccctgggccccagcatcgacacccacggcgagaccttcctgagccaggaggtggtggtgaacctgctgcaggagaccaagcaggccttcgagagatgccacagactgagcgaccccagcgacctgcccagaaacgccttcagaatcttcaccatcctggtggagttcctgtgcatcgagcacatcgactacgccctggagaccggcctggccggcatccccagcagcgacagcagaaacgccaacctgtacttcctggacgtggtgcagcaggccaacaccatcttccacctgttcgacaagcagttcaacgaccacctgatgcccctgatcagcagcagccccaagctgagcgagtgcctgcagaagaagaaggagatcatcgagcagatggagatgaagctggacaccggcatcgacagaaccctgaactgcatgatcggccagatgaagcacatcctggccgccgagcagaagaagaccgacttcaagcccgaggacgagaacaacgtgctgatccagtacaccaacgcctgcgtgaaggtgtgcgcctacgtgagaaagcaggtggagaagatcaagaacagcatggacggcaagaacgtggacaccgtgctgatggagctgggcgtgagattccacagactgatctacgagcacctgcagcagtacagctacagctgcatgggcggcatgctggccatctgcgacgtggccgagtacagaaagtgcgccaaggacttcaagatccccatggtgctgcacctgttcgacaccctgcacgccctgtgcaacctgctggtggtggcccccgacaacctgaagcaggtgtgcagcggcgagcagctggccaacctggacaagaacatcctgcacagcttcgtgcagctgagagccgactacagaagcgccagactggccagacacttcagctag

SEQ ID NO: 81022 - DNA, 2415 bp, synthetic construct
  misc_feature 1..2415: note = Description of Artificial Sequence: Synthetic coding sequence
  source 1..2415: mol_type = other DNA
atggccgagaacagcgagagcctgggcaccgtgcccgagcacgagagaatcctgcaggagatcgagagcaccgacaccgcctgcgtgggccccaccctgagaagcgtgtacgacgaccagcccaacgcccacaagaagttcatggagaagctggacgcctgcatcagaaaccacgacaaggagatcgagaagatgtgcaacttccaccaccagggcttcgtggacgccatcaccgagctgctgaaggtgagaaccgacgccgagaagctgaaggtgcaggtgaccgacaccaacagaagattccaggacgccggcaaggaggtgatcgtgcacaccgaggacatcatcagatgcagaatccagcagagaaacatcaccaccgtggtggagaagctgcagctgtgcctgcccgtgctggagatgtacagcaagctgaaggagcagatgagcgccaagagatactacagcgccctgaagaccatggagcagctggagaacgtgtacttcccctgggtgagccagtacagattctgccagctgatgatcgagaacctgcccaagctgagagaggacatcaaggagatcagcatgagcgacctgaaggacttcctggagagcatcagaaagcacagcgacaagatcggcgagaccgccatgaagcaggcccagcaccagaagaccttcagcgtgagcctgcagaagcagaacaagatgaagttcggcaagaacatgtacatcaacagagacagaatccccgaggagagaaacgagaccgtgctgaagcacagcctggaggaggaggacgagaacgaggaggagatcctgaccgtgcaggacctggtggacttcagccccgtgtacagatgcctgcacatctacagcgtgctgggcgacgaggagaccttcgagaactactacagaaagcagagaaagaagcaggccagactggtgctgcagccccagagcaacatgcacgagaccgtggacggctacagaagatacttcacccagatcgtgggcttcttcgtggtggaggaccacatcctgcacgtgacccagggcctggtgaccagagcctacaccgacgagctgtggaacatggccctgagcaagatcatcgccgtgctgagagcccacagcagctactgcaccgaccccgacctggtgctggagctgaagaacctgaccgtgatcttcgccgacaccctgcagggctacggcttccccgtgaacagactgttcgacctgctgttcgagatcagagaccagtacaacgagaccctgctgaagaagtgggccggcgtgttcagagacatcttcgaggaggacaactacagccccatccccgtggtgaacgaggaggagtacaagatcgtgatcagcaagttccccttccaggaccccgacctggagaagcagagcttccccaagaagttccccatgagccagagcgtgccccacatctacatccaggtgaaggagttcatctacgccagcctgaagttcagcgagagcctgcacagaagcagcaccgagatcgacgacatgctgagaaagagcaccaacctgctgctgaccagaaccctgagcagctgcctgctgaacctgatcagaaagccccacatcggcctgaccgagctggtgcagatcatcatcaacaccacccacctggagcaggcctgcaagtacctggaggacttcatcaccaacatcaccaacatcagccaggagaccgtgcacaccaccagactgtacggcctgagcaccttcaaggacgccagacacgccgccgagggcgagatctacaccaagctgaaccagaagatcgacgagttcgtgcagctggccgactacgactggaccatgagcgagcccgacggcagagccagcggctacctgatggacctgatcaacttcctgagaagcatcttccaggtgttcacccacctgcccggcaaggtggcccagaccgcctgcatgagcgcctgccagcacctgagcaccagcctgatgcagatgctgctggacagcgagctgaagcagatcagcatgggcgccgtgcagcagttcaacctggacgtgatccagtgcgagctgttcgccagcagcgagcccgtgcccggcttccagggcgacaccctgcagctggccttcatcgacctgagacagctgctggacctgttcatggtgtgggactggagcacctacctggccgactacggccagcccgccagcaagtacctgagagtgaaccccaacaccgccctgaccctgctggagaagatgaaggacaccagcaagaagaacaacatcttcgcccagttcagaaagaacgacagagacaagcagaagctgatcgagaccgtggtgaagcagctgagaagcctggtgaacggcatgagccagcacatgtag

SEQ ID NO: 81023 - DNA, 462 bp, synthetic construct
  misc_feature 1..462: note = Description of Artificial Sequence: Synthetic coding sequence
  source 1..462: mol_type = other DNA
atggccgagaacagcgagagcctgggcaccgtgcccgagcacgagagaatcctgcaggagatcgagagcaccgacaccgcctgcgtgggccccaccctgagaagcgtgtacgacgaccagcccaacgcccacaagaagttcatggagaagctggacgcctgcatcagaaaccacgacaaggagatcgagaagatgtgcaacttccaccaccagggcttcgtggacgccatcaccgagctgctgaaggtgagaaccgacgccgagaagctgaaggtgcaggtgaccgacaccaacagaagattccaggacgccggcaaggaggtgatcgtgcacaccgaggacatcatcagatgcagaatccagcagagaaacatcaccaccgtggtggagaagctgcagctgtgcctgcccgtgctggagatgtacagcaagctgaaggagcagatgagcgccaagagatag

SEQ ID NO: 81024 - DNA, 2463 bp, synthetic construct
  misc_feature 1..2463: note = Description of Artificial Sequence: Synthetic coding sequence
  source 1..2463: mol_type = other DNA
atgtgctgcgtgggcggcgccggcagctgcagcgacaccggcaagctgggcgcctgcagagccatgctggaggaggagaccgaccagacctacgagaacgtgctggccgagatccagagcttcgagctgcccgtggaggccaccctgagaagcgtgtacgacgaccagcccaacgcccacaagaagttcatggagaagctggacgcctgcatcagaaaccacgacaaggagatcgagaagatgtgcaacttccaccaccagggcttcgtggacgccatcaccgagctgctgaaggtgagaaccgacgccgagaagctgaaggtgcaggtgaccgacaccaacagaagattccaggacgccggcaaggaggtgatcgtgcacaccgaggacatcatcagatgcagaatccagcagagaaacatcaccaccgtggtggagaagctgcagctgtgcctgcccgtgctggagatgtacagcaagctgaaggagcagatgagcgccaagagatactacagcgccctgaagaccatggagcagctggagaacgtgtacttcccctgggtgagccagtacagattctgccagctgatgatcgagaacctgcccaagctgagagaggacatcaaggagatcagcatgagcgacctgaaggacttcctggagagcatcagaaagcacagcgacaagatcggcgagaccgccatgaagcaggcccagcaccagaagaccttcagcgtgagcctgcagaagcagaacaagatgaagttcggcaagaacatgtacatcaacagagacagaatccccgaggagagaaacgagaccgtgctgaagcacagcctggaggaggaggacgagaacgaggaggagatcctgaccgtgcaggacctggtggacttcagccccgtgtacagatgcctgcacatctacagcgtgctgggcgacgaggagaccttcgagaactactacagaaagcagagaaagaagcaggccagactggtgctgcagccccagagcaacatgcacgagaccgtggacggctacagaagatacttcacccagatcgtgggcttcttcgtggtggaggaccacatcctgcacgtgacccagggcctggtgaccagagcctacaccgacgagctgtggaacatggccctgagcaagatcatcgccgtgctgagagcccacagcagctactgcaccgaccccgacctggtgctggagctgaagaacctgaccgtgatcttcgccgacaccctgcagggctacggcttccccgtgaacagactgttcgacctgctgttcgagatcagagaccagtacaacgagaccctgctgaagaagtgggccggcgtgttcagagacatcttcgaggaggacaactacagccccatccccgtggtgaacgaggaggagtacaagatcgtgatcagcaagttccccttccaggaccccgacctggagaagcagagcttccccaagaagttccccatgagccagagcgtgccccacatctacatccaggtgaaggagttcatctacgccagcctgaagttcagcgagagcctgcacagaagcagcaccgagatcgacgacatgctgagaaagagcaccaacctgctgctgaccagaaccctgagcagctgcctgctgaacctgatcagaaagccccacatcggcctgaccgagctggtgcagatcatcatcaacaccacccacctggagcaggcctgcaagtacctggaggacttcatcaccaacatcaccaacatcagccaggagaccgtgcacaccaccagactgtacggcctgagcaccttcaaggacgccagacacgccgccgagggcgagatctacaccaagctgaaccagaagatcgacgagttcgtgcagctggccgactacgactggaccatgagcgagcccgacggcagagccagcggctacctgatggacctgatcaacttcctgagaagcatcttccaggtgttcacccacctgcccggcaaggtggcccagaccgcctgcatgagcgcctgccagcacctgagcaccagcctgatgcagatgctgctggacagcgagctgaagcagatcagcatgggcgccgtgcagcagttcaacctggacgtgatccagtgcgagctgttcgccagcagcgagcccgtgcccggcttccagggcgacaccctgcagctggccttcatcgacctgagacagctgctggacctgttcatggtgtgggactggagcacctacctggccgactacggccagcccgccagcaagtacctgagagtgaaccccaacaccgccctgaccctgctggagaagatgaaggacaccagcaagaagaacaacatcttcgcccagttcagaaagaacgacagagacaagcagaagctgatcgagaccgtggtgaagcagctgagaagcctggtgaacggcatgagccagcacatgtag

SEQ ID NO: 81025 - DNA, 2400 bp, synthetic construct
  misc_feature 1..2400: note = Description of Artificial Sequence: Synthetic coding sequence
  source 1..2400: mol_type = other DNA
atgctggaggaggagaccgaccagacctacgagaacgtgctggccgagatccagagcttcgagctgcccgtggaggccaccctgagaagcgtgtacgacgaccagcccaacgcccacaagaagttcatggagaagctggacgcctgcatcagaaaccacgacaaggagatcgagaagatgtgcaacttccaccaccagggcttcgtggacgccatcaccgagctgctgaaggtgagaaccgacgccgagaagctgaaggtgcaggtgaccgacaccaacagaagattccaggacgccggcaaggaggtgatcgtgcacaccgaggacatcatcagatgcagaatccagcagagaaacatcaccaccgtggtggagaagctgcagctgtgcctgcccgtgctggagatgtacagcaagctgaaggagcagatgagcgccaagagatactacagcgccctgaagaccatggagcagctggagaacgtgtacttcccctgggtgagccagtacagattctgccagctgatgatcgagaacctgcccaagctgagagaggacatcaaggagatcagcatgagcgacctgaaggacttcctggagagcatcagaaagcacagcgacaagatcggcgagaccgccatgaagcaggcccagcaccagaagaccttcagcgtgagcctgcagaagcagaacaagatgaagttcggcaagaacatgtacatcaacagagacagaatccccgaggagagaaacgagaccgtgctgaagcacagcctggaggaggaggacgagaacgaggaggagatcctgaccgtgcaggacctggtggacttcagccccgtgtacagatgcctgcacatctacagcgtgctgggcgacgaggagaccttcgagaactactacagaaagcagagaaagaagcaggccagactggtgctgcagccccagagcaacatgcacgagaccgtggacggctacagaagatacttcacccagatcgtgggcttcttcgtggtggaggaccacatcctgcacgtgacccagggcctggtgaccagagcctacaccgacgagctgtggaacatggccctgagcaagatcatcgccgtgctgagagcccacagcagctactgcaccgaccccgacctggtgctggagctgaagaacctgaccgtgatcttcgccgacaccctgcagggctacggcttccccgtgaacagactgttcgacctgctgttcgagatcagagaccagtacaacgagaccctgctgaagaagtgggccggcgtgttcagagacatcttcgaggaggacaactacagccccatccccgtggtgaacgaggaggagtacaagatcgtgatcagcaagttccccttccaggaccccgacctggagaagcagagcttccccaagaagttccccatgagccagagcgtgccccacatctacatccaggtgaaggagttcatctacgccagcctgaagttcagcgagagcctgcacagaagcagcaccgagatcgacgacatgctgagaaagagcaccaacctgctgctgaccagaaccctgagcagctgcctgctgaacctgatcagaaagccccacatcggcctgaccgagctggtgcagatcatcatcaacaccacccacctggagcaggcctgcaagtacctggaggacttcatcaccaacatcaccaacatcagccaggagaccgtgcacaccaccagactgtacggcctgagcaccttcaaggacgccagacacgccgccgagggcgagatctacaccaagctgaaccagaagatcgacgagttcgtgcagctggccgactacgactggaccatgagcgagcccgacggcagagccagcggctacctgatggacctgatcaacttcctgagaagcatcttccaggtgttcacccacctgcccggcaaggtggcccagaccgcctgcatgagcgcctgccagcacctgagcaccagcctgatgcagatgctgctggacagcgagctgaagcagatcagcatgggcgccgtgcagcagttcaacctggacgtgatccagtgcgagctgttcgccagcagcgagcccgtgcccggcttccagggcgacaccctgcagctggccttcatcgacctgagacagctgctggacctgttcatggtgtgggactggagcacctacctggccgactacggccagcccgccagcaagtacctgagagtgaaccccaacaccgccctgaccctgctggagaagatgaaggacaccagcaagaagaacaacatcttcgcccagttcagaaagaacgacagagacaagcagaagctgatcgagaccgtggtgaagcagctgagaagcctggtgaacggcatgagccagcacatgtag

SEQ ID NO: 81026 - DNA, 2106 bp, synthetic construct
  misc_feature 1..2106: note = Description of Artificial Sequence: Synthetic coding sequence
  source 1..2106: mol_type = other DNA
atggccgagaacagcgagagcctgggcaccgtgcccgagcacgagagaatcctgcaggagatcgagagcaccgacaccgcctgcgtgggccccaccctgagaagcgtgtacgacgaccagcccaacgcccacaagaagttcatggagaagctggacgcctgcatcagaaaccacgacaaggagatcgagaagatgtgcaacttccaccaccagggcttcgtggacgccatcaccgagctgctgaaggtgagaaccgacgccgagaagctgaaggtgcaggtgaccgacaccaacagaagattccaggacgccggcaaggaggtgatcgtgcacaccgaggacatcatcagatgcagaatccagcagagaaacatcaccaccgtggtggagaagctgcagctgtgcctgcccgtgctggagatgtacagcaagctgaaggagcagatgagcgccaagagatactacagcgccctgaagaccatggagcagctggagaacgtgtacttcccctgggtgagccagtacagattctgccagctgatgatcgagaacctgcccaagctgagagaggacatcaaggagatcagcatgagcgacctgaaggacttcctggagagcatcagaaagcacagcgacaagatcggcgagaccgccatgaagcaggcccagcaccagaagaccttcagcgtgagcctgcagaagcagaacaagatgaagttcggcaagaacatgtacatcaacagagacagaatccccgaggagagaaacgagaccgtgctgaagcacagcctggaggaggaggacgagaacgaggaggagggcgacgaggagaccttcgagaactactacagaaagcagagaaagaagcaggccagactggtgctgcagccccagagcaacatgggctacggcttccccgtgaacagactgttcgacctgctgttcgagatcagagaccagtacaacgagaccctgctgaagaagtgggccggcgtgttcagagacatcttcgaggaggacaactacagccccatccccgtggtgaacgaggaggagtacaagatcgtgatcagcaagttccccttccaggaccccgacctggagaagcagagcttccccaagaagttccccatgagccagagcgtgccccacatctacatccaggtgaaggagttcatctacgccagcctgaagttcagcgagagcctgcacagaagcagcaccgagatcgacgacatgctgagaaagagcaccaacctgctgctgaccagaaccctgagcagctgcctgctgaacctgatcagaaagccccacatcggcctgaccgagctggtgcagatcatcatcaacaccacccacctggagcaggcctgcaagtacctggaggacttcatcaccaacatcaccaacatcagccaggagaccgtgcacaccaccagactgtacggcctgagcaccttcaaggacgccagacacgccgccgagggcgagatctacaccaagctgaaccagaagatcgacgagttcgtgcagctggccgactacgactggaccatgagcgagcccgacggcagagccagcggctacctgatggacctgatcaacttcctgagaagcatcttccaggtgttcacccacctgcccggcaaggtggcccagaccgcctgcatgagcgcctgccagcacctgagcaccagcctgatgcagatgctgctggacagcgagctgaagcagatcagcatgggcgccgtgcagcagttcaacctggacgtgatccagtgcgagctgttcgccagcagcgagcccgtgcccggcttccagggcgacaccctgcagctggccttcatcgacctgagacagctgctggacctgttcatggtgtgggactggagcacctacctggccgactacggccagcccgccagcaagtacctgagagtgaaccccaacaccgccctgaccctgctggagaagatgaaggacaccagcaagaagaacaacatcttcgcccagttcagaaagaacgacagagacaagcagaagctgatcgagaccgtggtgaagcagctgagaagcctggtgaacggcatgagccagcacatgtag

SEQ ID NO: 81027 - DNA, 219 bp, synthetic construct
  misc_feature 1..219: note = Description of Artificial Sequence: Synthetic coding sequence
  source 1..219: mol_type = other DNA
ggcaaggtggcccagaccgcctgcatgagcgcctgccagcacctgagcaccagcctgatgcagatgctgctggacagcgagctgaagcagatcagcatgggcgccgtgcagcagttcaacctggacgtgatccagtgcgagctgttcgccagcagcgagcccgtgcccggcttccagggcgacaccctgcagctggccttcatcgacctgagacagtag

SEQ ID NO: 81028 - DNA, 2436 bp, synthetic construct
  misc_feature 1..2436: note = Description of Artificial Sequence: Synthetic coding sequence
  source 1..2436: mol_type = other DNA
atggagagaggcaagatggccgaggccgagagcctggagaccgccgccgagcacgagagaatcctgagagagatcgagagcaccgacaccgcctgcatcggccccaccctgagaagcgtgtacgacggcgaggagcacggcagattcatggagaagctggagaccagaatcagaaaccacgacagagagatcgagaagatgtgcaacttccactaccagggcttcgtggacagcatcaccgagctgctgaaggtgagaggcgaggcccagaagctgaagaaccaggtgaccgacaccaacagaaagctgcagcacgagggcaaggagctggtgatcgccatggaggagctgaagcagtgcagactgcagcagagaaacatcagcgccaccgtggacaagctgatgctgtgcctgcccgtgctggagatgtacagcaagctgagagaccagatgaagaccaagagacactaccccgccctgaagaccctggagcacctggagcacacctacctgccccaggtgagccactacagattctgcaaggtgatggtggacaacatccccaagctgagagaggagatcaaggacgtgagcatgagcgacctgaaggacttcctggagagcatcagaaagcacagcgacaagatcggcgagaccgccatgaagcaggcccagcagcagagaaacctggacaacatcgtgctgcagcagcccagaatcggcagcaagagaaagagcaagaaggacgcctacatcatcttcgacaccgagatcgagagcaccagccccaagagcgagcaggacagcggcatcctggacgtggaggacgaggaggacgacgaggaggtgcccggcgcccaggacctggtggacttcagccccgtgtacagatgcctgcacatctacagcgtgctgggcgccagagagaccttcgagaactactacagaaagcagagaagaaagcaggccagactggtgctgcagccccccagcaacatgcacgagaccctggacggctacagaaagtacttcaaccagatcgtgggcttcttcgtggtggaggaccacatcctgcacaccacccagggcctggtgaacagagcctacatcgacgagctgtgggagatggccctgagcaagaccatcgccgccctgagaacccacagcagctactgcagcgaccccaacctggtgctggacctgaagaacctgatcgtgctgttcgccgacaccctgcaggtgtacggcttccccgtgaaccagctgttcgacatgctgctggagatcagagaccagtacagcgagaccctgctgaagaagtgggccggcatcttcagaaacatcctggacagcgacaactacagccccatccccgtgaccagcgaggagatgtacaagaaggtggtgggccagttccccttccaggacatcgagctggagaagcagcccttccccaagaagttccccttcagcgagttcgtgcccaaggtgtacaaccagatcaaggagttcatctacgcctgcctgaagttcagcgaggacctgcacctgagcagcaccgaggtggacgacatgatcagaaagagcaccaacctgctgctgaccagaaccctgagcaacagcctgcagaacgtgatcaagagaaagaacatcggcctgaccgagctggtgcagatcatcatcaacaccacccacctggagaagagctgcaagtacctggaggagttcatcaccaacatcaccaacgtgctgcccgagaccgtgcacaccaccaagctgtacggcaccaccaccttcaaggacgccagacacgccgccgaggaggagatctacaccaacctgaaccagaagatcgaccagttcctgcagctggccgactacgactggatgaccggcgacctgggcaacaaggccagcgactacctggtggacctgatcgccttcctgagaagcaccttcgccgtgttcacccacctgcccggcaaggtggcccagaccgcctgcatgagcgcctgcaagcacctggccaccagcctgatgcagctgctgctggaggccgaggtgagacagctgaccctgggcgccctgcagcagttcaacctggacgtgagagagtgcgagcagttcgccagaagcggccccgtgcccggcttccaggaggacaccctgcagctggccttcatcgacctgagacagctgctggacctgttcatccagtgggactggagcacctacctggccgactacggccagcccaactgcaagtacctgagagtgaaccccgtgaccgccctgaccctgctggagaagatgaaggacaccagcagaaagaacaacatgttcgcccagttcagaaagaacgagagagacaagcagaagctgatcgacaccgtggccaagcagctgagaggcctgatcagcagccaccacagctag

SEQ ID NO: 81029 - DNA, 2016 bp, synthetic construct
  misc_feature 1..2016: note = Description of Artificial Sequence: Synthetic coding sequence
  source 1..2016: mol_type = other DNA
atggagagaggcaagatggccgaggccgagagcctggagaccgccgccgagcacgagagaatcctgagagagatcgagagcaccgacaccgcctgcatcggccccaccctgagaagcgtgtacgacggcgaggagcacggcagattcatggagaagctggagaccagaatcagaaaccacgacagagagatcgagaagatgtgcaacttccactaccagggcttcgtggacagcatcaccgagctgctgaaggtgagaggcgaggcccagaagctgaagaaccaggtgaccgacaccaacagaaagctgcagcacgagggcaaggagctggtgatcgccatggaggagctgaagcagtgcagactgcagcagagaaacatcagcgccaccgtggacaagctgatgctgtgcctgcccgtgctggagatgtacagcaagctgagagaccagatgaagaccaagagacactaccccgccctgaagaccctggagcacctggagcacacctacctgccccaggtgagccactacagattctgcaaggtgatggtggacaacatccccaagctgagagaggagatcaaggacgtgagcatgagcgacctgaaggacttcctggagagcatcagaaagcacagcgacaagatcggcgagaccgccatgaagcaggcccagcagcagagaaacctggacaacatcgtgctgcagcagcccagaatcggcagcaagagaaagagcaagaaggacgcctacatcatcttcgacaccgagatcgagagcaccagccccaagagcgagcaggacagcggcatcctggacgtggaggacgaggaggacgacgaggaggtgcccggcgcccaggacctggtggacttcagccccgtgtacagatgcctgcacatctacagcgtgctgggcgccagagagaccttcgagaactactacagaaagcagagaagaaagcaggccagactggtgctgcagccccccagcaacatgcacgagaccctggacggctacagaaagtacttcaaccagatcgtgggcttcttcgtggtggaggaccacatcctgcacaccacccagggcctggtgaacagagcctacatcgacgagctgtgggagatggccctgagcaagaccatcgccgccctgagaacccacagcagctactgcagcgaccccaacctggtgctggacctgaagaacctgatcgtgctgttcgccgacaccctgcaggtgtacggcttccccgtgaaccagctgttcgacatgctgctggagatcagagaccagtacagcgagaccctgctgaagaagtgggccggcatcttcagaaacatcctggacagcgacaactacagccccatccccgtgaccagcgaggagatgtacaagaaggtggtgggccagttccccttccaggacatcgagctggagaagcagcccttccccaagaagttccccttcagcgagttcgtgcccaaggtgtacaaccagatcaaggagttcatctacgcctgcctgaagttcagcgaggacctgcacctgagcagcaccgaggtggacgacatgatcagaaagagcaccaacctgctgctgaccagaaccctgagcaacagcctgcagaacgtgatcaagagaaagaacatcggcctgaccgagctggtgcagatcatcatcaacaccacccacctggagaagagctgcaagtacctggaggagttcatcaccaacatcaccaacgtgctgcccgagaccgtgcacaccaccaagctgtacggcaccaccaccttcaaggacgccagacacgccgccgaggaggagatctacaccaacctgaaccagaagatcgaccagttcctgcagctggccgactacgactggatgaccggcgacctgggcaacaaggccagcgactacctggtggacctgatcgccttcctgagaagcaccttcgccgtgttcacccacctgcccgtgagcggcagctgctacttcgtgctgtacatctag

SEQ ID NO: 81030 - DNA, 5970 bp, synthetic construct
  misc_feature 1..5970: note = Description of Artificial Sequence: Synthetic coding sequence
  source 1..5970: mol_type = other DNA
atgaccaaggtgccccccgccttcgacttcagcttcctgaacgacgaggaggccagaaagatcctgcaggtgctggagagaaacgaggagctgcagagagccgagaaggacagaatcagcaagctgcagaagaccaagagagacatcagatggctgcagggcgtgaccggcgagtggttcgaggagatccagagaaagaagttctgcaacgagaccgacgtgagccagatgctgaagcagcccctgacctacagactgagcaaggagatggccaagaacgaccccatcgagctgcccaccagcagaagcaagaacgtgaccaaccagaagaagcccacccccttcagcagcagaatgagcttcagaagcagcttcgccagcctgttcagcttcagaaagagcggcaaggagaccagcaagctgcccagcctgggccagaagggctgcgacggccacgccggcccccccatgcccgtgagaggcgccgccgtgcaggccaagatctacaacagccccctggagaaccacctggtggacagcaccttcgtgcccaagcccgccgtgatgagagaggagagcggcatgccccccccctgggacgccagcctgctggagaacgagttcttccaggtgctggacgacctggacagcaagctggcccaggagcagagcgccagcagcgtgaacaccagaacccccctgaactacggcagcagaacccagttcggccacttctacagcagcggcaacagacacggcaacatcaccgagagacacaagaagcactacaacgagaccagcaacatgagcatctacgacatcctgagacccggcacccccagagagggcttcaagaccttcagccccagaaccagcaccatctacgacatgtacagaaccagagagcccagagtgttcaaggaggactacgtgcagaagaacaccttcggcagcaccagcctgtgcttcgacagcagacagagaagcgccctgcccgccaccggccacttcaccgccagaagcctgcacttccccgccaccacccagagcaagagcggcttcatcccccccagacaccagcagagccccaagagaacccccctgagcagcatcatctggaacagaagcgacagcagcagagacagagagaaccaggaggagttcctgagagcccccagccccatggagatcgaccccgccgacaagtacgtgtaccccagaggcttccaggagaacaagagatacgagagctaccacagccagaacgtgtaccagagagtgagcctgaacgcccccatggagaacgccatgagccccgacaccttcgagaacagcgagaacatgcccttctaccaccagagcaacaccttcaccagaagcttcttcagcaacaccttcggcagaagcggcgagcagagaagattcggccagggccccttctggggccaggagaagggccacagcttctggagcgacttccacagaagcagaaagagcttcagcagcagcgacagagacttcgagatgatcagcatggaggccaacagcgtgagcgccatccacggccacaacgtgagcagcgagcactgggagagcttcagcagcggctacggcaccgacgtgagcagaggccaggaggagccccacccctggcagttcgacttccagagaagcaccctggacagcatggtggtgagccacggcaacgagacccagctgaccccccacttcggcacccccaacgtgtgcagcatgaccggcagcagctaccacgtgaagagcagcgagctggtgagccagcaggacagcagccccgtggaggtgcacatcaacaaggaggccagcagcttcggcatcgcccagaccctggccagcagcttcaagaccagcttcagccagatcagcgacgacagaagaaacccccagagccccaacctgcagaaccccaccgtgaccctgcagaagatcttccccaacaagcccgccagccaccccatgagaagccacaccgaggtgaccgtgaccagcagcaacagcgtggacagcctgcccctggccaagagccagcccaacatcctggtgaccgaggtgaacaacgagaaggacctgaacgagagcatcagcgaggaggacaagcagctgagcaagatggaccagaccaacaaggccggcgagatcccccagcccgtgagccagaccggcatcagcaacagcctgcccgacttccagaaccccctgagccaggacagcgccaagagcaacggcttcggcttcaacgccagcaccatcatcagcagcaagaagagccccagagtgttcagcagaaaggacaccagcaagatgtacatcccccacaccgacaagagcaacgacatcaagcaggacaagagattcaccgagaacagaaagctgggcagcaccgccagcctgcccttcatccaggagcacagaaccccccccagcttccccagaaccgaccagggctgccaccaggagctgaccgtgaacaacgaggacatcagcagaatcatcaccaacaaccactggagcagcgccctgaccgacacccagaacgcccagtacagcaagtgcaagctgacccccggccacaagaccagctgcgacagcctggacctgagcagcgccgccctgcccgacagcagccccagcaagaacagcagcctggacgcccccgtggtgcccagcaccaccgtgttcagcagaagaagccccagcgacaaggaccccagcctgggcgagagagaggagaaggacaacgccggcaagaaccagaagaaccagttcatcgtgagccacagcgagaaccaggagagaaacgacagccccgtgcccacccacgacgaggtggtggacgtgaagtgccacagccacagccccttcagaaacgagagaggcaagggcaagatcagacaccacatcagctgcatcgagaagctgagcaagaccgagagcatcagcgtgcccaccagcgaccacagaagcctgatcgaggccaaccagagcaacagcaaggtgagcgagctggacaccatctactgcaccctgcccagaaagagcagcagcttcctgatccacggcagacagagcggcagcaagatcatggccgccagcctgagaaacggccccccccccttccagatcaagaacaacgtggaggacgccatgggcaactacatgctgaacaagttcagccccagcagccccgagagcgccaacgagtgcagcaaggtgctgagcgacagcgccctggaggcccccgaggccaccgagagaatgaccaacgtgaagagcagcggcagcaccagcgtgagaaagggccccctgcccttcctgatcaacagagccatgagctgccccagcggcgagccccacgccagcaccggcagagagggcagaaagaagcccctgaccagcggcatggacgccagcgagctgacccccagagcctgggagagaatcatcagccccgtggagagcgacagcagcgtgagagactgcagcctgaccaagagacagcaccagaaggagaacttccaggagtacaccgagaaggagggcaagatggccgccagcagaagaagcgtgttcgccctgagcaacgaggaccccctgcccttctgcagcgacctgagcggcaaggagagaggcaagaccctgcacaaggtgaagaccaccagcaccttcagcgtgagcggcgacgaggacaacgtgaagtgcctggaggtggtgagcatctactacaccctgcccagaaagcccagcaagaagttctgcaacctgctgcagcagtacacccagaacaccaacctgctgatcgagagcccccaggtggagaccgagaccttccccaacgccctggagaaggacaagcagaactacagcaccagagagcagagcggcacccccagctgcgagaacctgaagatgagcgtgaacagcgaccagaccctgaccaccgagaacatgaccgccttcagactgagcaacagaggccccctggcccccaccctgcaggagatggccagcgtggaggccgccgtgagcctgcccgaggaggagagcaaggccagagagatcttcagcgacaacctggccaagacccccctgggcgacagcgagaacaagaaggagagaggcaagaagctgcagagcgagaccctgcacaccagcctgatgctgcagagaaagaacgtgagcgaggagaagagcgagaactgccagcagagcatcaacagcagcaacagcggccccagcagcctgcccgccctgagcgaggtgaacatcggcaacagccagaccagaagaagcagctgggagtgcaccggcagcggcagagccatccccttcaccggcagcggcaagtgcccccagaaggaccacaccagcaccgccgtgggcgacggcagcagcggcagccagcccagagagggcagaggcgacatcggcaccaactgccagaagatgaccaacaagaccctgagccacagcgagagccaggtgttcgccctgacccccgccctgcacaagctgcagctgggcgaggagacccagagcgacgagcccaacctggagagcctgcagagcgagcccagagagctgccccagagaagccaggaggccaacatgaccgagagcagaaaggccgaggacgagatgcagaagagcgcctgggaccagcccagcctgcccgagggcaacaagaacaagaccaacctggacgacctggtgaagggcgagaacagaagcagcgtgaagcacagactggccgccatgagcaaggccagcagaaagttccccgccaaggacgtgagccccagaagacacgtggccaccatcttcccccagagcggcagcagaagcggcttcgaccacctgagcctgggcaccgtggagtgcaaccccctgttccccgagcccacccccaagagcgccgagagcatcggcgagagcagactgagcgagaacggcaagcacgtgaagaagagcgagaacctgctgcccatcaccgtgctgcccaacagagagcccagcacccacgtgagcaaccagaagagcaacagcatcagccagagacaccagaacgagttcaagaacgtgagcgagagccccagcaagcacgagaacagcaaggacgtgaccgccgcccagaacctggtgagagagagcggcgcccccagccccatcaccttcaccagcctgagagaggccgagttcagcgacaaccagagaagactgagcccccccttccccctggagcccgcccagaagagcagagtgagcagccccctggccagcttcctgcagcagcagagaagcgccagcagcctggagtgggagcccgagccccacctgtacagaagcaagagcctgaagagcatcaacgtgcacggcgacctgctgagaaagagccacccccccaaggtgagagagagacacttcagcgagagcaccagcatcgacaacgccctgagcagactgaccctgggcaacgagttcagcgtgaacaacggctacagcagaagattcagaagcttcagcgagctgcccagctgcgacggcaacgagagctgggcctacagaagcggcaccaagaccggccccagaagcgccatcagcatctacagacccatcgactacggcatcttcggcaaggagcagcagctggccttcctggagaacgtgaagagaagcctgacccagggcagactgtggaagcccagcttcctgaagaaccccggcttcctgaaggacgacctgagaaacccccccaaccccagcgagagcctgagcagcaacagccccagcagccaggtgcccgaggacggcctgagccccagcgagcccctgaacatctacgaggacgaccccgtggacagcaactgcgacaccgacaccaccaccgacgacgagtactacctggacgagaacgacaaggagagcgagctgtag

SEQ ID NO: 81031 - DNA, 5742 bp, synthetic construct
  misc_feature 1..5742: note = Description of Artificial Sequence: Synthetic coding sequence
  source 1..5742: mol_type = other DNA
atgctgaagcagcccctgacctacagactgagcaaggagatggccaagaacgaccccatcgagctgcccaccagcagaagcaagaacgtgaccaaccagaagaagcccacccccttcagcagcagaatgagcttcagaagcagcttcgccagcctgttcagcttcagaaagagcggcaaggagaccagcaagctgcccagcctgggccagaagggctgcgacggccacgccggcccccccatgcccgtgagaggcgccgccgtgcaggccaagatctacaacagccccctggagaaccacctggtggacagcaccttcgtgcccaagcccgccgtgatgagagaggagagcggcatgccccccccctgggacgccagcctgctggagaacgagttcttccaggtgctggacgacctggacagcaagctggcccaggagcagagcgccagcagcgtgaacaccagaacccccctgaactacggcagcagaacccagttcggccacttctacagcagcggcaacagacacggcaacatcaccgagagacacaagaagcactacaacgagaccagcaacatgagcatctacgacatcctgagacccggcacccccagagagggcttcaagaccttcagccccagaaccagcaccatctacgacatgtacagaaccagagagcccagagtgttcaaggaggactacgtgcagaagaacaccttcggcagcaccagcctgtgcttcgacagcagacagagaagcgccctgcccgccaccggccacttcaccgccagaagcctgcacttccccgccaccacccagagcaagagcggcttcatcccccccagacaccagcagagccccaagagaacccccctgagcagcatcatctggaacagaagcgacagcagcagagacagagagaaccaggaggagttcctgagagcccccagccccatggagatcgaccccgccgacaagtacgtgtaccccagaggcttccaggagaacaagagatacgagagctaccacagccagaacgtgtaccagagagtgagcctgaacgcccccatggagaacgccatgagccccgacaccttcgagaacagcgagaacatgcccttctaccaccagagcaacaccttcaccagaagcttcttcagcaacaccttcggcagaagcggcgagcagagaagattcggccagggccccttctggggccaggagaagggccacagcttctggagcgacttccacagaagcagaaagagcttcagcagcagcgacagagacttcgagatgatcagcatggaggccaacagcgtgagcgccatccacggccacaacgtgagcagcgagcactgggagagcttcagcagcggctacggcaccgacgtgagcagaggccaggaggagccccacccctggcagttcgacttccagagaagcaccctggacagcatggtggtgagccacggcaacgagacccagctgaccccccacttcggcacccccaacgtgtgcagcatgaccggcagcagctaccacgtgaagagcagcgagctggtgagccagcaggacagcagccccgtggaggtgcacatcaacaaggaggccagcagcttcggcatcgcccagaccctggccagcagcttcaagaccagcttcagccagatcagcgacgacagaagaaacccccagagccccaacctgcagaaccccaccgtgaccctgcagaagatcttccccaacaagcccgccagccaccccatgagaagccacaccgaggtgaccgtgaccagcagcaacagcgtggacagcctgcccctggccaagagccagcccaacatcctggtgaccgaggtgaacaacgagaaggacctgaacgagagcatcagcgaggaggacaagcagctgagcaagatggaccagaccaacaaggccggcgagatcccccagcccgtgagccagaccggcatcagcaacagcctgcccgacttccagaaccccctgagccaggacagcgccaagagcaacggcttcggcttcaacgccagcaccatcatcagcagcaagaagagccccagagtgttcagcagaaaggacaccagcaagatgtacatcccccacaccgacaagagcaacgacatcaagcaggacaagagattcaccgagaacagaaagctgggcagcaccgccagcctgcccttcatccaggagcacagaaccccccccagcttccccagaaccgaccagggctgccaccaggagctgaccgtgaacaacgaggacatcagcagaatcatcaccaacaaccactggagcagcgccctgaccgacacccagaacgcccagtacagcaagtgcaagctgacccccggccacaagaccagctgcgacagcctggacctgagcagcgccgccctgcccgacagcagccccagcaagaacagcagcctggacgcccccgtggtgcccagcaccaccgtgttcagcagaagaagccccagcgacaaggaccccagcctgggcgagagagaggagaaggacaacgccggcaagaaccagaagaaccagttcatcgtgagccacagcgagaaccaggagagaaacgacagccccgtgcccacccacgacgaggtggtggacgtgaagtgccacagccacagccccttcagaaacgagagaggcaagggcaagatcagacaccacatcagctgcatcgagaagctgagcaagaccgagagcatcagcgtgcccaccagcgaccacagaagcctgatcgaggccaaccagagcaacagcaaggtgagcgagctggacaccatctactgcaccctgcccagaaagagcagcagcttcctgatccacggcagacagagcggcagcaagatcatggccgccagcctgagaaacggccccccccccttccagatcaagaacaacgtggaggacgccatgggcaactacatgctgaacaagttcagccccagcagccccgagagcgccaacgagtgcagcaaggtgctgagcgacagcgccctggaggcccccgaggccaccgagagaatgaccaacgtgaagagcagcggcagcaccagcgtgagaaagggccccctgcccttcctgatcaacagagccatgagctgccccagcggcgagccccacgccagcaccggcagagagggcagaaagaagcccctgaccagcggcatggacgccagcgagctgacccccagagcctgggagagaatcatcagccccgtggagagcgacagcagcgtgagagactgcagcctgaccaagagacagcaccagaaggagaacttccaggagtacaccgagaaggagggcaagatggccgccagcagaagaagcgtgttcgccctgagcaacgaggaccccctgcccttctgcagcgacctgagcggcaaggagagaggcaagaccctgcacaaggtgaagaccaccagcaccttcagcgtgagcggcgacgaggacaacgtgaagtgcctggaggtggtgagcatctactacaccctgcccagaaagcccagcaagaagttctgcaacctgctgcagcagtacacccagaacaccaacctgctgatcgagagcccccaggtggagaccgagaccttccccaacgccctggagaaggacaagcagaactacagcaccagagagcagagcggcacccccagctgcgagaacctgaagatgagcgtgaacagcgaccagaccctgaccaccgagaacatgaccgccttcagactgagcaacagaggccccctggcccccaccctgcaggagatggccagcgtggaggccgccgtgagcctgcccgaggaggagagcaaggccagagagatcttcagcgacaacctggccaagacccccctgggcgacagcgagaacaagaaggagagaggcaagaagctgcagagcgagaccctgcacaccagcctgatgctgcagagaaagaacgtgagcgaggagaagagcgagaactgccagcagagcatcaacagcagcaacagcggccccagcagcctgcccgccctgagcgaggtgaacatcggcaacagccagaccagaagaagcagctgggagtgcaccggcagcggcagagccatccccttcaccggcagcggcaagtgcccccagaaggaccacaccagcaccgccgtgggcgacggcagcagcggcagccagcccagagagggcagaggcgacatcggcaccaactgccagaagatgaccaacaagaccctgagccacagcgagagccaggtgttcgccctgacccccgccctgcacaagctgcagctgggcgaggagacccagagcgacgagcccaacctggagagcctgcagagcgagcccagagagctgccccagagaagccaggaggccaacatgaccgagagcagaaaggccgaggacgagatgcagaagagcgcctgggaccagcccagcctgcccgagggcaacaagaacaagaccaacctggacgacctggtgaagggcgagaacagaagcagcgtgaagcacagactggccgccatgagcaaggccagcagaaagttccccgccaaggacgtgagccccagaagacacgtggccaccatcttcccccagagcggcagcagaagcggcttcgaccacctgagcctgggcaccgtggagtgcaaccccctgttccccgagcccacccccaagagcgccgagagcatcggcgagagcagactgagcgagaacggcaagcacgtgaagaagagcgagaacctgctgcccatcaccgtgctgcccaacagagagcccagcacccacgtgagcaaccagaagagcaacagcatcagccagagacaccagaacgagttcaagaacgtgagcgagagccccagcaagcacgagaacagcaaggacgtgaccgccgcccagaacctggtgagagagagcggcgcccccagccccatcaccttcaccagcctgagagaggccgagttcagcgacaaccagagaagactgagcccccccttccccctggagcccgcccagaagagcagagtgagcagccccctggccagcttcctgcagcagcagagaagcgccagcagcctggagtgggagcccgagccccacctgtacagaagcaagagcctgaagagcatcaacgtgcacggcgacctgctgagaaagagccacccccccaaggtgagagagagacacttcagcgagagcaccagcatcgacaacgccctgagcagactgaccctgggcaacgagttcagcgtgaacaacggctacagcagaagattcagaagcttcagcgagctgcccagctgcgacggcaacgagagctgggcctacagaagcggcaccaagaccggccccagaagcgccatcagcatctacagacccatcgactacggcatcttcggcaaggagcagcagctggccttcctggagaacgtgaagagaagcctgacccagggcagactgtggaagcccagcttcctgaagaaccccggcttcctgaaggacgacctgagaaacccccccaaccccagcgagagcctgagcagcaacagccccagcagccaggtgcccgaggacggcctgagccccagcgagcccctgaacatctacgaggacgaccccgtggacagcaactgcgacaccgacaccaccaccgacgacgagtactacctggacgagaacgacaaggagagcgagctgtag

SEQ ID NO: 81032 - DNA, 2460 bp, synthetic construct
  misc_feature 1..2460: note = Description of Artificial Sequence: Synthetic coding sequence
  source 1..2460: mol_type = other DNA
atgcccgtgagaggcgccgccgtgcaggccaagatctacaacagccccctggagaaccacctggtggacagcaccttcgtgcccaagcccgccgtgatgagagaggagagcggcatgccccccccctgggacgccagcctgctggagaacgagttcttccaggtgctggacgacctggacagcaagctggcccaggagcagagcgccagcagcgtgaacaccagaacccccctgaactacggcagcagaacccagttcggccacttctacagcagcggcaacagacacggcaacatcaccgagagacacaagaagcactacaacgagaccagcaacatgagcatctacgacatcctgagacccggcacccccagagagggcttcaagaccttcagccccagaaccagcaccatctacgacatgtacagaaccagagagcccagagtgttcaaggaggactacgtgcagaagaacaccttcggcagcaccagcctgtgcttcgacagcagacagagaagcgccctgcccgccaccggccacttcaccgccagaagcctgcacttccccgccaccacccagagcaagagcggcttcatcccccccagacaccagcagagccccaagagaacccccctgagcagcatcatctggaacagaagcgacagcagcagagacagagagaaccaggaggagttcctgagagcccccagccccatggagatcgaccccgccgacaagtacgtgtaccccagaggcttccaggagaacaagagatacgagagctaccacagccagaacgtgtaccagagagtgagcctgaacgcccccatggagaacgccatgagccccgacaccttcgagaacagcgagaacatgcccttctaccaccagagcaacaccttcaccagaagcttcttcagcaacaccttcggcagaagcggcgagcagagaagattcggccagggccccttctggggccaggagaagggccacagcttctggagcgacttccacagaagcagaaagagcttcagcagcagcgacagagacttcgagatgatcagcatggaggccaacagcgtgagcgccatccacggccacaacgtgagcagcgagcactgggagagcttcagcagcggctacggcaccgacgtgagcagaggccaggaggagccccacccctggcagttcgacttccagagaagcaccctggacagcatggtggtgagccacggcaacgagacccagctgaccccccacttcggcacccccaacgtgtgcagcatgaccggcagcagctaccacgtgaagagcagcgagctggtgagccagcaggacagcagccccgtggaggtgcacatcaacaaggaggccagcagcttcggcatcgcccagaccctggccagcagcttcaagaccagcttcagccagatcagcgacgacagaagaaacccccagagccccaacctgcagaaccccaccgtgaccctgcagaagatcttccccaacaagcccgccagccaccccatgagaagccacaccgaggtgaccgtgaccagcagcaacagcgtggacagcctgcccctggccaagagccagcccaacatcctggtgaccgaggtgaacaacgagaacagcaaggacgtgaccgccgcccagaacctggtgagagagagcggcgcccccagccccatcaccttcaccagcctgagagaggccgagttcagcgacaaccagagaagactgagcccccccttccccctggagcccgcccagaagagcagagtgagcagccccctggccagcttcctgcagcagcagagaagcgccagcagcctggagtgggagcccgagccccacctgtacagaagcaagagcctgaagagcatcaacgtgcacggcgacctgctgagaaagagccacccccccaaggtgagagagagacacttcagcgagagcaccagcatcgacaacgccctgagcagactgaccctgggcaacgagttcagcgtgaacaacggctacagcagaagattcagaagcttcagcgagctgcccagctgcgacggcaacgagagctgggcctacagaagcggcaccaagaccggccccagaagcgccatcagcatctacagacccatcgactacggcatcttcggcaaggagcagcagctggccttcctggagaacgtgaagagaagcctgacccagggcagactgtggaagcccagcttcctgaagaaccccggcttcctgaaggacgacctgagaaacccccccaaccccagcgagagcctgagcagcaacagccccagcagccaggtgcccgaggacggcctgagccccagcgagcccctgaacatctacgaggacgaccccgtggacagcaactgcgacaccgacaccaccaccgacgacgagtactacctggacgagaacgacaaggagagcgagctgtag

SEQ ID NO: 81033 - DNA, 5406 bp, synthetic construct
  misc_feature 1..5406: note = Description of Artificial Sequence: Synthetic coding sequence
  source 1..5406: mol_type = other DNA
atgagagaggagagcggcatgccccccccctgggacgccagcctgctggagaacgagttcttccaggtgctggacgacctggacagcaagctggcccaggagcagagcgccagcagcgtgaacaccagaacccccctgaactacggcagcagaacccagttcggccacttctacagcagcggcaacagacacggcaacatcaccgagagacacaagaagcactacaacgagaccagcaacatgagcatctacgacatcctgagacccggcacccccagagagggcttcaagaccttcagccccagaaccagcaccatctacgacatgtacagaaccagagagcccagagtgttcaaggaggactacgtgcagaagaacaccttcggcagcaccagcctgtgcttcgacagcagacagagaagcgccctgcccgccaccggccacttcaccgccagaagcctgcacttccccgccaccacccagagcaagagcggcttcatcccccccagacaccagcagagccccaagagaacccccctgagcagcatcatctggaacagaagcgacagcagcagagacagagagaaccaggaggagttcctgagagcccccagccccatggagatcgaccccgccgacaagtacgtgtaccccagaggcttccaggagaacaagagatacgagagctaccacagccagaacgtgtaccagagagtgagcctgaacgcccccatggagaacgccatgagccccgacaccttcgagaacagcgagaacatgcccttctaccaccagagcaacaccttcaccagaagcttcttcagcaacaccttcggcagaagcggcgagcagagaagattcggccagggccccttctggggccaggagaagggccacagcttctggagcgacttccacagaagcagaaagagcttcagcagcagcgacagagacttcgagatgatcagcatggaggccaacagcgtgagcgccatccacggccacaacgtgagcagcgagcactgggagagcttcagcagcggctacggcaccgacgtgagcagaggccaggaggagccccacccctggcagttcgacttccagagaagcaccctggacagcatggtggtgagccacggcaacgagacccagctgaccccccacttcggcacccccaacgtgtgcagcatgaccggcagcagctaccacgtgaagagcagcgagctggtgagccagcaggacagcagccccgtggaggtgcacatcaacaaggaggccagcagcttcggcatcgcccagaccctggccagcagcttcaagaccagcttcagccagatcagcgacgacagaagaaacccccagagccccaacctgcagaaccccaccgtgaccctgcagaagatcttccccaacaagcccgccagccaccccatgagaagccacaccgaggtgaccgtgaccagcagcaacagcgtggacagcctgcccctggccaagagccagcccaacatcctggtgaccgaggtgaacaacgagaaggacctgaacgagagcatcagcgaggaggacaagcagctgagcaagatggaccagaccaacaaggccggcgagatcccccagcccgtgagccagaccggcatcagcaacagcctgcccgacttccagaaccccctgagccaggacagcgccaagagcaacggcttcggcttcaacgccagcaccatcatcagcagcaagaagagccccagagtgttcagcagaaaggacaccagcaagatgtacatcccccacaccgacaagagcaacgacatcaagcaggacaagagattcaccgagaacagaaagctgggcagcaccgccagcctgcccttcatccaggagcacagaaccccccccagcttccccagaaccgaccagggctgccaccaggagctgaccgtgaacaacgaggacatcagcagaatcatcaccaacaaccactggagcagcgccctgaccgacacccagaacgcccagtacagcaagtgcaagctgacccccggccacaagaccagctgcgacagcctggacctgagcagcgccgccctgcccgacagcagccccagcaagaacagcagcctggacgcccccgtggtgcccagcaccaccgtgttcagcagaagaagccccagcgacaaggaccccagcctgggcgagagagaggagaaggacaacgccggcaagaaccagaagaaccagttcatcgtgagccacagcgagaaccaggagagaaacgacagccccgtgcccacccacgacgaggtggtggacgtgaagtgccacagccacagccccttcagaaacgagagaggcaagggcaagatcagacaccacatcagctgcatcgagaagctgagcaagaccgagagcatcagcgtgcccaccagcgaccacagaagcctgatcgaggccaaccagagcaacagcaaggtgagcgagctggacaccatctactgcaccctgcccagaaagagcagcagcttcctgatccacggcagacagagcggcagcaagatcatggccgccagcctgagaaacggccccccccccttccagatcaagaacaacgtggaggacgccatgggcaactacatgctgaacaagttcagccccagcagccccgagagcgccaacgagtgcagcaaggtgctgagcgacagcgccctggaggcccccgaggccaccgagagaatgaccaacgtgaagagcagcggcagcaccagcgtgagaaagggccccctgcccttcctgatcaacagagccatgagctgccccagcggcgagccccacgccagcaccggcagagagggcagaaagaagcccctgaccagcggcatggacgccagcgagctgacccccagagcctgggagagaatcatcagccccgtggagagcgacagcagcgtgagagactgcagcctgaccaagagacagcaccagaaggagaacttccaggagtacaccgagaaggagggcaagatggccgccagcagaagaagcgtgttcgccctgagcaacgaggaccccctgcccttctgcagcgacctgagcggcaaggagagaggcaagaccctgcacaaggtgaagaccaccagcaccttcagcgtgagcggcgacgaggacaacgtgaagtgcctggaggtggtgagcatctactacaccctgcccagaaagcccagcaagaagttctgcaacctgctgcagcagtacacccagaacaccaacctgctgatcgagagcccccaggtggagaccgagaccttccccaacgccctggagaaggacaagcagaactacagcaccagagagcagagcggcacccccagctgcgagaacctgaagatgagcgtgaacagcgaccagaccctgaccaccgagaacatgaccgccttcagactgagcaacagaggccccctggcccccaccctgcaggagatggccagcgtggaggccgccgtgagcctgcccgaggaggagagcaaggccagagagatcttcagcgacaacctggccaagacccccctgggcgacagcgagaacaagaaggagagaggcaagaagctgcagagcgagaccctgcacaccagcctgatgctgcagagaaagaacgtgagcgaggagaagagcgagaactgccagcagagcatcaacagcagcaacagcggccccagcagcctgcccgccctgagcgaggtgaacatcggcaacagccagaccagaagaagcagctgggagtgcaccggcagcggcagagccatccccttcaccggcagcggcaagtgcccccagaaggaccacaccagcaccgccgtgggcgacggcagcagcggcagccagcccagagagggcagaggcgacatcggcaccaactgccagaagatgaccaacaagaccctgagccacagcgagagccaggtgttcgccctgacccccgccctgcacaagctgcagctgggcgaggagacccagagcgacgagcccaacctggagagcctgcagagcgagcccagagagctgccccagagaagccaggaggccaacatgaccgagagcagaaaggccgaggacgagatgcagaagagcgcctgggaccagcccagcctgcccgagggcaacaagaacaagaccaacctggacgacctggtgaagggcgagaacagaagcagcgtgaagcacagactggccgccatgagcaaggccagcagaaagttccccgccaaggacgtgagccccagaagacacgtggccaccatcttcccccagagcggcagcagaagcggcttcgaccacctgagcctgggcaccgtggagtgcaaccccctgttccccgagcccacccccaagagcgccgagagcatcggcgagagcagactgagcgagaacggcaagcacgtgaagaagagcgagaacctgctgcccatcaccgtgctgcccaacagagagcccagcacccacgtgagcaaccagaagagcaacagcatcagccagagacaccagaacgagttcaagaacgtgagcgagagccccagcaagcacgagaacagcaaggacgtgaccgccgcccagaacctggtgagagagagcggcgcccccagccccatcaccttcaccagcctgagagaggccgagttcagcgacaaccagagaagactgagcccccccttccccctggagcccgcccagaagagcagagtgagcagccccctggccagcttcctgcagcagcagagaagcgccagcagcctggagtgggagcccgagccccacctgtacagaagcaagagcctgaagagcatcaacgtgcacggcgacctgctgagaaagagccacccccccaaggtgagagagagacacttcagcgagagcaccagcatcgacaacgccctgagcagactgaccctgggcaacgagttcagcgtgaacaacggctacagcagaagattcagaagcttcagcgagctgcccagctgcgacggcaacgagagctgggcctacagaagcggcaccaagaccggccccagaagcgccatcagcatctacagacccatcgactacggcatcttcggcaaggagcagcagctggccttcctggagaacgtgaagagaagcctgacccagggcagactgtggaagcccagcttcctgaagaaccccggcttcctgaaggacgacctgagaaacccccccaaccccagcgagagcctgagcagcaacagccccagcagccaggtgcccgaggacggcctgagccccagcgagcccctgaacatctacgaggacgaccccgtggacagcaactgcgacaccgacaccaccaccgacgacgagtactacctggacgagaacgacaaggagagcgagctgtag

SEQ ID NO: 81034 - DNA, 5949 bp, synthetic construct
  misc_feature 1..5949: note = Description of Artificial Sequence: Synthetic coding sequence
  source 1..5949: mol_type = other DNA
atgagcctgagcttcctgaacgacgaggaggccagaaagatcctgcaggtgctggagagaaacgaggagctgcagagagccgagaaggacagaatcagcaagctgcagaagaccaagagagacatcagatggctgcagggcgtgaccggcgagtggttcgaggagatccagagaaagaagttctgcaacgagaccgacgtgagccagatgctgaagcagcccctgacctacagactgagcaaggagatggccaagaacgaccccatcgagctgcccaccagcagaagcaagaacgtgaccaaccagaagaagcccacccccttcagcagcagaatgagcttcagaagcagcttcgccagcctgttcagcttcagaaagagcggcaaggagaccagcaagctgcccagcctgggccagaagggctgcgacggccacgccggcccccccatgcccgtgagaggcgccgccgtgcaggccaagatctacaacagccccctggagaaccacctggtggacagcaccttcgtgcccaagcccgccgtgatgagagaggagagcggcatgccccccccctgggacgccagcctgctggagaacgagttcttccaggtgctggacgacctggacagcaagctggcccaggagcagagcgccagcagcgtgaacaccagaacccccctgaactacggcagcagaacccagttcggccacttctacagcagcggcaacagacacggcaacatcaccgagagacacaagaagcactacaacgagaccagcaacatgagcatctacgacatcctgagacccggcacccccagagagggcttcaagaccttcagccccagaaccagcaccatctacgacatgtacagaaccagagagcccagagtgttcaaggaggactacgtgcagaagaacaccttcggcagcaccagcctgtgcttcgacagcagacagagaagcgccctgcccgccaccggccacttcaccgccagaagcctgcacttccccgccaccacccagagcaagagcggcttcatcccccccagacaccagcagagccccaagagaacccccctgagcagcatcatctggaacagaagcgacagcagcagagacagagagaaccaggaggagttcctgagagcccccagccccatggagatcgaccccgccgacaagtacgtgtaccccagaggcttccaggagaacaagagatacgagagctaccacagccagaacgtgtaccagagagtgagcctgaacgcccccatggagaacgccatgagccccgacaccttcgagaacagcgagaacatgcccttctaccaccagagcaacaccttcaccagaagcttcttcagcaacaccttcggcagaagcggcgagcagagaagattcggccagggccccttctggggccaggagaagggccacagcttctggagcgacttccacagaagcagaaagagcttcagcagcagcgacagagacttcgagatgatcagcatggaggccaacagcgtgagcgccatccacggccacaacgtgagcagcgagcactgggagagcttcagcagcggctacggcaccgacgtgagcagaggccaggaggagccccacccctggcagttcgacttccagagaagcaccctggacagcatggtggtgagccacggcaacgagacccagctgaccccccacttcggcacccccaacgtgtgcagcatgaccggcagcagctaccacgtgaagagcagcgagctggtgagccagcaggacagcagccccgtggaggtgcacatcaacaaggaggccagcagcttcggcatcgcccagaccctggccagcagcttcaagaccagcttcagccagatcagcgacgacagaagaaacccccagagccccaacctgcagaaccccaccgtgaccctgcagaagatcttccccaacaagcccgccagccaccccatgagaagccacaccgaggtgaccgtgaccagcagcaacagcgtggacagcctgcccctggccaagagccagcccaacatcctggtgaccgaggtgaacaacgagaaggacctgaacgagagcatcagcgaggaggacaagcagctgagcaagatggaccagaccaacaaggccggcgagatcccccagcccgtgagccagaccggcatcagcaacagcctgcccgacttccagaaccccctgagccaggacagcgccaagagcaacggcttcggcttcaacgccagcaccatcatcagcagcaagaagagccccagagtgttcagcagaaaggacaccagcaagatgtacatcccccacaccgacaagagcaacgacatcaagcaggacaagagattcaccgagaacagaaagctgggcagcaccgccagcctgcccttcatccaggagcacagaaccccccccagcttccccagaaccgaccagggctgccaccaggagctgaccgtgaacaacgaggacatcagcagaatcatcaccaacaaccactggagcagcgccctgaccgacacccagaacgcccagtacagcaagtgcaagctgacccccggccacaagaccagctgcgacagcctggacctgagcagcgccgccctgcccgacagcagccccagcaagaacagcagcctggacgcccccgtggtgcccagcaccaccgtgttcagcagaagaagccccagcgacaaggaccccagcctgggcgagagagaggagaaggacaacgccggcaagaaccagaagaaccagttcatcgtgagccacagcgagaaccaggagagaaacgacagccccgtgcccacccacgacgaggtggtggacgtgaagtgccacagccacagccccttcagaaacgagagaggcaagggcaagatcagacaccacatcagctgcatcgagaagctgagcaagaccgagagcatcagcgtgcccaccagcgaccacagaagcctgatcgaggccaaccagagcaacagcaaggtgagcgagctggacaccatctactgcaccctgcccagaaagagcagcagcttcctgatccacggcagacagagcggcagcaagatcatggccgccagcctgagaaacggccccccccccttccagatcaagaacaacgtggaggacgccatgggcaactacatgctgaacaagttcagccccagcagccccgagagcgccaacgagtgcagcaaggtgctgagcgacagcgccctggaggcccccgaggccaccgagagaatgaccaacgtgaagagcagcggcagcaccagcgtgagaaagggccccctgcccttcctgatcaacagagccatgagctgccccagcggcgagccccacgccagcaccggcagagagggcagaaagaagcccctgaccagcggcatggacgccagcgagctgacccccagagcctgggagagaatcatcagccccgtggagagcgacagcagcgtgagagactgcagcctgaccaagagacagcaccagaaggagaacttccaggagtacaccgagaaggagggcaagatggccgccagcagaagaagcgtgttcgccctgagcaacgaggaccccctgcccttctgcagcgacctgagcggcaaggagagaggcaagaccctgcacaaggtgaagaccaccagcaccttcagcgtgagcggcgacgaggacaacgtgaagtgcctggaggtggtgagcatctactacaccctgcccagaaagcccagcaagaagttctgcaacctgctgcagcagtacacccagaacaccaacctgctgatcgagagcccccaggtggagaccgagaccttccccaacgccctggagaaggacaagcagaactacagcaccagagagcagagcggcacccccagctgcgagaacctgaagatgagcgtgaacagcgaccagaccctgaccaccgagaacatgaccgccttcagactgagcaacagaggccccctggcccccaccctgcaggagatggccagcgtggaggccgccgtgagcctgcccgaggaggagagcaaggccagagagatcttcagcgacaacctggccaagacccccctgggcgacagcgagaacaagaaggagagaggcaagaagctgcagagcgagaccctgcacaccagcctgatgctgcagagaaagaacgtgagcgaggagaagagcgagaactgccagcagagcatcaacagcagcaacagcggccccagcagcctgcccgccctgagcgaggtgaacatcggcaacagccagaccagaagaagcagctgggagtgcaccggcagcggcagagccatccccttcaccggcagcggcaagtgcccccagaaggaccacaccagcaccgccgtgggcgacggcagcagcggcagccagcccagagagggcagaggcgacatcggcaccaactgccagaagatgaccaacaagaccctgagccacagcgagagccaggtgttcgccctgacccccgccctgcacaagctgcagctgggcgaggagacccagagcgacgagcccaacctggagagcctgcagagcgagcccagagagctgccccagagaagccaggaggccaacatgaccgagagcagaaaggccgaggacgagatgcagaagagcgcctgggaccagcccagcctgcccgagggcaacaagaacaagaccaacctggacgacctggtgaagggcgagaacagaagcagcgtgaagcacagactggccgccatgagcaaggccagcagaaagttccccgccaaggacgtgagccccagaagacacgtggccaccatcttcccccagagcggcagcagaagcggcttcgaccacctgagcctgggcaccgtggagtgcaaccccctgttccccgagcccacccccaagagcgccgagagcatcggcgagagcagactgagcgagaacggcaagcacgtgaagaagagcgagaacctgctgcccatcaccgtgctgcccaacagagagcccagcacccacgtgagcaaccagaagagcaacagcatcagccagagacaccagaacgagttcaagaacgtgagcgagagccccagcaagcacgagaacagcaaggacgtgaccgccgcccagaacctggtgagagagagcggcgcccccagccccatcaccttcaccagcctgagagaggccgagttcagcgacaaccagagaagactgagcccccccttccccctggagcccgcccagaagagcagagtgagcagccccctggccagcttcctgcagcagcagagaagcgccagcagcctggagtgggagcccgagccccacctgtacagaagcaagagcctgaagagcatcaacgtgcacggcgacctgctgagaaagagccacccccccaaggtgagagagagacacttcagcgagagcaccagcatcgacaacgccctgagcagactgaccctgggcaacgagttcagcgtgaacaacggctacagcagaagattcagaagcttcagcgagctgcccagctgcgacggcaacgagagctgggcctacagaagcggcaccaagaccggccccagaagcgccatcagcatctacagacccatcgactacggcatcttcggcaaggagcagcagctggccttcctggagaacgtgaagagaagcctgacccagggcagactgtggaagcccagcttcctgaagaaccccggcttcctgaaggacgacctgagaaacccccccaaccccagcgagagcctgagcagcaacagccccagcagccaggtgcccgaggacggcctgagccccagcgagcccctgaacatctacgaggacgaccccgtggacagcaactgcgacaccgacaccaccaccgacgacgagtactacctggacgagaacgacaaggagagcgagctgtag

SEQ ID NO: 81035 - DNA, 2583 bp, synthetic construct
  misc_feature 1..2583: note = Description of Artificial Sequence: Synthetic coding sequence
  source 1..2583: mol_type = other DNA
atggccccccccagcaccagagagcccagagtgctgagcgccaccagcgccaccaagagcgacggcgagatggtgctgcccggcttccccgacgccgacagcttcgtgaagttcgccctgggcagcgtggtggccgtgaccaaggccagcggcggcctgccccagttcggcgacgagtacgacttctacagaagcttccccggcttccaggccttctgcgagacccagggcgacagactgctgcagtgcatgagcagagtgatgcagtaccacggctgcagaagcaacatcaaggacagaagcaaggtgaccgagctggaggacaagttcgacctgctggtggacgccaacgacgtgatcctggagagagtgggcatcctgctggacgaggccagcggcgtgaacaagaaccagcagcccgtgctgcccgccggcctgcaggtgcccaagaccgtggtgagcagctggaacagaaaggccgccgagtacggcaagaaggccaagagcgagaccttcagactgctgcacgccaagaacatcatcagaccccagctgaagttcagagagaagatcgacaacagcaacacccccttcctgcccaagatcttcatcaagcccaacgcccagaagcccctgccccaggccctgagcaaggagagaagagagagaccccaggacagacccgaggacctggacgtgccccccgccctggccgacttcatccaccagcagagaacccagcaggtggagcaggacatgttcgcccacccctaccagtacgagctgaaccacttcacccccgccgacgccgtgctgcagaagccccagccccagctgtacagacccatcgaggagaccccctgccacttcatcagcagcctggacgagctggtggagctgaacgagaagctgctgaactgccaggagttcgccgtggacctggagcaccacagctacagaagcttcctgggcctgacctgcctgatgcagatcagcaccagaaccgaggacttcatcatcgacaccctggagctgagaagcgacatgtacatcctgaacgagagcctgaccgaccccgccatcgtgaaggtgttccacggcgccgacagcgacatcgagtggctgcagaaggacttcggcctgtacgtggtgaacatgttcgacacccaccaggccgccagactgctgaacctgggcagacacagcctggaccacctgctgaagctgtactgcaacgtggacagcaacaagcagtaccagctggccgactggagaatcagacccctgcccgaggagatgctgagctacgccagagacgacacccactacctgctgtacatctacgacaagatgagactggagatgtgggagagaggcaacggccagcccgtgcagctgcaggtggtgtggcagagaagcagagacatctgcctgaagaagttcatcaagcccatcttcaccgacgagagctacctggagctgtacagaaagcagaagaagcacctgaacacccagcagctgaccgccttccagctgctgttcgcctggagagacaagaccgccagaagagaggacgagagctacggctacgtgctgcccaaccacatgatgctgaagatcgccgaggagctgcccaaggagccccagggcatcatcgcctgctgcaaccccgtgccccccctggtgagacagcagatcaacgagatgcacctgctgatccagcaggccagagagatgcccctgctgaagagcgaggtggccgccggcgtgaagaagagcggccccctgcccagcgccgagagactggagaacgtgctgttcggcccccacgactgcagccacgccccccccgacggctaccccatcatccccaccagcggcagcgtgcccgtgcagaagcaggccagcctgttccccgacgagaaggaggacaacctgctgggcaccacctgcctgatcgccaccgccgtgatcaccctgttcaacgagcccagcgccgaggacagcaagaagggccccctgaccgtggcccagaagaaggcccagaacatcatggagagcttcgagaaccccttcagaatgatcagcaacagatggaagctggcccaggtgcaggtgcagaaggacagcaaggaggccgtgaagaagaaggccgccgagcagaccgccgccagagagcaggccaaggaggcctgcaaggccgccgccgagcaggccatcagcgtgagacagcaggtggtgctggagaacgccgccaagaagagagagagagccaccagcgaccccagaaccaccgagcagaagcaggagaagaagagactgaagatcagcaagaagcccaaggaccccgagccccccgagaaggagttcaccccctacgactacagccagagcgacttcaaggccttcgccggcaacagcaagagcaaggtgagcagccagttcgaccccaacaagcagacccccagcggcaagaagtgcatcgccgccaagaagatcaagcagagcgtgggcaacaagagcatgagcttccccaccggcaagagcgacagaggcttcagatacaactggccccagagatag

SEQ ID NO: 81036 - DNA, 2658 bp, synthetic construct
  misc_feature 1..2658: note = Description of Artificial Sequence: Synthetic coding sequence
  source 1..2658: mol_type = other DNA
atggccccccccagcaccagagagcccagagtgctgagcgccaccagcgccaccaagagcgacggcgagatggtgctgcccggcttccccgacgccgacagcttcgtgaagttcgccctgggcagcgtggtggccgtgaccaaggccagcggcggcctgccccagttcggcgacgagtacgacttctacagaagcttccccggcttccaggccttctgcgagacccagggcgacagactgctgcagtgcatgagcagagtgatgcagtaccacggctgcagaagcaacatcaaggacagaagcaaggtgaccgagctggaggacaagttcgacctgctggtggacgccaacgacgtgatcctggagagagtgggcatcctgctggacgaggccagcggcgtgaacaagaaccagcagcccgtgctgcccgccggcctgcaggtgcccaagaccgtggtgagcagctggaacagaaaggccgccgagtacggcaagaaggccaagagcgagaccttcagactgctgcacgccaagaacatcatcagaccccagctgaagttcagagagaagatcgacaacagcaacacccccttcctgcccaagatcttcatcaagcccaacgcccagaagcccctgccccaggccctgagcaaggagagaagagagagaccccaggacagacccgaggacctggacgtgccccccgccctggccgacttcatccaccagcagagaacccagcaggtggagcaggacatgttcgcccacccctaccagtacgagctgaaccacttcacccccgccgacgccgtgctgcagaagccccagccccagctgtacagacccatcgaggagaccccctgccacttcatcagcagcctggacgagctggtggagctgaacgagaagctgctgaactgccaggagttcgccgtggacctggagcaccacagctacagaagcttcctgggcctgacctgcctgatgcagatcagcaccagaaccgaggacttcatcatcgacaccctggagctgagaagcgacatgtacatcctgaacgagagcctgaccgaccccgccatcgtgaaggtgttccacggcgccgacagcgacatcgagtggctgcagaaggacttcggcctgtacgtggtgaacatgttcgacacccaccaggccgccagactgctgaacctgggcagacacagcctggaccacctgctgaagctgtactgcaacgtggacagcaacaagcagtaccagctggccgactggagaatcagacccctgcccgaggagatgctgagctacgccagagacgacacccactacctgctgtacatctacgacaagatgagactggagatgtgggagagaggcaacggccagcccgtgcagctgcaggtggtgtggcagagaagcagagacatctgcctgaagaagttcatcaagcccatcttcaccgacgagagctacctggagctgtacagaaagcagaagaagcacctgaacacccagcagctgaccgccttccagctgctgttcgcctggagagacaagaccgccagaagagaggacgagagctacggctacgtgctgcccaaccacatgatgctgaagatcgccgaggagctgcccaaggagccccagggcatcatcgcctgctgcaaccccgtgccccccctggtgagacagcagatcaacgagatgcacctgctgatccagcaggccagagagatgcccctgctgaagagcgaggtggccgccggcgtgaagaagagcggccccctgcccagcgccgagagactggagaacgtgctgttcggcccccacgactgcagccacgccccccccgacggctaccccatcatccccaccagcggcagcgtgcccgtgcagaagcaggccagcctgttccccgacgagaaggaggacaacctgctgggcaccacctgcctgatcgccaccgccgtgatcaccctgttcaacgagcccagcgccgaggacagcaagaagggccccctgaccgtggcccagaagaaggcccagaacatcatggagagcttcgagaaccccttcagaatgttcctgcccagcctgggccacagagcccccgtgagccaggccgccaagttcgaccccagcaccaagatctacgagatcagcaacagatggaagctggcccaggtgcaggtgcagaaggacagcaaggaggccgtgaagaagaaggccgccgagcagaccgccgccagagagcaggccaaggaggcctgcaaggccgccgccgagcaggccatcagcgtgagacagcaggtggtgctggagaacgccgccaagaagagagagagagccaccagcgaccccagaaccaccgagcagaagcaggagaagaagagactgaagatcagcaagaagcccaaggaccccgagccccccgagaaggagttcaccccctacgactacagccagagcgacttcaaggccttcgccggcaacagcaagagcaaggtgagcagccagttcgaccccaacaagcagacccccagcggcaagaagtgcatcgccgccaagaagatcaagcagagcgtgggcaacaagagcatgagcttccccaccggcaagagcgacagaggcttcagatacaactggccccagagatag

SEQ ID NO: 81037 - DNA, 2040 bp, synthetic construct
  misc_feature 1..2040: note = Description of Artificial Sequence: Synthetic coding sequence
  source 1..2040: mol_type = other DNA
atggccccccccagcaccagagagcccagagtgctgagcgccaccagcgccaccaagagcgacggcgagatggtgctgcccggcttccccgacgccgacagcttcgtgaagttcgccctgggcagcgtggtggccgtgaccaaggccagcggcggcctgccccagttcggcgacgagtacgacttctacagaagcttccccggcttccaggccttctgcgagacccagggcgacagactgctgcagtgcatgagcagagtgatgcagtaccacggctgcagaagcaacatcaaggacagaagcaaggtgaccgagctggaggacaagttcgacctgctggtggacgccaacgacgtgatcctggagagagtgggcatcctgctggacgaggccagcggcgtgaacaagaaccagcagcccgtgctgcccgccggcctgcaggtgcccaagaccgtggtgagcagctggaacagaaaggccgccgagtacggcaagaaggccaagagcgagaccttcagactgctgcacgccaagaacatcatcagaccccagctgaagttcagagagaagatcgacaacagcaacacccccttcctgcccaagatcttcatcaagcccaacgcccagaagcccctgccccaggccctgagcaaggagagaagagagagaccccaggacagacccgaggacctggacgtgccccccgccctggccgacttcatccaccagcagagaacccagcaggtggagcaggacatgttcgcccacccctaccagtacgagctgaaccacttcacccccgccgacgccgtgctgcagaagccccagccccagctgtacagacccatcgaggagaccccctgccacttcatcagcagcctggacgagctggtggagctgaacgagaagctgctgaactgccaggagttcgccgtggacctggagcaccacagctacagaagcttcctgggcctgacctgcctgatgcagatcagcaccagaaccgaggacttcatcatcgacaccctggagctgagaagcgacatgtacatcctgaacgagagcctgaccgaccccgccatcgtgaaggtgttccacggcgccgacagcgacatcgagtggctgcagaaggacttcggcctgtacgtggtgaacatgttcgacacccaccaggccgccagactgctgaacctgggcagacacagcctggaccacctgctgaagctgtactgcaacgtggacagcaacaagcagtaccagctggccgactggagaatcagacccctgcccgaggagatgctgagctacgccagagacgacacccactacctgctgtacatctacgacaagatgagactggagatgtgggagagaggcaacggccagcccgtgcagctgcaggtggtgtggcagagaagcagagacatctgcctgaagaagttcatcaagcccatcttcaccgacgagagctacctggagctgtacagaaagcagaagaagcacctgaacacccagcagctgaccgccttccagctgctgttcgcctggagagacaagaccgccagaagagaggacgagagctacggctacgtgctgcccaaccacatgatgctgaagatcgccgaggagctgcccaaggagccccagggcatcatcgcctgctgcaaccccgtgccccccctggtgagacagcagatcaacgagatgcacctgctgatccagcaggccagagagatgcccctgctgaagagcgaggtggccgccggcgtgaagaagagcggccccctgcccagcgccgaggtggagtgcagaatctgcttcctgccccaggagggcaagagacaggtgaccgccagcgccagcacccccctgaccgaggcctgcgccgacagctggcagaaggccaccgccggcctgcacgtgctgcacgccagcctgctggtgagcttcaacgccgagatcggcgagtgcagcctgtggaccagcagactgctgccctgccccagcggctggctgagcaaccaccccaaccagtggtag

SEQ ID NO: 81038 - DNA, 747 bp, synthetic construct
  misc_feature 1..747: note = Description of Artificial Sequence: Synthetic coding sequence
  source 1..747: mol_type = other DNA
atggccgccggcttcaagaccgtggagcccctggagtactacagaagattcctgaaggagaactgcagacccgacggcagagagctgggcgagttcagaaccaccaccgtgaacatcggcagcatcagcaccgccgacggcagcgccctggtgaagctgggcaacaccaccgtgatctgcggcgtgaaggccttcagaagcggcccccccggcgaggaggcccaggtggccagccagttcatcgccgacgtgatcgagaacagccagatcatccagaaggaggacctgtgcatcagccccggcaagctggtgtgggtgctgtactgcgacctgatctgcctggactacgacggcaacatcctggacgcctgcaccttcgccctgctggccgccctgaagaacgtgcagctgcccgaggtgaccatcaacgaggagaccgccctggccgaggtgaacctgaagaagaagagctacctgaacatcagaacccaccccgtggccaccagcttcgccgtgttcgacgacaccctgctgatcgtggaccccaccggcgaggaggagcacctggccaccggcaccctgaccatcgtgatggacgaggagggcaagctgtgctgcctgcacaagcccggcggcagcggcctgaccggcgccaagctgcaggactgcatgagcagagccgtgaccagacacaaggaggtgaagaagctgatggacgaggtgatcaagagcatgaagcccaagtag

SEQ ID NO: 81039 - DNA, 831 bp, synthetic construct
  misc_feature 1..831: note = Description of Artificial Sequence: Synthetic coding sequence
  source 1..831: mol_type = other DNA
atggccgccggcttcaagaccgtggagcccctggagtactacagaagattcctgaaggagaactgcagacccgacggcagagagctgggcgagttcagaaccaccaccgtgaacatcggcagcatcagcaccgccgacggcagcgccctggtgaagctgggcaacaccaccgtgatctgcggcgtgaaggccgagttcgccgcccccagcaccgacgcccccgacaagggctacgtggtgcccaacgtggacctgccccccctgtgcagcagcagattcagaagcggcccccccggcgaggaggcccaggtggccagccagttcatcgccgacgtgatcgagaacagccagatcatccagaaggaggacctgtgcatcagccccggcaagctggtgtgggtgctgtactgcgacctgatctgcctggactacgacggcaacatcctggacgcctgcaccttcgccctgctggccgccctgaagaacgtgcagctgcccgaggtgaccatcaacgaggagaccgccctggccgaggtgaacctgaagaagaagagctacctgaacatcagaacccaccccgtggccaccagcttcgccgtgttcgacgacaccctgctgatcgtggaccccaccggcgaggaggagcacctggccaccggcaccctgaccatcgtgatggacgaggagggcaagctgtgctgcctgcacaagcccggcggcagcggcctgaccggcgccaagctgcaggactgcatgagcagagccgtgaccagacacaaggaggtgaagaagctgatggacgaggtgatcaagagcatgaagcccaagtag

SEQ ID NO: 81040 - DNA, 1320 bp, synthetic construct
  misc_feature 1..1320: note = Description of Artificial Sequence: Synthetic coding sequence
  source 1..1320: mol_type = other DNA
atgaaggagacccccctgagcaactgcgagagaagattcctgctgagagccatcgaggagaagaagagactggacggcagacagacctacgactacagaaacatcagaatcagcttcggcaccgactacggctgctgcatcgtggagctgggcaagaccagagtgctgggccaggtgagctgcgagctggtgagccccaagctgaacagagccaccgagggcatcctgttcttcaacctggagctgagccagatggccgcccccgccttcgagcccggcagacagagcgacctgctggtgaagctgaacagactgatggagagatgcctgagaaacagcaagtgcatcgacaccgagagcctgtgcgtggtggccggcgagaaggtgtggcagatcagagtggacctgcacctgctgaaccacgacggcaacatcatcgacgccgccagcatcgccgccatcgtggccctgtgccacttcagaagacccgacgtgagcgtgcagggcgacgaggtgaccctgtacacccccgaggagagagaccccgtgcccctgagcatccaccacatgcccatctgcgtgagcttcgccttcttccagcagggcacctacctgctggtggaccccaacgagagagaggagagagtgatggacggcctgctggtgatcgccatgaacaagcacagagagatctgcaccatccagagcagcggcggcatcatgctgctgaaggaccaggtgctgagatgcagcaagatcgccggcgtgaaggtggccgagatcaccgagctgatcctgaaggccctggagaacgaccagaaggtgagaaaggagggcggcaagttcggcttcgccgagagcatcgccaaccagagaatcaccgccttcaagatggagaaggcccccatcgacaccagcgacgtggaggagaaggccgaggagatcatcgccgaggccgagccccccagcgaggtggtgagcacccccgtgctgtggacccccggcaccgcccagatcggcgagggcgtggagaacagctggggcgacctggaggacagcgagaaggaggacgacgagggcggcggcgaccaggccatcatcctggacggcatcaagatggacaccggcgtggaggtgagcgacatcggcagccaggacgcccccatcatcctgagcgacagcgaggaggaggagatgatcatcctggagcccgacaagaaccccaagaagatcagaacccagaccaccagcgccaagcaggagaaggcccccagcaagaagcccgtgaagagaagaaagaagaagagagccgccaactag

SEQ ID NO: 81041 - DNA, 1371 bp, synthetic construct
  misc_feature 1..1371: note = Description of Artificial Sequence: Synthetic coding sequence
  source 1..1371: mol_type = other DNA
atgaaggagacccccctgagcaactgcgagagaagattcctgctgagagccatcgaggagaagaagagactggacggcagacagacctacgactacagaaacatcagaatcagcttcggcaccgactacggctgctgcatcgtggagctgggcaagaccagagtgctgggccaggtgagctgcgagctggtgagccccaagctgaacagagccaccgagggcatcctgttcttcaacctggagctgagccagatggccgcccccgccttcgagcccggcagacagagcgacctgctggtgaagctgaacagactgatggagagatgcctgagaaacagcaagtgcatcgacaccgagagcctgtgcgtggtggccggcgagaaggtgtggcagatcagagtggacctgcacctgctgaaccacgacggcaacatcatcgacgccgccagcatcgccgccatcgtggccctgtgccacttcagaagacccgacgtgagcgtgcagggcgacgaggtgaccctgtacacccccgaggagagagaccccgtgcccctgagcatccaccacatgcccatctgcgtgagcttcgccttcttccagcagggcacctacctgctggtggaccccaacgagagagaggagagagtgatggacggcctgctggtgatcgccatgaacaagcacagagagatctgcaccatccagagcagcggcggcatcatgctgctgaaggaccaggtgctgagatgcagcaagatcgccggcgtgaaggtggccgagatcaccgagctgatcctgaaggccctggagaacgaccagaaggtgagaaaggagggcggcaagttcggcttcgccgagagcatcgccaaccagagaatcaccgccttcaagatggagaaggcccccatcgacaccagcgacgtggaggagaaggccgaggagatcatcgccgaggccgagccccccagcgaggtggtgagcacccccgtgctgtggacccccggcaccgcccagatcggcgagggcgtggagaacagctggggcgacctggaggacagcgagaaggaggacgacgagggcggcggcgaccaggccatcatcctggacggcatcaagatggacaccggcgtggaggtgagcgacatcggcagccaggagctgggcttccaccacgtgggccagaccggcctggagttcctgaccagcgacgcccccatcatcctgagcgacagcgaggaggaggagatgatcatcctggagcccgacaagaaccccaagaagatcagaacccagaccaccagcgccaagcaggagaaggcccccagcaagaagcccgtgaagagaagaaagaagaagagagccgccaactag

SEQ ID NO: 81042 - DNA, 2031 bp, synthetic construct
  misc_feature 1..2031: note = Description of Artificial Sequence: Synthetic coding sequence
  source 1..2031: mol_type = other DNA
atgcagagctggagaagaagaaagagcctgtggctggccctgagcgccagctggctgctgctggtgctgctgggcggcttcagcctgctgagactggccctgccccccagacccagacccggcgccagccagggctggcccagatggctggacgccgagctgctgcagagcttcagccagcccggcgagctgcccgaggacgccgtgagccccccccaggccccccacggcggcagctgcaactgggagagctgcttcgacaccagcaagtgcagaggcgacggcctgaaggtgttcgtgtaccccgccgtgggcaccatcagcgagacccacagaagaatcctggccagcatcgagggcagcagattctacaccttcagccccgccggcgcctgcctgctgctgctgctgagcctggacgcccagaccggcgagtgcagcagcatgcccctgcagtggaacagaggcagaaaccacctggtgctgagactgcaccccgccccctgccccagaaccttccagctgggccaggccatggtggccgaggccagccccaccgtggacagcttcagacccggcttcgacgtggccctgcccttcctgcccgaggcccaccccctgagaggcggcgcccccggccagctgagacagcacagcccccagcccggcgtggccctgctggccctggaggaggagagaggcggctggagaaccgccgacaccggcagcagcgcctgcccctgggacggcagatgcgagcaggaccccggccccggccagacccagagacaggagaccctgcccaacgccaccttctgcctgatcagcggccacagacccgaggccgccagcagattcctgcaggccctgcaggccggctgcatccccgtgctgctgagccccagatgggagctgcccttcagcgaggtgatcgactggaccaaggccgccatcgtggccgacgagagactgcccctgcaggtgctggccgccctgcaggagatgagccccgccagagtgctggccctgagacagcagacccagttcctgtgggacgcctacttcagcagcgtggagaaggtgatccacaccaccctggaggtgatccaggacagaatcttcggcaccagcgcccaccccagcctgctgtggaacagcccccccggcgccctgctggccctgagcaccttcagcaccagcccccaggacttccccttctactacctgcagcagggcagcagacccgagggcagattcagcgccctgatctgggtgggcccccccggccagccccccctgaagctgatccaggccgtggccggcagccagcactgcgcccagatcctggtgctgtggagcaacgagagacccctgcccagcagatggcccgagaccgccgtgcccctgaccgtgatcgacggccacagaaaggtgagcgacagattctacccctacagcaccatcagaaccgacgccatcctgagcctggacgccagaagcagcctgagcaccagcgaggtggacttcgccttcctggtgtggcagagcttccccgagagaatggtgggcttcctgaccagcagccacttctgggacgaggcccacggcggctggggctacaccgccgagagaaccaacgagttcagcatggtgctgaccaccgccgccttctaccacagatactaccacaccctgttcacccacagcctgcccaaggccctgagaaccctggccgacgaggcccccacctgcgtggacgtgctgatgaacttcatcgtggccgccgtgaccaagctgccccccatcaaggtgccctacggcaagcagagacaggaggccgcccccctggcccccggcggccccggccccagacccaagccccccgcccccgcccccgactgcatcaaccagatcgccgccgccttcggccacatgcccctgctgagcagcagactgagactggaccccgtgctgttcaaggaccccgtgagcgtgcagagaaagaagtacagaagcctggagaagccctag

SEQ ID NO: 81043 - DNA, 993 bp, synthetic construct
  misc_feature 1..993: note = Description of Artificial Sequence: Synthetic coding sequence
  source 1..993: mol_type = other DNA
atgagatgctgccacatctgcaagctgcccggcagagtgatgggcatcagagtgctgagactgagcctggtggtgatcctggtgctgctgctggtggccggcgccctgaccgccctgctgcccagcgtgaaggaggacaagatgctgatgctgagaagagagatcaagagccagggcaagagcaccatggacagcttcaccctgatcatgcagacctacaacagaaccgacctgctgctgaagctgctgaaccactaccaggccgtgcccaacctgcacaaggtgatcgtggtgtggaacaacatcggcgagaaggcccccgacgagctgtggaacagcctgggcccccaccccatccccgtgatcttcaagcagcagaccgccaacagaatgagaaacagactgcaggtgttccccgagctggagaccaacgccgtgctgatggtggacgacgacaccctgatcagcacccccgacctggtgttcgccttcagcgtgtggcagcagttccccgaccagatcgtgggcttcgtgcccagaaagcacgtgagcaccagcagcggcatctacagctacggcagcttcgagatgcaggcccccggcagcggcaacggcgaccagtacagcatggtgctgatcggcgccagcttcttcaacagcaagtacctggagctgttccagagacagcccgccgccgtgcacgccctgatcgacgacacccagaactgcgacgacatcgccatgaacttcatcatcgccaagcacatcggcaagaccagcggcatcttcgtgaagcccgtgaacatggacaacctggagaaggagaccaacagcggctacagcggcatgtggcacagagccgagcacgccctgcagagaagctactgcatcaacaagctggtgaacatctacgacagcatgcccctgagatacagcaacatcatgatcagccagttcggcttcccctacgccaactacaagagaaagatctag

SEQ ID NO: 81044 - DNA, 993 bp, synthetic construct; identical to SEQ ID NO: 81043
  misc_feature 1..993: note = Description of Artificial Sequence: Synthetic coding sequence
  source 1..993: mol_type = other DNA

SEQ ID NO: 81045 - DNA, 354 bp, synthetic construct
  misc_feature 1..354: note = Description of Artificial Sequence: Synthetic coding sequence
  source 1..354: mol_type = other DNA
atgggcatcagagtgctgagactgagcctggtggtgatcctggtgctgctgctggtggccggcgccctgaccgccctgctgcccagcgtgaaggaggacaagatgctgatgctgagaagagagatcaagagccagggcaagagcaccatggacagcttcaccctgatcatgcagacctacaacagaaccgacctgctgctgaagctgctgaaccactaccaggccgtgcccaacctgcacaaggtgatcgtggtgtggaacaacatcggcgagaaggcccccgacgagctgtggaacagcctgggcccccaccccatccccgtgatcttcaagcagcagaccgccaacagatag

SEQ ID NO: 81046 - DNA, 801 bp, synthetic construct
  misc_feature 1..801: note = Description of Artificial Sequence: Synthetic coding sequence
  source 1..801: mol_type = other DNA
atgagaacctggaacagcggcggcaccaagtgctgccacatctgcaagctgcccggcagagtgatgggcatcagagtgctgagactgagcctggtggtgatcctggtgctgctgctggtggccggcgccctgaccgccctgctgcccagcgtgaaggaggacaagatgctgatgctgagaagagagatcaagagccagggcaagagcaccatggacagcttcaccctgatcatgcagacctacaacagaaccgacctgctgctgaagctgctgaaccactaccaggccgtgcccaacctgcacaaggtgatcgtggtgtggaacaacatcggcgagaaggcccccgacgagctgtggaacagcctgggcccccaccccatccccgtgatcttcaagcagcagaccgccaacagaatgagaaacagactgcaggtgttccccgagctggagaccaacgccgtgctgatggtggacgacgacaccctgatcagcacccccgacctggtgttcgccttcagcgtgtggcagcagttccccgaccagatcgtgggcttcgtgcccagaaagcacgtgagcaccagcagcggcatctacagctacggcagcttcgagatgcaggcccccggcagcggcaacggcgaccagtacagcatggtgctgatcggcgccagcttcttcaacagcaagtacctggagctgttccagagacagcccgccgccgtgcacgccctgatcgacgacacccagaactgcgacgacatcgccatgaacttcatcatcgccaagcacatcggcaagtag

SEQ ID NO: 81047 - DNA, 954 bp, synthetic construct
  misc_feature 1..954: note = Description of Artificial Sequence: Synthetic coding sequence
  source 1..954: mol_type = other DNA
atgggcatcagagtgctgagactgagcctggtggtgatcctggtgctgctgctggtggccggcgccctgaccgccctgctgcccagcgtgaaggaggacaagatgctgatgctgagaagagagatcaagagccagggcaagagcaccatggacagcttcaccctgatcatgcagacctacaacagaaccgacctgctgctgaagctgctgaaccactaccaggccgtgcccaacctgcacaaggtgatcgtggtgtggaacaacatcggcgagaaggcccccgacgagctgtggaacagcctgggcccccaccccatccccgtgatcttcaagcagcagaccgccaacagaatgagaaacagactgcaggtgttccccgagctggagaccaacgccgtgctgatggtggacgacgacaccctgatcagcacccccgacctggtgttcgccttcagcgtgtggcagcagttccccgaccagatcgtgggcttcgtgcccagaaagcacgtgagcaccagcagcggcatctacagctacggcagcttcgagatgcaggcccccggcagcggcaacggcgaccagtacagcatggtgctgatcggcgccagcttcttcaacagcaagtacctggagctgttccagagacagcccgccgccgtgcacgccctgatcgacgacacccagaactgcgacgacatcgccatgaacttcatcatcgccaagcacatcggcaagaccagcggcatcttcgtgaagcccgtgaacatggacaacctggagaaggagaccaacagcggctacagcggcatgtggcacagagccgagcacgccctgcagagaagctactgcatcaacaagctggtgaacatctacgacagcatgcccctgagatacagcaacatcatgatcagccagttcggcttcccctacgccaactacaagagaaagatctag

SEQ ID NO: 81048 - DNA, 519 bp, synthetic construct
  misc_feature 1..519: note = Description of Artificial Sequence: Synthetic coding sequence
  source 1..519: mol_type = other DNA
atgagcgtgcccggccccagcagccccgacggcgccctgaccagacccccctactgcctggaggccggcgagcccacccccggcctgagcgacaccagccccgacgagggcctgatcgaggacctgaccatcgaggacaaggccgtggagcagctggccgagggcctgctgagccactacctgcccgacctgcagagaagcaagcaggccctgcaggagctgacccagaaccaggtggtgctgctggacaccctggagcaggagatcagcaagttcaaggagtgccacagcatgctggacatcaacgccctgttcgccgaggccaagcactaccacgccaagctggtgaacatcagaaaggagatgctgatgctgcacgagaagaccagcaagctgaagaagagagccctgaagctgcagcagaagagacagaaggaggagctggagagagagcagcagagagagaaggagttcgagagagagaagcagctgaccgccagacccgccaagagaatgtag

SEQ ID NO: 81049 - DNA, 1608 bp, synthetic construct
  misc_feature 1..1608: note = Description of Artificial Sequence: Synthetic coding sequence
  source 1..1608: mol_type = other DNA
atgctgcacaagagcgaggagggcagagtgctggtggagttcacctgcaagaaccagcccaagcccagcctgcccaccgagtgggccctgtgcggcgagagagaggacagactggagctgctgaagctgagcaccttcgccctgatcatcacccccggcgaccccagactggtgatcagcagcggctgcgccaccagactgttcgaggccctggaggtgggcgccgtgcccgtggtgctgggcgagcaggtgcagctgccctaccaggacatgctgcagtggaacgaggccgccctggtggtgcccaagcccagagtgaccgaggtgcacttcctgctgagaagcctgagcgacagcgacctgctggccatgagaagacagggcagattcctgtgggagacctacttcagcaccgccgacagcatcttcaacaccgtgctggccatgatcagaaccagaatccagatccccgccgcccccatcagagaggaggccgccgccgagatcccccacagaagcggcaaggccgccggcaccgaccccaacatggccgacaacggcgacctggacctgggccccgtggagaccgagcccccctacgccagccccagatacctgagaaacttcaccctgaccgtgaccgacttctacagaagctggaactgcgcccccggccccttccacctgttcccccacacccccttcgaccccgtgctgcccagcgaggccaagttcctgggcagcggcaccggcttcagacccatcggcggcggcgccggcggcagcggcaaggagttccaggccgccctgggcggcaacgtgcccagagagcagttcaccgtggtgatgctgacctacgagagagaggaggtgctgatgaacagcctggagagactgaacggcctgccctacctgaacaaggtggtggtggtgtggaacagccccaagctgcccagcgaggacctgctgtggcccgacatcggcgtgcccatcatggtggtgagaaccgagaagaacagcctgaacaacagattcctgccctggaacgagatcgagaccgaggccatcctgagcatcgacgacgacgcccacctgagacacgacgagatcatgttcggcttcagagtgtggagagaggccagagacagaatcgtgggcttccccggcagataccacgcctgggacatcccccaccagagctggctgtacaacagcaactacagctgcgagctgagcatggtgctgaccggcgccgccttcttccacaagtactacgcctacctgtacagctacgtgatgccccaggccatcagagacatggtggacgagtacatcaactgcgaggacatcgccatgaacttcctggtgagccacatcaccagaaagccccccatcaaggtgaccagcagatggaccttcagatgccccggctgcccccaggccctgagccacgacgacagccacttccacgagagacacaagtgcatcaacttcttcgtgaaggtgtacggctacatgcccctgctgtacacccagttcagagtggacagcgtgctgttcaagaccagactgccccacgacaagaccaagtgcttcaagttcatctag

SEQ ID NO: 81050 - DNA, 3216 bp, synthetic construct
  misc_feature 1..3216: note = Description of Artificial Sequence: Synthetic coding sequence
  source 1..3216: mol_type = other DNA
atgcccgccatcatgaccatgctggccgaccacgccgccagacagctgctggacttcagccagaagctggacatcaacctgctggacaacgtggtgaactgcctgtaccacggcgagggcgcccagcagagaatggcccaggaggtgctgacccacctgaaggagcaccccgacgcctggaccagagtggacaccatcctggagttcagccagaacatgaacaccaagtactacggcctgcagatcctggagaacgtgatcaagaccagatggaagatcctgcccagaaaccagtgcgagggcatcaagaagtacgtggtgggcctgatcatcaagaccagcagcgaccccacctgcgtggagaaggagaaggtgtacatcggcaagctgaacatgatcctggtgcagatcctgaagcaggagtggcccaagcactggcccaccttcatcagcgacatcgtgggcgccagcagaaccagcgagagcctgtgccagaacaacatggtgatcctgaagctgctgagcgaggaggtgttcgacttcagcagcggccagatcacccaggtgaagagcaagcacctgaaggacagcatgtgcaacgagttcagccagatcttccagctgtgccagttcgtgatggagaacagccagaacgcccccctggtgcacgccaccctggagaccctgctgagattcctgaactggatccccctgggctacatcttcgagaccaagctgatcagcaccctgatctacaagttcctgaacgtgcccatgttcagaaacgtgagcctgaagtgcctgaccgagatcgccggcgtgagcgtgagccagtacgaggagcagttcgtgaccctgttcaccctgaccatgatgcagctgaagcagatgctgcccctgaacaccaacatcagactggcctacagcaacggcaaggacgacgagcagaacttcatccagaacctgagcctgttcctgtgcaccttcctgaaggagcacgaccagctgatcgagaagagactgaacctgagagagaccctgatggaggccctgcactacatgctgctggtgagcgaggtggaggagaccgagatcttcaagatctgcctggagtactggaaccacctggccgccgagctgtacagagagagccccttcagcaccagcgccagccccctgctgagcggcagccagcacttcgacgtgccccccagaagacagctgtacctgcccatgctgttcaaggtgagactgctgatggtgagcagaatggccaagcccgaggaggtgctggtggtggagaacgaccagggcgaggtggtgagagagttcatgaaggacaccgacagcatcaacctgtacaagaacatgagagagaccctggtgtacctgacccacctggactacgtggacaccgagagaatcatgaccgagaagctgcacaaccaggtgaacggcaccgagtggagctggaagaacctgaacaccctgtgctgggccatcggcagcatcagcggcgccatgcacgaggaggacgagaagagattcctggtgaccgtgatcaaggacctgctgggcctgtgcgagcagaagagaggcaaggacaacaaggccatcatcgccagcaacatcatgtacatcgtgggccagtaccccagattcctgagagcccactggaagttcctgaagaccgtggtgaacaagctgttcgagttcatgcacgagacccacgacggcgtgcaggacatggcctgcgacaccttcatcaagatcgcccagaagtgcagaagacacttcgtgcaggtgcaggtgggcgaggtgatgcccttcatcgacgagatcctgaacaacatcaacaccatcatctgcgacctgcagccccagcaggtgcacaccttctacgaggccgtgggctacatgatcggcgcccagaccgaccagaccgtgcaggagcacctgatcgagaagtacatgctgctgcccaaccaggtgtgggacagcatcatccagcaggccaccaagaacgtggacatcctgaaggaccccgagaccgtgaagcagctgggcagcatcctgaagaccaacgtgagagcctgcaaggccgtgggccaccccttcgtgatccagctgggcagaatctacctggacatgctgaacgtgtacaagtgcctgagcgagaacatcagcgccgccatccaggccaacggcgagatggtgaccaagcagcccctgatcagaagcatgagaaccgtgaagagagagaccctgaagctgatcagcggctgggtgagcagaagcaacgacccccagatggtggccgagaacttcgtgccccccctgctggacgccgtgctgatcgactaccagagaaacgtgcccgccgccagagagcccgaggtgctgagcaccatggccatcatcgtgaacaagctgggcggccacatcaccgccgagatcccccagatcttcgacgccgtgttcgagtgcaccctgaacatgatcaacaaggacttcgaggagtaccccgagcacagaaccaacttcttcctgctgctgcaggccgtgaacagccactgcttccccgccttcctggccatcccccccacccagttcaagctggtgctggacagcatcatctgggccttcaagcacaccatgagaaacgtggccgacaccggcctgcagatcctgttcaccctgctgcagaacgtggcccaggaggaggccgccgcccagagcttctaccagacctacttctgcgacatcctgcagcacatcttcagcgtggtgaccgacaccagccacaccgccggcctgaccatgcacgccagcatcctggcctacatgttcaacctggtggaggagggcaagatcagcaccagcctgaaccccggcaaccccgtgaacaaccagatcttcctgcaggagtacgtggccaacctgctgaagagcgccttcccccacctgcaggacgcccaggtgaagctgttcgtgaccggcctgttcagcctgaaccaggacatccccgccttcaaggagcacctgagagacttcctggtgcagatcaaggagttcgccggcgaggacaccagcgacctgttcctggaggagagagagatcgccctgagacaggccgacgaggagaagcacaagagacagatgagcgtgcccggcatcttcaacccccacgagatccccgaggagatgtgcgactag

SEQ ID NO: 81051 - DNA, 3216 bp, synthetic construct; identical to SEQ ID NO: 81050
  misc_feature 1..3216: note = Description of Artificial Sequence: Synthetic coding sequence
  source 1..3216: mol_type = other DNA

SEQ ID NO: 81052 - DNA, 3216 bp, synthetic construct; identical to SEQ ID NO: 81050
  misc_feature 1..3216: note = Description of Artificial Sequence: Synthetic coding sequence
  source 1..3216: mol_type = other DNA

SEQ ID NO: 81053 - DNA, 303 bp, synthetic construct
  misc_feature 1..303: note = Description of Artificial Sequence: Synthetic coding sequence
  source 1..303: mol_type = other DNA
atgcccgccatcatgaccatgctggccgaccacgccgccagacagctgctggacttcagccagaagctggacatcaacctgctggacaacgtggtgaactgcctgtaccacggcgagggcgcccagcagagaatggcccaggaggtgctgacccacctgaaggagcaccccgacgcctggaccagagtggacaccatcctggagttcagccagaacatgaacaccaagtactacggcctgcagatcctggagaacgtgatcaagaccagatggaagatcctgcccagaaaccagtgcgagtag

SEQ ID NO: 81054 - DNA, 288 bp, synthetic construct
  misc_feature 1..288: note = Description of Artificial Sequence: Synthetic coding sequence
  source 1..288: mol_type = other DNA
atgcccgccatcatgaccatgctggccgaccacgccgccagacagctgctggacttcagccagaagctggacatcaacctgctggacaacgtggtgaactgcctgtaccacggcgagggcgcccagcagagaatggcccaggaggtgctgacccacctgaaggagcaccccgacgcctggaccagagtggacaccatcctggagttcagccagaacatgaacaccaagtactacggcctgcagatcctggagaacgtgatcaagaccagatggaagatcctgccctag

SEQ ID NO: 81055 - DNA, 180 bp, synthetic construct
  misc_feature 1..180: note = Description of Artificial Sequence: Synthetic coding sequence
  source 1..180: mol_type = other DNA
atgcccgccatcatgaccatgctggccgaccacgccgccagacagctgctggacttcagccagaagctggacatcaacctgctggacaacgtggtgaactgcctgtaccacggcgagggcgcccagcagagaatggcccaggaggtgctgacccacctgaaggagcaccccgacgcctag

SEQ ID NO: 81056 - DNA, 399 bp, synthetic construct
  misc_feature 1..399: note = Description of Artificial Sequence: Synthetic coding sequence
  source 1..399: mol_type = other DNA
atgcccgccatcatgaccatgctggccgaccacgccgccagacagctgctggacttcagccagaagctggacatcaacctgctggacaacgtggtgaactgcctgtaccacggcgagggcgcccagcagagaatggcccaggaggtgctgacccacctgaaggagcaccccgacgcctggaccagagtggacaccatcctggagttcagccagaacatgaacaccaagtactacggcctgcagatcctggagaacgtgatcaagaccagatggaagatcctgcccagaaaccagtgcgagggcatcaagaagtacgtggtgggcctgatcatcaagaccagcagcgaccccacctgcgtggagaaggagaaggtgtacatcggcaagctgaacatgtag

SEQ ID NO: 81057 - DNA, 189 bp, synthetic construct
  misc_feature 1..189: note = Description of Artificial Sequence: Synthetic coding sequence
  source 1..189: mol_type = other DNA
atgcccgccatcatgaccatgctggccgaccacgccgccagacagctgctggacttcagccagaagctggacatcaacctgctggacaacgtggtgaactgcctgtaccacggcgagggcgcccagcagagaatggcccaggaggtgctgacccacctgaaggagcaccccgacgcctggaccagatag

SEQ ID NO: 81058 - DNA, 540 bp, synthetic construct
  misc_feature 1..540: note = Description of Artificial Sequence: Synthetic coding sequence
  source 1..540: mol_type = other DNA
atgcccgccatcatgaccatgctggccgaccacgccgccagacagctgctggacttcagccagaagctggacatcaacctgctggacaacgtggtgaactgcctgtaccacggcgagggcgcccagcagagaatggcccaggaggtgctgacccacctgaaggagcaccccgacgcctggaccagagtggacaccatcctggagttcagccagaacatgaacaccaagtactacggcctgcagatcctggagaacgtgatcaagaccagatggaagatcctgcccagaaaccagtgcgagggcatcaagaagtacgtggtgggcctgatcatcaagaccagcagcgaccccacctgcgtggagaaggagaaggtgtacatcggcaagctgaacatgatcctggtgcagatcctgaagcaggagtggcccaagcactggcccaccttcatcagcgacatcgtgggcgccagcagaaccagcgagagcctgtgccagaacaacatggtgatcctgaagctgctgagcgaggaggtgttctag

SEQ ID NO: 81059 - DNA, 285 bp, synthetic construct
  misc_feature 1..285: note = Description of Artificial Sequence: Synthetic coding sequence
  source 1..285: mol_type = other DNA
atgcccgccatcatgaccatgctggccgaccacgccgccagacagctgctggacttcagccagaagctggacatcaacctgctggacaacgtggtgaactgcctgtaccacggcgagggcgcccagcagagaatggcccaggaggtgctgacccacctgaaggagcaccccgacgcctggaccagagtggacaccatcctggagttcagccagaacatgaacaccaagtactacggcctgcagatcctggagaacgtgatcaagaccagatggaagatcctgtag

SEQ ID NO: 81060 - DNA, 3615 bp, synthetic construct
  misc_feature 1..3615: note = Description of Artificial Sequence: Synthetic coding sequence
  source 1..3615: mol_type = other DNA
atggccatggaccaggtgaacgccctgtgcgagcagctggtgaaggccgtgaccgtgatgatggaccccaacagcacccagagatacagactggaggccctgaagttctgcgaggagttcaaggagaagtgccccatctgcgtgccctgcggcctgagactggccgagaagacccaggtggccatcgtgagacacttcggcctgcagatcctggagcacgtggtgaagttcagatggaacggcatgagcagactggagaaggtgtacctgaagaacagcgtgatggagctgatcgccaacggcaccctgaacatcctggaggaggagaaccacatcaaggacgccctgagcagaatcgtggtggagatgatcaagagagagtggccccagcactggcccgacatgctgatcgagctggacaccctgagcaagcagggcgagacccagaccgagctggtgatgttcatcctgctgagactggccgaggacgtggtgaccttccagaccctgcccccccagagaagaagagacatccagcagaccctgacccagaacatggagagaatcttcagcttcctgctgaacaccctgcaggagaacgtgaacaagtaccagcaggtgaagaccgacaccagccaggagagcaaggcccaggccaactgcagagtgggcgtggccgccctgaacaccctggccggctacatcgactgggtgagcatgagccacatcaccgccgagaactgcaagctgctggagatcctgtgcctgctgctgaacgagcaggagctgcagctgggcgccgccgagtgcctgctgatcgccgtgagcagaaagggcaagctggaggacagaaagcccctgatggtgctgttcggcgacgtggccatgcactacatcctgagcgccgcccagaccgccgacggcggcggcctggtggagaagcactacgtgttcctgaagagactgtgccaggtgctgtgcgccctgggcaaccagctgtgcgccctgctgggcgccgacagcgacgtggagacccccagcaacttcggcaagtacctggagagcttcctggccttcaccacccaccccagccagttcctgagaagcagcacccagatgacctggggcgccctgttcagacacgagatcctgagcagagaccccctgctgctggccatcatccccaagtacctgagagccagcatgaccaacctggtgaagatgggcttccccagcaagaccgacagccccagctgcgagtacagcagattcgacttcgacagcgacgaggacttcaacgccttcttcaacagcagcagagcccagcagggcgaggtgatgagactggcctgcagactggaccccaagaccagcttccagatggccggcgagtggctgaagtaccagctgagcaccttcctggacgccggcagcgtgaacagctgcagcgccgtgggcaccggcgagggcagcctgtgcagcgtgttcagccccagcttcgtgcagtgggaggccatgaccctgttcctggagagcgtgatcacccagatgttcagaaccctgaacagagaggagatccccgtgaacgacggcatcgagctgctgcagatggtgctgaacttcgacaccaaggaccccctgatcctgagctgcgtgctgaccaacgtgagcgccctgttccccttcgtgacctacagacccgagttcctgccccaggtgttcagcaagctgttcagcagcgtgaccttcgagaccgtggaggagagcaaggcccccagaaccagagccgtgagaaacgtgagaagacacgcctgcagcagcatcatcaagatgtgcagagactacccccagctggtgctgcccaacttcgacatgctgtacaaccacgtgaagcagctgctgagcaacgagctgctgctgacccagatggagaagtgcgccctgatggaggccctggtgctgatcagcaaccagttcaagaactacgagagacagaaggtgttcctggaggagctgatggcccccgtggccagcatctggctgagccaggacatgcacagagtgctgagcgacgtggacgccttcatcgcctacgtgggcaccgaccagaagagctgcgaccccggcctggaggacccctgcggcctgaacagagccagaatgagcttctgcgtgtacagcatcctgggcgtggtgaagagaacctgctggcccaccgacctggaggaggccaaggccggcggcttcgtggtgggctacaccagcagcggcaaccccatcttcagaaacccctgcaccgagcagatcctgaagctgctggacaacctgctggccctgatcagaacccacaacaccctgtacgcccccgagatgctggccaagatggccgagcccttcaccaaggccctggacatgctggacgccgagaagagcgccatcctgggcctgccccagcccctgctggagctgaacgacagccccgtgttcaagaccgtgctggagagaatgcagagattcttcagcaccctgtacgagaactgcttccacatcctgggcaaggccggccccagcatgcagcaggacttctacaccgtggaggacctggccacccagctgctgagcagcgccttcgtgaacctgaacaacatccccgactacagactgagacccatgctgagagtgttcgtgaagcccctggtgctgttctgcccccccgagcactacgaggccctggtgagccccatcctgggccccctgttcacctacctgcacatgagactgagccagaagtggcaggtgatcaaccagagaagcctgctgtgcggcgaggacgaggccgccgacgagaaccccgagagccaggagatgctggaggagcagctggtgagaatgctgaccagagaggtgatggacctgatcaccgtgtgctgcgtgagcaagaagggcgccgaccacagcagcgccccccccgccgacggcgacgacgaggagatgatggccaccgaggtgacccccagcgccatggccgagctgaccgacctgggcaagtgcctgatgaagcacgaggacgtgtgcaccgccctgctgatcaccgccttcaacagcctggcctggaaggacaccctgagctgccagagaaccaccagccagctgtgctggcccctgctgaagcaggtgctgagcggcaccctgctggccgacgccgtgacctggctgttcaccagcgtgctgaagggcctgcagatgcacggccagcacgacggctgcatggccagcctggtgcacctggccttccagatctacgaggccctgagacccagatacctggagatcagagccgtgatggagcagatccccgagatccagaaggacagcctggaccagttcgactgcaagctgctgaaccccagcctgcagaaggtggccgacaagagaagaaaggaccagttcaagagactgatcgccggctgcatcggcaagcccctgggcgagcagttcagaaaggaggtgcacatcaagaacctgcccagcctgttcaagaagaccaagcccatgctggagaccgaggtgctggacaacgacggcggcggcctggccaccatcttcgagccctag

SEQ ID NO: 81061 - DNA, 513 bp, synthetic construct
  misc_feature 1..513: note = Description of Artificial Sequence: Synthetic coding sequence
  source 1..513: mol_type = other DNA
atggccggcgagtggctgaagtaccagctgagcaccttcctggacgccggcagcgtgaacagctgcagcgccgtgggcaccggcgagggcagcctgtgcagcgtgttcagccccagcttcgtgcagtgggaggccatgaccctgttcctggagagcgtgatcacccagatgttcagaaccctgaacagagaggagatccccgtgaacgacggcatcgagctgctgcagatggtgctgaacttcgacaccaaggaccccctgatcctgagctgcgtgctgaccaacgtgagcgccctgttccccttcgtgacctacagacccgagttcctgccccaggtgttcagcaagctgttcagcagcgtgaccttcgagaccgtggaggagagcaagcccccccacttcccccccctgagcgcctggaaggagatccaggtgtggagctggagagagcaggccctgtgcagaaccagaagcaactacaccaaggtgagcagaaagggcgtgagagcctag

SEQ ID NO: 81062 - DNA, 2166 bp, synthetic construct
  misc_feature 1..2166: note = Description of Artificial Sequence: Synthetic coding sequence
  source 1..2166: mol_type = other DNA
atggccggcgagtggctgaagtaccagctgagcaccttcctggacgccggcagcgtgaacagctgcagcgccgtgggcaccggcgagggcagcctgtgcagcgtgttcagccccagcttcgtgcagtgggaggccatgaccctgttcctggagagcgtgatcacccagatgttcagaaccctgaacagagaggagatccccgtgaacgacggcatcgagctgctgcagatggtgctgaacttcgacaccaaggaccccctgatcctgagctgcgtgctgaccaacgtgagcgccctgttccccttcgtgacctacagacccgagttcctgccccaggtgttcagcaagctgttcagcagcgtgaccttcgagaccgtggaggagagcaaggcccccagaaccagagccgtgagaaacgtgagaagacacgcctgcagcagcatcatcaagatgtgcagagactacccccagctggtgctgcccaacttcgacatgctgtacaaccacgtgaagcagctgctgagcaacgagctgctgctgacccagatggagaagtgcgccctgatggaggccctggtgctgatcagcaaccagttcaagaactacgagagacagaaggtgttcctggaggagctgatggcccccgtggccagcatctggctgagccaggacatgcacagagtgctgagcgacgtggacgccttcatcgcctacgtgggcaccgaccagaagagctgcgaccccggcctggaggacccctgcggcctgaacagagccagaatgagcttctgcgtgtacagcatcctgggcgtggtgaagagaacctgctggcccaccgacctggaggaggccaaggccggcggcttcgtggtgggctacaccagcagcggcaaccccatcttcagaaacccctgcaccgagcagatcctgaagctgctggacaacctgctggccctgatcagaacccacaacaccctgtacgcccccgagatgctggccaagatggccgagcccttcaccaaggccctggacatgctggacgccgagaagagcgccatcctgggcctgccccagcccctgctggagctgaacgacagccccgtgttcaagaccgtgctggagagaatgcagagattcttcagcaccctgtacgagaactgcttccacatcctgggcaaggccggccccagcatgcagcaggacttctacaccgtggaggacctggccacccagctgctgagcagcgccttcgtgaacctgaacaacatccccgactacagactgagacccatgctgcacatcctgagcaagcccctggtgctgttctgcccccccgagcactacgaggccctggtgagccccatcctgggccccctgttcacctacctgcacatgagactgagccagaagtggcaggtgatcaaccagagaagcctgctgtgcggcgaggacgaggccgccgacgagaaccccgagagccaggagatgctggaggagcagctggtgagaatgctgaccagagaggtgatggacctgatcaccgtgtgctgcgtgagcaagaagggcgccgaccacagcagcgccccccccgccgacggcgacgacgaggagatgatggccaccgaggtgacccccagcgccatggccgagctgaccgacctgggcaagtgcctgatgaagcacgaggacgtgtgcaccgccctgctgatcaccgccttcaacagcctggcctggaaggacaccctgagctgccagagaaccaccagccagctgtgctggcccctgctgaagcaggtgctgagcggcaccctgctggccgacgccgtgacctggctgttcaccagcgtgctgaagggcctgcagatgcacggccagcacgacggctgcatggccagcctggtgcacctggccttccagatctacgaggccctgagacccagatacctggagatcagagccgtgatggagcagatccccgagatccagaaggacagcctggaccagttcgactgcaagctgctgaaccccagcctgcagaaggtggccgacaagagaagaaaggaccagttcaagagactgatcgccggctgcatcggcaagcccctgggcgagcagttcagaaaggaggtgcacatcaagaacctgcccttcgtggccgacctgtag

SEQ ID NO: 81063 - DNA, 2211 bp, synthetic construct
  misc_feature 1..2211: note = Description of Artificial Sequence: Synthetic coding sequence
  source 1..2211: mol_type = other DNA
atgcactacatcctgagcgccgcccagaccgccgacggcggcggcctggtggagaagcactacgtgttcctgaagagactgtgccaggtgctgtgcgccctgggcaaccagctgtgcgccctgctgggcgccgacagcgacgtggagacccccagcaacttcggcaagtacctggagagcttcctggccttcaccacccaccccagccagttcctgagaagcagcacccagatgacctggggcgccctgttcagacacgagatcctgagcagagaccccctgctgctggccatcatccccaagtacctgagagccagcatgaccaacctggtgaagatgggcttccccagcaagaccgacagccccagctgcgagtacagcagattcgacttcgacagcgacgaggacttcaacgccttcttcaacagcagcagagcccagcagggcgaggtgatgagactggcctgcagactggaccccaagaccagcttccagatggccggcgagtggctgaagtaccagctgagcaccttcctggacgccggcagcgtgaacagctgcagcgccgtgggcaccggcgagggcagcctgtgcagcgtgttcagccccagcttcgtgcagtgggaggccatgaccctgttcctggagagcgtgatcacccagatgttcagaaccctgaacagagaggagatccccgtgaacgacggcatcgagctgctgcagatggtgctgaacttcgacaccaaggaccccctgatcctgagctgcgtgctgaccaacgtgagcgccctgttccccttcgtgacctacagacccgagttcctgccccaggtgttcagcaagctgttcagcagcgtgaccttcgagaccgtggaggagagcaaggcccccagaaccagagccgtgagaaacgtgagaagacacgcctgcagcagcatcatcaagatgtgcagagactacccccagctggtgctgcccaacttcgacatgctgtacaaccacgtgaagcagctgctgagcaacgagctgctgctgacccagatggagaagtgcgccctgatggaggccctggtgctgatcagcaaccagttcaagaactacgagagacagaaggtgttcctggaggagctgatggcccccgtggccagcatctggctgagccaggacatgcacagagtgctgagcgacgtggacgccttcatcgcctacgtgggcaccgaccagaagagctgcgaccccggcctggaggacccctgcggcctgaacagagccagaatgagcttctgcgtgtacagcatcctgggcgtggtgaagagaacctgctggcccaccgacctggaggaggccaaggccggcggcttcgtggtgggctacaccagcagcggcaaccccatcttcagaaacccctgcaccgagcagatcctgaagctgctggacaacctgctggccctgatcagaacccacaacaccctgtacgcccccgagatgctggccaagatggccgagcccttcaccaaggccctggacatgctggacgccgagaagagcgccatcctgggcctgccccagcccctgctggagctgaacgacagccccgtgttcaagaccgtgctggagagaatgcagagattcttcagcaccctgtacgagaactgcttccacatcctgggcaaggccggccccagcatgcagcaggacttctacaccgtggaggacctggccacccagctgctgagcagcgccttcgtgaacctgaacaacatccccgactacagactgagacccatgctgcacatcctgagcaagcccctggtgctgttctgcccccccgagcactacgaggccctggtgagccccatcctgggccccctgttcacctacctgcacatgagactgagccagaagtggcaggtgatcaaccagagaagcctgctgtgcggcgaggacgaggccgccgacgagaaccccgagagccaggagatgctggaggagcagctggtgagaatgctgaccagagaggtgatggacctgatcaccgtgtgctgcgtgagcaagaagggcgccgaccacagcagcgccccccccgccgacggcgacgacgaggagatgatggccaccgaggtgacccccagcgccatggccgagctgaccgacctggtgagcatccagagcaccgacaagagagtgagccccagagccgaggtggactag

SEQ ID NO: 81064 - DNA, 2499 bp, synthetic construct
  misc_feature 1..2499: note = Description of Artificial Sequence: Synthetic coding sequence
  source 1..2499: mol_type = other DNA
atgacctggggcgccctgttcagacacgagatcctgagcagagaccccctgctgctggccatcatccccaagtacctgagagccagcatgaccaacctggtgaagatgggcttccccagcaagaccgacagccccagctgcgagtacagcagattcgacttcgacagcgacgaggacttcaacgccttcttcaacagcagcagagcccagcagggcgaggtgatgagactggcctgcagactggaccccaagaccagcttccagatggccggcgagtggctgaagtaccagctgagcaccttcctggacgccggcagcgtgaacagctgcagcgccgtgggcaccggcgagggcagcctgtgcagcgtgttcagccccagcttcgtgcagtgggaggccatgaccctgttcctggagagcgtgatcacccagatgttcagaaccctgaacagagaggagatccccgtgaacgacggcatcgagctgctgcagatggtgctgaacttcgacaccaaggaccccctgatcctgagctgcgtgctgaccaacgtgagcgccctgttccccttcgtgacctacagacccgagttcctgccccaggtgttcagcaagctgttcagcagcgtgaccttcgagaccgtggaggagagcaaggcccccagaaccagagccgtgagaaacgtgagaagacacgcctgcagcagcatcatcaagatgtgcagagactacccccagctggtgctgcccaacttcgacatgctgtacaaccacgtgaagcagctgctgagcaacgagctgctgctgacccagatggagaagtgcgccctgatggaggccctggtgctgatcagcaaccagttcaagaactacgagagacagaaggtgttcctggaggagctgatggcccccgtggccagcatctggctgagccaggacatgcacagagtgctgagcgacgtggacgccttcatcgcctacgtgggcaccgaccagaagagctgcgaccccggcctggaggacccctgcggcctgaacagagccagaatgagcttctgcgtgtacagcatcctgggcgtggtgaagagaacctgctggcccaccgacctggaggaggccaaggccggcggcttcgtggtgggctacaccagcagcggcaaccccatcttcagaaacccctgcaccgagcagatcctgaagctgctggacaacctgctggccctgatcagaacccacaacaccctgtacgcccccgagatgctggccaagatggccgagcccttcaccaaggccctggacatgctggacgccgagaagagcgccatcctgggcctgccccagcccctgctggagctgaacgacagccccgtgttcaagaccgtgctggagagaatgcagagattcttcagcaccctgtacgagaactgcttccacatcctgggcaaggccggccccagcatgcagcaggacttctacaccgtggaggacctggccacccagctgctgagcagcgccttcgtgaacctgaacaacatccccgactacagactgagacccatgctgagagtgttcgtgaagcccctggtgctgttctgcccccccgagcactacgaggccctggtgagccccatcctgggccccctgttcacctacctgcacatgagactgagccagaagtggcaggtgatcaaccagagaagcctgctgtgcggcgaggacgaggccgccgacgagaaccccgagagccaggagatgctggaggagcagctggtgagaatgctgaccagagaggtgatggacctgatcaccgtgtgctgcgtgagcaagaagggcgccgaccacagcagcgccccccccgccgacggcgacgacgaggagatgatggccaccgaggtgacccccagcgccatggccgagctgaccgacctgggcaagtgcctgatgaagcacgaggacgtgtgcaccgccctgctgatcaccgccttcaacagcctggcctggaaggacaccctgagctgccagagaaccaccagccagctgtgctggcccctgctgaagcaggtgctgagcggcaccctgctggccgacgccgtgacctggctgttcaccagcgtgctgaagggcctgcagatgcacggccagcacgacggctgcatggccagcctggtgcacctggccttccagatctacgaggccctgagacccagatacctggagatcagagccgtgatggagcagatccccgagatccagaaggacagcctggaccagttcgactgcaagctgctgaaccccagcctgcagaaggtggccgacaagagaagaaaggaccagttcaagagactgatcgccggctgcatcggcaagcccctgggcgagcagttcagaaaggaggtgcacatcaagaacctgcccagcctgttcaagaagaccaagcccatgctggagaccgaggtgctggacaacgacggcggcggcctggccaccatcttcgagccctag

SEQ ID NO: 81065 - DNA, 3378 bp, synthetic construct
  misc_feature 1..3378: note = Description of Artificial Sequence: Synthetic coding sequence
  source 1..3378: mol_type = other DNA
atggccagcgaggaggccagcctgagagccctggagagcctgatgaccgagttcttccacgactgcaccaccaacgagagaaagagagagatcgaggagctgctgaacaacttcgcccagcagatcggcgcctggagattctgcctgtacttcctgagcagcaccagaaacgactacgtgatgatgtacagcctgaccgtgttcgagaacctgatcaacaagatgtggctgggcgtgcccagccaggacaagatggagatcagaagctgcctgcccaagctgctgctggcccaccacaagaccctgccctacttcatcagaaacaagctgtgcaaggtgatcgtggacatcggcagacaggactggcccatgttctaccacgacttcttcaccaacatcctgcagctgatccagagccccgtgaccacccccctgggcctgatcatgctgaagaccaccagcgaggagctggcctgccccagagaggacctgagcgtggccagaaaggaggagctgagaaagctgctgctggaccaggtgcagaccgtgctgggcctgctgaccggcatcctggagaccgtgtgggacaagcacagcgtgaccgccgccacccccccccccagccccaccagcggcgagagcggcgacctgctgagcaacctgctgcagagccccagcagcgccaagctgctgaaccagcccatccccatcctggacgtggagagcgagtacatctgcagcctggccctggagtgcctggcccacctgttcagctggatccccctgagcgccagcatcacccccagcctgctgaccaccatcttccacttcgccagattcggctgcgacatcagagccagaaagatggccagcgtgaacggcagcagccagaactgcgtgagcggccaggagagaggcagactgggcgtgctggccatgagctgcatcaacgagctgatgagcaagaactgcgtgcccatggagttcgaggagtacctgctgagaatgttccagcagaccttctacctgctgcagaagatcaccaaggacaacaacgcccacaccgtgaagagcagactggaggagctggacgagagctacatcgagaagttcaccgacttcctgagactgttcgtgagcgtgcacctgagaagaatcgagagctacagccagttccccgtggtggagttcctgaccctgctgttcaagtacaccttccaccagcccacccacgagggctacttcagctgcctggacatctggaccctgttcctggactacctgaccagcaagatcaagagcagactgggcgacaaggaggccgtgctgaacagatacgaggacgccctggtgctgctgctgaccgaggtgctgaacagaatccagttcagatacaaccaggcccagctggaggagctggacgacgagaccctggacgacgaccagcagaccgagtggcagagatacctgagacagagcctggaggtggtggccaaggtgatggagctgctgcccacccacgccttcagcaccctgttccccgtgctgcaggacaacctggaggtgtacctgggcctgcagcagttcatcgtgaccagcggcagcggccacagactgaacatcaccgccgagaacgactgcagaagactgcactgcagcctgagagacctgagcagcctgctgcaggccgtgggcagactggccgagtacttcatcggcgacgtgttcgccgccagattcaacgacgccctgaccgtggtggagagactggtgaaggtgaccctgtacggcagccagatcaagctgtacaacatcgagaccgccgtgcccagcgtgctgaagcccgacctgatcgacgtgcacgcccagagcctggccgccctgcaggcctacagccactggctggcccagtactgcagcgaggtgcacagacagaacacccagcagttcgtgaccctgatcagcaccaccatggacgccatcacccccctgatcagcaccaaggtgcaggacaagctgctgctgagcgcctgccacctgctggtgagcctggccaccaccgtgagacccgtgttcctgatcagcatccccgccgtgcagaaggtgttcaacagaatcaccgacgccagcgccctgagactggtggacaaggcccaggtgctggtgtgcagagccctgagcaacatcctgctgctgccctggcccaacctgcccgagaacgagcagcagtggcccgtgagaagcatcaaccacgccagcctgatcagcgccctgagcagagactacagaaacctgaagcccagcgccgtggccccccagagaaagatgcccctggacgacaccaagctgatcatccaccagaccctgagcgtgctggaggacatcgtggagaacatcagcggcgagagcaccaagagcagacagatctgctaccagagcctgcaggagagcgtgcaggtgagcctggccctgttccccgccttcatccaccagagcgacgtgaccgacgagatgctgagcttcttcctgaccctgttcagaggcctgagagtgcagatgggcgtgcccttcaccgagcagatcatccagaccttcctgaacatgttcaccagagagcagctggccgagagcatcctgcacgagggcagcaccggctgcagagtggtggagaagttcctgaagatcctgcaggtggtggtgcaggagcccggccaggtgttcaagcccttcctgcccagcatcatcgccctgtgcatggagcaggtgtaccccatcatcgccgagagacccagccccgacgtgaaggccgagctgttcgagctgctgttcagaaccctgcaccacaactggagatacttcttcaagagcaccgtgctggccagcgtgcagagaggcatcgccgaggagcagatggagaacgagccccagttcagcgccatcatgcaggccttcggccagagcttcctgcagcccgacatccacctgttcaagcagaacctgttctacctggagaccctgaacaccaagcagaagctgtaccacaagaagatcttcagaaccgccatgctgttccagttcgtgaacgtgctgctgcaggtgctggtgcacaagagccacgacctgctgcaggaggagatcggcatcgccatctacaacatggccagcgtggacttcgacggcttcttcgccgccttcctgcccgagttcctgaccagctgcgacggcgtggacgccaaccagaagagcgtgctgggcagaaacttcaagatggacagagacctgcccagcttcacccagaacgtgcacagactggtgaacgacctgagatactacagactgtgcaacgacagcctgccccccggcaccgtgaagctgtag

SEQ ID NO: 81066 - DNA, 3336 bp, synthetic construct
  misc_feature 1..3336: note = Description of Artificial Sequence: Synthetic coding sequence
  source 1..3336: mol_type = other DNA
atgaccgagttcttccacgactgcaccaccaacgagagaaagagagagatcgaggagctgctgaacaacttcgcccagcagatcggcgcctggagattctgcctgtacttcctgagcagcaccagaaacgactacgtgatgatgtacagcctgaccgtgttcgagaacctgatcaacaagatgtggctgggcgtgcccagccaggacaagatggagatcagaagctgcctgcccaagctgctgctggcccaccacaagaccctgccctacttcatcagaaacaagctgtgcaaggtgatcgtggacatcggcagacaggactggcccatgttctaccacgacttcttcaccaacatcctgcagctgatccagagccccgtgaccacccccctgggcctgatcatgctgaagaccaccagcgaggagctggcctgccccagagaggacctgagcgtggccagaaaggaggagctgagaaagctgctgctggaccaggtgcagaccgtgctgggcctgctgaccggcatcctggagaccgtgtgggacaagcacagcgtgaccgccgccacccccccccccagccccaccagcggcgagagcggcgacctgctgagcaacctgctgcagagccccagcagcgccaagctgctgaaccagcccatccccatcctggacgtggagagcgagtacatctgcagcctggccctggagtgcctggcccacctgttcagctggatccccctgagcgccagcatcacccccagcctgctgaccaccatcttccacttcgccagattcggctgcgacatcagagccagaaagatggccagcgtgaacggcagcagccagaactgcgtgagcggccaggagagaggcagactgggcgtgctggccatgagctgcatcaacgagctgatgagcaagaactgcgtgcccatggagttcgaggagtacctgctgagaatgttccagcagaccttctacctgctgcagaagatcaccaaggacaacaacgcccacaccgtgaagagcagactggaggagctggacgagagctacatcgagaagttcaccgacttcctgagactgttcgtgagcgtgcacctgagaagaatcgagagctacagccagttccccgtggtggagttcctgaccctgctgttcaagtacaccttccaccagcccacccacgagggctacttcagctgcctggacatctggaccctgttcctggactacctgaccagcaagatcaagagcagactgggcgacaaggaggccgtgctgaacagatacgaggacgccctggtgctgctgctgaccgaggtgctgaacagaatccagttcagatacaaccaggcccagctggaggagctggacgacgagaccctggacgacgaccagcagaccgagtggcagagatacctgagacagagcctggaggtggtggccaaggtgatggagctgctgcccacccacgccttcagcaccctgttccccgtgctgcaggacaacctggaggtgtacctgggcctgcagcagttcatcgtgaccagcggcagcggccacagactgaacatcaccgccgagaacgactgcagaagactgcactgcagcctgagagacctgagcagcctgctgcaggccgtgggcagactggccgagtacttcatcggcgacgtgttcgccgccagattcaacgacgccctgaccgtggtggagagactggtgaaggtgaccctgtacggcagccagatcaagctgtacaacatcgagaccgccgtgcccagcgtgctgaagcccgacctgatcgacgtgcacgcccagagcctggccgccctgcaggcctacagccactggctggcccagtactgcagcgaggtgcacagacagaacacccagcagttcgtgaccctgatcagcaccaccatggacgccatcacccccctgatcagcaccaaggtgcaggacaagctgctgctgagcgcctgccacctgctggtgagcctggccaccaccgtgagacccgtgttcctgatcagcatccccgccgtgcagaaggtgttcaacagaatcaccgacgccagcgccctgagactggtggacaaggcccaggtgctggtgtgcagagccctgagcaacatcctgctgctgccctggcccaacctgcccgagaacgagcagcagtggcccgtgagaagcatcaaccacgccagcctgatcagcgccctgagcagagactacagaaacctgaagcccagcgccgtggccccccagagaaagatgcccctggacgacaccaagctgatcatccaccagaccctgagcgtgctggaggacatcgtggagaacatcagcggcgagagcaccaagagcagacagatctgctaccagagcctgcaggagagcgtgcaggtgagcctggccctgttccccgccttcatccaccagagcgacgtgaccgacgagatgctgagcttcttcctgaccctgttcagaggcctgagagtgcagatgggcgtgcccttcaccgagcagatcatccagaccttcctgaacatgttcaccagagagcagctggccgagagcatcctgcacgagggcagcaccggctgcagagtggtggagaagttcctgaagatcctgcaggtggtggtgcaggagcccggccaggtgttcaagcccttcctgcccagcatcatcgccctgtgcatggagcaggtgtaccccatcatcgccgagagacccagccccgacgtgaaggccgagctgttcgagctgctgttcagaaccctgcaccacaactggagatacttcttcaagagcaccgtgctggccagcgtgcagagaggcatcgccgaggagcagatggagaacgagccccagttcagcgccatcatgcaggccttcggccagagcttcctgcagcccgacatccacctgttcaagcagaacctgttctacctggagaccctgaacaccaagcagaagctgtaccacaagaagatcttcagaaccgccatgctgttccagttcgtgaacgtgctgctgcaggtgctggtgcacaagagccacgacctgctgcaggaggagatcggcatcgccatctacaacatggccagcgtggacttcgacggcttcttcgccgccttcctgcccgagttcctgaccagctgcgacggcgtggacgccaaccagaagagcgtgctgggcagaaacttcaagatggacagagacctgcccagcttcacccagaacgtgcacagactggtgaacgacctgagatactacagactgtgcaacgacagcctgccccccggcaccgtgaagctgtag

SEQ ID NO: 81067 - DNA, 3264 bp, synthetic construct
  misc_feature 1..3264: note = Description of Artificial Sequence: Synthetic coding sequence
  source 1..3264: mol_type = other DNA
atggccgaccacgtgcagagcctggcccagctggagaacctgtgcaagcagctgtacgagaccaccgacaccaccaccagactgcaggccgagaaggccctggtggagttcaccaacagccccgactgcctgagcaagtgccagctgctgctggagagaggcagcagcagctacagccagctgctggccgccacctgcctgaccaagctggtgagcagaaccaacaaccccctgcccctggagcagagaatcgacatcagaaactacgtgctgaactacctggccaccagacccaagctggccaccttcgtgacccaggccctgatccagctgtacgccagaatcaccaagctgggctggttcgactgccagaaggacgactacgtgttcagaaacgccatcaccgacgtgaccagattcctgcaggacagcgtggagtactgcatcatcggcgtgaccatcctgagccagctgaccaacgagatcaaccaggccgacaccacccaccccctgaccaagcacagaaagatcgccagcagcttcagagacagcagcctgttcgacatcttcaccctgagctgcaacctgctgaagcaggccagcggcaagaacctgaacctgaacgacgagagccagcacggcctgctgatgcagctgctgaagctgacccacaactgcctgaacttcgacttcatcggcaccagcaccgacgagagcagcgacgacctgtgcaccgtgcagatccccaccagctggagaagcgccttcctggacagcagcaccctgcagctgttcttcgacctgtaccacagcatcccccccagcttcagccccctggtgctgagctgcctggtgcagatcgccagcgtgagaagaagcctgttcaacaacgccgagagagccaagttcctgagccacctggtggacggcgtgaagagaatcctggagaacccccagagcctgagcgaccccaacaactaccacgagttctgcagactgctggccagactgaagagcaactaccagctgggcgagctggtgaaggtggagaactaccccgaggtgatcagactgatcgccaacttcaccgtgaccagcctgcagcactgggagttcgcccccaacagcgtgcactacctgctgagcctgtggcagagactggccgccagcgtgccctacgtgaaggccaccgagccccacatgctggagacctacacccccgaggtgaccaaggcctacatcaccagcagactggagagcgtgcacatcatcctgagagacggcctggaggaccccctggaggacaccggcctggtgcagcagcagctggaccagctgagcaccatcggcagatgcgagtacgagaagacctgcgccctgctggtgcagctgttcgaccagagcgcccagagctaccaggagctgctgcagagcgccagcgccagccccatggacatcgccgtgcaggagggcagactgacctggctggtgtacatcatcggcgccgtgatcggcggcagagtgagcttcgccagcaccgacgagcaggacgccatggacggcgagctggtgtgcagagtgctgcagctgatgaacctgaccgacagcagactggcccaggccggcaacgagaagctggagctggccatgctgagcttcttcgagcagttcagaaagatctacatcggcgaccaggtgcagaagagcagcaagctgtacagaagactgagcgaggtgctgggcctgaacgacgagaccatggtgctgagcgtgttcatcggcaagatcatcaccaacctgaagtactggggcagatgcgagcccatcaccagcaagaccctgcagctgctgaacgacctgagcatcggctacagcagcgtgagaaagctggtgaagctgagcgccgtgcagttcatgctgaacaaccacaccagcgagcacttcagcttcctgggcatcaacaaccagagcaacctgaccgacatgagatgcagaaccaccttctacaccgccctgggcagactgctgatggtggacctgggcgaggacgaggaccagtacgagcagttcatgctgcccctgaccgccgccttcgaggccgtggcccagatgttcagcaccaacagcttcaacgagcaggaggccaagagaaccctggtgggcctggtgagagacctgagaggcatcgccttcgccttcaacgccaagaccagcttcatgatgctgttcgagtggatctaccccagctacatgcccatcctgcagagagccatcgagctgtggtaccacgaccccgcctgcaccacccccgtgctgaagctgatggccgagctggtgcacaacagaagccagagactgcagttcgacgtgagcagccccaacggcatcctgctgttcagagagaccagcaagatgatcaccatgtacggcaacagaatcctgaccctgggcgaggtgcccaaggaccaggtgtacgccctgaagctgaagggcatcagcatctgcttcagcatgctgaaggccgccctgagcggcagctacgtgaacttcggcgtgttcagactgtacggcgacgacgccctggacaacgccctgcagaccttcatcaagctgctgctgagcatcccccacagcgacctgctggactaccccaagctgagccagagctactacagcctgctggaggtgctgacccaggaccacatgaacttcatcgccagcctggagccccacgtgatcatgtacatcctgagcagcatcagcgagggcctgaccgccctggacaccatggtgtgcaccggctgctgcagctgcctggaccacatcgtgacctacctgttcaagcagctgagcagaagcaccaagaagagaaccacccccctgaaccaggagagcgacagattcctgcacatcatgcagcagcaccccgagatgatccagcagatgctgagcaccgtgctgaacatcatcatcttcgaggactgcagaaaccagtggagcatgagcagacccctgctgggcctgatcctgctgaacgagaagtacttcagcgacctgagaaacagcatcgtgaacagccagccccccgagaagcagcaggccatgcacctgtgcttcgagaacctgatggagggcatcgagagaaacctgctgaccaagaacagagacagattcacccagaacctgagcgccttcagaagagaggtgaacgacagcatgaagaacagcacctacggcgtgaacagcaacgacatgatgagctag

SEQ ID NO: 81068 - DNA, 3267 bp, synthetic construct
  misc_feature 1..3267: note = Description of Artificial Sequence: Synthetic coding sequence
  source 1..3267: mol_type = other DNA
atgagagaccccggcagaaagagcctggcccagctggagaacctgtgcaagcagctgtacgagaccaccgacaccaccaccagactgcaggccgagaaggccctggtggagttcaccaacagccccgactgcctgagcaagtgccagctgctgctggagagaggcagcagcagctacagccagctgctggccgccacctgcctgaccaagctggtgagcagaaccaacaaccccctgcccctggagcagagaatcgacatcagaaactacgtgctgaactacctggccaccagacccaagctggccaccttcgtgacccaggccctgatccagctgtacgccagaatcaccaagctgggctggttcgactgccagaaggacgactacgtgttcagaaacgccatcaccgacgtgaccagattcctgcaggacagcgtggagtactgcatcatcggcgtgaccatcctgagccagctgaccaacgagatcaaccaggccgacaccacccaccccctgaccaagcacagaaagatcgccagcagcttcagagacagcagcctgttcgacatcttcaccctgagctgcaacctgctgaagcaggccagcggcaagaacctgaacctgaacgacgagagccagcacggcctgctgatgcagctgctgaagctgacccacaactgcctgaacttcgacttcatcggcaccagcaccgacgagagcagcgacgacctgtgcaccgtgcagatccccaccagctggagaagcgccttcctggacagcagcaccctgcagctgttcttcgacctgtaccacagcatcccccccagcttcagccccctggtgctgagctgcctggtgcagatcgccagcgtgagaagaagcctgttcaacaacgccgagagagccaagttcctgagccacctggtggacggcgtgaagagaatcctggagaacccccagagcctgagcgaccccaacaactaccacgagttctgcagactgctggccagactgaagagcaactaccagctgggcgagctggtgaaggtggagaactaccccgaggtgatcagactgatcgccaacttcaccgtgaccagcctgcagcactgggagttcgcccccaacagcgtgcactacctgctgagcctgtggcagagactggccgccagcgtgccctacgtgaaggccaccgagccccacatgctggagacctacacccccgaggtgaccaaggcctacatcaccagcagactggagagcgtgcacatcatcctgagagacggcctggaggaccccctggaggacaccggcctggtgcagcagcagctggaccagctgagcaccatcggcagatgcgagtacgagaagacctgcgccctgctggtgcagctgttcgaccagagcgcccagagctaccaggagctgctgcagagcgccagcgccagccccatggacatcgccgtgcaggagggcagactgacctggctggtgtacatcatcggcgccgtgatcggcggcagagtgagcttcgccagcaccgacgagcaggacgccatggacggcgagctggtgtgcagagtgctgcagctgatgaacctgaccgacagcagactggcccaggccggcaacgagaagctggagctggccatgctgagcttcttcgagcagttcagaaagatctacatcggcgaccaggtgcagaagagcagcaagctgtacagaagactgagcgaggtgctgggcctgaacgacgagaccatggtgctgagcgtgttcatcggcaagatcatcaccaacctgaagtactggggcagatgcgagcccatcaccagcaagaccctgcagctgctgaacgacctgagcatcggctacagcagcgtgagaaagctggtgaagctgagcgccgtgcagttcatgctgaacaaccacaccagcgagcacttcagcttcctgggcatcaacaaccagagcaacctgaccgacatgagatgcagaaccaccttctacaccgccctgggcagactgctgatggtggacctgggcgaggacgaggaccagtacgagcagttcatgctgcccctgaccgccgccttcgaggccgtggcccagatgttcagcaccaacagcttcaacgagcaggaggccaagagaaccctggtgggcctggtgagagacctgagaggcatcgccttcgccttcaacgccaagaccagcttcatgatgctgttcgagtggatctaccccagctacatgcccatcctgcagagagccatcgagctgtggtaccacgaccccgcctgcaccacccccgtgctgaagctgatggccgagctggtgcacaacagaagccagagactgcagttcgacgtgagcagccccaacggcatcctgctgttcagagagaccagcaagatgatcaccatgtacggcaacagaatcctgaccctgggcgaggtgcccaaggaccaggtgtacgccctgaagctgaagggcatcagcatctgcttcagcatgctgaaggccgccctgagcggcagctacgtgaacttcggcgtgttcagactgtacggcgacgacgccctggacaacgccctgcagaccttcatcaagctgctgctgagcatcccccacagcgacctgctggactaccccaagctgagccagagctactacagcctgctggaggtgctgacccaggaccacatgaacttcatcgccagcctggagccccacgtgatcatgtacatcctgagcagcatcagcgagggcctgaccgccctggacaccatggtgtgcaccggctgctgcagctgcctggaccacatcgtgacctacctgttcaagcagctgagcagaagcaccaagaagagaaccacccccctgaaccaggagagcgacagattcctgcacatcatgcagcagcaccccgagatgatccagcagatgctgagcaccgtgctgaacatcatcatcttcgaggactgcagaaaccagtggagcatgagcagacccctgctgggcctgatcctgctgaacgagaagtacttcagcgacctgagaaacagcatcgtgaacagccagccccccgagaagcagcaggccatgcacctgtgcttcgagaacctgatggagggcatcgagagaaacctgctgaccaagaacagagacagattcacccagaacctgagcgccttcagaagagaggtgaacgacagcatgaagaacagcacctacggcgtgaacagcaacgacatgatgagctag

SEQ ID NO: 81069 - DNA, 3291 bp, synthetic construct
  misc_feature 1..3291: note = Description of Artificial Sequence: Synthetic coding sequence
  source 1..3291: mol_type = other DNA
atggccgaccacgtgcagagcctggcccagctggagaacctgtgcaagcagctgtacgagaccaccgacaccaccaccagactgcaggccgagaaggccctggtggagttcaccaacagccccgactgcctgagcaagtgccagctgctgctggagagaggcagcagcagctacagccagctgctggccgccacctgcctgaccaagctggtgagcagaaccaacaaccccctgcccctggagcagagaatcgacatcagaaactacgtgctgaactacctggccaccagacccaagctggccaccttcgtgacccaggccctgatccagctgtacgccagaatcaccaagctgggctggttcgactgccagaaggacgactacgtgttcagaaacgccatcaccgacgtgaccagattcctgcaggacagcgtggagtactgcatcatcggcgtgaccatcctgagccagctgaccaacgagatcaaccaggtgagcgccaccgccttcctgatcgaggccgacaccacccaccccctgaccaagcacagaaagatcgccagcagcttcagagacagcagcctgttcgacatcttcaccctgagctgcaacctgctgaagcaggccagcggcaagaacctgaacctgaacgacgagagccagcacggcctgctgatgcagctgctgaagctgacccacaactgcctgaacttcgacttcatcggcaccagcaccgacgagagcagcgacgacctgtgcaccgtgcagatccccaccagctggagaagcgccttcctggacagcagcaccctgcagctgttcttcgacctgtaccacagcatcccccccagcttcagccccctggtgctgagctgcctggtgcagatcgccagcgtgagaagaagcctgttcaacaacgccgagagagccaagttcctgagccacctggtggacggcgtgaagagaatcctggagaacccccagagcctgagcgaccccaacaactaccacgagttctgcagactgctggccagactgaagagcaactaccagctgggcgagctggtgaaggtggagaactaccccgaggtgatcagactgatcgccaacttcaccgtgaccagcctgcagcactgggagttcgcccccaacagcgtgcactacctgctgagcctgtggcagagactggccgccagcgtgccctacgtgaaggccaccgagccccacatgctggagacctacacccccgaggtgaccaaggcctacatcaccagcagactggagagcgtgcacatcatcctgagagacggcctggaggaccccctggaggacaccggcctggtgcagcagcagctggaccagctgagcaccatcggcagatgcgagtacgagaagacctgcgccctgctggtgcagctgttcgaccagagcgcccagagctaccaggagctgctgcagagcgccagcgccagccccatggacatcgccgtgcaggagggcagactgacctggctggtgtacatcatcggcgccgtgatcggcggcagagtgagcttcgccagcaccgacgagcaggacgccatggacggcgagctggtgtgcagagtgctgcagctgatgaacctgaccgacagcagactggcccaggccggcaacgagaagctggagctggccatgctgagcttcttcgagcagttcagaaagatctacatcggcgaccaggtgcagaagagcagcaagctgtacagaagactgagcgaggtgctgggcctgaacgacgagaccatggtgctgagcgtgttcatcggcaagatcatcaccaacctgaagtactggggcagatgcgagcccatcaccagcaagaccctgcagctgctgaacgacctgagcatcggctacagcagcgtgagaaagctggtgaagctgagcgccgtgcagttcatgctgaacaaccacaccagcgagcacttcagcttcctgggcatcaacaaccagagcaacctgaccgacatgagatgcagaaccaccttctacaccgccctgggcagactgctgatggtggacctgggcgaggacgaggaccagtacgagcagttcatgctgcccctgaccgccgccttcgaggccgtggcccagatgttcagcaccaacagcttcaacgagcaggaggccaagagaaccctggtgggcctggtgagagacctgagaggcatcgccttcgccttcaacgccaagaccagcttcatgatgctgttcgagtggatctaccccagctacatgcccatcctgcagagagccatcgagctgtggtaccacgaccccgcctgcaccacccccgtgctgaagctgatggccgagctggtgcacaacagaagccagagactgcagttcgacgtgagcagccccaacggcatcctgctgttcagagagaccagcaagatgatcaccatgtacggcaacagaatcctgaccctgggcgaggtgcccaaggaccaggtgtacgccctgaagctgaagggcatcagcatctgcttcagcatgctgaaggccgccctgagcggcagctacgtgaacttcggcgtgttcagactgtacggcgacgacgccctggacaacgccctgcagaccttcatcaagctgctgctgagcatcccccacagcgacctgctggactaccccaagctgagccagagctactacagcctgctggaggtgctgacccaggaccacatgaacttcatcgccagcctggagccccacgtgatcatgtacatcctgagcagcatcagcgagggcctgaccgccctggacaccatggtgtgcaccggctgctgcagctgcctggaccacatcgtgacctacctgttcaagcagctgagcagaagcaccaagaagagaaccacccccctgaaccaggagagcgacagattcctgcacatcatgcagcagcaccccgagatgatccagcagatgctgagcaccgtgctgaacatcatcatcttcgaggactgcagaaaccagtggagcatgagcagacccctgctgggcctgatcctgctgaacgagaagtacttcagcgacctgagaaacagcatcgtgaacagccagccccccgagaagcagcaggccatgcacctgtgcttcgagaacctgatggagggcatcgagagaaacctgctgaccaagaacagagacagattcacccagaacctgagcgccttcagaagagaggtgaacgacagcatgaagaacagcacctacggcgtgaacagcaacgacatgatgagctag

SEQ ID NO: 81070 - DNA, 6363 bp, synthetic construct
  misc_feature 1..6363: note = Description of Artificial Sequence: Synthetic coding sequence
  source 1..6363: mol_type = other DNA
atgagaagcttcaagagagtgaacttcggcaccctgctgagcagccagaaggaggccgaggagctgctgcccgccctgaaggagttcctgagcaacccccccgccggcttccccagcagcagaagcgacgccgagagaagacaggcctgcgacgccatcctgagagcctgcaaccagcagctgaccgccaagctggcctgccccagacacctgggcagcctgctggagctggccgagctggcctgcgacggctacctggtgagcaccccccagagaccccccctgtacctggagagaatcctgttcgtgctgctgagaaacgccgccgcccagggcagccccgaggccaccctgagactggcccagcccctgcacgcctgcctggtgcagtgcagcagagaggccgccccccaggactacgaggccgtggccagaggcagcttcagcctgctgtggaagggcgccgaggccctgctggagagaagagccgccttcgccgccagactgaaggccctgagcttcctggtgctgctggaggacgagagcaccccctgcgaggtgccccacttcgccagccccaccgcctgcagagccgtggccgcccaccagctgttcgacgccagcggccacggcctgaacgaggccgacgccgacttcctggacgacctgctgagcagacacgtgatcagagccctggtgggcgagagaggcagcagcagcggcctgctgagcccccagagagccctgtgcctgctggagctgaccctggagcactgcagaagattctgctggagcagacaccacgacaaggccatcagcgccgtggagaaggcccacagctacctgagaaacaccaacctggcccccagcctgcagctgtgccagctgggcgtgaagctgctgcaggtgggcgaggagggcccccaggccgtggccaagctgctgatcaaggccagcgccgtgctgagcaagagcatggaggcccccagcccccccctgagagccctgtacgagagctgccagttcttcctgagcggcctggagagaggcaccaagagaagatacagactggacgccatcctgagcctgttcgccttcctgggcggctactgcagcctgctgcagcagctgagagacgacggcgtgtacggcggcagcagcaagcagcagcagagcttcctgcagatgtacttccagggcctgcacctgtacaccgtggtggtgtacgacttcgcccagggctgccagatcgtggacctggccgacctgacccagctggtggacagctgcaagagcaccgtggtgtggatgctggaggccctggagggcctgagcggccaggagctgaccgaccacatgggcatgaccgccagctacaccagcaacctggcctacagcttctacagccacaagctgtacgccgaggcctgcgccatcagcgagcccctgtgccagcacctgggcctggtgaagcccggcacctaccccgaggtgccccccgagaagctgcacagatgcttcagactgcaggtggagagcctgaagaagctgggcaagcaggcccagggctgcaagatggtgatcctgtggctggccgccctgcagccctgcagccccgagcacatggccgagcccgtgaccttctgggtgagagtgaagatggacgccgccagagccggcgacaaggagctgcagctgaagaccctgagagacagcctgagcggctgggaccccgagaccctggccctgctgctgagagaggagctgcaggcctacaaggccgtgagagccgacaccggccaggagagattcaacatcatctgcgacctgctggagctgagccccgaggagacccccgccggcgcctgggccagagccacccacctggtggagctggcccaggtgctgtgctaccacgacttcacccagcagaccaactgcagcgccctggacgccatcagagaggccctgcagctgctggacagcgtgagacccgaggcccaggccagagaccagctgctggacgacaaggcccaggccctgctgtggctgtacatctgcaccctggaggccaagatgcaggagggcatcgagagagacagaagagcccaggcccccggcaacctggaggagttcgaggtgaacgacctgaactacgaggacaagctgcaggaggacagattcctgtacagcaacatcgccttcaacctggccgccgacgccgcccagagcaagtgcctggaccaggccctggccctgtggaaggagctgctgaccaagggccaggcccccgccgtgagatgcctgcagcagaccgccgccagcctgcagatcctggccgccctgtaccagctggtggccaagcccatgcaggccctggaggtgctgctgctgctgagaatcgtgagcgagagactgaaggaccacagcaaggccgccggcagcagctgccacatcacccagctgctgctgaccctgggctgccccagctacgcccagctgcacctggaggaggccgccagcagcctgaagcacctggaccagaccaccgacacctacctgctgctgagcctgacctgcgacctgctgagaagccagctgtactggacccaccagaaggtgaccaagggcgtgagcctgctgctgagcgtgctgagagaccccgccctgcagaagagcagcaaggcctggtacctgctgagagtgcaggtgctgcagctggtggccgcctacctgagcctgcccagcaacaacctgagccacagcctgtgggagcagctgtgcgcccagggctggcagacccccgagatcgccctgatcgacagccacaagctgctgagaagcatcatcctgctgctgatgggcagcgacatcctgagcacccagaaggccgccgtggagaccagcttcctggactacggcgagaacctggtgcagaagtggcaggtgctgagcgaggtgctgagctgcagcgagaagctggtgtgccacctgggcagactgggcagcgtgagcgaggccaaggccttctgcctggaggccctgaagctgaccaccaagctgcagatccccagacagtgcgccctgttcctggtgctgaagggcgagctggagctggccagaaacgacatcgacctgtgccagagcgacctgcagcaggtgctgttcctgctggagagctgcaccgagttcggcggcgtgacccagcacctggacagcgtgaagaaggtgcacctgcagaagggcaagcagcaggcccaggtgccctgccccccccagctgcccgaggaggagctgttcctgagaggccccgccctggagctggtggccaccgtggccaaggagcccggccccatcgcccccagcaccaacagcagccccgtgctgaagaccaagccccagcccatccccaacttcctgagccacagccccacctgcgactgcagcctgtgcgccagccccgtgctgaccgccgtgtgcctgagatgggtgctggtgaccgccggcgtgagactggccatgggccaccaggcccagggcctggacctgctgcaggtggtgctgaagggctgccccgaggccgccgagagactgacccaggccctgcaggccagcctgaaccacaagaccccccccagcctggtgcccagcctgctggacgagatcctggcccaggcctacaccctgctggccctggagggcctgaaccagcccagcaacgagagcctgcagaaggtgctgcagagcggcctgaagttcgtggccgccagaatcccccacctggagccctggagagccagcctgctgctgatctgggccctgaccaagctgggcggcctgagctgctgcaccacccagctgttcgccagcagctggggctggcagccccccctgatcaagagcgtgcccggcagcgagcccagcaagacccagggccagaagagaagcggcagaggcagacagaagctggccagcgcccccctgagactgaacaacaccagccagaagggcctggagggcagaggcctgccctgcacccccaagccccccgacagaatcagacaggccggcccccacgtgcccttcaccgtgttcgaggaggtgtgccccaccgagagcaagcccgaggtgccccaggcccccagagtgcagcagagagtgcagaccagactgaaggtgaacttcagcgacgacagcgacctggaggaccccgtgagcgccgaggcctggctggccgaggagcccaagagaagaggcaccgccagcagaggcagaggcagagccagaaagggcctgagcctgaagaccgacgccgtggtggcccccggcagcgcccccggcaaccccggcctgaacggcagaagcagaagagccaagaaggtggccagcagacactgcgaggagagaagaccccagagagccagcgaccaggccagacccggccccgagatcatgagaaccatccccgaggaggagctgaccgacaactggagaaagatgagcttcgagatcctgagaggcagcgacggcgaggacagcgccagcggcggcaagacccccgcccccggccccgaggccgccagcggcgagtgggagctgctgagactggacagcagcaagaagaagctgcccagcccctgccccgacaaggagagcgacaaggacctgggccccagactgagactgcccagcgcccccgtggccaccggcctgagcaccctggacagcatctgcgacagcctgagcgtggccttcagaggcatcagccactgcccccccagcggcctgtacgcccacctgtgcagattcctggccctgtgcctgggccacagagacccctacgccaccgccttcctggtgaccgagagcgtgagcatcacctgcagacaccagctgctgacccacctgcacagacagctgagcaaggcccagaagcacagaggcagcctggagatcgccgaccagctgcagggcctgagcctgcaggagatgcccggcgacgtgcccctggccagaatccagagactgttcagcttcagagccctggagagcggccacttcccccagcccgagaaggagagcttccaggagagactggccctgatccccagcggcgtgaccgtgtgcgtgctggccctggccaccctgcagcccggcaccgtgggcaacaccctgctgctgaccagactggagaaggacagcccccccgtgagcgtgcagatccccaccggccagaacaagctgcacctgagaagcgtgctgaacgagttcgacgccatccagaaggcccagaaggagaacagcagctgcaccgacaagagagagtggtggaccggcagactggccctggaccacagaatggaggtgctgatcgccagcctggagaagagcgtgctgggctgctggaagggcctgctgctgcccagcagcgaggagcccggccccgcccaggaggccagcagactgcaggagctgctgcaggactgcggctggaagtaccccgacagaaccctgctgaagatcatgctgagcggcgccggcgccctgaccccccaggacatccaggccctggcctacggcctgtgccccacccagcccgagagagcccaggagctgctgaacgaggccgtgggcagactgcagggcctgaccgtgcccagcaacagccacctggtgctggtgctggacaaggacctgcagaagctgccctgggagagcatgcccagcctgcaggccctgcccgtgaccagactgcccagcttcagattcctgctgagctacagcatcatcaaggagtacggcgccagccccgtgctgagccagggcgtggaccccagaagcaccttctacgtgctgaacccccacaacaacctgagcagcaccgaggagcagttcagagccaacttcagcagcgaggccggctggagaggcgtggtgggcgaggtgcccagacccgagcaggtgcaggaggccctgaccaagcacgacctgtacatctacgccggccacggcgccggcgccagattcctggacggccaggccgtgctgagactgagctgcagagccgtggccctgctgttcggctgcagcagcgccgccctggccgtgagaggcaacctggagggcgccggcatcgtgctgaagtacatcatggccggctgccccctgttcctgggcaacctgtgggacgtgaccgacagagacatcgacagatacaccgaggccctgctgcagggctggctgggcgccggccccggcgcccccctgctgtactacgtgaaccaggccagacaggcccccagactgaagtacctgatcggcgccgcccccatcgcctacggcctgcccgtgagcctgagatag

SEQ ID NO: 81071 - DNA, 6363 bp, synthetic construct; identical to SEQ ID NO: 81070
  misc_feature 1..6363: note = Description of Artificial Sequence: Synthetic coding sequence
  source 1..6363: mol_type = other DNA

SEQ ID NO: 81072 - DNA, 5388 bp, synthetic construct
  misc_feature 1..5388: note = Description of Artificial Sequence: Synthetic coding sequence
  source 1..5388: mol_type = other DNA
atggaggcccccagcccccccctgagagccctgtacgagagctgccagttcttcctgagcggcctggagagaggcaccaagagaagatacagactggacgccatcctgagcctgttcgccttcctgggcggctactgcagcctgctgcagcagctgagagacgacggcgtgtacggcggcagcagcaagcagcagcagagcttcctgcagatgtacttccagggcctgcacctgtacaccgtggtggtgtacgacttcgcccagggctgccagatcgtggacctggccgacctgacccagctggtggacagctgcaagagcaccgtggtgtggatgctggaggccctggagggcctgagcggccaggagctgaccgaccacatgggcatgaccgccagctacaccagcaacctggcctacagcttctacagccacaagctgtacgccgaggcctgcgccatcagcgagcccctgtgccagcacctgggcctggtgaagcccggcacctaccccgaggtgccccccgagaagctgcacagatgcttcagactgcaggtggagagcctgaagaagctgggcaagcaggcccagggctgcaagatggtgatcctgtggctggccgccctgcagccctgcagccccgagcacatggccgagcccgtgaccttctgggtgagagtgaagatggacgccgccagagccggcgacaaggagctgcagctgaagaccctgagagacagcctgagcggctgggaccccgagaccctggccctgctgctgagagaggagctgcaggcctacaaggccgtgagagccgacaccggccaggagagattcaacatcatctgcgacctgctggagctgagccccgaggagacccccgccggcgcctgggccagagccacccacctggtggagctggcccaggtgctgtgctaccacgacttcacccagcagaccaactgcagcgccctggacgccatcagagaggccctgcagctgctggacagcgtgagacccgaggcccaggccagagaccagctgctggacgacaaggcccaggccctgctgtggctgtacatctgcaccctggaggccaagatgcaggagggcatcgagagagacagaagagcccaggcccccggcaacctggaggagttcgaggtgaacgacctgaactacgaggacaagctgcaggaggacagattcctgtacagcaacatcgccttcaacctggccgccgacgccgcccagagcaagtgcctggaccaggccctggccctgtggaaggagctgctgaccaagggccaggcccccgccgtgagatgcctgcagcagaccgccgccagcctgcagatcctggccgccctgtaccagctggtggccaagcccatgcaggccctggaggtgctgctgctgctgagaatcgtgagcgagagactgaaggaccacagcaaggccgccggcagcagctgccacatcacccagctgctgctgaccctgggctgccccagctacgcccagctgcacctggaggaggccgccagcagcctgaagcacctggaccagaccaccgacacctacctgctgctgagcctgacctgcgacctgctgagaagccagctgtactggacccaccagaaggtgaccaagggcgtgagcctgctgctgagcgtgctgagagaccccgccctgcagaagagcagcaaggcctggtacctgctgagagtgcaggtgctgcagctggtggccgcctacctgagcctgcccagcaacaacctgagccacagcctgtgggagcagctgtgcgcccagggctggcagacccccgagatcgccctgatcgacagccacaagctgctgagaagcatcatcctgctgctgatgggcagcgacatcctgagcacccagaaggccgccgtggagaccagcttcctggactacggcgagaacctggtgcagaagtggcaggtgctgagcgaggtgctgagctgcagcgagaagctggtgtgccacctgggcagactgggcagcgtgagcgaggccaaggccttctgcctggaggccctgaagctgaccaccaagctgcagatccccagacagtgcgccctgttcctggtgctgaagggcgagctggagctggccagaaacgacatcgacctgtgccagagcgacctgcagcaggtgctgttcctgctggagagctgcaccgagttcggcggcgtgacccagcacctggacagcgtgaagaaggtgcacctgcagaagggcaagcagcaggcccaggtgccctgccccccccagctgcccgaggaggagctgttcctgagaggccccgccctggagctggtggccaccgtggccaaggagcccggccccatcgcccccagcaccaacagcagccccgtgctgaagaccaagccccagcccatccccaacttcctgagccacagccccacctgcgactgcagcctgtgcgccagccccgtgctgaccgccgtgtgcctgagatgggtgctggtgaccgccggcgtgagactggccatgggccaccaggcccagggcctggacctgctgcaggtggtgctgaagggctgccccgaggccgccgagagactgacccaggccctgcaggccagcctgaaccacaagaccccccccagcctggtgcccagcctgctggacgagatcctggcccaggcctacaccctgctggccctggagggcctgaaccagcccagcaacgagagcctgcagaaggtgctgcagagcggcctgaagttcgtggccgccagaatcccccacctggagccctggagagccagcctgctgctgatctgggccctgaccaagctgggcggcctgagctgctgcaccacccagctgttcgccagcagctggggctggcagccccccctgatcaagagcgtgcccggcagcgagcccagcaagacccagggccagaagagaagcggcagaggcagacagaagctggccagcgcccccctgagactgaacaacaccagccagaagggcctggagggcagaggcctgccctgcacccccaagccccccgacagaatcagacaggccggcccccacgtgcccttcaccgtgttcgaggaggtgtgccccaccgagagcaagcccgaggtgccccaggcccccagagtgcagcagagagtgcagaccagactgaaggtgaacttcagcgacgacagcgacctggaggaccccgtgagcgccgaggcctggctggccgaggagcccaagagaagaggcaccgccagcagaggcagaggcagagccagaaagggcctgagcctgaagaccgacgccgtggtggcccccggcagcgcccccggcaaccccggcctgaacggcagaagcagaagagccaagaaggtggccagcagacactgcgaggagagaagaccccagagagccagcgaccaggccagacccggccccgagatcatgagaaccatccccgaggaggagctgaccgacaactggagaaagatgagcttcgagatcctgagaggcagcgacggcgaggacagcgccagcggcggcaagacccccgcccccggccccgaggccgccagcggcgagtgggagctgctgagactggacagcagcaagaagaagctgcccagcccctgccccgacaaggagagcgacaaggacctgggccccagactgagactgcccagcgcccccgtggccaccggcctgagcaccctggacagcatctgcgacagcctgagcgtggccttcagaggcatcagccactgcccccccagcggcctgtacgcccacctgtgcagattcctggccctgtgcctgggccacagagacccctacgccaccgccttcctggtgaccgagagcgtgagcatcacctgcagacaccagctgctgacccacctgcacagacagctgagcaaggcccagaagcacagaggcagcctggagatcgccgaccagctgcagggcctgagcctgcaggagatgcccggcgacgtgcccctggccagaatccagagactgttcagcttcagagccctggagagcggccacttcccccagcccgagaaggagagcttccaggagagactggccctgatccccagcggcgtgaccgtgtgcgtgctggccctggccaccctgcagcccggcaccgtgggcaacaccctgctgctgaccagactggagaaggacagcccccccgtgagcgtgcagatccccaccggccagaacaagctgcacctgagaagcgtgctgaacgagttcgacgccatccagaaggcccagaaggagaacagcagctgcaccgacaagagagagtggtggaccggcagactggccctggaccacagaatggaggtgctgatcgccagcctggagaagagcgtgctgggctgctggaagggcctgctgctgcccagcagcgaggagcccggccccgcccaggaggccagcagactgcaggagctgctgcaggactgcggctggaagtaccccgacagaaccctgctgaagatcatgctgagcggcgccggcgccctgaccccccaggacatccaggccctggcctacggcctgtgccccacccagcccgagagagcccaggagctgctgaacgaggccgtgggcagactgcagggcctgaccgtgcccagcaacagccacctggtgctggtgctggacaaggacctgcagaagctgccctgggagagcatgcccagcctgcaggccctgcccgtgaccagactgcccagcttcagattcctgctgagctacagcatcatcaaggagtacggcgccagccccgtgctgagccagggcgtggaccccagaagcaccttctacgtgctgaacccccacaacaacctgagcagcaccgaggagcagttcagagccaacttcagcagcgaggccggctggagaggcgtggtgggcgaggtgcccagacccgagcaggtgcaggaggccctgaccaagcacgacctgtacatctacgccggccacggcgccggcgccagattcctggacggccaggccgtgctgagactgagctgcagagccgtggccctgctgttcggctgcagcagcgccgccctggccgtgagaggcaacctggagggcgccggcatcgtgctgaagtacatcatggccggctgccccctgttcctgggcaacctgtgggacgtgaccgacagagacatcgacagatacaccgaggccctgctgcagggctggctgggcgccggccccggcgcccccctgctgtactacgtgaaccaggccagacaggcccccagactgaagtacctgatcggcgccgcccccatcgcctacggcctgcccgtgagcctgagatag

SEQ ID NO: 81073 - DNA, 1248 bp, synthetic construct
  misc_feature 1..1248: note = Description of Artificial Sequence: Synthetic coding sequence
  source 1..1248: mol_type = other DNA
atgggcaccaccgccagagccgccctggtgctgacctacctggccgtggccagcgccgccagcgagggcggcttcaccgccaccggccagagacagctgagacccgagcacttccaggaggtgggctacgccgccccccccagcccccccctgagcagaagcctgcccatggaccaccccgacagcagccagcacggcccccccttcgagggccagagccaggtgcagcccccccccagccaggaggccacccccctgcagcaggagaagctgctgcccgcccagctgcccgccgagaaggaggtgggcccccccctgccccaggaggccgtgcccctgcagaaggagctgcccagcctgcagcaccccaacgagcagaaggagggcacccccgcccccttcggcgaccagagccaccccgagcccgagagctggaacgccgcccagcactgccagcaggacagaagccagggcggctggggccacagactggacggcttcccccccggcagacccagccccgacaacctgaaccagatctgcctgcccaacagacagcacgtggtgtacggcccctggaacctgccccagagcagctacagccacctgaccagacagggcgagaccctgaacttcctggagatcggctacagcagatgctgccactgcagaagccacaccaacagactggagtgcgccaagctggtgtgggaggacaccctggacaagtactgcgacagagagtacgccgtgaagacccaccaccacctgtgctgcagacacccccccagccccaccagagacgagtgcttcgccagaagagccccctaccccaactacgacagagacatcctgaccatcgacatcggcagagtgacccccaacctgatgggccacctgtgcggcaaccagagagtgctgaccaagcacaagcacatccccggcctgatccacaacatgaccgccagatgctgcgacctgcccttccccgagcaggcctgctgcgccgaggaggagaagctgaccttcatcaacgacctgtgcggccccagaagaaacatctggagagaccccgccctgtgctgctacctgagccccggcgacgagcaggtgaactgcttcaacatcaactacctgagaaacgtggccctggtgagcggcgacaccgagaacgccaagggccagggcgagcagggcagcaccggcggcaccaacatcagcagcaccagcgagcccaaggaggagtag

SEQ ID NO: 81074 - DNA, 1623 bp, synthetic construct
  misc_feature 1..1623: note = Description of Artificial Sequence: Synthetic coding sequence
  source 1..1623: mol_type = other DNA
atgggcaccaccgccagagccgccctggtgctgacctacctggccgtggccagcgccgccagcgagggcggcttcaccgccaccggccagagacagctgagacccgagcacttccaggaggtgggctacgccgccccccccagcccccccctgagcagaagcctgcccatggaccaccccgacagcagccagcacggcccccccttcgagggccagagccaggtgcagcccccccccagccaggaggccacccccctgcagcaggagaagctgctgcccgcccagctgcccgccgagaaggaggtgggcccccccctgccccaggaggccgtgcccctgcagaaggagctgcccagcctgcagcaccccaacgagcagaaggagggcacccccgcccccttcggcgaccagagccaccccgagcccgagagctggaacgccgcccagcactgccagcaggacagaagccagggcggctggggccacagactggacggcttcccccccggcagacccagccccgacaacctgaaccagatctgcctgcccaacagacagcacgtggtgtacggcccctggaacctgccccagagcagctacagccacctgaccagacagggcgagaccctgaacttcctggagatcggctacagcagatgctgccactgcagaagccacaccaacagactggagtgcgccaagctggtgtgggaggaggccatgagcagattctgcgaggccgagttcagcgtgaagaccagaccccactggtgctgcaccagacagggcgaggccagattcagctgcttccaggaggaggccccccagccccactaccagctgagagcctgccccagccaccagcccgacatcagcagcggcctggagctgcccttcccccccggcgtgcccaccctggacaacatcaagaacatctgccacctgagaagattcagaagcgtgcccagaaacctgcccgccaccgaccccctgcagagagagctgctggccctgatccagctggagagagagttccagagatgctgcagacagggcaacaaccacacctgcacctggaaggcctgggaggacaccctggacaagtactgcgacagagagtacgccgtgaagacccaccaccacctgtgctgcagacacccccccagccccaccagagacgagtgcttcgccagaagagccccctaccccaactacgacagagacatcctgaccatcgacatcggcagagtgacccccaacctgatgggccacctgtgcggcaaccagagagtgctgaccaagcacaagcacatccccggcctgatccacaacatgaccgccagatgctgcgacctgcccttccccgagcaggcctgctgcgccgaggaggagaagctgaccttcatcaacgacctgtgcggccccagaagaaacatctggagagaccccgccctgtgctgctacctgagccccggcgacgagcaggtgaactgcttcaacatcaactacctgagaaacgtggccctggtgagcggcgacaccgagaacgccaagggccagggcgagcagggcagcaccggcggcaccaacatcagcagcaccagcgagcccaaggaggagtag

SEQ ID NO: 81075 - DNA, 1704 bp, synthetic construct
  misc_feature 1..1704: note = Description of Artificial Sequence: Synthetic coding sequence
  source 1..1704: mol_type = other DNA
atgggcaccaccgccagagccgccctggtgctgacctacctggccgtggccagcgccgccagcgagggcggcttcaccgccaccggccagagacagctgagacccgagcacttccaggaggtgggctacgccgccccccccagcccccccctgagcagaagcctgcccatggaccaccccgacagcagccagcacggcccccccttcgagggccagagcggcaaggagggcagaggccccagaccccacagccagccctggctgggcgagagagtgggctgcagccacatcccccccagcatcgtgcagcccccccccagccaggaggccacccccctgcagcaggagaagctgctgcccgcccagctgcccgccgagaaggaggtgggcccccccctgccccaggaggccgtgcccctgcagaaggagctgcccagcctgcagcaccccaacgagcagaaggagggcacccccgcccccttcggcgaccagagccaccccgagcccgagagctggaacgccgcccagcactgccagcaggacagaagccagggcggctggggccacagactggacggcttcccccccggcagacccagccccgacaacctgaaccagatctgcctgcccaacagacagcacgtggtgtacggcccctggaacctgccccagagcagctacagccacctgaccagacagggcgagaccctgaacttcctggagatcggctacagcagatgctgccactgcagaagccacaccaacagactggagtgcgccaagctggtgtgggaggaggccatgagcagattctgcgaggccgagttcagcgtgaagaccagaccccactggtgctgcaccagacagggcgaggccagattcagctgcttccaggaggaggccccccagccccactaccagctgagagcctgccccagccaccagcccgacatcagcagcggcctggagctgcccttcccccccggcgtgcccaccctggacaacatcaagaacatctgccacctgagaagattcagaagcgtgcccagaaacctgcccgccaccgaccccctgcagagagagctgctggccctgatccagctggagagagagttccagagatgctgcagacagggcaacaaccacacctgcacctggaaggcctgggaggacaccctggacaagtactgcgacagagagtacgccgtgaagacccaccaccacctgtgctgcagacacccccccagccccaccagagacgagtgcttcgccagaagagccccctaccccaactacgacagagacatcctgaccatcgacatcggcagagtgacccccaacctgatgggccacctgtgcggcaaccagagagtgctgaccaagcacaagcacatccccggcctgatccacaacatgaccgccagatgctgcgacctgcccttccccgagcaggcctgctgcgccgaggaggagaagctgaccttcatcaacgacctgtgcggccccagaagaaacatctggagagaccccgccctgtgctgctacctgagccccggcgacgagcaggtgaactgcttcaacatcaactacctgagaaacgtggccctggtgagcggcgacaccgagaacgccaagggccagggcgagcagggcagcaccggcggcaccaacatcagcagcaccagcgagcccaaggaggagtag

SEQ ID NO: 81076 - DNA, 2100 bp, synthetic construct
  misc_feature 1..2100: note = Description of Artificial Sequence: Synthetic coding sequence
  source 1..2100: mol_type = other DNA
atgaagatcgccgtgctgttctgcttcttcctgctgatcatcttccagaccgacttcggcaagaacgaggagatccccagaaagcagagaagaaagatctaccacagaagactgagaaagagcagcaccagccacaagcacagaagcaacagacagctgggcatccagcagaccaccgtgttcacccccgtggccagactgcccatcgtgaacttcgactacagcatggaggagaagttcgagagcttcagcagcttccccggcgtggagagcagctacaacgtgctgcccggcaagaagggccactgcctggtgaagggcatcaccatgtacaacaaggccgtgtggagccccgagccctgcaccacctgcctgtgcagcgacggcagagtgctgtgcgacgagaccatgtgccacccccagagatgcccccagaccgtgatccccgagggcgagtgctgccccgtgtgcagcgccaccgtgagctacagcctgctgagcggcatcgccctgaacgacagaaacgagttcagcggcgacagcagcgagcagagagagcccaccaacctgctgcacaagcagctgccccccccccaggtgggcatggacagaatcgtgagaaaggaggccctgcagagcgaggaggacgaggaggtgaaggaggaggacaccgagcagaagagagagacccccgagagcagaaaccagggccagctgtacagcgagggcgacagcagaggcggcgacagaaagcagagacccggcgaggagagaagactggcccaccagcagcagagacagggcagagaggaggaggaggacgaggaggaggagggcgaggagggcgaggaggacgaggaggacgaggaggaccccgtgagaggcgacatgttcagaatgcccagcagaagccccctgcccgccccccccagaggcaccctgagactgcccagcggctgcagcctgagctacagaaccatcagctgcatcaacgccatgctgacccagatcccccccctgaccgccccccagatcaccagcctggagctgaccggcaacagcatcgccagcatccccgacgaggccttcaacggcctgcccaacctggagagactggacctgagcaagaacaacatcaccagcagcggcatcggccccaaggccttcaagctgctgaagaagctgatgagactgaacatggacggcaacaacctgatccagatccccagccagctgcccagcaccctggaggagctgaaggtgaacgagaacaacctgcaggccatcgacgaggagagcctgagcgacctgaaccagctggtgaccctggagctggagggcaacaacctgagcgaggccaacgtgaaccccctggccttcaagcccctgaagagcctggcctacctgagactgggcaagaacaagttcagaatcatcccccagggcctgcccggcagcatcgaggagctgtacctggagaacaaccagatcgaggagatcaccgagatctgcttcaaccacaccagaaagatcaacgtgatcgtgctgagatacaacaagatcgaggagaacagaatcgcccccctggcctggatcaaccaggagaacctggagagcatcgacctgagctacaacaagctgtaccacgtgcccagctacctgcccaagagcctgctgcacctggtgctgctgggcaaccagatcgagagaatccccggctacgtgttcggccacatggagcccggcctggagtacctgtacctgagcttcaacaagctggccgacgacggcatggacagagtgagcttctacggcgcctaccacagcctgagagagctgttcctggaccacaacgacctgaagagcatcccccccggcatccaggagatgaaggccctgcacttcctgagactgaacaacaacaagatcagaaacatcctgcccgaggagatctgcaacgccgaggaggacgacgacagcaacctggagcacctgcacctggagaacaactacatcaagatcagagagatccccagctacaccttcagctgcatcagaagctacagcagcatcgtgctgaagccccagaacatcaagtag

SEQ ID NO: 81077 - DNA, 495 bp, synthetic construct
  misc_feature 1..495: note = Description of Artificial Sequence: Synthetic coding sequence
  source 1..495: mol_type = other DNA
atgaagatcgccgtgctgttctgcttcttcctgctgatcatcttccagaccgacttcggcaagaacgaggagatccccagaaagcagagaagaaagatctaccacagaagactgagaaagagcagcaccagccacaagcacagaagcaacagacagctgggcatccagcagaccaccgtgttcacccccgtggccagactgcccatcgtgaacttcgactacagcatggaggagaagttcgagagcttcagcagcttccccggcgtggagagcagctacaacgtgctgcccggcaagaagggccactgcctggtgaagggcatcaccatgtacaacaaggccgtgtggagccccgagccctgcaccacctgcctgtgcagcgacggcagagtgctgtgcgacgagaccatgtgccacccccagagatgcccccagaccgtgatccccgagggcgagtgctgccccgtgtgcagcgccaccggcaccgagatctag

SEQ ID NO: 81078 - DNA, 483 bp, synthetic construct
  misc_feature 1..483: note = Description of Artificial Sequence: Synthetic coding sequence
  source 1..483: mol_type = other DNA
atgaagatcgccgtgctgttctgcttcttcctgctgatcatcttccagaccgacttcggcaagaacgaggagatccccagaaagcagagaagaaagatctaccacagaagactgagaaagagcagcaccagccacaagcacagaagcaacagacagctgggcatccagcagaccaccgtgttcacccccgtggccagactgcccatcgtgaacttcgactacagcatggaggagaagttcgagagcttcagcagcttccccggcgtggagagcagctacaacgtgctgcccggcaagaagggccactgcctggtgaagggcatcaccatgtacaacaaggccgtgtggagccccgagccctgcaccacctgcctgtgcagcgacggcagagtgctgtgcgacgagaccatgtgccacccccagagatgcccccagaccgtgatccccgagggcgagtgctgccccgtgtgcagcgccacctag

SEQ ID NO: 81079 - DNA, 1932 bp, synthetic construct
  misc_feature 1..1932: note = Description of Artificial Sequence: Synthetic coding sequence
  source 1..1932: mol_type = other DNA
atgaagatcgccgtgctgttctgcttcttcctgctgatcatcttccagaccgacttcggcaagaacgaggagatccccagaaagcagagaagaaagatctaccacagaagactgagaaagagcagcaccagccacaagcacagaagcaacagacagctgggcatccagcagaccaccgtgttcacccccgtggccagactgcccatcgtgaacttcgactacagcatggaggagaagttcgagagcttcagcagcttccccggcgtggagagcagctacaacgtgctgcccggcaagaagggccactgcctggtgaagggcatcaccatgtacaacaaggccgtgtggagccccgagccctgcaccacctgcctgtgcagcgacggcagagtgctgtgcgacgagaccatgtgccacccccagagatgcccccagaccgtgatccccgagggcgagtgctgccccgtgtgcagcgccaccgagcagagagagcccaccaacctgctgcacaagcagctgccccccccccaggtgggcatggacagaatcgtgagaaaggaggccctgcagagcgaggaggacgaggaggtgaaggaggaggacaccgagcagaagagagagacccccgagagcagaaaccagggccagctgtacagcgagggcgacagcagaggcggcgacagaaagcagagacccggcgaggagagaagactggcccaccagcagcagagacagggcagagaggaggaggaggacgaggaggaggagggcgaggagggcgaggaggacgaggaggacgaggaggaccccgtgagaggcgacatgttcagaatgcccagcagaagccccctgcccgccccccccagaggcaccctgagactgcccagcggctgcagcctgagctacagaaccatcagctgcatcaacgccatgctgacccagatcccccccctgaccgccccccagatcaccagcctggagctgaccggcaacagcatcgccagcatccccgacgaggccttcaacggcctgcccaacctggagagactggacctgagcaagaacaacatcaccagcagcggcatcggccccaaggccttcaagctgctgaagaagctgatgagactgaacatggacggcaacaacctgatccagatccccagccagctgcccagcaccctggaggagctgaaggtgaacgagaacaacctgcaggccatcgacgaggagagcctgagcgacctgaaccagctggtgaccctggagctggagggcaacaacctgagcgaggccaacgtgaaccccctggccttcaagcccctgaagagcctggcctacctgagactgggcaagaacaagttcagaatcatcccccagggcctgcccggcagcatcgaggagctgtacctggagaacaaccagatcgaggagatcaccgagatctgcttcaaccacaccagaaagatcaacgtgatcgtgctgagatacaacaagatcgaggagaacagaatcgcccccctggcctggatcaaccaggagaacctggagagcatcgacctgagctacaacaagctgtaccacgtgcccagctacctgcccaagagcctgctgcacctggtgctgctgggcaaccagatcgagagaatccccggctacgtgttcggccacatggagcccggcctggagtacctgtacctgagcttcaacaagctggccgacgacggcatggacagagtgagcttctacggcgcctaccacagcctgagagagctgttcctggaccacaacgacctgaagagcatcccccccggcatccaggagatgaaggccctgcacttcctgagactgaacaacaacaagatcagatgcgtgagcgacgccgtgctggagaccgtgaccaacagaagcgacgtggccttccccctgtggtag

SEQ ID NO: 81080 - DNA, 1779 bp, synthetic construct
  misc_feature 1..1779: note = Description of Artificial Sequence: Synthetic coding sequence
  source 1..1779: mol_type = other DNA
atggagatgcaggacctgaccagcccccacagcagactgagcggcagcagcgagagccccagcggccccaagctgggcaacagccacatcaacagcaacagcatgacccccaacggcaccgaggtgaagaccgagcccatgagcagcagcgagaccgccagcaccaccgccgacggcagcctgaacaacttcagcggcagcgccatcggcagcagcagcttcagccccagacccacccaccagttcagccccccccagatctaccccagcaacagaccctacccccacatcctgcccacccccagcagccagaccatggccgcctacggccagacccagttcaccaccggcatgcagcaggccaccgcctacgccacctacccccagcccggccagccctacggcatcagcagctacggcgccctgtgggccggcatcaagaccgagggcggcctgagccagagccagagccccggccagaccggcttcctgagctacggcaccagcttcagcaccccccagcccggccaggccccctacagctaccagatgcagggcagcagcttcaccaccagcagcggcatctacaccggcaacaacagcctgaccaacagcagcggcttcaacagcagccagcaggactaccccagctaccccagcttcggccagggccagtacgcccagtactacaacagcagcccctaccccgcccactacatgaccagcagcaacaccagccccaccacccccagcaccaacgccacctaccagctgcaggagccccccagcggcatcaccagccaggccgtgaccgaccccaccgccgagtacagcaccatccacagccccagcacccccatcaaggacagcgacagcgacagactgagaagaggcagcgacggcaagagcagaggcagaggcagaagaaacaacaaccccagccccccccccgacagcgacctggagagagtgttcatctgggacctggacgagaccatcatcgtgttccacagcctgctgaccggcagctacgccaacagatacggcagagacccccccaccagcgtgagcctgggcctgagaatggaggagatgatcttcaacctggccgacacccacctgttcttcaacgacctggaggagtgcgaccaggtgcacatcgacgacgtgagcagcgacgacaacggccaggacctgagcacctacaacttcggcaccgacggcttccccgccgccgccaccagcgccaacctgtgcctggccaccggcgtgagaggcggcgtggactggatgagaaagctggccttcagatacagaagagtgaaggagatctacaacacctacaagaacaacgtgggcggcctgctgggccccgccaagagagaggcctggctgcagctgagagccgagatcgaggccctgaccgacagctggctgaccctggccctgaaggccctgagcctgatccacagcagaaccaactgcgtgaacatcctggtgaccaccacccagctgatccccgccctggccaaggtgctgctgtacggcctgggcatcgtgttccccatcgagaacatctacagcgccaccaagatcggcaaggagagctgcttcgagagaatcatccagagattcggcagaaaggtggtgtacgtggtgatcggcgacggcgtggaggaggagcagggcgccaagaagcacgccatgcccttctggagaatcagcagccacagcgacctgatggccctgcaccacgccctggagctggagtacctgtag

SEQ ID NO: 81081 - DNA, 1680 bp, synthetic construct
  misc_feature 1..1680: note = Description of Artificial Sequence: Synthetic coding sequence
  source 1..1680: mol_type = other DNA
atgctgctgttcccccaggtggccgtgaagaccgagcccatgagcagcagcgagaccgccagcaccaccgccgacggcagcctgaacaacttcagcggcagcgccatcggcagcagcagcttcagccccagacccacccaccagttcagccccccccagatctaccccagcaacagaccctacccccacatcctgcccacccccagcagccagaccatggccgcctacggccagacccagttcaccaccggcatgcagcaggccaccgcctacgccacctacccccagcccggccagccctacggcatcagcagctacggcgccctgtgggccggcatcaagaccgagggcggcctgagccagagccagagccccggccagaccggcttcctgagctacggcaccagcttcagcaccccccagcccggccaggccccctacagctaccagatgcagggcagcagcttcaccaccagcagcggcatctacaccggcaacaacagcctgaccaacagcagcggcttcaacagcagccagcaggactaccccagctaccccagcttcggccagggccagtacgcccagtactacaacagcagcccctaccccgcccactacatgaccagcagcaacaccagccccaccacccccagcaccaacgccacctaccagctgcaggagccccccagcggcatcaccagccaggccgtgaccgaccccaccgccgagtacagcaccatccacagccccagcacccccatcaaggacagcgacagcgacagactgagaagaggcagcgacggcaagagcagaggcagaggcagaagaaacaacaaccccagccccccccccgacagcgacctggagagagtgttcatctgggacctggacgagaccatcatcgtgttccacagcctgctgaccggcagctacgccaacagatacggcagagacccccccaccagcgtgagcctgggcctgagaatggaggagatgatcttcaacctggccgacacccacctgttcttcaacgacctggaggagtgcgaccaggtgcacatcgacgacgtgagcagcgacgacaacggccaggacctgagcacctacaacttcggcaccgacggcttccccgccgccgccaccagcgccaacctgtgcctggccaccggcgtgagaggcggcgtggactggatgagaaagctggccttcagatacagaagagtgaaggagatctacaacacctacaagaacaacgtgggcggcctgctgggccccgccaagagagaggcctggctgcagctgagagccgagatcgaggccctgaccgacagctggctgaccctggccctgaaggccctgagcctgatccacagcagaaccaactgcgtgaacatcctggtgaccaccacccagctgatccccgccctggccaaggtgctgctgtacggcctgggcatcgtgttccccatcgagaacatctacagcgccaccaagatcggcaaggagagctgcttcgagagaatcatccagagattcggcagaaaggtggtgtacgtggtgatcggcgacggcgtggaggaggagcagggcgccaagaagcacgccatgcccttctggagaatcagcagccacagcgacctgatggccctgcaccacgccctggagctggagtacctgtag

SEQ ID NO: 81082 - DNA, 1779 bp, synthetic construct; identical to SEQ ID NO: 81080
  misc_feature 1..1779: note = Description of Artificial Sequence: Synthetic coding sequence
  source 1..1779: mol_type = other DNA

SEQ ID NO: 81083 - DNA, 1683 bp, synthetic construct
  misc_feature 1..1683: note = Description of Artificial Sequence: Synthetic coding sequence
  source 1..1683: mol_type = other DNA
atgctgatgatctacgtgcagctggtggtgaagaccgagcccatgagcagcagcgagaccgccagcaccaccgccgacggcagcctgaacaacttcagcggcagcgccatcggcagcagcagcttcagccccagacccacccaccagttcagccccccccagatctaccccagcaacagaccctacccccacatcctgcccacccccagcagccagaccatggccgcctacggccagacccagttcaccaccggcatgcagcaggccaccgcctacgccacctacccccagcccggccagccctacggcatcagcagctacggcgccctgtgggccggcatcaagaccgagggcggcctgagccagagccagagccccggccagaccggcttcctgagctacggcaccagcttcagcaccccccagcccggccaggccccctacagctaccagatgcagggcagcagcttcaccaccagcagcggcatctacaccggcaacaacagcctgaccaacagcagcggcttcaacagcagccagcaggactaccccagctaccccagcttcggccagggccagtacgcccagtactacaacagcagcccctaccccgcccactacatgaccagcagcaacaccagccccaccacccccagcaccaacgccacctaccagctgcaggagccccccagcggcatcaccagccaggccgtgaccgaccccaccgccgagtacagcaccatccacagccccagcacccccatcaaggacagcgacagcgacagactgagaagaggcagcgacggcaagagcagaggcagaggcagaagaaacaacaaccccagccccccccccgacagcgacctggagagagtgttcatctgggacctggacgagaccatcatcgtgttccacagcctgctgaccggcagctacgccaacagatacggcagagacccccccaccagcgtgagcctgggcctgagaatggaggagatgatcttcaacctggccgacacccacctgttcttcaacgacctggaggagtgcgaccaggtgcacatcgacgacgtgagcagcgacgacaacggccaggacctgagcacctacaacttcggcaccgacggcttccccgccgccgccaccagcgccaacctgtgcctggccaccggcgtgagaggcggcgtggactggatgagaaagctggccttcagatacagaagagtgaaggagatctacaacacctacaagaacaacgtgggcggcctgctgggccccgccaagagagaggcctggctgcagctgagagccgagatcgaggccctgaccgacagctggctgaccctggccctgaaggccctgagcctgatccacagcagaaccaactgcgtgaacatcctggtgaccaccacccagctgatccccgccctggccaaggtgctgctgtacggcctgggcatcgtgttccccatcgagaacatctacagcgccaccaagatcggcaaggagagctgcttcgagagaatcatccagagattcggcagaaaggtggtgtacgtggtgatcggcgacggcgtggaggaggagcagggcgccaagaagcacgccatgcccttctggagaatcagcagccacagcgacctgatggccctgcaccacgccctggagctggagtacctgtag

SEQ ID NO: 81084 - DNA, 1674 bp, synthetic construct
  misc_feature 1..1674: note = Description of Artificial Sequence: Synthetic coding sequence
  source 1..1674: mol_type = other DNA
atggagatgcaggacctgaccagcccccacagcagactgagcggcagcagcgagagccccagcggccccaagctgggcaacagccacatcaacagcaacagcatgacccccaacggcaccgaggtgaagaccgagcccatgagcagcagcgagaccgccagcaccaccgccgacggcagcctgaacaacttcagcggcagcgccatcggcagcagcagcttcagccccagacccacccaccagttcagccccccccagatctaccccagcaacagaccctacccccacatcctgcccacccccagcagccagaccatggccgcctacggccagacccagttcaccaccggcatgcagcaggccaccgcctacgccacctacccccagcccggccagccctacggcatcagcagctacggcatcaagaccgagggcggcctgagccagagccagagccccggccagaccggcttcctgagctacggcaccagcttcagcaccccccagcccggccaggccccctacagctaccagatgcagggcagcagcttcaccaccagcagcggcatctacaccggcaacaacagcctgaccaacagcagcggcttcaacagcagccagcaggactaccccagctaccccagcttcggccagggccagtacgcccagtactacaacagcagcccctaccccgcccactacatgaccagcagcaacaccagccccaccacccccagcaccaacgccacctaccagctgcaggagccccccagcggcatcaccagccaggccgtgaccgaccccaccgccgagtacagcaccatccacagccccagcacccccatcaaggacagcgacagcgacagactgagaagaggcagcgacggcaagagcagaggcagaggcagaagaaacaacaaccccagccccccccccgacagcgacctggagagagtgttcatctgggacctggacgagaccatcatcgtgttccacagcctgctgaccggcagctacgccaacagatacggcagagagtgcgaccaggtgcacatcgacgacgtgagcagcgacgacaacggccaggacctgagcacctacaacttcggcaccgacggcttccccgccgccgccaccagcgccaacctgtgcctggccaccggcgtgagaggcggcgtggactggatgagaaagctggccttcagatacagaagagtgaaggagatctacaacacctacaagaacaacgtgggcggcctgctgggccccgccaagagagaggcctggctgcagctgagagccgagatcgaggccctgaccgacagctggctgaccctggccctgaaggccctgagcctgatccacagcagaaccaactgcgtgaacatcctggtgaccaccacccagctgatccccgccctggccaaggtgctgctgtacggcctgggcatcgtgttccccatcgagaacatctacagcgccaccaagatcggcaaggagagctgcttcgagagaatcatccagagattcggcagaaaggtggtgtacgtggtgatcggcgacggcgtggaggaggagcagggcgccaagaagcacgccatgcccttctggagaatcagcagccacagcgacctgatggccctgcaccacgccctggagctggagtacctgtag

SEQ ID NO: 81085 - DNA, 1527 bp, synthetic construct
  misc_feature 1..1527: note = Description of Artificial Sequence: Synthetic coding sequence
  source 1..1527: mol_type = other DNA
atggtggagctggtgatcagccccagcctgaccgtgaacagcgactgcctggacaagctgaagttcaacagagccgacgccgccgtgtggaccctgagcgacagacagggcatcaccaagagcgcccccctgagagtgagccagctgttcagcagaagctgccccagagtgctgcccagacagcccagcaccgccatggccgcctacggccagacccagtacagcgccggcatccagcaggccaccccctacaccgcctaccccccccccgcccaggcctacggcatccccagctacagcatcaagaccgaggacagcctgaaccacagccccggccagagcggcttcctgagctacggcagcagcttcagcaccagccccaccggccagagcccctacacctaccagatgcacggcaccaccggcttctaccagggcggcaacggcctgggcaacgccgccggcttcggcagcgtgcaccaggactaccccagctaccccggcttcccccagagccagtacccccagtactacggcagcagctacaaccccccctacgtgcccgccagcagcatctgccccagccccctgagcaccagcacctacgtgctgcaggaggccagccacaacgtgcccaaccagagcagcgagagcctggccggcgagtacaacacccacaacggccccagcacccccgccaaggagggcgacaccgacagaccccacagagccagcgacggcaagctgagaggcagaagcaagagaagcagcgaccccagccccgccggcgacaacgagatcgagagagtgttcgtgtgggacctggacgagaccatcatcatcttccacagcctgctgaccggcaccttcgccagcagatacggcaaggactgcgaccagatccacgtggacgacgtgagcagcgacgacaacggccaggacctgagcacctacaacttcagcgccgacggcttccacagcagcgcccccggcgccaacctgtgcctgggcagcggcgtgcacggcggcgtggactggatgagaaagctggccttcagatacagaagagtgaaggagatgtacaacacctacaagaacaacgtgggcggcctgatcggcacccccaagagagagacctggctgcagctgagagccgagctggaggccctgaccgacctgtggctgacccacagcctgaaggccctgaacctgatcaacagcagacccaactgcgtgaacgtgctggtgaccaccacccagctgatccccgccctggccaaggtgctgctgtacggcctgggcagcgtgttccccatcgagaacatctacagcgccaccaagaccggcaaggagagctgcttcgagagaatcatgcagagattcggcagaaaggccgtgtacgtggtgatcggcgacggcgtggaggaggagcagggcgccaagaagcacaacatgcccttctggagaatcagctgccacgccgacctggaggccctgagacacgccctggagctggagtacctgtag

SEQ ID NO: 81086 - DNA, 1617 bp, synthetic construct
  misc_feature 1..1617: note = Description of Artificial Sequence: Synthetic coding sequence
  source 1..1617: mol_type = other DNA
atggtggagctggtgatcagccccagcctgaccgtgaacagcgactgcctggacaagctgaagttcaacagagccgacgccgccgtgtggaccctgagcgacagacagggcatcaccaagagcgcccccctgagagtgagccagctgttcagcagaagctgccccagagtgctgcccagacagcccagcaccgccatggccgcctacggccagacccagtacagcgccggcatccagcaggccaccccctacaccgcctaccccccccccgcccaggcctacggcatccccagctacagcatcaagaccgaggacagcctgaaccacagccccggccagagcggcttcctgagctacggcagcagcttcagcaccagccccaccggccagagcccctacacctaccagatgcacggcaccaccggcttctaccagggcggcaacggcctgggcaacgccgccggcttcggcagcgtgcaccaggactaccccagctaccccggcttcccccagagccagtacccccagtactacggcagcagctacaaccccccctacgtgcccgccagcagcatctgccccagccccctgagcaccagcacctacgtgctgcaggaggccagccacaacgtgcccaaccagagcagcgagagcctggccggcgagtacaacacccacaacggccccagcacccccgccaaggagggcgacaccgacagaccccacagagccagcgacggcaagctgagaggcagaagcaagagaagcagcgaccccagccccgccggcgacaacgagatcgagagagtgttcgtgtgggacctggacgagaccatcatcatcttccacagcctgctgaccggcaccttcgccagcagatacggcaaggacaccaccaccagcgtgagaatcggcctgatgatggaggagatgatcttcaacctggccgacacccacctgttcttcaacgacctggaggactgcgaccagatccacgtggacgacgtgagcagcgacgacaacggccaggacctgagcacctacaacttcagcgccgacggcttccacagcagcgcccccggcgccaacctgtgcctgggcagcggcgtgcacggcggcgtggactggatgagaaagctggccttcagatacagaagagtgaaggagatgtacaacacctacaagaacaacgtgggcggcctgatcggcacccccaagagagagacctggctgcagctgagagccgagctggaggccctgaccgacctgtggctgacccacagcctgaaggccctgaacctgatcaacagcagacccaactgcgtgaacgtgctggtgaccaccacccagctgatccccgccctggccaaggtgctgctgtacggcctgggcagcgtgttccccatcgagaacatctacagcgccaccaagaccggcaaggagagctgcttcgagagaatcatgcagagattcggcagaaaggccgtgtacgtggtgatcggcgacggcgtggaggaggagcagggcgccaagaagcacaacatgcccttctggagaatcagctgccacgccgacctggaggccctgagacacgccctggagctggagtacctgtag

SEQ ID NO: 81087 - DNA, 1380 bp, synthetic construct
  misc_feature 1..1380: note = Description of Artificial Sequence: Synthetic coding sequence
  source 1..1380: mol_type = other DNA
atggtggagctggtgatcagccccagcctgaccgtgaacagcgactgcctggacaagctgaagttcaacagagccgacgccgccgtgtggaccctgagcgacagacagggcatcaccaagagcgcccccctgagagtgagccagctgttcagcagaagctgccccagagtgctgcccagacagcccagcaccgccatggccgcctacggccagacccagtacagcgccggcatccagcaggccaccccctacaccgcctaccccccccccgcccaggcctacggcatccccagctacagcatcaagaccgaggacagcctgaaccacagccccggccagagcggcttcctgagctacggcagcagcttcagcaccagccccaccggccagagcccctacacctaccagatgcacggcaccaccggcttctaccagggcggcaacggcctgggcaacgccgccggcttcggcagcgtgcaccaggactaccccagctaccccggcttcccccagagccagtacccccagtactacggcagcagctacaaccccccctacgtgcccgccagcagcatctgccccagccccctgagcaccagcacctacgtgctgcaggaggccagccacaacgtgcccaaccagagcagcgagagcctggccggcgagtacaacacccacaacggccccagcacccccgccaaggagggcgacaccgacagaccccacagagccagcgacggcaagctgagaggcagaagcaagagaagcagcgaccccagccccgccggcgacaacgagatcgagagagtgttcgtgtgggacctggacgagaccatcatcatcttccacagcctgctgaccggcaccttcgccagcagatacggcaaggacaccaccaccagcgtgagaatcggcctgatgatggaggagatgatcttcaacctggccgacacccacctgttcttcaacgacctggaggactgcgaccagatccacgtggacgacgtgagcagcgacgacaacggccaggacctgagcacctacaacttcagcgccgacggcttccacagcagcgcccccggcgccaacctgtgcctgggcagcggcgtgcacggcggcgtggactggatgagaaagctggccttcagatacagaagagtgaaggagatgtacaacacctacaagaacaacgtgggcggcaaggagagctgcttcgagagaatcatgcagagattcggcagaaaggccgtgtacgtggtgatcggcgacggcgtggaggaggagcagggcgccaagaagcacaacatgcccttctggagaatcagctgccacgccgacctggaggccctgagacacgccctggagctggagtacctgtag

SEQ ID NO: 81088 - DNA, 1527 bp, synthetic construct
  misc_feature 1..1527: note = Description of Artificial Sequence: Synthetic coding sequence
  source 1..1527: mol_type = other DNA
atggtggagctggtgatcagccccagcctgaccgtgaacagcgactgcctggacaagctgaagttcaacagagccgacgccgccgtgtggaccctgagcgacagacagggcatcaccaagagcgcccccctgagagtgagccagctgttcagcagaagctgccccagagtgctgcccagacagcccagcaccgccatggccgcctacggccagacccagtacagcgccggcatccagcaggccaccccctacaccgcctaccccccccccgcccaggcctacggcatccccagctacagcatcaagaccgaggacagcctgaaccacagccccggccagagcggcttcctgagctacggcagcagcttcagcaccagccccaccggccagagcccctacacctaccagatgcacggcaccaccggcttctaccagggcggcaacggcctgggcaacgccgccggcttcggcagcgtgcaccaggactaccccagctaccccggcttcccccagagccagtacccccagtactacggcagcagctacaaccccccctacgtgcccgccagcagcatctgccccagccccctgagcaccagcacctacgtgctgcaggaggccagccacaacgtgcccaaccagagcagcgagagcctggccggcgagtacaacacccacaacggccccagcacccccgccaaggagggcgacaccgacagaccccacagagccagcgacggcaagctgagaggcagaagcaagagaagcagcgaccccagccccgccggcgacaacgagatcgagagagtgttcgtgtgggacctggacgagaccatcatcatcttccacagcctgctgaccggcaccttcgccagcagatacggcaaggactgcgaccagatccacgtggacgacgtgagcagcgacgacaacggccaggacctgagcacctacaacttcagcgccgacggcttccacagcagcgcccccggcgccaacctgtgcctgggcagcggcgtgcacggcggcgtggactggatgagaaagctggccttcagatacagaagagtgaaggagatgtacaacacctacaagaacaacgtgggcggcctgatcggcacccccaagagagagacctggctgcagctgagagccgagctggaggccctgaccgacctgtggctgacccacagcctgaaggccctgaacctgatcaacagcagacagaactgcgtgaacgtgctggtgaccaccacccagctgatccccgccctggccaaggtgctgctgtacggcctgggcagcgtgttccccatcgagaacatctacagcgccaccaagaccggcaaggagagctgcttcgagagaatcatgcagagattcggcagaaaggccgtgtacgtggtgatcggcgacggcgtggaggaggagcagggcgccaagaagcacaacatgcccttctggagaatcagctgccacgccgacctggaggccctgagacacgccctggagctggagtacctgtag

SEQ ID NO: 81089 - DNA, 1611 bp, synthetic construct
  misc_feature 1..1611: note = Description of Artificial Sequence: Synthetic coding sequence
  source 1..1611: mol_type = other DNA
atggaggaggagcaggacctgcccgagcagcccgtgaagaaggccaagatgcaggagagcggcgagcagaccatcagccaggtgagcaaccccgacgtgagcgaccagaagcccgagaccagcagcctggccagcaacctgcccatgagcgaggagatcatgacctgcaccgactacatccccagaagcagcaacgactacaccagccagatgtacagcgccaagccctacgcccacatcctgagcgtgcccgtgagcgagaccgcctaccccggccagacccagtaccagaccctgcagcagacccagccctacgccgtgtacccccaggccacccagacctacggcctgccccccttcgccagcagcaccaacgccagcctgatcagcaccagcagcaccatcgccaacatccccgccgccgccgtggccagcatcagcaaccaggactaccccacctacaccatcctgggccagaaccagtaccaggcctgctaccccagcagcagcttcggcgtgaccggccagaccaacagcgacgccgagagcaccaccctggccgccaccacctaccagagcgagaagcccagcgtgatggcccccgcccccgccgcccagagactgagcagcggcgaccccagcaccagccccagcctgagccagaccacccccagcaaggacaccgacgaccagagcagaaagaacatgaccagcaagaacagaggcaagagaaaggccgacgccaccagcagccaggacagcgagctggagagagtgttcctgtgggacctggacgagaccatcatcatcttccacagcctgctgaccggcagctacgcccagaagtacggcaaggaccccaccgtggtgatcggcagcggcctgaccatggaggagatgatcttcgaggtggccgacacccacctgttcttcaacgacctggaggagtgcgaccaggtgcacgtggaggacgtggccagcgacgacaacggccaggacctgagcaactacagcttcagcaccgacggcttcagcggcagcggcggcagcggcagccacggcagcagcgtgggcgtgcagggcggcgtggactggatgagaaagctggccttcagatacagaaaggtgagagagatctacgacaagcacaagagcaacgtgggcggcctgctgagcccccagagaaaggaggccctgcagagactgagagccgagatcgaggtgctgaccgacagctggctgggcaccgccctgaagagcctgctgctgatccagagcagaaagaactgcgtgaacgtgctgatcaccaccacccagctggtgcccgccctggccaaggtgctgctgtacggcctgggcgagatcttccccatcgagaacatctacagcgccaccaagatcggcaaggagagctgcttcgagagaatcgtgagcagattcggcaagaaggtgacctacgtggtgatcggcgacggcagagacgaggagatcgccgccaagcagcagctgtacttcctggacatggaggccctgggctgccagctggagcccaccgccctgatcctgttcatccagctgagcggcaacctgagcaactacaacaagctgtag

SEQ ID NO: 81090 - DNA, 1251 bp, synthetic construct
  misc_feature 1..1251: note = Description of Artificial Sequence: Synthetic coding sequence
  source 1..1251: mol_type = other DNA
atgatcatcccccacaagtgcatcctgcagaccagcagcaccaacgccagcctgatcagcaccagcagcaccatcgccaacatccccgccgccgccgtggccagcatcagcaaccaggactaccccacctacaccatcctgggccagaaccagtaccaggcctgctaccccagcagcagcttcggcgtgaccggccagaccaacagcgacgccgagagcaccaccctggccgccaccacctaccagagcgagaagcccagcgtgatggcccccgcccccgccgcccagagactgagcagcgaccccagcaccagccccagcctgagccagaccacccccagcaaggacaccgacgaccagagcagaaagaacatgaccagcaagaacagaggcaagagaaaggccgacgccaccagcagccaggacagcgagctggagagagtgttcctgtgggacctggacgagaccatcatcatcttccacagcctgctgaccggcagctacgcccagaagtacggcaaggaccccaccgtggtgatcggcagcggcctgaccatggaggagatgatcttcgaggtggccgacacccacctgttcttcaacgacctggaggagtgcgaccaggtgcacgtggaggacgtggccagcgacgacaacggccaggacctgagcaactacagcttcagcaccgacggcttcagcggcagcggcggcagcggcagccacggcagcagcgtgggcgtgcagggcggcgtggactggatgagaaagctggccttcagatacagaaaggtgagagagatctacgacaagcacaagagcaacgtgggcggcctgctgagcccccagagaaaggaggccctgcagagactgagagccgagatcgaggtgctgaccgacagctggctgggcaccgccctgaagagcctgctgctgatccagagcagaaagaactgcgtgaacgtgctgatcaccaccacccagctggtgcccgccctggccaaggtgctgctgtacggcctgggcgagatcttccccatcgagaacatctacagcgccaccaagatcggcaaggagagctgcttcgagagaatcgtgagcagattcggcaagaaggtgacctacgtggtgatcggcgacggcagagacgaggagatcgccgccaagcagcacaacatgcccttctggagaatcaccaaccacggcgacctggtgagcctgcaccaggccctggagctggacttcctgtag

SEQ ID NO: 81091 - DNA, 1722 bp, synthetic construct
  misc_feature 1..1722: note = Description of Artificial Sequence: Synthetic coding sequence
  source 1..1722: mol_type = other DNA
atggaggaggagcaggacctgcccgagcagcccgtgaagaaggccaagatgcaggagagcggcgagcagaccatcagccaggtgagcaaccccgacgtgagcgaccagaagcccgagaccagcagcctggccagcaacctgcccatgagcgaggagatcatgacctgcaccgactacatccccagaagcagcaacgactacaccagccagatgtacagcgccaagccctacgcccacatcctgagcgtgcccgtgagcgagaccgcctaccccggccagacccagtaccagaccctgcagcagacccagccctacgccgtgtacccccaggccacccagacctacggcctgccccccttcggcgccctgtggcccggcatgaagcccgagagcggcctgatccagacccccagccccagccagcacagcgtgctgacctgcaccaccggcctgaccaccagccagcccagccccgcccactacagctaccccatccaggccagcagcaccaacgccagcctgatcagcaccagcagcaccatcgccaacatccccgccgccgccgtggccagcatcagcaaccaggactaccccacctacaccatcctgggccagaaccagtaccaggcctgctaccccagcagcagcttcggcgtgaccggccagaccaacagcgacgccgagagcaccaccctggccgccaccacctaccagagcgagaagcccagcgtgatggcccccgcccccgccgcccagagactgagcagcggcgaccccagcaccagccccagcctgagccagaccacccccagcaaggacaccgacgaccagagcagaaagaacatgaccagcaagaacagaggcaagagaaaggccgacgccaccagcagccaggacagcgagctggagagagtgttcctgtgggacctggacgagaccatcatcatcttccacagcctgctgaccggcagctacgcccagaagtacggcaaggaccccaccgtggtgatcggcagcggcctgaccatggaggagatgatcttcgaggtggccgacacccacctgttcttcaacgacctggaggagtgcgaccaggtgcacgtggaggacgtggccagcgacgacaacggccaggacctgagcaactacagcttcagcaccgacggcttcagcggcagcggcggcagcggcagccacggcagcagcgtgggcgtgcagggcggcgtggactggatgagaaagctggccttcagatacagaaaggtgagagagatctacgacaagcacaagagcaacgtgggcggcctgctgagcccccagagaaaggaggccctgcagagactgagagccgagatcgaggtgctgaccgacagctggctgggcaccgccctgaagagcctgctgctgatccagagcagaaagaactgcgtgaacgtgctgatcaccaccacccagctggtgcccgccctggccaaggtgctgctgtacggcctgggcgagatcttccccatcgagaacatctacagcgccaccaagatcggcaaggagagctgcttcgagagaatcgtgagcagattcggcaagaaggtgacctacgtggtgatcggcgacggcagagacgaggagatcgccgccaagcagcacaacatgcccttctggagaatcaccaaccacggcgacctggtgagcctgcaccaggccctggagctggacttcctgtag

SEQ ID NO: 81092 - DNA, 1344 bp, synthetic construct
  misc_feature 1..1344: note = Description of Artificial Sequence: Synthetic coding sequence
  source 1..1344: mol_type = other DNA
atgaagcccgagagcggcctgatccagacccccagccccagccagcacagcgtgctgacctgcaccaccggcctgaccaccagccagcccagccccgcccactacagctaccccatccaggccagcagcaccaacgccagcctgatcagcaccagcagcaccatcgccaacatccccgccgccgccgtggccagcatcagcaaccaggactaccccacctacaccatcctgggccagaaccagtaccaggcctgctaccccagcagcagcttcggcgtgaccggccagaccaacagcgacgccgagagcaccaccctggccgccaccacctaccagagcgagaagcccagcgtgatggcccccgcccccgccgcccagagactgagcagcggcgaccccagcaccagccccagcctgagccagaccacccccagcaaggacaccgacgaccagagcagaaagaacatgaccagcaagaacagaggcaagagaaaggccgacgccaccagcagccaggacagcgagctggagagagtgttcctgtgggacctggacgagaccatcatcatcttccacagcctgctgaccggcagctacgcccagaagtacggcaaggaccccaccgtggtgatcggcagcggcctgaccatggaggagatgatcttcgaggtggccgacacccacctgttcttcaacgacctggaggagtgcgaccaggtgcacgtggaggacgtggccagcgacgacaacggccaggacctgagcaactacagcttcagcaccgacggcttcagcggcagcggcggcagcggcagccacggcagcagcgtgggcgtgcagggcggcgtggactggatgagaaagctggccttcagatacagaaaggtgagagagatctacgacaagcacaagagcaacgtgggcggcctgctgagcccccagagaaaggaggccctgcagagactgagagccgagatcgaggtgctgaccgacagctggctgggcaccgccctgaagagcctgctgctgatccagagcagaaagaactgcgtgaacgtgctgatcaccaccacccagctggtgcccgccctggccaaggtgctgctgtacggcctgggcgagatcttccccatcgagaacatctacagcgccaccaagatcggcaaggagagctgcttcgagagaatcgtgagcagattcggcaagaaggtgacctacgtggtgatcggcgacggcagagacgaggagatcgccgccaagcagcacaacatgcccttctggagaatcaccaaccacggcgacctggtgagcctgcaccaggccctggagctggacttcctgtag

SEQ ID NO: 81093 - DNA, 1584 bp, synthetic construct
  misc_feature 1..1584: note = Description of Artificial Sequence: Synthetic coding sequence
  source 1..1584: mol_type = other DNA
atggaggaggagcaggacctgcccgagcagcccgtgaagaaggccaagatgcaggagagcggcgagcagaccatcagccaggtgagcaaccccgacgtgagcgaccagaagcccgagaccagcagcctggccagcaacctgcccatgagcgaggagatcatgacctgcaccgactacatccccagaagcagcaacgactacaccagccagatgtacagcgccaagccctacgcccacatcctgagcgtgcccgtgagcgagaccgcctaccccggccagacccagtaccagaccctgcagcagacccagccctacgccgtgtacccccaggccacccagacctacggcctgccccccttcgccagcagcaccaacgccagcctgatcagcaccagcagcaccatcgccaacatccccgccgccgccgtggccagcatcagcaaccaggactaccccacctacaccatcctgggccagaaccagtaccaggcctgctaccccagcagcagcttcggcgtgaccggccagaccaacagcgacgccgagagcaccaccctggccgccaccacctaccagagcgagaagcccagcgtgatggcccccgcccccgccgcccagagactgagcagcggcgaccccagcaccagccccagcctgagccagaccacccccagcaaggacaccgacgaccagagcagaaagaacatgaccagcaagaacagaggcaagagaaaggccgacgccaccagcagccaggacagcgagctggagagagtgttcctgtgggacctggacgagaccatcatcatcttccacagcctgctgaccggcagctacgcccagaagtacggcaaggaccccaccgtggtgatcggcagcggcctgaccatggaggagatgatcttcgaggtggccgacacccacctgttcttcaacgacctggaggagtgcgaccaggtgcacgtggaggacgtggccagcgacgacaacggccaggacctgagcaactacagcttcagcaccgacggcttcagcggcagcggcggcagcggcagccacggcagcagcgtgggcgtgcagggcggcgtggactggatgagaaagctggccttcagatacagaaaggtgagagagatctacgacaagcacaagagcaacgtgggcggcctgctgagcccccagagaaaggaggccctgcagagactgagagccgagatcgaggtgctgaccgacagctggctgggcaccgccctgaagagcctgctgctgatccagagcagaaagaactgcgtgaacgtgctgatcaccaccacccagctggtgcccgccctggccaaggtgctgctgtacggcctgggcgagatcttccccatcgagaacatctacagcgccaccaagatcggcaaggagagctgcttcgagagaatcgtgagcagattcggcaagaaggtgacctacgtggtgatcggcgacggcagagacgaggagatcgccgccaagcagcacaacatgcccttctggagaatcaccaaccacggcgacctggtgagcctgcaccaggccctggagctggacttcctgtag

SEQ ID NO: 81094 - DNA, 1563 bp, synthetic construct
  misc_feature 1..1563: note = Description of Artificial Sequence: Synthetic coding sequence
  source 1..1563: mol_type = other DNA
atgacctgcaccgactacatccccagaagcagcaacgactacaccagccagatgtacagcgccaagccctacgcccacatcctgagcgtgcccgtgagcgagaccgcctaccccggccagacccagtaccagaccctgcagcagacccagccctacgccgtgtacccccaggccacccagacctacggcctgccccccttcggcgccctgtggcccggcatgaagcccgagagcggcctgatccagacccccagccccagccagcacagcgtgctgacctgcaccaccggcctgaccaccagccagcccagccccgcccactacagctaccccatccaggccagcagcaccaacgccagcctgatcagcaccagcagcaccatcgccaacatccccgccgccgccgtggccagcatcagcaaccaggactaccccacctacaccatcctgggccagaaccagtaccaggcctgctaccccagcagcagcttcggcgtgaccggccagaccaacagcgacgccgagagcaccaccctggccgccaccacctaccagagcgagaagcccagcgtgatggcccccgcccccgccgcccagagactgagcagcggcgaccccagcaccagccccagcctgagccagaccacccccagcaaggacaccgacgaccagagcagaaagaacatgaccagcaagaacagaggcaagagaaaggccgacgccaccagcagccaggacagcgagctggagagagtgttcctgtgggacctggacgagaccatcatcatcttccacagcctgctgaccggcagctacgcccagaagtacggcaaggaccccaccgtggtgatcggcagcggcctgaccatggaggagatgatcttcgaggtggccgacacccacctgttcttcaacgacctggaggagtgcgaccaggtgcacgtggaggacgtggccagcgacgacaacggccaggacctgagcaactacagcttcagcaccgacggcttcagcggcagcggcggcagcggcagccacggcagcagcgtgggcgtgcagggcggcgtggactggatgagaaagctggccttcagatacagaaaggtgagagagatctacgacaagcacaagagcaacgtgggcggcctgctgagcccccagagaaaggaggccctgcagagactgagagccgagatcgaggtgctgaccgacagctggctgggcaccgccctgaagagcctgctgctgatccagagcagaaagaactgcgtgaacgtgctgatcaccaccacccagctggtgcccgccctggccaaggtgctgctgtacggcctgggcgagatcttccccatcgagaacatctacagcgccaccaagatcggcaaggagagctgcttcgagagaatcgtgagcagattcggcaagaaggtgacctacgtggtgatcggcgacggcagagacgaggagatcgccgccaagcagcacaacatgcccttctggagaatcaccaaccacggcgacctggtgagcctgcaccaggccctggagctggacttcctgtag

SEQ ID NO: 81095 - DNA, 1920 bp, synthetic construct
  misc_feature 1..1920: note = Description of Artificial Sequence: Synthetic coding sequence
  source 1..1920: mol_type = other DNA
atggaggacagccaggacctgaacgagcagagcgtgaagaagacctgcaccgagagcgacgtgagccagagccagaacagcagaagcatggagatgcaggacctggccagcccccacaccctggtgggcggcggcgacacccccggcagcagcaagctggagaagagcaacctgagcagcaccagcgtgaccaccaacggcaccggcggcgagaacatgaccgtgctgaacaccgccgactggctgctgagctgcaacacccccagcagcgccaccatgagcctgctggccgtgaagaccgagcccctgaacagcagcgagaccaccgccaccaccggcgacggcgccctggacaccttcaccggcagcgtgatcaccagcagcggctacagccccagaagcgcccaccagtacagcccccagctgtaccccagcaagccctacccccacatcctgagcacccccgccgcccagaccatgagcgcctacgccggccagacccagtacagcggcatgcagcagcccgccgtgtacaccgcctacagccagaccggccagccctacagcctgcccacctacgacctgggcgtgatgctgcccgccatcaagaccgagagcggcctgagccagacccagagccccctgcagagcggctgcctgagctacagccccggcttcagcaccccccagcccggccagaccccctacagctaccagatgcccggcagcagcttcgcccccagcagcaccatctacgccaacaacagcgtgagcaacagcaccaacttcagcggcagccagcaggactaccccagctacaccgccttcggccagaaccagtacgcccagtactacagcgccagcacctacggcgcctacatgaccagcaacaacaccgccgacggcacccccagcagcaccagcacctaccagctgcaggagagcctgcccggcctgaccaaccagcccggcgagttcgacaccatgcagagccccagcacccccatcaaggacctggacgagagaacctgcagaagcagcggcagcaagagcagaggcagaggcagaaagaacaaccccagccccccccccgacagcgacctggagagagtgttcgtgtgggacctggacgagaccatcatcgtgttccacagcctgctgaccggcagctacgcccagaagtacggcaaggacccccccatggccgtgaccctgggcctgagaatggaggagatgatcttcaacctggccgacacccacctgttcttcaacgacctggaggagtgcgaccaggtgcacatcgacgacgtgagcagcgacgacaacggccaggacctgagcacctacagcttcgccaccgacggcttccacgccgccgccagcagcgccaacctgtgcctgcccaccggcgtgagaggcggcgtggactggatgagaaagctggccttcagatacagaagagtgaaggagctgtacaacacctacaagaacaacgtgggcggcctgctgggccccgccaagagagacgcctggctgcagctgagagccgagatcgagggcctgaccgacagctggctgaccaacgccctgaagagcctgagcatcatcagcaccagaagcaactgcatcaacgtgctggtgaccaccacccagctgatccccgccctggccaaggtgctgctgtacagcctgggcggcgccttccccatcgagaacatctacagcgccaccaagatcggcaaggagagctgcttcgagagaatcgtgagcagattcggcaccaacatcacctacgtggtgatcggcgacggcagagacgaggagcacgccgccaaccagcacaacatgcccttctggagaatcagcagccacagcgacctgctggccctgcaccaggccctggagctggagtacctgtag

SEQ ID NO: 81096 - DNA, 1851 bp, synthetic construct
  misc_feature 1..1851: note = Description of Artificial Sequence: Synthetic coding sequence
  source 1..1851: mol_type = other DNA
atggaggacagccaggacctgaacgagcagagcgtgaagaagacctgcaccgagagcgacgtgagccagagccagaacagcagaagcatggagatgcaggacctggccagcccccacaccctggtgggcggcggcgacacccccggcagcagcaagctggagaagagcaacctgagcagcaccagcgtgaccaccaacggcaccggcgtgagcctgctggccgtgaagaccgagcccctgaacagcagcgagaccaccgccaccaccggcgacggcgccctggacaccttcaccggcagcgtgatcaccagcagcggctacagccccagaagcgcccaccagtacagcccccagctgtaccccagcaagccctacccccacatcctgagcacccccgccgcccagaccatgagcgcctacgccggccagacccagtacagcggcatgcagcagcccgccgtgtacaccgcctacagccagaccggccagccctacagcctgcccacctacgacctgggcgtgatgctgcccgccatcaagaccgagagcggcctgagccagacccagagccccctgcagagcggctgcctgagctacagccccggcttcagcaccccccagcccggccagaccccctacagctaccagatgcccggcagcagcttcgcccccagcagcaccatctacgccaacaacagcgtgagcaacagcaccaacttcagcggcagccagcaggactaccccagctacaccgccttcggccagaaccagtacgcccagtactacagcgccagcacctacggcgcctacatgaccagcaacaacaccgccgacggcacccccagcagcaccagcacctaccagctgcaggagagcctgcccggcctgaccaaccagcccggcgagttcgacaccatgcagagccccagcacccccatcaaggacctggacgagagaacctgcagaagcagcggcagcaagagcagaggcagaggcagaaagaacaaccccagccccccccccgacagcgacctggagagagtgttcgtgtgggacctggacgagaccatcatcgtgttccacagcctgctgaccggcagctacgcccagaagtacggcaaggacccccccatggccgtgaccctgggcctgagaatggaggagatgatcttcaacctggccgacacccacctgttcttcaacgacctggaggagtgcgaccaggtgcacatcgacgacgtgagcagcgacgacaacggccaggacctgagcacctacagcttcgccaccgacggcttccacgccgccgccagcagcgccaacctgtgcctgcccaccggcgtgagaggcggcgtggactggatgagaaagctggccttcagatacagaagagtgaaggagctgtacaacacctacaagaacaacgtgggcggcctgctgggccccgccaagagagacgcctggctgcagctgagagccgagatcgagggcctgaccgacagctggctgaccaacgccctgaagagcctgagcatcatcagcaccagaagcaactgcatcaacgtgctggtgaccaccacccagctgatccccgccctggccaaggtgctgctgtacagcctgggcggcgccttccccatcgagaacatctacagcgccaccaagatcggcaaggagagctgcttcgagagaatcatgcagagattcggcagaaaggtggtgtacgtggtgatcggcgacggcgtggaggaggagcaggccgccaagaagcacaacatgcccttctggagaatcagcagccacagcgacctgctggccctgcaccaggccctggagctggagtacctgtag

SEQ ID NO: 81097 - DNA, 1920 bp, synthetic construct
  misc_feature 1..1920: note = Description of Artificial Sequence: Synthetic coding sequence
  source 1..1920: mol_type = other DNA
atggaggacagccaggacctgaacgagcagagcgtgaagaagacctgcaccgagagcgacgtgagccagagccagaacagcagaagcatggagatgcaggacctggccagcccccacaccctggtgggcggcggcgacacccccggcagcagcaagctggagaagagcaacctgagcagcaccagcgtgaccaccaacggcaccggcggcgagaacatgaccgtgctgaacaccgccgactggctgctgagctgcaacacccccagcagcgccaccatgagcctgctggccgtgaagaccgagcccctgaacagcagcgagaccaccgccaccaccggcgacggcgccctggacaccttcaccggcagcgtgatcaccagcagcggctacagccccagaagcgcccaccagtacagcccccagctgtaccccagcaagccctacccccacatcctgagcacccccgccgcccagaccatgagcgcctacgccggccagacccagtacagcggcatgcagcagcccgccgtgtacaccgcctacagccagaccggccagccctacagcctgcccacctacgacctgggcgtgatgctgcccgccatcaagaccgagagcggcctgagccagacccagagccccctgcagagcggctgcctgagctacagccccggcttcagcaccccccagcccggccagaccccctacagctaccagatgcccggcagcagcttcgcccccagcagcaccatctacgccaacaacagcgtgagcaacagcaccaacttcagcggcagccagcaggactaccccagctacaccgccttcggccagaaccagtacgcccagtactacagcgccagcacctacggcgcctacatgaccagcaacaacaccgccgacggcacccccagcagcaccagcacctaccagctgcaggagagcctgcccggcctgaccaaccagcccggcgagttcgacaccatgcagagccccagcacccccatcaaggacctggacgagagaacctgcagaagcagcggcagcaagagcagaggcagaggcagaaagaacaaccccagccccccccccgacagcgacctggagagagtgttcgtgtgggacctggacgagaccatcatcgtgttccacagcctgctgaccggcagctacgcccagaagtacggcaaggacccccccatggccgtgaccctgggcctgagaatggaggagatgatcttcaacctggccgacacccacctgttcttcaacgacctggaggagtgcgaccaggtgcacatcgacgacgtgagcagcgacgacaacggccaggacctgagcacctacagcttcgccaccgacggcttccacgccgccgccagcagcgccaacctgtgcctgcccaccggcgtgagaggcggcgtggactggatgagaaagctggccttcagatacagaagagtgaaggagctgtacaacacctacaagaacaacgtgggcggcctgctgggccccgccaagagagacgcctggctgcagctgagagccgagatcgagggcctgaccgacagctggctgaccaacgccctgaagagcctgagcatcatcagcaccagaagcaactgcatcaacgtgctggtgaccaccacccagctgatccccgccctggccaaggtgctgctgtacagcctgggcggcgccttccccatcgagaacatctacagcgccaccaagatcggcaaggagagctgcttcgagagaatcatgcagagattcggcagaaaggtggtgtacgtggtgatcggcgacggcgtggaggaggagcaggccgccaagaagcacaacatgcccttctggagaatcagcagccacagcgacctgctggccctgcaccaggccctggagctggagtacctgtag

SEQ ID NO: 81098 - DNA, 9498 bp, synthetic construct
  misc_feature 1..9498: note = Description of Artificial Sequence: Synthetic coding sequence
  source 1..9498: mol_type = other DNA
atgaccgacaagagcatcgtgatcctgagcctgatggtgttccacagcagcttcatcaacggcaagacctgcagaagacagctggtggaggagtggcacccccagcccagcagctacgtggtgaactggaccctgaccgagaacatctgcctggacttctacagagactgctggttcctgggcgtgaacaccaagatcgacaccagcggcaaccaggccgtgccccagatctgccccctgcagatccagctgggcgacatcctggtgatcagcagcgagcccagcctgcagttccccgagatcaacctgatgaacgtgagcgagaccagcttcgtgggctgcgtgcagaacaccaccaccgaggaccagctgctgttcggctgcagactgaagggcatgcacaccgtgaacagcaagtggctgagcgtgggcacccactacttcatcaccgtgatggccagcggccccagcccctgccccctgggcctgagactgaacgtgaccgtgaagcagcagttctgccaggagagcctgagcagcgagttctgcagcggccacggcaagtgcctgagcgaggcctggagcaagacctacagctgccactgccagccccccttcagcggcaagtactgccaggagctggacgcctgcagcttcaagccctgcaagaacaacggcagctgcatcaacaagagagagaactgggacgagcaggcctacgagtgcgtgtgccacccccccttcaccggcaagaactgcagcgagatcatcggccagtgccagccccacgtgtgcttccacggcaactgcagcaacatcaccagcaacagcttcatctgcgagtgcgacgagcagttcagcggccccttctgcgaggtgagcgccaagccctgcgtgagcctgctgttctggaagagaggcatctgccccaacagcagcagcgcctacacctacgagtgccccaagggcagcagcagccagaacggcgagaccgacgtgagcgagttcagcctggtgccctgccagaacggcaccgactgcatcaagatcagcaacgacgtgatgtgcatctgcagccccatcttcaccgacctgctgtgcaagagcatccagaccagctgcgagagcttccccctgagaaacaacgccacctgcaagaagtgcgagaaggactacccctgcagctgcatcagcggcttcaccgagaagaactgcgagaaggccatcgaccactgcaagctgctgagcatcaactgcctgaacgaggagtggtgcttcaacatcatcggcagattcaagtacgtgtgcatccccggctgcaccaagaacccctgctggttcctgaagaacgtgtacctgatccaccagcacctgtgctactgcggcgtgaccttccacggcatctgccaggacaagggccccgcccagttcgagtacgtgtggcagctgggcttcgccggcagcgagggcgagaagtgccagggcgtgatcgacgcctacttcttcctggccgccaactgcaccgaggacgccacctacgtgaacgaccccgaggacaacaacagcagctgctggttcccccacgagggcaccaaggagatctgcgccaacggctgcagctgcctgagcgaggaggacagccaggagtacagatacctgtgcttcctgagatgggccggcaacatgtacctggagaacaccaccgacgaccaggagaacgagtgccagcacgaggccgtgtgcaaggacgagatcaacagacccagatgcagctgcagcctgagctacatcggcagactgtgcgtggtgaacgtggactactgcctgggcaaccacagcatcagcgtgcacggcctgtgcctggccctgagccacaactgcaactgcagcggcctgcagagatacgagagaaacatctgcgagatcgacaccgaggactgcaagagcgccagctgcaagaacggcaccaccagcacccacctgagaggctacttcttcagaaagtgcgtgcccggcttcaagggcacccagtgcgagatcgacatcgacgagtgcgccagccacccctgcaagaacggcgccacctgcatcgaccagcccggcaactacttctgccagtgcgtgccccccttcaaggtggtggacggcttcagctgcctgtgcaaccccggctacgtgggcatcagatgcgagcaggacatcgacgactgcatcctgaacgcctgcgagcacaacagcacctgcaaggacctgcacctgagctaccagtgcgtgtgcctgagcgactgggagggcaacttctgcgagcaggagagcaacgagtgcaagatgaacccctgcaagaacaacagcacctgcaccgacctgtacaagagctacagatgcgagtgcaccagcggctggaccggccagaactgcagcgaggagatcaacgagtgcgacagcgacccctgcatgaacggcggcctgtgccacgagagcaccatccccggccagttcgtgtgcctgtgcccccccctgtacaccggccagttctgccaccagagatacaacctgtgcgacctgctgcacaacccctgcagaaacaacagcacctgcctggccctggtggacgccaaccagcactgcatctgcagagaggagttcgagggcaagaactgcgagatcgacgtgaaggactgcctgttcctgagctgccaggactacggcgactgcgaggacatggtgaacaacttcagatgcatctgcagacccggcttcagcggcagcctgtgcgagatcgagatcaacgagtgcagcagcgagccctgcaagaacaacggcacctgcgtggacctgaccaacagattcttctgcaactgcgagcccgagtaccacggccccttctgcgagctggacgtgaacaagtgcaagatcagcccctgcctggacgaggagaactgcgtgtacagaaccgacggctacaactgcctgtgcgcccccggctacaccggcatcaactgcgagatcaacctggacgagtgcctgagcgagccctgcctgcacgacggcgtgtgcatcgacggcatcaaccactacacctgcgactgcaagagcggcttcttcggcacccactgcgagaccaacgccaacgactgcctgagcaacccctgcctgcacggcagatgcaccgagctgatcaacgagtacccctgcagctgcgacgccgacggcaccagcacccagtgcaagatcaagatcaacgactgcaccagcatcccctgcatgaacgagggcttctgccagaagagcgcccacggcttcacctgcatctgccccagaggctacaccggcgcctactgcgagaagagcatcgacaactgcgccgagcccgagctgaacagcgtgatctgcctgaacggcggcatctgcgtggacggccccggccacaccttcgactgcagatgcctgcccggcttcagcggccagttctgcgagatcaacatcaacgagtgcagcagcagcccctgcctgcacggcgccgactgcgaggaccacatcaacggctacgtgtgcaagtgccagcccggctggagcggccaccactgcgagaacgagctggagtgcatccccaacagctgcgtgcacgagctgtgcatggagaacgagcccggcagcacctgcctgtgcacccccggcttcatgacctgcagcatcggcctgctgtgcggcgacgagatcagaagaatcacctgcctgacccccatcttccagagaaccgaccccatcagcacccagacctacaccatcccccccagcgagaccctggtgagcagcttccccagcatcaaggccaccagaatccccgccatcatggacacctaccccgtggaccagggccccaagcagaccggcatcgtgaagcacgacatcctgcccaccaccggcctggccaccctgagaatcagcacccccctggagagctacctgctgcaggagctgatcgtgaccagagagctgagcgccaagcacagcctgctgagcagcgccgacgtgagcagcagcagattcctgaacttcggcatcagagaccccgcccagatcgtgcaggacaagaccagcgtgagccacatgcccatcagaaccagcgccgccaccctgggcttcttcttccccgacagaagagccagaacccccttcatcatgagcagcctgatgagcgacttcatcttccccacccagagcctgctgttcgagaactgccagaccgtggccctgagcgccacccccaccaccagcgtgatcagaagcatccccggcgccgacatcgagctgaacagacagagcctgctgagcagaggcttcctgctgatcgccgccagcatcagcgccacccccgtggtgagcagaggcgcccaggaggacatcgaggagtacagcgccgacagcctgatcagcagaagagagcactggagactgctgagccccagcatgagccccatcttccccgccaaggtgatcatcagcaagcaggtgaccatcctgaacagcagcgccctgcacagattcagcaccaaggccttcaaccccagcgagtaccaggccatcaccgaggccagcagcaaccagagactgaccaacatcaagagccaggccgccgacagcctgagagagctgagccagacctgcgccacctgcagcatgaccgagatcaagagcagcagagagttcagcgaccaggtgctgcacagcaagcagagccacttctacgagaccttctggatgaacagcgccatcctggccagctggtacgccctgatgggcgcccagaccatcaccagcggccacagcttcagcagcgccaccgagatcacccccagcgtggccttcaccgaggtgcccagcctgttccccagcaagaagagcgccaagagaaccatcctgagcagcagcctggaggagagcatcaccctgagcagcaacctggacgtgaacctgtgcctggacaagacctgcctgagcatcgtgcccagccagaccatcagcagcgacctgatgaacagcgacctgaccagcaagatgaccaccgacgagctgagcgtgagcgagaacatcctgaagctgctgaagatcagacagtacggcatcaccatgggccccaccgaggtgctgaaccaggagagcctgctggacatggagaagagcaagggcagccacaccctgttcaagctgcaccccagcgacagcagcctggacttcgagctgaacctgcagatctaccccgacgtgaccctgaagacctacagcgagatcacccacgccaacgacttcaagaacaacctgccccccctgaccggcagcgtgcccgacttcagcgaggtgaccaccaacgtggccttctacaccgtgagcgccacccccgccctgagcatccagaccagcagcagcatgagcgtgatcagacccgactggccctacttcaccgactacatgaccagcctgaagaaggaggtgaagaccagcagcgagtggagcaagtgggagctgcagcccagcgtgcagtaccaggagttccccaccgccagcagacacctgcccttcaccagaagcctgaccctgagcagcctggagagcatcctggccccccagagactgatgatcagcgacttcagctgcgtgagatactacggcgacagctacctggagttccagaacgtggccctgaacccccagaacaacatcagcctggagttccagaccttcagcagctacggcctgctgctgtacgtgaagcaggacagcaacctggtggacggcttcttcatccagctgttcatcgagaacggcaccctgaagtaccacttctactgccccggcgaggccaagttcaagagcatcaacaccaccgtgagagtggacaacggccagaagtacaccctgctgatcagacaggagctggacccctgcaacgccgagctgaccatcctgggcagaaacacccagatctgcgagagcatcaaccacgtgctgggcaagcccctgcccaagagcggcagcgtgttcatcggcggcttccccgacctgcacggcaagatccagatgcccgtgcccgtgaagaacttcaccggctgcatcgaggtgatcgagatcaacaactggagaagcttcatccccagcaaggccgtgaagaactaccacatcaacaactgcagaagccagggcttcatgctgagccccaccgccagcttcgtggacgccagcgacgtgacccagggcgtggacaccatgtggaccagcgtgagccccagcgtggccgcccccagcgtgtgccagcaggacgtgtgccacaacggcggcacctgccacgccatcttcctgagcagcggcatcgtgagcttccagtgcgactgccccctgcacttcaccggcagattctgcgagaaggacgccggcctgttcttccccagcttcaacggcaacagctacctggagctgcccttcctgaagttcgtgctggagaaggagcacaacagaaccgtgaccatctacctgaccatcaagaccaacagcctgaacggcaccatcctgtacagcaacggcaacaactgcggcaagcagttcctgcacctgttcctggtggagggcagacccagcgtgaagtacggctgcggcaacagccagaacatcctgaccgtgagcgccaactacagcatcaacaccaacgccttcacccccatcaccatcagatacaccacccccgtgggcagccccggcgtggtgtgcatgatcgagatgaccgccgacggcaagccccccgtgcagaagaaggacaccgagatcagccacgccagccaggcctacttcgagagcatgttcctgggccacatccccgccaacgtgcagatccacaagaaggccggccccgtgtacggcttcagaggctgcatcctggacctgcaggtgaacaacaaggagttcttcatcatcgacgaggccagacacggcaagaacatcgagaactgccacgtgccctggtgcgcccaccacctgtgcagaaacaacggcacctgcatcagcgacaacgagaacctgttctgcgagtgccccagactgtacagcggcaagctgtgccagttcgccagctgcgagaacaacccctgcggcaacggcgccacctgcgtgcccaagagcggcaccgacatcgtgtgcctgtgcccctacggcagaagcggccccctgtgcaccgacgccatcaacatcacccagcccagattcagcggcaccgacgccttcggctacaccagcttcctggcctacagcagaatcagcgacatcagcttccactacgagttccacctgaagttccagctggccaacaaccacagcgccctgcagaacaacctgatcttcttcaccggccagaagggccacggcctgaacggcgacgacttcctggccgtgggcctgctgaacggcagcgtggtgtacagctacaacctgggcagcggcatcgccagcatcagaagcgagcccctgaacctgagcctgggcgtgcacaccgtgcacctgggcaagttcttccaggagggctggctgaaggtggacgaccacaagaacaagagcatcatcgcccccggcagactggtgggcctgaacgtgttcagccagttctacgtgggcggctacagcgagtacacccccgacctgctgcccaacggcgccgacttcaagaacggcttccagggctgcatcttcaccctgcaggtgagaaccgagaaggacggccacttcagaggcctgggcaaccccgagggccaccccaacgccggcagaagcgtgggccagtgccacgccagcccctgcagcctgatgaagtgcggcaacggcggcacctgcatcgagagcggcaccagcgtgtactgcaactgcaccaccggctggaagggcagcttctgcaccgagaccgtgagcacctgcgaccccgagcacgaccccccccaccactgcagcagaggcgccacctgcatcagcctgccccacggctacacctgcttctgccccctgggcaccaccggcatctactgcgagcaggccctgatcctgatcgtgatcctggagaagcccaagcccgccgagagaaaggtgaagaaggaggccctgagcatcagcgaccccagcttcagaagcaacgagctgagctggatgagcttcgccagcttccacgtgagaaagaagacccacatccagctgcagttccagcccctggccgccgacggcatcctgttctacgccgcccagcacctgaaggcccagagcggcgacttcctgtgcatcagcctggtgaacagcagcgtgcagctgagatacaacctgggcgacagaaccatcatcctggagaccctgcagaaggtgaccatcaacggcagcacctggcacatcatcaaggccggcagagtgggcgccgagggctacctggacctggacggcatcaacgtgaccgagaaggccagcaccaagatgagcagcctggacaccaacaccgacttctacatcggcggcgtgagcagcctgaacctggtgaaccccatggccatcgagaacgagcccgtgggcttccagggctgcatcagacaggtgatcatcaacaaccaggagctgcagctgaccgagttcggcgccaagggcggcagcaacgtgggcgactgcgacggcaccgcctgcggctacaacacctgcagaaacggcggcgagtgcaccgtgaacggcaccaccttcagctgcagatgcctgcccgactgggccggcaacacctgcaaccagagcgtgagctgcctgaacaacctgtgcctgcaccagagcctgtgcatccccgaccagagcttcagctacagctgcctgtgcaccctgggctgggtgggcagatactgcgagaacaagaccagcttcagcaccgccaagttcatgggcaacagctacatcaagtacatcgaccccaactacagaatgagaaacctgcagttcaccaccatcagcctgaacttcagcaccaccaagaccgagggcctgatcgtgtggatgggcatcgcccagaacgaggagaacgacttcctggccatcggcctgcacaaccagaccctgaagatcgccgtgaacctgggcgagagaatcagcgtgcccatgagctacaacaacggcaccttctgctgcaacaagtggcaccacgtggtggtgatccagaaccagaccctgatcaaggcctacatcaacaacagcctgatcctgagcgaggacatcgacccccacaagaacttcgtggccctgaactacgacggcatctgctacctgggcggcttcgagtacggcagaaaggtgaacatcgtgacccaggagatcttcaagaccaacttcgtgggcaagatcaaggacgtggtgttcttccaggagcccaagaacatcgagctgatcaagctggagggctacaacgtgtacgacggcgacgagcagaacgaggtgacctag

SEQ ID NO: 81099 - DNA, 1785 bp, synthetic construct
  misc_feature 1..1785: note = Description of Artificial Sequence: Synthetic coding sequence
  source 1..1785: mol_type = other DNA
atgaccgacaagagcatcgtgatcctgagcctgatggtgttccacagcagcttcatcaacggcaagacctgcagaagacagctggtggaggagtggcacccccagcccagcagctacgtggtgaactggaccctgaccgagaacatctgcctggacttctacagagactgctggttcctgggcgtgaacaccaagatcgacaccagcggcaaccaggccgtgccccagatctgccccctgcagatccagctgggcgacatcctggtgatcagcagcgagcccagcctgcagttccccgagatcaacctgatgaacgtgagcgagaccagcttcgtgggctgcgtgcagaacaccaccaccgaggaccagctgctgttcggctgcagactgaagggcatgcacaccgtgaacagcaagtggctgagcgtgggcacccactacttcatcaccgtgatggccagcggccccagcccctgccccctgggcctgagactgaacgtgaccgtgaagcagcagttctgccaggagagcctgagcagcgagttctgcagcggccacggcaagtgcctgagcgaggcctggagcaagacctacagctgccactgccagccccccttcagcggcaagtactgccaggagctggacgcctgcagcttcaagccctgcaagaacaacggcagctgcatcaacaagagagagaactgggacgagcaggcctacgagtgcgtgtgccacccccccttcaccggcaagaactgcagcgagatcatcggccagtgccagccccacgtgtgcttccacggcaactgcagcaacatcaccagcaacagcttcatctgcgagtgcgacgagcagttcagcggccccttctgcgaggtgagcgccaagccctgcgtgagcctgctgttctggaagagaggcatctgccccaacagcagcagcgcctacacctacgagtgccccaagggcagcagcagccagaacggcgagaccgacgtgagcgagttcagcctggtgccctgccagaacggcaccgactgcatcaagatcagcaacgacgtgatgtgcatctgcagccccatcttcaccgacctgctgtgcaagagcatccagaccagctgcgagagcttccccctgagaaacaacgccacctgcaagaagtgcgagaaggactacccctgcagctgcatcagcggcttcaccgagaagaactgcgagaaggccatcgaccactgcaagctgctgagcatcaactgcctgaacgaggagtggtgcttcaacatcatcggcagattcaagtacgtgtgcatccccggctgcaccaagaacccctgctggttcctgaagaacgtgtacctgatccaccagcacctgtgctactgcggcgtgaccttccacggcatctgccaggacaagggccccgcccagttcgagtacgtgtggcagctgggcttcgccggcagcgagggcgagaagtgccagggcgtgatcgacgcctacttcttcctggccgccaactgcaccgaggacgccacctacgtgaacgaccccgaggacaacaacagcagctgctggttcccccacgagggcaccaaggagatctgcgccaacggctgcagctgcctgagcgaggaggacagccaggagtacagatacctgtgcttcctgagatgggccggcaacatgtacctggagaacaccaccgacgaccaggagaacgagtgccagcacgaggccgtgtgcaaggacgagatcaacagacccagatacctgtgcatcatctag

SEQ ID NO: 81100 - DNA, 9498 bp, synthetic construct; identical to SEQ ID NO: 81098
  misc_feature 1..9498: note = Description of Artificial Sequence: Synthetic coding sequence
  source 1..9498: mol_type = other DNA

SEQ ID NO: 81101 - DNA, 9435 bp, synthetic construct
  misc_feature 1..9435: note = Description of Artificial Sequence: Synthetic coding sequence
  source 1..9435: mol_type = other DNA
atgaccgacaagagcatcgtgatcctgagcctgatggtgttccacagcagcttcatcaacggcaagacctgcagaagacagctggtggaggagtggcacccccagcccagcagctacgtggtgaactggaccctgaccgagaacatctgcctggacttctacagagactgctggttcctgggcgtgaacaccaagatcgacaccagcggcaaccaggccgtgccccagatctgccccctgcagatccagctgggcgacatcctggtgatcagcagcgagcccagcctgcagttccccgagatcaacctgatgaacgtgagcgagaccagcttcgtgggctgcgtgcagaacaccaccaccgaggaccagctgctgttcggctgcagactgaagggcatgcacaccgtgaacagcaagtggctgagcgtgggcacccactacttcatcaccgtgatggccagcggccccagcccctgccccctgggcctgagactgaacgtgaccgtgaagcagcagttctgccaggagagcctgagcagcgagttctgcagcggccacggcaagtgcctgagcgaggcctggagcaagacctacagctgccactgccagccccccttcagcggcaagtactgccaggagctggacgcctgcagcttcaagccctgcaagaacaacggcagctgcatcaacaagagagagaactgggacgagcaggcctacgagtgcgtgtgccacccccccttcaccggcaagaactgcagcgagatcatcggccagtgccagccccacgtgtgcttccacggcaactgcagcaacatcaccagcaacagcttcatctgcgagtgcgacgagcagttcagcggccccttctgcgaggtgagcgccaagccctgcgtgagcctgctgttctggaagagaggcatctgccccaacagcagcagcgcctacacctacgagtgccccaagggcagcagcagccagaacggcgagaccgacgtgagcgagttcagcctggtgccctgccagaacggcaccgactgcatcaagatcagcaacgacgtgatgtgcatctgcagccccatcttcaccgacctgctgtgcaagagcatccagaccagctgcgagagcttccccctgagaaacaacgccacctgcaagaagtgcgagaaggactacccctgcagctgcatcagcggcttcaccgagaagaactgcgagaaggccatcgaccactgcaagctgctgagcatcaactgcctgaacgaggagtggtgcttcaacatcatcggcagattcaagtacgtgtgcatccccggctgcaccaagaacccctgctggttcctgaagaacgtgtacctgatccaccagcacctgtgctactgcggcgtgaccttccacggcatctgccaggacaagggccccgcccagttcgagtacgtgtggcagctgggcttcgccggcagcgagggcgagaagtgccagggcgtgatcgacgcctacttcttcctggccgccaactgcaccgaggacgccacctacgtgaacgaccccgaggacaacaacagcagctgctggttcccccacgagggcaccaaggagatctgcgccaacggctgcagctgcctgagcgaggaggacagccaggagtacagatacctgtgcttcctgagatgggccggcaacatgtacctggagaacaccaccgacgaccaggagaacgagtgccagcacgaggccgtgtgcaaggacgagatcaacagacccagatgcagctgcagcctgagctacatcggcagactgtgcgtggtgaacgtggactactgcctgggcaaccacagcatcagcgtgcacggcctgtgcctggccctgagccacaactgcaactgcagcggcctgcagagatacgagagaaacatctgcgagatcgacaccgaggactgcaagagcgccagctgcaagaacggcaccaccagcacccacctgagaggctacttcttcagaaagtgcgtgcccggcttcaagggcacccagtgcgagatcgacatcgacgagtgcgccagccacccctgcaagaacggcgccacctgcatcgaccagcccggcaactacttctgccagtgcgtgccccccttcaaggtggtggacggcttcagctgcctgtgcaaccccggctacgtgggcatcagatgcgagcaggacatcgacgactgcatcctgaacgcctgcgagcacaacagcacctgcaaggacctgcacctgagctaccagtgcgtgtgcctgagcgactgggagggcaacttctgcgagcaggagagcaacgagtgcaagatgaacccctgcaagaacaacagcacctgcaccgacctgtacaagagctacagatgcgagtgcaccagcggctggaccggccagaactgcagcgaggagatcaacgagtgcgacagcgacccctgcatgaacggcggcctgtgccacgagagcaccatccccggccagttcgtgtgcctgtgcccccccctgtacaccggccagttctgccaccagagatacaacctgtgcgacctgctgcacaacccctgcagaaacaacagcacctgcctggccctggtggacgccaaccagcactgcatctgcagagaggagttcgagggcaagaactgcgagatcgacgtgaaggactgcctgttcctgagctgccaggactacggcgactgcgaggacatggtgaacaacttcagatgcatctgcagacccggcttcagcggcagcctgtgcgagatcgagatcaacgagtgcagcagcgagccctgcaagaacaacggcacctgcgtggacctgaccaacagattcttctgcaactgcgagcccgagtaccacggccccttctgcgagctggacgtgaacaagtgcaagatcagcccctgcctggacgaggagaactgcgtgtacagaaccgacggctacaactgcctgtgcgcccccggctacaccggcatcaactgcgagatcaacctggacgagtgcctgagcgagccctgcctgcacgacggcgtgtgcatcgacggcatcaaccactacacctgcgactgcaagagcggcttcttcggcacccactgcgagaccaacgccaacgactgcctgagcaacccctgcctgcacggcagatgcaccgagctgatcaacgagtacccctgcagctgcgacgccgacggcaccagcacccagtgcaagatcaagatcaacgactgcaccagcatcccctgcatgaacgagggcttctgccagaagagcgcccacggcttcacctgcatctgccccagaggctacaccggcgcctactgcgagaagagcatcgacaactgcgccgagcccgagctgaacagcgtgatctgcctgaacggcggcatctgcgtggacggccccggccacaccttcgactgcagatgcctgcccggcttcagcggccagttctgcgagatcaacatcaacgagtgcagcagcagcccctgcctgcacggcgccgactgcgaggaccacatcaacggctacgtgtgcaagtgccagcccggctggagcggccaccactgcgagaacgagctggagtgcatccccaacagctgcgtgcacgagctgtgcatggagaacgagcccggcagcacctgcctgtgcacccccggcttcatgacctgcagcatcggcctgctgtgcggcgacgagatcagaagaatcacctgcctgacccccatcttccagagaaccgaccccatcagcacccagacctacaccatcccccccagcgagaccctggtgagcagcttccccagcatcaaggccaccagaatccccgccatcatggacacctaccccgtggaccagggccccaagcagaccggcatcgtgaagcacgacatcctgcccaccaccggcctggccaccctgagaatcagcacccccctggagagctacctgctgcaggagctgatcgtgaccagagagctgagcgccaagcacagcctgctgagcagcgccgacgtgagcagcagcagattcctgaacttcggcatcagagaccccgcccagatcgtgcaggacaagaccagcgtgagccacatgcccatcagaaccagcgccgccaccctgggcttcttcttccccgacagaagagccagaacccccttcatcatgagcagcctgatgagcgacttcatcttccccacccagagcctgctgttcgagaactgccagaccgtggccctgagcgccacccccaccaccagcgtgatcagaagcatccccggcgccgacatcgagctgaacagacagagcctgctgagcagaggcttcctgctgatcgccgccagcatcagcgccacccccgtggtgagcagaggcgcccaggaggacatcgaggagtacagcgccgacagcctgatcagcagaagagagcactggagactgctgagccccagcatgagccccatcttccccgccaaggtgatcatcagcaagcaggtgaccatcctgaacagcagcgccctgcacagattcagcaccaaggccttcaaccccagcgagtaccaggccatcaccgaggccagcagcaaccagagactgaccaacatcaagagccaggccgccgacagcctgagagagctgagccagacctgcgccacctgcagcatgaccgagatcaagagcagcagagagttcagcgaccaggtgctgcacagcaagcagagccacttctacgagaccttctggatgaacagcgccatcctggccagctggtacgccctgatgggcgcccagaccatcaccagcggccacagcttcagcagcgccaccgagatcacccccagcgtggccttcaccgaggtgcccagcctgttccccagcaagaagagcgccaagagaaccatcctgagcagcagcctggaggagagcatcaccctgagcagcaacctggacgtgaacctgtgcctggacaagacctgcctgagcatcgtgcccagccagaccatcagcagcgacctgatgaacagcgacctgaccagcaagatgaccaccgacgagctgagcgtgagcgagaacatcctgaagctgctgaagatcagacagtacggcatcaccatgggccccaccgaggtgctgaaccaggagagcctgctggacatggagaagagcaagggcagccacaccctgttcaagctgcaccccagcgacagcagcctggacttcgagctgaacctgcagatctaccccgacgtgaccctgaagacctacagcgagatcacccacgccaacgacttcaagaacaacctgccccccctgaccggcagcgtgcccgacttcagcgaggtgaccaccaacgtggccttctacaccgtgagcgccacccccgccctgagcatccagaccagcagcagcatgagcgtgatcagacccgactggccctacttcaccgactacatgaccagcctgaagaaggaggtgaagaccagcagcgagtggagcaagtgggagctgcagcccagcgtgcagtaccaggagttccccaccgccagcagacacctgcccttcaccagaagcctgaccctgagcagcctggagagcatcctggccccccagagactgatgatcagcgacttcagctgcgtgagatactacggcgacagctacctggagttccagaacgtggccctgaacccccagaacaacatcagcctggagttccagaccttcagcagctacggcctgctgctgtacgtgaagcaggacagcaacctggtggacggcttcttcatccagctgttcatcgagaacggcaccctgaagtaccacttctactgccccggcgaggccaagttcaagagcatcaacaccaccgtgagagtggacaacggccagaagtacaccctgctgatcagacaggagctggacccctgcaacgccgagctgaccatcctgggcagaaacacccagatctgcgagagcatcaaccacgtgctgggcaagcccctgcccaagagcggcagcgtgttcatcggcggcttccccgacctgcacggcaagatccagatgcccgtgcccgtgaagaacttcaccggctgcatcgaggtgatcgagatcaacaactggagaagcttcatccccagcaaggccgtgaagaactaccacatcaacaactgcagaagccagggcttcatgctgagccccaccgccagcttcgtggacgccagcgacgtgacccagggcgtggacaccatgtggaccagcgtgagccccagcgtggccgcccccagcgtgtgccagcaggacgtgtgccacaacggcggcacctgccacgccatcttcctgagcagcggcatcgtgagcttccagtgcgactgccccctgcacttcaccggcagattctgcgagaaggacgccggcctgttcttccccagcttcaacggcaacagctacctggagctgcccttcctgaagttcgtgctggagaaggagcacaacagaaccgtgaccatctacctgaccatcaagaccaacagcctgaacggcaccatcctgtacagcaacggcaacaactgcggcaagcagttcctgcacctgttcctggtggagggcagacccagcgtgaagtacggctgcggcaacagccagaacatcctgaccgtgagcgccaactacagcatcaacaccaacgccttcacccccatcaccatcagatacaccacccccgtgggcagccccggcgtggtgtgcatgatcgagatgaccgccgacggcaagccccccgtgcagaagaaggacaccgagatcagccacgccagccaggcctacttcgagagcatgttcctgggccacatccccgccaacgtgcagatccacaagaaggccggccccgtgtacggcttcagaggctgcatcctggacctgcaggtgaacaacaaggagttcttcatcatcgacgaggccagacacggcaagaacatcgagaactgccacgtgccctggtgcgcccaccacctgtgcagaaacaacggcacctgcatcagcgacaacgagaacctgttctgcgagtgccccagactgtacagcggcaagctgtgccagttcgccagctgcgagaacaacccctgcggcaacggcgccacctgcgtgcccaagagcggcaccgacatcgtgtgcctgtgcccctacggcagaagcggccccctgtgcaccgacgccatcaacatcacccagcccagattcagcggcaccgacgccttcggctacaccagcttcctggcctacagcagaatcagcgacatcagcttccactacgagttccacctgaagttccagctggccaacaaccacagcgccctgcagaacaacctgatcttcttcaccggccagaagggccacggcctgaacggcgacgacttcctggccgtgggcctgctgaacggcagcgtggtgtacagctacaacctgggcagcggcatcgccagcatcagaagcgagcccctgaacctgagcctgggcgtgcacaccgtgcacctgggcaagttcttccaggagggctggctgaaggtggacgaccacaagaacaagagcatcatcgcccccggcagactggtgggcctgaacgtgttcagccagttctacgtgggcggctacagcgagtacacccccgacctgctgcccaacggcgccgacttcaagaacggcttccagggctgcatcttcaccctgcaggtgagaaccgagaaggacggccacttcagaggcctgggcaaccccgagggccaccccaacgccggcagaagcgtgggccagtgccacgccagcccctgcagcctgatgaagtgcggcaacggcggcacctgcatcgagagcggcaccagcgtgtactgcaactgcaccaccggctggaagggcagcttctgcaccgagaccgtgagcacctgcgaccccgagcacgaccccccccaccactgcagcagaggcgccacctgcatcagcctgccccacggctacacctgcttctgccccctgggcaccaccggcatctactgcgagcaggccctgagcatcagcgaccccagcttcagaagcaacgagctgagctggatgagcttcgccagcttccacgtgagaaagaagacccacatccagctgcagttccagcccctggccgccgacggcatcctgttctacgccgcccagcacctgaaggcccagagcggcgacttcctgtgcatcagcctggtgaacagcagcgtgcagctgagatacaacctgggcgacagaaccatcatcctggagaccctgcagaaggtgaccatcaacggcagcacctggcacatcatcaaggccggcagagtgggcgccgagggctacctggacctggacggcatcaacgtgaccgagaaggccagcaccaagatgagcagcctggacaccaacaccgacttctacatcggcggcgtgagcagcctgaacctggtgaaccccatggccatcgagaacgagcccgtgggcttccagggctgcatcagacaggtgatcatcaacaaccaggagctgcagctgaccgagttcggcgccaagggcggcagcaacgtgggcgactgcgacggcaccgcctgcggctacaacacctgcagaaacggcggcgagtgcaccgtgaacggcaccaccttcagctgcagatgcctgcccgactgggccggcaacacctgcaaccagagcgtgagctgcctgaacaacctgtgcctgcaccagagcctgtgcatccccgaccagagcttcagctacagctgcctgtgcaccctgggctgggtgggcagatactgcgagaacaagaccagcttcagcaccgccaagttcatgggcaacagctacatcaagtacatcgaccccaactacagaatgagaaacctgcagttcaccaccatcagcctgaacttcagcaccaccaagaccgagggcctgatcgtgtggatgggcatcgcccagaacgaggagaacgacttcctggccatcggcctgcacaaccagaccctgaagatcgccgtgaacctgggcgagagaatcagcgtgcccatgagctacaacaacggcaccttctgctgcaacaagtggcaccacgtggtggtgatccagaaccagaccctgatcaaggcctacatcaacaacagcctgatcctgagcgaggacatcgacccccacaagaacttcgtggccctgaactacgacggcatctgctacctgggcggcttcgagtacggcagaaaggtgaacatcgtgacccaggagatcttcaagaccaacttcgtgggcaagatcaaggacgtggtgttcttccaggagcccaagaacatcgagctgatcaagctggagggctacaacgtgtacgacggcgacgagcagaacgaggtgacctag

SEQ ID NO: 81102 - DNA, 1785 bp, synthetic construct; identical to SEQ ID NO: 81099
  misc_feature 1..1785: note = Description of Artificial Sequence: Synthetic coding sequence
  source 1..1785: mol_type = other DNA

SEQ ID NO: 81103 - DNA, 1860 bp, synthetic construct
  misc_feature 1..1860: note = Description of Artificial Sequence: Synthetic coding sequence
  source 1..1860: mol_type = other DNA
atgaccgacaagagcatcgtgatcctgagcctgatggtgttccacagcagcttcatcaacggcaagacctgcagaagacagctggtggaggagtggcacccccagcccagcagctacgtggtgaactggaccctgaccgagaacatctgcctggacttctacagagactgctggttcctgggcgtgaacaccaagatcgacaccagcggcaaccaggccgtgccccagatctgccccctgcagatccagctgggcgacatcctggtgatcagcagcgagcccagcctgcagttccccgagatcaacctgatgaacgtgagcgagaccagcttcgtgggctgcgtgcagaacaccaccaccgaggaccagctgctgttcggctgcagactgaagggcatgcacaccgtgaacagcaagtggctgagcgtgggcacccactacttcatcaccgtgatggccagcggccccagcccctgccccctgggcctgagactgaacgtgaccgtgaagcagcagttctgccaggagagcctgagcagcgagttctgcagcggccacggcaagtgcctgagcgaggcctggagcaagacctacagctgccactgccagccccccttcagcggcaagtactgccaggagctggacgcctgcagcttcaagccctgcaagaacaacggcagctgcatcaacaagagagagaactgggacgagcaggcctacgagtgcgtgtgccacccccccttcaccggcaagaactgcagcgagatcatcggccagtgccagccccacgtgtgcttccacggcaactgcagcaacatcaccagcaacagcttcatctgcgagtgcgacgagcagttcagcggccccttctgcgaggtgagcgccaagccctgcgtgagcctgctgttctggaagagaggcatctgccccaacagcagcagcgcctacacctacgagtgccccaagggcagcagcagccagaacggcgagaccgacgtgagcgagttcagcctggtgccctgccagaacggcaccgactgcatcaagatcagcaacgacgtgatgtgcatctgcagccccatcttcaccgacctgctgtgcaagagcatccagaccagctgcgagagcttccccctgagaaacaacgccacctgcaagaagtgcgagaaggactacccctgcagctgcatcagcggcttcaccgagaagaactgcgagaaggccatcgaccactgcaagctgctgagcatcaactgcctgaacgaggagtggtgcttcaacatcatcggcagattcaagtacgtgtgcatccccggctgcaccaagaacccctgctggttcctgaagaacgtgtacctgatccaccagcacctgtgctactgcggcgtgaccttccacggcatctgccaggacaagggccccgcccagttcgagtacgtgtggcagctgggcttcgccggcagcgagggcgagaagtgccagggcgtgatcgacgcctacttcttcctggccgccaactgcaccgaggacgccacctacgtgaacgaccccgaggacaacaacagcagctgctggttcccccacgagggcaccaaggagatctgcgccaacggctgcagctgcctgagcgaggaggacagccaggagtacagatacctgtgcttcctgagatgggccggcaacatgtacctggagaacaccaccgacgaccaggagaacgagtgccagcacgaggccgtgtgcaaggacgagatcaacagacccagaagaatcctgaacaccgtgatcccccaccagatccagcagcacatcgagagattcatccagcacgaccaggtgggcttcatcgtgagaatctag

SEQ ID NO: 81104 - DNA, 1764 bp, synthetic construct
  misc_feature 1..1764: note = Description of Artificial Sequence: Synthetic coding sequence
  source 1..1764: mol_type = other DNA
atgggctgggacctgggcaccagactgttccagagacaggagcagagaagcagactgagcagaatctggctggagaagaccagagtgttcctggagggcagcaccagaacccccgccctgccccactgcctgttctggctgctgcaggtgcccagcacccaggaccccctgttccccggctacggcccccagtgccccgtggacctggccggccccccctgcctgagacccctgttcggcggcctgggcggctactggagagccctgcagagaggcagagagggcagaaccatgaccagcagagccagcgagctgagccccggcagaagcgtgaccgccggcatcatcatcgtgggcgacgagatcctgaagggccacacccaggacaccaacaccttcttcctgtgcagaaccctgagaagcctgggcgtgcaggtgtgcagagtgagcgtggtgcccgacgaggtggccaccatcgccgccgaggtgaccagcttcagcaacagattcacccacgtgctgaccgccggcggcatcggccccacccacgacgacgtgaccttcgaggccgtggcccaggccttcggcgacgagctgaagccccaccccaagctggaggccgccaccaaggccctgggcggcgagggctgggagaagctgagcctggtgcccagcagcgccagactgcactacggcaccgacccctgcaccggccagcccttcagattccccctggtgagcgtgagaaacgtgtacctgttccccggcatccccgagctgctgagaagagtgctggagggcatgaagggcctgttccagaaccccgccgtgcagttccacagcaaggagctgtacgtggccgccgacgaggccagcatcgcccccatcctggccgaggcccaggcccacttcggcagaagactgggcctgggcagctaccccgactggggcagcaactactaccaggtgaagctgaccctggacagcgaggaggagggccccctggaggagtgcctggcctacctgaccgccagactgccccagggcagcctggtgccctacatgcccaacgccgtggagcaggccagcgaggccgtgtacaagctggccgagagcggcagcagcctgggcaagaaggtggccggcgccctgcagaccatcgagaccagcctggcccagtacagcctgacccagctgtgcgtgggcttcaacggcggcaaggactgcaccgccctgctgcacctgttccacgccgccgtgcagagaaagctgcccgacgtgcccaaccccctgcagatcctgtacatcagaagcatcagccccttccccgagctggagcagttcctgcaggacaccatcaagagatacaacctgcagatgctggaggccgagggcagcatgaagcaggccctgggcgagctgcaggccagacacccccagctggaggccgtgctgatgggcaccagaagaaccgacccctacagctgcagcctgtgccccttcagccccaccgaccccggctggcccgccttcatgagaatcaaccccctgctggactggacctacagagacatctgggacttcctgagacagctgttcgtgccctactgcatcctgtacgacagaggctacaccagcctgggcagcagagagaacaccgtgagaaaccccgccctgaagtgcctgagccccggcggccaccccacctacagacccgcctacctgctggagaacgaggaggaggagagaaacagcagaacctag

SEQ ID NO: 81105 - DNA, 513 bp, synthetic construct
  misc_feature 1..513: note = Description of Artificial Sequence: Synthetic coding sequence
  source 1..513: mol_type = other DNA
atgaagggcctgttccagaaccccgccgtgcagttccacagcaaggagctgtacgtggccgccgacgaggccagcatcgcccccatcctggccgaggcccaggcccacttcggcagaagactgggcctgggcagctaccccgactggggcagcaactactaccaggtgaagctgaccctggacagcgaggaggagggccccctggaggagtgcctggcctacctgaccgccagactgccccagggcagcctggtgccctacatgcccaacgccgtggagcaggccagcgaggccgtgtacaagctggccgagagcggcaactacctgatgttccagacccccagcagaagctgcatcagcgccgccagccccctgagcctgagctggaacagcttctacagaaccctgagcagagagcaggccatccccgagaaccagatcgccagcccccccagcgaggccaagggcgccgaggagccctggatgggccccttccccggccagcagggctag

SEQ ID NO: 81106 - DNA, 1473 bp, synthetic construct
  misc_feature 1..1473: note = Description of Artificial Sequence: Synthetic coding sequence
  source 1..1473: mol_type = other DNA
atgaccagcagagccagcgagctgagccccggcagaagcgtgaccgccggcatcatcatcgtgggcgacgagatcctgaagggccacacccaggacaccaacaccttcttcctgtgcagaaccctgagaagcctgggcgtgcaggtgtgcagagtgagcgtggtgcccgacgaggtggccaccatcgccgccgaggtgaccagcttcagcaacagattcacccacgtgctgaccgccggcggcatcggccccacccacgacgacgtgaccttcgaggccgtggcccaggccttcggcgacgagctgaagccccaccccaagctggaggccgccaccaaggccctgggcggcgagggctgggagaagctgagcctggtgcccagcagcgccagactgcactacggcaccgacccctgcaccggccagcccttcagattccccctggtgagcgtgagaaacgtgtacctgttccccggcatccccgagctgctgagaagagtgctggagggcatgaagggcctgttccagaaccccgccgtgcagttccacagcaaggagctgtacgtggccgccgacgaggccagcatcgcccccatcctggccgaggcccaggcccacttcggcagaagactgggcctgggcagctaccccgactggggcagcaactactaccaggtgaagctgaccctggacagcgaggaggagggccccctggaggagtgcctggcctacctgaccgccagactgccccagggcagcctggtgccctacatgcccaacgccgtggagcaggccagcgaggccgtgtacaagctggccgagagcggcagcagcctgggcaagaaggtggccggcgccctgcagaccatcgagaccagcctggcccagtacagcctgacccagctgtgcgtgggcttcaacggcggcaaggactgcaccgccctgctgcacctgttccacgccgccgtgcagagaaagctgcccgacgtgcccaaccccctgcagatcctgtacatcagaagcatcagccccttccccgagctggagcagttcctgcaggacaccatcaagagatacaacctgcagatgctggaggccgagggcagcatgaagcaggccctgggcgagctgcaggccagacacccccagctggaggccgtgctgatgggcaccagaagaaccgacccctacagctgcagcctgtgccccttcagccccaccgaccccggctggcccgccttcatgagaatcaaccccctgctggactggacctacagagacatctgggacttcctgagacagctgttcgtgccctactgcatcctgtacgacagaggctacaccagcctgggcagcagagagaacaccgtgagaaaccccgccctgaagtgcctgagccccggcggccaccccacctacagacccgcctacctgctggagaacgaggaggaggagagaaacagcagaacctag

SEQ ID NO: 81107 - DNA, 387 bp, synthetic construct
  misc_feature 1..387: note = Description of Artificial Sequence: Synthetic coding sequence
  source 1..387: mol_type = other DNA
atgctggaggccgagggcagcatgaagcaggccctgggcgagctgcaggccagacacccccagctggaggccgtgctgatgggcaccagaagaaccgacccctacagctgcagcctgtgccccttcagccccaccgaccccggctggcccgccttcatgagaatcaaccccctgctggactggacctacagagacatctgggacttcctgagacagctgttcgtgccctactgcatcctgtacgacagaggctacaccagcctgggcagcagagagaacaccgtgagaaaccccgccctgaagtgcctgagccccggcggccaccccacctacagacccgcctacctgctggagaacgaggaggaggagagaaacagcagaacctag

SEQ ID NO: 81108 - DNA, 885 bp, synthetic construct
  misc_feature 1..885: note = Description of Artificial Sequence: Synthetic coding sequence
  source 1..885: mol_type = other DNA
atgcagcccagcagcagcaccccccccctgcacccctacagcaccgacggcctgatcttccccttcaacccccagggccacacccaggacaccaacaccttcttcctgtgcagaaccctgagaagcctgggcgtgcaggtgtgcagagtgagcgtggtgcccgacgaggtggccaccatcgccgccgaggtgaccagcttcagcaacagattcacccacgtgctgaccgccggcggcatcggccccacccacgacgacgtgaccttcgaggccgtggcccaggccttcggcgacgagctgaagccccaccccaagctggaggccgccaccaaggccctgggcggcgagggctgggagaagctgagcctggtgcccagcagcgccagactgcactacggcaccgacccctgcaccggccagcccttcagattccccctggtgagcgtgagaaacgtgtacctgttccccggcatccccgagctgctgagaagagtgctggagggcatgaagggcctgttccagaaccccgccgtgcagttccacagcaaggagctgtacgtggccgccgacgaggccagcatcgcccccatcctggccgaggcccaggcccacttcggcagaagactgggcctgggcagctaccccgactggggcagcaactactaccaggtgaagctgaccctggacagcgaggaggagggccccctggaggagtgcctggcctacctgaccgccagactgccccagggcagcctggtgccctacatgcccaacgccgtggagcaggccagcgaggccgtgtacaagctggccgagagcggcagagacctgatggaggagggccactacgcccagagccactggtggcaccccagaagccagtag

SEQ ID NO: 81109 - DNA, 1341 bp, synthetic construct
  misc_feature 1..1341: note = Description of Artificial Sequence: Synthetic coding sequence
  source 1..1341: mol_type = other DNA
atgaccagcagagccagcgagctgagccccggcagaagcgtgaccgccggcatcatcatcgtgggcgacgagatcctgaagggccacacccaggacaccaacaccttcttcctgtgcagaaccctgagaagcctgggcgtgcaggtgtgcagagtgagcgtggtgcccgacgaggtggccaccatcgccgccgaggtgaccagcttcagcaacagattcacccacgtgctgaccgccggcggcatcggccccacccacgacgacgtgaccttcgaggccgtggcccaggccttcggcgacgagctgaagccccaccccaagctggaggccgccaccaaggccctgggcggcgagggctgggagaagctgagcctggtgcccagcagcgccagactgcactacggcaccgacccctgcaccggccagcccttcagattccccctggtgagcgtgagaaacgtgtacctgttccccggcatccccgagctgctgagaagagtgctggagggcatgaagggcctgttccagaaccccgccgtgcagttccacagcaaggagctgtacgtggccgccgacgaggccagcatcgcccccatcctggccgaggcccaggcccacttcggcagaagactgggcctgggcagctaccccgactggggcagcaactactaccaggtgaagctgaccctggacagcgaggaggagggccccctggaggagtgcctggcctacctgaccgccagactgccccagggcagcctggtgccctacatgcccaacgccgtggagcaggccagcgaggccgtgtacaagctggccgagagcggcagcagcctgggcaagaaggtggccggcgccctgcagaccatcgagaccagcctggcccagtacagcctgacccagctgtgcgtgggcttcaacggcggcaaggactgcaccgccctgctgcacctgttccacgccgccgtgcagagaaagctgcccgacgtgcccaaccccctgcagatcctgtacatcagaagcatcagccccttccccgagctggagcagttcctgcaggacaccatcaagagatacaacctgcagatgctggaggccgagggcagcatgaagcaggccctgggcgagctgcaggccagacacccccagctggaggccgtgctgatgggcaccagaagaaccgacccctacagctgcagcctgtgccccttcagccccaccgaccccggctggcccgccttcatgagaatcaaccccctgctggactggacctacagagacatctgggacttcctgagacagctgttcgtgccctactgcatcctgtacgacagaggctag

SEQ ID NO: 81110 - DNA, 1371 bp, synthetic construct
  misc_feature 1..1371: note = Description of Artificial Sequence: Synthetic coding sequence
  source 1..1371: mol_type = other DNA
atgggctgggacctgggcaccagactgttccagagacaggagcagagaagcagactgagcagaatctggctggagaagaccagagtgttcctggagggcagcaccagaacccccgccctgccccactgcctgttctggctgctgcaggtgcccagcacccaggaccccctgttccccggctacggcccccagtgccccgtggacctggccggccccccctgcctgagacccctgttcggcggcctgggcggctactggagagccctgcagagaggcagagagggcagaaccatgaccagcagagccagcgagctgagccccggcagaagcgtgaccgccggcatcatcatcgtgggcgacgagatcctgaagggccacacccaggacaccaacaccttcttcctgtgcagaaccctgagaagcctgggcgtgcaggtgtgcagagtgagcgtggtgcccgacgaggtggccaccatcgccgccgaggtgaccagcttcagcaacagattcacccacgtgctgaccgccggcggcatcggccccacccacgacgacgtgaccttcgaggccgtggcccaggccttcggcgacgagctgaagccccaccccaagctggaggccgccaccaaggccctgggcggcgagggctgggagaagctgagcctggtgcccagcagcgccagactgcactacggcaccgacccctgcaccggccagcccttcagattccccctggtgagcgtgagaaacgtgtacctgttccccggcatccccgagctgctgagaagagtgctggagggcatgaagggcctgttccagaaccccgccgtgcagttccacagcaaggagctgtacgtggccgccgacgaggccagcatcgcccccatcctggccgaggcccaggcccacttcggcagaagactgggcctgggcagctaccccgactggggcagcaactactaccaggtgaagctgaccctggacagcgaggaggagggccccctggaggagtgcctggcctacctgaccgccagactgccccagggcagcctggtgccctacatgcccaacgccgtggagcaggccagcgaggccgtgtacaagctggccgagagcggcagcagcctgggcaagaaggtggccggcgccctgcagaccatcgagaccagcctggcccagtacagcctgacccagctgtgcgtgggcttcaacggcggcaaggactgcaccgccctgctgcacctgttccacgccgccgtgcagagaaagctgcccgacgtgcccaaccccctgcagatcctgtacatcagaagcatcagccccttccccgagctggagcagttcctgcaggacaccatcaagagatactag

SEQ ID NO: 81111 - DNA, 1017 bp, synthetic construct
  misc_feature 1..1017: note = Description of Artificial Sequence: Synthetic coding sequence
  source 1..1017: mol_type = other DNA
atgcagcccagcagcagcaccccccccctgcacccctacagcaccgacggcctgatcttccccttcaacccccagggccacacccaggacaccaacaccttcttcctgtgcagaaccctgagaagcctgggcgtgcaggtgtgcagagtgagcgtggtgcccgacgaggtggccaccatcgccgccgaggtgaccagcttcagcaacagattcacccacgtgctgaccgccggcggcatcggccccacccacgacgacgtgaccttcgaggccgtggcccaggccttcggcgacgagctgaagccccaccccaagctggaggccgccaccaaggccctgggcggcgagggctgggagaagctgagcctggtgcccagcagcgccagactgcactacggcaccgacccctgcaccggccagcccttcagattccccctggtgagcgtgagaaacgtgtacctgttccccggcatccccgagctgctgagaagagtgctggagggcatgaagggcctgttccagaaccccgccgtgcagttccacagcaaggagctgtacgtggccgccgacgaggccagcatcgcccccatcctggccgaggcccaggcccacttcggcagaagactgggcctgggcagctaccccgactggggcagcaactactaccaggtgaagctgaccctggacagcgaggaggagggccccctggaggagtgcctggcctacctgaccgccagactgccccagggcagcctggtgccctacatgcccaacgccgtggagcaggccagcgaggccgtgtacaagctggccgagagcggcaactacctgatgttccagacccccagcagaagctgcatcagcgccgccagccccctgagcctgagctggaacagcttctacagaaccctgagcagagagcaggccatccccgagaaccagatcgccagcccccccagcgaggccaagggcgccgaggagccctggatgggccccttccccggccagcagggctag

SEQ ID NO: 81112 - DNA, 1461 bp, synthetic construct
  misc_feature 1..1461: note = Description of Artificial Sequence: Synthetic coding sequence
  source 1..1461: mol_type = other DNA
atgatcagaagagtgctgccccacggcatgggcagaggcctgctgaccagaagacccggcaccagaagaggcggcttcagcctggactgggacggcaaggtgagcgagatcaagaagaagatcaagagcatcctgcccggcagaagctgcgacctgctgcaggacaccagccacctgccccccgagcacagcgacgtggtgatcgtgggcggcggcgtgctgggcctgagcgtggcctactggctgaagaagctggagagcagaagaggcgccatcagagtgctggtggtggagagagaccacacctacagccaggccagcaccggcctgagcgtgggcggcatctgccagcagttcagcctgcccgagaacatccagctgagcctgttcagcgccagcttcctgagaaacatcaacgagtacctggccgtggtggacgccccccccctggacctgagattcaaccccagcggctacctgctgctggccagcgagaaggacgccgccgccatggagagcaacgtgaaggtgcagagacaggagggcgccaaggtgagcctgatgagccccgaccagctgagaaacaagttcccctggatcaacaccgagggcgtggccctggccagctacggcatggaggacgagggctggttcgacccctggtgcctgctgcagggcctgagaagaaaggtgcagagcctgggcgtgctgttctgccagggcgaggtgaccagattcgtgagcagcagccagagaatgctgaccaccgacgacaaggccgtggtgctgaagagaatccacgaggtgcacgtgaagatggacagaagcctggagtaccagcccgtggagtgcgccatcgtgatcaacgccgccggcgcctggagcgcccagatcgccgccctggccggcgtgggcgagggcccccccggcaccctgcagggcaccaagctgcccgtggagcccagaaagagatacgtgtacgtgtggcactgcccccagggccccggcctggagacccccctggtggccgacaccagcggcgcctacttcagaagagagggcctgggcagcaactacctgggcggcagaagccccaccgagcaggaggagcccgaccccgccaacctggaggtggaccacgacttcttccaggacaaggtgtggccccacctggccctgagagtgcccgccttcgagaccctgaaggtgcagagcgcctgggccggctactacgactacaacaccttcgaccagaacggcgtggtgggcccccaccccctggtggtgaacatgtacttcgccaccggcttcagcggccacggcctgcagcaggcccccggcatcggcagagccgtggccgagatggtgctgaagggcagattccagaccatcgacctgagccccttcctgttcaccagattctacctgggcgagaagatccaggagaacaacatcatctag

SEQ ID NO: 81113 - DNA, 951 bp, synthetic construct
  misc_feature 1..951: note = Description of Artificial Sequence: Synthetic coding sequence
  source 1..951: mol_type = other DNA
atggagagcaacgtgaaggtgcagagacaggagggcgccaaggtgagcctgatgagccccgaccagctgagaaacaagttcccctggatcaacaccgagggcgtggccctggccagctacggcatggaggacgagggctggttcgacccctggtgcctgctgcagggcctgagaagaaaggtgcagagcctgggcgtgctgttctgccagggcgaggtgaccagattcgtgagcagcagccagagaatgctgaccaccgacgacaaggccgtggtgctgaagagaatccacgaggtgcacgtgaagatggacagaagcctggagtaccagcccgtggagtgcgccatcgtgatcaacgccgccggcgcctggagcgcccagatcgccgccctggccggcgtgggcgagggcccccccggcaccctgcagggcaccaagctgcccgtggagcccagaaagagatacgtgtacgtgtggcactgcccccagggccccggcctggagacccccctggtggccgacaccagcggcgcctacttcagaagagagggcctgggcagcaactacctgggcggcagaagccccaccgagcaggaggagcccgaccccgccaacctggaggtggaccacgacttcttccaggacaaggtgtggccccacctggccctgagagtgcccgccttcgagaccctgaaggtgcagagcgcctgggccggctactacgactacaacaccttcgaccagaacggcgtggtgggcccccaccccctggtggtgaacatgtacttcgccaccggcttcagcggccacggcctgcagcaggcccccggcatcggcagagccgtggccgagatggtgctgaagggcagattccagaccatcgacctgagccccttcctgttcaccagattctacctgggcgagaagatccaggagaacaacatcatctag

SEQ ID NO: 81114 - DNA, 1419 bp, synthetic construct
  misc_feature 1..1419: note = Description of Artificial Sequence: Synthetic coding sequence
  source 1..1419: mol_type = other DNA
atggcccacaccggcagaaccgtgggcagactgggcgagggcgactgggacggcaaggtgagcgagatcaagaagaagatcaagagcatcctgcccggcagaagctgcgacctgctgcaggacaccagccacctgccccccgagcacagcgacgtggtgatcgtgggcggcggcgtgctgggcctgagcgtggcctactggctgaagaagctggagagcagaagaggcgccatcagagtgctggtggtggagagagaccacacctacagccaggccagcaccggcctgagcgtgggcggcatctgccagcagttcagcctgcccgagaacatccagctgagcctgttcagcgccagcttcctgagaaacatcaacgagtacctggccgtggtggacgccccccccctggacctgagattcaaccccagcggctacctgctgctggccagcgagaaggacgccgccgccatggagagcaacgtgaaggtgcagagacaggagggcgccaaggtgagcctgatgagccccgaccagctgagaaacaagttcccctggatcaacaccgagggcgtggccctggccagctacggcatggaggacgagggctggttcgacccctggtgcctgctgcagggcctgagaagaaaggtgcagagcctgggcgtgctgttctgccagggcgaggtgaccagattcgtgagcagcagccagagaatgctgaccaccgacgacaaggccgtggtgctgaagagaatccacgaggtgcacgtgaagatggacagaagcctggagtaccagcccgtggagtgcgccatcgtgatcaacgccgccggcgcctggagcgcccagatcgccgccctggccggcgtgggcgagggcccccccggcaccctgcagggcaccaagctgcccgtggagcccagaaagagatacgtgtacgtgtggcactgcccccagggccccggcctggagacccccctggtggccgacaccagcggcgcctacttcagaagagagggcctgggcagcaactacctgggcggcagaagccccaccgagcaggaggagcccgaccccgccaacctggaggtggaccacgacttcttccaggacaaggtgtggccccacctggccctgagagtgcccgccttcgagaccctgaaggtgcagagcgcctgggccggctactacgactacaacaccttcgaccagaacggcgtggtgggcccccaccccctggtggtgaacatgtacttcgccaccggcttcagcggccacggcctgcagcaggcccccggcatcggcagagccgtggccgagatggtgctgaagggcagattccagaccatcgacctgagccccttcctgttcaccagattctacctgggcgagaagatccaggagaacaacatcatctag

SEQ ID NO: 81115 - DNA, 501 bp, synthetic construct
  misc_feature 1..501: note = Description of Artificial Sequence: Synthetic coding sequence
  source 1..501: mol_type = other DNA
atggcccagagactgctgctgagaagattcctggccagcgtgatcagcagaaagcccagccagggccagtggccccccctgaccagcagagccctgcagaccccccagtgcagccccggcggcctgaccgtgacccccaaccccgccagaaccatctacaccaccagaatcagcctgaccaccttcaacatccaggacggccccgacttccaggacagagtggtgaacagcgagacccccgtggtggtggacttccacgcccagtggtgcggcccctgcaagatcctgggccccagactggagaagatggtggccaagcagcacggcaaggtggtgatggccaaggtggacatcgacgaccacaccgacctggccatcgagtacgaggtgagcgccgtgcccaccgtgctggccatgaagaacggcgacgtggtggacaagttcgtgggcatcaaggacgaggaccagctggaggccttcctgaagaagctgatcggctag

SEQ ID NO: 81116 - DNA, 2055 bp, synthetic construct; identical to SEQ ID NO: 80903
  misc_feature 1..2055: note = Description of Artificial Sequence: Synthetic coding sequence
  source 1..2055: mol_type = other DNA

SEQ ID NO: 81117 - DNA, 2055 bp, synthetic construct; identical to SEQ ID NO: 80903
  misc_feature 1..2055: note = Description of Artificial Sequence: Synthetic coding sequence
  source 1..2055: mol_type = other DNA

SEQ ID NO: 81118 - DNA, 261 bp, synthetic construct
  misc_feature 1..261: note = Description of Artificial Sequence: Synthetic coding sequence
  source 1..261: mol_type = other DNA
atgggcctgagcgccgccgcccccctgtggggcccccccggcctgctgctggccatcgccctgcaccccgccctgagcgtgccccccagaagagactactgcgtgctgggcgccggccccgccggcctgcagatggcctacttcctgcagagagccggcagagactacgccgtgttcgagagagcccccagacccggcagcttcttcaccagataccccagacacagaaagctgatcagcatcaacaagagatacacctag

SEQ ID NO: 81119 - DNA, 729 bp, synthetic construct
  misc_feature 1..729: note = Description of Artificial Sequence: Synthetic coding sequence
  source 1..729: mol_type = other DNA
atgttcctgctgagcggcgacccctgcttcaagaccccccccagcaccgccaagagcatcagcatccccggccaggacagcagcctgcagctgacctgcaagggcggcggcaccagcagcggcggcagcagcaccaacagcctgaccggcagcagaccccccaaggccagacccaccatcctgagcagcggcctgcccgaggagcccgaccagaacctgagcagccccgaggaggtgttccacagcggccacagcagaaacagcagctacgccagccagcagagcaagatcagcggctacagcaccgagcacagcagaagcagcagcctgagcgacctgacccacagaagaaacaccagcaccagcagcagcgccagcggcggcctgggcatgaccgtggagggccccgagggcagcgagagagagcacagaccccccgagaagccccccagaccccccagacccctgcacctgagcgacagaagcttcagaagaaagaaggacagcgtggagagccaccccacctgggtggacgacaccagaatcgacgccgacgccatcgtggagaagatcgtgcagagccaggacttcaccgacggcagcaacaccgaggacagcaacctgagactgttcgtgagcagagacggcagcgccaccctgagcggcatccagctggccaccagagtgagcagcggcgtgtacgagcccgtggtgatcgagagccactag

SEQ ID NO: 81120 - DNA, 1155 bp, synthetic construct
  misc_feature 1..1155: note = Description of Artificial Sequence: Synthetic coding sequence
  source 1..1155: mol_type = other DNA
atggccttcctgatgaagaagaagaagttcaagttccagaccaccttcaccctggaggagctgaccgccgtgcccttcgtgaacggcgtgctgttctgcaaggtgagactgctggacggcggcgacttcgtgagcctgagcagcagagaggaggtgcaggagaactgcgtgagatggagaaagagattcaccttcgtgtgcaagatgagcgccaaccccgccaccggcctgctggacccctgcgtgttcagagtgagcgtgagaaaggagctgaagggcggcaaggcctacagcaagctgggcttcgccgacctgaacctggccgagttcgccggcagcggcagcaccgtgagatgctgcctgctggagggctacgacaccaagaacaccagacaggacaacagcatcctgaaggtgaccatcggcatgttcctgctgagcggcgacccctgcttcaagaccccccccagcaccgccaagagcatcagcatccccggccaggacagcagcctgcagctgacctgcaagggcggcggcaccagcagcggcggcagcagcaccaacagcctgaccggcagcagaccccccaaggccagacccaccatcctgagcagcggcctgcccgaggagcccgaccagaacctgagcagccccgaggaggtgttccacagcggccacagcagaaacagcagctacgccagccagcagagcaagatcagcggctacagcaccgagcacagcagaagcagcagcctgagcgacctgacccacagaagaaacaccagcaccagcagcagcgccagcggcggcctgggcatgaccgtggagggccccgagggcagcgagagagagcacagaccccccgagaagccccccagaccccccagacccctgcacctgagcgacagaagcttcagaagaaagaaggacagcgtggagagccaccccacctgggtggacgacaccagaatcgacgccgacgccatcgtggagaagatcgtgcagagccaggacttcaccgacggcagcaacaccgaggacagcaacctgagactgttcgtgagcagagacggcagcgccaccctgagcggcatccagctggccaccagagtgagcagcggcgtgtacgagcccgtggtgatcgagagccactag

SEQ ID NO: 81121 - DNA, 435 bp, synthetic construct
  misc_feature 1..435: note = Description of Artificial Sequence: Synthetic coding sequence
  source 1..435: mol_type = other DNA
atgtacagcgagatccagagagagagagccgacatcggcggcctgatggccagacccgagtacagagagtggaaccccgagctgatcaagcccaagaagctgctgaaccccgtgaaggccagcagaagccaccaggagctgcacagagagctgctgatgaaccacagaagaggcctgggcgtggacagcaagcccgagctgcagagagtgctggagcacagaagaagaaaccagctgatcaagaagaagaaggaggagctggaggccaagagactgcagtgccccttcgagcaggagctgctgagaagacagcagagactgaaccagctggagaagccccccgagaaggaggaggaccacgcccccgagttcatcaaggtgagagagaacctgagaagaatcgccaccctgaccagcgaggagagagagctgtag

SEQ ID NO: 81122 - DNA, 435 bp, synthetic construct; identical to SEQ ID NO: 81121
  misc_feature 1..435: note = Description of Artificial Sequence: Synthetic coding sequence
  source 1..435: mol_type = other DNA

SEQ ID NO: 81123 - DNA, 519 bp, synthetic construct
  misc_feature 1..519: note = Description of Artificial Sequence: Synthetic coding sequence
  source 1..519: mol_type = other DNA
atggcccagagactgggcgagtgggccagaggccccagcgacgccaccggcctgtacagagccgtgctgctgagaagcgccgccatgtacagcgagatccagagagagagagccgacatcggcggcctgatggccagacccgagtacagagagtggaaccccgagctgatcaagcccaagaagctgctgaaccccgtgaaggccagcagaagccaccaggagctgcacagagagctgctgatgaaccacagaagaggcctgggcgtggacagcaagcccgagctgcagagagtgctggagcacagaagaagaaaccagctgatcaagaagaagaaggaggagctggaggccaagagactgcagtgccccttcgagcaggagctgctgagaagacagcagagactgaaccagctggagaagccccccgagaaggaggaggaccacgcccccgagttcatcaaggtgagagagaacctgagaagaatcgccaccctgaccagcgaggagagagagctgtag

SEQ ID NO: 81124 - DNA, 408 bp, synthetic construct
  misc_feature 1..408: note = Description of Artificial Sequence: Synthetic coding sequence
  source 1..408: mol_type = other DNA
atgtacagcgagatccagagagagagagccgacatcggcggcctgatggccagacccgagtacagagagtggaaccccgagctgatcaagcccaagaagctgctgaaccccgtgaaggccagcagaagccaccaggagctgcacagagagctgctgatgaaccacagaagaggcctgggcgtggacagcaagcccgagctgcagagagtgctggagcacagaagaagaaaccagctgatcaagaagaagaaggaggagctggaggccaagagactgcagtgccccttcgagcaggagctgctgagaagacagcagagactgaaccaggtgggcgacggccaccccgccggcaccacccacccccccggcctgagcagcagagaggagctgtgctgcggccacagctag

SEQ ID NO: 81125 - DNA, 318 bp, synthetic construct
  misc_feature 1..318: note = Description of Artificial Sequence: Synthetic coding sequence
  source 1..318: mol_type = other DNA
atgtacagcgagatccagagagagagagccgacatcggcggcctgatggccagacccgagtacagagagtggaaccccgagctgatcaagcccaagaagctgctgaaccccgtgaaggccagcagaagccaccaggagctgcacagagagctgctgatgaaccacagaagaggcctgggcgtggacagcaagcccgagctgcagagagtgctggagcacagaagaagaaaccagctgatcaagaagaagaaggaggagctggaggccaagagactgcagtgccccttcgagcaggagctgctgagaagacagcagtag

SEQ ID NO: 81126 - DNA, 528 bp, synthetic construct
  misc_feature 1..528: note = Description of Artificial Sequence: Synthetic coding sequence
  source 1..528: mol_type = other DNA
atgggcgccgcccagggcaagaagaagacctacagcccccaggccagattccacagcgagaacgagaagcagagaagaaacggcagcgccgccatgtacagcgagatccagagagagagagccgacatcggcggcctgatggccagacccgagtacagagagtggaaccccgagctgatcaagcccaagaagctgctgaaccccgtgaaggccagcagaagccaccaggagctgcacagagagctgctgatgaaccacagaagaggcctgggcgtggacagcaagcccgagctgcagagagtgctggagcacagaagaagaaaccagctgatcaagaagaagaaggaggagctggaggccaagagactgcagtgccccttcgagcaggagctgctgagaagacagcagagactgaaccagctggagaagccccccgagaaggaggaggaccacgcccccgagttcatcaaggtgagagagaacctgagaagaatcgccaccctgaccagcgaggagagagagctgtag

SEQ ID NO: 81127 - DNA, 789 bp, synthetic construct
  misc_feature 1..789: note = Description of Artificial Sequence: Synthetic coding sequence
  source 1..789: mol_type = other DNA
atggcccccggcagcccccccggccccgccatcgccaccatgaagctgaacgagagaagcctggccttctacgccacctgcgacgcccccgtggacaacgccggcttcctgtacaagaagggcggcagacacgccgcctaccacagaagatggttcgtgctgagaggcaacatgctgttctacttcgaggacgccgccagcagagagcccgtgggcgtgatcatcctggagggctgcaccgtggagctggtggaggccgccgaggagttcgccttcgccgtgagattcgccggcaccagagccagaacctacgtgctggccgccgagagccaggacgccatggagggctgggtgaaggccctgagcagagccagcttcgactacctgagactggtggtgagagagctggagcagcagctggccgccgtgagaggcggcggcggcatggccctgccccagccccagccccagagcctgcccctgccccccagcctgcccagcgccctggcccccgtgcccagcctgcccagcgcccccgcccccgtgcccgccctgcccctgcccagaagacccagcgccctgccccccaaggagaacggctgcgccgtgtggagcaccgaggccaccttcagacccggccccgagccccccccccccccccccagaagaagagccagcgccccccacggccccctggacatggcccccttcgccagactgcacgagtgctacggccaggagatcagagccctgagaggccagtggctgagcagcagagtgcagccctag

SEQ ID NO: 81128 - DNA, 750 bp, synthetic construct
  misc_feature 1..750: note = Description of Artificial Sequence: Synthetic coding sequence
  source 1..750: mol_type = other DNA
atgaagctgaacgagagaagcctggccttctacgccacctgcgacgcccccgtggacaacgccggcttcctgtacaagaagggcggcagacacgccgcctaccacagaagatggttcgtgctgagaggcaacatgctgttctacttcgaggacgccgccagcagagagcccgtgggcgtgatcatcctggagggctgcaccgtggagctggtggaggccgccgaggagttcgccttcgccgtgagattcgccggcaccagagccagaacctacgtgctggccgccgagagccaggacgccatggagggctgggtgaaggccctgagcagagccagcttcgactacctgagactggtggtgagagagctggagcagcagctggccgccgtgagaggcggcggcggcatggccctgccccagccccagccccagagcctgcccctgccccccagcctgcccagcgccctggcccccgtgcccagcctgcccagcgcccccgcccccgtgcccgccctgcccctgcccagaagacccagcgccctgccccccaaggagaacggctgcgccgtgtggagcaccgaggccaccttcagacccggccccgagccccccccccccccccccagaagaagagccagcgccccccacggccccctggacatggcccccttcgccagactgcacgagtgctacggccaggagatcagagccctgagaggccagtggctgagcagcagagtgcagccctag

SEQ ID NO: 81129 - DNA, 267 bp, synthetic construct
  misc_feature 1..267: note = Description of Artificial Sequence: Synthetic coding sequence
  source 1..267: mol_type = other DNA
atgaagctgaacgagagaagcctggccttctacgccacctgcgacgcccccgtggacaacgccggcttcctgtacaagaagggcggcagacacgccgcctaccacagaagatggttcgtgctgagaggcaacatgctgttctacttcgaggacgccgccagcagagagcccgtgggcgtgatcatcctggtggccgtggccctgtggcccagagccctgagcgtgagcccctggtggctgagccagggcagccccgacaccccctag

SEQ ID NO: 81130 - DNA, 849 bp, synthetic construct
  misc_feature 1..849: note = Description of Artificial Sequence: Synthetic coding sequence
  source 1..849: mol_type = other DNA
atgcaggccagctgcaccagaagagtgggcggcaccagacccaccaccggcgccggcagctgctgcgccggcacctgcagcagcaccagcagaaccctgcccgccgtgagcccctgggccagcagcagctggagagccgccctgtggagctggtggagaccccccagaagcagccccagcctgtgcgccctgagaggccccggcagagcccccacctgctggcccctgagagtgagaatgccctggagagccggcagcagaccctgcagagtgcccgccagcaccacctgcggctggtggtgcgccagctggagcagcagctggagactgtacgtggccggcgtggcctggccctgccccagccccagccccagcccctgcccctgccccagaccctgccccctgccctggccccagagccacccctgcctgctgccccagcccagaagccagccctgcccctgccccgccggccccgtgcccagcagacccagaagaatggccgccctgagcggcgccctgagaccccccagcggcctggaccccagccccctgcaccacagactggccgccggccccagacaccccaccggcccctggacctggccccccagccccggctgcaccagcgccatggccagaagaagcggcccctgcgtggccagcggcagcgccgccggcagcagccccgaggccaccagagcccccgtgctgggcggccacaagctgtacgccctgtgggacagacccggccccggcgagaccggcggcgccgaccccgagggcaaccacggccagggctggccccccggccccgagtggcccggcttcggcggctgcagactgtag

SEQ ID NO: 81131 - DNA, 354 bp, synthetic construct
  misc_feature 1..354: note = Description of Artificial Sequence: Synthetic coding sequence
  source 1..354: mol_type = other DNA
atgaagctgaacgagagaagcctggccttctacgccacctgcgacgcccccgtggacaacgccggcttcctgtacaagaagggcggcagacacgccgcctaccacagaagatggttcgtgctgagaggcaacatgctgttctacttcgaggacgccgccagcagagagcccgtgggcgtgatcatcctggagggctgcaccgtggagctggtggaggccgccgaggagttcgccttcgccgtgagattcgccggcaccagagccagaacctacgtgctggccgccgagagccaggacgccatggagggctgggtgaaggccctgagcagagccagcttcgactacctgagatag

SEQ ID NO: 81132 - DNA, 750 bp, synthetic construct; identical to SEQ ID NO: 81128
  misc_feature 1..750: note = Description of Artificial Sequence: Synthetic coding sequence
  source 1..750: mol_type = other DNA

SEQ ID NO: 81133 - DNA, 750 bp, synthetic construct; identical to SEQ ID NO: 81128
  misc_feature 1..750: note = Description of Artificial Sequence: Synthetic coding sequence
  source 1..750: mol_type = other DNA

SEQ ID NO: 81134 - DNA, 225 bp, synthetic construct
  misc_feature 1..225: note = Description of Artificial Sequence: Synthetic coding sequence
  source 1..225: mol_type = other DNA
atgaagctgaacgagagaagcctggccttctacgccacctgcgacgcccccgtggacaacgccggcttcctgtacaagaagggcggcagacacgccgcctaccacagaagatggttcgtgctgagaggcaacatgctgttctacttcgaggacgccgccagcagagagcccgtgggcgtgatcatcctggagggctgcaccgtggagctggtggaggccgcctag

SEQ ID NO: 81135 - DNA, 243 bp, synthetic construct
  misc_feature 1..243: note = Description of Artificial Sequence: Synthetic coding sequence
  source 1..243: mol_type = other DNA
atgaagctgaacgagagaagcctggccttctacgccacctgcgacgcccccgtggacaacgccggcttcctgtacaagaagggcggcagacacgccgcctaccacagaagatggttcgtgctgagaggcaacatgctgttctacttcgaggacgccgccagcagagagcccgtgggcgtgatcatcctggagggctgcaccgtggagctggtggaggccgccgaggagttcgccttcgcctag

SEQ ID NO: 81136 - DNA, 780 bp, synthetic construct
  misc_feature 1..780: note = Description of Artificial Sequence: Synthetic coding sequence
  source 1..780: mol_type = other DNA
atgaagctgaacgagagaagcgtggcccactacgccctgagcgacagccccgccgaccacatgggcttcctgagaacctggggcggccccggcaccccccccacccccagcggcaccggcagaagatgctggttcgtgctgaagggcaacctgctgttcagcttcgagagcagagagggcagagcccccctgagcctggtggtgctggagggctgcaccgtggagctggccgaggcccccgtgcccgaggagttcgccttcgccatctgcttcgacgcccccggcgtgagaccccacctgctggccgccgagggccccgccgcccaggaggcctgggtgaaggtgctgagcagagccagcttcggctacatgagactggtggtgagagagctggagagccagctgcaggacgccagacagagcctggccctgcagagaagaagcagctggaagagcgtggccagcagatgcaagccccaggcccccaaccacagagccgccggcctggagaacggccactgcctgagcaaggacagcagccccgtgggcctggtggaggaggccggcagcagaagcgccggctggggcctggccgagtgggagctgcagggccccgccagcctgctgctgggcaagggccagagccccgtgagccccgagaccagctgcttcagcaccctgcacgactggtacggccaggagatcgtggagctgagacagtgctggcagaagagagcccagggcagccacagcaagtgcgaggagcaggacagaccctag

SEQ ID NO: 81137 - DNA, 327 bp, synthetic construct
  misc_feature 1..327: note = Description of Artificial Sequence: Synthetic coding sequence
  source 1..327: mol_type = other DNA
atgaagctgaacgagagaagcgtggcccactacgccctgagcgacagccccgccgaccacatgggcttcctgagaacctggggcggccccggcaccccccccacccccagcggcaccggcagaagatgctggttcgtgctgaagggcaacctgctgttcagcttcgagagcagagagggcagagcccccctgagcctggtggtgctggagggctgcaccgtggagctggccgaggcccccgtgcccgaggagttcgccttcgccatctgcttcgacgcccccggcgtgagaccccacctgctggccgccgagggccccgccgcctag

SEQ ID NO: 81138 - DNA, 729 bp, synthetic construct
  misc_feature 1..729: note = Description of Artificial Sequence: Synthetic coding sequence
  source 1..729: mol_type = other DNA
atgaccatccccggcggcacccccagcctgaagatcctgtggctgaaccaggagcccgagatccaggtgagaagactggacaccctgctggcctgcttcaacctgagcagcagcagagaggagctgcaggccgtggagagccccttccaggccctgtgctgcctgctgatctacctgttcgtgcaggtggacaccctgtgcctggaggacctgcacgccttcatcgcccaggccctgtgcctgcagggcaagagcaccagccagctggtgaacctgcagcccgactacatcaaccccagagccgtgcagctgggcagcctgctggtgagaggcctgaccaccctggtgctggtgaacagcgcctgcggcttcccctggaagaccagcgacttcatgccctggaacgtgttcgacggcaagctgttccaccagaagtacctgcagagcgagaagggctacgccgtggaggtgctgctggagcagaacagaagcagactgaccaagttccacaacctgaaggccgtggtgtgcaaggcctgcatgaaggagaacagaagaatcaccggcagagcccactggggcagccaccacgccggcagatggggcagacagggcagcagctaccacagaaccggcagcggctacagcagaagcagccagggccagccctggagagaccagggccccggcagcagacagtacgagcacgaccagtggagaagatactag

SEQ ID NO: 81139 - DNA, 2733 bp, synthetic construct
  misc_feature 1..2733: note = Description of Artificial Sequence: Synthetic coding sequence
  source 1..2733: mol_type = other DNA
atgggcgtgagaggcctgcagggcttcgtgggcagcacctgcccccacatctgcaccgtggtgaacttcaaggagctggccgagcaccacagaagcaagtaccccggctgcacccccaccatcgtggtggacgccatgtgctgcctgagatactggtacacccccgagagctggatctgcggcggccagtggagagagtacttcagcgccctgagagacttcgtgaagaccttcaccgccgccggcatcaagctgatcttcttcttcgacggcatggtggagcaggacaagagagacgagtgggtgaagagaagactgaagaacaacagagagatcagcagaatcttccactacatcaagagccacaaggagcagcccggcagaaacatgttcttcatccccagcggcctggccgtgttcaccagattcgccctgaagaccctgggccaggagaccctgtgcagcctgcaggaggccgactacgaggtggccagctacggcctgcagcacaactgcctgggcatcctgggcgaggacaccgactacctgatctacgacacctgcccctacttcagcatcagcgagctgtgcctggagagcctggacaccgtgatgctgtgcagagagaagctgtgcgagagcctgggcctgtgcgtggccgacctgcccctgctggcctgcctgctgggcaacgacatcatccccgagggcatgttcgagagcttcagatacaagtgcctgagcagctacaccagcgtgaaggagaacttcgacaagaagggcaacatcatcctggccgtgagcgaccacatcagcaaggtgctgtacctgtaccagggcgagaagaagctggaggagatcctgcccctgggccccaacaaggccctgttctacaagggcatggccagctacctgctgcccggccagaagagcccctggttcttccagaagcccaagggcgtgatcaccctggacaagcaggtgatcagcaccagcagcgacgccgagagcagagaggaggtgcccatgtgcagcgacgccgagagcagacaggaggtgcccatgtgcaccggccccgagagcagaagagaggtgcccgtgtacaccgacagcgagcccagacaggaggtgcccatgtgcagcgaccccgagcccagacaggaggtgcccacctgcaccggccccgagagcagaagagaggtgcccatgtgcagcgaccccgagcccagacaggaggtgcccatgtgcaccggccccgaggccagacaggaggtgcccatgtacaccgacagcgagcccagacaggaggtgcccatgtacaccgacagcgagcccagacaggaggtgcccatgtacaccggcagcgagcccagacaggaggtgcccatgtacaccggccccgagagcagacaggaggtgcccatgtacaccggccccgagagcagacaggaggtgctgatcagaaccgaccccgagagcagacaggagatcatgtgcaccggccacgagagcaagcaggaggtgcccatctgcaccgaccccatcagcaagcaggaggacagcatgtgcacccacgccgagatcaaccagaagctgcccgtggccaccgacttcgagttcaagctggaggccctgatgtgcaccaaccccgagatcaagcaggaggaccccaccaacgtgggccccgaggtgaagcagcaggtgaccatggtgagcgacaccgagatcctgaaggtggccagaacccaccacgtgcaggccgagagctacctggtgtacaacatcatgagcagcggcgagatcgagtgcagcaacaccctggaggacgagctggaccaggccctgcccagccaggccttcatctacagacccatcagacagagagtgtacagcctgctgctggaggactgccaggacgtgaccagcacctgcctggccgtgaaggagtggttcgtgtaccccggcaaccccctgagacaccccgacctggtgagacccctgcagatgaccatccccggcggcacccccagcctgaagatcctgtggctgaaccaggagcccgagatccaggtgagaagactggacaccctgctggcctgcttcaacctgagcagcagcagagaggagctgcaggccgtggagagccccttccaggccctgtgctgcctgctgatctacctgttcgtgcaggtggacaccctgtgcctggaggacctgcacgccttcatcgcccaggccctgtgcctgcagggcaagagcaccagccagctggtgaacctgcagcccgactacatcaaccccagagccgtgcagctgggcagcctgctggtgagaggcctgaccaccctggtgctggtgaacagcgcctgcggcttcccctggaagaccagcgacttcatgccctggaacgtgttcgacggcaagctgttccaccagaagtacctgcagagcgagaagggctacgccgtggaggtgctgctggagcagaacagaagcagactgaccaagttccacaacctgaaggccgtggtgtgcaaggcctgcatgaaggagaacagaagaatcaccggcagagcccactggggcagccaccacgccggcagatggggcagacagggcagcagctaccacagaaccggcagcggctacagcagaagcagccagggccagccctggagagaccagggccccggcagcagacagtacgagcacgaccagtggagaagatactag

SEQ ID NO: 81140 - DNA, 2802 bp, synthetic construct
  misc_feature 1..2802: note = Description of Artificial Sequence: Synthetic coding sequence
  source 1..2802: mol_type = other DNA
atgttcggccccagaggcagcaccagcgccggcgccggcagaaaggagatcctgagcagaagcagcgtgatgggcgtgagaggcctgcagggcttcgtgggcagcacctgcccccacatctgcaccgtggtgaacttcaaggagctggccgagcaccacagaagcaagtaccccggctgcacccccaccatcgtggtggacgccatgtgctgcctgagatactggtacacccccgagagctggatctgcggcggccagtggagagagtacttcagcgccctgagagacttcgtgaagaccttcaccgccgccggcatcaagctgatcttcttcttcgacggcatggtggagcaggacaagagagacgagtgggtgaagagaagactgaagaacaacagagagatcagcagaatcttccactacatcaagagccacaaggagcagcccggcagaaacatgttcttcatccccagcggcctggccgtgttcaccagattcgccctgaagaccctgggccaggagaccctgtgcagcctgcaggaggccgactacgaggtggccagctacggcctgcagcacaactgcctgggcatcctgggcgaggacaccgactacctgatctacgacacctgcccctacttcagcatcagcgagctgtgcctggagagcctggacaccgtgatgctgtgcagagagaagctgtgcgagagcctgggcctgtgcgtggccgacctgcccctgctggcctgcctgctgggcaacgacatcatccccgagggcatgttcgagagcttcagatacaagtgcctgagcagctacaccagcgtgaaggagaacttcgacaagaagggcaacatcatcctggccgtgagcgaccacatcagcaaggtgctgtacctgtaccagggcgagaagaagctggaggagatcctgcccctgggccccaacaaggccctgttctacaagggcatggccagctacctgctgcccggccagaagagcccctggttcttccagaagcccaagggcgtgatcaccctggacaagcaggtgatcagcaccagcagcgacgccgagagcagagaggaggtgcccatgtgcagcgacgccgagagcagacaggaggtgcccatgtgcaccggccccgagagcagaagagaggtgcccgtgtacaccgacagcgagcccagacaggaggtgcccatgtgcagcgaccccgagcccagacaggaggtgcccacctgcaccggccccgagagcagaagagaggtgcccatgtgcagcgaccccgagcccagacaggaggtgcccatgtgcaccggccccgaggccagacaggaggtgcccatgtacaccgacagcgagcccagacaggaggtgcccatgtacaccgacagcgagcccagacaggaggtgcccatgtacaccggcagcgagcccagacaggaggtgcccatgtacaccggccccgagagcagacaggaggtgcccatgtacaccggccccgagagcagacaggaggtgctgatcagaaccgaccccgagagcagacaggagatcatgtgcaccggccacgagagcaagcaggaggtgcccatctgcaccgaccccatcagcaagcaggaggacagcatgtgcacccacgccgagatcaaccagaagctgcccgtggccaccgacttcgagttcaagctggaggccctgatgtgcaccaaccccgagatcaagcaggaggaccccaccaacgtgggccccgaggtgaagcagcaggtgaccatggtgagcgacaccgagatcctgaaggtggccagaacccaccacgtgcaggccgagagctacctggtgtacaacatcatgagcagcggcgagatcgagtgcagcaacaccctggaggacgagctggaccaggccctgcccagccaggccttcatctacagacccatcagacagagagtgtacagcctgctgctggaggactgccaggacgtgaccagcacctgcctggccgtgaaggagtggttcgtgtaccccggcaaccccctgagacaccccgacctggtgagacccctgcagatgaccatccccggcggcacccccagcctgaagatcctgtggctgaaccaggagcccgagatccaggtgagaagactggacaccctgctggcctgcttcaacctgagcagcagcagagaggagctgcaggccgtggagagccccttccaggccctgtgctgcctgctgatctacctgttcgtgcaggtggacaccctgtgcctggaggacctgcacgccttcatcgcccaggccctgtgcctgcagggcaagagcaccagccagctggtgaacctgcagcccgactacatcaaccccagagccgtgcagctgggcagcctgctggtgagaggcctgaccaccctggtgctggtgaacagcgcctgcggcttcccctggaagaccagcgacttcatgccctggaacgtgttcgacggcaagctgttccaccagaagtacctgcagagcgagaagggctacgccgtggaggtgctgctggagcagaacagaagcagactgaccaagttccacaacctgaaggccgtggtgtgcaaggcctgcatgaaggagaacagaagaatcaccggcagagcccactggggcagccaccacgccggcagatggggcagacagggcagcagctaccacagaaccggcagcggctacagcagaagcagccagggccagccctggagagaccagggccccggcagcagacagtacgagcacgaccagtggagaagatactag

SEQ ID NO: 81141 - DNA, 2769 bp, synthetic construct
  misc_feature 1..2769: note = Description of Artificial Sequence: Synthetic coding sequence
  source 1..2769: mol_type = other DNA
atggacagacagatgatcctgagcagaagcagcgtgatgggcgtgagaggcctgcagggcttcgtgggcagcacctgcccccacatctgcaccgtggtgaacttcaaggagctggccgagcaccacagaagcaagtaccccggctgcacccccaccatcgtggtggacgccatgtgctgcctgagatactggtacacccccgagagctggatctgcggcggccagtggagagagtacttcagcgccctgagagacttcgtgaagaccttcaccgccgccggcatcaagctgatcttcttcttcgacggcatggtggagcaggacaagagagacgagtgggtgaagagaagactgaagaacaacagagagatcagcagaatcttccactacatcaagagccacaaggagcagcccggcagaaacatgttcttcatccccagcggcctggccgtgttcaccagattcgccctgaagaccctgggccaggagaccctgtgcagcctgcaggaggccgactacgaggtggccagctacggcctgcagcacaactgcctgggcatcctgggcgaggacaccgactacctgatctacgacacctgcccctacttcagcatcagcgagctgtgcctggagagcctggacaccgtgatgctgtgcagagagaagctgtgcgagagcctgggcctgtgcgtggccgacctgcccctgctggcctgcctgctgggcaacgacatcatccccgagggcatgttcgagagcttcagatacaagtgcctgagcagctacaccagcgtgaaggagaacttcgacaagaagggcaacatcatcctggccgtgagcgaccacatcagcaaggtgctgtacctgtaccagggcgagaagaagctggaggagatcctgcccctgggccccaacaaggccctgttctacaagggcatggccagctacctgctgcccggccagaagagcccctggttcttccagaagcccaagggcgtgatcaccctggacaagcaggtgatcagcaccagcagcgacgccgagagcagagaggaggtgcccatgtgcagcgacgccgagagcagacaggaggtgcccatgtgcaccggccccgagagcagaagagaggtgcccgtgtacaccgacagcgagcccagacaggaggtgcccatgtgcagcgaccccgagcccagacaggaggtgcccacctgcaccggccccgagagcagaagagaggtgcccatgtgcagcgaccccgagcccagacaggaggtgcccatgtgcaccggccccgaggccagacaggaggtgcccatgtacaccgacagcgagcccagacaggaggtgcccatgtacaccgacagcgagcccagacaggaggtgcccatgtacaccggcagcgagcccagacaggaggtgcccatgtacaccggccccgagagcagacaggaggtgcccatgtacaccggccccgagagcagacaggaggtgctgatcagaaccgaccccgagagcagacaggagatcatgtgcaccggccacgagagcaagcaggaggtgcccatctgcaccgaccccatcagcaagcaggaggacagcatgtgcacccacgccgagatcaaccagaagctgcccgtggccaccgacttcgagttcaagctggaggccctgatgtgcaccaaccccgagatcaagcaggaggaccccaccaacgtgggccccgaggtgaagcagcaggtgaccatggtgagcgacaccgagatcctgaaggtggccagaacccaccacgtgcaggccgagagctacctggtgtacaacatcatgagcagcggcgagatcgagtgcagcaacaccctggaggacgagctggaccaggccctgcccagccaggccttcatctacagacccatcagacagagagtgtacagcctgctgctggaggactgccaggacgtgaccagcacctgcctggccgtgaaggagtggttcgtgtaccccggcaaccccctgagacaccccgacctggtgagacccctgcagatgaccatccccggcggcacccccagcctgaagatcctgtggctgaaccaggagcccgagatccaggtgagaagactggacaccctgctggcctgcttcaacctgagcagcagcagagaggagctgcaggccgtggagagccccttccaggccctgtgctgcctgctgatctacctgttcgtgcaggtggacaccctgtgcctggaggacctgcacgccttcatcgcccaggccctgtgcctgcagggcaagagcaccagccagctggtgaacctgcagcccgactacatcaaccccagagccgtgcagctgggcagcctgctggtgagaggcctgaccaccctggtgctggtgaacagcgcctgcggcttcccctggaagaccagcgacttcatgccctggaacgtgttcgacggcaagctgttccaccagaagtacctgcagagcgagaagggctacgccgtggaggtgctgctggagcagaacagaagcagactgaccaagttccacaacctgaaggccgtggtgtgcaaggcctgcatgaaggagaacagaagaatcaccggcagagcccactggggcagccaccacgccggcagatggggcagacagggcagcagctaccacagaaccggcagcggctacagcagaagcagccagggccagccctggagagaccagggccccggcagcagacagtacgagcacgaccagtggagaagatactag

SEQ ID NO: 81142 - DNA, 3291 bp, synthetic construct
  misc_feature 1..3291: note = Description of Artificial Sequence: Synthetic coding sequence
  source 1..3291: mol_type = other DNA
atgggcgtgcagggcttccaggagttcctggagaagagatgccccggcgccgtggtgcccgtggacctgctgaagctggccagaaccgtgagcagacagcagcagcagcagcacctgcacagacagctgccccccaccgccgccctggcccccggcgcccccagagccgccagaggcagcgtgcccctgcagccccccctgccccccgccgccctgggcgcctacagcggcggcgccggccccatcagacaccaccaccccgcccaccacttccaccaccacggccaggcccagcccggcctgcacccccccctgcccccccccccccccccccagctgcccggcgccagagtgctggtggacgccggcagcgccctgcccagactgtacggcggctaccagaccgactgggtgtgcggcggccagtggaacgccatgctgggctacctgagcgccctgtgccaggcctgcgcctaccccggcggcgacggcctggagctggtggtgatgttccccggcggcctgggcaaggacagactggccgagtggggcagaagatgccaggccgagagacagaccgcccagctgatcgtgggccacgtgggcaacaagggcacccccccccccagagcctggttcctgccccccgcctgcctgagccactgcgtgagactggccctgatcagattcagagtgaaggtgttccagagcctggaggaccaccacctggaggtggtggccttcttcagagagaacggcttccacggcctgctggcccacgacagcgagtacgccctgtacaacatccccagctactacagcagccacgccctgaagctgagctggaacggcaagaacctgaccaccaaccagttcctgatgcaggaggtggccaagcagctgggcctgaagagaatgaacttccccatcttcgccgccctgctgggcaaccacatcctgcccgacgaggacctggccgccttccactggagcctgctgggccccgagcaccccctggccagcctgaaggtgagagcccaccagctggtgctgcccccctgcgacgtggtgatcaaggccgtgagcgagtacgtgagcagcatcaaggaccccagcaacctggacgtggtgggcaaggacgtgttcaagcagagccagagcagaaccgaggacaagatcgagagattcaagaaggccgtggagtactacagcgtgaccaccaagctgagcagcctgcccgtgggccccagcttcctgggcttcagaaacaacagactgggcaacccccccctgcccagaaaccaggtgggcaccatcagcgccggcaagcccatgttcagccaccaggtgccccagaaggtgaagtaccccccccccttccccgtgggccccaacagcagcctgctgttcagcagccacgccctgggcgagagccacgccttcagcgaggaccccatgctgcagaacagccccttcgccaactgggccgtgagctacgacagcagcgccagccagttccccaactacctgcccagcaaggccagcccccccctgggccccgacagcagccacagcagcagcagcgacggcgacgagcccaacggcgccagcagcgaccacatcaccgaggccttccaccaccagcccgagtggggcaaccccaacagagacagaggcagctgggcccagcccgtggacaccggcgtgagcgaggccagcctgggcgacggcgagccccacatccccagcctgctgagcatgagcaccagaaaccacatggacatcaccatcccccccctgccccccgtggcccccgaggtgctgagagtggccgagcacagacacagaagaggcctgatgtacccctacatctaccacgtgctgaccaagggcgagatcaagatccccgtgtgcatcgaggacgagtgcaacatggagctgccccccgccgccctgctgttcagaagcgccagacagtacgtgtacggcgtgctgttcagcctggccgagacccagagaaagatggagagactggccatgagaagaagactgcccgtggaggtgcccagcgtgatcctgaaggagtggagcgcctacaagggcaagagcccccagacccccgagctggtgagcgccctgaccttcagagagtggacctgccccaacctgaagaagctgtggctgggcaaggccgtggaggacaagaacagaagaatgagagccttcctggcctgcatgaagagcgacacccccagcatgctgaaccccgccaacgtgcccacccacctgctgctgatgtgctgcgtgctgagatacatggtgcagtggcccggcggcagaatcctgcacagacacgagctggacaccttcctggcccaggccgtgagcacccagctgtacgagcccgacagactgcaggagctgaagatcgagaagctggacgccagaggcatccagctggccgccctgttcatgagcggcgtggacaccgccctgttcgccaacgacgcctgcggccagcccgtgccctgggagcactgctgcccctggatctacttcgacggcaagctgttccagagcaagctgatcaaggccggcagagagagagtgagcctggtggagctgtgcgacggccaggccgacctggccaccaaggtggagaagatgagacagagcatcctggagggcgtgaacatgaaccaccccccccccagcgccctgctgcccagccccaccttcgtgccccccatggtgcccagcctgtaccccgtgagcctgtacagcagagccatgggcagcatgcccctgcccccccagggcagaagcagaggcttcgccggcctgcaccccatccccccccagggcggcaagctggagatcgccggcatggtggtgggccagtgggccggcagcagaagcagcagaggcagaggcagcttcggcatgcaggtggtgagcgtgggcggccccggcaagggccacggcaaggagcagaccggcagaggcagcaagggccacaagaagggcaacaagcagggcagcagcgacggcgtgagcaagagcctggagctgcaccagggcagaagcagaagccaggtgaacggcaacagcggcgccctgatcaaggaggagaagagcgaccacagactgcccgcccccagccagtgcgccctgagcagagacagcaacgagtgcaacaacggcaacagatacctgcccatgaacaacagagagaagaaccacctgcaggagcagaagctggagaccgtggcccagagaaaggaggactag

SEQ ID NO: 81143 - DNA, 717 bp, synthetic construct
  misc_feature 1..717: note = Description of Artificial Sequence: Synthetic coding sequence
  source 1..717: mol_type = other DNA
atgggcgtgcagggcttccaggagttcctggagaagagatgccccggcgccgtggtgcccgtggacctgctgaagctggccagaaccgtgagcagacagcagcagcagcagcacctgcacagacagctgccccccaccgccgccctggcccccggcgcccccagagccgccagaggcagcgtgcccctgcagccccccctgccccccgccgccctgggcgcctacagcggcggcgccggccccatcagacaccaccaccccgcccaccacttccaccaccacggccaggcccagcccggcctgcacccccccctgcccccccccccccccccccagctgcccggcgccagagtgctggtggacgccggcagcgccctgcccagactgtacggcggctaccagaccgactgggtgtgcggcggccagtggaacgccatgctgggctacctgagcgccctgtgccaggcctgcgcctaccccggcggcgacggcctggagctggtggtgatgttccccggcggcctgggcaaggacagactggccgagtggggcagaagatgccaggccgagagacagaccgcccagctgatcgtgggccacgtgggcaacaagggcacccccccccccagagcctggttcctgccccccgcctgcctgagccactgcgtgagactggccctgatcagattcagagtgaagcaggccgccatgctgtag

SEQ ID NO: 81144 - DNA, 3408 bp, synthetic construct
  misc_feature 1..3408: note = Description of Artificial Sequence: Synthetic coding sequence
  source 1..3408: mol_type = other DNA
atggagacccagaaggacgaggccgcccaggccaagggcgccgccgccagcggcagcaccagagagcagaccgccgagaagggcgccaagaacaaggccgccgaggccaccgagggccccaccagcgagcccagcagcagcggccccggcagactgaagaagaccgccatgaagctgttcggcggcaagaagggcatctgcaccctgcccagcttcttcggcggcggcagaagcaagggcagcggcaagggcagcagcaagaagggcctgagcaagagcaagacccacgacggcctgagcgaggccgcccacggccccgaggacgtggtgagcgagggcaccggcttcagcctgcccctgcccgagctgccctgccagttccccagcagccagagcgcccacggcgccctggagaccggcagcagatgcaagaccagcgtggccggcgccaccgagaaggccgtggccgagaagttccccagcatgcccaagcccaagaagggcctgaagggcttcttcagcagcatcagaagacacagaaagagcaaggtgaccggcgccgagcagagcgagcccggcgccaagggccccgagagagtgagagccagaccccacgagcacgtgagcagcgccccccaggtgccctgcttcgaggagaccttccaggcccccagaaaggagaacgccaacccccaggacgcccccggccccaaggtgagccccacccccgagcccagcccccccgccaccgagaagatggcctgcaaggaccccgagaagcccatggaggcctgcgccagcgcccacgtgcagcccaagcccgcccccgaggccagcagcctggaggagccccacagccccgagaccggcgagaaggtggtggccggcgaggtgaacccccccaacggccccgtgggcgaccccctgagcctgctgttcggcgacgtgaccagcctgaagagcttcgacagcctgaccggctgcggcgacatcatcgccgagcaggacatggacagcatgaccgacagcatggccagcggcggccagagagccaacagagacggcaccaagagaagcagctgcctggtgacctaccagggcggcggcgaggagatggccctgcccgacgacgacgacgaggaggaggaggaggaggaggaggtggagctggaggaggaggaggaggaggtgaaggaggaggaggaggacgacgacctggagtacctgtgggagaccgcccagatgtaccccagacccaacatgaacctgggctaccaccccaccaccagccccggccaccacggctacatgctgctggaccccgtgagaagctaccccggcctggcccccggcgagctgctgaccccccagagcgaccagcaggagagcgcccccaacagcgacgagggctactacgacagcaccacccccggcttcgaggacgacagcggcgaggccctgggcctggtgagaagagactgcctgcccagagacagctacagcggcgacgccctgtacgagttctacgagcccgacgacagcctggagaacagcccccccggcgacgactgcctgtacgacctgcacggcagaagcagcgagatgttcgaccccttcctgaacttcgagcccttcctgagcagcagaccccccggcgccatggagaccgaggaggagagactggtgaccatccagaagcagctgctgtactgggagctgagaagagagcagctggaggcccaggaggccagagccagagaggcccacgccagagaggcccacgccagagaggcctacaccagagaggcctacggcagagaggcctacgccagagaggcccacacctgggaggcccacggcagagaggccagaaccagagaggcccaggccagagaggtgagatgcagagagacccaggtgagagagacccaggccagacaggagaagcccgtgctggagtaccagatgagacccctgggccccagcgtgatgggcctggccgccggcgtgagcggcaccagccagatcagccacagaggcatcaccagcgccttccccaccaccgccagcagcgagcccgactggagagacttcagacccctggagaagagatacgagggcacctgcagcaagaaggaccagagcacctgcctgatgcagctgttccagagcgacgccatgttcgagcccgacatgcaggaggccaacttcggcggcagccccagaagagcctaccccacctacagcccccccgaggaccccgaggaggaggaggtggagaaggagggcaacgccaccgtgagcttcagccaggccctggtggagttcaccagcaacggcaacctgttcagcagcatgagctgcagcagcgacagcgacagcagcttcacccagaacctgcccgagctgccccccatggtgaccttcgacatcgccgacgtggagagagacggcgagggcaagtgcgaggagaaccccgagttccacaacgacgaggacctggccgccagcctggaggccttcgagctgggctactaccacaagcacgccttcaacaactaccacagcagattctaccagggcctgccctggggcgtgagcagcctgcccagatacctgggcctgcccggcctgcaccccagacccccccccgccgccatggccctgaacagaagaagcagaagcctggacaccgccgagaccctggagatggagctgagcaacagccacctggtgcagggctacctggagagcgacgagctgcaggcccagcaggaggacagcgacgaggaggacgaggaggaggaggagggcgagtggagcagagacagccccctgagcctgtacaccgagccccccggcgcctacgactggcccgcctgggccccctgccccctgcccgtgggccccggccccgcctggatcagccccaaccagctggacagacccagcagccagagcccctacagacaggccacctgctgcatcccccccatgaccatgagcatcagcctgagcgtgcccgagagcagagcccccggcgagagcggcccccagctggccagacccagccacctgcacctgcccatgggcccctgctacaacctgcagccccaggccagccagagcatgagagccagacccagagacgtgctgctgcccgtggacgagcccagctgcagcagcagcagcggcggcttcagccccagccccctgccccaggccaagcccgtgggcatcacccacggcatcccccagctgcccagagtgagacccgagcacccccagccccagcccacccactacggccccagcagcctggacctgagcaaggagagagccgagcagggcgccagcctggccaccagctacagcagcaccgccatgaacggcaacctggccaagtag

SEQ ID NO: 81145 - DNA, 2415 bp, synthetic construct
  misc_feature 1..2415: note = Description of Artificial Sequence: Synthetic coding sequence
  source 1..2415: mol_type = other DNA
atggagacccagaaggacgaggccgcccaggccaagggcgccgccgccagcggcagcaccagagagcagaccgccgagaagggcgccaagaacaaggccgccgaggccaccgagggccccaccagcgagcccagcagcagcggccccggcagactgaagaagaccgccatgaagctgttcggcggcaagaagggcatctgcaccctgcccagcttcttcggcggcggcagaagcaagggcagcggcaagggcagcagcaagaagggcctgagcaagagcaagacccacgacggcctgagcgaggccgcccacggccccgaggacgtggtgagcgagggcaccggcttcagcctgcccctgcccgagctgccctgccagttccccagcagccagagcgcccacggcgccctggagaccggcagcagatgcaagaccagcgtggccggcgccaccgagaaggccgtggccgagaagttccccagcatgcccaagcccaagaagggcctgaagggcttcttcagcagcatcagaagacacagaaagagcaaggtgaccggcgccgagcagagcgagcccggcgccaagggccccgagagagtgagagccagaccccacgagcacgtgagcagcgccccccaggtgccctgcttcgaggagaccttccaggcccccagaaaggagaacgccaacccccaggacgcccccggccccaaggtgagccccacccccgagcccagcccccccgccaccgagaagatggcctgcaaggaccccgagaagcccatggaggcctgcgccagcgcccacgtgcagcccaagcccgcccccgaggccagcagcctggaggagccccacagccccgagaccggcgagaaggtggtggccggcgaggtgaacccccccaacggccccgtgggcgaccccctgagcctgctgttcggcgacgtgaccagcctgaagagcttcgacagcctgaccggctgcggcgacatcatcgccgagcaggacatggacagcatgaccgacagcatggccagcggcggccagagagccaacagagacggcaccaagagaagcagctgcctggtgacctaccagggcggcggcgaggagatggccctgcccgacgacgacgacgaggaggaggaggaggaggaggaggtggagctggaggaggaggaggaggaggtgaaggaggaggaggaggacgacgacctggagtacctgtgggagaccgcccagatgtaccccagacccaacatgaacctgggctaccaccccaccaccagccccggccaccacggctacatgctgctggaccccgtgagaagctaccccggcctggcccccggcgagctgctgaccccccagagcgaccagcaggagagcgcccccaacagcgacgagggctactacgacagcaccacccccggcttcgaggacgacagcggcgaggccctgggcctggtgagaagagactgcctgcccagagacagctacagcggcgacgccctgtacgagttctacgagcccgacgacagcctggagaacagcccccccggcgacgactgcctgtacgacctgcacggcagaagcagcgagatgttcgaccccttcctgaacttcgagcccttcctgagcagcagaccccccggcgccatggagaccgaggaggagagactggtgaccatccagaagcagctgctgtactgggagctgagaagagagcagctggaggcccaggaggccagagccagagaggcccacgccagagaggcccacgccagagaggcctacaccagagaggcctacggcagagaggcctacgccagagaggcccacacctgggaggcccacggcagagaggccagaaccagagaggcccaggccagagaggtgagatgcagagagacccaggtgagagagacccaggccagacaggagaagcccgtgctggagtaccagatgagacccctgggccccagcgtgatgggcctggccgccggcgtgagcggcaccagccagatcagccacagaggcatcaccagcgccttccccaccaccgccagcagcgagcccgactggagagacttcagacccctggagaagagatacgagggcacctgcagcaagaaggaccagagcacctgcctgatgcagctgttccagagcgacgccatgttcgagcccgacatgcaggaggccaacttcggcggcagccccagaagagcctaccccacctacagcccccccgaggaccccgaggaggaggaggtggagaaggagggcaacgccaccgtgagcttcagccaggccctggtggagttcaccagcaacggcaacctgttcagcagcatcagatgccccggcaccgaggacaagagacaggtgacccaggcctgcggcacctggtag

SEQ ID NO: 81146 - DNA, 1566 bp, synthetic construct
  misc_feature 1..1566: note = Description of Artificial Sequence: Synthetic coding sequence
  source 1..1566: mol_type = other DNA
atgttcaccagcgagaagggcgtggtggaggagtggctgagcgagttcaagaccctgcccgagaccagcctgcccaactacgccaccaacctgaaggacaagagcagcctggtgagcagcctgtacaaggtgatccaggagccccagagcgagctgctggagcccgtgtgccaccagctgttcgagttctacagaagcggcgaggagcagctgctgcagttcaccctgcagttcctgcccgagctgatctggtgctacctggccgtgagcgccagcagaaacgtgcacagcagcggctgcatcgaggccctgctgctgggcgtgtacaacctggagatcgtggacaagcagggccacaccaaggtgctgagcttcaccatccccagcctgagcaagcccagcgtgtaccacgagcccagcagcatcggcagcatggccctgaccgagagcgccctgagccagcacggcctgagcaaggtggtgtacagcggcccccacccccagagagagatgctgaccgcccagaacagattcgaggtgctgaccttcctgctgctgtgctacaacgccgccctgacctacatgcccagcgtgagcctgcagagcctgtgccagatctgcagcagaatctgcgtgtgcggctaccccagacagcacgtgagaaagtacaagggcatcagcagcagaatccccgtgagcagcggcttcatggtgcagatgctgaccggcatctacttcgccttctacaacggcgagtgggacctggcccagaaggccctggacgacatcatctacagagcccagctggagctgtaccccgagcccctgctggtggccaacgccatcaaggccagcctgccccacggccccatgaagagcaacaaggagggcaccagatgcatccaggtggagatcacccccaccagcagcagaatcagcagaaacgccgtgaccagcatgagcatcagaggccacagatggaagagacacggcaacaccgagctgaccggccaggaggagctgatggagatcagcgaggtggacgagggcttctacagcagagccgccagcagcaccagccagagcggcctgagcaacagcagccacaactgcagcaacaagcccagcatcggcaagaaccacagaagaagcggcggcagcaagaccggcggcaaggagaaggagaccaccggcgagagctgcaaggaccacttcgccagaaagcagacccagagagcccagagcgagaacctggagctgctgagcctgaagagactgaccctgaccaccagccagagcctgcccaagcccagcagccacggcctggccaagaccgccgccaccgtgttcagcaagagcttcgagcaggtgagcggcgtgaccgtgccccacaaccccagcagcgccgtgggctgcggcgccggcaccgacgccaacagattcagcgcctgcagcctgcaggaggagaagctgatctacgtgagcgagagaaccgagctgcccatgaagcaccagagcggccagcagagaccccccagcatcagcatcaccctgagcaccgactag

SEQ ID NO: 81147 - DNA, 342 bp, synthetic construct
  misc_feature 1..342: note = Description of Artificial Sequence: Synthetic coding sequence
  source 1..342: mol_type = other DNA
atggacggcagagtgcagctgatcaaggccctgctggccctgcccatcagacccgccaccagaagatggagaaaccccatccccttccccgagaccttcgacggcgacaccgacagactgcccgagttcatcgtgcagaccggcagctacatgttcgtggacgagaacaccttcagcagcgacgccctgaaggtgaccttcctgatcaccagactgaccggccccgccctgcagtgggtgatcccctacatcaagaaggagagccccctgctgaacgactacagaggcttcctggccgagatgaagagagtgttcggctgggaggaggacgaggacttctag

SEQ ID NO: 81148 - DNA, 2241 bp, synthetic construct
  misc_feature 1..2241: note = Description of Artificial Sequence: Synthetic coding sequence
  source 1..2241: mol_type = other DNA
atgggcgacgtgctgagcacccacctggacgacgccagaagacagcacatcgccgagaagaccggcaagatcctgaccgagttcctgcagttctacgaggaccagtacggcgtggccctgttcaacagcatgagacacgagatcgagggcaccggcctgccccaggcccagctgctgtggagaaaggtgcccctggacgagagaatcgtgttcagcggcaacctgttccagcaccaggaggacagcaagaagtggagaaacagattcagcctggtgccccacaactacggcctggtgctgtacgagaacaaggccgcctacgagagacaggtgccccccagagccgtgatcaacagcgccggctacaagatcctgaccagcgtggaccagtacctggagctgatcggcaacagcctgcccggcaccaccgccaagagcggcagcgcccccatcctgaagtgccccacccagttccccctgatcctgtggcacccctacgccagacactactacttctgcatgatgaccgaggccgagcaggacaagtggcaggccgtgctgcaggactgcatcagacactgcaacaacggcatccccgaggacagcaaggtggagggccccgccttcaccgacgccatcagaatgtacagacagagcaaggagctgtacggcacctgggagatgctgtgcggcaacgaggtgcagatcctgagcaacctggtgatggaggagctgggccccgagctgaaggccgagctgggccccagactgaagggcaagccccaggagagacagagacagtggatccagatcagcgacgccgtgtaccacatggtgtacgagcaggccaaggccagattcgaggaggtgctgagcaaggtgcagcaggtgcagcccgccatgcaggccgtgatcagaaccgacatggaccagatcatcaccagcaaggagcacctggccagcaagatcagagccttcatcctgcccaaggccgaggtgtgcgtgagaaaccacgtgcagccctacatccccagcatcctggaggccctgatggtgcccaccagccagggcttcaccgaggtgagagacgtgttcttcaaggaggtgaccgacatgaacctgaacgtgatcaacgagggcggcatcgacaagctgggcgagtacatggagaagctgagcagactggcctaccaccccctgaagatgcagagctgctacgagaagatggagagcctgagactggacggcctgcagcagagattcgacgtgagcagcaccagcgtgttcaagcagagagcccagatccacatgagagagcagatggacaacgccgtgtacaccttcgagaccctgctgcaccaggagctgggcaagggccccaccaaggaggagctgtgcaagagcatccagagagtgctggagagagtgctgaagaagtacgactacgacagcagcagcgtgagaaagagattcttcagagaggccctgctgcagatcagcatccccttcctgctgaagaagctggcccccacctgcaagagcgagctgcccagattccaggagctgatcttcgaggacttcgccagattcatcctggtggagaacacctacgaggaggtggtgctgcagaccgtgatgaaggacatcctgcaggccgtgaaggaggccgccgtgcagagaaagcacaacctgtacagagacagcatggtgatgcacaacagcgaccccaacctgcacctgctggccgagggcgcccccatcgactggggcgaggagtacagcaacagcggcggcggcggcagccccagccccagcacccccgagagcgccaccctgagcgagaagagaagaagagccaagcaggtggtgagcgtggtgcaggacgaggaggtgggcctgcccttcgaggccagccccgagagccccccccccgccagccccgacggcgtgaccgagatcagaggcctgctggcccagggcctgagacccgagagccccccccccgccggccccctgctgaacggcgcccccgccggcgagagcccccagcccaaggccgcccccgaggccagcagcccccccgccagccccctgcagcacctgctgcccggcaaggccgtggacctgggcccccccaagcccagcgaccaggagaccggcgagcaggtgagcagccccagcagccaccccgccctgcacaccaccaccgaggacagcgccggcgtgcagaccgagttctag

SEQ ID NO: 81149 - DNA, 2202 bp, synthetic construct
  misc_feature 1..2202: note = Description of Artificial Sequence: Synthetic coding sequence
  source 1..2202: mol_type = other DNA
atgggctggatgggcgagaagaccggcaagatcctgaccgagttcctgcagttctacgaggaccagtacggcgtggccctgttcaacagcatgagacacgagatcgagggcaccggcctgccccaggcccagctgctgtggagaaaggtgcccctggacgagagaatcgtgttcagcggcaacctgttccagcaccaggaggacagcaagaagtggagaaacagattcagcctggtgccccacaactacggcctggtgctgtacgagaacaaggccgcctacgagagacaggtgccccccagagccgtgatcaacagcgccggctacaagatcctgaccagcgtggaccagtacctggagctgatcggcaacagcctgcccggcaccaccgccaagagcggcagcgcccccatcctgaagtgccccacccagttccccctgatcctgtggcacccctacgccagacactactacttctgcatgatgaccgaggccgagcaggacaagtggcaggccgtgctgcaggactgcatcagacactgcaacaacggcatccccgaggacagcaaggtggagggccccgccttcaccgacgccatcagaatgtacagacagagcaaggagctgtacggcacctgggagatgctgtgcggcaacgaggtgcagatcctgagcaacctggtgatggaggagctgggccccgagctgaaggccgagctgggccccagactgaagggcaagccccaggagagacagagacagtggatccagatcagcgacgccgtgtaccacatggtgtacgagcaggccaaggccagattcgaggaggtgctgagcaaggtgcagcaggtgcagcccgccatgcaggccgtgatcagaaccgacatggaccagatcatcaccagcaaggagcacctggccagcaagatcagagccttcatcctgcccaaggccgaggtgtgcgtgagaaaccacgtgcagccctacatccccagcatcctggaggccctgatggtgcccaccagccagggcttcaccgaggtgagagacgtgttcttcaaggaggtgaccgacatgaacctgaacgtgatcaacgagggcggcatcgacaagctgggcgagtacatggagaagctgagcagactggcctaccaccccctgaagatgcagagctgctacgagaagatggagagcctgagactggacggcctgcagcagagattcgacgtgagcagcaccagcgtgttcaagcagagagcccagatccacatgagagagcagatggacaacgccgtgtacaccttcgagaccctgctgcaccaggagctgggcaagggccccaccaaggaggagctgtgcaagagcatccagagagtgctggagagagtgctgaagaagtacgactacgacagcagcagcgtgagaaagagattcttcagagaggccctgctgcagatcagcatccccttcctgctgaagaagctggcccccacctgcaagagcgagctgcccagattccaggagctgatcttcgaggacttcgccagattcatcctggtggagaacacctacgaggaggtggtgctgcagaccgtgatgaaggacatcctgcaggccgtgaaggaggccgccgtgcagagaaagcacaacctgtacagagacagcatggtgatgcacaacagcgaccccaacctgcacctgctggccgagggcgcccccatcgactggggcgaggagtacagcaacagcggcggcggcggcagccccagccccagcacccccgagagcgccaccctgagcgagaagagaagaagagccaagcaggtggtgagcgtggtgcaggacgaggaggtgggcctgcccttcgaggccagccccgagagccccccccccgccagccccgacggcgtgaccgagatcagaggcctgctggcccagggcctgagacccgagagccccccccccgccggccccctgctgaacggcgcccccgccggcgagagcccccagcccaaggccgcccccgaggccagcagcccccccgccagccccctgcagcacctgctgcccggcaaggccgtggacctgggcccccccaagcccagcgaccaggagaccggcgagcaggtgagcagccccagcagccaccccgccctgcacaccaccaccgaggacagcgccggcgtgcagaccgagttctag

SEQ ID NO: 81150 - DNA, 1191 bp, synthetic construct
  misc_feature 1..1191: note = Description of Artificial Sequence: Synthetic coding sequence
  source 1..1191: mol_type = other DNA
atggtgcccaccagccagggcttcaccgaggtgagagacgtgttcttcaaggaggtgaccgacatgaacctgaacgtgatcaacgagggcggcatcgacaagctgggcgagtacatggagaagctgagcagactggcctaccaccccctgaagatgcagagctgctacgagaagatggagagcctgagactggacggcctgcagcagagattcgacgtgagcagcaccagcgtgttcaagcagagagcccagatccacatgagagagcagatggacaacgccgtgtacaccttcgagaccctgctgcaccaggagctgggcaagggccccaccaaggaggagctgtgcaagagcatccagagagtgctggagagagtgctgaagaagtacgactacgacagcagcagcgtgagaaagagattcttcagagaggccctgctgcagatcagcatccccttcctgctgaagaagctggcccccacctgcaagagcgagctgcccagattccaggagctgatcttcgaggacttcgccagattcatcctggtggagaacacctacgaggaggtggtgctgcagaccgtgatgaaggacatcctgcaggccgtgaaggaggccgccgtgcagagaaagcacaacctgtacagagacagcatggtgatgcacaacagcgaccccaacctgcacctgctggccgagggcgcccccatcgactggggcgaggagtacagcaacagcggcggcggcggcagccccagccccagcacccccgagagcgccaccctgagcgagaagagaagaagagccaagcaggtggtgagcgtggtgcaggacgaggaggtgggcctgcccttcgaggccagccccgagagccccccccccgccagccccgacggcgtgaccgagatcagaggcctgctggcccagggcctgagacccgagagccccccccccgccggccccctgctgaacggcgcccccgccggcgagagcccccagcccaaggccgcccccgaggccagcagcccccccgccagccccctgcagcacctgctgcccggcaaggccgtggacctgggcccccccaagcccagcgaccaggagaccggcgagcaggtgagcagccccagcagccaccccgccctgcacaccaccaccgaggacagcgccggcgtgcagaccgagttctag

SEQ ID NO: 81151 - DNA, 3072 bp, synthetic construct
  misc_feature 1..3072: note = Description of Artificial Sequence: Synthetic coding sequence
  source 1..3072: mol_type = other DNA
atgggcgccggcgccctggccatctgccagagcaaggccgccgtgagactgaaggaggacatgaagaagatcgtggccgtgcccctgaacgagcagaaggacttcacctaccagaagctgttcggcgtgagcctgcaggagctggagagacagggcctgaccgagaacggcatccccgccgtggtgtggaacatcgtggagtacctgacccagcacggcctgacccaggagggcctgttcagagtgaacggcaacgtgaaggtggtggagcagctgagactgaagttcgagagcggcgtgcccgtggagctgggcaaggacggcgacgtgtgcagcgccgccagcctgctgaagctgttcctgagagagctgcccgacagcctgatcaccagcgccctgcagcccagattcatccagctgttccaggacggcagaaacgacgtgcaggagagcagcctgagagacctgatcaaggagctgcccgacacccactactgcctgctgaagtacctgtgccagttcctgaccaaggtggccaagcaccacgtgcagaacagaatgaacgtgcacaacctggccaccgtgttcggccccaactgcttccacgtgccccccggcctggagggcatgaaggagcaggacctgtgcaacaagatcatggccaagatcctggagaactacaacaccctgttcgaggtggagtacaccgagaacgaccacctgagatgcgagaacctggccagactgatcatcgtgaaggaggtgtactacaagaacagcctgcccatcctgctgaccagaggcctggagagagacatgcccaagcccccccccaagaccaagatccccaagagcagaagcgagggcagcatccaggcccacagagtgctgcagcccgagctgagcgacggcatcccccagctgagcctgagactgagctacagaaaggcctgcctggaggacatgaacagcgccgagggcgccatcagcgccaagctggtgcccagcagccaggaggacgagagacccctgagccccttctacctgagcgcccacgtgccccaggtgagcaacgtgagcgccaccggcgagctgctggagagaaccatcagaagcgccgtggagcagcacctgttcgacgtgaacaacagcggcggccagagcagcgaggacagcgagagcggcaccctgagcgccagcagcgccaccagcgccagacagagaagaagacagagcaaggagcaggacgaggtgagacacggcagagacaagggcctgatcaacaaggagaacacccccagcggcttcaaccacctggacgactgcatcctgaacacccaggaggtggagaaggtgcacaagaacaccttcggctgcgccggcgagagaagcaagcccaagagacagaagagcagcaccaagctgagcgagctgcacgacaaccaggacggcctggtgaacatggagagcctgaacagcaccagaagccacgagagaaccggccccgacgacttcgagtggatgagcgacgagagaaagggcaacgagaaggacggcggccacacccagcacttcgagagccccaccatgaagatccaggagcaccccagcctgagcgacaccaagcagcagagaaaccaggacgccggcgaccaggaggagagcttcgtgagcgaggtgccccagagcgacctgaccgccctgtgcgacgagaagaactgggaggagcccatccccgccttcagcagctggcagagagagaacagcgacagcgacgaggcccacctgagcccccaggccggcagactgatcagacagctgctggacgaggacagcgaccccatgctgagccccagattctacgcctacggccagagcagacagtacctggacgacaccgaggtgccccccagcccccccaacagccacagcttcatgagaagaagaagcagcagcctgggcagctacgacgacgagcaggaggacctgacccccgcccagctgaccagaagaatccagagcctgaagaagaagatcagaaagttcgaggacagattcgaggaggagaagaagtacagacccagccacagcgacaaggccgccaaccccgaggtgctgaagtggaccaacgacctggccaagttcagaagacagctgaaggagagcaagctgaagatcagcgaggaggacctgacccccagaatgagacagagaagcaacaccctgcccaagagcttcggcagccagctggagaaggaggacgagaagaagcaggagctggtggacaaggccatcaagcccagcgtggaggccaccctggagagcatccagagaaagctgcaggagaagagagccgagagcagcagacccgaggacatcaaggacatgaccaaggaccagatcgccaacgagaaggtggccctgcagaaggccctgctgtactacgagagcatccacggcagacccgtgaccaagaacgagagacaggtgatgaagcccctgtacgacagatacagactggtgaagcagatcctgagcagagccaacaccatccccatcatcggcagccccagcagcaagagaagaagccccctgctgcagcccatcatcgagggcgagaccgccagcttcttcaaggagatcaaggaggaggaggagggcagcgaggacgacagcaacgtgaagcccgacttcatggtgaccctgaagaccgacttcagcgccagatgcttcctggaccagttcgaggacgacgccgacggcttcatcagccccatggacgacaagatccccagcaagtgcagccaggacaccggcctgagcaacctgcacgccgccagcatccccgagctgctggagcacctgcaggagatgagagaggagaagaagagaatcagaaagaagctgagagacttcgaggacaacttcttcagacagaacggcagaaacgtgcagaaggaggacagaacccccatggccgaggagtacagcgagtacaagcacatcaaggccaagctgagactgctggaggtgctgatcagcaagagagacaccgacagcaagagcatgtag

SEQ ID NO: 81152 - DNA, 2010 bp, synthetic construct
  misc_feature 1..2010: note = Description of Artificial Sequence: Synthetic coding sequence
  source 1..2010: mol_type = other DNA
atggcctgcgagatcatgcccctgcagagcagccaggaggacgagagacccctgagccccttctacctgagcgcccacgtgccccaggtgagcaacgtgagcgccaccggcgagctgctggagagaaccatcagaagcgccgtggagcagcacctgttcgacgtgaacaacagcggcggccagagcagcgaggacagcgagagcggcaccctgagcgccagcagcgccaccagcgccagacagagaagaagacagagcaaggagcaggacgaggtgagacacggcagagacaagggcctgatcaacaaggagaacacccccagcggcttcaaccacctggacgactgcatcctgaacacccaggaggtggagaaggtgcacaagaacaccttcggctgcgccggcgagagaagcaagcccaagagacagaagagcagcaccaagctgagcgagctgcacgacaaccaggacggcctggtgaacatggagagcctgaacagcaccagaagccacgagagaaccggccccgacgacttcgagtggatgagcgacgagagaaagggcaacgagaaggacggcggccacacccagcacttcgagagccccaccatgaagatccaggagcaccccagcctgagcgacaccaagcagcagagaaaccaggacgccggcgaccaggaggagagcttcgtgagcgaggtgccccagagcgacctgaccgccctgtgcgacgagaagaactgggaggagcccatccccgccttcagcagctggcagagagagaacagcgacagcgacgaggcccacctgagcccccaggccggcagactgatcagacagctgctggacgaggacagcgaccccatgctgagccccagattctacgcctacggccagagcagacagtacctggacgacaccgaggtgccccccagcccccccaacagccacagcttcatgagaagaagaagcagcagcctgggcagctacgacgacgagcaggaggacctgacccccgcccagctgaccagaagaatccagagcctgaagaagaagatcagaaagttcgaggacagattcgaggaggagaagaagtacagacccagccacagcgacaaggccgccaaccccgaggtgctgaagtggaccaacgacctggccaagttcagaagacagctgaaggagagcaagctgaagatcagcgaggaggacctgacccccagaatgagacagagaagcaacaccctgcccaagagcttcggcagccagctggagaaggaggacgagaagaagcaggagctggtggacaaggccatcaagcccagcgtggaggccaccctggagagcatccagagaaagctgcaggagaagagagccgagagcagcagacccgaggacatcaaggacatgaccaaggaccagatcgccaacgagaaggtggccctgcagaaggccctgctgtactacgagagcatccacggcagacccgtgaccaagaacgagagacaggtgatgaagcccctgtacgacagatacagactggtgaagcagatcctgagcagagccaacaccatccccatcatcgaggaggaggagggcagcgaggacgacagcaacgtgaagcccgacttcatggtgaccctgaagaccgacttcagcgccagatgcttcctggaccagttcgaggacgacgccgacggcttcatcagccccatggacgacaagatccccagcaagtgcagccaggacaccggcctgagcaacctgcacgccgccagcatccccgagctgctggagcacctgcaggagatgagagaggagaagaagagaatcagaaagaagctgagagacttcgaggacaacttcttcagacagaacggcagaaacgtgcagaaggaggacagaacccccatggccgaggagtacagcgagtacaagcacatcaaggccaagctgagactgctggaggtgctgatcagcaagagagacaccgacagcaagagcatgtag

SEQ ID NO: 81153 - DNA, 2094 bp, synthetic construct
  misc_feature 1..2094: note = Description of Artificial Sequence: Synthetic coding sequence
  source 1..2094: mol_type = other DNA
atggcctgcgagatcatgcccctgcagagcagccaggaggacgagagacccctgagccccttctacctgagcgcccacgtgccccaggtgagcaacgtgagcgccaccggcgagctgctggagagaaccatcagaagcgccgtggagcagcacctgttcgacgtgaacaacagcggcggccagagcagcgaggacagcgagagcggcaccctgagcgccagcagcgccaccagcgccagacagagaagaagacagagcaaggagcaggacgaggtgagacacggcagagacaagggcctgatcaacaaggagaacacccccagcggcttcaaccacctggacgactgcatcctgaacacccaggaggtggagaaggtgcacaagaacaccttcggctgcgccggcgagagaagcaagcccaagagacagaagagcagcaccaagctgagcgagctgcacgacaaccaggacggcctggtgaacatggagagcctgaacagcaccagaagccacgagagaaccggccccgacgacttcgagtggatgagcgacgagagaaagggcaacgagaaggacggcggccacacccagcacttcgagagccccaccatgaagatccaggagcaccccagcctgagcgacaccaagcagcagagaaaccaggacgccggcgaccaggaggagagcttcgtgagcgaggtgccccagagcgacctgaccgccctgtgcgacgagaagaactgggaggagcccatccccgccttcagcagctggcagagagagaacagcgacagcgacgaggcccacctgagcccccaggccggcagactgatcagacagctgctggacgaggacagcgaccccatgctgagccccagattctacgcctacggccagagcagacagtacctggacgacaccgaggtgccccccagcccccccaacagccacagcttcatgagaagaagaagcagcagcctgggcagctacgacgacgagcaggaggacctgacccccgcccagctgaccagaagaatccagagcctgaagaagaagatcagaaagttcgaggacagattcgaggaggagaagaagtacagacccagccacagcgacaaggccgccaaccccgaggtgctgaagtggaccaacgacctggccaagttcagaagacagctgaaggagagcaagctgaagatcagcgaggaggacctgacccccagaatgagacagagaagcaacaccctgcccaagagcttcggcagccagctggagaaggaggacgagaagaagcaggagctggtggacaaggccatcaagcccagcgtggaggccaccctggagagcatccagagaaagctgcaggagaagagagccgagagcagcagacccgaggacatcaaggacatgaccaaggaccagatcgccaacgagaaggtggccctgcagaaggccctgctgtactacgagagcatccacggcagacccgtgaccaagaacgagagacaggtgatgaagcccctgtacgacagatacagactggtgaagcagatcctgagcagagccaacaccatccccatcatcggcagccccagcagcaagagaagaagccccctgctgcagcccatcatcgagggcgagaccgccagcttcttcaaggagatcaaggaggaggaggagggcagcgaggacgacagcaacgtgaagcccgacttcatggtgaccctgaagaccgacttcagcgccagatgcttcctggaccagttcgaggacgacgccgacggcttcatcagccccatggacgacaagatccccagcaagtgcagccaggacaccggcctgagcaacctgcacgccgccagcatccccgagctgctggagcacctgcaggagatgagagaggagaagaagagaatcagaaagaagctgagagacttcgaggacaacttcttcagacagaacggcagaaacgtgcagaaggaggacagaacccccatggccgaggagtacagcgagtacaagcacatcaaggccaagctgagactgctggaggtgctgatcagcaagagagacaccgacagcaagagcatgtag

SEQ ID NO: 81154 - DNA, 609 bp, synthetic construct
  misc_feature 1..609: note = Description of Artificial Sequence: Synthetic coding sequence
  source 1..609: mol_type = other DNA
atgggcgccggcgccctggccatctgccagagcaaggccgccgtgagactgaaggaggacatgaagaagatcgtggccgtgcccctgaacgagcagaaggacttcacctaccagaagctgttcggcgtgagcctgcaggagctggagagacagggcctgaccgagaacggcatccccgccgtggtgtggaacatcgtggagtacctgacccagcacggcctgacccaggagggcctgttcagagtgaacggcaacgtgaaggtggtggagcagctgagactgaagttcgagagcggcgtgcccgtggagctgggcaaggacggcgacgtgtgcagcgccgccagcctgctgaagctgttcctgagagagctgcccgacagcctgatcaccagcgccctgcagcccagattcatccagctgttccaggacggcagaaacgacgtgcaggagagcagcctgagagacctgatcaaggagctgcccgacacccactactgcctgctgaagtacctgtgccagttcctgaccaaggtggccaagcaccacgtgcagaacagaatgaacgtgcacaacctggccaccgtgttcggccccaactgcttccagtag

SEQ ID NO: 81155 - DNA, 1494 bp, synthetic construct
  misc_feature 1..1494: note = Description of Artificial Sequence: Synthetic coding sequence
  source 1..1494: mol_type = other DNA
atggccagccccgccccccccgagcacgccgaggagggctgccccgcccccgccgccgaggagcaggccccccccagccccccccccccccaggccagccccgccgagagacagcagcaggaggaggaggcccaggaggccggcgccgccgagggcgccggcctgcaggtggaggaggccgccggcagagccgccgccgccgtgacctggctgctgggcgagcccgtgctgtggctgggctgcagagccgacgagctgctgagctggaagagacccctgagaagcctgctgggcttcgtggccgccaacctgctgttctggttcctggccctgaccccctggagagtgtaccacctgatcagcgtgatgatcctgggcagagtgatcatgcagatcatcaaggacatggtgctgagcagaaccagaggcgcccagctgtggagaagcctgagcgagagctgggaggtgatcaacagcaagcccgacgagagacccagactgagccactgcatcgccgagagctggatgaacttcagcatcttcctgcaggagatgagcctgttcaagcagcagagccccggcaagttctgcctgctggtgtgcagcgtgtgcaccttcttcaccatcctgggcagctacatccccggcgtgatcctgagctacctgctgctgctgtgcgccttcctgtgccccctgttcaagtgcaacgacatcggccagaagatctacagcaagatcaagagcgtgctgctgaagctggacttcggcatcggcgagtacatcaaccagaagaagagagagagaagcgaggccgacaaggagaagagccacaaggacgacagcgagctggacttcagcgccctgtgccccaagatcagcctgaccgtggccgccaaggagctgagcgtgagcgacaccgacgtgagcgaggtgagctggaccgacaacggcaccttcaacctgagcgagggctacaccccccagaccgacaccagcgacgacctggacagacccagcgaggaggtgttcagcagagacctgagcgacttccccagcctggagaacggcatgggcaccaacgacgaggacgagctgagcctgggcctgcccaccgagctgaagagaaagaaggagcagctggacagcggccacagacccagcaaggagacccagagcgccgccggcctgaccctgcccctgaacagcgaccagaccttccacctgatgagcaacctggccggcgacgtgatcaccgccgccgtgaccgccgccatcaaggaccagctggagggcgtgcagcaggccctgagccaggccgcccccatccccgaggaggacaccgacaccgaggagggcgacgacttcgagctgctggaccagagcgagctggaccagatcgagagcgagctgggcctgacccaggaccaggaggccgaggcccagcagaacaagaagagcagcggcttcctgagcaacctgctgggcggccactag

SEQ ID NO: 81156 - DNA, 1071 bp, synthetic construct
  misc_feature 1..1071: note = Description of Artificial Sequence: Synthetic coding sequence
  source 1..1071: mol_type = other DNA
atgcccgagggcgaggacttcggccccggcaagagctgggaggtgatcaacagcaagcccgacgagagacccagactgagccactgcatcgccgagagctggatgaacttcagcatcttcctgcaggagatgagcctgttcaagcagcagagccccggcaagttctgcctgctggtgtgcagcgtgtgcaccttcttcaccatcctgggcagctacatccccggcgtgatcctgagctacctgctgctgctgtgcgccttcctgtgccccctgttcaagtgcaacgacatcggccagaagatctacagcaagatcaagagcgtgctgctgaagctggacttcggcatcggcgagtacatcaaccagaagaagagagagagaagcgaggccgacaaggagaagagccacaaggacgacagcgagctggacttcagcgccctgtgccccaagatcagcctgaccgtggccgccaaggagctgagcgtgagcgacaccgacgtgagcgaggtgagctggaccgacaacggcaccttcaacctgagcgagggctacaccccccagaccgacaccagcgacgacctggacagacccagcgaggaggtgttcagcagagacctgagcgacttccccagcctggagaacggcatgggcaccaacgacgaggacgagctgagcctgggcctgcccaccgagctgaagagaaagaaggagcagctggacagcggccacagacccagcaaggagacccagagcgccgccggcctgaccctgcccctgaacagcgaccagaccttccacctgatgagcaacctggccggcgacgtgatcaccgccgccgtgaccgccgccatcaaggaccagctggagggcgtgcagcaggccctgagccaggccgcccccatccccgaggaggacaccgacaccgaggagggcgacgacttcgagctgctggaccagagcgagctggaccagatcgagagcgagctgggcctgacccaggaccaggaggccgaggcccagcagaacaagaagagcagcggcttcctgagcaacctgctgggcggccactag

SEQ ID NO: 81157 - DNA, 2151 bp, synthetic construct
  misc_feature 1..2151: note = Description of Artificial Sequence: Synthetic coding sequence
  source 1..2151: mol_type = other DNA
atggccaccagccacagagtggccaagctggtggccagcagcctgcagacccccgtgaaccccatcaccggcgccagagtggcccagtacgagagagaggaccccctgaaggccctggccgccgccgaggccatcctggaggacgaggaggaggagaaggtggcccagcccgccggcgccagcgccgacctgaacaccagcttcagcggcgtggacgagcacgcccccatcagctacgaggacttcgtgaacttccccgacatccaccacagcaacgaggagtacttcaagaaggtggaggagctgaaggccgcccacatcgagaccatggccaagctggagaagatgtaccaggacaagctgcacctgaaggaggtgcagcccgtggtgatcagagaggacagcctgagcgacagcagcagaagcgtgagcgagaagaacagctaccaccccgtgagcctgatgaccagcttcagcgagcccgacctgggccagagcagcagcctgtacgtgagcagcagcgaggaggagctgcccaacctggagaaggagtaccccagaaagaacagaatgatgacctacgccaaggagctgatcaacaacatgtggaccgacttctgcgtggaggactacatcagatgcaaggacaccggcttccacgccgccgagaagagaagaaagaagagaaaggagtgggtgcccaccatcaccgtgcccgagcccttccagatgatgatcagagagcagaagaagaaggaggagagcatgaagagcaagagcgacatcgagatggtgcacaaggccctgaagaagcaggaggaggaccccgagtacaagaagaagttcagagccaaccccgtgcccgccagcgtgttcctgcccctgtaccacgacctggtgaagcagaaggaggagagaagaagaagcctgaaggagaagagcaaggaggccctgctggccagccagaagcccttcaagttcatcgccagagaggagcagaagagagccgccagagagaagcagctgagagacttcctgaagtacaagaagaagaccaacagattcaaggccagacccatccccagaagcacctacggcagcaccaccaacgacaagctgaaggaggaggagctgtacagaaacctgagaacccagctgagagcccaggagcacctgcagaacagcagccccctgccctgcagaagcgcctgcggctgcagaaaccccagatgccccgagcaggccgtgaagctgaagtgcaagcacaaggtgagatgccccacccccgacttcgaggacctgcccgagagataccagaagcacctgagcgagcacaagagccccaagctgctgaccgtgtgcaagcccttcgacctgcacgccagcccccacgccagcatcaagagagagaagatcctggccgacatcgaggccgacgaggagaacctgaaggagaccagatggccctacctgagccccagaagaaagagccccgtgagatgcgccggcgtgaaccccgtgccctgcaactgcaacccccccgtgcccaccgtgagcagcagaggcagagagcaggccgtgagaagaagcctggaggagaagaagatgctggaggaggagagaaacagaatcctgaccaagcagaagcagagaatgaaggagctgcagaagctgctgaccaccagagccaaggcctacgacagccaccagagcctggcccagatcagcaagagcagagtgaagtgcctgagaaagagcgagaaggagagaatgagagagtaccagagagagctggaggagagagaggagaagctgaagaagagacccctgctgttcgagagagtggcccagaagaacgccagaatggccgccgagaagcactacagcaacaccctgaaggccctgggcatcagcgacgagttcgtgagcaagaagggccagagcggcaaggtgctggagtacttcaacaaccaggagaccaagagcgtgaccgaggacaaggagagcttcaacgaggaggagaagatcgaggagagagagaacggcgaggagaactacttcatcgacaccaacagccaggacagctacaaggagaaggacgaggccaacgaggagagcgaggaggagaagagcgtggaggagagccactag

SEQ ID NO: 81158 - DNA, 1983 bp, synthetic construct
  misc_feature 1..1983: note = Description of Artificial Sequence: Synthetic coding sequence
  source 1..1983: mol_type = other DNA
atggccaccagccacagagtggccaagctggtggccagcagcctgcagacccccgtgaaccccatcaccggcgccagagtggcccagtacgagagagaggaccccctgaaggccctggccgccgccgaggccatcctggaggacgaggaggaggagaaggtggcccagcccgccggcgccagcgccgacctgaacaccagcttcagcggcgtggacgagcacgcccccatcagctacgaggacttcgtgaacttccccgacatccaccacagcaacgaggagtacttcaagaaggtggaggagctgaaggccgcccacatcgagaccatggccaagctggagaagatgtaccaggacaagctgcacctgaaggaggtgcagcccgtggtgatcagagaggacagcctgagcgacagcagcagaagcgtgagcgagaagaacagctaccaccccgtgagcctgatgaccagcttcagcgagcccgacctgggccagagcagcagcctgtacgtgagcagcagcgaggaggagctgcccaacctggagaaggagtaccccagaaagaacagaatgatgacctacgccaaggagctgatcaacaacatgtggaccgacttctgcgtggaggactacatcagatgcaaggacaccggcttccacgccgccgagaagagaagaaagaagagaaaggagtgggtgcccaccatcaccgtgcccgagcccttccagatgatgatcagagagcagaagaagaaggaggagagcatgaagagcaagagcgacatcgagatggtgcacaaggccctgaagaagcaggaggaggaccccgagtacaagaagaagttcagagccaaccccgtgcccgccagcgtgttcctgcccctgtaccacgacctggtgaagcagaaggaggagagaagaagaagcctgaaggagaagagcaaggaggccctgctggccagccagaagcccttcaagttcatcgccagagaggagcagaagagagccgccagagagaagcagctgagagacttcctgaagtacaagaagaagaccaacagattcaaggccagacccatccccagaagcacctacggcagcaccaccaacgacaagctgaaggaggaggagctgtacagaaacctgagaacccagctgagagcccaggagcacctgcagaacagcagccccctgccctgcagaagcgcctgcggctgcagaaaccccagatgccccgagcaggccgtgaagctgaagtgcaagcacaaggtgagatgccccacccccgacttcgaggacctgcccgagagataccagaagcacctgagcgagcacaagagccccaagctgctgaccgtgtgcaagcccttcgacctgcacgccagcccccacgccagcatcaagagagagaagatcctggccgacatcgaggccgacgaggagaacctgaaggagaccagatggccctacctgagccccagaagaaagagccccgtgagatgcgccggcgtgaaccccgtgccctgcaactgcaacccccccgtgcccaccgtgagcagcagaggcagagagcaggccgtgagaaagagcgagaaggagagaatgagagagtaccagagagagctggaggagagagaggagaagctgaagaagagacccctgctgttcgagagagtggcccagaagaacgccagaatggccgccgagaagcactacagcaacaccctgaaggccctgggcatcagcgacgagttcgtgagcaagaagggccagagcggcaaggtgctggagtacttcaacaaccaggagaccaagagcgtgaccgaggacaaggagagcttcaacgaggaggagaagatcgaggagagagagaacggcgaggagaactacttcatcgacaccaacagccaggacagctacaaggagaaggacgaggccaacgaggagagcgaggaggagaagagcgtggaggagagccactag

SEQ ID NO: 81159 - DNA, 645 bp, synthetic construct
  misc_feature 1..645: note = Description of Artificial Sequence: Synthetic coding sequence
  source 1..645: mol_type = other DNA
atgagcgtgccccagatccacgtggaggaggtgggcgccgaggagggcgccggcgccgccgccccccccgacgaccacctgagaagcctgaaggccctgaccgagaagctgagactggagaccagaagacccagctacctggagtggcaggccagactggaggagcacacctggcccttccccagacccgccgccgagccccaggccagcctggaggagggcgagagaggcggccaggagcccctgctgcccctgagagaggccggccagcacccccccagcgccagaagcgccagccagggcgccagacccctgagcaccggcaagctggagggcttccagagcatcgacgaggccatcgcctggctgagaaaggagctgaccgagatgagactgcaggaccagcagctggccagacagctgatgagactgagaggcgacatcaacaagctgaagatcgagcacacctgcagactgcacagaagaatgctgaacgacgccacctacgagctggaggagagagacgagctggccgacctgttctgcgacagccccctggccagcagcttcagcctgagcacccccctgaagctgatcggcgtgaccaagatgaacatcaacagcagaagattcagcctgtgctag

SEQ ID NO: 81160 - DNA, 1248 bp, synthetic construct
  misc_feature 1..1248: note = Description of Artificial Sequence: Synthetic coding sequence
  source 1..1248: mol_type = other DNA
atggccgccagcatcagcggctacaccttcagcgccgtgtgcttccacagcgccaacagcaacgccgaccacgagggcttcctgctgggcgaggtgagacaggaggagaccttcagcatcagcgacagccagatcagcaacaccgagttcctgcaggtgatcgagatccacaaccaccagccctgcagcaagctgttcagcttctacgactacgccagcaaggtgaacgaggagagcctggacagaatcctgaaggacagaagaaagaaggtgatcggctggtacagattcagaagaaacacccagcagcagatgagctacagagagcaggtgctgcacaagcagctgaccagaatcctgggcgtgcccgacctggtgttcctgctgttcagcttcatcagcaccgccaacaacagcacccacgccctggagtacgtgctgttcagacccaacagaagatacaaccagagaatcagcctggccatccccaacctgggcaacaccagccagcaggagtacaaggtgagcagcgtgcccaacaccagccagagctacgccaaggtgatcaaggagcacggcaccgacttcttcgacaaggacggcgtgatgaaggacatcagagccatctaccaggtgtacaacgccctgcaggagaaggtgcaggccgtgtgcgccgacgtggagaagagcgagagagtggtggagagctgccaggccgaggtgaacaagctgagaagacagatcacccagagaaagaacgagaaggagcaggagagaagactgcagcaggccgtgctgagcagacagatgcccagcgagagcctggaccccgccttcagccccagaatgcccagcagcggcttcgccgccgagggcagaagcaccctgggcgacgccgaggccagcgaccccccccccccctacagcgacttccaccccaacaaccaggagagcaccctgagccacagcagaatggagagaagcgtgttcatgcccagaccccaggccgtgggcagcagcaactacgccagcaccagcgccggcctgaagtaccccggcagcggcgccgacctgccccccccccagagagccgccggcgacagcggcgaggacagcgacgacagcgactacgagaacctgatcgaccccaccgagcccagcaacagcgagtacagccacagcaaggacagcagacccatggcccaccccgacgaggaccccagaaacacccagaccagccagatctag

SEQ ID NO: 81161 - DNA, 3522 bp, synthetic construct
  misc_feature 1..3522: note = Description of Artificial Sequence: Synthetic coding sequence
  source 1..3522: mol_type = other DNA
atgaccagaagatgcatgcccgccagacccggcttccccagcagccccgcccccggcagcagcccccccagatgccacctgagacccggcagcaccgcccacgccgccgccggcaagagaaccgagagccccggcgacagaaagcagagcatcatcgacttcttcaagcccgccagcaagcaggacagacacatgctggacagcccccagaagagcaacatcaagtacggcggcagcagactgagcatcaccggcaccgagcagttcgagagaaagctgagcagccccaaggagagcaagcccaagagagtgccccccgagaagagccccatcatcgaggccttcatgaagggcgtgaaggagcaccacgaggaccacggcatccacgagagcagaagaccctgcctgagcctggccagcaagtacctggccaagggcaccaacatctacgtgcccagcagctaccacctgcccaaggagatgaagagcctgaagaagaagcacagaagccccgagagaagaaagagcctgttcatccacgagaacaacgagaagaacgacagagacagaggcaagaccaacgccgacagcaagaagcagaccaccgtggccgaggccgacatcttcaacaacagcagcagaagcctgagcagcagaagcagcctgagcagacaccaccccgaggagagccccctgggcgccaagttccagctgagcctggccagctactgcagagagagagagctgaagagactgagaaaggagcagatggagcagagaatcaacagcgagaacagcttcagcgaggccagcagcctgagcctgaagagcagcatcgagagaaagtacaagcccagacaggagcagagaaagcagaacgacatcatccccggcaagaacaacctgagcaacgtggagaacggccacctgagcagaaagagaagcagcagcgacagctgggagcccaccagcgccggcagcaagcagaacaagttccccgagaagagaaagagaaacagcgtggacagcgacctgaagagcaccagagagagcatgatccccaaggccagagagagcttcctggagaagagacccgacggcccccaccagaaggagaagttcatcaagcacatcgccctgaagacccccggcgacgtgctgagactggaggacatcagcaaggagcccagcgacgagaccgacggcagcagcgccggcctggcccccagcaacagcggcaacagcggccaccacagcaccagaaacagcgaccagatccaggtggccggcaccaaggagaccaagatgcagaagccccacctgcccctgagccaggagaagagcgccatcaagaaggccagcaacctgcagaagaacaagaccgccagcagcaccaccaaggagaaggagaccaagctgcccctgctgagcagagtgcccagcgccggcagcagcctggtgcccctgaacgccaagaactgcgccctgcccgtgagcaagaaggacaaggagagaagcagcagcaaggagtgcagcggccacagcaccgagagcaccaagcacaaggagcacaaggccaagaccaacaaggccgacagcaacgtgagcagcggcaagatcagcggcggccccctgagaagcgagtacggcacccccaccaagagcccccccgccgccctggaggtggtgccctgcatccccagccccgccgcccccagcgacaaggcccccagcgagggcgagagcagcggcaacagcaacgccggcagcagcgccctgaagagaaagctgagaggcgacttcgacagcgacgaggagagcctgggctacaacctggacagcgacgaggaggaggagaccctgaagagcctggaggagatcatggccctgaacttcaaccagacccccgccgccaccggcaagccccccgccctgagcaagggcctgagaagccagagcagcgactacaccggccacgtgcaccccggcacctacaccaacaccctggagagactggtgaaggagatggaggacacccagagactggacgagctgcagaagcagctgcaggaggacatcagacagggcagaggcatcaagagccccatcagaatcggcgaggaggacagcaccgacgacgaggacggcctgctggaggagcacaaggagttcctgaagaagttcagcgtgaccatcgacgccatccccgaccaccaccccggcgaggagatcttcaacttcctgaacagcggcaagatcttcaaccagtacaccctggacctgagagacagcggcttcatcggccagagcgccgtggagaagctgatcctgaagagcggcaagaccgaccagatcttcctgaccacccagggcttcctgaccagcgcctaccactacgtgcagtgccccgtgcccgtgctgaagtggctgttcagaatgatgagcgtgcacaccgactgcatcgtgagcgtgcagatcctgagcaccctgatggagatcaccatcagaaacgacaccttcagcgacagccccgtgtggccctggatccccagcctgagcgacgtggccgccgtgttcttcaacatgggcatcgacttcagaagcctgttccccctggagaacctgcagcccgacttcaacgaggactacctggtgagcgagacccagaccaccagcagaggcaaggagagcgaggacagcagctacaagcccatcttcagcaccctgcccgagaccaacatcctgaacgtggtgaagttcctgggcctgtgcaccagcatccaccccgagggctaccaggacagagagatcatgctgctgatcctgatgctgttcaagatgagcctggagaagcagctgaagcagatccccctggtggacttccagagcctgctgatcaacctgatgaagaacatcagagactggaacaccaaggtgcccgagctgtgcctgggcatcaacgagctgagcagccacccccacaacctgctgtggctggtgcagctggtgcccaactggaccagcagaggcagacagctgagacagtgcctgagcctggtgatcatcagcaagctgctggacgagaagcacgaggacgtgcccaacgccagcaacctgcaggtgagcgtgctgcacagatacctggtgcagatgaagcccagcgacctgctgaagaagatggtgctgaagaagaaggccgagcagcccgacggcatcatcgacgacagcctgcacctggagctggagaagcaggcctactacctgacctacatcctgctgcacctggtgggcgaggtgagctgcagccacagcttcagcagcggccagagaaagcacttcgtgctgctgtgcggcgccctggagaagcacgtgaagtgcgacatcagagaggacgccagactgttctacagaaccaaggtgaaggacctggtggccagaatccacggcaagtggcaggagatcatccagaactgcagacccacccagggccagctgcacgacttctgggtgcccgacagctag

SEQ ID NO: 81162 - DNA, 3561 bp, synthetic construct
  misc_feature 1..3561: note = Description of Artificial Sequence: Synthetic coding sequence
  source 1..3561: mol_type = other DNA
atgaccagaagatgcatgcccgccagacccggcttccccagcagccccgcccccggcagcagcccccccagatgccacctgagacccggcagcaccgcccacgccgccgccggcaagagaaccgagagccccggcgacagaaagcagagcatcatcgacttcttcaagcccgccagcaagcaggacagacacatgctggacagcccccagaagagcaacatcaagtacggcggcagcagactgagcatcaccggcaccgagcagttcgagagaaagctgagcagccccaaggagagcaagcccaagagagtgccccccgagaagagccccatcatcgaggccttcatgaagggcgtgaaggagcaccacgaggaccacggcatccacgagagcagaagaccctgcctgagcctggccagcaagtacctggccaagggcaccaacatctacgtgcccagcagctaccacctgcccaaggagatgaagagcctgaagaagaagcacagaagccccgagagaagaaagagcctgttcatccacgagaacaacgagaagaacgacagagacagaggcaagaccaacgccgacagcaagaagcagaccaccgtggccgaggccgacatcttcaacaacagcagcagaagcctgagcagcagaagcagcctgagcagacaccaccccgaggagagccccctgggcgccaagttccagctgagcctggccagctactgcagagagagagagctgaagagactgagaaaggagcagatggagcagagaatcaacagcgagaacagcttcagcgaggccagcagcctgagcctgaagagcagcatcgagagaaagtacaagcccagacaggagcagagaaagcagaacgacatcatccccggcaagaacaacctgagcaacgtggagaacggccacctgagcagaaagagaagcagcagcgacagctgggagcccaccagcgccggcagcaagcagaacaagttccccgagaagagaaagagaaacagcgtggacagcgacctgaagagcaccagagagagcatgatccccaaggccagagagagcttcctggagaagagacccgacggcccccaccagaaggagaagttcatcaagcacatcgccctgaagacccccggcgacgtgctgagactggaggacatcagcaaggagcccagcgacgagaccgacggcagcagcgccggcctggcccccagcaacagcggcaacagcggccaccacagcaccagaaacagcgaccagatccaggtggccggcaccaaggagaccaagatgcagaagccccacctgcccctgagccaggagaagagcgccatcaagaaggccagcaacctgcagaagaacaagaccgccagcagcaccaccaaggagaaggagaccaagctgcccctgctgagcagagtgcccagcgccggcagcagcctggtgcccctgaacgccaagaactgcgccctgcccgtgagcaagaaggacaaggagagaagcagcagcaaggagtgcagcggccacagcaccgagagcaccaagcacaaggagcacaaggccaagaccaacaaggccgacagcaacgtgagcagcggcaagatcagcggcggccccctgagaagcgagtacggcacccccaccaagagcccccccgccgccctggaggtggtgccctgcatccccagccccgccgcccccagcgacaaggcccccagcgagggcgagagcagcggcaacagcaacgccggcagcagcgccctgaagagaaagctgagaggcgacttcgacagcgacgaggagagcctgggctacaacctggacagcgacgaggaggaggagaccctgaagagcctggaggagatcatggccctgaacttcaaccagacccccgccgccaccggcaagccccccgccctgagcaagggcctgagaagccagagcagcgactacaccggccacgtgcaccccggcacctacaccaacaccctggagagactggtgaaggagatggaggacacccagagactggacgagctgcagaagcagctgcaggaggacatcagacagggcagaggcatcaagagccccatcagaatcggcgaggaggacagcaccgacgacgaggacggcctgctggaggagcacaaggagttcctgaagaagttcagcgtgaccatcgacgccatccccgaccaccaccccggcgaggagatcttcaacttcctgaacagcggcaagatcttcaaccagtacaccctggacctgagagacagcggcttcatcggccagagcgccgtggagaagctgatcctgaagagcggcaagaccgaccagatcttcctgaccacccagggcttcctgaccagcgcctaccactacgtgcagtgccccgtgcccgtgctgaagtggctgttcagaatgatgagcgtgcacaccgactgcatcgtgagcgtgcagatcctgagcaccctgatggagatcaccatcagaaacgacaccttcagcgacagccccgtgtggccctggatccccagcctgagcgacgtggccgccgtgttcttcaacatgggcatcgacttcagaagcctgttccccctggagaacctgcagcccgacttcaacgaggactacctggtgagcgagacccagaccaccagcagaggcaaggagagcgaggacagcagctacaagcccatcttcagcaccctgcccgagaccaacatcctgaacgtggtgaagttcctgggcctgtgcaccagcatccaccccgagggctaccaggacagagagatcatgctgctgatcctgatgctgttcaagatgagcctggagaagcagctgaagcagatccccctggtggacttccagagcctgctgatcaacctgatgaagaacatcagagactggaacaccaaggtgcccgagctgtgcctgggcatcaacgagctgagcagccacccccacaacctgctgtggctggtgcagctggtgcccaactggaccagcagaggcagacagctgagacagtgcctgagcctggtgatcatcagcaagctgctggacgagaagcacgaggacgtgcccaacgccagcaacctgcaggtgagcgtgctgcacagatacctggtgcagatgaagcccagcgacctgctgaagaagatggtgctgaagaagaaggccgagcagcccgacggcatcatcgacgacagcctgcacctggagctggagaagcaggcctactacctgacctacatcctgctgcacctggtgggcgaggtgagctgcagccacagcttcagcagcggccagagaaagcacttcgtgctgctgtgcggcgccctggagaagcacgtgaagtgcgacatcagagaggacgccagactgttctacagaaccaaggtgaaggacctggtggccagaatccacggcaagtggcaggagatcatccagaactgcagacccacccaggtgagcttctgctacaccatcagctgcatcctgaacagcttcgccgagtggcacagcagctactgcctgaagtag

SEQ ID NO: 81163 - DNA, 2277 bp, synthetic construct
  misc_feature 1..2277: note = Description of Artificial Sequence: Synthetic coding sequence
  source 1..2277: mol_type = other DNA
atgaccagaagatgcatgcccgccagacccggcttccccagcagccccgcccccggcagcagcccccccagatgccacctgagacccggcagcaccgcccacgccgccgccggcaagagaaccgagagccccggcgacagaaagcagagcatcatcgacttcttcaagcccgccagcaagcaggacagacacatgctggacagcccccagaagagcaacatcaagtacggcggcagcagactgagcatcaccggcaccgagcagttcgagagaaagctgagcagccccaaggagagcaagcccaagagagtgccccccgagaagagccccatcatcgaggccttcatgaagggcgtgaaggagcaccacgaggaccacggcatccacgagagcagaagaccctgcctgagcctggccagcaagtacctggccaagggcaccaacatctacgtgcccagcagctaccacctgcccaaggagatgaagagcctgaagaagaagcacagaagccccgagagaagaaagagcctgttcatccacgagaacaacgagaagaacgacagagacagaggcaagaccaacgccgacagcaagaagcagaccaccgtggccgaggccgacatcttcaacaacagcagcagaagcctgagcagcagaagcagcctgagcagacaccaccccgaggagagccccctgggcgccaagttccagctgagcctggccagctactgcagagagagagagctgaagagactgagaaaggagcagatggagcagagaatcaacagcgagaacagcttcagcgaggccagcagcctgagcctgaagagcagcatcgagagaaagtacaagcccagacaggagcagagaaagcagaacgacatcatccccggcaagaacaacctgagcaacgtggagaacggccacctgagcagaaagagaagcagcagcgacagctgggagcccaccagcgccggcagcaagcagaacaagttccccgagaagagaaagagaaacagcgtggacagcgacctgaagagcaccagagagagcatgatccccaaggccagagagagcttcctggagaagagacccgacggcccccaccagaaggagaagttcatcaagcacatcgccctgaagacccccggcgacgtgctgagactggaggacatcagcaaggagcccagcgacgagaccgacggcagcagcgccggcctggcccccagcaacagcggcaacagcggccaccacagcaccagaaacagcgaccagatccaggtggccggcaccaaggagaccaagatgcagaagccccacctgcccctgagccaggagaagagcgccatcaagaaggccagcaacctgcagaagaacaagaccgccagcagcaccaccaaggagaaggagaccaagctgcccctgctgagcagagtgcccagcgccggcagcagcctggtgcccctgaacgccaagaactgcgccctgcccgtgagcaagaaggacaaggagagaagcagcagcaaggagtgcagcggccacagcaccgagagcaccaagcacaaggagcacaaggccaagaccaacaaggccgacagcaacgtgagcagcggcaagatcagcggcggccccctgagaagcgagtacggcacccccaccaagagcccccccgccgccctggaggtggtgccctgcatccccagccccgccgcccccagcgacaaggcccccagcgagggcgagagcagcggcaacagcaacgccggcagcagcgccctgaagagaaagctgagaggcgacttcgacagcgacgaggagagcctgggctacaacctggacagcgacgaggaggaggagaccctgaagagcctggaggagatcatggccctgaacttcaaccagacccccgccgccaccggcaagccccccgccctgagcaagggcctgagaagccagagcagcgactacaccggccacgtgcaccccggcacctacaccaacaccctggagagactggtgaaggagatggaggacacccagagattcgtgagcatcaagatcaacctgctgaacctgaccttctgcctgttcgtgtggctgaccttcaacctgcccttcctgaagaaccacgagaagctggcctgcatcctggacagcgtggtgaactgcgtgagaatcagatacgtgggcagaacccagtggctgatgcccgtgatcaccaccctgtgggagacccaggccagactgctggagcccagaagcagcagactgagatag

SEQ ID NO: 81164 - DNA, 675 bp, synthetic construct
  misc_feature 1..675: note = Description of Artificial Sequence: Synthetic coding sequence
  source 1..675: mol_type = other DNA
atgaccagaatcaccgagctgtggagcagcccccagtggaaggtgggcgccgaggtgtgcggcagacagatgagagagcagagaaccgccgagcagagcgagacccagagaacctggctgagcatggccgccaccctgcagttcctggtgtgcctggtggtggccatctgcctgctgagcggcgtgaccaccacccagccccacgccggccagcccatggacagcaccagcgtgggcggcggcctgcaggagcccgaggcccccgaggtgatgttcgagctgctgtgggccggcctggagctggacgtgatgggccagctgcacatccaggacgaggagctggccagcacccaccccggcagaagactgagactgctgctgcagcaccacgtgcccagcgacctggagggcaccgagcagtggctgcagcagctgcaggacctgagaaagggcccccccctgagcacctgggacttcgagcacctgctgctgaccggcctgagctgcgtgtacagactgcacgccgccagcgaggccgaggagagaggcagatgggcccaggtgttcgccctgctggcccaggagaccctgtgggacctgtgcaagggcttctgcccccaggacagaccccccagcctgggcagctgggccagcatcctggaccccttcccctag

SEQ ID NO: 81165 - DNA, 606 bp, synthetic construct
  misc_feature 1..606: note = Description of Artificial Sequence: Synthetic coding sequence
  source 1..606: mol_type = other DNA
atgagagagcagagaaccgccgagcagagcgagacccagagaacctggctgagcatggccgccaccctgcagttcctggtgtgcctggtggtggccatctgcctgctgagcggcgtgaccaccacccagccccacgccggccagcccatggacagcaccagcgtgggcggcggcctgcaggagcccgaggcccccgaggtgatgttcgagctgctgtgggccggcctggagctggacgtgatgggccagctgcacatccaggacgaggagctggccagcacccaccccggcagaagactgagactgctgctgcagcaccacgtgcccagcgacctggagggcaccgagcagtggctgcagcagctgcaggacctgagaaagggcccccccctgagcacctgggacttcgagcacctgctgctgaccggcctgagctgcgtgtacagactgcacgccgccagcgaggccgaggagagaggcagatgggcccaggtgttcgccctgctggcccaggagaccctgtgggacctgtgcaagggcttctgcccccaggacagaccccccagcctgggcagctgggccagcatcctggaccccttcccctag

SEQ ID NO: 81166 - DNA, 1626 bp, synthetic construct
  misc_feature 1..1626: note = Description of Artificial Sequence: Synthetic coding sequence
  source 1..1626: mol_type = other DNA
atgcccggcctgagaagagacagactgctgaccctgctgctgctgggcgccctgctgagcgccgacctgtacttccacctgtggccccaggtgcagagacagctgagacccagagagagacccagaggctgcccctgcaccggcagagccagcagcctggccagagacagcgccgccgccgccagcgaccccggcaccatcgtgcacaacttcagcagaaccgagcccagaaccgagcccgccggcggcagccacagcggcagcagcagcaagctgcaggccctgttcgcccaccccctgtacaacgtgcccgaggagccccccctgctgggcgccgaggacagcctgctggccagccaggaggccctgagatactacagaagaaaggtggccagatggaacagaagacacaagatgtacagagagcagatgaacctgaccagcctggacccccccctgcagctgagactggaggccagctgggtgcagttccacctgggcatcaacagacacggcctgtacagcagaagcagccccgtggtgagcaagctgctgcaggacatgagacacttccccaccatcagcgccgactacagccaggacgagaaggccctgctgggcgcctgcgactgcacccagatcgtgaagcccagcggcgtgcacctgaagctggtgctgagattcagcgacttcggcaaggccatgttcaagcccatgagacagcagagagacgaggagacccccgtggacttcttctacttcatcgacttccagagacacaacgccgagatcgccgccttccacctggacagaatcctggacttcagaagagtgccccccaccgtgggcagaatcgtgaacgtgaccaaggagatcctggaggtgaccaagaacgagatcctgcagagcgtgttcttcgtgagccccgccagcaacgtgtgcttcttcgccaagtgcccctacatgtgcaagaccgagtacgccgtgtgcggcaacccccacctgctggagggcagcctgagcgccttcctgcccagcctgaacctggcccccagactgagcgtgcccaacccctggatcagaagctacaccctggccggcaaggaggagtgggaggtgaaccccctgtactgcgacaccgtgaagcagatctacccctacaacaacagccagagactgctgaacgtgatcgacatggccatcttcgacttcctgatcggcaacatggacagacaccactacgagatgttcaccaagttcggcgacgacggcttcctgatccacctggacaacgccagaggcttcggcagacacagccacgacgagatcagcatcctgagccccctgagccagtgctgcatgatcaagaagaagaccctgctgcacctgcagctgctggcccaggccgactacagactgagcgacgtgatgagagagagcctgctggaggaccagctgagccccgtgctgaccgagccccacctgctggccctggacagaagactgcagaccatcctgagaaccgtggagggctgcatcgtggcccacggccagcagagcgtgatcgtggacggccccgtggagcagctggcccccgacagcggccaggccaacctgaccagctag

SEQ ID NO: 81167 - DNA, 1023 bp, synthetic construct
  misc_feature 1..1023: note = Description of Artificial Sequence: Synthetic coding sequence
  source 1..1023: mol_type = other DNA
atgggccccccccacagcggccccggcggcgtgagagtgggcgccctgctgctgctgggcgtgctgggcctggtgagcggcctgagcctggagcccgtgtactggaacagcgccaacaagagattccaggccgagggcggctacgtgctgtacccccagatcggcgacagactggacctgctgtgccccagagccagaccccccggcccccacagcagccccaactacgagttctacaagctgtacctggtgggcggcgcccagggcagaagatgcgaggccccccccgcccccaacctgctgctgacctgcgacagacccgacctggacctgagattcaccatcaagttccaggagtacagccccaacctgtggggccacgagttcagaagccaccacgactactacatcatcgccaccagcgacggcaccagagagggcctggagagcctgcagggcggcgtgtgcctgaccagaggcatgaaggtgctgctgagagtgggccagagccccagaggcggcgccgtgcccagaaagcccgtgagcgagatgcccatggagagagacagaggcgccgcccacagcctggagcccggcaaggagaacctgcccggcgaccccaccagcaacgccaccagcagaggcgccgagggccccctgcccccccccagcatgcccgccgtggccggcgccgccggcggcctggccctgctgctgctgggcgtggccggcgccggcggcgccatgtgctggagaagaagaagagccaagcccagcgagagcagacaccccggccccggcagcttcggcagaggcggcagcctgggcctgggcggcggcggcggcatgggccccagagaggccgagcccggcgagctgggcatcgccctgagaggcggcggcgccgccgacccccccttctgcccccactacgagaaggtgagcggcgactacggccaccccgtgtacatcgtgcaggacggccccccccagagcccccccaacatctactacaaggtgtag

SEQ ID NO: 81168 - DNA, 438 bp, synthetic construct
  misc_feature 1..438: note = Description of Artificial Sequence: Synthetic coding sequence
  source 1..438: mol_type = other DNA
atgttcaccagccccagcgagggcaagcccggcaacatggacagacaccactacgagatgttcaccaagttcggcgacgacggcttcctgatccacctggacaacgccagaggcttcggcagacacagccacgacgagatcagcatcctgagccccctgagccagtgctgcatgatcaagaagaagaccctgctgcacctgcagctgctggcccaggccgactacagactgagcgacgtgatgagagagagcctgctggaggaccagctgagccccgtgctgaccgagccccacctgctggccctggacagaagactgcagaccatcctgagaaccgtggagggctgcatcgtggcccacggccagcagagcgtgatcgtggacggccccgtggagcagctggcccccgacagcggccaggccaacctgaccagctag

SEQ ID NO: 81169 - DNA, 1230 bp, synthetic construct
  misc_feature 1..1230: note = Description of Artificial Sequence: Synthetic coding sequence
  source 1..1230: mol_type = other DNA
atgaagctgaagcagagagtggtgctgctggccatcctgctggtgatcttcatcttcaccaaggtgttcctgatcgacaacctggacaccagcgccgccaacagagaggaccagagagccttccacagaatgatgaccggcctgagagtggagctggcccccaagctggaccacaccctgcagagcccctgggagatcgccgcccagtgggtggtgcccagagaggtgtaccccgaggagacccccgagctgggcgccgtgatgcacgccatggccaccaagaagatcatcaaggccgacgtgggctacaagggcacccagctgaaggccctgctgatcctggagggcggccagaaggtggtgttcaagcccaagagatacagcagagaccacgtggtggagggcgagccctacgccggctacgacagacacaacgccgaggtggccgccttccacctggacagaatcctgggcttccacagagcccccctggtggtgggcagattcgtgaacctgagaaccgagatcaagcccgtggccaccgagcagctgctgagcaccttcctgaccgtgggcaacaacacctgcttctacggcaagtgctactactgcagagagaccgagcccgcctgcgccgacggcgacatcatggagggcagcgtgaccctgtggctgcccgacgtgtggcccctgcagaagcacagacacccctggggcagaacctacagagagggcaagctggccagatgggagtacgacgagagctactgcgacgccgtgaagaagaccagcccctacgacagcggccccagactgctggacatcatcgacaccgccgtgttcgactacctgatcggcaacgccgacagacaccactacgagagcttccaggacgacgagggcgccagcatgctgatcctgctggacaacgccaagagcttcggcaaccccagcctggacgagagaagcatcctggcccccctgtaccagtgctgcatcatcagagtgagcacctggaacagactgaactacctgaagaacggcgtgctgaagagcgccctgaagagcgccatggcccacgaccccatcagccccgtgctgagcgacccccacctggacgccgtggaccagagactgctgagcgtgctggccaccgtgaagcagtgcaccgaccagttcggcatggacaccgtgctggtggaggacagaatgcccctgagccacctgtag

SEQ ID NO: 81170 - DNA, 417 bp, synthetic construct
  misc_feature 1..417: note = Description of Artificial Sequence: Synthetic coding sequence
  source 1..417: mol_type = other DNA
atgaagctgaagcagagagtggtgctgctggccatcctgctggtgatcttcatcttcaccaaggtgttcctgatcgacaacctggacaccagcgccgccaacagagaggaccagagagccttccacagaatgatgaccggcctgagagtggagctggcccccaagctggaccacaccctgcagagcccctgggagatcgccgcccagtgggtggtgcccagagaggtgtaccccgaggagacccccgagctgggcgccgtgatgcacgccatggccaccaagaagatcatcaaggccgacgtgggctacaagggcacccagctgaaggccctgctgatcctggagggcggccagaaggtggtgttcaagcccaagagatacagcagagaccacgtggtggagggcgagccctactag

SEQ ID NO: 81171 - DNA, 1755 bp, synthetic construct
  misc_feature 1..1755: note = Description of Artificial Sequence: Synthetic coding sequence
  source 1..1755: mol_type = other DNA
atgaagatgatgctggtgagaagattcagagtgctgatcctgatggtgttcctggtggcctgcgccctgcacatcgccctggacctgctgcccagactggagagaagaggcgccagacccagcggcgagcccggctgcagctgcgcccagcccgccgccgaggtggccgcccccggctgggcccaggtgagaggcagacccggcgagccccccgccgccagcagcgccgccggcgacgccggctggcccaacaagcacaccctgagaatcctgcaggacttcagcagcgaccccagcagcaacctgagcagccacagcctggagaagctgccccccgccgccgagcccgccgagagagccctgagaggcagagaccccggcgccctgagaccccacgaccccgcccacagacccctgctgagagaccccggccccagaagaagcgagagcccccccggccccggcggcgacgccagcctgctggccagactgttcgagcaccccctgtacagagtggccgtgccccccctgaccgaggaggacgtgctgttcaacgtgaacagcgacaccagactgagccccaaggccgccgagaaccccgactggccccacgccggcgccgagggcgccgagttcctgagccccggcgaggccgccgtggacagctaccccaactggctgaagttccacatcggcatcaacagatacgagctgtacagcagacacaaccccgccatcgaggccctgctgcacgacctgagcagccagagaatcaccagcgtggccatgaagagcggcggcacccagctgaagctgatcatgaccttccagaactacggccaggccctgttcaagcccatgaagcagaccagagagcaggagaccccccccgacttcttctacttcagcgactacgagagacacaacgccgagatcgccgccttccacctggacagaatcctggacttcagaagagtgccccccgtggccggcagaatggtgaacatgaccaaggagatcagagacgtgaccagagacaagaagctgtggagaaccttcttcatcagccccgccaacaacatctgcttctacggcgagtgcagctactactgcagcaccgagcacgccctgtgcggcaagcccgaccagatcgagggcagcctggccgccttcctgcccgacctgagcctggccaagagaaagacctggagaaacccctggagaagaagctaccacaagagaaagaaggccgagtgggaggtggaccccgactactgcgaggaggtgaagcagacccccccctacgacagcagccacagaatcctggacgtgatggacatgaccatcttcgacttcctgatgggcaacatggacagacaccactacgagaccttcgagaagttcggcaacgagaccttcatcatccacctggacaacggcagaggcttcggcaagtacagccacgacgagctgagcatcctggtgcccctgcagcagtgctgcagaatcagaaagagcacctacctgagactgcagctgctggccaaggaggagtacaagctgagcctgctgatggccgagagcctgagaggcgaccaggtggcccccgtgctgtaccagccccacctggaggccctggacagaagactgagagtggtgctgaaggccgtgagagactgcgtggagagaaacggcctgcacagcgtggtggacgacgacctggacaccgagcacagagccgccagcgccagatag

SEQ ID NO: 81172 - DNA, 3957 bp, synthetic construct
  misc_feature 1..3957: note = Description of Artificial Sequence: Synthetic coding sequence
  source 1..3957: mol_type = other DNA
atgatgaacagaaccacccccgaccaggagctggtgcccgccagcgagcccgtgtgggagagaccctggagcgtggaggagatcagaagaagcagccagagctggagcctggccgccgacgccggcctgctgcagttcctgcaggagttcagccagcagaccatcagcagaacccacgagatcaagaagcaggtggacggcctgatcagagagaccaaggccaccgactgcagactgcacaacgtgttcaacgacttcctgatgctgagcaacacccagttcatcgagaacagagtgtacgacgaggaggtggaggagcccgtgctgaaggccgaggccgagaagaccgagcaggagaagaccagagagcagaaggaggtggacctgatccccaaggtgcaggaggccgtgaactacggcctgcaggtgctggacagcgccttcgagcagctggacatcaaggccggcaacagcgacagcgaggaggacgacgccaacggcagagtggagctgatcctggagcccaaggacctgtacatcgacagacccctgccctacctgatcggcagcaagctgttcatggagcaggaggacgtgggcctgggcgagctgagcagcgaggagggcagcgtgggcagcgacagaggcagcatcgtggacaccgaggaggagaaggaggaggaggagagcgacgaggacttcgcccaccacagcgacaacgagcagaaccagcacaccacccagatgagcgacgaggaggaggacgacgacggctgcgacctgttcgccgacagcgagaaggaggaggaggacatcgaggacatcgaggagaacaccagacccaagagaagcagacccaccagcttcgccgacgagctggccgccagaatcaagggcgacgccatgggcagagtggacgaggagcccaccaccctgcccagcggcgaggccaagcccagaaagaccctgaaggagaagaaggagagaagaacccccagcgacgacgaggaggacaacctgttcgccccccccaagctgaccgacgaggacttcagccccttcggcagcggcggcggcctgttcagcggcggcaagggcctgttcgacgacgaggacgaggagagcgacctgttcaccgaggccagccaggacagacaggccggcgccagcgtgaaggaggagagcagcagcagcaagcccggcaagaagatccccgccggcgccgtgagcgtgttcctgggcgacaccgacgtgttcggcgccgccagcgtgcccagcctgaaggagccccagaagcccgagcagcccacccccagaaagagcccctacggccccccccccaccggcctgttcgacgacgacgacggcgacgacgacgacgacttcttcagcgccccccacagcaagcccagcaagaccagaaaggtgcagagcaccgccgacatcttcggcgacgaggagggcgacctgttcaaggagaaggccgtggccagccccgaggccaccgtgagccagaccgacgagaacaaggccagagccgagaagaaggtgaccctgagctacagcaagaacctgaagcccagcagcgagaccaagacccagaagggcctgttcagcgacgaggaggacagcgaggacctgttcagcagccagagcgccagcaacctgaagggcgccagcctgctgcccggcaagctgcccaccagcgtgagcctgttcgacgacgaggacgaggaggacaacctgttcggcggcaccgccgccaagaagcagaccctgagcctgcaggcccagagagaggagaaggccaaggccagcgagctgagcaagaagaaggccagcgccctgctgttcagcagcgacgaggagtggaacatccccgccagccagacccacctggccagcgacagcagaagcaagggcgagcccagagacagcggcaccctgcagagccaggaggccaaggccgtgaagaagaccagcctgttcgaggaggacaaggaggacgacctgttcgccatcgccaaggacagccagaagaagacccagagagtgagcctgctgttcgaggacgacgtggacagcggcggcagcctgttcggcagcccccccaccagcgtgccccccgccaccaagaagaaggagaccgtgagcgaggccccccccctgctgttcagcgacgaggaggagaaggaggcccagctgggcgtgaagagcgtggacaagaaggtggagagcgccaaggagagcctgaagttcggcagaaccgacgtggccgagagcgagaaggagggcctgctgaccagaagcgcccaggagaccgtgaagcacagcgacctgttcagcagcagcagcccctgggacaagggcaccaagcccagaaccaagaccgtgctgagcctgttcgacgaggaggaggacaagatggaggaccagaacatcatccaggccccccagaaggaggtgggcaagggctgcgaccccgacgcccaccccaagagcaccggcgtgttccaggacgaggagctgctgttcagccacaagctgcagaaggacaacgaccccgacgtggacctgttcgccggcaccaagaagaccaagctgctggagcccagcgtgggcagcctgttcggcgacgacgaggacgacgacctgttcagcagcgccaagagccagcccctggtgcaggagaagaagagagtggtgaagaaggaccacagcgtgaacagcttcaagaaccagaagcaccccgagagcatccagggcagcaaggagaagggcatctggaagcccgagaccccccaggccaacctggccatcaaccccgccgccctgctgcccaccgccgccagccagatcagcgaggtgaagcccgtgctgcccgagctggccttccccagcagcgagcacagaagaagccacggcctggagagcgtgcccgtgctgcccggcagcggcgaggccggcgtgagcttcgacctgcccgcccaggccgacaccctgcacagcgccaacaagagcagagtgaagatgagaggcaagagaagaccccagaccagagccgccagaagactggccgcccaggagagcagcgaggccgaggacatgagcgtgcccagaggccccatcgcccagtgggccgacggcgccatcagccccaacggccacagaccccagctgagagccgccagcggcgaggacagcaccgaggaggccctggccgccgccgccgccccctgggagggcggccccgtgcccggcgtggacaccagccccttcgccaagagcctgggccacagcagaggcgaggccgacctgttcgacagcggcgacatcttcagcaccggcaccggcagccagagcgtggagagaaccaagcccaaggccaagatcgccgagaaccccgccaacccccccgtgggcggcaaggccaagagccccatgttccccgccctgggcgaggccagcagcgacgacgacctgttccagagcgccaagcccaagcccgccaagaagaccaaccccttccccctgctggaggacgaggacgacctgttcaccgaccagaaggtgaagaagaacgagaccaagagcagcagccagcaggacgtgatcctgaccacccaggacatcttcgaggacgacatcttcgccaccgaggccatcaagcccagccagaagaccagagagaaggagaagaccctggagagcaacctgttcgacgacaacatcgacatcttcgccgacctgaccgtgaagcccaaggagaagagcaagaagaaggtggaggccaagagcatcttcgacgacgacatggacgacatcttcagcaccggcatccaggccaagaccaccaagcccaagagcagaagcgcccaggccgcccccgagcccagattcgagcacaaggtgagcaacatcttcgacgaccccctgaacgccttcggcggccagtag

SEQ ID NO: 81173 - DNA, 3789 bp, synthetic construct
  misc_feature 1..3789: note = Description of Artificial Sequence: Synthetic coding sequence
  source 1..3789: mol_type = other DNA
atgaacagaaccacccccgaccaggagctggtgcccgccagcgagcccgtgtgggagagaccctggagcgtggaggagatcagaagaagcagccagagctggagcctggccgccgacgccggcagagtgtacgacgaggaggtggaggagcccgtgctgaaggccgaggccgagaagaccgagcaggagaagaccagagagcagaaggaggtggacctgatccccaaggtgcaggaggccgtgaactacggcctgcaggtgctggacagcgccttcgagcagctggacatcaaggccggcaacagcgacagcgaggaggacgacgccaacggcagagtggagctgatcctggagcccaaggacctgtacatcgacagacccctgccctacctgatcggcagcaagctgttcatggagcaggaggacgtgggcctgggcgagctgagcagcgaggagggcagcgtgggcagcgacagaggcagcatcgtggacaccgaggaggagaaggaggaggaggagagcgacgaggacttcgcccaccacagcgacaacgagcagaaccagcacaccacccagatgagcgacgaggaggaggacgacgacggctgcgacctgttcgccgacagcgagaaggaggaggaggacatcgaggacatcgaggagaacaccagacccaagagaagcagacccaccagcttcgccgacgagctggccgccagaatcaagggcgacgccatgggcagagtggacgaggagcccaccaccctgcccagcggcgaggccaagcccagaaagaccctgaaggagaagaaggagagaagaacccccagcgacgacgaggaggacaacctgttcgccccccccaagctgaccgacgaggacttcagccccttcggcagcggcggcggcctgttcagcggcggcaagggcctgttcgacgacgaggacgaggagagcgacctgttcaccgaggccagccaggacagacaggccggcgccagcgtgaaggaggagagcagcagcagcaagcccggcaagaagatccccgccggcgccgtgagcgtgttcctgggcgacaccgacgtgttcggcgccgccagcgtgcccagcctgaaggagccccagaagcccgagcagcccacccccagaaagagcccctacggccccccccccaccggcctgttcgacgacgacgacggcgacgacgacgacgacttcttcagcgccccccacagcaagcccagcaagaccagaaaggtgcagagcaccgccgacatcttcggcgacgaggagggcgacctgttcaaggagaaggccgtggccagccccgaggccaccgtgagccagaccgacgagaacaaggccagagccgagaagaaggtgaccctgagctacagcaagaacctgaagcccagcagcgagaccaagacccagaagggcctgttcagcgacgaggaggacagcgaggacctgttcagcagccagagcgccagcaacctgaagggcgccagcctgctgcccggcaagctgcccaccagcgtgagcctgttcgacgacgaggacgaggaggacaacctgttcggcggcaccgccgccaagaagcagaccctgagcctgcaggcccagagagaggagaaggccaaggccagcgagctgagcaagaagaaggccagcgccctgctgttcagcagcgacgaggagtggaacatccccgccagccagacccacctggccagcgacagcagaagcaagggcgagcccagagacagcggcaccctgcagagccaggaggccaaggccgtgaagaagaccagcctgttcgaggaggacaaggaggacgacctgttcgccatcgccaaggacagccagaagaagacccagagagtgagcctgctgttcgaggacgacgtggacagcggcggcagcctgttcggcagcccccccaccagcgtgccccccgccaccaagaagaaggagaccgtgagcgaggccccccccctgctgttcagcgacgaggaggagaaggaggcccagctgggcgtgaagagcgtggacaagaaggtggagagcgccaaggagagcctgaagttcggcagaaccgacgtggccgagagcgagaaggagggcctgctgaccagaagcgcccaggagaccgtgaagcacagcgacctgttcagcagcagcagcccctgggacaagggcaccaagcccagaaccaagaccgtgctgagcctgttcgacgaggaggaggacaagatggaggaccagaacatcatccaggccccccagaaggaggtgggcaagggctgcgaccccgacgcccaccccaagagcaccggcgtgttccaggacgaggagctgctgttcagccacaagctgcagaaggacaacgaccccgacgtggacctgttcgccggcaccaagaagaccaagctgctggagcccagcgtgggcagcctgttcggcgacgacgaggacgacgacctgttcagcagcgccaagagccagcccctggtgcaggagaagaagagagtggtgaagaaggaccacagcgtgaacagcttcaagaaccagaagcaccccgagagcatccagggcagcaaggagaagggcatctggaagcccgagaccccccaggccaacctggccatcaaccccgccgccctgctgcccaccgccgccagccagatcagcgaggtgaagcccgtgctgcccgagctggccttccccagcagcgagcacagaagaagccacggcctggagagcgtgcccgtgctgcccggcagcggcgaggccggcgtgagcttcgacctgcccgcccaggccgacaccctgcacagcgccaacaagagcagagtgaagatgagaggcaagagaagaccccagaccagagccgccagaagactggccgcccaggagagcagcgaggccgaggacatgagcgtgcccagaggccccatcgcccagtgggccgacggcgccatcagccccaacggccacagaccccagctgagagccgccagcggcgaggacagcaccgaggaggccctggccgccgccgccgccccctgggagggcggccccgtgcccggcgtggacaccagccccttcgccaagagcctgggccacagcagaggcgaggccgacctgttcgacagcggcgacatcttcagcaccggcaccggcagccagagcgtggagagaaccaagcccaaggccaagatcgccgagaaccccgccaacccccccgtgggcggcaaggccaagagccccatgttccccgccctgggcgaggccagcagcgacgacgacctgttccagagcgccaagcccaagcccgccaagaagaccaaccccttccccctgctggaggacgaggacgacctgttcaccgaccagaaggtgaagaagaacgagaccaagagcagcagccagcaggacgtgatcctgaccacccaggacatcttcgaggacgacatcttcgccaccgaggccatcaagcccagccagaagaccagagagaaggagaagaccctggagagcaacctgttcgacgacaacatcgacatcttcgccgacctgaccgtgaagcccaaggagaagagcaagaagaaggtggaggccaagagcatcttcgacgacgacatggacgacatcttcagcaccggcatccaggccaagaccaccaagcccaagagcagaagcgcccaggccgcccccgagcccagattcgagcacaaggtgagcaacatcttcgacgaccccctgaacgccttcggcggccagtag

SEQ ID NO: 81174 - DNA, 399 bp, synthetic construct
  misc_feature 1..399: note = Description of Artificial Sequence: Synthetic coding sequence
  source 1..399: mol_type = other DNA
atggaggaccagaacatcatccaggccccccagaaggaggtgggcaagggctgcgaccccgacgcccaccccaagagcaccggcgtgttccaggacgaggagctgctgttcagccacaagctgcagaaggacaacgaccccgacgtggacctgttcgccggcaccaagaagaccaagctgctggagcccagcgtgggcagcctgttcggcgacgacgaggacgacgacctgttcagcagcgccaagagccagcccctggtgcaggagaagaagagagtggtgaagaaggaccacagcgtgaacagcttcaagaaccagaagcaccccgagagcatccagggcagcaaggagaagggcatctggaagcccgagaccccccaggtgagaaaccccctgtag

SEQ ID NO: 81175 - DNA, 3963 bp, synthetic construct
  misc_feature 1..3963: note = Description of Artificial Sequence: Synthetic coding sequence
  source 1..3963: mol_type = other DNA
atgatgaacagaaccacccccgaccaggagctggtgcccgccagcgagcccgtgtgggagagaccctggagcgtggaggagatcagaagaagcagccagagctggagcctggccgccgacgccggcctgctgcagttcctgcaggagttcagccagcagaccatcagcagaacccacgagatcaagaagcaggtggacggcctgatcagagagaccaaggccaccgactgcagactgcacaacgtgttcaacgacttcctgatgctgagcaacacccagttcatcgagaacagagtgtacgacgaggaggtggaggagcccgtgctgaaggccgaggccgagaagaccgagcaggagaagaccagagagcagaaggaggtggacctgatccccaaggtgcaggaggccgtgaactacggcctgcaggtgctggacagcgccttcgagcagctggacatcaaggccggcaacagcgacagcgaggaggacgacgccaacggcagagtggagctgatcctggagcccaaggacctgtacatcgacagacccctgccctacctgatcggcagcaagctgttcatggagcaggaggacgtgggcctgggcgagctgagcagcgaggagggcagcgtgggcagcgacagaggcagcatcgtggacaccgaggaggagaaggaggaggaggagagcgacgaggacttcgcccaccacagcgacaacgagcagaaccagcacaccacccagatgagcgacgaggaggaggacgacgacggctgcgacctgttcgccgacagcgagaaggaggaggaggacatcgaggacatcgaggagaacaccagacccaagagaagcagacccaccagcttcgccgacgagctggccgccagaatcaagggcgacgccatgggcagagtggacgaggagcccaccaccctgcccagcggcgaggccaagcccagaaagaccctgaaggagaagaaggagagaagaacccccagcgacgacgaggaggacaacctgttcgccccccccaagctgaccgacgaggacttcagccccttcggcagcggcggcggcctgttcagcggcggcaagggcctgttcgacgacgaggacgaggagagcgacctgttcaccgaggccagccaggacagacaggccggcgccagcgtgaaggaggagagcagcagcagcaagcccggcaagaagatccccgccggcgccgtgagcgtgttcctgggcgacaccgacgtgttcggcgccgccagcgtgcccagcctgaaggagccccagaagcccgagcagcccacccccagaaagagcccctacggccccccccccaccggcctgttcgacgacgacgacggcgacgacgacgacgacttcttcagcgccccccacagcaagcccagcaagaccagaaaggtgcagagcaccgccgacatcttcggcgacgaggagggcgacctgttcaaggagaaggccgtggccagccccgaggccaccgtgagccagaccgacgagaacaaggccagagccgagaagaaggtgaccctgagctacagcaagaacctgaagcccagcagcgagaccaagacccagaagggcctgttcagcgacgaggaggacagcgaggacctgttcagcagccagagcgccagcaacctgaagggcgccagcctgctgcccggcaagctgcccaccagcgtgagcctgttcgacgacgaggacgaggaggacaacctgttcggcggcaccgccgccaagaagcagaccctgagcctgcaggcccagagagaggagaaggccaaggccagcgagctgagcaagaagaaggccagcgccctgctgttcagcagcgacgaggaggaccagtggaacatccccgccagccagacccacctggccagcgacagcagaagcaagggcgagcccagagacagcggcaccctgcagagccaggaggccaaggccgtgaagaagaccagcctgttcgaggaggacaaggaggacgacctgttcgccatcgccaaggacagccagaagaagacccagagagtgagcctgctgttcgaggacgacgtggacagcggcggcagcctgttcggcagcccccccaccagcgtgccccccgccaccaagaagaaggagaccgtgagcgaggccccccccctgctgttcagcgacgaggaggagaaggaggcccagctgggcgtgaagagcgtggacaagaaggtggagagcgccaaggagagcctgaagttcggcagaaccgacgtggccgagagcgagaaggagggcctgctgaccagaagcgcccaggagaccgtgaagcacagcgacctgttcagcagcagcagcccctgggacaagggcaccaagcccagaaccaagaccgtgctgagcctgttcgacgaggaggaggacaagatggaggaccagaacatcatccaggccccccagaaggaggtgggcaagggctgcgaccccgacgcccaccccaagagcaccggcgtgttccaggacgaggagctgctgttcagccacaagctgcagaaggacaacgaccccgacgtggacctgttcgccggcaccaagaagaccaagctgctggagcccagcgtgggcagcctgttcggcgacgacgaggacgacgacctgttcagcagcgccaagagccagcccctggtgcaggagaagaagagagtggtgaagaaggaccacagcgtgaacagcttcaagaaccagaagcaccccgagagcatccagggcagcaaggagaagggcatctggaagcccgagaccccccaggccaacctggccatcaaccccgccgccctgctgcccaccgccgccagccagatcagcgaggtgaagcccgtgctgcccgagctggccttccccagcagcgagcacagaagaagccacggcctggagagcgtgcccgtgctgcccggcagcggcgaggccggcgtgagcttcgacctgcccgcccaggccgacaccctgcacagcgccaacaagagcagagtgaagatgagaggcaagagaagaccccagaccagagccgccagaagactggccgcccaggagagcagcgaggccgaggacatgagcgtgcccagaggccccatcgcccagtgggccgacggcgccatcagccccaacggccacagaccccagctgagagccgccagcggcgaggacagcaccgaggaggccctggccgccgccgccgccccctgggagggcggccccgtgcccggcgtggacaccagccccttcgccaagagcctgggccacagcagaggcgaggccgacctgttcgacagcggcgacatcttcagcaccggcaccggcagccagagcgtggagagaaccaagcccaaggccaagatcgccgagaaccccgccaacccccccgtgggcggcaaggccaagagccccatgttccccgccctgggcgaggccagcagcgacgacgacctgttccagagcgccaagcccaagcccgccaagaagaccaaccccttccccctgctggaggacgaggacgacctgttcaccgaccagaaggtgaagaagaacgagaccaagagcagcagccagcaggacgtgatcctgaccacccaggacatcttcgaggacgacatcttcgccaccgaggccatcaagcccagccagaagaccagagagaaggagaagaccctggagagcaacctgttcgacgacaacatcgacatcttcgccgacctgaccgtgaagcccaaggagaagagcaagaagaaggtggaggccaagagcatcttcgacgacgacatggacgacatcttcagcaccggcatccaggccaagaccaccaagcccaagagcagaagcgcccaggccgcccccgagcccagattcgagcacaaggtgagcaacatcttcgacgaccccctgaacgccttcggcggccagtag

SEQ ID NO: 81176 - DNA, 4026 bp, synthetic construct
  misc_feature 1..4026: note = Description of Artificial Sequence: Synthetic coding sequence
  source 1..4026: mol_type = other DNA
atgatgaacagaaccacccccgaccaggagctggtgcccgccagcgagcccgtgtgggagagaccctggagcgtggaggagatcagaagaagcagccagagctggagcctggccgccgacgccggcctgctgcagttcctgcaggagttcagccagcagaccatcagcagaacccacgagatcaagaagcaggtggacggcctgatcagagagaccaaggccaccgactgcagactgcacaacgtgttcaacgacttcctgatgctgagcaacacccagttcatcgagaacagagtgtacgacgaggaggtggaggagcccgtgctgaaggccgaggccgagaagaccgagcaggagaagaccagagagcagaaggaggtggacctgatccccaaggtgcaggaggccgtgaactacggcctgcaggtgctggacagcgccttcgagcagctggacatcaaggccggcaacagcgacagcgaggaggacgacgccaacggcagagtggagctgatcctggagcccaaggacctgtacatcgacagacccctgccctacctgatcggcagcaagctgttcatggagcaggaggacgtgggcctgggcgagctgagcagcgaggagggcagcgtgggcagcgacagaggcagcatcgtggacaccgaggaggagaaggaggaggaggagagcgacgaggacttcgcccaccacagcgacaacgagcagaaccagcacaccacccagatgagcgacgaggaggaggacgacgacggctgcgacctgttcgccgacagcgagaaggaggaggaggacatcgaggacatcgaggagaacaccagacccaagagaagcagacccaccagcttcgccgacgagctggccgccagaatcaagggcgacgccatgggcagagtggacgaggagcccaccaccctgcccagcggcgaggccaagcccagaaagaccctgaaggagaagaaggagagaagaacccccagcgacgacgaggaggacaacctgttcgccccccccaagctgaccgacgaggacttcagccccttcggcagcggcggcggcctgttcagcggcggcaagggcctgttcgacgacgaggacgaggagagcgacctgttcaccgaggccagccaggacagacaggccggcgccagcgtgaaggaggagagcagcagcagcaagcccggcaagaagatccccgccggcgccgtgagcgtgttcctgggcgacaccgacgtgttcggcgccgccagcgtgcccagcctgaaggagccccagaagcccgagcagcccacccccagaaagagcccctacggccccccccccaccggcctgttcgacgacgacgacggcgacgacgacgacgacttcttcagcgccccccacagcaagcccagcaagaccggcaaggtgcagagcaccgccgacatcttcggcgacgaggagggcgacctgttcaaggagaaggccgtggccagccccgaggccaccgtgagccagaccgacgagaacaaggccagagccgagaagaaggtgaccctgagctacagcaagaacctgaagcccagcagcgagaccaagacccagaagggcctgttcagcgacgaggaggacagcgaggacctgttcagcagccagagcgccagcaacctgaagggcgccagcctgctgcccggcaagctgcccaccagcgtgagcctgttcgacgacgaggacgaggaggacaacctgttcggcggcaccgccgccaagaagcagaccctgagcctgcaggcccagagagaggagaaggccaaggccagcgagctgagcaagaagaaggccagcgccctgctgttcagcagcgacgaggaggaccagtggaacatccccgccagccagacccacctggccagcgacagcagaagcaagggcgagcccagagacagcggcaccctgcagagccaggaggccaaggccgtgaagaagaccagcctgttcgaggaggacaaggaggacgacctgttcgccatcgccaaggacagccagaagaagacccagagagtgagcctgctgttcgaggacgacgtggacagcggcggcagcctgttcggcagcccccccaccagcgtgccccccgccaccaagaagaaggagaccgtgagcgaggccccccccctgctgttcagcgacgaggaggagaaggaggcccagctgggcgtgaagagcgtggacaagaaggtggagagcgccaaggagagcctgaagttcggcagaaccgacgtggccgagagcgagaaggagggcctgctgaccagaagcgcccaggagaccgtgaagcacagcgacctgttcagcagcagcagcccctgggacaagggcaccaagcccagaaccaagaccgtgctgagcctgttcgacgaggaggaggacaagatggaggaccagaacatcatccaggccccccagaaggaggtgggcaagggctgcgaccccgacgcccaccccaagagcaccggcgtgttccaggacgaggagctgctgttcagccacaagctgcagaaggacaacgaccccgacgtggacctgttcgccggcaccaagaagaccaagctgctggagcccagcgtgggcagcctgttcggcgacgacgaggacgacgacctgttcagcagcgccaagagccagcccctggtgcaggagaagaagagagtggtgaagaaggaccacagcgtgaacagcttcaagaaccagaagcaccccgagagcatccagggcagcaaggagaagggcatctggaagcccgagaccccccaggacagcagcggcctggcccccttcaagaccaaggagcccagcaccagaatcggcaagatccaggccaacctggccatcaaccccgccgccctgctgcccaccgccgccagccagatcagcgaggtgaagcccgtgctgcccgagctggccttccccagcagcgagcacagaagaagccacggcctggagagcgtgcccgtgctgcccggcagcggcgaggccggcgtgagcttcgacctgcccgcccaggccgacaccctgcacagcgccaacaagagcagagtgaagatgagaggcaagagaagaccccagaccagagccgccagaagactggccgcccaggagagcagcgaggccgaggacatgagcgtgcccagaggccccatcgcccagtgggccgacggcgccatcagccccaacggccacagaccccagctgagagccgccagcggcgaggacagcaccgaggaggccctggccgccgccgccgccccctgggagggcggccccgtgcccggcgtggacaccagccccttcgccaagagcctgggccacagcagaggcgaggccgacctgttcgacagcggcgacatcttcagcaccggcaccggcagccagagcgtggagagaaccaagcccaaggccaagatcgccgagaaccccgccaacccccccgtgggcggcaaggccaagagccccatgttccccgccctgggcgaggccagcagcgacgacgacctgttccagagcgccaagcccaagcccgccaagaagaccaaccccttccccctgctggaggacgaggacgacctgttcaccgaccagaaggtgaagaagaacgagaccaagagcagcagccagcaggacgtgatcctgaccacccaggacatcttcgaggacgacatcttcgccaccgaggccatcaagcccagccagaagaccagagagaaggagaagaccctggagagcaacctgttcgacgacaacatcgacatcttcgccgacctgaccgtgaagcccaaggagaagagcaagaagaaggtggaggccaagagcatcttcgacgacgacatggacgacatcttcagcaccggcatccaggccaagaccaccaagcccaagagcagaagcgcccaggccgcccccgagcccagattcgagcacaaggtgagcaacatcttcgacgaccccctgaacgccttcggcggccagtag

SEQ ID NO: 81177 - DNA, 840 bp, synthetic construct
  misc_feature 1..840: note = Description of Artificial Sequence: Synthetic coding sequence
  source 1..840: mol_type = other DNA
atgatgaacagaaccacccccgaccaggagctggtgcccgccagcgagcccgtgtgggagagaccctggagcgtggaggagatcagaagaagcagccagagctggagcctggccgccgacgccggcagagtgtacgacgaggaggtggaggagcccgtgctgaaggccgaggccgagaagaccgagcaggagaagaccagagagcagaaggaggtggacctgatccccaaggtgcaggaggccgtgaactacggcctgcaggtgctggacagcgccttcgagcagctggacatcaaggccggcaacagcgacagcgaggaggacgacgccaacggcagagtggagctgatcctggagcccaaggacctgtacatcgacagacccctgccctacctgatcggcagcaagctgttcatggagcaggaggacgtgggcctgggcgagctgagcagcgaggagggcagcgtgggcagcgacagaggcagcatcgtggacaccgaggaggagaaggaggaggaggagagcgacgaggacttcgcccaccacagcgacaacgagcagaaccagcacaccacccagatgagcgacgaggaggaggacgacgacggctgcgacctgttcgccgacagcgagaaggaggaggaggacatcgaggacatcgaggagaacaccagacccaagagaagcagacccaccagcttcgccgacgagctggccgccagaatcaagggcgacgccatgggcagagtggacgaggagcccaccaccctgcccagcggcgaggccaagcccagaaagaccctgaaggagaagaaggagagaagaacccccagcgactag

SEQ ID NO: 81178 - DNA, 3762 bp, synthetic construct
  misc_feature 1..3762: note = Description of Artificial Sequence: Synthetic coding sequence
  source 1..3762: mol_type = other DNA
atgcccagactgagcggcaagagcgtgagagtgtacgacgaggaggtggaggagcccgtgctgaaggccgaggccgagaagaccgagcaggagaagaccagagagcagaaggaggtggacctgatccccaaggtgcaggaggccgtgaactacggcctgcaggtgctggacagcgccttcgagcagctggacatcaaggccggcaacagcgacagcgaggaggacgacgccaacggcagagtggagctgatcctggagcccaaggacctgtacatcgacagacccctgccctacctgatcggcagcaagctgttcatggagcaggaggacgtgggcctgggcgagctgagcagcgaggagggcagcgtgggcagcgacagaggcagcatcgtggacaccgaggaggagaaggaggaggaggagagcgacgaggacttcgcccaccacagcgacaacgagcagaaccagcacaccacccagatgagcgacgaggaggaggacgacgacggctgcgacctgttcgccgacagcgagaaggaggaggaggacatcgaggacatcgaggagaacaccagacccaagagaagcagacccaccagcttcgccgacgagctggccgccagaatcaagggcgacgccatgggcagagtggacgaggagcccaccaccctgcccagcggcgaggccaagcccagaaagaccctgaaggagaagaaggagagaagaacccccagcgacgacgaggaggacaacctgttcgccccccccaagctgaccgacgaggacttcagccccttcggcagcggcggcggcctgttcagcggcggcaagggcctgttcgacgacgaggacgaggagagcgacctgttcaccgaggccagccaggacagacaggccggcgccagcgtgaaggaggagagcagcagcagcaagcccggcaagaagatccccgccggcgccgtgagcgtgttcctgggcgacaccgacgtgttcggcgccgccagcgtgcccagcctgaaggagccccagaagcccgagcagcccacccccagaaagagcccctacggccccccccccaccggcctgttcgacgacgacgacggcgacgacgacgacgacttcttcagcgccccccacagcaagcccagcaagaccggcaaggtgcagagcaccgccgacatcttcggcgacgaggagggcgacctgttcaaggagaaggccgtggccagccccgaggccaccgtgagccagaccgacgagaacaaggccagagccgagaagaaggtgaccctgagctacagcaagaacctgaagcccagcagcgagaccaagacccagaagggcctgttcagcgacgaggaggacagcgaggacctgttcagcagccagagcgccagcaacctgaagggcgccagcctgctgcccggcaagctgcccaccagcgtgagcctgttcgacgacgaggacgaggaggacaacctgttcggcggcaccgccgccaagaagcagaccctgagcctgcaggcccagagagaggagaaggccaaggccagcgagctgagcaagaagaaggccagcgccctgctgttcagcagcgacgaggaggaccagtggaacatccccgccagccagacccacctggccagcgacagcagaagcaagggcgagcccagagacagcggcaccctgcagagccaggaggccaaggccgtgaagaagaccagcctgttcgaggaggacaaggaggacgacctgttcgccatcgccaaggacagccagaagaagacccagagagtgagcctgctgttcgaggacgacgtggacagcggcggcagcctgttcggcagcccccccaccagcgtgccccccgccaccaagaagaaggagaccgtgagcgaggccccccccctgctgttcagcgacgaggaggagaaggaggcccagctgggcgtgaagagcgtggacaagaaggtggagagcgccaaggagagcctgaagttcggcagaaccgacgtggccgagagcgagaaggagggcctgctgaccagaagcgcccaggagaccgtgaagcacagcgacctgttcagcagcagcagcccctgggacaagggcaccaagcccagaaccaagaccgtgctgagcctgttcgacgaggaggaggacaagatggaggaccagaacatcatccaggccccccagaaggaggtgggcaagggctgcgaccccgacgcccaccccaagagcaccggcgtgttccaggacgaggagctgctgttcagccacaagctgcagaaggacaacgaccccgacgtggacctgttcgccggcaccaagaagaccaagctgctggagcccagcgtgggcagcctgttcggcgacgacgaggacgacgacctgttcagcagcgccaagagccagcccctggtgcaggagaagaagagagtggtgaagaaggaccacagcgtgaacagcttcaagaaccagaagcaccccgagagcatccagggcagcaaggagaagggcatctggaagcccgagaccccccaggacagcagcggcctggcccccttcaagaccaaggagcccagcaccagaatcggcaagatccaggccaacctggccatcaaccccgccgccctgctgcccaccgccgccagccagatcagcgaggtgaagcccgtgctgcccgagctggccttccccagcagcgagcacagaagaagccacggcctggagagcgtgcccgtgctgcccggcagcggcgaggccggcgtgagcttcgacctgcccgcccaggccgacaccctgcacagcgccaacaagagcagagtgaagatgagaggcaagagaagaccccagaccagagccgccagaagactggccgcccaggagagcagcgaggccgaggacatgagcgtgcccagaggccccatcgcccagtgggccgacggcgccatcagccccaacggccacagaccccagctgagagccgccagcggcgaggacagcaccgaggaggccctggccgccgccgccgccccctgggagggcggccccgtgcccggcgtggacaccagccccttcgccaagagcctgggccacagcagaggcgaggccgacctgttcgacagcggcgacatcttcagcaccggcaccggcagccagagcgtggagagaaccaagcccaaggccaagatcgccgagaaccccgccaacccccccgtgggcggcaaggccaagagccccatgttccccgccctgggcgaggccagcagcgacgacgacctgttccagagcgccaagcccaagcccgccaagaagaccaaccccttccccctgctggaggacgaggacgacctgttcaccgaccagaaggtgaagaagaacgagaccaagagcagcagccagcaggacgtgatcctgaccacccaggacatcttcgaggacgacatcttcgccaccgaggccatcaagcccagccagaagaccagagagaaggagaagaccctggagagcaacctgttcgacgacaacatcgacatcttcgccgacctgaccgtgaagcccaaggagaagagcaagaagaaggtggaggccaagagcatcttcgacgacgacatggacgacatcttcagcaccggcatccaggccaagaccaccaagcccaagagcagaagcgcccaggccgcccccgagcccagattcgagcacaaggtgagcaacatcttcgacgaccccctgaacgccttcggcggccagtag

SEQ ID NO: 81179 - DNA, 3738 bp, synthetic construct
  misc_feature 1..3738: note = Description of Artificial Sequence: Synthetic coding sequence
  source 1..3738: mol_type = other DNA
atgatgaacagaaccacccccgaccaggagctggtgcccgccagcgagcccgtgtgggagagaccctggagcgtggaggagatcagaagaagcagccagagctggagcctggccgccgacgccggcctgctgcagttcctgcaggagttcagccagcagaccatcagcagaacccacgagatcaagaagcaggtggacggcctgatcagagagaccaaggccaccgactgcagactgcacaacgtgttcaacgacttcctgatgctgagcaacacccagttcatcgagaacagagtgtacgacgaggaggtggaggagcccgtgctgaaggccgaggccgagaagaccgagcaggagaagaccagagagcagaaggaggtggacctgatccccaaggtgcaggaggccgtgaactacggcctgcaggtgctggacagcgccttcgagcagctggacatcaaggccggcaacagcgacagcgaggaggacgacgccaacggcagagtggagctgatcctggagcccaaggacctgtacatcgacagacccctgccctacctgatcggcagcaagctgttcatggagcaggaggacgtgggcctgggcgagctgagcagcgaggagggcagcgtgggcagcgacagaggcagcatcgtggacaccgaggaggagaaggaggaggaggagagcgacgaggacttcgcccaccacagcgacaacgagcagaaccagcacaccacccagatgagcgacgaggaggaggacgacgacggctgcgacctgttcgccgacagcgagaaggaggaggaggacatcgaggacatcgaggagaacaccagacccaagagaagcagacccaccagcttcgccgacgagctggccgccagaatcaagggcgacgccatgggcagagtggacgaggagcccaccaacgaggaggacaacctgttcgccccccccaagctgaccgacgaggacttcagccccttcggcagcggcggcggcctgttcagcggcggcaagggcctgttcgacgacgaggacgaggagagcgacctgttcaccgaggccagccaggacagacaggccggcgccagcgtgaaggaggagagcagcagcagcaagcccggcaagaagatccccgccggcgccgtgagcgtgttcctgggcgacaccgacgtgttcggcgccgccagcgtgcccagcctgaaggagccccagaagcccgagcagcccacccccagaaagagcccctacggccccccccccaccggcctgttcgacgacgacgacggcgacgacgacgacgacttcttcagcgccccccacagcaagcccagcaagaccagaaaggtgcagagcaccgccgacatcttcggcgacgaggagggcgacctgttcaaggagaaggccgtggccagccccgaggccaccgtgagccagaccgacgagaacaaggccagagccgagaagaaggtgaccctgagctacagcaagaacctgaagcccagcagcgagaccaagacccagaagggcctgttcagcgacgaggaggacagcgaggacctgttcagcagccagagcgccagcaacctgaagggcgccagcctgctgcccggcaagctgcccaccagcgtgagcctgttcgacgacgaggacgaggaggacaacctgttcggcggcaccgccgccaagaagcagaccctgagcctgcaggcccagagagaggagaaggccaaggccagcgagctgagcaagaagaaggccagcgccctgctgttcagcagcgacgaggaggaccagtggaacatccccgccagccagacccacctggccagcgacagcagaagcaagggcgagcccagagacagcggcaccctgcagagccaggaggccaaggccgtgaagaagaccagcctgttcgaggaggacaaggaggacgacctgttcgccatcgccaaggacagccagaagaagacccagagagtgagcctgctgttcgaggacgacgtggacagcggcggcagcctgttcggcagcccccccaccagcgtgccccccgccaccaaggagggcctgctgaccagaagcgcccaggagaccgtgaagcacagcgacctgttcagcagcagcagcccctgggacaagggcaccaagcccagaaccaagaccgtgctgagcctgttcgacgaggaggaggacaagatggaggaccagaacatcatccaggccccccagaaggaggtgggcaagggctgcgaccccgacgcccaccccaagagcaccggcgtgttccaggacgaggagctgctgttcagccacaagctgcagaaggacaacgaccccgacgtggacctgttcgccggcaccaagaagaccaagctgctggagcccagcgtgggcagcctgttcggcgacgacgaggacgacgacctgttcagcagcgccaagagccagcccctggtgcaggagaagaagagagtggtgaagaaggaccacagcgtgaacagcttcaagaaccagaagcaccccgagagcatccagggcagcaaggagaagggcatctggaagcccgagaccccccaggccaacctggccatcaaccccgccgccctgctgcccaccgccgccagccagatcagcgaggtgaagcccgtgctgcccgagctggccttccccagcagcgagcacagaagaagccacggcctggagagcgtgcccgtgctgcccggcagcggcgaggccggcgtgagcttcgacctgcccgcccaggccgacaccctgcacagcgccaacaagagcagagtgaagatgagaggcaagagaagaccccagaccagagccgccagaagactggccgcccaggagagcagcgaggccgaggacatgagcgtgcccagaggccccatcgcccagtgggccgacggcgccatcagccccaacggccacagaccccagctgagagccgccagcggcgaggacagcaccgaggaggccctggccgccgccgccgccccctgggagggcggccccgtgcccggcgtggacaccagccccttcgccaagagcctgggccacagcagaggcgaggccgacctgttcgacagcggcgacatcttcagcaccggcaccggcagccagagcgtggagagaaccaagcccaaggccaagatcgccgagaaccccgccaacccccccgtgggcggcaaggccaagagccccatgttccccgccctgggcgaggccagcagcgacgacgacctgttccagagcgccaagcccaagcccgccaagaagaccaaccccttccccctgctggaggacgaggacgacctgttcaccgaccagaaggtgaagaagaacgagaccaagagcagcagccagcaggacgtgatcctgaccacccaggacatcttcgaggacgacatcttcgccaccgaggccatcaagcccagccagaagaccagagagaaggagaagaccctggagagcaacctgttcgacgacaacatcgacatcttcgccgacctgaccgtgaagcccaaggagaagagcaagaagaaggtggaggccaagagcatcttcgacgacgacatggacgacatcttcagcaccggcatccaggccaagaccaccaagcccaagagcagaagcgcccaggccgcccccgagcccagattcgagcacaaggtgagcaacatcttcgacgaccccctgaacgccttcggcggccagtag

SEQ ID NO: 81180 - DNA, 3840 bp, synthetic construct
  misc_feature 1..3840: note = Description of Artificial Sequence: Synthetic coding sequence
  source 1..3840: mol_type = other DNA
atgatgaacagaaccacccccgaccaggagctggtgcccgccagcgagcccgtgtgggagagaccctggagcgtggaggagatcagaagaagcagccagagctggagcctggccgccgacgccggcctgctgcagttcctgcaggagttcagccagcagaccatcagcagaacccacgagatcaagaagcaggtggacggcctgatcagagagaccaaggccaccgactgcagactgcacaacgtgttcaacgacttcctgatgctgagcaacacccagttcatcgagaacagagtgtacgacgaggaggtggaggagcccgtgctgaaggccgaggccgagaagaccgagcaggagaagaccagagagcagaaggaggtggacctgatccccaaggtgcaggaggccgtgaactacggcctgcaggtgctggacagcgccttcgagcagctggacatcaaggccggcaacagcgacagcgaggaggacgacgccaacggcagagtggagctgatcctggagcccaaggacctgtacatcgacagacccctgccctacctgatcggcagcaagctgttcatggagcaggaggacgtgggcctgggcgagctgagcagcgaggagggcagcgtgggcagcgacagaggcagcatcgtggacaccgaggaggagaaggaggaggaggagagcgacgaggacttcgcccaccacagcgacaacgagcagaaccagcacaccacccagatgagcgacgaggaggaggacgacgacggctgcgacctgttcgccgacagcgagaaggaggaggaggacatcgaggacatcgaggagaacaccagacccaagagaagcagacccaccagcttcgccgacgagctggccgccagaatcaagggcgacgccatgggcagagtggacgaggagcccaccaccctgcccagcggcgaggccaagcccagaaagaccctgaaggagaagaaggagagaagaacccccagcgacgacgaggaggacaacctgttcgccccccccaagctgaccgacgaggacttcagccccttcggcagcggcggcggcctgttcagcggcggcaagggcctgttcgacgacgaggacgaggagagcgacctgttcaccgaggccagccaggacagacaggccggcgccagcgtgaaggaggagagcagcagcagcaagcccggcaagaagatccccgccggcgccgtgagcgtgttcctgggcgacaccgacgtgttcggcgccgccagcgtgcccagcctgaaggagccccagaagcccgagcagcccacccccagaaagagcccctacggccccccccccaccggcctgttcgacgacgacgacggcgacgacgacgacgacttcttcagcgccccccacagcaagcccagcaagaccagaaaggtgcagagcaccgccgacatcttcggcgacgaggagggcgacctgttcaaggagaaggccgtggccagccccgaggccaccgtgagccagaccgacgagaacaaggccagagccgagaagaaggtgaccctgagctacagcaagaacctgaagcccagcagcgagaccaagacccagaagggcctgttcagcgacgaggaggacagcgaggacctgttcagcagccagagcgccagcaacctgaagggcgccagcctgctgcccggcaagctgcccaccagcgtgagcctgttcgacgacgaggacgaggaggacaacctgttcggcggcaccgccgccaagaagcagaccctgagcctgcaggcccagagagaggagaaggccaaggccagcgagctgagcaagaagaaggccagcgccctgctgttcagcagcgacgaggaggaccagtggaacatccccgccagccagacccacctggccagcgacagcagaagcaagggcgagcccagagacagcggcaccctgcagagccaggaggccaaggccgtgaagaagaccagcctgttcgaggaggacaaggaggacgacctgttcgccatcgccaaggacagccagaagaagacccagagagtgagcctgctgttcgaggacgacgtggacagcggcggcagcctgttcggcagcccccccaccagcgtgccccccgccaccaagaagaaggagaccgtgagcgaggccccccccctgctgttcagcgacgaggaggagaaggaggcccagctgggcgtgaagagcgtggacaagaaggtggagagcgccaaggagagcctgaagttcggcagaaccgacgtggccgagagcgagaaggagggcctgctgaccagaagcgcccaggagaccgtgaagcacagcgacctgttcagcagcagcagcccctgggacaagggcaccaagcccagaaccaagaccgtgctgagcctgttcgacgaggaggaggacaagatggaggaccagaacatcatccaggccccccagaaggaggtgggcaagggctgcgaccccgacgcccaccccaagagcaccggcgtgttccaggacgaggagctgctgttcagccacaagctgcagaaggacaacgaccccgacgtggacctgttcgccggcaccaagaagaccaagctgctggagcccagcgtgggcagcctgttcggcgacgacgaggacgacgacctgttcagcagcgccaagagccagcccctggccaacctggccatcaaccccgccgccctgctgcccaccgccgccagccagatcagcgaggtgaagcccgtgctgcccgagctggccttccccagcagcgagcacagaagaagccacggcctggagagcgtgcccgtgctgcccggcagcggcgaggccggcgtgagcttcgacctgcccgcccaggccgacaccctgcacagcgccaacaagagcagagtgaagatgagaggcaagagaagaccccagaccagagccgccagaagactggccgcccaggagagcagcgaggccgaggacatgagcgtgcccagaggccccatcgcccagtgggccgacggcgccatcagccccaacggccacagaccccagctgagagccgccagcggcgaggacagcaccgaggaggccctggccgccgccgccgccccctgggagggcggccccgtgcccggcgtggacaccagccccttcgccaagagcctgggccacagcagaggcgaggccgacctgttcgacagcggcgacatcttcagcaccggcaccggcagccagagcgtggagagaaccaagcccaaggccaagatcgccgagaaccccgccaacccccccgtgggcggcaaggccaagagccccatgttccccgccctgggcgaggccagcagcgacgacgacctgttccagagcgccaagcccaagcccgccaagaagaccaaccccttccccctgctggaggacgaggacgacctgttcaccgaccagaaggtgaagaagaacgagaccaagagcagcagccagcaggacgtgatcctgaccacccaggacatcttcgaggacgacatcttcgccaccgaggccatcaagcccagccagaagaccagagagaaggagaagaccctggagagcaacctgttcgacgacaacatcgacatcttcgccgacctgaccgtgaagcccaaggagaagagcaagaagaaggtggaggccaagagcatcttcgacgacgacatggacgacatcttcagcaccggcatccaggccaagaccaccaagcccaagagcagaagcgcccaggccgcccccgagcccagattcgagcacaaggtgagcaacatcttcgacgaccccctgaacgccttcggcggccagtag

SEQ ID NO: 81181 - DNA, 1329 bp, synthetic construct
  misc_feature 1..1329: note = Description of Artificial Sequence: Synthetic coding sequence
  source 1..1329: mol_type = other DNA
atggccgagggcgagggctacttcgccatgagcgaggacgagctggcctgcagcccctacatccccctgggcggcgacttcggcggcggcgacttcggcggcggcgacttcggcggcggcgacttcggcggcggcggcagcttcggcggccactgcctggactactgcgagagccccaccgcccactgcaacgtgctgaactgggagcaggtgcagagactggacggcatcctgagcgagaccatccccatccacggcagaggcaacttccccaccctggagctgcagcccagcctgatcgtgaaggtggtgagaagaagactggccgagaagagaatcggcgtgagagacgtgagactgaacggcagcgccgccagccacgtgctgcaccaggacagcggcctgggctacaaggacctggacctgatcttctgcgccgacctgagaggcgagggcgagttccagaccgtgaaggacgtggtgctggactgcctgctggacttcctgcccgagggcgtgaacaaggagaagatcacccccctgaccctgaaggaggcctacgtgcagaagatggtgaaggtgtgcaacgacagcgacagatggagcctgatcagcctgagcaacaacagcggcaagaacgtggagctgaagttcgtggacagcctgagaagacagttcgagttcagcgtggacagcttccagatcaagctggacagcctgctgctgttctacgagtgcagcgagaaccccatgaccgagaccttccaccccaccatcatcggcgagagcgtgtacggcgacttccaggaggccttcgaccacctgtgcaacaagatcatcgccaccagaaaccccgaggagatcagaggcggcggcctgctgaagtactgcaacctgctggtgagaggcttcagacccgccagcgacgagatcaagaccctgcagagatacatgtgcagcagattcttcatcgacttcagcgacatcggcgagcagcagagaaagctggagagctacctgcagaaccacttcgtgggcctggaggacagaaagtacgagtacctgatgaccctgcacggcgtggtgaacgagagcaccgtgtgcctgatgggccacgagagaagacagaccctgaacctgatcaccatgctggccatcagagtgctggccgaccagaacgtgatccccaacgtggccaacgtgacctgctactaccagcccgccccctacgtggccgacgccaacttcagcaactactacatcgcccaggtgcagcccgtgttcacctgccagcagcagacctacagcacctggctgccctgcaactag

SEQ ID NO: 81182 - DNA, 1176 bp, synthetic construct
  misc_feature 1..1176: note = Description of Artificial Sequence: Synthetic coding sequence
  source 1..1176: mol_type = other DNA
atggccgaggagagcagctgcaccagagactgcatgagcttcagcgtgctgaactgggaccaggtgagcagactgcacgaggtgctgaccgaggtggtgcccatccacggcagaggcaacttccccaccctggagatcaccctgaaggacatcgtgcagaccgtgagaagcagactggaggaggccggcatcaaggtgcacgacgtgagactgaacggcagcgccgccggccacgtgctggtgaaggacaacggcctgggctgcaaggacctggacctgatcttccacgtggccctgcccaccgaggccgagttccagctggtgagagacgtggtgctgtgcagcctgctgaacttcctgcccgagggcgtgaacaagctgaagatcagccccgtgaccctgaaggaggcctacgtgcagaagctggtgaaggtgtgcaccgacaccgacagatggagcctgatcagcctgagcaacaagaacggcaagaacgtggagctgaagttcgtggacagcatcagaagacagttcgagttcagcgtggacagcttccagatcatcctggacagcctgctgttcttctacgactgcagcaacaaccccatcagcgagcacttccaccccaccgtgatcggcgagagcatgtacggcgacttcgaggaggccttcgaccacctgcagaacagactgatcgccaccaagaaccccgaggagatcagaggcggcggcctgctgaagtacagcaacctgctggtgagagacttcagacccaccgaccaggaggagatcaagaccctggagagatacatgtgcagcagattcttcatcgacttccccgacatcctggagcagcagagaaagctggagacctacctgcagaaccacttcgccgaggaggagagaagcaagtacgactacctgatgatcctgagaagagtggtgaacgagagcaccgtgtgcctgatgggccacgagagaagacagaccctgaacctgatcagcctgctggccctgagagtgctggccgagcagaacatcatccccagcgccaccaacgtgacctgctactaccagcccgccccctacgtgagcgacggcaacttcagcaactactacgtggcccacccccccgtgacctacagccagccctaccccacctggctgccctgcaactag

SEQ ID NO: 81183 - DNA, 2340 bp, synthetic construct
  misc_feature 1..2340: note = Description of Artificial Sequence: Synthetic coding sequence
  source 1..2340: mol_type = other DNA
atgcagcaggccctggagctggccctggacagagccgagtacgtgatcgagagcgccagacagagaccccccaagagaaagtacctgagcagcggcagaaagagcgtgttccagaagctgtacgacctgtacatcgaggagtgcgagaaggagcccgaggtgaagaagctgagaagaaacgtgaacctgctggagaagctggtgatgcaggagaccctgagctgcctggtggtgaacctgtaccccggcaacgagggctacagcctgatgctgagaggcaagaacggcagcgacagcgagaccatcagactgccctacgaggagggcgagctgctggagtacctggacgccgaggagctgccccccatcctggtggacctgctggagaagagccaggtgaacatcttccactgcggctgcgtgatcgccgagatcagagactacagacagagcagcaacatgaagagccccggctaccagagcagacacatcctgctgagacccaccatgcagaccctgatctgcgacgtgcacagcatcaccagcgacaaccacaagtggacccaggaggacaagctgctgctggagagccagctgatcctggccaccgccgagcccctgtgcctggaccccagcatcgccgtgacctgcaccgccaacagactgctgtacaacaagcagaagatgaacaccagacccatgaagagatgcttcaagagatacagcagaagcagcctgaacagacagcaggacctgagccactgccccccccccccccagctgagactgctggacttcctgcagaagagaaaggagagaaaggccggccagcactacgacctgaagatcagcaaggccggcaactgcgtggacatgtggaagagaagcccctgcaacctggccatccccagcgaggtggacgtggagaagtacgccaaggtggagaagagcatcaagagcgacgacagccagcccaccgtgtggcccgcccacgacgtgaaggacgactacgtgttcgagtgcgaggccggcacccagtaccagaagaccaagctgaccatcctgcagagcctgggcgaccccctgtactacggcaagatccagccctgcaaggccgacgaggagagcgacagccagatgagccccagccacagcagcaccgacgaccacagcaactggttcatcatcggcagcaagaccgacgccgagagagtggtgaaccagtaccaggagctggtgcagaacgaggccaagtgccccgtgaagatgagccacagcagcagcggcagcgccagcctgagccaggtgagccccggcaaggagaccgaccagaccgagaccgtgagcgtgcagagcagcgtgctgggcaagggcgtgaagcacagacccccccccatcaagctgcccagcagcagcggcaacagcagcagcggcaactacttcaccccccagcagaccagcagcttcctgaagagccccacccccccccccagcagcaagcccagcagcatccccagaaagagcagcgtggacctgaaccaggtgagcatgctgagccccgccgccctgagccccgccagcagcagccagagaaccaccgccacccaggtgatggccaacagcgccggcctgaacttcatcaacgtggtgggcagcgtgtgcggcgcccaggccctgatgagcggcagcaaccccatgctgggctgcaacaccggcgccatcacccccgccggcatcaacctgagcggcctgctgcccagcggcggcctgctgcccaacgccctgcccagcgccatgcaggccgccagccaggccggcgtgcccttcggcctgaagaacaccagcagcctgagacccctgaacctgctgcagctgcccggcggcagcctgatcttcaacaccctgcagcagcagcagcagcagctgagccagttcaccccccagcagccccagcagcccaccacctgcagcccccagcagcccggcgagcagggcagcgagcagggcagcaccagccaggagcaggccctgagcgcccagcaggccgccgtgatcaacctgaccggcgtgggcagcttcatgcagagccaggccgccgtgctgagccagctgggcagcgccgagaacagacccgagcagagcctgccccagcagagattccagctgagcagcgccttccagcagcagcagcagcagatccagcagctgagattcctgcagcaccagatggccatggccgccgccgccgcccagaccgcccagctgcaccaccacagacacaccggcagccagagcaagagcaagatgaagagaggcacccccaccacccccaagttctag

SEQ ID NO: 81184 - DNA, 2202 bp, synthetic construct
  misc_feature 1..2202: note = Description of Artificial Sequence: Synthetic coding sequence
  source 1..2202: mol_type = other DNA
atgcagcaggccctggagctggccctggacagagccgagtacgtgatcgagagcgccagacagagaccccccaagagaaagtacctgagcagcggcagaaagagcgtgttccagaagctgtacgacctgtacatcgaggagtgcgagaaggagcccgaggtgaagcagaagctgagaagaaacgtgaacctgctggagaagctggtgatgcaggagaccctgagctgcctggtggtgaacctgtaccccggcaacgagggctacagcctgatgctgagaggcaagaacggcagcgacagcgagaccatcagactgccctacgaggagggcgagctgctggagtacctggacgccgaggagctgccccccatcctggtggacctgctggagaagagccaggtgaacatcttccactgcggctgcgtgatcgccgagatcagagactacagacagagcagcaacatgaagagccccggctaccagagcagacacatcctgctgagacccaccatgcagaccctgatctgcgacgtgcacagcatcaccagcgacaaccacaagtggacccaggaggacaagctgctgctggagagccagctgatcctggccaccgccgagcccctgtgcctggaccccagcatcgccgtgacctgcaccgccaacagactgctgtacaacaagcagaagatgaacaccagacccatgaagagatgcttcaagagatacagcagaagcagcctgaacagacagcaggacctgagccactgccccccccccccccagctgagactgctggacttcctgcagaagagaaaggagagaaaggccggccagcactacgacctgaagatcagcaaggccggcaactgcgtggacatgtggaagagaagcccctgcaacctggccatccccagcgaggtggacgtggagaagtacgccaaggtggagaagagcatcaagagcgacgacagccagcccaccgtgtggcccgcccacgacgtgaaggacgactacgtgttcgagtgcgaggccggcacccagtaccagaagaccaagctgaccatcctgcagagcctgggcgaccccctgtactacggcaagatccagccctgcaaggccgacgaggagagcgacagccagatgagccccagccacagcagcaccgacgaccacagcaactggttcatcatcggcagcaagaccgacgccgagagagtggtgaaccagtaccaggagctggtgcagaacgaggccaagtgccccgtgaagatgagccacagcagcagcggcagcgccagcctgagccaggtgagccccggcaaggagaccgaccagaccgagaccgtgagcgtgcagagcagcgtgctgggcaagggcgtgaagcacagacccccccccatcaagctgcccagcagcagcggcaacagcagcagcggcaactacttcaccccccagcagaccagcagcttcctgaagagccccacccccccccccagcagcaagcccagcagcatccccagaaagagcagcgtggacctgaaccaggtgagcatgctgagccccgccgccctgagccccgccagcagcagccagagaaccaccgccacccaggtgatggccaacagcgccggcctgaacttcatcaacgtggtgggcagcgtgtgcggcgcccaggccctgatgagcggcagcaaccccatgctgggctgcaacaccggcgccatcacccccgccggcatcaacctgagcggcctgctgcccagcggcggcctgctgcccaacgccctgcccagcgccatgcaggccgccagccaggccggcgtgcccttcggcctgaagaacaccagcagcctgagacccctgaacctgctgcagctgcccggcggcagcctgatcttcaacaccctgcagcagcagcagcagcagctgagccagttcaccccccagcagccccagcagcccaccacctgcagcccccagcagcccggcgagcagggcagcgagcagggcagcaccagccaggagcaggccctgagcgcccagcaggccgccgtgatcaacctgaccggcgtgggcagcttcatgcagagccaggccgccgccgtggccatcctggccgccagcaacggctacggcagcagcagcagcaccaacagcagcgccaccagcagcagcgcctacagacagcccgtgaagaagtag

SEQ ID NO: 81185 - DNA, 2202 bp, synthetic construct; identical to SEQ ID NO: 81184
  misc_feature 1..2202: note = Description of Artificial Sequence: Synthetic coding sequence
  source 1..2202: mol_type = other DNA

SEQ ID NO: 81186 - DNA, 2202 bp, synthetic construct; identical to SEQ ID NO: 81184
  misc_feature 1..2202: note = Description of Artificial Sequence: Synthetic coding sequence
  source 1..2202: mol_type = other DNA

SEQ ID NO: 81187 - DNA, 2217 bp, synthetic construct
  misc_feature 1..2217: note = Description of Artificial Sequence: Synthetic coding sequence
  source 1..2217: mol_type = other DNA
atgcagcaggccctggagctggccctggacagagccgagtacgtgatcgagagcgccagacagagaccccccaagagaaagtacctgagcagcggcagaaagagcgtgttccagaagctgtacgacctgtacatcgaggagtgcgagaaggagcccgaggtgaagaagctgagaagaaacgtgaacctgctggagaagctggtgatgcaggagaccctgagctgcctggtggtgaacctgtaccccggcaacgagggctacagcctgatgctgagaggcaagaacggcagcgacagcgagaccatcagactgccctacgaggagggcgagctgctggagtacctggacgccgaggagctgccccccatcctggtggacctgctggagaagagccaggtgaacatcttccactgcggctgcgtgatcgccgagatcagagactacagacagagcagcaacatgaagagccccggctaccagagcagacacatcctgctgagacccaccatgcagaccctgatctgcgacgtgcacagcatcaccagcgacaaccacaagtggacccaggaggacaagctgctgctggagagccagctgatcctggccaccgccgagcccctgtgcctggaccccagcatcgccgtgacctgcaccgccaacagactgctgtacaacaagcagaagatgaacaccagacccatgaagagatgcttcaagagatacagcagaagcagcctgaacagacagcaggacctgagccactgccccccccccccccagctgagactgctggacttcctgcagaagagaaaggagagaaaggccggccagcactacgacctgaagatcagcaaggccggcaactgcgtggacatgtggaagagaagcccctgcaacctggccatccccagcgaggtggacgtggagaagtacgccaaggtggagaagagcatcaagagcgacgacagccagcccaccgtgtggcccgcccacgacgtgaaggacgactacgtgttcgagtgcgaggccggcacccagtaccagaagaccaagctgaccatcctgcagagcctgggcgaccccctgtactacggcaagatccagccctgcaaggccgacgaggagagcgacagccagatgagccccagccacagcagcaccgacgaccacagcaactggttcatcatcggcagcaagaccgacgccgagagagtggtgaaccagtaccaggagctggtgcagaacgaggccaagtgccccgtgaagatgagccacagcagcagcggcagcgccagcctgagccaggtgagccccggcaaggagaccgaccagaccgagaccgtgagcgtgcagagcagcgtgctgggcaagggcgtgaagcacagacccccccccatcaagctgcccagcagcagcggcaacagcagcagcggcaactacttcaccccccagcagaccagcagcttcctgaagagccccacccccccccccagcagcaagcccagcagcatccccagaaagagcagcgtggacctgaaccaggtgagcatgctgagccccgccgccctgagccccgccagcagcagccagagaaccaccgccacccaggtgatggccaacagcgccggcctgaacttcatcaacgtggtgggcagcgtgtgcggcgcccaggccctgatgagcggcagcaaccccatgctgggctgcaacaccggcgccatcacccccgccggcatcaacctgagcggcctgctgcccagcggcggcctgctgcccaacgccctgcccagcgccatgcaggccgccagccaggccggcgtgcccttcggcctgaagaacaccagcagcctgagacccctgaacctgctgcagctgcccggcggcagcctgatcttcaacaccctgcagcagcagcagcagcagctgagccagttcaccccccagcagccccagcagcccaccacctgcagcccccagcagcccggcgagcagggcagcgagcagggcagcaccagccaggagcaggccctgagcgcccagcaggccgccgtgatcaacctgaccggcgtgggcagcttcatgcagagccaggccgccgccgtggccatcctggccgccagcaacggctacggcagcagcagcagcaccaacagcagcgccaccagcagcagcgcctacagacagcccgacaccagagccctgaaccagaagaactag

SEQ ID NO: 81188 - DNA, 1497 bp, synthetic construct
  misc_feature 1..1497: note = Description of Artificial Sequence: Synthetic coding sequence
  source 1..1497: mol_type = other DNA
atgtacgtgatcgagagcgccagacagagaccccccaagagaaagtacctgagcagcggcagaaagagcgtgttccagaagctgtacgacctgtacatcgaggagtgcgagaaggagcccgaggtgaagaagctgagaagaaacgtgaacctgctggagaagctggtgatgcaggagaccctgagctgcctggtggtgaacctgtaccccggcaacgagggctacagcctgatgctgagaggcaagaacggcagcgacagcgagaccatcagactgccctacgaggagggcgagctgctggagtacctggacgccgaggagctgccccccatcctggtggacctgctggagaagagccaggtgaacatcttccactgcggctgcgtgatcgccgagatcagagactacagacagagcagcaacatgaagagccccggctaccagagcagacacatcctgctgagacccaccatgcagaccctgatctgcgacgtgcacagcatcaccagcgacaaccacaagtggacccaggaggacaagctgctgctggagagccagctgatcctggccaccgccgagcccctgtgcctggaccccagcatcgccgtgacctgcaccgccaacagactgctgtacaacaagcagaagatgaacaccagacccatgaagagatgcttcaagagatacagcagaagcagcctgaacagacagcaggacctgagccactgccccccccccccccagctgagactgctggacttcctgcagaagagaaaggagagaaaggccggccagcactacgacctgaagatcagcaaggccggcaactgcgtggacatgtggaagagaagcccctgcaacctggccatccccagcgaggtggacgacgtgaaggacgactacgtgttcgagtgcgaggccggcacccagtaccagaagaccaagctgaccatcctgcagagcctgggcgaccccctgtactacggcaagatccagccctgcaaggccgacgaggagagcgacagccagatgagccccagccacagcagcaccgacgaccacagcaactggttcatcatcggcagcaagaccgacgccgagagagtggtgaaccagtaccaggagctggtgcagaacgaggccaagtgccccgtgaagatgagccacagcagcagcggcagcgccagcctgagccaggtgagccccggcaaggagaccgaccagaccgagaccgtgagcgtgcagagcagcgtgctgggcaagggcgtgaagcacagacccccccccatcaagctgcccagcagcagcggcaacagcagcagcggcaactacttcaccccccagcagaccagcagcttcctgaagagccccacccccccccccagcagcaagcccagcagcatccccagaaagagcagcgtggacctgaaccaggtgagcatgctgagccccgccgccctgagccccgccagcagcagccagagacacgagagctag

SEQ ID NO: 81189 - DNA, 678 bp, synthetic construct
  misc_feature 1..678: note = Description of Artificial Sequence: Synthetic coding sequence
  source 1..678: mol_type = other DNA
atgctgctgaccctggccggcggcgccctgttcttccccggcctgttcgccctgtgcacctgggccctgagaagaagccagcccggctggagcagaaccgactgcgtgatgatcagcaccagactggtgagcagcgtgcacgccgtgctggccaccggcagcggcatcgtgatcatcagaagctgcgacgacgtgatcaccggcagacactggctggccagagagtacgtgtggttcctgatcccctacatgatctacgacagctacgccatgtacctgtgcgagtggtgcagaaccagagaccagaacagagcccccagcctgaccctgagaaacttcctgagcagaaacagactgatgatcacccaccacgccgtgatcctgttcgtgctggtgcccgtggcccagctgaagcagcagcacaccctgctgtacaaggtgaacggcatcctgaccctggccaccttcctgagctgcagaatcctgctgttccccttcatgtactggagctacggcagacagcagggcctgagcctgctgcaggtgcccttcagcatccccttctactgcaacgtggccaacgccttcctggtggccccccagatctactggttctgcctgctgtgcagaaaggccgtgagactgttcgacaccccccaggccaagaaggacggctag

SEQ ID NO: 81190 - DNA, 774 bp, synthetic construct
  misc_feature 1..774: note = Description of Artificial Sequence: Synthetic coding sequence
  source 1..774: mol_type = other DNA
atgctgctgaccctggccggcggcgccctgttcttccccggcctgttcgccctgtgcacctgggccctgagaagaagccagcccggctggagcagaaccgactgcgtgatgatcagcaccagactggtgagcagcgtgcacgccgtgctggccaccggcagcggcatcgtgatcatcagaagctgcgacgacgtgatcaccggcagacactggctggccagagagtacgtgtggttcctgatcccctacatgatctacgacagctacgccatgtacctgtgcgagtggtgcagaaccagagaccagaacagagcccccagcctgaccctgagaaacttcctgagcagaaacagactgatgatcacccaccacgccgtgatcctgttcgtgctggtgcccgtggcccagagactgagaggcgacctgggcgacttcttcgtgggctgcatcttcaccgccgagctgagcacccccttcgtgagcctgggcagagtgctgatccagctgaagcagcagcacaccctgctgtacaaggtgaacggcatcctgaccctggccaccttcctgagctgcagaatcctgctgttccccttcatgtactggagctacggcagacagcagggcctgagcctgctgcaggtgcccttcagcatccccttctactgcaacgtggccaacgccttcctggtggccccccagatctactggttctgcctgctgtgcagaaaggccgtgagactgttcgacaccccccaggccaagaaggacggctag

SEQ ID NO: 81191 - DNA, 993 bp, synthetic construct
  misc_feature 1..993: note = Description of Artificial Sequence: Synthetic coding sequence
  source 1..993: mol_type = other DNA
atgatcagcaccagatacagaagaagaagagacgcccccagaggccccggcagatgccccccccaccccaccagacccagaggccccggcagaaagagaggcgccgccggcagccccggcgccgcccccagcgccagcagaagacccgagttccccaagcccctgagagtgctgccctggagagagagaggcagaggcggcagagagtggcccatgagcctgagaagccccctgcccaccagcgcctgcggctggggcgagagcggcagaagacccggcagagccccctgcggccccagaaccggcctgagcgccagagccgtgctgagcgccagagccagactggtgagcagcgtgcacgccgtgctggccaccggcagcggcatcgtgatcatcagaagctgcgacgacgtgatcaccggcagacactggctggccagagagtacgtgtggttcctgatcccctacatgatctacgacagctacgccatgtacctgtgcgagtggtgcagaaccagagaccagaacagagcccccagcctgaccctgagaaacttcctgagcagaaacagactgatgatcacccaccacgccgtgatcctgttcgtgctggtgcccgtggcccagagactgagaggcgacctgggcgacttcttcgtgggctgcatcttcaccgccgagctgagcacccccttcgtgagcctgggcagagtgctgatccagctgaagcagcagcacaccctgctgtacaaggtgaacggcatcctgaccctggccaccttcctgagctgcagaatcctgctgttccccttcatgtactggagctacggcagacagcagggcctgagcctgctgcaggtgcccttcagcatccccttctactgcaacgtggccaacgccttcctggtggccccccagatctactggttctgcctgctgtgcagaaaggccgtgagactgttcgacaccccccaggccaagaaggacggctag

SEQ ID NO: 81192 - DNA, 741 bp, synthetic construct
  misc_feature 1..741: note = Description of Artificial Sequence: Synthetic coding sequence
  source 1..741: mol_type = other DNA
atggaggcccccgaggccgccgagggcggcctgcagagaggcgccagaagagccgccggcgccagaagccagggcgccctgcccagcggcgaggtgcaccacggcggcgtgaagctgggcatgagaagcatccccatcgccaccgcctgcaccatctaccacaagttcttctgcgagaccaacctggacgcctacgacccctacctgatcgccatgagcagcatctacctggccggcaaggtggaggagcagcacctgagaaccagagacatcatcaacgtgagcaacagatacttcaaccccagcggcgagcccctggagctggacagcagattctgggagctgagagacagcatcgtgcagtgcgagctgctgatgctgagagtgctgagattccaggtgagcttccagcacccccacaagtacctgctgcactacctggtgagcctgcagaactggctgaacagacacagctggcagagaacccccgtggccgtgaccgcctgggccctgctgagagacagctaccacggcgccctgtgcctgagattccaggcccagcacatcgccgtggccgtgctgtacctggccctgcaggtgtacggcgtggaggtgcccgccgaggtggaggccgagaagccctggtggcaggtgttcaacgacgacctgaccaagcccatcatcgacaacatcgtgagcgacctgatccagatctacaccatggacaccgagatcccctag

SEQ ID NO: 81193 - DNA, 585 bp, synthetic construct
  misc_feature 1..585: note = Description of Artificial Sequence: Synthetic coding sequence
  source 1..585: mol_type = other DNA
atggaggccggcgtgaagctgggcatgagaagcatccccatcgccaccgcctgcaccatctaccacaagttcttctgcgagaccaacctggacgcctacgacccctacctgatcgccatgagcagcatctacctggccggcaaggtggaggagcagcacctgagaaccagagacatcatcaacgtgagcaacagatacttcaaccccagcggcgagcccctggagctggacagcagattctgggagctgagagacagcatcgtgcagtgcgagctgctgatgctgagagtgctgagattccaggtgagcttccagcacccccacaagtacctgctgcactacctggtgagcctgcagaactggctgaacagacacagctggcagagaacccccgtggccgtgaccgcctgggccctgctgagagacagctaccacggcgccctgtgcctgagattccaggcccagcacatcgccgtggccgtgctgtacctggccctgcaggtgtacggcgtggaggtgcccgccgaggtggaggccgagaagccctggtggcagatctacaccatggacaccgagatcccctag

SEQ ID NO: 81194 - DNA, 681 bp, synthetic construct
  misc_feature 1..681: note = Description of Artificial Sequence: Synthetic coding sequence
  source 1..681: mol_type = other DNA
atggaggcccccgaggccgccgagggcggcctgcagagaggcgccagaagagccgccggcgccagaagccagggcgccctgcccagcggcgaggtgcaccacggcggcgtgaagctgggcatgagaagcatccccatcgccaccgcctgcaccatctaccacaagttcttctgcgagaccaacctggacgcctacgacccctacctgatcgccatgagcagcatctacctggccggcaaggtggaggagcagcacctgagaaccagagacatcatcaacgtgagcaacagatacttcaaccccagcggcgagcccctggagctggacagcagattctgggagctgagagacagcatcgtgcagtgcgagctgctgatgctgagagtgctgagattccaggtgagcttccagcacccccacaagtacctgctgcactacctggtgagcctgcagaactggctgaacagacacagctggcagagaacccccgtggccgtgaccgcctgggccctgctgagagacagctaccacggcgccctgtgcctgagattccaggcccagcacatcgccgtggccgtgctgtacctggccctgcaggtgtacggcgtggaggtgcccgccgaggtggaggccgagaagccctggtggcagatctacaccatggacaccgagatcccctag

SEQ ID NO: 81195 - DNA, 645 bp, synthetic construct
  misc_feature 1..645: note = Description of Artificial Sequence: Synthetic coding sequence
  source 1..645: mol_type = other DNA
atggaggccggcgtgaagctgggcatgagaagcatccccatcgccaccgcctgcaccatctaccacaagttcttctgcgagaccaacctggacgcctacgacccctacctgatcgccatgagcagcatctacctggccggcaaggtggaggagcagcacctgagaaccagagacatcatcaacgtgagcaacagatacttcaaccccagcggcgagcccctggagctggacagcagattctgggagctgagagacagcatcgtgcagtgcgagctgctgatgctgagagtgctgagattccaggtgagcttccagcacccccacaagtacctgctgcactacctggtgagcctgcagaactggctgaacagacacagctggcagagaacccccgtggccgtgaccgcctgggccctgctgagagacagctaccacggcgccctgtgcctgagattccaggcccagcacatcgccgtggccgtgctgtacctggccctgcaggtgtacggcgtggaggtgcccgccgaggtggaggccgagaagccctggtggcaggtgttcaacgacgacctgaccaagcccatcatcgacaacatcgtgagcgacctgatccagatctacaccatggacaccgagatcccctag

SEQ ID NO: 81196 - DNA, 741 bp, synthetic construct
  misc_feature 1..741: note = Description of Artificial Sequence: Synthetic coding sequence
  source 1..741: mol_type = other DNA
atggaggcccccgagggcggcggcggccccgccgccagaggccccgagggccccgcccccgaggccagagtgcacttcagagtggccagattcatcatggaggccggcgtgaagctgggcatgagaagcatccccatcgccaccgcctgcaccatctaccacaagttcttctgcgagaccaacctggacgcctacgacccctacctgatcgccatgagcagcatctacctggccggcaaggtggaggagcagcacctgagaaccagagacatcatcaacgtgagcaacagatacttcaaccccagcggcgagcccctggagctggacagcagattctgggagctgagagacagcatcgtgcagtgcgagctgctgatgctgagagtgctgagattccaggtgagcttccagcacccccacaagtacctgctgcactacctggtgagcctgcagaactggctgaacagacacagctggcagagaacccccgtggccgtgaccgcctgggccctgctgagagacagctaccacggcgccctgtgcctgagattccaggcccagcacatcgccgtggccgtgctgtacctggccctgcaggtgtacggcgtggaggtgcccgccgaggtggaggccgagaagccctggtggcaggtgttcaacgacgacctgaccaagcccatcatcgacaacatcgtgagcgacctgatccagatctacaccatggacaccgagatcccctag

SEQ ID NO: 81197 - DNA, 429 bp, synthetic construct
  misc_feature 1..429: note = Description of Artificial Sequence: Synthetic coding sequence
  source 1..429: mol_type = other DNA
atggaggccggcgtgaagctgggcatgagaagcatccccatcgccaccgcctgcaccatctaccacaagttcttctgcgagaccaacctggacgcctacgacccctacctgatcgccatgagcagcatctacctggccggcaaggtggaggagcagcacctgagaaccagagacatcatcaacgtgagcaacagattcatcccctggacccagagaagccccaaggtgctggcccaggcctgccccaagagaagccccggctggagcgccgcctggggccactgccaccacgtggccatgaccgccggcccccacagaaccagctgggaggactggctgtgctgctggagaagagccggcgagggcaacggcatgctgcccctgtgccagagcctggaggtggccgtgcaggtgatggtgggcgcctag

SEQ ID NO: 81198 - DNA, 285 bp, synthetic construct
  misc_feature 1..285: note = Description of Artificial Sequence: Synthetic coding sequence
  source 1..285: mol_type = other DNA
tgagccggcaaggtggaggagcagcacctgagaaccagagacatcatcaacgtgagcaacagatacttcaaccccagcggcgagcccctggagctggacagcagattctgggagctgagagacagcatcgtgcagtgcgagctgctgatgctgagagtgctgagattccaggtgagcttccagcacccccacaaggtgttcaacgacgacctgaccaagcccatcatcgacaacatcgtgagcgacctgatccagatctacaccatggacaccgagatcccctag

SEQ ID NO: 81199 - DNA, 366 bp, synthetic construct
  misc_feature 1..366: note = Description of Artificial Sequence: Synthetic coding sequence
  source 1..366: mol_type = other DNA
tgaagatacttcaaccccagcggcgagcccctggagctggacagcagattctgggagctgagagacagcatcgtgcagtgcgagctgctgatgctgagagtgctgagattccaggtgagcttccagcacccccacaagaactggctgaacagacacagctggcagagaacccccgtggccgtgaccgcctgggccctgctgagagacagctaccacggcgccctgtgcctgagattccaggcccagcacatcgccgtggccgtgctgtacctggccctgcaggtgtacggcgtggaggtgcccgccgaggtggaggccgagaagccctggtggcagatctacaccatggacaccgagatcccctag

SEQ ID NO: 81200 - DNA, 3207 bp, synthetic construct
  misc_feature 1..3207: note = Description of Artificial Sequence: Synthetic coding sequence
  source 1..3207: mol_type = other DNA
atgctggtgggcagccagagcttcagccccggcggccccaacggcatcatcagaagccagagcttcgccggcttcagcggcctgcaggagagaagaagcagatgcaacagcttcatcgagaacagcagcgccctgaagaagccccaggccaagctgaagaagatgcacaacctgggccacaagaacaacaacccccccaaggagccccagcccaagagagtggaggaggtgtacagagccctgaagaacggcctggacgagtacctggaggtgcaccagaccgagctggacaagctgaccgcccagctgaaggacatgaagagaaacagcagactgggcgtgctgtacgacctggacaagcagatcaagaccatcgagagatacatgagaagactggagttccacatcagcaaggtggacgagctgtacgaggcctactgcatccagagaagactgcaggacggcgccagcaagatgaagcaggccttcgccaccagccccgccagcaaggccgccagagagagcctgaccgagatcaacagaagcttcaaggagtacaccgagaacatgtgcaccatcgaggtggagctggagaacctgctgggcgagttcagcatcaagatgaagggcctggccggcttcgccagactgtgccccggcgaccagtacgagatcttcatgaagtacggcagacagagatggaagctgaagggcaagatcgaggtgaacggcaagcagagctgggacggcgaggagaccgtgttcctgcccctgatcgtgggcttcatcagcatcaaggtgaccgagctgaagggcctggccacccacatcctggtgggcagcgtgacctgcgagaccaaggagctgttcgccgccagaccccaggtggtggccgtggacatcaacgacctgggcaccatcaagctgaacctggagatcacctggtaccccttcgacgtggaggacatgaccgccagcagcggcgccggcaacaaggccgccgccctgcagagaagaatgagcatgtacagccagggcacccccgagacccccaccttcaaggaccacagcttcttcagatggctgcaccccagccccgacaagcccagaagactgagcgtgctgagcgccctgcaggacaccttcttcgccaagctgcacagaagcagaagcttcagcgacctgcccagcctgagacccagccccaaggccgtgctggagctgtacagcaacctgcccgacgacatcttcgagaacggcaaggccgccgaggagaagatgcccctgagcctgagcttcagcgacctgcccaacggcgactgcgccctgaccagccacagcaccggcagccccagcaacagcaccaaccccgagatcaccatcacccccgccgagttcaacctgagcagcctggccagccagaacgagggcatggacgacaccagcagcgccagcagcagaaacagcctgggcgagggccaggagcccaagagccacctgaaggaggaggaccccgaggagcccagaaagcccgccagcgcccccagcgaggcctgcagaagacagagcagcggcgccggcgccgagcacctgttcctggagaacgacgtggccgaggccctgctgcaggagagcgaggaggccagcgagctgaagcccgtggagctggacaccagcgagggcaacatcaccaagcagctggtgaagagactgaccagcgccgaggtgcccatggccaccgacagactgctgagcgagggcagcgtgggcggcgagagcgagggctgcagaagcttcctggacggcagcctggaggacgccttcaacggcctgctgctggccctggagccccacaaggagcagtacaaggagttccaggacctgaaccaggaggtgatgaacctggacgacatcctgaagtgcaagcccgccgtgagcagaagcagaagcagcagcctgagcctgaccgtggagagcgccctggagagcttcgacttcctgaacaccagcgacttcgacgaggaggaggacggcgacgaggtgtgcaacgtgggcggcggcgccgacagcgtgttcagcgacaccgagaccgagaagcacagctacagaagcgtgcaccccgaggccagaggccacctgagcgaggccctgaccgaggacaccggcgtgggcaccagcgtggccggcagccccctgcccctgaccaccggcaacgagagcctggacatcaccatcgtgagacacctgcagtactgcacccagctggtgcagcagatcgtgttcagcagcaagacccccttcgtggccagaagcctgctggagaagctgagcagacagatccaggtgatggagaagctggccgccgtgagcgacgagaacatcggcaacatcagcagcgtggtggaggccatccccgagttccacaagaagctgagcctgctgagcttctggaccaagtgctgcagccccgtgggcgtgtaccacagccccgccgacagagtgatgaagcagctggaggccagcttcgccagaaccgtgaacaaggagtaccccggcctggccgaccccgtgttcagaaccctggtgagccagatcctggacagagccgagcccctgctgagcagcagcctgagcagcgaggtggtgaccgtgttccagtactacagctacttcaccagccacggcgtgagcgacctggagagctacctgagccagctggccagacaggtgagcatggtgcagaccctgcagagcctgagagacgagaagctgctgcagaccatgagcgacctggcccccagcaacctgctggcccagcaggaggtgctgagaaccctggccctgctgctgaccagagaggacaacgaggtgagcgaggccgtgaccctgtacctggccgccgccagcaagaaccagcacttcagagagaaggccctgctgtactactgcgaggccctgaccaagaccaacctgcagctgcagaaggccgcctgcctggccctgaagatcctggaggccaccgagagcatcaagatgctggtgaccctgtgccagagcgacaccgaggagatcagaaacgtggccagcgagaccctgctgagcctgggcgaggacggcagactggcctacgagcagctggacaagttccccagagactgcgtgaaggtgggcggcagacacggcaccgaggtggccaccgccttctag

SEQ ID NO: 81201 - DNA, 1776 bp, synthetic construct
  misc_feature 1..1776: note = Description of Artificial Sequence: Synthetic coding sequence
  source 1..1776: mol_type = other DNA
atgctggtgggcagccagagcttcagccccggcggccccaacggcatcatcagaagccagagcttcgccggcttcagcggcctgcaggagagaagaagcagatgcaacagcttcatcgagaacagcagcgccctgaagaagccccaggccaagctgaagaagatgcacaacctgggccacaagaacaacaacccccccaaggagccccagcccaagagagtggaggaggtgtacagagccctgaagaacggcctggacgagtacctggaggtgcaccagaccgagctggacaagctgaccgcccagctgaaggacatgaagagaaacagcagactgggcgtgctgtacgacctggacaagcagatcaagaccatcgagagatacatgagaagactggagttccacatcagcaaggtggacgagctgtacgaggcctactgcatccagagaagactgcaggacggcgccagcaagatgaagcaggccttcgccaccagccccgccagcaaggccgccagagagagcctgaccgagatcaacagaagcttcaaggagtacaccgagaacatgtgcaccatcgaggtggagctggagaacctgctgggcgagttcagcatcaagatgaagggcctggccggcttcgccagactgtgccccggcgaccagtacgagatcttcatgaagtacggcagacagagatggaagctgaagggcaagatcgaggtgaacggcaagcagagctgggacggcgaggagaccgtgttcctgcccctgatcgtgggcttcatcagcatcaaggtgaccgagctgaagggcctggccacccacatcctggtgggcagcgtgacctgcgagaccaaggagctgttcgccgccagaccccaggtggtggccgtggacatcaacgacctgggcaccatcaagctgaacctggagatcacctggtaccccttcgacgtggaggacatgaccgccagcagcggcgccggcaacaaggccgccgccctgcagagaagaatgagcatgtacagccagggcacccccgagacccccaccttcaaggaccacagcttcttcagcaacctgcccgacgacatcttcgagaacggcaaggccgccgaggagaagatgcccctgagcctgagcttcagcgacctgcccaacggcgactgcgccctgaccagccacagcaccggcagccccagcaacagcaccaaccccgagatcaccatcacccccgccgagttcaacctgagcagcctggccagccagaacgagggcatggacgacaccagcagcgccagcagcagaaacagcctgggcgagggccaggagcccaagagccacctgaaggaggaggaccccgaggagcccagaaagcccgccagcgcccccagcgaggcctgcagaagacagagcagcggcgccggcgccgagcacctgttcctggagaacgacgtggccgaggccctgctgcaggagagcgaggaggccagcgagctgaagcccgtggagctggacaccagcgagggcaacatcaccaagcagctggtgaagagactgaccagcgccgaggtgcccatggccaccgacagactgctgagcgagggcagcgtgggcggcgagagcgagggctgcagaagcttcctggacggcagcctggaggacgccttcaacggcctgctgctggccctggagccccacaaggagcagtacaaggagttccaggacctgaaccaggaggtgatgaacctggacgacatcctgaagaagtag

SEQ ID NO: 81202 - DNA, 1944 bp, synthetic construct
  misc_feature 1..1944: note = Description of Artificial Sequence: Synthetic coding sequence
  source 1..1944: mol_type = other DNA
atggtgctgcccagcagactgcactggatcagaaacagaccctggagagacagaatcagaagaagacagctgaacagactgcccaccagactgcccgagatcatgctggtgggcagccagagcttcagccccggcggccccaacggcatcatcagaagccagagcttcgccggcttcagcggcctgcaggagagaagaagcagatgcaacagcttcatcgagaacagcagcgccctgaagaagccccaggccaagctgaagaagatgcacaacctgggccacaagaacaacaacccccccaaggagccccagcccaagagagtggaggaggtgtacagagccctgaagaacggcctggacgagtacctggaggtgcaccagaccgagctggacaagctgaccgcccagctgaaggacatgaagagaaacagcagactgggcgtgctgtacgacctggacaagcagatcaagaccatcgagagatacatgagaagactggagttccacatcagcaaggtggacgagctgtacgaggcctactgcatccagagaagactgcaggacggcgccagcaagatgaagcaggccttcgccaccagccccgccagcaaggccgccagagagagcctgaccgagatcaacagaagcttcaaggagtacaccgagaacatgtgcaccatcgaggtggagctggagaacctgctgggcgagttcagcatcaagatgaagggcctggccggcttcgccagactgtgccccggcgaccagtacgagatcttcatgaagtacggcagacagagatggaagctgaagggcaagatcgaggtgaacggcaagcagagctgggacggcgaggagaccgtgttcctgcccctgatcgtgggcttcatcagcatcaaggtgaccgagctgaagggcctggccacccacatcctggtgggcagcgtgacctgcgagaccaaggagctgttcgccgccagaccccaggtggtggccgtggacatcaacgacctgggcaccatcaagctgaacctggagatcacctggtaccccttcgacgtggaggacatgaccgccagcagcggcgccggcaacaaggccgccgccctgcagagaagaatgagcatgtacagccagggcacccccgagacccccaccttcaaggaccacagcttcttcagcaacctgcccgacgacatcttcgagaacggcaaggccgccgaggagaagatgcccctgagcctgagcttcagcgacctgcccaacggcgactgcgccctgaccagccacagcaccggcagccccagcaacagcaccaaccccgagatcaccatcacccccgccgagttcaacctgagcagcctggccagccagaacgagggcatggacgacaccagcagcgccagcagcagaaacagcctgggcgagggccaggagcccaagagccacctgaaggaggaggaccccgaggagcccagaaagcccgccagcgcccccagcgaggcctgcagaagacagagcagcggcgccggcgccgagcacctgttcctggagaacgacgtggccgaggccctgctgcaggagagcgaggaggccagcgagctgaagcccgtggagctggacaccagcgagggcaacatcaccaagcagctggtgaagagactgaccagcgccgaggtgcccatggccaccgacagactgctgagcgagggcagcgtgggcggcgagagcgagggctgcagaagcttcctggacggcagcctggaggacgccttcaacggcctgctgctggccctggagccccacaaggagcagtacaaggagttccaggacctgaaccaggaggtgatgaacctggacgacatcctgaaggacgccaagcacctggacgaccagaagctgaacggcgccgccagctggaccgagatcaccgagggcgagtag

SEQ ID NO: 81203 - DNA, 3144 bp, synthetic construct
  misc_feature 1..3144: note = Description of Artificial Sequence: Synthetic coding sequence
  source 1..3144: mol_type = other DNA
atgcagttcttcgacgccgaggagctgctggtggacgaggaggacgacgtgttcggcgagggcctgcccaccagactgcccgagatcatgctggtgggcagccagagcttcagccccggcggccccaacggcatcatcagaagccagagcttcgccggcttcagcggcctgcaggagagaagaagcagatgcaacagcttcatcgagaacagcagcgccctgaagaagccccaggccaagctgaagaagatgcacaacctgggccacaagaacaacaacccccccaaggagccccagcccaagagagtggaggaggtgtacagagccctgaagaacggcctggacgagtacctggaggtgcaccagaccgagctggacaagctgaccgcccagctgaaggacatgaagagaaacagcagactgggcgtgctgtacgacctggacaagcagatcaagaccatcgagagatacatgagaagactggagttccacatcagcaaggtggacgagctgtacgaggcctactgcatccagagaagactgcaggacggcgccagcaagatgaagcaggccttcgccaccagccccgccagcaaggccgccagagagagcctgaccgagatcaacagaagcttcaaggagtacaccgagaacatgtgcaccatcgaggtggagctggagaacctgctgggcgagttcagcatcaagatgaagggcctggccggcttcgccagactgtgccccggcgaccagtacgagatcttcatgaagtacggcagacagagatggaagctgaagggcaagatcgaggtgaacggcaagcagagctgggacggcgaggagaccgtgttcctgcccctgatcgtgggcttcatcagcatcaaggtgaccgagctgaagggcctggccacccacatcctggtgggcagcgtgacctgcgagaccaaggagctgttcgccgccagaccccaggtggtggccgtggacatcaacgacctgggcaccatcaagctgaacctggagatcacctggtaccccttcgacgtggaggacatgaccgccagcagcggcgccggcaacaaggccgccgccctgcagagaagaatgagcatgtacagccagggcacccccgagacccccaccttcaaggaccacagcttcttcagcaacctgcccgacgacatcttcgagaacggcaaggccgccgaggagaagatgcccctgagcctgagcttcagcgacctgcccaacggcgactgcgccctgaccagccacagcaccggcagccccagcaacagcaccaaccccgagatcaccatcacccccgccgagttcaacctgagcagcctggccagccagaacgagggcatggacgacaccagcagcgccagcagcagaaacagcctgggcgagggccaggagcccaagagccacctgaaggaggaggaccccgaggagcccagaaagcccgccagcgcccccagcgaggcctgcagaagacagagcagcggcgccggcgccgagcacctgttcctggagaacgacgtggccgaggccctgctgcaggagagcgaggaggccagcgagctgaagcccgtggagctggacaccagcgagggcaacatcaccaagcagctggtgaagagactgaccagcgccgaggtgcccatggccaccgacagactgctgagcgagggcagcgtgggcggcgagagcgagggctgcagaagcttcctggacggcagcctggaggacgccttcaacggcctgctgctggccctggagccccacaaggagcagtacaaggagttccaggacctgaaccaggaggtgatgaacctggacgacatcctgaagtgcaagcccgccgtgagcagaagcagaagcagcagcctgagcctgaccgtggagagcgccctggagagcttcgacttcctgaacaccagcgacttcgacgaggaggaggacggcgacgaggtgtgcaacgtgggcggcggcgccgacagcgtgttcagcgacaccgagaccgagaagcacagctacagaagcgtgcaccccgaggccagaggccacctgagcgaggccctgaccgaggacaccggcgtgggcaccagcgtggccggcagccccctgcccctgaccaccggcaacgagagcctggacatcaccatcgtgagacacctgcagtactgcacccagctggtgcagcagatcgtgttcagcagcaagacccccttcgtggccagaagcctgctggagaagctgagcagacagatccaggtgatggagaagctggccgccgtgagcgacgagaacatcggcaacatcagcagcgtggtggaggccatccccgagttccacaagaagctgagcctgctgagcttctggaccaagtgctgcagccccgtgggcgtgtaccacagccccgccgacagagtgatgaagcagctggaggccagcttcgccagaaccgtgaacaaggagtaccccggcctggccgaccccgtgttcagaaccctggtgagccagatcctggacagagccgagcccctgctgagcagcagcctgagcagcgaggtggtgaccgtgttccagtactacagctacttcaccagccacggcgtgagcgacctggagagctacctgagccagctggccagacaggtgagcatggtgcagaccctgcagagcctgagagacgagaagctgctgcagaccatgagcgacctggcccccagcaacctgctggcccagcaggaggtgctgagaaccctggccctgctgctgaccagagaggacaacgaggtgagcgaggccgtgaccctgtacctggccgccgccagcaagaaccagcacttcagagagaaggccctgctgtactactgcgaggccctgaccaagaccaacctgcagctgcagaaggccgcctgcctggccctgaagatcctggaggccaccgagagcatcaagatgctggtgaccctgtgccagagcgacaccgaggagatcagaaacgtggccagcgagaccctgctgagcctgggcgaggacggcagactggcctacgagcagctggacaagttccccagagactgcgtgaaggtgggcggcagacacggcaccgaggtggccaccgccttctag

SEQ ID NO: 81204 - DNA, 1842 bp, synthetic construct
  misc_feature 1..1842: note = Description of Artificial Sequence: Synthetic coding sequence
  source 1..1842: mol_type = other DNA
atgctggtgggcagccagagcttcagccccggcggccccaacggcatcatcagaagccagagcttcgccggcttcagcggcctgcaggagagaagaagcagatgcaacagcttcatcgagaacagcagcgccctgaagaagccccaggccaagctgaagaagatgcacaacctgggccacaagaacaacaacccccccaaggagccccagcccaagagagtggaggaggtgtacagagccctgaagaacggcctggacgagtacctggaggtgcaccagaccgagctggacaagctgaccgcccagctgaaggacatgaagagaaacagcagactgggcgtgctgtacgacctggacaagcagatcaagaccatcgagagatacatgagaagactggagttccacatcagcaaggtggacgagctgtacgaggcctactgcatccagagaagactgcaggacggcgccagcaagatgaagcaggccttcgccaccagccccgccagcaaggccgccagagagagcctgaccgagatcaacagaagcttcaaggagtacaccgagaacatgtgcaccatcgaggtggagctggagaacctgctgggcgagttcagcatcaagatgaagggcctggccggcttcgccagactgtgccccggcgaccagtacgagatcttcatgaagtacggcagacagagatggaagctgaagggcaagatcgaggtgaacggcaagcagagctgggacggcgaggagaccgtgttcctgcccctgatcgtgggcttcatcagcatcaaggtgaccgagctgaagggcctggccacccacatcctggtgggcagcgtgacctgcgagaccaaggagctgttcgccgccagaccccaggtggtggccgtggacatcaacgacctgggcaccatcaagctgaacctggagatcacctggtaccccttcgacgtggaggacatgaccgccagcagcggcgccggcaacaaggccgccgccctgcagagaagaatgagcatgtacagccagggcacccccgagacccccaccttcaaggaccacagcttcttcagcaacctgcccgacgacatcttcgagaacggcaaggccgccgaggagaagatgcccctgagcctgagcttcagcgacctgcccaacggcgactgcgccctgaccagccacagcaccggcagccccagcaacagcaccaaccccgagatcaccatcacccccgccgagttcaacctgagcagcctggccagccagaacgagggcatggacgacaccagcagcgccagcagcagaaacagcctgggcgagggccaggagcccaagagccacctgaaggaggaggaccccgaggagcccagaaagcccgccagcgcccccagcgaggcctgcagaagacagagcagcggcgccggcgccgagcacctgttcctggagaacgacgtggccgaggccctgctgcaggagagcgaggaggccagcgagctgaagcccgtggagctggacaccagcgagggcaacatcaccaagcagctggtgaagagactgaccagcgccgaggtgcccatggccaccgacagactgctgagcgagggcagcgtgggcggcgagagcgagggctgcagaagcttcctggacggcagcctggaggacgccttcaacggcctgctgctggccctggagccccacaaggagcagtacaaggagttccaggacctgaaccaggaggtgatgaacctggacgacatcctgaaggacgccaagcacctggacgaccagaagctgaacggcgccgccagctggaccgagatcaccgagggcgagtag

SEQ ID NO: 81205 - DNA, 2673 bp, synthetic construct
  misc_feature 1..2673: note = Description of Artificial Sequence: Synthetic coding sequence
  source 1..2673: mol_type = other DNA
atgagcgccaacaacagcccccccagcgcccagaagagcgtgctgcccaccgccatccccgccgtgctgcccgccgccagcccctgcagcagccccaagaccggcctgagcgccagactgagcaacggcagcttcagcgcccccagcctgaccaacagcagaggcagcgtgcacaccgtgagcttcctgctgcagatcggcctgaccagagagagcgtgaccatcgaggcccaggagctgagcctgagcgccgtgaaggacctggtgtgcagcatcgtgtaccagaagttccccgagtgcggcttcttcggcatgtacgacaagatcctgctgttcagacacgacatgaacagcgagaacatcctgcagctgatcaccagcgccgacgagatccacgagggcgacctggtggaggtggtgctgagcgccctggccaccgtggaggacttccagatcagaccccacaccctgtacgtgcacagctacaaggcccccaccttctgcgactactgcggcgagatgctgtggggcctggtgagacagggcctgaagtgcgagggctgcggcctgaactaccacaagagatgcgccttcaagatccccaacaactgcagcggcgtgagaaagagaagactgagcaacgtgagcctgcccggccccggcctgagcgtgcccagacccctgcagcccgagtacgtggccctgcccagcgaggagagccacgtgcaccaggagcccagcaagagaatccccagctggagcggcagacccatctggatggagaagatggtgatgtgcagagtgaaggtgccccacaccttcgccgtgcacagctacaccagacccaccatctgccagtactgcaagagactgctgaagggcctgttcagacagggcatgcagtgcaaggactgcaagttcaactgccacaagagatgcgccagcaaggtgcccagagactgcctgggcgaggtgaccttcaacggcgagcccagcagcctgggcaccgacaccgacatccccatggacatcgacaacaacgacatcaacagcgacagcagcagaggcctggacgacaccgaggagcccagcccccccgaggacaagatgttcttcctggaccccagcgacctggacgtggagagagacgaggaggccgtgaagaccatcagccccagcaccagcaacaacatccccctgatgagagtggtgcagagcatcaagcacaccaagagaaagagcagcaccatggtgaaggagggctggatggtgcactacaccagcagagacaacctgagaaagagacactactggagactggacagcaagtgcctgaccctgttccagaacgagagcggcagcaagtactacaaggagatccccctgagcgagatcctgagaatcagcagccccagagacttcaccaacatcagccagggcagcaacccccactgcttcgagatcatcaccgacaccatggtgtacttcgtgggcgagaacaacggcgacagcagccacaaccccgtgctggccgccaccggcgtgggcctggacgtggcccagagctgggagaaggccatcagacaggccctgatgcccgtgaccccccaggccagcgtgtgcaccagccccggccagggcaaggaccacaaggacctgagcaccagcatcagcgtgagcaactgccagatccaggagaacgtggacatcagcaccgtgtaccagatcttcgccgacgaggtgctgggcagcggccagttcggcatcgtgtacggcggcaagcacagaaagaccggcagagacgtggccatcaaggtgatcgacaagatgagattccccaccaagcaggagagccagctgagaaacgaggtggccatcctgcagaacctgcaccaccccggcatcgtgaacctggagtgcatgttcgagacccccgagagagtgttcgtggtgatggagaagctgcacggcgacatgctggagatgatcctgagcagcgagaagagcagactgcccgagagaatcaccaagttcatggtgacccagatcctggtggccctgagaaacctgcacttcaagaacatcgtgcactgcgacctgaagcccgagaacgtgctgctggccagcgccgagcccttcccccaggtgaagctgtgcgacttcggcttcgccagaatcatcggcgagaagagcttcagaagaagcgtggtgggcacccccgcctacctggcccccgaggtgctgagaagcaagggctacaacagaagcctggacatgtggagcgtgggcgtgatcatctacgtgagcctgagcggcaccttccccttcaacgaggacgaggacatcaacgaccagatccagaacgccgccttcatgtacccccccaacccctggagagagatcagcggcgaggccatcgacctgatcaacaacctgctgcaggtgaagatgagaaagagatacagcgtggacaagagcctgagccacccctggctgcaggactaccagacctggctggacctgagagagttcgagaccagaatcggcgagagatacatcacccacgagagcgacgacgccagatgggagatccacgcctacacccacaacctggtgtaccccaagcacttcatcatggcccccaaccccgacgacatggaggaggacccctag

SEQ ID NO: 81206 - DNA, 1233 bp, synthetic construct
  misc_feature 1..1233: note = Description of Artificial Sequence: Synthetic coding sequence
  source 1..1233: mol_type = other DNA
atgccctacagcaccaacaaggagctgatcctgggcatcatggtgggcaccgccggcatcagcctgctgctgctgtggtaccacaaggtgagaaagcccggcatcgccatgaagctgcccgagttcctgagcctgggcaacaccttcaacagcatcaccctgcaggacgagatccacgacgaccagggcaccaccgtgatcttccaggagagacagctgcagatcctggagaagctgaacgagctgctgaccaacatggaggagctgaaggaggagatcagattcctgaaggaggccatccccaagctggaggagtacatccaggacgagctgggcggcaagatcaccgtgcacaagatcagcccccagcacagagccagaaagagaagactgcccaccatccagagcagcgccaccagcaacagcagcgaggaggccgagagcgagggcggctacatcaccgccaacaccgacaccgaggagcagagcttccccgtgcccaaggccttcaacaccagagtggaggagctgaacctggacgtgctgctgcagaaggtggaccacctgagaatgagcgagagcggcaagagcgagagcttcgagctgctgagagaccacaaggagaagttcagagacgagatcgagttcatgtggagattcgccagagcctacggcgacatgtacgagctgagcaccaacacccaggagaagaagcactacgccaacatcggcaagaccctgagcgagagagccatcaacagagcccccatgaacggccactgccacctgtggtacgccgtgctgtgcggctacgtgagcgagttcgagggcctgcagaacaagatcaactacggccacctgttcaaggagcacctggacatcgccatcaagctgctgcccgaggagcccttcctgtactacctgaagggcagatactgctacaccgtgagcaagctgagctggatcgagaagaagatggccgccaccctgttcggcaagatccccagcagcaccgtgcaggaggccctgcacaacttcctgaaggccgaggagctgtgccccggctacagcaaccccaactacatgtacctggccaagtgctacaccgacctggaggagaaccagaacgccctgaagttctgcaacctggccctgctgctgcccaccgtgaccaaggaggacaaggaggcccagaaggagatgcagaagatcatgaccagcctgaagagatag

SEQ ID NO: 81207 - DNA, 1233 bp, synthetic construct; identical to SEQ ID NO: 81206
  misc_feature 1..1233: note = Description of Artificial Sequence: Synthetic coding sequence
  source 1..1233: mol_type = other DNA

SEQ ID NO: 81208 - DNA, 528 bp, synthetic construct
  misc_feature 1..528: note = Description of Artificial Sequence: Synthetic coding sequence
  source 1..528: mol_type = other DNA
atgccctacagcaccaacaaggagctgatcctgggcatcatggtgggcaccgccggcatcagcctgctgctgctgtggtaccacaaggtgagaaagcccggcatcgccatgaagctgcccgagttcctgagcctgggcaacaccttcaacagcatcaccctgcaggacgagatccacgacgaccagggcaccaccgtgatcttccaggagagacagctgcagatcctggagaagctgaacgagctgctgaccaacatggaggagctgaaggaggagatcagattcctgaaggaggccatccccaagctggaggagtacatccaggacgagctgggcggcaagatcaccgtgcacaagatcagcccccagcacagagccagaaagagaagactgcccaccatccagagcagcgccaccagcaacagcagcgaggaggccgagagcgagggcggctacatcaccgccaacaccgacaccgaggagcagagcttccccgtgcccaaggccttcaacaccagagtggagtag

SEQ ID NO: 81209 - DNA, 798 bp, synthetic construct
  misc_feature 1..798: note = Description of Artificial Sequence: Synthetic coding sequence
  source 1..798: mol_type = other DNA
atgggcaagtgcctgagatacatcaccgccaacaccgacaccgaggagcagagcttccccgtgcccaaggccttcaacaccagagtggaggagctgaacctggacgtgctgctgcagaaggtggaccacctgagaatgagcgagagcggcaagagcgagagcttcgagctgctgagagaccacaaggagaagttcagagacgagatcgagttcatgtggagattcgccagagcctacggcgacatgtacgagctgagcaccaacacccaggagaagaagcactacgccaacatcggcaagaccctgagcgagagagccatcaacagagcccccatgaacggccactgccacctgtggtacgccgtgctgtgcggctacgtgagcgagttcgagggcctgcagaacaagatcaactacggccacctgttcaaggagcacctggacatcgccatcaagctgctgcccgaggagcccttcctgtactacctgaagggcagatactgctacaccgtgagcaagctgagctggatcgagaagaagatggccgccaccctgttcggcaagatccccagcagcaccgtgcaggaggccctgcacaacttcctgaaggccgaggagctgtgccccggctacagcaaccccaactacatgtacctggccaagtgctacaccgacctggaggagaaccagaacgccctgaagttctgcaacctggccctgctgctgcccaccgtgaccaaggaggacaaggaggcccagaaggagatgcagaagatcatgaccagcctgaagagatag

SEQ ID NO: 81210 - DNA, 453 bp, synthetic construct
  misc_feature 1..453: note = Description of Artificial Sequence: Synthetic coding sequence
  source 1..453: mol_type = other DNA
tgagtgctgtgcggctacgtgagcgagttcgagggcctgcagaacaagatcaactacggccacctgttcaaggagcacctggacatcgccatcaagctgctgcccgaggagcccttcctgtactacctgaagggcagatactgctacaccgtgagcaagctgagctggatcgagaagaagatggccgccaccctgttcggcaagatccccagcagcaccgtgcaggaggccctgcacaacttcctgaaggccgaggagctgtgccccggctacagcaaccccaactacatgtacctggccaagtgctacaccgacctggaggagaaccagaacgccctgaagttctgcaacctggccctgctgctgcccaccgtgaccaaggaggacaaggaggcccagaaggagatgcagaagatcatgaccagcctgaagagactgagaaagaccaagtag

SEQ ID NO: 81211 - DNA, 717 bp, synthetic construct
  misc_feature 1..717: note = Description of Artificial Sequence: Synthetic coding sequence
  source 1..717: mol_type = other DNA
atgggcaagtgcctgagatacatcaccgccaacaccgacaccgaggagcagagcttccccgtgcccaaggccttcaacaccagagtggaggagctgaacctggacgtgctgctgcagaaggtggaccacctgagaatgagcgagagcggcaagagcgagagcttcgagctgctgagagaccacaaggagaagttcagagacgagatcgagttcatgtggagattcgccagagcctacggcgacatgtacgagctgagcaccaacacccaggagaagaagcactacgccaacatcggcaagaccctgagcgagagagccatcaacagagcccccatgaacggccactgccacctgtggtacgccgtgctgtgcggctacgtgagcgagttcgagggcctgcagaacaagatcaactacggccacctgttcaaggagcacctggacatcgccatcaagctgctgcccgaggagcccttcctgtactacctgaagggcagatactgctacaccgtgagcaagctgagctggatcgagaagaagatggccgccaccctgttcggcaagatccccagcagcaccgtgcaggaggccctgcacaacttcctgaaggccgaggagctgtgccccggctacagcaaccccaactacatgtacctggccaagtgctacaccgacctggaggagaaccagaacgccctgaagttctgcaacctgtag

SEQ ID NO: 81212 - DNA, 1413 bp, synthetic construct
  misc_feature 1..1413: note = Description of Artificial Sequence: Synthetic coding sequence
  source 1..1413: mol_type = other DNA
atgagcagactgggcgccctgggcggcgccagagccggcctgggcctgctgctgggcaccgccgccggcctgggcttcctgtgcctgctgtacagccagagatggaagagaacccagagacacggcagaagccagagcctgcccaacagcctggactacacccagaccagcgaccccggcagacacgtgatgctgctgagagccgtgcccggcggcgccggcgacgccagcgtgctgcccagcctgcccagagagggccaggagaaggtgctggacagactggacttcgtgctgaccagcctggtggccctgagaagagaggtggaggagctgagaagcagcctgagaggcctggccggcgagatcgtgggcgaggtgagatgccacatggaggagaaccagagagtggccagaagaagaagattccccttcgtgagagagagaagcgacagcaccggcagcagcagcgtgtacttcaccgccagcagcggcgccaccttcaccgacgccgagagcgagggcggctacaccaccgccaacgccgagagcgacaacgagagagacagcgacaaggagagcgaggacggcgaggacgaggtgagctgcgagaccgtgaagatgggcagaaaggacagcctggacctggaggaggaggccgccagcggcgccagcagcgccctggaggccggcggcagcagcggcctggaggacgtgctgcccctgctgcagcaggccgacgagctgcacagaggcgacgagcagggcaagagagagggcttccagctgctgctgaacaacaagctggtgtacggcagcagacaggacttcctgtggagactggccagagcctacagcgacatgtgcgagctgaccgaggaggtgagcgagaagaagagctacgccctggacggcaaggaggaggccgaggccgccctggagaagggcgacgagagcgccgactgccacctgtggtacgccgtgctgtgcggccagctggccgagcacgagagcatccagagaagaatccagagcggcttcagcttcaaggagcacgtggacaaggccatcgccctgcagcccgagaaccccatggcccacttcctgctgggcagatggtgctaccaggtgagccacctgagctggctggagaagaagaccgccaccgccctgctggagagccccctgagcgccaccgtggaggacgccctgcagagcttcctgaaggccgaggagctgcagcccggcttcagcaaggccggcagagtgtacatcagcaagtgctacagagagctgggcaagaacagcgaggccagatggtggatgaagctggccctggagctgcccgacgtgaccaaggaggacctggccatccagaaggacctggaggagctggaggtgatcctgagagactag

SEQ ID NO: 81213 - DNA, 1413 bp, synthetic construct; identical to SEQ ID NO: 81212
  misc_feature 1..1413: note = Description of Artificial Sequence: Synthetic coding sequence
  source 1..1413: mol_type = other DNA

SEQ ID NO: 81214 - DNA, 1224 bp, synthetic construct
  misc_feature 1..1224: note = Description of Artificial Sequence: Synthetic coding sequence
  source 1..1224: mol_type = other DNA
atgctgctgagagccgtgcccggcggcgccggcgacgccagcgtgctgcccagcctgcccagagagggccaggagaaggtgctggacagactggacttcgtgctgaccagcctggtggccctgagaagagaggtggaggagctgagaagcagcctgagaggcctggccggcgagatcgtgggcgaggtgagatgccacatggaggagaaccagagagtggccagaagaagaagattccccttcgtgagagagagaagcgacagcaccggcagcagcagcgtgtacttcaccgccagcagcggcgccaccttcaccgacgccgagagcgagggcggctacaccaccgccaacgccgagagcgacaacgagagagacagcgacaaggagagcgaggacggcgaggacgaggtgagctgcgagaccgtgaagatgggcagaaaggacagcctggacctggaggaggaggccgccagcggcgccagcagcgccctggaggccggcggcagcagcggcctggaggacgtgctgcccctgctgcagcaggccgacgagctgcacagaggcgacgagcagggcaagagagagggcttccagctgctgctgaacaacaagctggtgtacggcagcagacaggacttcctgtggagactggccagagcctacagcgacatgtgcgagctgaccgaggaggtgagcgagaagaagagctacgccctggacggcaaggaggaggccgaggccgccctggagaagggcgacgagagcgccgactgccacctgtggtacgccgtgctgtgcggccagctggccgagcacgagagcatccagagaagaatccagagcggcttcagcttcaaggagcacgtggacaaggccatcgccctgcagcccgagaaccccatggcccacttcctgctgggcagatggtgctaccaggtgagccacctgagctggctggagaagaagaccgccaccgccctgctggagagccccctgagcgccaccgtggaggacgccctgcagagcttcctgaaggccgaggagctgcagcccggcttcagcaaggccggcagagtgtacatcagcaagtgctacagagagctgggcaagaacagcgaggccagatggtggatgaagctggccctggagctgcccgacgtgaccaaggaggacctggccatccagaaggacctggaggagctggaggtgatcctgagagactag

SEQ ID NO: 81215 - DNA, 864 bp, synthetic construct
  misc_feature 1..864: note = Description of Artificial Sequence: Synthetic coding sequence
  source 1..864: mol_type = other DNA
atgagcagactgggcgccctgggcggcgccagagccggcctgggcctgctgctgggcaccgccgccggcctgggcttcctgtgcctgctgtacagccagagatggaagagaacccagagacacggcagaagccagagcctgcccaacagcctggactacacccagaccagcgaccccggcagacacgtgatgctgctgagagccgtgcccggcggcgccggcgacgccagcgtgctgcccagcctgcccagagagggccaggagaaggtgctggacagactggacttcgtgctgaccagcctggtggccctgagaagagaggtggaggagctgagaagcagcctgagaggcctggccggcgagatcgtgggcgaggtgagatgccacatggaggagaaccagagagtggccagaagaagaagattccccttcgtgagagagagaagcgacagcaccggcagcagcagcgtgtacttcaccgccagcagcggcgccaccttcaccgacgccgagagcgagggcggctacaccaccgccaacgccgagagcgacaacgagagagacagcgacaaggagagcgaggacggcgaggacgaggtgagctgcgagaccgtgaagatgggcagaaaggacagcctggacctggaggaggaggccgccagcggcgccagcagcgccctggaggccggcggcagcagcggcctggaggacgtgctgcccctgctgcagcaggccgacgagctgcacagaggcgacgagcagggcaagagagagggcttccagctgctgctgaacaacaagctggtgtacggcagcagacaggacttcctgtggagactggccagagcctacagcgacatgtag

SEQ ID NO: 81216 - DNA, 945 bp, synthetic construct
  misc_feature 1..945: note = Description of Artificial Sequence: Synthetic coding sequence
  source 1..945: mol_type = other DNA
atggccctggccgccagactgtggagactgctgcccttcagaagaggcgccgcccccggcagcagactgcccgccggcaccagcggcagcagaggccactgcggcccctgcagattcagaggcttcgaggtgatgggcaaccccggcaccttcaagagaggcctgctgctgagcgccctgagctacctgggcttcgagacctaccaggtgatcagccaggccgccgtggtgcacgccaccgccaaggtggaggagatcctggagcaggccgactacctgtacgagagcggcgagaccgagaagctgtaccagctgctgacccagtacaaggagagcgaggacgccgagctgctgtggagactggccagagccagcagagacgtggcccagctgagcagaaccagcgaggaggagaagaagctgctggtgtacgaggccctggagtacgccaagagagccctggagaagaacgagagcagcttcgccagccacaagtggtacgccatctgcctgagcgacgtgggcgactacgagggcatcaaggccaagatcgccaacgcctacatcatcaaggagcacttcgagaaggccatcgagctgaaccccaaggacgccaccagcatccacctgatgggcatctggtgctacaccttcgccgagatgccctggtaccagagaagaatcgccaagatgctgttcgccaccccccccagcagcacctacgagaaggccctgggctacttccacagagccgagcaggtggaccccaacttctacagcaagaacctgctgctgctgggcaagacctacctgaagctgcacaacaagaagctggccgccttctggctgatgaaggccaaggactaccccgcccacaccgaggaggacaagcagatccagaccgaggccgcccagctgctgaccagcttcagcgagaagaactag

SEQ ID NO: 81217 - DNA, 855 bp, synthetic construct
  misc_feature 1..855: note = Description of Artificial Sequence: Synthetic coding sequence
  source 1..855: mol_type = other DNA
atggccctggccgccagactgtggagactgctgcccttcagaagaggcgccgcccccggcagcagactgcccgccggcaccagcggcagcagaggccactgcggcccctgcagattcagaggcttcgaggtgatgggcaaccccggcaccttcaagagaggcctgctgctgagcgccctgagctacctgggcttcgagacctaccaggtgatcagccaggccgccgtggtgcacgccaccgccaaggtggaggagatcctggagcaggccgactacctgtacgagagcggcgagaccgagaagctgtaccagctgctgacccagtacaaggagagcgaggacgccgagctgctgtggagactggccagagccagcagagacgtggcccagctgagcagaaccagcgaggaggagaagaagctgctggtgtacgaggccctggagtacgccaagagagccctggagaagaacgagagcagcttcgccagccacaagaaggccatcgagctgaaccccaaggacgccaccagcatccacctgatgggcatctggtgctacaccttcgccgagatgccctggtaccagagaagaatcgccaagatgctgttcgccaccccccccagcagcacctacgagaaggccctgggctacttccacagagccgagcaggtggaccccaacttctacagcaagaacctgctgctgctgggcaagacctacctgaagctgcacaacaagaagctggccgccttctggctgatgaaggccaaggactaccccgcccacaccgaggaggacaagcagatccagaccgaggccgcccagctgctgaccagcttcagcgagaagaactag

SEQ ID NO: 81218 - DNA, 3540 bp, synthetic construct
  misc_feature 1..3540: note = Description of Artificial Sequence: Synthetic coding sequence
  source 1..3540: mol_type = other DNA
atggccagaagaagccagagcagcagccagggcgacaaccccctggcccccggctacctgcccccccactacaaggagtactacagactggccgtggacgccctggccgagggcggcagcgaggcctacagcagattcctggccaccgagggcgcccccgacttcctgtgccccgaggagctggagcacgtgagcagacacctgagacccccccagtacgtgaccagagagccccccgagggcagcctgctggacgtggacatggacggcagcagcggcacctactggcccgtgaacagcgaccaggccgtgcccgagctggacctgggctggcccctgaccttcggcttccagggcaccgaggtgaccaccctggtgcagccccccccccccgacagccccagcatcaaggacgaggccagaagaatgatcagaagcgcccagcaggtggtggccgtggtgatggacatgttcaccgacgtggacctgctgagcgaggtgctggaggccgccgccagaagagtgcccgtgtacatcctgctggacgagatgaacgcccagcacttcctggacatggccgacaagtgcagagtgaacctgcagcacgtggacttcctgagagtgagaaccgtggccggccccacctactactgcagaaccggcaagagcttcaagggccacgtgaaggagaagttcctgctggtggactgcgccgtggtgatgagcggcagctacagcttcatgtggagcttcgagaagatccacagaagcctggcccacgtgttccagggcgagctggtgagcagcttcgacgaggagttcagaatcctgttcgcccagagcgagcccctggtgcccagcgccgccgccctggccagaatggacgcctacgccctggccccctacgccggcgccggccccctggtgggcgtgcccggcgtgggcgcccccacccccttcagcttccccaagagagcccacctgctgttccccccccccagagaggagggcctgggcttccccagcttcctggaccccgacagacacttcctgagcgccttcagaagagaggagccccccagaatgcccggcggcgccctggagccccacgccggcctgagacccctgagcagaagactggaggccgaggccggccccgccggcgagctggccggcgccagaggcttcttccaggccagacacctggagatggacgccttcaagagacacagcttcgccaccgagggcgccggcgccgtggagaacttcgccgccgccagacaggtgagcagacagaccttcctgagccacggcgacgacttcagattccagaccagccacttccacagagaccagctgtaccagcagcagtaccagtgggacccccagctgacccccgccagaccccagggcctgttcgagaagctgagaggcggcagagccggcttcgccgaccccgacgacttcaccctgggcgccggccccagattccccgagctgggccccgacggccaccagagactggactacgtgcccagcagcgccagcagagaggtgagacacggcagcgaccccgccttcgcccccggccccagaggcctggagcccagcggcgcccccagacccaacctgacccagagattcccctgccaggccgccgccagacccggccccgaccccgcccccgaggccgagcccgagagaagaggcggccccgagggcagagccggcctgagaagatggagactggccagctacctgagcggctgccacggcgaggacggcggcgacgacggcctgcccgcccccatggaggccgaggcctacgaggacgacgtgctggcccccggcggcagagcccccgccggcgacctgctgcccagcgccttcagagtgcccgccgccttccccaccaaggtgcccgtgcccggccccggcagcggcggcaacggccccgagagagagggccccgaggagcccggcctggccaagcaggacagcttcagaagcagactgaaccccctggtgcagagaagcagcagactgagaagcagcctgatcttcagcaccagccaggccgagggcgccgccggcgccgccgccgccaccgagaaggtgcagctgctgcacaaggagcagaccgtgagcgagaccctgggccccggcggcgaggccgtgagaagcgccgccagcaccaaggtggccgagctgctggagaagtacaagggccccgccagagaccccggcggcggcgccggcgccatcaccgtggccagccacagcaaggccgtggtgagccaggcctggagagaggaggtggccgcccccggcgccgtgggcggcgagagaagaagcctggagagctgcctgctggacctgagagacagcttcgcccagcagctgcaccaggaggccgagagacagcccggcgccgccagcctgaccgccgcccagctgctggacaccctgggcagaagcggcagcgacagactgcccagcagattcctgagcgcccagagccacagcaccagcccccagggcctggacagccccctgcccctggagggcagcggcgcccaccaggtgctgcacaacgagagcaagggcagccccaccagcgcctaccccgagagaaagggcagccccacccccggcttcagcaccagaagaggcagccccaccaccggcttcatcgagcagaagggcagccccaccagcgcctaccccgagagaagaggcagccccgtgccccccgtgcccgagagaagaagcagccccgtgccccccgtgcccgagagaagaggcagcctgaccctgaccatcagcggcgagagccccaaggccggccccgccgaggagggccccagcggccccatggaggtgctgagaaagggcagcctgagactgagacagctgctgagccccaagggcgagagaagaatggaggacgagggcggcttccccgtgccccaggagaacggccagcccgagagccccagaagactgagcctgggccagggcgacagcaccgaggccgccaccgaggagagaggccccagagccagactgagcagcgccaccgccaacgccctgtacagcagcaacctgagagacgacaccaaggccatcctggagcagatcagcgcccacggccagaagcacagagccgtgcccgcccccagccccggccccacccacaacagccccgagctgggcagaccccccgccgccggcgtgctggcccccgacatgagcgacaaggacaagtgcagcgccatcttcagaagcgacagcctgggcacccagggcagactgagcagaaccctgcccgccagcgccgaggagagagacagactgctgagaagaatggagagcatgagaaaggagaagagagtgtacagcagattcgaggtgttctgcaagaaggaggaggccagcagccccggcgccggcgagggccccgccgaggagggcaccagagacagcaaggtgggcaagttcgtgcccaagatcctgggcaccttcaagagcaagaagtag

SEQ ID NO: 81219 - DNA, 933 bp, synthetic construct
  misc_feature 1..933: note = Description of Artificial Sequence: Synthetic coding sequence
  source 1..933: mol_type = other DNA
atgggcaaccaggtggagaagctgacccacctgagctacaaggaggtgcccaccgccgaccccaccggcgtggacagagacgacggccccagaatcggcgtgagctacatcttcagcaacgacgacgaggacgtggagccccagccccccccccagggccccgacggcggcggcctgcccgacggcggcgacggccccccccccccccagccccagccctacgaccccagactgcacgaggtggagtgcagcgtgttctacagagacgagtgcatctaccagaagagcttcgcccccggcagcgccgccctgagcacctacacccccgagaacctgctgaacaagtgcaagcccggcgacctggtggagttcgtgagccaggcccagtacccccactgggccgtgtacgtgggcaacttccaggtggtgcacctgcacagactggaggtgatcaacagcttcctgaccgacgccagccagggcagaagaggcagagtggtgaacgacctgtacagatacaagcccctgagcagcagcgccgtggtgagaaacgccctggcccacgtgggcgccaaggagagagagctgagctggagaaacagcgagagcttcgccgcctggtgcagatacggcaagagagagttcaagatcggcggcgagctgagaatcggcaagcagccctacagactgcagatccagctgagcgcccagagaagccacaccctggagttccagagcctggaggacctgatcatggagaagagaagaaacgaccagatcggcagagccgccgtgctgcaggagctggccacccacctgcaccccgccgagcccgaggagggcgacagcaacgtggccagaaccacccccccccccggcagaccccccgcccccagcagcgaggaggaggacggcgaggccgtggcccactag

SEQ ID NO: 81220 - DNA, 999 bp, synthetic construct
  misc_feature 1..999: note = Description of Artificial Sequence: Synthetic coding sequence
  source 1..999: mol_type = other DNA
atggagcccgtgggcagaaagagaagcagaaaggccgccaaggcccagctggaggcccaggtgaccgccgcccagggcgccaccaaggagggcagcggcatcgccagcaacttccccggccagcccaccatggagcccgtgggcagaaagagaagcagaaaggccgccaaggcccagctggaggcccaggtgagagccgcccccgccaagaagcacaccggcaaggaccccgtgagagacgagtgcgaggagagaaaccccttcaccgagaccagagaggaggacgtgaccgacgagcacggcgagagagagcccttcgccgagaaggacgagcacaccggcatccacaccatgaagctggagcacatcgccgccgacatcaagaagggcctggccgccaagagagagatgatcaagatcgacaaggccgcctacagaaagaccaagaacaccatcgagagagccctgaagaagaagcagctgaagagacagaagagagactacagacacaccagaaagctgctgaacgtgctgaaggagtacatcgccgagaagcagaaggacgacgaggccgaggaggccgaggccgccgccgccgccgccgaggccgccgccgccgccgaggccgccgccgccgccgccgaggtgatcgtggtggaggacgaggaggaggaggagaaggaggaggaggaggagaaggaggaggaggaggaggagggcgaggaggagggcggcggcgaggagggcgaggagggcggcggcggcggcgagggcgaggagaccgaggaggaggaggaggaggaggaggaggaggaggaggaggagcagatcaaggccttccaggagaagcagaagagatggcagcagcccaccggcgtgagaagctggagactgagagagatgaagcccctgctggagcagctgctgaaggccgccaaggacaccaaggacaactactgcatcatcagcagcagcgaggagagcgagctggacaactag

SEQ ID NO: 81221 - DNA, 999 bp, synthetic construct; identical to SEQ ID NO: 81220
  misc_feature 1..999: note = Description of Artificial Sequence: Synthetic coding sequence
  source 1..999: mol_type = other DNA

SEQ ID NO: 81222 - DNA, 561 bp, synthetic construct
  misc_feature 1..561: note = Description of Artificial Sequence: Synthetic coding sequence
  source 1..561: mol_type = other DNA
atggccgcctggggcaagaagcacgccggcaaggaccccgtgagagacgagtgcgaggagagaaacagattcaccgagaccagagaggaggacgtgaccgacgagcacggcgagagagagcccttcgccgagaccgacgagcacaccggcgccaacaccaagaagcccgaggacaccgccgaggacctgaccgccaagagaaagagaatgaagatggacaagacctgcagcaagaccaagaacaagagcaagcacgccctgagaaagaagcagctgaagagacagaagagagactacatccacagcctgaagctgctgaacgtgctggaggagtacatcaccgacgagcagaaggaggaggaggaggaggagggcgaggaggaggagctgatcagaatcttccaggagcagcagaagaagtggcagcagtacagaagcgtgagaagagagagactgaaggagatgaagctgctgagagaccagttcgtgaaggccctggaggacttcgaggacctgtgcgacagagtgttcagcgacgaggacagcgagctggacaactag

SEQ ID NO: 81223 - DNA, 681 bp, synthetic construct
  misc_feature 1..681: note = Description of Artificial Sequence: Synthetic coding sequence
  source 1..681: mol_type = other DNA
atgcccggcttcctgagcttcctgagcgtgagcctgagaagccccggcagcggcatcgccagcagcttccccggccagcccgccaccgaccccgtgggcagaagagccgccaaggcccagctggaggcccagttcatggccgcctggggcaagaagcacgccggcaaggaccccgtgagagacgagtgcgaggagagaaacagattcaccgagaccagagaggaggacgtgaccgacgagcacggcgagagagagcccttcgccgagaccgacgagcacaccggcgccaacaccaagaagcccgaggacaccgccgtgggcgccaacaacttcaagaactaccccgtgcacatcggcgtgagcagcgagcagcacatcctgctggactgcagcctgagcagacagaagagagactacatccacagcctgaagctgctgaacgtgctggaggagtacatcaccgacgagcagaaggaggaggaggaggaggagggcgaggaggaggagctgatcagaatcttccaggagcagcagaagaagtggcagcagtacagaagcgtgagaagagagagactgaaggagatgaagctgctgagagaccagttcgtgaaggccctggaggacttcgaggacctgtgcgacagagtgttcagcgacgaggacagcgagctggacaactag

SEQ ID NO: 81224 - DNA, 561 bp, synthetic construct; identical to SEQ ID NO: 81222
  misc_feature 1..561: note = Description of Artificial Sequence: Synthetic coding sequence
  source 1..561: mol_type = other DNA

SEQ ID NO: 81225 - DNA, 501 bp, synthetic construct
  misc_feature 1..501: note = Description of Artificial Sequence: Synthetic coding sequence
  source 1..501: mol_type = other DNA
atggccgccaaggaccagctggaggtgcaggtgatggccgcccaggagatggagctggccggcaaggaccccgtgagccacgagcacgaggagagaaagcccgtgaccgagaccaaggagggcgacgtgaccgacgagcacggcgagagaggcagcttcgccgagaccgacgagcacaccggcgtggacaccaaggagctggaggacatcgccgccgacatcaaggagcacctggccgccaagagaaagagaatcgagaagatcgccaaggcctgcagcgagatcaagaacagaatcaagaacgtgctgagaaccacccagctgaagagacagaagagagactacagaatcagcctgaagctgcccaacgtgctggaggagttcatcaccgacgagcagaaggacgaggagggcgacggcgagaaggaggagcagatcaagatcttccaggagcagcagaagagatggcagcaggacggcaagggcaccgagagagactag

SEQ ID NO: 81226 - DNA, 501 bp, synthetic construct; identical to SEQ ID NO: 81225
  misc_feature 1..501: note = Description of Artificial Sequence: Synthetic coding sequence
  source 1..501: mol_type = other DNA

SEQ ID NO: 81227 - DNA, 381 bp, synthetic construct
  misc_feature 1..381: note = Description of Artificial Sequence: Synthetic coding sequence
  source 1..381: mol_type = other DNA
tgagacgtgaccgacgagcacggcgagagaggcagcttcgccgagaccgacgagcacaccggcgtggacaccaaggagctggaggacatcgccgccgacatcaaggagcacctggccgccaagagaaagagaatcgagaagatcgccaaggcctgcagcgagatcaagaacagaatcaagaacgtgctgagaaccacccagctgaagagacagaagagagactacagaatcagcctgaagctgcccaacgtgctggaggagttcatcaccgacgagcagaaggacgaggagggcgacggcgagaaggaggagcagatcaagatcttccaggagcagcagaagagatggcagcaggacggcaagggcaccgagagagactag

SEQ ID NO: 81228 - DNA, 387 bp, synthetic construct
  misc_feature 1..387: note = Description of Artificial Sequence: Synthetic coding sequence
  source 1..387: mol_type = other DNA
atggccgccaaggaccagctggaggtgcaggtgatggccgcccaggagatggagctggccggcaaggaccccgtgagccacgagcacgaggagagaaagcccgtgaccgagaccaaggagggcgacgtgaccgacgagcacggcgagagaggcagcttcgccgagaccgacgagcacaccggcgtggacaccaaggagctggaggacatcgccggcatgttctacgagctgttcgtggtgtacgagaactgcttccagccctacaacccctacagcagactgtacgagctggtggacgacaagaccgtgctgaacgccttcttcagctacatcgccttcaacgtgatctgcctgatcatcttcctgacctacttcttcaactgctag

SEQ ID NO: 81229 - DNA, 1395 bp, synthetic construct
  misc_feature 1..1395: note = Description of Artificial Sequence: Synthetic coding sequence
  source 1..1395: mol_type = other DNA
atgatggccagaagagaccccaagcccggcgccaagagactggtgagagcccagaccctgcagaagcagagaagagcccccgtgggccccagagcccccccccccgacgaggaggaccccagactgaagtgcaagaactgcgaggccttcggccacaccgccagaagcaccagatgccccatgaagtgctggaaggccgccctggtgccccccaacttcggcgagaaggagggcaaggagaacctgaagccctggaagccccaggtggaggccaaccccggccccctgaacaaggacaagggcgagaaggaggagagacccagaccccaggacccccagagaaaggccctgctgcacatcttcagcagaaagccccccgagaagcccctgcccaaccagaagggcagcaccgagagcagcgactacctgagagtggccagcggccccatgcccgtgcacaccaccagcaagagacccagagtggaccccgtgctgagcgacagaagcgccaccgagatgagcgacagaggcagcgtgctggccagcctgagccccctgagaaaggccagcctgagcagcagcagcagcctgggccccaaggagagacagaccggcgccgccgccgacatcccccagaccgccgtgagacaccagggccccgagcccctgctggtggtgaagcccacccacagcagccccgccggcggctgcagagaggtgccccaggccgccagcaagacccacggcctgctgcaggccgtgagcccccaggcccaggacaagagacccgccgtgaccagccagccctgcccccccgccgccacccacagcctgggcctgggcagcaacctgagcttcggccccggcgccaagagaagcgcccccgcccccatccaggcctgcctgaacttccccaagaagcccagactgggccccttccagatccccgagagcgccatccagggcggcgagctgggcgcccccgagaacctgcagcccccccccgccgccaccgagctgggccccagaaccagcccccagaccggcaccagaacccccgcccaggtgctgagcggcgacagacagcccccccacagcagaccctgcctgcccaccgcccaggcctgcaccatgagccaccaccccgccgccagccacgacggcgcccagcccctgagagtgctgttcagaagactggagaacggcagatggagcagcagcctgctgaccgcccccagcttccacagccccgagaagcccggcgccttcctggcccagagcccccacgtgagcgagaagagcgagggcccctgcgtgagagtgccccccagcgtgctgtacgaggacctgcaggtgcccagcagcagcgaggacagcgacagcgacctggagtag

SEQ ID NO: 81230 - DNA, 45 bp, synthetic construct
  misc_feature 1..45: note = Description of Artificial Sequence: Synthetic coding sequence
  source 1..45: mol_type = other DNA
atgatggccagaagagaccccaagcccggcgccaagagactgtag

SEQ ID NO: 81231 - DNA, 1395 bp, synthetic construct; identical to SEQ ID NO: 81229
  misc_feature 1..1395: note = Description of Artificial Sequence: Synthetic coding sequence
  source 1..1395: mol_type = other DNA

SEQ ID NO: 81232 - DNA, 1143 bp, synthetic construct
  misc_feature 1..1143: note = Description of Artificial Sequence: Synthetic coding sequence
  source 1..1143: mol_type = other DNA
atggccgtgaccgaggccagcctgctgagacagtgccccctgctgctgccccagaacagaagcaagaccgtgtacgagggcttcatcagcgcccagggcagagacttccacctgagaatcgtgctgcccgaggacctgcagctgaagaacgccagactgctgtgcagctggcagctgagaaccatcctgagcggctaccacagaatcgtgcagcagagaatgcagcacagccccgacctgatgagcttcatgatggagctgaagatgctgctggaggtggccctgaagaacagacaggagctgtacgccctgcccccccccccccagttctacagcagcctgatcgaggagatcggcaccctgggctgggacaagctggtgtacgccgacacctgcttcagcaccatcaagctgaaggccgaggacgccagcggcagagagcacctgatcaccctgaagctgaaggccaagtaccccgccgagagccccgactacttcgtggacttccccgtgcccttctgcgccagctggaccccccaggtgaacagcccccagagcagcctgatcagcatctacagccagttcctggccgccatcgagagcctgaaggccttctgggacgtgatggacgagatcgacgagaagacctgggtgctggagcccgagaagccccccagaagcgccaccgccagaagaatcgccctgggcaacaacgtgagcatcaacatcgaggtggaccccagacaccccaccatgctgcccgagtgcttcttcctgggcgccgaccacgtggtgaagcccctgggcatcaagctgagcagaaacatccacctgtgggaccccgagaacagcgtgctgcagaacctgaaggacgtgctggagatcgacttccccgccagagccatcctggagaagagcgacttcaccatggactgcggcatctgctacgcctaccagctggacggcaccatccccgaccaggtgtgcgacaacagccagtgcggccagcccttccaccagatctgcctgtacgagtggctgagaggcctgctgaccagcagacagagcttcaacatcatcttcggcgagtgcccctactgcagcaagcccatcaccctgaagatgagcggcagaaagcactag

SEQ ID NO: 81233 - DNA, 2580 bp, synthetic construct
  misc_feature 1..2580: note = Description of Artificial Sequence: Synthetic coding sequence
  source 1..2580: mol_type = other DNA
atgaccagcaagcaggccatgagcagcaacgagcaggagagactgctgtgctacaacggcgaggtgctggtgttccagctgagcaagggcaacttcgccgacaaggagcccaccaagacccccatcctgcacgtgagaagaatggtgttcgacagaggcaccaaggtgttcgtgcagaagagcaccggcttcttcaccatcaaggaggagaacagccacctgaagatcatgtgctgcaactgcgtgagcgacttcagaaccggcatcaacctgccctacatcgtgatcgagaagaacaagaagaacaacgtgttcgagtacttcctgctgatcctgcacagcaccaacaagttcgagatgagactgagcttcaagctgggctacgagatgaaggacggcctgagagtgctgaacggccccctgatcctgtggagacacgtgaaggccttcttcttcatcagcagccagaccggcaaggtggtgagcgtgagcggcaacttcagcagcatccagtgggccggcgagatcgagaacctgggcatggtgctgctgggcctgaaggagtgctgcctgagcgaggaggagtgcacccaggagcccagcaagagcgactacgccatctggaacaccaagttctgcgtgtacagcctggagagccaggaggtgctgagcgacatctacatcatcccccccgcctacagcagcgtggtgacctacgtgcacatctgcgccaccgagatcatcaagaaccagctgagaatcagcctgatcgccctgaccagaaagaaccagctgatcagcttccagaacggcacccccaagaacgtgtgccagctgcccttcggcgacccctgcgccgtgcagctgatggacagcggcggcggcaacctgttcttcgtggtgagcttcatcagcaacaacgcctgcgccgtgtggaaggagagcttccaggtggccgccaagtgggagaagctgagcctggtgctgatcgacgacttcatcggcagcggcaccgagcaggtgctgctgctgttcaaggacagcctgaacagcgactgcctgaccagcttcaagatcaccgacctgggcaagatcaactacagcagcgagcccagcgactgcaacgaggacgacctgttcgaggacaagcaggagaacagatacctggtggtgccccccctggagaccggcctgaaggtgtgcttcagcagcttcagagagctgagacagcacctgctgctgaaggagaagatcatcagcaagagctacaaggccctgatcaacctggtgcagggcaaggacgacaacaccagcagcgccgaggagaaggagtgcctggtgcccctgtgcggcgaggaggagaacagcgtgcacatcctggacgagaagctgagcgacaacttccaggacagcgagcagctggtggagaagatctggtacagagtgatcgacgacagcctggtggtgggcgtgaagaccaccagcagcctgaagctgagcctgaacgacgtgaccctgagcctgctgatggaccaggcccacgacagcagattcagactgctgaagtgccagaacagagtgatcaagctgagcaccaaccccttccccgccccctacctgatgccctgcgagatcggcctggaggccaagagagtgaccctgacccccgacagcaagaaggaggagagcttcgtgtgcgagcaccccagcaagaaggagtgcgtgcagatcatcaccgccgtgaccagcctgagccccctgctgaccttcagcaagttctgctgcaccgtgctgctgcagatcatggagagagagagcggcaactgccccaaggacagatacgtggtgtgcggcagagtgttcctgagcctggaggacctgagcaccggcaagtacctgctgaccttccccaagaagaagcccatcgagcacatggaggacctgttcgccctgctggccgccttccacaagagctgcttccagatcaccagccccggctacgccctgaacagcatgaaggtgtggctgctggagcacatgaagtgcgagatcatcaaggagttccccgaggtgtacttctgcgagagacccggcagcttctacggcaccctgttcacctggaagcagagaacccccttcgagggcatcctgatcatctacagcagaaaccagaccgtgatgttccagtgcctgcacaacctgatcagaatcctgcccatcaactgcttcctgaagaacctgaagagcggcagcgagaacttcctgatcgacaacatggccttcaccctggagaaggagctggtgaccctgagcagcctgagcagcgccatcgccaagcacgagagcaacttcatgcagagatgcgaggtgagcaagggcaagagcagcgtggtggccgccgccctgagcgacagaagagagaacatccacccctacagaaaggagctgcagagagagaagaagaagatgctgcagaccaacctgaaggtgagcggcgccctgtacagagagatcaccctgaaggtggccgaggtgcagctgaagagcgacttcgccgcccagaagctgagcaacctgtag

SEQ ID NO: 81234 - DNA, 2580 bp, synthetic construct; identical to SEQ ID NO: 81233
  misc_feature 1..2580: note = Description of Artificial Sequence: Synthetic coding sequence
  source 1..2580: mol_type = other DNA

SEQ ID NO: 81235 - DNA, 2457 bp, synthetic construct
  misc_feature 1..2457: note = Description of Artificial Sequence: Synthetic coding sequence
  source 1..2457: mol_type = other DNA
atgaccagcaagcaggccatgagcagcaacgagcaggagagactgctgtgctacaacggcgaggtgctggtgttccagctgagcaagggcaacttcgccgacaaggagcccaccaagacccccatcctgcacgtgagaagaatggtgttcgacagaggcaccaaggtgttcgtgcagaagagcaccggcttcttcaccatcaaggaggagaacagccacctgaagatcatgtgctgcaactgcgtgagcgacttcagaaccggcatcaacctgccctacatcgtgatcgagaagaacaagaagaacaacgtgttcgagtacttcctgctgatcctgcacagcaccaacaagttcgagatgagactgagcttcaagctgggctacgagatgaaggacggcctgagagtgctgaacggccccctgatcctgtggagacacgtgaaggccttcttcttcatcagcagccagaccggcaaggtggtgagcgtgagcggcaacttcagcagcatccagtgggccggcgagatcgagaacctgggcatggtgctgctgggcctgaaggagtgctgcctgagcgaggaggagtgcacccaggagcccagcaagagcgactacgccatctggaacaccaagttctgcgtgtacagcctggagagccaggaggtgctgagcgacatctacatcatcccccccgcctacagcagcgtggtgacctacgtgcacatctgcgccaccgagatcatcaagaaccagctgagaatcagcctgatcgccctgaccagaaagaaccagctgatcagcttccagaacggcacccccaagaacgtgtgccagctgcccttcggcgacccctgcgccgtgcagctgatggacagcggcggcggcaacctgttcttcgtggtgagcttcatcagcaacaacgcctgcgccgtgtggaaggagagcttccaggtggccgccaagtgggagaagctgagcctggtgctgatcgacgacttcatcggcagcggcaccgagcaggtgctgctgctgttcaaggacagcctgaacagcgactgcctgaccagcttcaagatcaccgacctgggcaagatcaactacagcagcgagcccagcgactgcaacgaggacgacctgttcgaggacaagcaggagaacagatacctggtggtgccccccctggagaccggcctgaaggtgtgcttcagcagcttcagagagctgagacagcacctgctgctgaaggagaagatcatcagcaagagctacaaggccctgatcaacctggtgcagggcaaggacgacaacaccagcagcgccgaggagaaggagtgcctggtgcccctgtgcggcgaggaggagaacagcgtgcacatcctggacgagaagctgagcgacaacttccaggacagcgagcagctggtggagaagatctggtacagagtgatcgacgacagcctggtggtgggcgtgaagaccaccagcagcctgaagctgagcctgaacgacgtgaccctgagcctgctgatggaccaggcccacgacagcagattcagactgctgaagtgccagaacagagtgatcaagctgagcaccaaccccttccccgccccctacctgatgccctgcgagatcggcctggaggccaagagagtgaccctgacccccgacagcaagaaggaggagagcttcgtgtgcgagcaccccagcaagaaggagtgcgtgcagatcatcaccgccgtgaccagcctgagccccctgctgaccttcagcaagttctgctgcaccgtgctgctgcagatcatggagagagagagcggcaactgccccaaggacagatacgtggtgtgcggcagagtgttcctgagcctggaggacctgagcaccggcaagtacctgctgaccttccccaagaagaagcccatcgagcacatggaggacctgttcgccctgctggccgccttccacaagagctgcttccagatcaccagccccggctacgccctgaacagcatgaaggtgtggctgctggagcacatgaagtgcgagatcatcaaggagttccccgaggtgtacttctgcgagagacccggcagcttctacggcaccctgttcacctggaagcagagaacccccttcgagggcatcctgatcatctacagcagaaaccagaccgtgatgttccagtgcctgcacaacctgatcagaatcctgcccatcaactgcttcctgaagaacctgaagagcggcagcgagaacttcctgatcgacaacatggccttcaccctggagaaggagctggtgaccctgagcagcctgagcagcgccatcgccaagcacgagagcaacttcatgcagagatgcgaggtgagcaagggcaagagcagcgtggtggccgccgccctgagcgacagaagagagaacatccacccctacagaaaggagctgcagagatag

SEQ ID NO: 81236 - DNA, 1677 bp, synthetic construct
  misc_feature 1..1677: note = Description of Artificial Sequence: Synthetic coding sequence
  source 1..1677: mol_type = other DNA
atggcccaggacagcgtggacctgagctgcgactaccagttctggatgcagaagctgagcgtgtgggaccaggccagcaccctggagacccagcaggacacctgcctgcacgtggcccagttccaggagttcctgagaaagatgtacgaggccctgaaggagatggacagcaacaccgtgatcgagagattccccaccatcggccagctgctggccaaggcctgctggaaccccttcatcctggcctacgacgagagccagaagatcctgatctggtgcctgtgctgcctgatcaacaaggagccccagaacagcggccagagcaagctgaacagctggatccagggcgtgctgagccacatcctgagcgccctgagattcgacaaggaggtggccctgttcacccagggcctgggctacgcccccatcgactactaccccggcctgctgaagaacatggtgctgagcctggccagcgagctgagagagaaccacctgaacggcttcaacacccagagaagaatggcccccgagagagtggccagcctgagcagagtgtgcgtgcccctgatcaccctgaccgacgtggaccccctggtggaggccctgctgatctgccacggcagagagccccaggagatcctgcagcccgagttcttcgaggccgtgaacgaggccatcctgctgaagaagatcagcctgcccatgagcgccgtggtgtgcctgtggctgagacacctgcccagcctggagaaggccatgctgcacctgttcgagaagctgatcagcagcgagagaaactgcctgagaagaatcgagtgcttcatcaaggacagcagcctgccccaggccgcctgccaccccgccatcttcagagtggtggacgagatgttcagatgcgccctgctggagaccgacggcgccctggagatcatcgccaccatccaggtgttcacccagtgcttcgtggaggccctggagaaggccagcaagcagctgagattcgccctgaagacctacttcccctacaccagccccagcctggccatggtgctgctgcaggacccccaggacatccccagaggccactggctgcagaccctgaagcacatcagcgagctgctgagagaggccgtggaggaccagacccacggcagctgcggcggccccttcgagagctggttcctgttcatccacttcggcggctgggccgagatggtggccgagcagctgctgatgagcgccgccgagccccccaccgccctgctgtggctgctggccttctactacggccccagagacggcagacagcagagagcccagaccatggtgcaggtgaaggccgtgctgggccacctgctggccatgagcagaagcagcagcctgagcgcccaggacctgcagaccgtggccggccagggcaccgacaccgacctgagagcccccgcccagcagctgatcagacacctgctgctgaacttcctgctgtgggcccccggcggccacaccatcgcctgggacgtgatcaccctgatggcccacaccgccgagatcacccacgagatcatcggcttcctggaccagaccctgtacagatggaacagactgggcatcgagagccccagaagcgagaagctggccagagagctgctgaaggagctgagaacccaggtgtag

SEQ ID NO: 81237 - DNA, 1677 bp, synthetic construct; identical to SEQ ID NO: 81236
  misc_feature 1..1677: note = Description of Artificial Sequence: Synthetic coding sequence
  source 1..1677: mol_type = other DNA

SEQ ID NO: 81238 - DNA, 453 bp, synthetic construct
  misc_feature 1..453: note = Description of Artificial Sequence: Synthetic coding sequence
  source 1..453: mol_type = other DNA
atggcccaggacagcgtggacctgagctgcgactaccagttctggatgcagaagctgagcgtgtgggaccaggccagcaccctggagacccagcaggacacctgcctgcacgtggcccagttccaggagttcctgagaaagatgtacgaggccctgaaggagatggacagcaacaccgtgatcgagagattccccaccatcggccagctgctggccaaggcctgctggaaccccttcatcctggcctacgacgagagccagaagatcctgatctggtgcctgtgctgcctgatcaacaaggagccccagaacagcggccagagcaagctgaacagctggatccagggcgtgctgagccacatcctgagcgccctgagattcgacaaggaggtggccctgttcacccagggcctgggctacgcccccatcgactactaccccggcctgctgtag

SEQ ID NO: 81239 - DNA, 4416 bp, synthetic construct
  misc_feature 1..4416: note = Description of Artificial Sequence: Synthetic coding sequence
  source 1..4416: mol_type = other DNA
atggtgagcaagagaagactgagcaagagcgaggacaaggagagcctgaccgaggacgccagcaagaccagaaagcagcccctgagcaagaagaccaagaagagccacatcgccaacgaggtggaggagaacgacagcatcttcgtgaagctgctgaagatcagcggcatcatcctgaagaccggcgagagccagaaccagctggccgtggaccagatcgccttccagaagaagctgttccagaccctgagaagacaccccagctaccccaagatcatcgaggagttcgtgagcggcctggagagctacatcgaggacgaggacagcttcagaaactgcctgctgagctgcgagagactgcaggacgaggaggccagcatgggcgccagctacagcaagagcctgatcaagctgctgctgggcatcgacatcctgcagcccgccatcatcaagaccctgttcgagaagctgcccgagtacttcttcgagaacaagaacagcgacgagatcaacatccccagactgatcgtgagccagctgaagtggctggacagagtggtggacggcaaggacctgaccaccaagatcatgcagctgatcagcatcgcccccgagaacctgcagcacgacatcatcaccagcctgcccgagatcctgggcgacagccagcacgccgacgtgggcaaggagctgagcgacctgctgatcgagaacaccagcctgaccgtgcccatcctggacgtgctgagcagcctgagactggaccccaacttcctgctgaaggtgagacagctggtgatggacaagctgagcagcatcagactggaggacctgcccgtgatcatcaagttcatcctgcacagcgtgaccgccatggacaccctggaggtgatcagcgagctgagagagaagctggacctgcagcactgcgtgctgcccagcagactgcaggccagccaggtgaagctgaagagcaagggcagagccagcagcagcggcaaccaggagagcagcggccagagctgcatcatcctgctgttcgacgtgatcaagagcgccatcagatacgagaagaccatcagcgaggcctggatcaaggccatcgagaacaccgccagcgtgagcgagcacaaggtgttcgacctggtgatgctgttcatcatctacagcaccaacacccagaccaagaagtacatcgacagagtgctgagaaacaagatcagaagcggctgcatccaggagcagctgctgcagagcaccttcagcgtgcactacctggtgctgaaggacatgtgcagcagcatcctgagcctggcccagagcctgctgcacagcctggaccagagcatcatcagcttcggcagcctgctgtacaagtacgccttcaagttcttcgacacctactgccagcaggaggtggtgggcgccctggtgacccacatctgcagcggcaacgaggccgaggtggacaccgccctggacgtgctgctggagctggtggtgctgaaccccagcgccatgatgatgaacgccgtgttcgtgaagggcatcctggactacctggacaacatcagcccccagcagatcagaaagctgttctacgtgctgagcaccctggccttcagcaagcagaacgaggccagcagccacatccaggacgacatgcacctggtgatcagaaagcagctgagcagcaccgtgttcaagtacaagctgatcggcatcatcggcgccgtgaccatggccggcatcatggccgccgacagaagcgagagccccagcctgacccaggagagagccaacctgagcgacgagcagtgcacccaggtgaccagcctgctgcagctggtgcacagctgcagcgagcagagcccccaggccagcgccctgtactacgacgagttcgccaacctgatccagcacgagaagctggaccccaaggccctggagtgggtgggccacaccatctgcaacgacttccaggacgccttcgtggtggacagctgcgtggtgcccgagggcgacttccccttccccgtgaaggccctgtacggcctggaggagtacgacacccaggacggcatcgccatcaacctgctgcccctgctgttcagccaggacttcgccaaggacggcggccccgtgaccagccaggagagcggccagaagctggtgagccccctgtgcctggccccctacttcagactgctgagactgtgcgtggagagacagcacaacggcaacctggaggagatcgacggcctgctggactgccccatcttcctgaccgacctggagcccggcgagaagctggagagcatgagcgccaaggagagaagcttcatgtgcagcctgatcttcctgaccctgaactggttcagagagatcgtgaacgccttctgccaggagaccagccccgagatgaagggcaaggtgctgaccagactgaagcacatcgtggagctgcagatcatcctggagaagtacctggccgtgacccccgactacgtgccccccctgggcaacttcgacgtggagaccctggacatcaccccccacaccgtgaccgccatcagcgccaagatcagaaagaagggcaagatcgagagaaagcagaagaccgacggcagcaagaccagcagcagcgacaccctgagcgaggagaagaacagcgagtgcgaccccacccccagccacagaggccagctgaacaaggagttcaccggcaaggaggagaagaccagcctgctgctgcacaacagccacgccttcttcagagagctggacatcgaggtgttcagcatcctgcactgcggcctggtgaccaagttcatcctggacaccgagatgcacaccgaggccaccgaggtggtgcagctgggcccccccgagctgctgttcctgctggaggacctgagccagaagctggagagcatgctgaccccccccatcgccagaagagtgcccttcctgaagaacaagggcagcagaaacatcggcttcagccacctgcagcagagaagcgcccaggagatcgtgcactgcgtgttccagctgctgacccccatgtgcaaccacctggagaacatccacaactacttccagtgcctggccgccgagaaccacggcgtggtggacggccccggcgtgaaggtgcaggagtaccacatcatgagcagctgctaccagagactgctgcagatcttccacggcctgttcgcctggagcggcttcagccagcccgagaaccagaacctgctgtacagcgccctgcacgtgctgagcagcagactgaagcagggcgagcacagccagcccctggaggagctgctgagccagagcgtgcactacctgcagaacttccaccagagcatccccagcttccagtgcgccctgtacctgatcagactgctgatggtgatcctggagaagagcaccgccagcgcccagaacaaggagaagatcgccagcctggccagacagttcctgtgcagagtgtggcccagcggcgacaaggagaagagcaacatcagcaacgaccagctgcacgccctgctgtgcatctacctggagcacaccgagagcatcctgaaggccatcgaggagatcgccggcgtgggcgtgcccgagctgatcaacagccccaaggacgccagcagcagcaccttccccaccctgaccagacacaccttcgtggtgttcttcagagtgatgatggccgagctggagaagaccgtgaagaagatcgagcccggcaccgccgccgacagccagcagatccacgaggagaagctgctgtactggaacatggccgtgagagacttcagcatcctgatcaacctgatcaaggtgttcgacagccaccccgtgctgcacgtgtgcctgaagtacggcagactgttcgtggaggccttcctgaagcagtgcatgcccctgctggacttcagcttcagaaagcacagagaggacgtgctgagcctgctggagaccttccagctggacaccagactgctgcaccacctgtgcggccacagcaagatccaccaggacaccagactgacccagcacgtgcccctgctgaagaagaccctggagctgctggtgtgcagagtgaaggccatgctgaccctgaacaactgcagagaggccttctggctgggcaacctgaagaacagagacctgcagggcgaggagatcaagagccagaacagccaggagagcaccgccgacgagagcgaggacgacatgagcagccaggccagcaagagcaaggccaccgaggtgagcctgcagaacccccccgagagcggcaccgacggctgcatcctgctgatcgtgctgagctggtggagcagaaccctgcccacctacgtgtactgccagatgctgctgtgccccttccccttccccccctag

SEQ ID NO: 81240 - DNA, 3750 bp, synthetic construct
  misc_feature 1..3750: note = Description of Artificial Sequence: Synthetic coding sequence
  source 1..3750: mol_type = other DNA
atggtgagcaagagaagactgagcaagagcgaggacaaggagagcctgaccgaggacgccagcaagaccagaaagcagcccctgagcaagaagaccaagaagagccacatcgccaacgaggtggaggagaacgacagcatcttcgtgaagctgctgaagatcagcggcatcatcctgaagaccggcgagagccagaaccagctggccgtggaccagatcgccttccagaagaagctgttccagaccctgagaagacaccccagctaccccaagatcatcgaggagttcgtgagcggcctggagagctacatcgaggacgaggacagcttcagaaactgcctgctgagctgcgagagactgcaggacgaggaggccagcatgggcgccagctacagcaagagcctgatcaagctgctgctgggcatcgacatcctgcagcccgccatcatcaagaccctgttcgagaagctgcccgagtacttcttcgagaacaagaacagcgacgagatcaacatccccagactgatcgtgagccagctgaagtggctggacagagtggtggacggcaaggacctgaccaccaagatcatgcagctgatcagcatcgcccccgagaacctgcagcacgacatcatcaccagcctgcccgagatcctgggcgacagccagcacgccgacgtgggcaaggagctgagcgacctgctgatcgagaacaccagcctgaccgtgcccatcctggacgtgctgagcagcctgagactggaccccaacttcctgctgaaggtgagacagctggtgatggacaagctgagcagcatcagactggaggacctgcccgtgatcatcaagttcatcctgcacagcgtgaccgccatggacaccctggaggtgatcagcgagctgagagagaagctggacctgcagcactgcgtgctgcccagcagactgcaggccagccaggtgaagctgaagagcaagggcagagccagcagcagcggcaaccaggagagcagcggccagagctgcatcatcctgctgttcgacgtgatcaagagcgccatcagatacgagaagaccatcagcgaggcctggatcaaggccatcgagaacaccgccagcgtgagcgagcacaaggtgttcgacctggtgatgctgttcatcatctacagcaccaacacccagaccaagaagtacatcgacagagtgctgagaaacaagatcagaagcggctgcatccaggagcagctgctgcagagcaccttcagcgtgcactacctggtgctgaaggacatgtgcagcagcatcctgagcctggcccagagcctgctgcacagcctggaccagagcatcatcagcttcggcagcctgctgtacaagtacgccttcaagttcttcgacacctactgccagcaggaggtggtgggcgccctggtgacccacatctgcagcggcaacgaggccgaggtggacaccgccctggacgtgctgctggagctggtggtgctgaaccccagcgccatgatgatgaacgccgtgttcgtgaagggcatcctggactacctggacaacatcagcccccagcagatcagaaagctgttctacgtgctgagcaccctggccttcagcaagcagaacgaggccagcagccacatccaggacgacatgcacctggtgatcagaaagcagctgagcagcaccgtgttcaagtacaagctgatcggcatcatcggcgccgtgaccatggccggcatcatggccgccgacagaagcgagagccccagcctgacccaggagagagccaacctgagcgacgagcagtgcacccaggtgaccagcctgctgcagctggtgcacagctgcagcgagcagagcccccaggccagcgccctgtactacgacgagttcgccaacctgatccagcacgagaagctggaccccaaggccctggagtgggtgggccacaccatctgcaacgacttccaggacgccttcgtggtggacagctgcgtggtgcccgagggcgacttccccttccccgtgaaggccctgtacggcctggaggagtacgacacccaggacggcatcgccatcaacctgctgcccctgctgttcagccaggacttcgccaaggacggcggccccgtgaccagccaggagagcggccagaagctggtgagccccctgtgcctggccccctacttcagactgctgagactgtgcgtggagagacagcacaacggcaacctggaggagatcgacggcctgctggactgccccatcttcctgaccgacctggagcccggcgagaagctggagagcatgagcgccaaggagagaagcttcatgtgcagcctgatcttcctgaccctgaactggttcagagagatcgtgaacgccttctgccaggagaccagccccgagatgaagggcaaggtgctgaccagactgaagcacatcgtggagctgcagatcatcctggagaagtacctggccgtgacccccgactacgtgccccccctgggcaacttcgacgtggagaccctggacatcaccccccacaccgtgaccgccatcagcgccaagatcagaaagaagggcaagatcgagagaaagcagaagaccgacggcagcaagaccagcagcagcgacaccctgagcgaggagaagaacagcgagtgcgaccccacccccagccacagaggccagctgaacaaggagttcaccggcaaggaggagaagaccagcctgctgctgcacaacagccacgccttcttcagagagctggacatcgaggtgttcagcatcctgcactgcggcctggtgaccaagttcatcctggacaccgagatgcacaccgaggccaccgaggtggtgcagctgggcccccccgagctgctgttcctgctggaggacctgagccagaagctggagagcatgctgaccccccccatcgccagaagagtgcccttcctgaagaacaagggcagcagaaacatcggcttcagccacctgcagcagagaagcgcccaggagatcgtgcactgcgtgttccagctgctgacccccatgtgcaaccacctggagaacatccacaactacttccagtgcctggccgccgagaaccacggcgtggtggacggccccggcgtgaaggtgcaggagtaccacatcatgagcagctgctaccagagactgctgcagatcttccacggcctgttcgcctggagcggcttcagccagcccgagaaccagaacctgctgtacagcgccctgcacgtgctgagcagcagactgaagcagggcgagcacagccagcccctggaggagctgctgagccagagcgtgcactacctgcagaacttccaccagagcatccccagcttccagtgcgccctgtacctgatcagactgctgatggtgatcctggagaagagcaccgccagcgcccagaacaaggagaagatcgccagcctggccagacagttcctgtgcagagtgtggcccagcggcgacaaggagaagagcaacatcagcaacgaccagctgcacgccctgctgtgcatctacctggagcacaccgagagcatcctgaaggccatcgaggagatcgccggcgtgggcgtgcccgagctgatcaacagccccaaggacgccagcagcagcaccttccccaccctgaccagattcatgaagagaaacagcagcaccggcacctggctgttcgagaccagcgtgagcagcagcacctag

SEQ ID NO: 81241 - DNA, 4356 bp, synthetic construct
  misc_feature 1..4356: note = Description of Artificial Sequence: Synthetic coding sequence
  source 1..4356: mol_type = other DNA
atggtgagcaagagaagactgagcaagagcgaggacaaggagagcctgaccgaggacgccagcaagaccagaaagcagcccctgagcaagaagaccaagaagagccacatcgccaacgaggtggaggagaacgacagcatcttcgtgaagctgctgaagatcagcggcatcatcctgaagaccggcgagagccagaaccagctggccgtggaccagatcgccttccagaagaagctgttccagaccctgagaagacaccccagctaccccaagatcatcgaggagttcgtgagcggcctggagagctacatcgaggacgaggacagcttcagaaactgcctgctgagctgcgagagactgcaggacgaggaggccagcatgggcgccagctacagcaagagcctgatcaagctgctgctgggcatcgacatcctgcagcccgccatcatcaagaccctgttcgagaagctgcccgagtacttcttcgagaacaagaacagcgacgagatcaacatccccagactgatcgtgagccagctgaagtggctggacagagtggtggacggcaaggacctgaccaccaagatcatgcagctgatcagcatcgcccccgagaacctgcagcacgacatcatcaccagcctgcccgagatcctgggcgacagccagcacgccgacgtgggcaaggagctgagcgacctgctgatcgagaacaccagcctgaccgtgcccatcctggacgtgctgagcagcctgagactggaccccaacttcctgctgaaggtgagacagctggtgatggacaagctgagcagcatcagactggaggacctgcccgtgatcatcaagttcatcctgcacagcgtgaccgccatggacaccctggaggtgatcagcgagctgagagagaagctggacctgcagcactgcgtgctgcccagcagactgcaggccagccaggtgaagctgaagagcaagggcagagccagcagcagcggcaaccaggagagcagcggccagagctgcatcatcctgctgttcgacgtgatcaagagcgccatcagatacgagaagaccatcagcgaggcctggatcaaggccatcgagaacaccgccagcgtgagcgagcacaaggtgttcgacctggtgatgctgttcatcatctacagcaccaacacccagaccaagaagtacatcgacagagtgctgagaaacaagatcagaagcggctgcatccaggagcagctgctgcagagcaccttcagcgtgcactacctggtgctgaaggacatgtgcagcagcatcctgagcctggcccagagcctgctgcacagcctggaccagagcatcatcagcttcggcagcctgctgtacaagtacgccttcaagttcttcgacacctactgccagcaggaggtggtgggcgccctggtgacccacatctgcagcggcaacgaggccgaggtggacaccgccctggacgtgctgctggagctggtggtgctgaaccccagcgccatgatgatgaacgccgtgttcgtgaagggcatcctggactacctggacaacatcagcccccagcagatcagaaagctgttctacgtgctgagcaccctggccttcagcaagcagaacgaggccagcagccacatccaggacgacatgcacctggtgatcagaaagcagctgagcagcaccgtgttcaagtacaagctgatcggcatcatcggcgccgtgaccatggccggcatcatggccgccgacagaagcgagagccccagcctgacccaggagagagccaacctgagcgacgagcagtgcacccaggtgaccagcctgctgcagctggtgcacagctgcagcgagcagagcccccaggccagcgccctgtactacgacgagttcgccaacctgatccagcacgagaagctggaccccaaggccctggagtgggtgggccacaccatctgcaacgacttccaggacgccttcgtggtggacagctgcgtggtgcccgagggcgacttccccttccccgtgaaggccctgtacggcctggaggagtacgacacccaggacggcatcgccatcaacctgctgcccctgctgttcagccaggacttcgccaaggacggcggccccgtgaccagccaggagagcggccagaagctggtgagccccctgtgcctggccccctacttcagactgctgagactgtgcgtggagagacagcacaacggcaacctggaggagatcgacggcctgctggactgccccatcttcctgaccgacctggagcccggcgagaagctggagagcatgagcgccaaggagagaagcttcatgtgcagcctgatcttcctgaccctgaactggttcagagagatcgtgaacgccttctgccaggagaccagccccgagatgaagggcaaggtgctgaccagactgaagcacatcgtggagctgcagatcatcctggagaagtacctggccgtgacccccgactacgtgccccccctgggcaacttcgacgtggagaccctggacatcaccccccacaccgtgaccgccatcagcgccaagatcagaaagaagggcaagatcgagagaaagcagaagaccgacggcagcaagaccagcagcagcgacaccctgagcgaggagaagaacagcgagtgcgaccccacccccagccacagaggccagctgaacaaggagttcaccggcaaggaggagaagaccagcctgctgctgcacaacagccacgccttcttcagagagctggacatcgaggtgttcagcatcctgcactgcggcctggtgaccaagttcatcctggacaccgagatgcacaccgaggccaccgaggtggtgcagctgggcccccccgagctgctgttcctgctggaggacctgagccagaagctggagagcatgctgaccccccccatcgccagaagagtgcccttcctgaagaacaagggcagcagaaacatcggcttcagccacctgcagcagagaagcgcccaggagatcgtgcactgcgtgttccagctgctgacccccatgtgcaaccacctggagaacatccacaactacttccagtgcctggccgccgagaaccacggcgtggtggacggccccggcgtgaaggtgcaggagtaccacatcatgagcagctgctaccagagactgctgcagatcttccacggcctgttcgcctggagcggcttcagccagcccgagaaccagaacctgctgtacagcgccctgcacgtgctgagcagcagactgaagcagggcgagcacagccagcccctggaggagctgctgagccagagcgtgcactacctgcagaacttccaccagagcatccccagcttccagtgcgccctgtacctgatcagactgctgatggtgatcctggagaagagcaccgccagcgcccagaacaaggagaagatcgccagcctggccagacagttcctgtgcagagtgtggcccagcggcgacaaggagaagagcaacatcagcaacgaccagctgcacgccctgctgtgcatctacctggagcacaccgagagcatcctgaaggccatcgaggagatcgccggcgtgggcgtgcccgagctgatcaacagccccaaggacgccagcagcagcaccttccccaccctgaccagacacaccttcgtggtgttcttcagagtgatgatggccgagctggagaagaccgtgaagaagatcgagcccggcaccgccgccgacagccagcagatccacgaggagaagctgctgtactggaacatggccgtgagagacttcagcatcctgatcaacctgatcaaggtgttcgacagccaccccgtgctgcacgtgtgcctgaagtacggcagactgttcgtggaggccttcctgaagcagtgcatgcccctgctggacttcagcttcagaaagcacagagaggacgtgctgagcctgctggagaccttccagctggacaccagactgctgcaccacctgtgcggccacagcaagatccaccaggacaccagactgacccagcacgtgcccctgctgaagaagaccctggagctgctggtgtgcagagtgaaggccatgctgaccctgaacaactgcagagaggccttctggctgggcaacctgaagaacagagacctgcagggcgaggagatcaagagccagaacagccaggagagcaccgccgacgagagcgaggacgacatgagcagccaggccagcaagagcaaggccaccgaggacggcgaggaggacgaggtgagcgccggcgagaaggagcaggacagcgacgagagctacgacgacagcgactag

SEQ ID NO: 81242 - DNA, 4356 bp, synthetic construct; identical to SEQ ID NO: 81241
  misc_feature 1..4356: note = Description of Artificial Sequence: Synthetic coding sequence
  source 1..4356: mol_type = other DNA

SEQ ID NO: 81243 - DNA, 1341 bp, synthetic construct
  misc_feature 1..1341: note = Description of Artificial Sequence: Synthetic coding sequence
  source 1..1341: mol_type = other DNA
atggacagcagcgccgcccccaccaacgccagcaactgcaccgacgccctggcctacagcagctgcagccccgcccccagccccggcagctgggtgaacctgagccacctggacggcaacctgagcgacccctgcggccccaacagaaccgacctgggcggcagagacagcctgtgcccccccaccggcagccccagcatgatcaccgccatcaccatcatggccctgtacagcatcgtgtgcgtggtgggcctgttcggcaacttcctggtgatgtacgtgatcgtgagatacaccaagatgaagaccgccaccaacatctacatcttcaacctggccctggccgacgccctggccaccagcaccctgcccttccagagcgtgaactacctgatgggcacctggcccttcggcaccatcctgtgcaagatcgtgatcagcatcgactactacaacatgttcaccagcatcttcaccctgtgcaccatgagcgtggacagatacatcgccgtgtgccaccccgtgaaggccctggacttcagaacccccagaaacgccaagatcatcaacgtgtgcaactggatcctgagcagcgccatcggcctgcccgtgatgttcatggccaccaccaagtacagacagggcagcatcgactgcaccctgaccttcagccaccccacctggtactgggagaacctgctgaagatctgcgtgttcatcttcgccttcatcatgcccgtgctgatcatcaccgtgtgctacggcctgatgatcctgagactgaagagcgtgagaatgctgagcggcagcaaggagaaggacagaaacctgagaagaatcaccagaatggtgctggtggtggtggccgtgttcatcgtgtgctggacccccatccacatctacgtgatcatcaaggccctggtgaccatccccgagaccaccttccagaccgtgagctggcacttctgcatcgccctgggctacaccaacagctgcctgaaccccgtgctgtacgccttcctggacgagaacttcaagagatgcttcagagagttctgcatccccaccagcagcaacatcgagcagcagaacagcaccagaatcagacagaacaccagagaccaccccagcaccgccaacaccgtggacagaaccaaccaccagtgcctgcccatccccagcctgagctgctgggccctggagcagggctgcctggtggtgtaccccggccccctgcagggccccctggtgagatacgacctgcccgccatcctgcacagcagctgcctgagaggcaacaccgcccccagccccagcggcggcgccttcctgctgagctag

SEQ ID NO: 81244 - DNA, 1125 bp, synthetic construct
  misc_feature 1..1125: note = Description of Artificial Sequence: Synthetic coding sequence
  source 1..1125: mol_type = other DNA
atggagagcctgctgcagcacctggacagattcagcgagctgctggccgtgagcagcaccacctacgtgagcacctgggaccccgccaccgtgagaagagccctgcagtgggccagatacctgagacacatccacagaagattcggcagacacggccccatcagaaccgccctggagagaagactgcacaaccagtggagacaggagggcggcttcggcagaggccccgtgcccggcctggccaacttccaggccctgggccactgcgacgtgctgctgagcctgagactgctggagaacagagccctgggcgacgccgccagataccacctggtgcagcagctgttccccggccccggcgtgagagacgccgacgaggagaccctgcaggagagcctggccagactggccagaagaagaagcgccgtgcacatgctgagattcaacggctacagagagaaccccaacctgcaggaggacagcctgatgaagacccaggccgagctgctgctggagagactgcaggaggtgggcaaggccgaggccgagagacccgccagattcctgagcagcctgtgggagagactgccccagaacaacttcctgaaggtgatcgccgtggccctgctgcagccccccctgagcagaagaccccaggaggagctggagcccggcatccacaagagccccggcgagggcagccaggtgctggtgcactggctgctgggcaacagcgaggtgttcgccgccttctgcagagccctgcccgccggcctgctgaccctggtgaccagcagacaccccgccctgagccccgtgtacctgggcctgctgaccgactggggccagagactgcactacgacctgcagaagggcatctgggtgggcaccgagagccaggacgtgccctgggaggagctgcacaacagattccagagcctgtgccaggcccccccccccctgaaggacaaggtgctgaccgccctggagacctgcaaggcccaggacggcgacttcgaggtgcccggcctgagcatctggaccgacctgctgctggccctgagaagcggcgccttcagaaagagacaggtgctgggcctgagcgccggcctgagcagcgtgtag

SEQ ID NO: 81245 - DNA, 3807 bp, synthetic construct
  misc_feature 1..3807: note = Description of Artificial Sequence: Synthetic coding sequence
  source 1..3807: mol_type = other DNA
atggaccagaagatcctgagcctggccgccgagaagaccgccgacaagctgcaggagttcctgcagaccctgagagagggcgacctgaccaacctgctgcagaaccaggccgtgaagggcaaggtggccggcgccctgctgagagccatcttcaagggcagcccctgcagcgaggaggccggcaccctgagaagaagaaagatctacacctgctgcatccagctggtggagagcggcgacctgcagaaggagatcgccagcgagatcatcggcctgctgatgctggaggcccaccacttccccggccccctgctggtggagctggccaacgagttcatcagcgccgtgagagagggcagcctggtgaacggcaagagcctggagctgctgcccatcatcctgaccgccctggccaccaagaaggagaacctggcctacggcaagggcgtgctgagcggcgaggagtgcaagaagcagctgatcaacaccctgtgcagcggcagatgggaccagcagtacgtgatccagctgaccagcatgttcaaggacgtgcccctgaccgccgaggaggtggagttcgtggtggagaaggccctgagcatgttcagcaagatgaacctgcaggagatcccccccctggtgtaccagctgctggtgctgagcagcaagggcagcagaaagagcgtgctggagggcatcatcgccttcttcagcgccctggacaagcagcacaacgaggagcagagcggcgacgagctgctggacgtggtgaccgtgcccagcggcgagctgagacacgtggagggcaccatcatcctgcacatcgtgttcgccatcaagctggactacgagctgggcagagagctggtgaagcacctgaaggtgggccagcagggcgacagcaacaacaacctgagccccttcagcatcgccctgctgctgagcgtgaccagaatccagagattccaggaccaggtgctggacctgctgaagaccagcgtggtgaagagcttcaaggacctgcagctgctgcagggcagcaagttcctgcagaacctggtgccccacagaagctacgtgagcaccatgatcctggaggtggtgaagaacagcgtgcacagctgggaccacgtgacccagggcctggtggagctgggcttcatcctgatggacagctacggccccaagaaggtgctggacggcaagaccatcgagaccagccccagcctgagcagaatgcccaaccagcacgcctgcaagctgggcgccaacatcctgctggagaccttcaagatccacgagatgatcagacaggagatcctggagcaggtgctgaacagagtggtgaccagagccagcagccccatcagccacttcctggacctgctgagcaacatcgtgatgtacgcccccctggtgctgcagagctgcagcagcaaggtgaccgaggccttcgactacctgagcttcctgcccctgcagaccgtgcagagactgctgaaggccgtgcagcccctgctgaaggtgagcatgagcatgagagactgcctgatcctggtgctgagaaaggccatgttcgccaaccagctggacgccagaaagagcgccgtggccggcttcctgctgctgctgaagaacttcaaggtgctgggcagcctgagcagcagccagtgcagccagagcctgagcgtgagccaggtgcacgtggacgtgcacagccactacaacagcgtggccaacgagaccttctgcctggagatcatggacagcctgagaagatgcctgagccagcaggccgacgtgagactgatgctgtacgagggcttctacgacgtgctgagaagaaacagccagctggccaacagcgtgatgcagaccctgctgagccagctgaagcagttctacgagcccaagcccgacctgctgccccccctgaagctggaggcctgcatcctgacccagggcgacaagatcagcctgcaggagcccctggactacctgctgtgctgcatccagcactgcctggcctggtacaagaacaccgtgatccccctgcagcagggcgaggaggaggaggaggaggaggaggccttctacgaggacctggacgacatcctggagagcatcaccaacagaatgatcaagagcgagctggaggacttcgagctggacaagagcgccgacttcagccagagcaccagcatcggcatcaagaacaacatctgcgccttcctggtgatgggcgtgtgcgaggtgctgatcgagtacaacttcagcatcagcagcttcagcaagaacagattcgaggacatcctgagcctgttcatgtgctacaagaagctgagcgacatcctgaacgagaaggccggcaaggccaagaccaagatggccaacaagaccagcgacagcctgctgagcatgaagttcgtgagcagcctgctgaccgccctgttcagagtgctgctgtggagatacaccagcatccccaccagcgtggaggagagcggcaagaaggagaagggcaagagcatcagcctgctgtgcctggagggcctgcagaagatcttcagcgccgtgcagcagttctaccagcccaagatccagcagttcctgagagccctggacgtgaccgacaaggagggcgaggagagagaggacgccgacgtgagcgtgacccagagaaccgccttccagatcagacagttccagagaagcctgctgaacctgctgagcagccaggaggaggacttcaacagcaaggaggccctgctgctggtgaccgtgctgaccagcctgagcaagctgctggagcccagcagcccccagttcgtgcagatgctgagctggaccagcaagatctgcaaggagaacagcagagaggacgccctgttctgcaagagcctgatgaacctgctgttcagcctgcacgtgagctacaagagccccgtgatcctgctgagagacctgagccaggacatccacggccacctgggcgacatcgaccaggacgtggaggtggagaagaccaaccacttcgccatcgtgaacctgagaaccgccgcccccaccgtgtgcctgctggtgctgagccaggccgagaaggtgctggaggaggtggactggctgatcaccaagctgaagggccaggtgagccaggagaccctgagcgaggaggccagcagccaggccaccctgcccaaccagcccgtggagaaggccatcatcatgcagctgggcaccctgctgaccttcttccacgagctggtgcagaccgccctgcccagcggcagctgcgtggacaccctgctgaaggacctgtgcaagatgtacaccaccctgaccgccctggtgagatactacctgcaggtgtgccagagcagcggcggcatccccaagaacatggagaagctggtgaagctgagcggcagccacctgacccccctgtgctacagcttcatcagctacgtgcagaacaagagcaagagcctgaactacaccggcgagaagaaggagaagcccgccgccgtggccaccgccatggccagagtgctgagagagaccaagcccatccccaacctgatcttcgccatcgagcagtacgagaagttcctgatccacctgagcaagaagagcaaggtgaacctgatgcagcacatgaagctgagcaccagcagagacttcaagatcaagggcaacatcctggacatggtgctgagagaggacggcgaggacgagaacgaggagggcaccgccagcgagcacggcggccagaacaaggagcccgccaagaagaagagaaagaagtag

SEQ ID NO: 81246 - DNA, 3987 bp, synthetic construct
  misc_feature 1..3987: note = Description of Artificial Sequence: Synthetic coding sequence
  source 1..3987: mol_type = other DNA
atggaccagaagatcctgagcctggccgccgagaagaccgccgacaagctgcaggagttcctgcagaccctgagagagggcgacctgaccaacctgctgcagaaccaggccgtgaagggcaaggtggccggcgccctgctgagagccatcttcaagggcagcccctgcagcgaggaggccggcaccctgagaagaagaaagatctacacctgctgcatccagctggtggagagcggcgacctgcagaaggagatcgccagcgagatcatcggcctgctgatgctggaggcccaccacttccccggccccctgctggtggagctggccaacgagttcatcagcgccgtgagagagggcagcctggtgaacggcaagagcctggagctgctgcccatcatcctgaccgccctggccaccaagaaggagaacctggcctacggcaagggcgtgctgagcggcgaggagtgcaagaagcagctgatcaacaccctgtgcagcggcagatgggaccagcagtacgtgatccagctgaccagcatgttcaaggacgtgcccctgaccgccgaggaggtggagttcgtggtggagaaggccctgagcatgttcagcaagatgaacctgcaggagatcccccccctggtgtaccagctgctggtgctgagcagcaagggcagcagaaagagcgtgctggagggcatcatcgccttcttcagcgccctggacaagcagcacaacgaggagcagagcggcgacgagctgctggacgtggtgaccgtgcccagcggcgagctgagacacgtggagggcaccatcatcctgcacatcgtgttcgccatcaagctggactacgagctgggcagagagctggtgaagcacctgaaggtgggccagcagggcgacagcaacaacaacctgagccccttcagcatcgccctgctgctgagcgtgaccagaatccagagattccaggaccaggtgctggacctgctgaagaccagcgtggtgaagagcttcaaggacctgcagctgctgcagggcagcaagttcctgcagaacctggtgccccacagaagctacgtgagcaccatgatcctggaggtggtgaagaacagcgtgcacagctgggaccacgtgacccagggcctggtggagctgggcttcatcctgatggacagctacggccccaagaaggtgctggacggcaagaccatcgagaccagccccagcctgagcagaatgcccaaccagcacgcctgcaagctgggcgccaacatcctgctggagaccttcaagatccacgagatgatcagacaggagatcctggagcaggtgctgaacagagtggtgaccagagccagcagccccatcagccacttcctggacctgctgagcaacatcgtgatgtacgcccccctggtgctgcagagctgcagcagcaaggtgaccgaggccttcgactacctgagcttcctgcccctgcagaccgtgcagagactgctgaaggccgtgcagcccctgctgaaggtgagcatgagcatgagagactgcctgatcctggtgctgagaaaggccatgttcgccaaccagctggacgccagaaagagcgccgtggccggcttcctgctgctgctgaagaacttcaaggtgctgggcagcctgagcagcagccagtgcagccagagcctgagcgtgagccaggtgcacgtggacgtgcacagccactacaacagcgtggccaacgagaccttctgcctggagatcatggacagcctgagaagatgcctgagccagcaggccgacgtgagactgatgctgtacgagggcttctacgacgtgctgagaagaaacagccagctggccaacagcgtgatgcagaccctgctgagccagctgaagcagttctacgagcccaagcccgacctgctgccccccctgaagctggaggcctgcatcctgacccagggcgacaagatcagcctgcaggagcccctggactacctgctgtgctgcatccagcactgcctggcctggtacaagaacaccgtgatccccctgcagcagggcgaggaggaggaggaggaggaggaggccttctacgaggacctggacgacatcctggagagcatcaccaacagaatgatcaagagcgagctggaggacttcgagctggacaagagcgccgacttcagccagagcaccagcatcggcatcaagaacaacatctgcgccttcctggtgatgggcgtgtgcgaggtgctgatcgagtacaacttcagcatcagcagcttcagcaagaacagattcgaggacatcctgagcctgttcatgtgctacaagaagctgagcgacatcctgaacgagaaggccggcaaggccaagaccaagatggccaacaagaccagcgacagcctgctgagcatgaagttcgtgagcagcctgctgaccgccctgttcagagacagcatccagagccaccaggagagcctgagcgtgctgagaagcagcaacgagttcatgagatacgccgtgaacgtggccctgcagaaggtgcagcagctgaaggagaccggccacgtgagcggccccgacggccagaaccccgagaagatcttccagaacctgtgcgacatcaccagagtgctgctgtggagatacaccagcatccccaccagcgtggaggagagcggcaagaaggagaagggcaagagcatcagcctgctgtgcctggagggcctgcagaagatcttcagcgccgtgcagcagttctaccagcccaagatccagcagttcctgagagccctggacgtgaccgacaaggagggcgaggagagagaggacgccgacgtgagcgtgacccagagaaccgccttccagatcagacagttccagagaagcctgctgaacctgctgagcagccaggaggaggacttcaacagcaaggaggccctgctgctggtgaccgtgctgaccagcctgagcaagctgctggagcccagcagcccccagttcgtgcagatgctgagctggaccagcaagatctgcaaggagaacagcagagaggacgccctgttctgcaagagcctgatgaacctgctgttcagcctgcacgtgagctacaagagccccgtgatcctgctgagagacctgagccaggacatccacggccacctgggcgacatcgaccaggacgtggaggtggagaagaccaaccacttcgccatcgtgaacctgagaaccgccgcccccaccgtgtgcctgctggtgctgagccaggccgagaaggtgctggaggaggtggactggctgatcaccaagctgaagggccaggtgagccaggagaccctgagcgaggaggccagcagccaggccaccctgcccaaccagcccgtggagaaggccatcatcatgcagctgggcaccctgctgaccttcttccacgagctggtgcagaccgccctgcccagcggcagctgcgtggacaccctgctgaaggacctgtgcaagatgtacaccaccctgaccgccctggtgagatactacctgcaggtgtgccagagcagcggcggcatccccaagaacatggagaagctggtgaagctgagcggcagccacctgacccccctgtgctacagcttcatcagctacgtgcagaacaagagcaagagcctgaactacaccggcgagaagaaggagaagcccgccgccgtggccaccgccatggccagagtgctgagagagaccaagcccatccccaacctgatcttcgccatcgagcagtacgagaagttcctgatccacctgagcaagaagagcaaggtgaacctgatgcagcacatgaagctgagcaccagcagagacttcaagatcaagggcaacatcctggacatggtgctgagagaggacggcgaggacgagaacgaggagggcaccgccagcgagcacggcggccagaacaaggagcccgccaagaagaagagaaagaagtag

SEQ ID NO: 81247 - DNA, 3288 bp, synthetic construct
  misc_feature 1..3288: note = Description of Artificial Sequence: Synthetic coding sequence
  source 1..3288: mol_type = other DNA
atggaccagaagatcctgagcctggccgccgagaagaccgccgacaagctgcaggagttcctgcagaccctgagagagggcgacctgaccaacctgctgcagaaccaggccgtgaagggcaaggtggccggcgccctgctgagagccatcttcaagggcagcccctgcagcgaggaggccggcaccctgagaagaagaaagatctacacctgctgcatccagctggtggagagcggcgacctgcagaaggagatcgccagcgagatcatcggcctgctgatgctggaggcccaccacttccccggccccctgctggtggagctggccaacgagttcatcagcgccgtgagagagggcagcctggtgaacggcaagagcctggagctgctgcccatcatcctgaccgccctggccaccaagaaggagaacctggcctacggcaagggcgtgctgagcggcgaggagtgcaagaagcagctgatcaacaccctgtgcagcggcagatgggaccagcagtacgtgatccagctgaccagcatgttcaaggacgtgcccctgaccgccgaggaggtggagttcgtggtggagaaggccctgagcatgttcagcaagatgaacctgcaggagatcccccccctggtgtaccagctgctggtgctgagcagcaagggcagcagaaagagcgtgctggagggcatcatcgccttcttcagcgccctggacaagcagcacaacgaggagcagagcggcgacgagctgctggacgtggtgaccgtgcccagcggcgagctgagacacgtggagggcaccatcatcctgcacatcgtgttcgccatcaagctggactacgagctgggcagagagctggtgaagcacctgaaggtgggccagcagggcgacagcaacaacaacctgagccccttcagcatcgccctgctgctgagcgtgaccagaatccagagattccaggaccaggtgctggacctgctgaagaccagcgtggtgaagagcttcaaggacctgcagctgctgcagggcagcaagttcctgcagaacctggtgccccacagaagctacgtgagcaccatgatcctggaggtggtgaagaacagcgtgcacagctgggaccacgtgacccagggcctggtggagctgggcttcatcctgatggacagctacggccccaagaaggtgctggacggcaagaccatcgagaccagccccagcctgagcagaatgcccaaccagcacgcctgcaagctgggcgccaacatcctgctggagaccttcaagatccacgagatgatcagacaggagatcctggagcaggtgctgaacagagtggtgaccagagccagcagccccatcagccacttcctggacctgctgagcaacatcgtgatgtacgcccccctggtgctgcagagctgcagcagcaaggtgaccgaggccttcgactacctgagcttcctgcccctgcagaccgtgcagagactgctgaaggccgtgcagcccctgctgaaggtgagcatgagcatgagagactgcctgatcctggtgctgagaaaggccatgttcgccaaccagctggacgccagaaagagcgccgtggccggcttcctgctgctgctgaagaacttcaaggtgctgggcagcctgagcagcagccagtgcagccagagcctgagcgtgagccaggtgcacgtggacgtgcacagccactacaacagcgtggccaacgagaccttctgcctggagatcatggacagcctgagaagatgcctgagccagcaggccgacgtgagactgatgctgtacgagggcttctacgacgtgctgagaagaaacagccagctggccaacagcgtgatgcagaccctgctgagccagctgaagcagttctacgagcccaagcccgacctgctgccccccctgaagctggaggcctgcatcctgacccagggcgacaagatcagcctgcaggagcccctggactacctgctgtgctgcatccagcactgcctggcctggtacaagaacaccgtgatccccctgcagcagggcgaggaggaggaggaggaggaggaggccttctacgaggacctggacgacatcctggagagcatcaccaacagaatgatcaagagcgagctggaggacttcgagctggacaagagcgccgacttcagccagagcaccagcatcggcatcaagaacaacatctgcgccttcctggtgatgggcgtgtgcgaggtgctgatcgagtacaacttcagcatcagcagcttcagcaagaacagattcgaggacatcctgagcctgttcatgtgctacaagaagctgagcgacatcctgaacgagaaggccggcaaggccaagaccaagatggccaacaagaccagcgacagcctgctgagcatgaagttcgtgagcagcctgctgaccgccctgttcagagtgctgctgtggagatacaccagcatccccaccagcgtggaggagagcggcaagaaggagaagggcaagagcatcagcctgctgtgcctggagggcctgcagaagatcttcagcgccgtgcagcagttctaccagcccaagatccagcagttcctgagagccctggacgtgaccgacaaggagggcgaggagagagaggacgccgacgtgagcgtgacccagagaaccgccttccagatcagacagttccagagaagcctgctgaacctgctgagcagccaggaggaggacttcaacagcaaggaggccctgctgctggtgaccgtgctgaccagcctgagcaagctgctggagcccagcagcccccagttcgtgcagatgctgagctggaccagcaagatctgcaaggagaacagcagagaggacgccctgttctgcaagagcctgatgaacctgctgttcagcctgcacgtgagctacaagagccccgtgatcctgctgagagacctgagccaggacatccacggccacctgggcgacatcgaccaggacgtggaggtggagaagaccaaccacttcgccatcgtgaacctgagaaccgccgcccccaccgtgtgcctgctggtgctgagccaggccgagaaggtgctggaggaggtggactggctgatcaccaagctgaagggccaggtgagccaggagaccctgagcgtgagccccggcgtgagcgagctgagaagaaacagcaagaagtacggcaaggccggcgaggccgtgtggttcagcagcgacccccccgtgctgttcttccacttcctgagaaccgagtag

SEQ ID NO: 81248 - DNA, 222 bp, synthetic construct
  misc_feature 1..222: note = Description of Artificial Sequence: Synthetic coding sequence
  source 1..222: mol_type = other DNA
atgttcaaggacgtgcccctgaccgccgaggaggtggagttcgtggtggagaaggccctgagcatgttcagcaagatgaacctgcaggagatcccccccctggtgtaccagctgctggtgctgagcagcaagggcagcagaaagagcgtgctggagggcatcatcgccttcttcagcgccctggacaagcagcacaacgaggagcagagcggcgacgagtag

SEQ ID NO: 81249 - DNA, 501 bp, synthetic construct
  misc_feature 1..501: note = Description of Artificial Sequence: Synthetic coding sequence
  source 1..501: mol_type = other DNA
atggcccagaccagcagctacttcatgctgatcagctgcctgatgttcctgagccagagccagggccaggaggcccagaccgagctgccccaggccagaatcagctgccccgagggcaccaacgcctacagaagctactgctactacttcaacgaggacagagagacctgggtggacgccgacctgtactgccagaacatgaacagcggcaacctggtgagcgtgctgacccaggccgagggcgccttcgtggccagcctgatcaaggagagcggcaccgacgacttcaacgtgtggatcggcctgcacgaccccaagaagaacagaagatggcactggagcagcggcagcctggtgagctacaagagctggggcatcggcgcccccagcagcgtgaaccccggctactgcgtgagcctgaccagcagcaccggcttccagaagtggaaggacgtgccctgcgaggacaagttcagcttcgtgtgcaagttcaagaactag

SEQ ID NO: 81250 - DNA, 384 bp, synthetic construct
  misc_feature 1..384: note = Description of Artificial Sequence: Synthetic coding sequence
  source 1..384: mol_type = other DNA
atggccgtgaccgaggccagcctgctgagacagtgccccctgctgctgccccagaacagaagcaagaccgtgtacgagggcttcatcagcgcccagggcagagacttccacctgagaatcgtgctgcccgaggacctgcagctgaagaacgccagactgctgtgcagctggcagctgagaaccatcctgagcggctaccacagaatcgtgcagcagagaatgcagcacagccccgacctgatgagcttcatgatggagctgaagatgctgctggaggtggccctgaagaacagacaggagctgtacgccctgcccccccccccccagttctacagcagcctgatcgaggagatcggcaccctgggctgggacaaggccccctag

SEQ ID NO: 81251 - DNA, 6147 bp, synthetic construct
  misc_feature 1..6147: note = Description of Artificial Sequence: Synthetic coding sequence
  source 1..6147: mol_type = other DNA
atgagcggcagacagagaaccctgttccagacctggggcagcagcatcagcagaagcagcggcacccccggctgcagcagcggcaccgagagaccccagagccccggcagcagcaaggcccccctgcccgccgccgccgaggcccagctggagagcgacgacgacgtgctgctggtggccgcctacgaggccgagagacagctgtgcctggagaacggcggcttctgcaccagcgccggcgccctgtggatctaccccaccaactgccccgtgagagactaccagctgcacatcagcagagccgccctgttctgcaacaccctggtgtgcctgcccaccggcctgggcaagaccttcatcgccgccgtggtgatgtacaacttctacagatggttccccagcggcaaggtggtgttcatggcccccaccaagcccctggtgacccagcagatcgaggcctgctaccaggtgatgggcatcccccagagccacatggccgagatgaccggcagcacccaggccagcaccagaaaggagatctggtgcagcaagagagtgctgttcctgaccccccaggtgatggtgaacgacctgagcagaggcgcctgccccgccgccgagatcaagtgcctggtgatcgacgaggcccacaaggccctgggcaactacgcctactgccaggtggtgagagagctggtgaagtacaccaaccacttcagaatcctggccctgagcgccacccccggcagcgacatcaaggccgtgcagcaggtgatcaccaacctgctgatcggccagatcgagctgagaagcgaggacagccccgacatcctgacctacagccacgagagaaaggtggagaagctgatcgtgcccctgggcgaggagctggccgccatccagaagacctacatccagatcctggagagcttcgccagaagcctgatccagagaaacgtgctgatgagaagagacatccccaacctgaccaagtaccagatcatcctggccagagaccagttcagaaagaaccccagccccaacatcgtgggcatccagcagggcatcatcgagggcgagttcgccatctgcatcagcctgtaccacggctacgagctgctgcagcagatgggcatgagaagcctgtacttcttcctgtgcggcatcatggacggcaccaagggcatgaccagaagcaagaacgagctgggcagaaacgaggacttcatgaagctgtacaaccacctggagtgcatgttcgccagaaccagaagcaccagcgccaacggcatcagcgccatccagcagggcgacaagaacaagaagttcgtgtacagccaccccaagctgaagaagctggaggaggtggtgatcgagcacttcaagagctggaacgccgagaacaccaccgagaagaagagagacgagaccagagtgatgatcttcagcagcttcagagacagcgtgcaggagatcgccgagatgctgagccagcaccagcccatcatcagagtgatgaccttcgtgggccacgccagcggcaagagcaccaagggcttcacccagaaggagcagctggaggtggtgaagcagttcagagacggcggctacaacaccctggtgagcacctgcgtgggcgaggagggcctggacatcggcgaggtggacctgatcatctgcttcgacagccagaagagccccatcagactggtgcagagaatgggcagaaccggcagaaagagacagggcagaatcgtgatcatcctgagcgagggcagagaggagagaatctacaaccagagccagagcaacaagagaagcatctacaaggccatcagcagcaacagacaggtgctgcacttctaccagagaagccccagaatggtgcccgacggcatcaaccccaagctgcacaagatgttcatcacccacggcgtgtacgagcccgagaagcccagcagaaacctgcagagaaagagcagcatcttcagctacagagacggcatgagacagagcagcctgaagaaggactggttcctgagcgaggaggagttcaagctgtggaacagactgtacagactgagagacagcgacgagatcaaggagatcaccctgccccaggtgcagttcagcagcctgcagaacgaggagaacaagcccgcccaggagagcaccaccggcatccaccagctgagcctgagcgagtggagactgtggcaggaccaccccctgcccacccaccaggtggaccacagcgacagatgcagacacttcatcggcctgatgcagatgatcgagggcatgagacacgaggagggcgagtgcagctacgagctggaggtggagagctacctgcagatggaggacgtgaccagcaccttcatcgcccccagaaacgagagcaacaacctggccagcgacaccttcatcacccacaagaagagcagcttcatcaagaacatcaaccagggcagcagcagcagcgtgatcgagagcgacgaggagtgcgccgagatcgtgaagcagacccacatcaagcccaccaagatcgtgagcctgaagaagaaggtgagcaaggagatcaagaaggaccagctgaagaaggagaacaaccacggcatcatcgacagcgtggacaacgacagaaacagcaccgtggagaacatcttccaggaggacctgcccaacgacaagagaaccagcgacaccgacgagatcgccgccacctgcaccatcaacgagaacgtgatcaaggagccctgcgtgctgctgaccgagtgccagttcaccaacaagagcaccagcagcctggccggcaacgtgctggacagcggctacaacagcttcaacgacgagaagagcgtgagcagcaacctgttcctgcccttcgaggaggagctgtacatcgtgagaaccgacgaccagttctacaactgccacagcctgaccaaggaggtgctggccaacgtggagagattcctgagctacagccccccccccctgagcggcctgagcgacctggagtacgagatcgccaagggcaccgccctggagaacctgctgttcctgccctgcgccgagcacctgagaagcgacaagtgcacctgcctgctgagccacagcgccgtgaacagccagcagaacctggagctgaacagcctgaagtgcatcaactaccccagcgagaagagctgcctgtacgacatccccaacgacaacatcagcgacgagcccagcctgtgcgactgcgacgtgcacaagcacaaccagaacgagaacctggtgcccaacaacagagtgcagatccacagaagccccgcccagaacctggtgggcgagaacaaccacgacgtggacaacagcgacctgcccgtgctgagcaccgaccaggacgagagcctgctgctgttcgaggacgtgaacaccgagttcgacgacgtgagcctgagccccctgaacagcaagagcgagagcctgcccgtgagcgacaagaccgccatcagcgagacccccctggtgagccagttcctgatcagcgacgagctgctgctggacaacaacagcgagctgcaggaccagatcaccagagacgccaacagcttcaagagcagagaccagagaggcgtgcaggaggagaaggtgaagaaccacgaggacatcttcgactgcagcagagacctgttcagcgtgaccttcgacctgggcttctgcagccccgacagcgacgacgagatcctggagcacaccagcgacagcaacagacccctggacgacctgtacggcagatacctggagatcaaggagatcagcgacgccaactacgtgagcaaccaggccctgatccccagagaccacagcaagaacttcaccagcggcaccgtgatcatccccagcaacgaggacatgcagaaccccaactacgtgcacctgcccctgagcgccgccaagaacgaggagctgctgagccccggctacagccagttcagcctgcccgtgcagaagaaggtgatgagcacccccctgagcaagagcaacaccctgaacagcttcagcaagatcagaaaggagatcctgaagacccccgacagcagcaaggagaaggtgaacctgcagagattcaaggaggccctgaacagcaccttcgactacagcgagttcagcctggagaagagcaagagcagcggccccatgtacctgcacaagagctgccacagcgtggaggacggccagctgctgaccagcaacgagagcgaggacgacgagatcttcagaagaaaggtgaagagagccaagggcaacgtgctgaacagccccgaggaccagaagaacagcgaggtggacagccccctgcacgccgtgaagaagagaagattccccatcaacagaagcgagctgagcagcagcgacgagagcgagaacttccccaagccctgcagccagctggaggacttcaaggtgtgcaacggcaacgccagaagaggcatcaaggtgcccaagagacagagccacctgaagcacgtggccagaaagttcctggacgacgaggccgagctgagcgaggaggacgccgagtacgtgagcagcgacgagaacgacgagagcgagaacgagcaggacagcagcctgctggacttcctgaacgacgagacccagctgagccaggccatcaacgacagcgagatgagagccatctacatgaagagcctgagaagccccatgatgaacaacaagtacaagatgatccacaagacccacaagaacatcaacatcttcagccagatccccgagcaggacgagacctacctggaggacagcttctgcgtggacgaggaggagagctgcaagggccagagcagcgaggaggaggtgtgcgtggacttcaacctgatcaccgacgactgcttcgccaacagcaagaagtacaagaccagaagagccgtgatgctgaaggagatgatggagcagaactgcgcccacagcaagaagaagctgagcagaatcatcctgcccgacgacagcagcgaggaggagaacaacgtgaacgacaagagagagagcaacatcgccgtgaaccccagcaccgtgaagaagaacaagcagcaggaccactgcctgaacagcgtgcccagcggcagcagcgcccagagcaaggtgagaagcacccccagagtgaaccccctggccaagcagagcaagcagaccagcctgaacctgaaggacaccatcagcgaggtgagcgacttcaagccccagaaccacaacgaggtgcagagcaccaccccccccttcaccaccgtggacagccagaaggactgcagaaagttccccgtgccccagaaggacggcagcgccctggaggacagcagcaccagcggcgccagctgcagcaagagcagaccccacctggccggcacccacaccagcctgagactgccccaggagggcaagggcacctgcatcctggtgggcggccacgagatcaccagcggcctggaggtgatcagcagcctgagagccatccacggcctgcaggtggaggtgtgccccctgaacggctgcgactacatcgtgagcaacagaatggtggtggagagaagaagccagagcgagatgctgaacagcgtgaacaagaacaagttcatcgagcagatccagcacctgcagagcatgttcgagagaatctgcgtgatcgtggagaaggacagagagaagaccggcgacaccagcagaatgttcagaagaaccaagagctacgacagcctgctgaccaccctgatcggcgccggcatcagaatcctgttcagcagctgccaggaggagaccgccgacctgctgaaggagctgagcctggtggagcagagaaagaacgtgggcatccacgtgcccaccgtggtgaacagcaacaagagcgaggccctgcagttctacctgagcatccccaacatcagctacatcaccgccctgaacatgtgccaccagttcagcagcgtgaagagaatggccaacagcagcctgcaggagatcagcatgtacgcccaggtgacccaccagaaggccgaggagatctacagatacatccactacgtgttcgacatccagatgctgcccaacgacctgaaccaggacagactgaagagcgacatctag

SEQ ID NO: 81252 - DNA, 2010 bp, synthetic construct
  misc_feature 1..2010: note = Description of Artificial Sequence: Synthetic coding sequence
  source 1..2010: mol_type = other DNA
atgagcggcagacagagaaccctgttccagacctggggcagcagcatcagcagaagcagcggcacccccggctgcagcagcggcaccgagagaccccagagccccggcagcagcaaggcccccctgcccgccgccgccgaggcccagctggagagcgacgacgacgtgctgctggtggccgcctacgaggccgagagacagctgtgcctggagaacggcggcttctgcaccagcgccggcgccctgtggatctaccccaccaactgccccgtgagagactaccagctgcacatcagcagagccgccctgttctgcaacaccctggtgtgcctgcccaccggcctgggcaagaccttcatcgccgccgtggtgatgtacaacttctacagatggttccccagcggcaaggtggtgttcatggcccccaccaagcccctggtgacccagcagatcgaggcctgctaccaggtgatgggcatcccccagagccacatggccgagatgaccggcagcacccaggccagcaccagaaaggagatctggtgcagcaagagagtgctgttcctgaccccccaggtgatggtgaacgacctgagcagaggcgcctgccccgccgccgagatcaagtgcctggtgatcgacgaggcccacaaggccctgggcaactacgcctactgccaggtggtgagagagctggtgaagtacaccaaccacttcagaatcctggccctgagcgccacccccggcagcgacatcaaggccgtgcagcaggtgatcaccaacctgctgatcggccagatcgagctgagaagcgaggacagccccgacatcctgacctacagccacgagagaaaggtggagaagctgatcgtgcccctgggcgaggagctggccgccatccagaagacctacatccagatcctggagagcttcgccagaagcctgatccagagaaacgtgctgatgagaagagacatccccaacctgaccaagtaccagatcatcctggccagagaccagttcagaaagaaccccagccccaacatcgtgggcatccagcagggcatcatcgagggcgagttcgccatctgcatcagcctgtaccacggctacgagctgctgcagcagatgggcatgagaagcctgtacttcttcctgtgcggcatcatggacggcaccaagggcatgaccagaagcaagaacgagctgggcagaaacgaggacttcatgaagctgtacaaccacctggagtgcatgttcgccagaaccagaagcaccagcgccaacggcatcagcgccatccagcagggcgacaagaacaagaagttcgtgtacagccaccccaagctgaagaagctggaggaggtggtgatcgagcacttcaagagctggaacgccgagaacaccaccgagaagaagagagacgagaccagagtgatgatcttcagcagcttcagagacagcgtgcaggagatcgccgagatgctgagccagcaccagcccatcatcagagtgatgaccttcgtgggccacgccagcggcaagagcaccaagggcttcacccagaaggagcagctggaggtggtgaagcagttcagagacggcggctacaacaccctggtgagcacctgcgtgggcgaggagggcctggacatcggcgaggtggacctgatcatctgcttcgacagccagaagagccccatcagactggtgcagagaatgggcagaaccggcagaaagagacagggcagaatcgtgatcatcctgagcgagggcagagaggagagaatctacaaccagagccagagcaacaagagaagcatctacaaggccatcagcagcaacagacaggtgctgcacttctaccagagaagccccagaatggtgcccgacggcatcaaccccaagctgcacaagatgttcatcacccacggcgtgtacgagcccgagaagcccagcagaaacctgcagagaaagagcagcatcttcagctacagagacggcaagtag

SEQ ID NO: 81253 - DNA, 1968 bp, synthetic construct
  misc_feature 1..1968: note = Description of Artificial Sequence: Synthetic coding sequence
  source 1..1968: mol_type = other DNA
atggccgactacagcaccgtgcccccccccagcagcggcagcgccggcggcggcggcggcggcggcggcggcggcggcgtgaacgacgccttcaaggacgccctgcagagagccagacagatcgccgccaagatcggcggcgacgccggcaccagcctgaacagcaacgactacggctacggcggccagaagagacccctggaggacggcgaccagcccgacgccaagaaggtggccccccagaacgacagcttcggcacccagctgccccccatgcaccagcagcagagcagaagcgtgatgaccgaggagtacaaggtgcccgacggcatggtgggcttcatcatcggcagaggcggcgagcagatcagcagaatccagcaggagagcggctgcaagatccagatcgcccccgacagcggcggcctgcccgagagaagctgcatgctgaccggcacccccgagagcgtgcagagcgccaagagactgctggaccagatcgtggagaagggcagacccgcccccggcttccaccacggcgacggccccggcaacgccgtgcaggagatcatgatccccgccagcaaggccggcctggtgatcggcaagggcggcgagaccatcaagcagctgcaggagagagccggcgtgaagatggtgatgatccaggacggcccccagaacaccggcgccgacaagcccctgagaatcaccggcgacccctacaaggtgcagcaggccaaggagatggtgctggagctgatcagagaccagggcggcttcagagaggtgagaaacgagtacggcagcagaatcggcggcaacgagggcatcgacgtgcccatccccagattcgccgtgggcatcgtgatcggcagaaacggcgagatgatcaagaagatccagaacgacgccggcgtgagaatccagttcaagcccgacgacggcaccacccccgagagaatcgcccagatcaccggcccccccgacagatgccagcacgccgccgagatcatcaccgacctgctgagaagcgtgcaggccggcaaccccggcggccccggccccggcggcagaggcagaggcagaggccagggcaactggaacatgggcccccccggcggcctgcaggagttcaacttcatcgtgcccaccggcaagaccggcctgatcatcggcaagggcggcgagaccatcaagagcatcagccagcagagcggcgccagaatcgagctgcagagaaaccccccccccaacgccgaccccaacatgaagctgttcaccatcagaggcaccccccagcagatcgactacgccagacagctgatcgaggagaagatcggcggccccgtgaaccccctgggcccccccgtgccccacggcccccacggcgtgcccggcccccacggcccccccggcccccccggccccggcacccccatgggcccctacaaccccgccccctacaaccccggcccccccggccccgccccccacggcccccccgccccctacgccccccagggctggggcaacgcctacccccactggcagcagcaggccccccccgaccccgccaaggccggcaccgaccccaacagcgccgcctgggccgcctactacgcccactactaccagcagcaggcccagcccccccccgccgcccccgccggcgcccccaccaccacccagaccaacggccagggcgaccagcagaaccccgcccccgccggccaggtggactacaccaaggcctgggaggagtactacaagaagatgggccaggccgtgcccgcccccaccggcgccccccccggcggccagcccgactacagcgccgcctgggccgagtactacagacagcaggccgcctactacgcccagaccagcccccagggcatgccccagcacccccccgccccccagggcttcgccaaccacgccagaagccaccaccacctgtactag

SEQ ID NO: 81254 - DNA, 1935 bp, synthetic construct
  misc_feature 1..1935: note = Description of Artificial Sequence: Synthetic coding sequence
  source 1..1935: mol_type = other DNA
atggccgactacagcaccgtgcccccccccagcagcggcagcgccggcggcggcggcggcggcggcggcggcggcggcgtgaacgacgccttcaaggacgccctgcagagagccagacagatcgccgccaagatcggcggcgacgccggcaccagcctgaacagcaacgactacggctacggcggccagaagagacccctggaggacggcgaccagcccgacgccaagaaggtggccccccagaacgacagcttcggcacccagctgccccccatgcaccagcagcagagcagaagcgtgatgaccgaggagtacaaggtgcccgacggcatggtgggcttcatcatcggcagaggcggcgagcagatcagcagaatccagcaggagagcggctgcaagatccagatcgcccccgacagcggcggcctgcccgagagaagctgcatgctgaccggcacccccgagagcgtgcagagcgccaagagactgctggaccagatcgtggagaagggcagacccgcccccggcttccaccacggcgacggccccggcaacgccgtgcaggagatcatgatccccgccagcaaggccggcctggtgatcggcaagggcggcgagaccatcaagcagctgcaggagagagccggcgtgaagatggtgatgatccaggacggcccccagaacaccggcgccgacaagcccctgagaatcaccggcgacccctacaaggtgcagcaggccaaggagatggtgctggagctgatcagagaccagggcggcttcagagaggtgagaaacgagtacggcagcagaatcggcggcaacgagggcatcgacgtgcccatccccagattcgccgtgggcatcgtgatcggcagaaacggcgagatgatcaagaagatccagaacgacgccggcgtgagaatccagttcaagcccgacgacggcaccacccccgagagaatcgcccagatcaccggcccccccgacagatgccagcacgccgccgagatcatcaccgacctgctgagaagcgtgcaggccggcaaccccggcggccccggccccggcggcagaggcagaggcagaggccagggcaactggaacatgggcccccccggcggcctgcaggagttcaacttcatcgtgcccaccggcaagaccggcctgatcatcggcaagggcggcgagaccatcaagagcatcagccagcagagcggcgccagaatcgagctgcagagaaaccccccccccaacgccgaccccaacatgaagctgttcaccatcagaggcaccccccagcagatcgactacgccagacagctgatcgaggagaagatcggcggccccgtgaaccccctgggcccccccgtgccccacggcccccacggcgtgcccggcccccacggcccccccggcccccccggccccggcacccccatgggcccctacaaccccgccccctacaaccccggcccccccggccccgccccccacggcccccccgccccctacgccccccagggctggggcaacgcctacccccactggcagcagcaggccccccccgaccccgccaaggccggcaccgaccccaacagcgccgcctgggccgcctactacgcccactactaccagcagcaggcccagcccccccccgccgcccccgccggcgcccccaccaccacccagaccaacggccagggcgaccagcagaaccccgcccccgccggccaggtggactacaccaaggcctgggaggagtactacaagaagatgggccaggccgtgcccgcccccaccggcgccccccccggcggccagcccgactacagcgccgcctgggccgagtactacagacagcaggccgcctactacgcccagaccagcccccagggcatgccccagcacccccccgccccccagggccagtag

SEQ ID NO: 81255 - DNA, 1965 bp, synthetic construct
  misc_feature 1..1965: note = Description of Artificial Sequence: Synthetic coding sequence
  source 1..1965: mol_type = other DNA
atggccgactacagcaccgtgcccccccccagcagcggcagcgccggcggcggcggcggcggcggcggcggcggcggcgtgaacgacgccttcaaggacgccctgcagagagccagacagatcgccgccaagatcggcggcgacgccggcaccagcctgaacagcaacgactacggctacggcggccagaagagacccctggaggacggcgaccagcccgacgccaagaaggtggccccccagaacgacagcttcggcacccagctgccccccatgcaccagcagcagagaagcgtgatgaccgaggagtacaaggtgcccgacggcatggtgggcttcatcatcggcagaggcggcgagcagatcagcagaatccagcaggagagcggctgcaagatccagatcgcccccgacagcggcggcctgcccgagagaagctgcatgctgaccggcacccccgagagcgtgcagagcgccaagagactgctggaccagatcgtggagaagggcagacccgcccccggcttccaccacggcgacggccccggcaacgccgtgcaggagatcatgatccccgccagcaaggccggcctggtgatcggcaagggcggcgagaccatcaagcagctgcaggagagagccggcgtgaagatggtgatgatccaggacggcccccagaacaccggcgccgacaagcccctgagaatcaccggcgacccctacaaggtgcagcaggccaaggagatggtgctggagctgatcagagaccagggcggcttcagagaggtgagaaacgagtacggcagcagaatcggcggcaacgagggcatcgacgtgcccatccccagattcgccgtgggcatcgtgatcggcagaaacggcgagatgatcaagaagatccagaacgacgccggcgtgagaatccagttcaagcccgacgacggcaccacccccgagagaatcgcccagatcaccggcccccccgacagatgccagcacgccgccgagatcatcaccgacctgctgagaagcgtgcaggccggcaaccccggcggccccggccccggcggcagaggcagaggcagaggccagggcaactggaacatgggcccccccggcggcctgcaggagttcaacttcatcgtgcccaccggcaagaccggcctgatcatcggcaagggcggcgagaccatcaagagcatcagccagcagagcggcgccagaatcgagctgcagagaaaccccccccccaacgccgaccccaacatgaagctgttcaccatcagaggcaccccccagcagatcgactacgccagacagctgatcgaggagaagatcggcggccccgtgaaccccctgggcccccccgtgccccacggcccccacggcgtgcccggcccccacggcccccccggcccccccggccccggcacccccatgggcccctacaaccccgccccctacaaccccggcccccccggccccgccccccacggcccccccgccccctacgccccccagggctggggcaacgcctacccccactggcagcagcaggccccccccgaccccgccaaggccggcaccgaccccaacagcgccgcctgggccgcctactacgcccactactaccagcagcaggcccagcccccccccgccgcccccgccggcgcccccaccaccacccagaccaacggccaggagggcgaccagcagaaccccgcccccgccggccaggtggactacaccaaggcctgggaggagtactacaagaagatgggccaggccgtgcccgcccccaccggcgccccccccggcggccagcccgactacagcgccgcctgggccgagtactacagacagcaggccgcctactacgcccagaccagcccccagggcatgccccagcacccccccgccccccagtgcagattcgaccccgccagcatcgagctggccctgtag

SEQ ID NO: 81256 - DNA, 1890 bp, synthetic construct
  misc_feature 1..1890: note = Description of Artificial Sequence: Synthetic coding sequence
  source 1..1890: mol_type = other DNA
atggccgactacagcaccgtgcccccccccagcagcggcagcgccggcggcggcggcggcggcggcggcggcggcggcgtgaacgacgccttcaaggacgccctgcagagagccagacagatcgccgccaagatcggcggcgacgccggcaccagcctgaacagcaacgactacggctacggcggccagaagagacccctggaggacggcgaccagcccgacgccaagaaggtggccccccagaacgacagcttcggcacccagctgccccccatgcaccagcagcagagaagcgtgatgaccgaggagtacaaggtgcccgacggcatggtgggcttcatcatcggcagaggcggcgagcagatcagcagaatccagcaggagagcggctgcaagatccagatcgcccccgacagcggcggcctgcccgagagaagctgcatgctgaccggcacccccgagagcgtgcagagcgccaagagactgctggaccagatcgtggagaagggcagacccgcccccggcttccaccacggcgacggccccggcaacgccgtgcaggagatcatgatccccgccagcaaggccggcctggtgatcggcaagggcggcgagaccatcaagcagctgcaggagagagccggcgtgaagatggtgatgatccaggacggcccccagaacaccggcgccgacaagcccctgagaatcaccggcgacccctacaaggtgcagcaggccaaggagatggtgctggagctgatcagagaccagggcggcttcagagaggtgagaaacgagtacggcagcagaatcggcggcaacgagggcatcgacgtgcccatccccagattcgccgtgggcatcgtgatcggcagaaacggcgagatgatcaagaagatccagaacgacgccggcgtgagaatccagttcaagcccgacgacggcaccacccccgagagaatcgcccagatcaccggcccccccgacagatgccagcacgccgccgagatcatcaccgacctgctgagaagcgtgcaggccggcaaccccggcggccccggccccggcggcagaggcagaggcagaggccagggcaactggaacatgggcccccccggcggcctgcaggagttcaacttcatcgtgcccaccggcaagaccggcctgatcatcggcaagggcggcgagaccatcaagagcatcagccagcagagcggcgccagaatcgagctgcagagaaaccccccccccaacgccgaccccaacatgaagctgttcaccatcagaggcaccccccagcagatcgactacgccagacagctgatcgaggagaagatcggcggccccgtgaaccccctgggcccccccgtgccccacggcccccccggcacccccatgggcccctacaaccccgccccctacaaccccggcccccccggccccgccccccacggcccccccgccccctacgccccccagggctggggcaacgcctacccccactggcagcagcaggccccccccgaccccgccaaggccggcaccgaccccaacagcgccgcctgggccgcctactacgcccactactaccagcagcaggcccagcccccccccgccgcccccgccggcgcccccaccaccacccagaccaacggccagggcgaccagcagaaccccgcccccgccggccaggtggactacaccaaggcctgggaggagtactacaagaagatgggccaggccgtgcccgcccccaccggcgccccccccggcggccagcccgactacagcgccgcctgggccgagtactacagacagcaggccgcctactacgcccagaccagcccccagggcatgccccagcacccccccgccccccagggccagtag

SEQ ID NO: 81257 - DNA, 699 bp, synthetic construct
  misc_feature 1..699: note = Description of Artificial Sequence: Synthetic coding sequence
  source 1..699: mol_type = other DNA
atggccgactacagcaccgtgcccccccccagcagcggcagcgccggcggcggcggcggcggcggcggcggcggcggcgtgaacgacgccttcaaggacgccctgcagagagccagacagatcgccgccaagatcggcggcgacgccggcaccagcctgaacagcaacgactacggctacggcggccagaagagacccctggaggacggcgacggcagctggaccagccccagcagcaccacccactgggagggcatgcccagccccttcaaggaccagcccgacgccaagaaggtggccccccagaacgacagcttcggcacccagctgccccccatgcaccagcagcagagaagcgtgatgaccgaggagtacaaggtgcccgacggcatggtgggcttcatcatcggcagaggcggcgagcagatcagcagaatccagcaggagagcggctgcaagatccagatcgcccccgacagcggcggcctgcccgagagaagctgcatgctgaccggcacccccgagagcgtgcagagcgccaagagactgctggaccagatcgtggagaagggcagacccgcccccggcttccaccacggcgacggccccggcaacgccgtgcaggagatcatgatccccgccagcaaggccggcctggtgatcggcaagggcggcgagaccatcaagcagctgcagtag

SEQ ID NO: 81258 - DNA, 1998 bp, synthetic construct
  misc_feature 1..1998: note = Description of Artificial Sequence: Synthetic coding sequence
  source 1..1998: mol_type = other DNA
atggccgactacagcaccgtgcccccccccagcagcggcagcgccggcggcggcggcggcggcggcggcggcggcggcgtgaacgacgccttcaaggacgccctgcagagagccagacagatcgccgccaagatcggcggcgacgccggcaccagcctgaacagcaacgactacggctacggcggccagaagagacccctggaggacggcgacggcagctggaccagccccagcagcaccacccactgggagggcatgcccagccccttcaaggaccagcccgacgccaagaaggtggccccccagaacgacagcttcggcacccagctgccccccatgcaccagcagcagagcagaagcgtgatgaccgaggagtacaaggtgcccgacggcatggtgggcttcatcatcggcagaggcggcgagcagatcagcagaatccagcaggagagcggctgcaagatccagatcgcccccgacagcggcggcctgcccgagagaagctgcatgctgaccggcacccccgagagcgtgcagagcgccaagagactgctggaccagatcgtggagaagggcagacccgcccccggcttccaccacggcgacggccccggcaacgccgtgcaggagatcatgatccccgccagcaaggccggcctggtgatcggcaagggcggcgagaccatcaagcagctgcaggagagagccggcgtgaagatggtgatgatccaggacggcccccagaacaccggcgccgacaagcccctgagaatcaccggcgacccctacaaggtgcagcaggccaaggagatggtgctggagctgatcagagaccagggcggcttcagagaggtgagaaacgagtacggcagcagaatcggcggcaacgagggcatcgacgtgcccatccccagattcgccgtgggcatcgtgatcggcagaaacggcgagatgatcaagaagatccagaacgacgccggcgtgagaatccagttcaagcccgacgacggcaccacccccgagagaatcgcccagatcaccggcccccccgacagatgccagcacgccgccgagatcatcaccgacctgctgagaagcgtgcaggccggcaaccccggcggccccggccccggcggcagaggcagaggcagaggccagggcaactggaacatgggcccccccggcggcctgcaggagttcaacttcatcgtgcccaccggcaagaccggcctgatcatcggcaagggcggcgagaccatcaagagcatcagccagcagagcggcgccagaatcgagctgcagagaaaccccccccccaacgccgaccccaacatgaagctgttcaccatcagaggcaccccccagcagatcgactacgccagacagctgatcgaggagaagatcggcggccccgtgaaccccctgggcccccccgtgccccacggcccccacggcgtgcccggcccccacggcccccccggcccccccggccccggcacccccatgggcccctacaaccccgccccctacaaccccggcccccccggccccgccccccacggcccccccgccccctacgccccccagggctggggcaacgcctacccccactggcagcagcaggccccccccgaccccgccaaggccggcaccgaccccaacagcgccgcctgggccgcctactacgcccactactaccagcagcaggcccagcccccccccgccgcccccgccggcgcccccaccaccacccagaccaacggccagggcgaccagcagaaccccgcccccgccggccaggtggactacaccaaggcctgggaggagtactacaagaagatgggccaggccgtgcccgcccccaccggcgccccccccggcggccagcccgactacagcgccgcctgggccgagtactacagacagcaggccgcctactacgcccagaccagcccccagggcatgccccagcacccccccgccccccagggccagtag

SEQ ID NO: 81259 - DNA, 1260 bp, synthetic construct
  misc_feature 1..1260: note = Description of Artificial Sequence: Synthetic coding sequence
  source 1..1260: mol_type = other DNA
atgcccctgagcagatggctgagaagcgtgggcgtgttcctgctgcccgccccctactgggcccccagagagagatggctgggcagcctgagaagacccagcctggtgcacggctaccccgtgctggcctggcacagcgccagatgctggtgccaggcctggaccgaggagcccagagccctgtgcagcagcctgagaatgaacggcgaccagaacagcgacgtgtacgcccaggagaagcaggacttcgtgcagcacttcagccagatcgtgagagtgctgaccgaggacgagatgggccaccccgagatcggcgacgccatcgccagactgaaggaggtgctggagtacaacgccatcggcggcaagtacaacagaggcctgaccgtggtggtggccttcagagagctggtggagcccagaaagcaggacgccgacagcctgcagagagcctggaccgtgggctggtgcgtggagctgctgcaggccttcttcctggtggccgacgacatcatggacagcagcctgaccagaagaggccagatctgctggtaccagaagcccggcgtgggcctggacgccatcaacgacgccaacctgctggaggcctgcatctacagactgctgaagctgtactgcagagagcagccctactacctgaacctgatcgagctgttcctgcagagcagctaccagaccgagatcggccagaccctggacctgctgaccgccccccagggcaacgtggacctggtgagattcaccgagaagagatacaagagcatcgtgaagtacaagaccgccttctacagcttctacctgcccatcgccgccgccatgtacatggccggcatcgacggcgagaaggagcacgccaacgccaagaagatcctgctggagatgggcgagttcttccagatccaggacgactacctggacctgttcggcgaccccagcgtgaccggcaagatcggcaccgacatccaggacaacaagtgcagctggctggtggtgcagtgcctgcagagagccacccccgagcagtaccagatcctgaaggagaactacggccagaaggaggccgagaaggtggccagagtgaaggccctgtacgaggagctggacctgcccgccgtgttcctgcagtacgaggaggacagctacagccacatcatggccctgatcgagcagtacgccgcccccctgccccccgccgtgttcctgggcctggccagaaagatctacaagagaagaaagtag

SEQ ID NO: 81260 - DNA, 1260 bp, synthetic construct; identical to SEQ ID NO: 81259
  misc_feature 1..1260: note = Description of Artificial Sequence: Synthetic coding sequence
  source 1..1260: mol_type = other DNA

SEQ ID NO: 81261 - DNA, 1062 bp, synthetic construct
  misc_feature 1..1062: note = Description of Artificial Sequence: Synthetic coding sequence
  source 1..1062: mol_type = other DNA
atgaacggcgaccagaacagcgacgtgtacgcccaggagaagcaggacttcgtgcagcacttcagccagatcgtgagagtgctgaccgaggacgagatgggccaccccgagatcggcgacgccatcgccagactgaaggaggtgctggagtacaacgccatcggcggcaagtacaacagaggcctgaccgtggtggtggccttcagagagctggtggagcccagaaagcaggacgccgacagcctgcagagagcctggaccgtgggctggtgcgtggagctgctgcaggccttcttcctggtggccgacgacatcatggacagcagcctgaccagaagaggccagatctgctggtaccagaagcccggcgtgggcctggacgccatcaacgacgccaacctgctggaggcctgcatctacagactgctgaagctgtactgcagagagcagccctactacctgaacctgatcgagctgttcctgcagagcagctaccagaccgagatcggccagaccctggacctgctgaccgccccccagggcaacgtggacctggtgagattcaccgagaagagatacaagagcatcgtgaagtacaagaccgccttctacagcttctacctgcccatcgccgccgccatgtacatggccggcatcgacggcgagaaggagcacgccaacgccaagaagatcctgctggagatgggcgagttcttccagatccaggacgactacctggacctgttcggcgaccccagcgtgaccggcaagatcggcaccgacatccaggacaacaagtgcagctggctggtggtgcagtgcctgcagagagccacccccgagcagtaccagatcctgaaggagaactacggccagaaggaggccgagaaggtggccagagtgaaggccctgtacgaggagctggacctgcccgccgtgttcctgcagtacgaggaggacagctacagccacatcatggccctgatcgagcagtacgccgcccccctgccccccgccgtgttcctgggcctggccagaaagatctacaagagaagaaagtag

SEQ ID NO: 81262 - DNA, 2760 bp, synthetic construct
  misc_feature 1..2760: note = Description of Artificial Sequence: Synthetic coding sequence
  source 1..2760: mol_type = other DNA
atgaccggctacaccatgctgagaaacggcggcgccggcaacggcggccagacctgcatgctgagatggagcaacagaatcagactgacctggctgagcttcaccctgttcgtgatcctggtgttcttccccctgatcgcccactactacctgaccaccctggacgaggccgacgaggccggcaagagaatcttcggccccagagtgggcaacgagctgtgcgaggtgaagcacgtgctggacctgtgcagaatcagagagagcgtgagcgaggagctgctgcagctggaggccaagagacaggagctgaacagcgagatcgccaagctgaacctgaagatcgaggcctgcaagaagagcatcgagaacgccaagcaggacctgctgcagctgaagaacgtgatcagccagaccgagcacagctacaaggagctgatggcccagaaccagcccaagctgagcctgcccatcagactgctgcccgagaaggacgacgccggcctgcccccccccaaggccaccagaggctgcagactgcacaactgcttcgactacagcagatgccccctgaccagcggcttccccgtgtacgtgtacgacagcgaccagttcgtgttcggcagctacctggaccccctggtgaagcaggccttccaggccaccgccagagccaacgtgtacgtgaccgagaacgccgacatcgcctgcctgtacgtgatcctggtgggcgagatgcaggagcccgtggtgctgagacccgccgagctggagaagcagctgtacagcctgccccactggagaaccgacggccacaaccacgtgatcatcaacctgagcagaaagagcgacacccagaacctgctgtacaacgtgagcaccggcagagccatggtggcccagagcaccttctacaccgtgcagtacagacccggcttcgacctggtggtgagccccctggtgcacgccatgagcgagcccaacttcatggagatccccccccaggtgcccgtgaagagaaagtacctgttcaccttccagggcgagaagatcgagagcctgagaagcagcctgcaggaggccagaagcttcgaggaggagatggagggcgacccccccgccgactacgacgacagaatcatcgccaccctgaaggccgtgcaggacagcaagctggaccaggtgctggtggagttcacctgcaagaaccagcccaagcccagcctgcccaccgagtgggccctgtgcggcgagagagaggacagactggagctgctgaagctgagcaccttcgccctgatcatcacccccggcgaccccagactggtgatcagcagcggctgcgccaccagactgttcgaggccctggaggtgggcgccgtgcccgtggtgctgggcgagcaggtgcagctgccctaccaggacatgctgcagtggaacgaggccgccctggtggtgcccaagcccagagtgaccgaggtgcacttcctgctgagaagcctgagcgacagcgacctgctggccatgagaagacagggcagattcctgtgggagacctacttcagcaccgccgacagcatcttcaacaccgtgctggccatgatcagaaccagaatccagatccccgccgcccccatcagagaggaggccgccgccgagatcccccacagaagcggcaaggccgccggcaccgaccccaacatggccgacaacggcgacctggacctgggccccgtggagaccgagcccccctacgccagccccagatacctgagaaacttcaccctgaccgtgaccgacttctacagaagctggaactgcgcccccggccccttccacctgttcccccacacccccttcgaccccgtgctgcccagcgaggccaagttcctgggcagcggcaccggcttcagacccatcggcggcggcgccggcggcagcggcaaggagttccaggccgccctgggcggcaacgtgcccagagagcagttcaccgtggtgatgctgacctacgagagagaggaggtgctgatgaacagcctggagagactgaacggcctgccctacctgaacaaggtggtggtggtgtggaacagccccaagctgcccagcgaggacctgctgtggcccgacatcggcgtgcccatcatggtggtgagaaccgagaagaacagcctgaacaacagattcctgccctggaacgagatcgagaccgaggccatcctgagcatcgacgacgacgcccacctgagacacgacgagatcatgttcggcttcagagtgtggagagaggccagagacagaatcgtgggcttccccggcagataccacgcctgggacatcccccaccagagctggctgtacaacagcaactacagctgcgagctgagcatggtgctgaccggcgccgccttcttccacaagtactacgcctacctgtacagctacgtgatgccccaggccatcagagacatggtggacgagtacatcaactgcgaggacatcgccatgaacttcctggtgagccacatcaccagaaagccccccatcaaggtgaccagcagatggaccttcagatgccccggctgcccccaggccctgagccacgacgacagccacttccacgagagacacaagtgcatcaacttcttcgtgaaggtgtacggctacatgcccctgctgtacacccagttcagagtggacagcgtgctgttcaagaccagactgccccacgacaagaccaagtgcttcaagttcatctag

SEQ ID NO: 81263 - DNA, 1125 bp, synthetic construct
  misc_feature 1..1125: note = Description of Artificial Sequence: Synthetic coding sequence
  source 1..1125: mol_type = other DNA
atggagttcgtgaagtgcctgggccaccccgaggagttctacaacctggtgagattcagaatcggcggcaagagaaaggtgatgcccaagatggaccaggacagcctgagcagcagcctgaagacctgctacaagtacctgaaccagaccagcagaagcttcgccgccgtgatccaggccctggacggcgagatgagaaacgccgtgtgcatcttctacctggtgctgagagccctggacaccctggaggacgacatgaccatcagcgtggagaagaaggtgcccctgctgcacaacttccacagcttcctgtaccagcccgactggagattcatggagagcaaggagaaggacagacaggtgctggaggacttccccacctactgccactacgtggccggcctggtgggcatcggcctgagcagactgttcagcgccagcgagttcgaggaccccctggtgggcgaggacaccgagagagccaacagcatgggcctgttcctgcagaagaccaacatcatcagagactacctggaggaccagcagggcggcagagagttctggccccaggaggtgtggagcagatacgtgaagaagctgggcgacttcgccaagcccgagaacatcgacctggccgtgcagtgcctgaacgagctgatcaccaacgccctgcaccacatccccgacgtgatcacctacctgagcagactgagaaaccagagcgtgttcaacttctgcgccatcccccaggtgatggccatcgccaccctggccgcctgctacaacaaccagcaggtgttcaagggcgccgtgaagatcagaaagggccaggccgtgaccctgatgatggacgccaccaacatgcccgccgtgaaggccatcatctaccagtacatggaggagatctaccacagaatccccgacagcgaccccagcagcagcaagaccagacagatcatcagcaccatcagaacccagaacctgcccaactgccagctgatcagcagaagccactacagccccatctacctgagcttcgtgatgctgctggccgccctgagctggcagtacctgaccaccctgagccaggtgaccgaggactacgtgcagaccggcgagcactag

SEQ ID NO: 81264 - DNA, 999 bp, synthetic construct
  misc_feature 1..999: note = Description of Artificial Sequence: Synthetic coding sequence
  source 1..999: mol_type = other DNA
atgaccatcagcgtggagaagaaggtgcccctgctgcacaacttccacagcttcctgtaccagcccgactggagattcatggagagcaaggagaaggacagacaggtgctggaggacttccccaccatcagcctggagttcagaaacctggccgagaagtaccagaccgtgatcgccgacatctgcagaagaatgggcatcggcatggccgagttcctggacaagcacgtgaccagcgagcaggagtgggacaagtactgccactacgtggccggcctggtgggcatcggcctgagcagactgttcagcgccagcgagttcgaggaccccctggtgggcgaggacaccgagagagccaacagcatgggcctgttcctgcagaagaccaacatcatcagagactacctggaggaccagcagggcggcagagagttctggccccaggaggtgtggagcagatacgtgaagaagctgggcgacttcgccaagcccgagaacatcgacctggccgtgcagtgcctgaacgagctgatcaccaacgccctgcaccacatccccgacgtgatcacctacctgagcagactgagaaaccagagcgtgttcaacttctgcgccatcccccaggtgatggccatcgccaccctggccgcctgctacaacaaccagcaggtgttcaagggcgccgtgaagatcagaaagggccaggccgtgaccctgatgatggacgccaccaacatgcccgccgtgaaggccatcatctaccagtacatggaggagatctaccacagaatccccgacagcgaccccagcagcagcaagaccagacagatcatcagcaccatcagaacccagaacctgcccaactgccagctgatcagcagaagccactacagccccatctacctgagcttcgtgatgctgctggccgccctgagctggcagtacctgaccaccctgagccaggtgaccgaggactacgtgcagaccggcgagcactag

SEQ ID NO: 81265 - DNA, 1233 bp, synthetic construct
  misc_feature 1..1233: note = Description of Artificial Sequence: Synthetic coding sequence
  source 1..1233: mol_type = other DNA
atggagttcgtgaagtgcctgggccaccccgaggagttctacaacctggtgagattcagaatcggcggcaagagaaaggacagcctgagcagcagcctgaagacctgctacaagtacctgaaccagaccagcagaagcttcgccgccgtgatccaggccctggacggcgagatgagaaacgccgtgtgcatcttctacctggtgctgagagccctggacaccctggaggacgacatgaccatcagcgtggagaagaaggtgcccctgctgcacaacttccacagcttcctgtaccagcccgactggagattcatggagagcaaggagaaggacagacaggtgctggaggacttccccaccatcagcctggagttcagaaacctggccgagaagtaccagaccgtgatcgccgacatctgcagaagaatgggcatcggcatggccgagttcctggacaagcacgtgaccagcgagcaggagtgggacaagtactgccactacgtggccggcctggtgggcatcggcctgagcagactgttcagcgccagcgagttcgaggaccccctggtgggcgaggacaccgagagagccaacagcatgggcctgttcctgcagaagaccaacatcatcagagactacctggaggaccagcagggcggcagagagttctggccccaggaggtgtggagcagatacgtgaagaagctgggcgacttcgccaagcccgagaacatcgacctggccgtgcagtgcctgaacgagctgatcaccaacgccctgcaccacatccccgacgtgatcacctacctgagcagactgagaaaccagagcgtgttcaacttctgcgccatcccccaggtgatggccatcgccaccctggccgcctgctacaacaaccagcaggtgttcaagggcgccgtgaagatcagaaagggccaggccgtgaccctgatgatggacgccaccaacatgcccgccgtgaaggccatcatctaccagtacatggaggagatctaccacagaatccccgacagcgaccccagcagcagcaagaccagacagatcatcagcaccatcagaacccagaacctgcccaactgccagctgatcagcagaagccactacagccccatctacctgagcttcgtgatgctgctggccgccctgagctggcagtacctgaccaccctgagccaggtgaccgaggactacgtgcagaccggcgagcactag

SEQ ID NO: 81266 - DNA, 999 bp, synthetic construct; identical to SEQ ID NO: 81264
  misc_feature 1..999: note = Description of Artificial Sequence: Synthetic coding sequence
  source 1..999: mol_type = other DNA

SEQ ID NO: 81267 - DNA, 1062 bp, synthetic construct
  misc_feature 1..1062: note = Description of Artificial Sequence: Synthetic coding sequence
  source 1..1062: mol_type = other DNA
atgagaaacgccgtgtgcatcttctacctggtgctgagagccctggacaccctggaggacgacatgaccatcagcgtggagaagaaggtgcccctgctgcacaacttccacagcttcctgtaccagcccgactggagattcatggagagcaaggagaaggacagacaggtgctggaggacttccccaccatcagcctggagttcagaaacctggccgagaagtaccagaccgtgatcgccgacatctgcagaagaatgggcatcggcatggccgagttcctggacaagcacgtgaccagcgagcaggagtgggacaagtactgccactacgtggccggcctggtgggcatcggcctgagcagactgttcagcgccagcgagttcgaggaccccctggtgggcgaggacaccgagagagccaacagcatgggcctgttcctgcagaagaccaacatcatcagagactacctggaggaccagcagggcggcagagagttctggccccaggaggtgtggagcagatacgtgaagaagctgggcgacttcgccaagcccgagaacatcgacctggccgtgcagtgcctgaacgagctgatcaccaacgccctgcaccacatccccgacgtgatcacctacctgagcagactgagaaaccagagcgtgttcaacttctgcgccatcccccaggtgatggccatcgccaccctggccgcctgctacaacaaccagcaggtgttcaagggcgccgtgaagatcagaaagggccaggccgtgaccctgatgatggacgccaccaacatgcccgccgtgaaggccatcatctaccagtacatggaggagatctaccacagaatccccgacagcgaccccagcagcagcaagaccagacagatcatcagcaccatcagaacccagaacctgcccaactgccagctgatcagcagaagccactacagccccatctacctgagcttcgtgatgctgctggccgccctgagctggcagtacctgaccaccctgagccaggtgaccgaggactacgtgcagaccggcgagcactag

SEQ ID NO: 81268 - DNA, 1062 bp, synthetic construct; identical to SEQ ID NO: 81267
  misc_feature 1..1062: note = Description of Artificial Sequence: Synthetic coding sequence
  source 1..1062: mol_type = other DNA

SEQ ID NO: 81269 - DNA, 921 bp, synthetic construct
  misc_feature 1..921: note = Description of Artificial Sequence: Synthetic coding sequence
  source 1..921: mol_type = other DNA
atggagagcaaggagaaggacagacaggtgctggaggacttccccaccatcagcctggagttcagaaacctggccgagaagtaccagaccgtgatcgccgacatctgcagaagaatgggcatcggcatggccgagttcctggacaagcacgtgaccagcgagcaggagtgggacaagtactgccactacgtggccggcctggtgggcatcggcctgagcagactgttcagcgccagcgagttcgaggaccccctggtgggcgaggacaccgagagagccaacagcatgggcctgttcctgcagaagaccaacatcatcagagactacctggaggaccagcagggcggcagagagttctggccccaggaggtgtggagcagatacgtgaagaagctgggcgacttcgccaagcccgagaacatcgacctggccgtgcagtgcctgaacgagctgatcaccaacgccctgcaccacatccccgacgtgatcacctacctgagcagactgagaaaccagagcgtgttcaacttctgcgccatcccccaggtgatggccatcgccaccctggccgcctgctacaacaaccagcaggtgttcaagggcgccgtgaagatcagaaagggccaggccgtgaccctgatgatggacgccaccaacatgcccgccgtgaaggccatcatctaccagtacatggaggagatctaccacagaatccccgacagcgaccccagcagcagcaagaccagacagatcatcagcaccatcagaacccagaacctgcccaactgccagctgatcagcagaagccactacagccccatctacctgagcttcgtgatgctgctggccgccctgagctggcagtacctgaccaccctgagccaggtgaccgaggactacgtgcagaccggcgagcactag

SEQ ID NO: 81270 - DNA, 1140 bp, synthetic construct
  misc_feature 1..1140: note = Description of Artificial Sequence: Synthetic coding sequence
  source 1..1140: mol_type = other DNA
atggccgccaccgagggcgtgggcgaggccgcccagggcggcgagcccggccagcccgcccagccccccccccagccccaccccccccccccccagcagcagcacaaggaggagatggccgccgaggccggcgaggccgtggccagccccatggacgacggcttcgtgagcctggacagccccagctacgtgctgtacagagacagagccgagtgggccgacatcgaccccgtgccccagaacgacggccccaaccccgtggtgcagatcatctacagcgacaagttcagagacgtgtacgactacttcagagccgtgctgcagagagacgagagaagcgagagagccttcaagctgaccagagacgccatcgagctgaacgccgccaactacaccgtgtggcacttcagaagagtgctgctgaagagcctgcagaaggacctgcacgaggagatgaactacatcaccgccatcatcgaggagcagcccaagaactaccaggtgtggcaccacagaagagtgctggtggagtggctgagagaccccagccaggagctggagttcatcgccgacatcctgaaccaggacgccaagaactaccacgcctggcagcacagacagtgggtgatccaggagttcaagctgtgggacaacgagctgcagtacgtggaccagctgctgaaggaggacgtgagaaacaacagcgtgtggaaccagagatacttcgtgatcagcaacaccaccggctacaacgacagagccgtgctggagagagaggtgcagtacaccctggagatgatcaagctggtgccccacaacgagagcgcctggaactacctgaagggcatcctgcaggacagaggcctgagcaagtaccccaacctgctgaaccagctgctggacctgcagcccagccacagcagcccctacctgatcgccttcctggtggacatctacgaggacatgctggagaaccagtgcgacaacaaggaggacatcctgaacaaggccctggagctgtgcgagatcctggccaaggagaaggacaccatcagaaaggagtactggagatacatcggcagaagcctgcagagcaagcacagcaccgagaacgacagccccaccaacgtgcagcagtag

SEQ ID NO: 81271 - DNA, 939 bp, synthetic construct
  misc_feature 1..939: note = Description of Artificial Sequence: Synthetic coding sequence
  source 1..939: mol_type = other DNA
atggccgccaccgagggcgtgggcgaggccgcccagggcggcgagcccggccagcccgcccagccccccccccagccccaccccccccccccccagcagcagcacaaggaggagatggccgccgaggccggcgaggccgtggccagccccatggacgacggcttcgtgagcctggacagccccagctacgtgctgtacagacacttcagaagagtgctgctgaagagcctgcagaaggacctgcacgaggagatgaactacatcaccgccatcatcgaggagcagcccaagaactaccaggtgtggcaccacagaagagtgctggtggagtggctgagagaccccagccaggagctggagttcatcgccgacatcctgaaccaggacgccaagaactaccacgcctggcagcacagacagtgggtgatccaggagttcaagctgtgggacaacgagctgcagtacgtggaccagctgctgaaggaggacgtgagaaacaacagcgtgtggaaccagagatacttcgtgatcagcaacaccaccggctacaacgacagagccgtgctggagagagaggtgcagtacaccctggagatgatcaagctggtgccccacaacgagagcgcctggaactacctgaagggcatcctgcaggacagaggcctgagcaagtaccccaacctgctgaaccagctgctggacctgcagcccagccacagcagcccctacctgatcgccttcctggtggacatctacgaggacatgctggagaaccagtgcgacaacaaggaggacatcctgaacaaggccctggagctgtgcgagatcctggccaaggagaaggacaccatcagaaaggagtactggagatacatcggcagaagcctgcagagcaagcacagcaccgagaacgacagccccaccaacgtgcagcagtag

SEQ ID NO: 81272 - DNA, 1314 bp, synthetic construct
  misc_feature 1..1314: note = Description of Artificial Sequence: Synthetic coding sequence
  source 1..1314: mol_type = other DNA
atggccagccccagcagcttcacctactactgcccccccagcagcagccccgtgtggagcgagcccctgtacagcctgagacccgagcacgccagagagagactgcaggacgacagcgtggagaccgtgaccagcatcgagcaggccaaggtggaggagaagatccaggaggtgttcagcagctacaagttcaaccacctggtgcccagactggtgctgcagagagagaagcacttccactacctgaagagaggcctgagacagctgaccgacgcctacgagtgcctggacgccagcagaccctggctgtgctactggatcctgcacagcctggagctgctggacgagcccatcccccagatcgtggccaccgacgtgtgccagttcctggagctgtgccagagccccgagggcggcttcggcggcggccccggccagtacccccacctggcccccacctacgccgccgtgaacgccctgtgcatcatcggcaccgaggaggcctacgacatcatcaacagagagaagctgctgcagtacctgtacagcctgaagcagcccgacggcagcttcctgatgcacgtgggcggcgaggtggacgtgagaagcgcctactgcgccgccagcgtggccagcctgaccaacatcatcacccccgacctgttcgagggcaccgccgagtggatcgccagatgccagaactgggagggcggcatcggcggcgtgcccggcatggaggcccacggcggctacaccttctgcggcctggccgccctggtgatcctgaagagagagagaagcctgaacctgaagagcctgctgcagtgggtgaccagcagacagatgagattcgagggcggcttccagggcagatgcaacaagctggtggacggctgctacagcttctggcaggccggcctgctgcccctgctgcacagagccctgcacgcccagggcgaccccgccctgagcatgagccactggatgttccaccagcaggccctgcaggagtacatcctgatgtgctgccagtgccccgccggcggcctgctggacaagcccggcaagagcagagacttctaccacacctgctactgcctgagcggcctgagcatcgcccagcacttcggcagcggcgccatgctgcacgacgtggtgctgggcgtgcccgagaacgccctgcagcccacccaccccgtgtacaacatcggccccgacaaggtgatccaggccaccacctacttcctgcagaagcccgtgcccggcttcgaggagctgaaggacgagaccagcgccgagcccgccaccgactag

SEQ ID NO: 81273 - DNA, 1953 bp, synthetic construct
  misc_feature 1..1953: note = Description of Artificial Sequence: Synthetic coding sequence
  source 1..1953: mol_type = other DNA
atggccagcaacatggacagagagatgatcctggccgacttccaggcctgcaccggcatcgagaacatcgacgaggccatcaccctgctggagcagaacaactgggacctggtggccgccatcaacggcgtgatcccccaggagaacggcatcctgcagagcgagtacggcggcgagaccatccccggccccgccttcaaccccgccagccaccccgccagcgcccccaccagcagcagcagcagcgccttcagacccgtgatgcccagcagacagatcgtggagagacagcccagaatgctggacttcagagtggagtacagagacagaaacgtggacgtggtgctggaggacacctgcaccgtgggcgagatcaagcagatcctggagaacgagctgcagatccccgtgagcaagatgctgctgaagggctggaagaccggcgacgtggaggacagcaccgtgctgaagagcctgcacctgcccaagaacaacagcctgtacgtgctgacccccgacctgcccccccccagcagcagcagccacgccggcgccctgcaggagagcctgaaccagaacttcatgctgatcatcacccacagagaggtgcagagagagtacaacctgaacttcagcggcagcagcaccatccaggaggtgaagagaaacgtgtacgacctgaccagcatccccgtgagacaccagctgtgggagggctggcccaccagcgccaccgacgacagcatgtgcctggccgagagcggcctgagctacccctgccacagactgaccgtgggcagaagaagcagccccgcccagaccagagagcagagcgaggagcagatcaccgacgtgcacatggtgagcgacagcgacggcgacgacttcgaggacgccaccgagttcggcgtggacgacggcgaggtgttcggcatggccagcagcgccctgagaaagagccccatgatgcccgagaacgccgagaacgagggcgacgccctgctgcagttcaccgccgagttcagcagcagatacggcgactgccaccccgtgttcttcatcggcagcctggaggccgccttccaggaggccttctacgtgaaggccagagacagaaagctgctggccatctacctgcaccacgacgagagcgtgctgaccaacgtgttctgcagccagatgctgtgcgccgagagcatcgtgagctacctgagccagaacttcatcacctgggcctgggacctgaccaaggacagcaacagagccagattcctgaccatgtgcaacagacacttcggcagcgtggtggcccagaccatcagaacccagaagaccgaccagttccccctgttcctgatcatcatgggcaagagaagcagcaacgaggtgctgaacgtgatccagggcaacaccaccgtggacgagctgatgatgagactgatggccgccatggagatcttcaccgcccagcagcaggaggacatcaaggacgaggacgagagagaggccagagagaacgtgaagagagagcaggacgaggcctacagactgagcctggaggccgacagagccaagagagaggcccacgagagagagatggccgagcagttcagactggagcagatcagaaaggagcaggaggaggagagagaggccatcagactgagcctggagcaggccctgccccccgagcccaaggaggagaacgccgagcccgtgagcaagctgagaatcagaacccccagcggcgagttcctggagagaagattcctggccagcaacaagctgcagatcgtgttcgacttcgtggccagcaagggcttcccctgggacgagtacaagctgctgagcaccttccccagaagagacgtgacccagctggaccccaacaagagcctgctggaggtgaagctgttcccccaggagaccctgttcctggaggccaaggagtag

SEQ ID NO: 81274 - DNA, 1473 bp, synthetic construct
  misc_feature 1..1473: note = Description of Artificial Sequence: Synthetic coding sequence
  source 1..1473: mol_type = other DNA
atgatcctggccgacttccaggcctgcaccggcatcgagaacatcgacgaggccatcaccctgctggagcagaacaactgggacctggtggccgccatcaacggcgtgatcccccaggagaacggcatcctgcagagcgagtacggcggcgagaccatccccggccccgccttcaaccccgccagccaccccgccagcgcccccaccagcagcagcagcagcgccttcagacccgtgatgcccagcagacagatcgtggagagacagcccagaatgctggacttcagagtggagtacagagacagaaacgtggacgtggtgctggaggacacctgcaccgtgggcgagatcaagcagatcctggagaacgagctgcagatccccgtgagcaagatgctgctgaagggctggaagaccggcgacgtggaggacagcaccgtgctgaagagcctgcacctgcccaagaacaacagcctgtacgtgctgacccccgacctgcccccccccagcagcagcagccacgccggcgccctgcaggagttcagcagcagatacggcgactgccaccccgtgttcttcatcggcagcctggaggccgccttccaggaggccttctacgtgaaggccagagacagaaagctgctggccatctacctgcaccacgacgagagcgtgctgaccaacgtgttctgcagccagatgctgtgcgccgagagcatcgtgagctacctgagccagaacttcatcacctgggcctgggacctgaccaaggacagcaacagagccagattcctgaccatgtgcaacagacacttcggcagcgtggtggcccagaccatcagaacccagaagaccgaccagttccccctgttcctgatcatcatgggcaagagaagcagcaacgaggtgctgaacgtgatccagggcaacaccaccgtggacgagctgatgatgagactgatggccgccatggagatcttcaccgcccagcagcaggaggacatcaaggacgaggacgagagagaggccagagagaacgtgaagagagagcaggacgaggcctacagactgagcctggaggccgacagagccaagagagaggcccacgagagagagatggccgagcagttcagactggagcagatcagaaaggagcaggaggaggagagagaggccatcagactgagcctggagcaggccctgccccccgagcccaaggaggagaacgccgagcccgtgagcaagctgagaatcagaacccccagcggcgagttcctggagagaagattcctggccagcaacaagctgcagatcgtgttcgacttcgtggccagcaagggcttcccctgggacgagtacaagctgctgagcaccttccccagaagagacgtgacccagctggaccccaacaagagcctgctggaggtgaagctgttcccccaggagaccctgttcctggaggccaaggagtag

SEQ ID NO: 81275 - DNA, 1953 bp, synthetic construct; identical to SEQ ID NO: 81273
  misc_feature 1..1953: note = Description of Artificial Sequence: Synthetic coding sequence
  source 1..1953: mol_type = other DNA

SEQ ID NO: 81276 - DNA, 1497 bp, synthetic construct
  misc_feature 1..1497: note = Description of Artificial Sequence: Synthetic coding sequence
  source 1..1497: mol_type = other DNA
atggccagcaacatggacagagagatgatcctggccgacttccaggcctgcaccggcatcgagaacatcgacgaggccatcaccctgctggagcagaacaactgggacctggtggccgccatcaacggcgtgatcccccaggagaacggcatcctgcagagcgagtacggcggcgagaccatccccggccccgccttcaaccccgccagccaccccgccagcgcccccaccagcagcagcagcagcgccttcagacccgtgatgcccagcagacagatcgtggagagacagcccagaatgctggacttcagagtggagtacagagacagaaacgtggacgtggtgctggaggacacctgcaccgtgggcgagatcaagcagatcctggagaacgagctgcagatccccgtgagcaagatgctgctgaagggctggaagaccggcgacgtggaggacagcaccgtgctgaagagcctgcacctgcccaagaacaacagcctgtacgtgctgacccccgacctgcccccccccagcagcagcagccacgccggcaccctgcagcagttcagctacagatacggcgactgccaccccgtgttcttcatcggcagcctggaggccgccttccaggaggccttctacgtgaaggccagagacagaaagctgctggccatctacctgcaccacgacgagagcgtgctgaccaacgtgttctgcagccagatgctgtgcgccgagagcatcgtgagctacctgagccagaacttcatcacctgggcctgggacctgaccaaggacagcaacagagccagattcctgaccatgtgcaacagacacttcggcagcgtggtggcccagaccatcagaacccagaagaccgaccagttccccctgttcctgatcatcatgggcaagagaagcagcaacgaggtgctgaacgtgatccagggcaacaccaccgtggacgagctgatgatgagactgatggccgccatggagatcttcaccgcccagcagcaggaggacatcaaggacgaggacgagagagaggccagagagaacgtgaagagagagcaggacgaggcctacagactgagcctggaggccgacagagccaagagagaggcccacgagagagagatggccgagcagttcagactggagcagatcagaaaggagcaggaggaggagagagaggccatcagactgagcctggagcaggccctgccccccgagcccaaggaggagaacgccgagcccgtgagcaagctgagaatcagaacccccagcggcgagttcctggagagaagattcctggccagcaacaagctgcagatcgtgttcgacttcgtggccagcaagggcttcccctgggacgagtacaagctgctgagcaccttccccagaagagacgtgacccagctggaccccaacaagagcctgctggaggtgaagctgttcccccaggagaccctgttcctggaggccaaggagtag

SEQ ID NO: 81277 - DNA, 1227 bp, synthetic construct
  misc_feature 1..1227: note = Description of Artificial Sequence: Synthetic coding sequence
  source 1..1227: mol_type = other DNA
atgagaaacctgctggagatgtgcctggccgagagcggcctgagctacccctgccacagactgaccgtgggcagaagaagcagccccgcccagaccagagagcagagcgaggagcagatcaccgacgtgcacatggtgagcgacagcgacggcgacgacttcgaggacgccaccgagttcggcgtggacgacggcgaggtgttcggcatggccagcagcgccctgagaaagagccccatgatgcccgagaacgccgagaacgagggcgacgccctgctgcagttcaccgccgagttcagcagcagatacggcgactgccaccccgtgttcttcatcggcagcctggaggccgccttccaggaggccttctacgtgaaggccagagacagaaagctgctggccatctacctgcaccacgacgagagcgtgctgaccaacgtgttctgcagccagatgctgtgcgccgagagcatcgtgagctacctgagccagaacttcatcacctgggcctgggacctgaccaaggacagcaacagagccagattcctgaccatgtgcaacagacacttcggcagcgtggtggcccagaccatcagaacccagaagaccgaccagttccccctgttcctgatcatcatgggcaagagaagcagcaacgaggtgctgaacgtgatccagggcaacaccaccgtggacgagctgatgatgagactgatggccgccatggagatcttcaccgcccagcagcaggaggacatcaaggacgaggacgagagagaggccagagagaacgtgaagagagagcaggacgaggcctacagactgagcctggaggccgacagagccaagagagaggcccacgagagagagatggccgagcagttcagactggagcagatcagaaaggagcaggaggaggagagagaggccatcagactgagcctggagcaggccctgccccccgagcccaaggaggagaacgccgagcccgtgagcaagctgagaatcagaacccccagcggcgagttcctggagagaagattcctggccagcaacaagctgcagatcgtgttcgacttcgtggccagcaagggcttcccctgggacgagtacaagctgctgagcaccttccccagaagagacgtgacccagctggaccccaacaagagcctgctggaggtgaagctgttcccccaggagaccctgttcctggaggccaaggagtag

SEQ ID NO: 81278 - DNA, 951 bp, synthetic construct
  misc_feature 1..951: note = Description of Artificial Sequence: Synthetic coding sequence
  source 1..951: mol_type = other DNA
atgacccagggcaagctgagcgtggccaacaaggcccccggcaccgagggccagcagcaggtgcacggcgagaagaaggaggcccccgccgtgcccagcgccccccccagctacgaggaggccaccagcggcgagggcatgaaggccggcgccttcccccccgcccccaccgccgtgcccctgcaccccagctgggcctacgtggaccccagcagcagcagcagctacgacaacggcttccccaccggcgaccacgagctgttcaccaccttcagctgggacgaccagaaggtgagaagagtgttcgtgagaaaggtgtacaccatcctgctgatccagctgctggtgaccctggccgtggtggccctgttcaccttctgcgaccccgtgaaggactacgtgcaggccaaccccggctggtactgggccagctacgccgtgttcttcgccacctacctgaccctggcctgctgcagcggccccagaagacacttcccctggaacctgatcctgctgaccgtgttcaccctgagcatggcctacctgaccggcatgctgagcagctactacaacaccaccagcgtgctgctgtgcctgggcatcaccgccctggtgtgcctgagcgtgaccgtgttcagcttccagaccaagttcgacttcaccagctgccagggcgtgctgttcgtgctgctgatgaccctgttcttcagcggcctgatcctggccatcctgctgcccttccagtacgtgccctggctgcacgccgtgtacgccgccctgggcgccggcgtgttcaccctgttcctggccctggacacccagctgctgatgggcaacagaagacacagcctgagccccgaggagtacatcttcggcgccctgaacatctacctggacatcatctacatcttcaccttcttcctgcagctgttcggcaccaacagagagtag

SEQ ID NO: 81279 - DNA, 951 bp, synthetic construct; identical to SEQ ID NO: 81278
  misc_feature 1..951: note = Description of Artificial Sequence: Synthetic coding sequence
  source 1..951: mol_type = other DNA

SEQ ID NO: 81280 - DNA, 813 bp, synthetic construct
  misc_feature 1..813: note = Description of Artificial Sequence: Synthetic coding sequence
  source 1..813: mol_type = other DNA
atgaaggccggcgccttcccccccgcccccaccgccgtgcccctgcaccccagctgggcctacgtggaccccagcagcagcagcagctacgacaacggcttccccaccggcgaccacgagctgttcaccaccttcagctgggacgaccagaaggtgagaagagtgttcgtgagaaaggtgtacaccatcctgctgatccagctgctggtgaccctggccgtggtggccctgttcaccttctgcgaccccgtgaaggactacgtgcaggccaaccccggctggtactgggccagctacgccgtgttcttcgccacctacctgaccctggcctgctgcagcggccccagaagacacttcccctggaacctgatcctgctgaccgtgttcaccctgagcatggcctacctgaccggcatgctgagcagctactacaacaccaccagcgtgctgctgtgcctgggcatcaccgccctggtgtgcctgagcgtgaccgtgttcagcttccagaccaagttcgacttcaccagctgccagggcgtgctgttcgtgctgctgatgaccctgttcttcagcggcctgatcctggccatcctgctgcccttccagtacgtgccctggctgcacgccgtgtacgccgccctgggcgccggcgtgttcaccctgttcctggccctggacacccagctgctgatgggcaacagaagacacagcctgagccccgaggagtacatcttcggcgccctgaacatctacctggacatcatctacatcttcaccttcttcctgcagctgttcggcaccaacagagagtag

SEQ ID NO: 81281 - DNA, 1173 bp, synthetic construct
  misc_feature 1..1173: note = Description of Artificial Sequence: Synthetic coding sequence
  source 1..1173: mol_type = other DNA
atggacttctggctgtggcccctgtacttcctgcccgtgagcggcgccctgagaatcctgcccgaggtgaaggtggagggcgagctgggcggcagcgtgaccatcaagtgccccctgcccgagatgcacgtgagaatctacctgtgcagagagatggccggcagcggcacctgcggcaccgtggtgagcaccaccaacttcatcaaggccgagtacaagggcagagtgaccctgaagcagtaccccagaaagaacctgttcctggtggaggtgacccagctgaccgagagcgacagcggcgtgtacgcctgcggcgccggcatgaacaccgacagaggcaagacccagaaggtgaccctgaacgtgcacagcgagtacgagcccagctgggaggagcagcccatgcccgagacccccaagtggttccacctgccctacctgttccagatgcccgcctacgccagcagcagcaagttcgtgaccagagtgaccacccccgcccagagaggcaaggtgccccccgtgcaccacagcagccccaccacccagatcacccacagacccagagtgagcagagccagcagcgtggccggcgacaagcccagaaccttcctgcccagcaccaccgccagcaagatcagcgccctggagggcctgctgaagccccagacccccagctacaaccaccacaccagactgcacagacagagagccctggactacggcagccagagcggcagagagggccagggcttccacatcctgatccccaccatcctgggcctgttcctgctggccctgctgggcctggtggtgaagagagccgtggagagaagaaaggccctgagcagaagagccagaagactggccgtgagaatgagagccctggagagcagccagagacccagaggcagccccagacccagaagccagaacaacatctacagcgcctgccccagaagagccagaggcgccgacgccgccggcaccggcgaggcccccgtgcccggccccggcgcccccctgccccccgcccccctgcaggtgagcgagagcccctggctgcacgcccccagcctgaagaccagctgcgagtacgtgagcctgtaccaccagcccgccgccatgatggaggacagcgacagcgacgactacatcaacgtgcccgcctag

SEQ ID NO: 81282 - DNA, 921 bp, synthetic construct
  misc_feature 1..921: note = Description of Artificial Sequence: Synthetic coding sequence
  source 1..921: mol_type = other DNA
atggacttctggctgtggcccctgtacttcctgcccgtgagcggcgccctgagaatcctgcccgaggtgaaggtggagggcgagctgggcggcagcgtgaccatcaagtgccccctgcccgagatgcacgtgagaatctacctgtgcagagagatggccggcagcggcacctgcggcaccgtggtgagcaccaccaacttcatcaaggccgagtacaagggcagagtgaccctgaagcagtaccccagaaagaacctgttcctggtggaggtgacccagctgaccgagagcgacagcggcgtgtacgcctgcggcgccggcatgaacaccgacagaggcaagacccagaaggtgaccctgaacgtgcacagcgagtacgagcccagctgggaggagcagcccatgcccgagacccccaagtggttccacctgccctacctgttccagatgcccgcctacgccagcagcagcaagttcgtgaccagagtgaccacccccgcccagagaggcaaggtgccccccgtgcaccacagcagccccaccacccagatcacccacagacccagagtgagcagagccagcagcgtggccggcgacaagcccagaaccttcctgcccagcaccaccgccagcaagatcagcgccctggagggcctgctgaagccccagacccccagctacaaccaccacaccagactgcacagacagagccccctgcaggccggcccccccaccggcagagaggacgccagacccggcgagctgcccgaggcccccagagtggccgccaccgccctgcccaagcagcacctgcagagactgcccgccgccagaagctggagcggcagatgcagacacagaggcggccccagaagcagacccagaagcgccgtggcccccagacccgccgccggcgtgtag

SEQ ID NO: 81283 - DNA, 837 bp, synthetic construct
  misc_feature 1..837: note = Description of Artificial Sequence: Synthetic coding sequence
  source 1..837: mol_type = other DNA
atggacttctggctgtggcccctgtacttcctgcccgagtacgagcccagctgggaggagcagcccatgcccgagacccccaagtggttccacctgccctacctgttccagatgcccgcctacgccagcagcagcaagttcgtgaccagagtgaccacccccgcccagagaggcaaggtgccccccgtgcaccacagcagccccaccacccagatcacccacagacccagagtgagcagagccagcagcgtggccggcgacaagcccagaaccttcctgcccagcaccaccgccagcaagatcagcgccctggagggcctgctgaagccccagacccccagctacaaccaccacaccagactgcacagacagagagccctggactacggcagccagagcggcagagagggccagggcttccacatcctgatccccaccatcctgggcctgttcctgctggccctgctgggcctggtggtgaagagagccgtggagagaagaaaggccctgagcagaagagccagaagactggccgtgagaatgagagccctggagagcagccagagacccagaggcagccccagacccagaagccagaacaacatctacagcgcctgccccagaagagccagaggcgccgacgccgccggcaccggcgaggcccccgtgcccggccccggcgcccccctgccccccgcccccctgcaggtgagcgagagcccctggctgcacgcccccagcctgaagaccagctgcgagtacgtgagcctgtaccaccagcccgccgccatgatggaggacagcgacagcgacgactacatcaacgtgcccgcctag

SEQ ID NO: 81284 - DNA, 456 bp, synthetic construct
  misc_feature 1..456: note = Description of Artificial Sequence: Synthetic coding sequence
  source 1..456: mol_type = other DNA
atggacttctggctgtggcccctgtacttcctgcccgtgagcggcgccctgagaatcctgcccgaggtgaaggtggagggcgagctgggcggcagcgtgaccatcaagtgccccctgcccgagatgcacgtgagaatctacctgtgcagagagatggccggcagcggcacctgcggcaccgtggtgagcaccaccaacttcatcaaggccgagtacaagggcagagtgaccctgaagcagtaccccagaaagaacctgttcctggtggaggtgacccagctgaccgagagcgacagcggcgtgtacgcctgcggcgccggcatgaacaccgacagaggcaagacccagaaggtgaccctgaacgtgcacagcgagtacgagcccagctgggaggagcagcccatgcccgagacccccaagtggttccacctgccctacctgttccagatgccctag

SEQ ID NO: 81285 - DNA, 444 bp, synthetic construct
  misc_feature 1..444: note = Description of Artificial Sequence: Synthetic coding sequence
  source 1..444: mol_type = other DNA
atggacttctggctgtggcccctgtacttcctgcccgtgagcggcgccctgagaatcctgcccgaggtgaaggtggagggcgagctgggcggcagcgtgaccatcaagtgccccctgcccgagatgcacgtgagaatctacctgtgcagagagatggccggcagcggcacctgcggcaccgtggtgagcaccaccaacttcatcaaggccgagtacaagggcagagtgaccctgaagcagtaccccagaaagaacctgttcctggtggaggtgacccagctgaccgagagcgacagcggcgtgtacgcctgcggcgccggcatgaacaccgacagaggcaagacccagaaggtgaccctgaacgtgcacagcgagtacgagcccagctgggaggagcagcccatgcccgagacccccaagtggttccacctgccctacctgtag

SEQ ID NO: 81286 - DNA, 426 bp, synthetic construct
  misc_feature 1..426: note = Description of Artificial Sequence: Synthetic coding sequence
  source 1..426: mol_type = other DNA
atggacttctggctgtggcccctgtacttcctgcccgagatggagagctgctgcgtggcccaggacggcctggagctggtggccctgagcgacccccccggcagcgccagccagagcgccggcatcaccgtgagcggcgccctgagaatcctgcccgaggtgaaggtggagggcgagctgggcggcagcgtgaccatcaagtgccccctgcccgagatgcacgtgagaatctacctgtgcagagagatggccggcagcggcacctgcggcaccgtggtgagcaccaccaacttcatcaaggccgagtacaagggcagagtgaccctgaagcagtaccccagaaagaacctgttcctggtggaggtgacccagctgaccgagagcgacagcggcgtgtacgcctgcggcgccggcatgaacacctag

SEQ ID NO: 81287 - DNA, 1398 bp, synthetic construct
  misc_feature 1..1398: note = Description of Artificial Sequence: Synthetic coding sequence
  source 1..1398: mol_type = other DNA
atgagaagacccagaggcgagcccggccccagagcccccagacccaccgagggcgccacctgcgccggccccggcgagagctggagccccagccccaacagcatgctgagagtgctgctgagcgcccagaccagccccgccagactgagcggcctgctgctgatcccccccgtgcagccctgctgcctgggccccagcaagtggggcgacagacccgtgggcggcggccccagcgccggccccgtgcagggcctgcagagactgctggagcaggccaagagccccggcgagctgctgagatggctgggccagaaccccagcaaggtgagagcccaccactacagcgtggccctgagaagactgggccagctgctgggcagcagacccagacccccccccgtggagcaggtgaccctgcaggacctgagccagctgatcatcagaaactgccccagcttcgacatccacaccatccacgtgtgcctgcacctggccgtgctgctgggcttccccagcgacggccccctggtgtgcgccctggagcaggagagaagactgagactgccccccaagccccccccccccctgcagcccctgctgagaggcggccagggcctggaggccgccctgagctgccccagattcctgagataccccagacagcacctgatcagcagcctggccgaggccagacccgaggagctgaccccccacgtgatggtgctgctggcccagcacctggccagacacagactgagagagccccagctgctggaggccatcgcccacttcctggtggtgcaggagacccagctgagcagcaaggtggtgcagaagctggtgctgcccttcggcagactgaactacctgcccctggagcagcagttcatgccctgcctggagagaatcctggccagagaggccggcgtggcccccctggccaccgtgaacatcctgatgagcctgtgccagctgagatgcctgcccttcagagccctgcacttcgtgttcagccccggcttcatcaactacatcagcggcaccccccacgccctgatcgtgagaagatacctgagcctgctggacaccgccgtggagctggagctgcccggctacagaggccccagactgcccagaagacagcaggtgcccatcttcccccagcccctgatcaccgacagagccagatgcaagtacagccacaaggacatcgtggccgagggcctgagacagctgctgggcgaggagaagtacagacaggacctgaccgtgccccccggctactgcaccgacttcctgctgtgcgccagcagcagcggcgccgtgctgcccgtgagaacccaggaccccttcctgccctacccccccagagcctgccccagcagcagagccacctag

SEQ ID NO: 81288 - DNA, 1650 bp, synthetic construct
  misc_feature 1..1650: note = Description of Artificial Sequence: Synthetic coding sequence
  source 1..1650: mol_type = other DNA
atgagaagacccagaggcgagcccggccccagagcccccagacccaccgagggcgccacctgcgccggccccggcgagagctggagccccagccccaacagcatgctgagagtgctgctgagcgcccagaccagccccgccagactgagcggcctgctgctgatcccccccgtgcagccctgctgcctgggccccagcaagtggggcgacagacccgtgggcggcggccccagcgccggccccgtgcagggcctgcagagactgctggagcaggccaagagccccggcgagctgctgagatggctgggccagaaccccagcaaggtgagagcccaccactacagcgtggccctgagaagactgggccagctgctgggcagcagacccagacccccccccgtggagcaggtgaccctgcaggacctgagccagctgatcatcagaaactgccccagcttcgacatccacaccatccacgtgtgcctgcacctggccgtgctgctgggcttccccagcgacggccccctggtgtgcgccctggagcaggagagaagactgagactgccccccaagccccccccccccctgcagcccctgctgagaggcggccagggcctggaggccgccctgagctgccccagattcctgagataccccagacagcacctgatcagcagcctggccgaggccagacccgaggagctgaccccccacgtgatggtgctgctggcccagcacctggccagacacagactgagagagccccagctgctggaggccatcgcccacttcctggtggtgcaggagacccagctgagcagcaaggtggtgcagaagctggtgctgcccttcggcagactgaactacctgcccctggagcagcagttcatgccctgcctggagagaatcctggccagagaggccggcgtggcccccctggccaccgtgaacatcctgatgagcctgtgccagctgagatgcctgcccttcagagccctgcacttcgtgttcagccccggcttcatcaactacatcagcggcaccccccacgccctgatcgtgagaagatacctgagcctgctggacaccgccgtggagctggagctgcccggctacagaggccccagactgcccagaagacagcaggtgcccatcttcccccagcccctgatcaccgacagagccagatgcaagtacagccacaaggacatcgtggccgagggcctgagacagctgctgggcgaggagaagtacagacaggacctgaccgtgccccccggctactgcaccgacttcctgctgtgcgccagcagcagcggcgccgtgctgcccgtgagaacccaggaccccttcctgccctacccccccagaagctgcccccagggccaggccgccagcagcgccaccaccagagaccccgcccagagagtggtgctggtgctgagagagagatggcacttctgcagagacggcagagtgctgctgggcagcagagccctgagagagagacacctgggcctgatgggctaccagctgctgcccctgcccttcgaggagctggagagccagagaggcctgccccagctgaagagctacctgagacagaagctgcaggccctgggcctgagatggggccccgagggcggctag

SEQ ID NO: 81289 - DNA, 1227 bp, synthetic construct
  misc_feature 1..1227: note = Description of Artificial Sequence: Synthetic coding sequence
  source 1..1227: mol_type = other DNA
atgagaagacccagaggcgagcccggccccagagcccccagacccaccgagggcgccacctgcgccggccccggcgagagctgcttccccagcgacggccccctggtgtgcgccctggagcaggagagaagactgagactgccccccaagccccccccccccctgcagcccctgctgagaggcggccagggcctggaggccgccctgagctgccccagattcctgagataccccagacagcacctgatcagcagcctggccgaggccagacccgaggagctgaccccccacgtgatggtgctgctggcccagcacctggccagacacagactgagagagccccagctgctggaggccatcgcccacttcctggtggtgcaggagacccagctgagcagcaaggtggtgcagaagctggtgctgcccttcggcagactgaactacctgcccctggagcagcagttcatgccctgcctggagagaatcctggccagagaggccggcgtggcccccctggccaccgtgaacatcctgatgagcctgtgccagctgagatgcctgcccttcagagccctgcacttcgtgttcagccccggcttcatcaactacatcagcggcaccccccacgccctgatcgtgagaagatacctgagcctgctggacaccgccgtggagctggagctgcccggctacagaggccccagactgcccagaagacagcaggtgcccatcttcccccagcccctgatcaccgacagagccagatgcaagtacagccacaaggacatcgtggccgagggcctgagacagctgctgggcgaggagaagtacagacaggacctgaccgtgccccccggctactgcaccgacttcctgctgtgcgccagcagcagcggcgccgtgctgcccgtgagaacccaggaccccttcctgccctacccccccagaagctgcccccagggccaggccgccagcagcgccaccaccagagaccccgcccagagagtggtgctggtgctgagagagagatggcacttctgcagagacggcagagtgctgctgggcagcagagccctgagagagagacacctgggcctgatgggctaccagctgctgcccctgcccttcgaggagctggagagccagagaggcctgccccagctgaagagctacctgagacagaagctgcaggccctgggcctgagatggggccccgagggcggctag

SEQ ID NO: 81290 - DNA, 480 bp, synthetic construct
  misc_feature 1..480: note = Description of Artificial Sequence: Synthetic coding sequence
  source 1..480: mol_type = other DNA
atgctgagagtgctgctgagcgcccagaccagccccgccagactgagcggcctgctgctgatcccccccgtgcagccctgctgcctgggccccagcaagtggggcgacagacccgtgggcggcggccccagcgccggccccgtgcagggcctgcagagactgctggagcaggccaagagccccggcgagctgctgagatggctgggccagaaccccagcaaggtgagagcccaccactacagcgtggccctgagaagactgggccagctgctgggcagcagacccagacccccccccgtggagcaggtgaccctgcaggacctgagccagctgatcatcagaaactgccccagcttcgacatccacaccatccacgtgtgcctgcacctggccgtgctgctgggcggcaccgaggtgggccccgccctgtgggccaccgagctgcccgcccccggcaccgccgtgtacgccctgccctag

SEQ ID NO: 81291 - DNA, 1569 bp, synthetic construct
  misc_feature 1..1569: note = Description of Artificial Sequence: Synthetic coding sequence
  source 1..1569: mol_type = other DNA
atgagaagacccagaggcgagcccggccccagagcccccagacccaccgagggcgccacctgcgccggccccggcgagagctggagccccagccccaacagcatgctgagagtgctgctgagcgcccagaccagccccgccagactgagcggcctgctgctgatcccccccgtgcagccctgctgcctgggccccagcaagtggggcgacagacccgtgggcggcggccccagcgccggccccgtgcagggcctgcagagactgctggagcaggccaagagccccggcgagctgctgagatggctgggccagaaccccagcaaggtgagagcccaccactacagcgtggccctgagaagactgggccagctgctgggcagcagacccagacccccccccgtggagcaggtgaccctgcaggacctgagccagctgatcatcagaaactgccccagcttcgacatccacaccatccacgtgtgcctgcacctggccgtgctgctgggcttccccagcgacggccccctggtgtgcgccctggagcaggagagaagactgagactgccccccaagccccccccccccctgcagcccctgctgagagaggccagacccgaggagctgaccccccacgtgatggtgctgctggcccagcacctggccagacacagactgagagagccccagctgctggaggccatcgcccacttcctggtggtgcaggagacccagctgagcagcaaggtggtgcagaagctggtgctgcccttcggcagactgaactacctgcccctggagcagcagttcatgccctgcctggagagaatcctggccagagaggccggcgtggcccccctggccaccgtgaacatcctgatgagcctgtgccagctgagatgcctgcccttcagagccctgcacttcgtgttcagccccggcttcatcaactacatcagcggcaccccccacgccctgatcgtgagaagatacctgagcctgctggacaccgccgtggagctggagctgcccggctacagaggccccagactgcccagaagacagcaggtgcccatcttcccccagcccctgatcaccgacagagccagatgcaagtacagccacaaggacatcgtggccgagggcctgagacagctgctgggcgaggagaagtacagacaggacctgaccgtgccccccggctactgcaccgacttcctgctgtgcgccagcagcagcggcgccgtgctgcccgtgagaacccaggaccccttcctgccctacccccccagaagctgcccccagggccaggccgccagcagcgccaccaccagagaccccgcccagagagtggtgctggtgctgagagagagatggcacttctgcagagacggcagagtgctgctgggcagcagagccctgagagagagacacctgggcctgatgggctaccagctgctgcccctgcccttcgaggagctggagagccagagaggcctgccccagctgaagagctacctgagacagaagctgcaggccctgggcctgagatggggccccgagggcggctag

SEQ ID NO: 81292 - DNA, 1179 bp, synthetic construct
  misc_feature 1..1179: note = Description of Artificial Sequence: Synthetic coding sequence
  source 1..1179: mol_type = other DNA
atggaggcccccctggtgagcctggacgaggagttcgaggacctgagacccagctgcagcgaggaccccgaggagaagccccagtgcttctacggcagcagcccccaccacctggaggaccccagcctgagcgagctggagaacttcagcagcgagatcatcagcttcaagagcatggaggacctggtgaacgagttcgacgagaagctgaacgtgtgcttcagaaactacaacgccaagaccgagaacctggcccccgtgaagaaccagctgcagatccaggaggaggaggagaccctgcaggacgaggaggtgtgggacgccctgaccgacaactacatccccagcctgagcgaggactggagagaccccaacatcgaggccctgaacggcaactgcagcgacaccgagatccacgagaaggaggaggaggagttcaacgagaagagcgagaacgacagcggcatcaacgaggagcccctgctgaccgccgaccaggtgatcgaggagatcgaggagatgatgcagaacagccccgaccccgaggaggaggaggaggtgctggaggaggaggacggcggcgagaccagcagccaggccgacagcgtgctgctgcaggagatgcaggccctgacccagaccttcaacaacaactggagctacgagggcctgagacacatgagcggcagcgagctgaccgagctgctggaccaggtggagggcgccatcagagacttcagcgaggagctggtgcagcagctggccagaagagacgagctggagttcgagaaggaggtgaagaacagcttcatcaccgtgctgatcgaggtgcagaacaagcagaaggagcagagagagctgatgaagaagagaagaaaggagaagggcctgagcctgcagagcagcagaatcgagaagggcaaccagatgcccctgaagagattcagcatggagggcatcagcaacatcctgcagagcggcatcagacagaccttcggcagcagcggcaccgacaagcagtacctgaacaccgtgatcccctacgagaagaaggccagcccccccagcgtggaggacctgcagatgctgaccaacatcctgttcgccatgaaggaggacaacgagaaggtgcccaccctgctgaccgactacatcctgaaggtgctgtgccccacctag

SEQ ID NO: 81293 - DNA, 315 bp, synthetic construct
  misc_feature 1..315: note = Description of Artificial Sequence: Synthetic coding sequence
  source 1..315: mol_type = other DNA
atggaggcccccctggtgagcctggacgaggagttcgaggacctgagacccagctgcagcgaggaccccgaggagaagccccagtgcttctacggcagcagcccccaccacctggaggaccccagcctgagcgagctggagaacttcagcagcgagatcatcagcttcaagagcatggaggacctggtgaacgagttcgacgagaagctgaacgtgtgcttcagaaactacaacgccaagaccgagaacctggcccccgtgaagaaccagctgcagatccaggaggaggaggagaccctgcaggacgaggagtag

SEQ ID NO: 81294 - DNA, 315 bp, synthetic construct; identical to SEQ ID NO: 81293
  misc_feature 1..315: note = Description of Artificial Sequence: Synthetic coding sequence
  source 1..315: mol_type = other DNA

SEQ ID NO: 81295 - DNA, 1419 bp, synthetic construct
  misc_feature 1..1419: note = Description of Artificial Sequence: Synthetic coding sequence
  source 1..1419: mol_type = other DNA
atgaccgccaacggcaccgccgaggccgtgcagatccagttcggcctgatcaactgcggcaacaagtacctgaccgccgaggccttcggcttcaaggtgaacgccagcgccagcagcctgaagaagaaccacctgggcagatacctggccgccgacaaggacggcaacgtgacctgcgagagagaggtgcccggccccgactgcagattcctgatcgtggcccacgacgacggcagatggagcctgcagagcgaggcccacagaagatacttcggcggcaccgaggacagactgagctgcttcgcccagaccgtgagccccgccgagaagtggagcgtgcacatcgccatgcacccccaggtgaacatctacagcgtgaccagaaagagatacgcccacctgagcgccagacccgccgacgagatcgccgtggacagagacgtgccctggggcgtggacagcctgatcaccctggccttccaggaccagagatacagcgtgcagaccgccgaccacagattcctgagacacgacggcagactggtggccagacccgagcccgccaccggctacaccctggagttcagaagcggcaaggtggccttcagagactgcgagggcagatacctggcccccagcggccccagcggcaccctgaaggccggcaaggccaccaaggtgggcaaggacgagctgttcgccctggagcagagctgcgcccaggtggtgctgcaggccgccaacgagagaaacgtgagcaccagacagggcatggacctgagcgccaaccaggacgaggagaccgaccaggagaccttccagctggagatcgacagagacaccaagaagtgcgccttcagaacccacaccggcaagtactggaccctgaccgccaccggcggcgtgcagagcaccgccagcagcaagaacgccagctgctacttcgacatcgagtggagagacagaagaatcaccctgagagccagcaacggcaagttcgtgaccagcaagaagaacggccagctggccgccagcgtggagaccgccggcgacagcgagctgttcctgatgaagctgatcaacagacccatcatcgtgttcagaggcgagcacggcttcatcggctgcagaaaggtgaccggcaccctggacgccaacagaagcagctacgacgtgttccagctggagttcaacgacggcgcctacaacatcaaggacagcaccggcaagtactggaccgtgggcagcgacagcgccgtgaccagcagcggcgacacccccgtggacttcttcttcgagttctgcgactacaacaaggtggccatcaaggtgggcggcagatacctgaagggcgaccacgccggcgtgctgaaggccagcgccgagaccgtggaccccgccagcctgtgggagtactag

SEQ ID NO: 81296 - DNA, 1482 bp, synthetic construct
  misc_feature 1..1482: note = Description of Artificial Sequence: Synthetic coding sequence
  source 1..1482: mol_type = other DNA
atgaccgccaacggcaccgccgaggccgtgcagatccagttcggcctgatcaactgcggcaacaagtacctgaccgccgaggccttcggcttcaaggtgaacgccagcgccagcagcctgaagaagaagcagatctggaccctggagcagccccccgacgaggccggcagcgccgccgtgtgcctgagaagccacctgggcagatacctggccgccgacaaggacggcaacgtgacctgcgagagagaggtgcccggccccgactgcagattcctgatcgtggcccacgacgacggcagatggagcctgcagagcgaggcccacagaagatacttcggcggcaccgaggacagactgagctgcttcgcccagaccgtgagccccgccgagaagtggagcgtgcacatcgccatgcacccccaggtgaacatctacagcgtgaccagaaagagatacgcccacctgagcgccagacccgccgacgagatcgccgtggacagagacgtgccctggggcgtggacagcctgatcaccctggccttccaggaccagagatacagcgtgcagaccgccgaccacagattcctgagacacgacggcagactggtggccagacccgagcccgccaccggctacaccctggagttcagaagcggcaaggtggccttcagagactgcgagggcagatacctggcccccagcggccccagcggcaccctgaaggccggcaaggccaccaaggtgggcaaggacgagctgttcgccctggagcagagctgcgcccaggtggtgctgcaggccgccaacgagagaaacgtgagcaccagacagggcatggacctgagcgccaaccaggacgaggagaccgaccaggagaccttccagctggagatcgacagagacaccaagaagtgcgccttcagaacccacaccggcaagtactggaccctgaccgccaccggcggcgtgcagagcaccgccagcagcaagaacgccagctgctacttcgacatcgagtggagagacagaagaatcaccctgagagccagcaacggcaagttcgtgaccagcaagaagaacggccagctggccgccagcgtggagaccgccggcgacagcgagctgttcctgatgaagctgatcaacagacccatcatcgtgttcagaggcgagcacggcttcatcggctgcagaaaggtgaccggcaccctggacgccaacagaagcagctacgacgtgttccagctggagttcaacgacggcgcctacaacatcaaggacagcaccggcaagtactggaccgtgggcagcgacagcgccgtgaccagcagcggcgacacccccgtggacttcttcttcgagttctgcgactacaacaaggtggccatcaaggtgggcggcagatacctgaagggcgaccacgccggcgtgctgaaggccagcgccgagaccgtggaccccgccagcctgtgggagtactag

SEQ ID NO: 81297 - DNA, 648 bp, synthetic construct
  misc_feature 1..648: note = Description of Artificial Sequence: Synthetic coding sequence
  source 1..648: mol_type = other DNA
atggacctgagcgccaaccaggacgaggagaccgaccaggagaccttccagctggagatcgacagagacaccaagaagtgcgccttcagaacccacaccggcaagtactggaccctgaccgccaccggcggcgtgcagagcaccgccagcagcaagaacgccagctgctacttcgacatcgagtggagagacagaagaatcaccctgagagccagcaacggcaagttcgtgaccagcaagaagaacggccagctggccgccagcgtggagaccgccggcgacagcgagctgttcctgatgaagctgatcaacagacccatcatcgtgttcagaggcgagcacggcttcatcggctgcagaaaggtgaccggcaccctggacgccaacagaagcagctacgacgtgttccagctggagttcaacgacggcgcctacaacatcaaggacagcaccggcaagtactggaccgtgggcagcgacagcgccgtgaccagcagcggcgacacccccgtggacttcttcttcgagttctgcgactacaacaaggtggccatcaaggtgggcggcagatacctgaagggcgaccacgccggcgtgctgaaggccagcgccgagaccgtggaccccgccagcctgtgggagtactag

SEQ ID NO: 81298 - DNA, 1551 bp, synthetic construct
  misc_feature 1..1551: note = Description of Artificial Sequence: Synthetic coding sequence
  source 1..1551: mol_type = other DNA
atgcccaccaacggcctgcaccaggtgctgaagatccagttcggcctggtgaacgacaccgacagatacctgaccgccgagagcttcggcttcaaggtgaacgccagcgcccccagcctgaagagaaagcagacctgggtgctggagcccgaccccggccagggcaccgccgtgctgctgagaagcagccacctgggcagatacctgagcgccgaggaggacggcagagtggcctgcgaggccgagcagcccggcagagactgcagattcctggtgctgccccagcccgacggcagatgggtgctgagaagcgagccccacggcagattcttcggcggcaccgaggaccagctgagctgcttcgccaccgccgtgagccccgccgagctgtggaccgtgcacctggccatccacccccaggcccacctgctgagcgtgagcagaagaagatacgtgcacctgtgccccagagaggacgagatggccgccgacggcgacaagccctggggcgtggacgccctgctgaccctgatcttcagaagcagaagatactgcctgaagagctgcgacagcagatacctgagaagcgacggcagactggtgtgggagcccgagcccagagcctgctacaccctggagttcaaggccggcaagctggccttcaaggactgcgacggccactacctggcccccgtgggccccgccggcaccctgaaggccggcagaaacaccagacccggcaaggacgagctgttcgacctggaggagagccacccccaggtggtgctggtggccgccaaccacagatacgtgagcgtgagacagggcgtgaacgtgagcgccaaccaggacgacgagctggaccacgagaccttcctgatgcagatcgaccaggagaccaagaagtgcaccttctacagcagcaccggcggctactggaccctggtgacccacggcggcatccacgccaccgccacccaggtgagcgccaacaccatgttcgagatggagtggagaggcagaagagtggccctgaaggccagcaacggcagatacgtgtgcatgaagaagaacggccagctggccgccatcagcgacttcgtgggccccccccccagacccgcctggaccggcaaggtggccggcggcgccgcccagcagaccctgagcccccccggcaaggacgaggagttcaccctgaagctgatcaacagacccatcctggtgctgagaggcctggacggcttcgtgtgccaccacagaggcagcaaccagctggacaccaacagaagcgtgtacgacgtgttccacctgagcttcagcgacggcgcctacagaatcagaggcagagacggcggcttctggtacaccggcagccacggcagcgtgtgcagcgacggcgagagagccgaggacttcgtgttcgagttcagagagagaggcagactggccatcagagccagaagcggcaagtacctgagaggcggcgccagcggcctgctgagagccgacgccgacgcccccgccggcaccgccctgtgggagtactag

SEQ ID NO: 81299 - DNA, 1479 bp, synthetic construct
  misc_feature 1..1479: note = Description of Artificial Sequence: Synthetic coding sequence
  source 1..1479: mol_type = other DNA
atgcccaccaacggcctgcaccaggtgctgaagatccagttcggcctggtgaacgacaccgacagatacctgaccgccgagagcttcggcttcaaggtgaacgccagcgcccccagcctgaagagaaagcagacctgggtgctggagcccgaccccggccagggcaccgccgtgctgctgagaagcagccacctgggcagatacctgagcgccgaggaggacggcagagtggcctgcgaggccgagcagcccggcagagactgcagattcctggtgctgccccagcccgacggcagatgggtgctgagaagcgagccccacggcagattcttcggcggcaccgaggaccagctgagctgcttcgccaccgccgtgagccccgccgagctgtggaccgtgcacctggccatccacccccaggcccacctgctgagcgtgagcagaagaagatacgtgcacctgtgccccagagaggacgagatggccgccgacggcgacaagccctggggcgtggacgccctgctgaccctgatcttcagaagcagaagatactgcctgaagagctgcgacagcagatacctgagaagcgacggcagactggtgtgggagcccgagcccagagcctgctacaccctggagttcaaggccggcaagctggccttcaaggactgcgacggccactacctggcccccgtgggccccgccggcaccctgaaggccggcagaaacaccagacccggcaaggacgagctgttcgacctggaggagagccacccccaggtggtgctggtggccgccaaccacagatacgtgagcgtgagacagggcgtgaacgtgagcgccaaccaggacgacgagctggaccacgagaccttcctgatgcagatcgaccaggagaccaagaagtgcaccttctacagcagcaccggcggctactggaccctggtgacccacggcggcatccacgccaccgccacccaggtgagcgccaacaccatgttcgagatggagtggagaggcagaagagtggccctgaaggccagcaacggcagatacgtgtgcatgaagaagaacggccagctggccgccatcagcgacttcgtgggcaaggacgaggagttcaccctgaagctgatcaacagacccatcctggtgctgagaggcctggacggcttcgtgtgccaccacagaggcagcaaccagctggacaccaacagaagcgtgtacgacgtgttccacctgagcttcagcgacggcgcctacagaatcagaggcagagacggcggcttctggtacaccggcagccacggcagcgtgtgcagcgacggcgagagagccgaggacttcgtgttcgagttcagagagagaggcagactggccatcagagccagaagcggcaagtacctgagaggcggcgccagcggcctgctgagagccgacgccgacgcccccgccggcaccgccctgtgggagtactag

SEQ ID NO: 81300 - DNA, 2133 bp, synthetic construct
  misc_feature 1..2133: note = Description of Artificial Sequence: Synthetic coding sequence
  source 1..2133: mol_type = other DNA
atgctgaccaccctgaagcccttcggcagcgtgagcgtggagagcaagatgaacaacaaggccggcagcttcttctggaacctgagacagttcagcaccctggtgagcaccagcagaaccatgagactgtgctgcctgggcctgtgcaagcccaagatcgtgcacagcaactggaacatcctgaacaacttccacaacagaatgcagagcaccgacatcatcagatacctgttccaggacgccttcatcttcaagagcgacgtgggcttccagaccaagggcatcagcaccctgaccgccctgagaatcgagagactgctgtacgccaagagactgttcttcgacagcaagcagagcctggtgcccgtggacaagagcgacgacgagctgaagaaggtgaacctgaaccacgaggtgagcaacgaggacgtgctgaccaaggagaccaagcccaacagaatcagcagcagaaagctgagcgaggagtgcaacagcctgagcgacgtgctggacgccttcagcaaggcccccaccttccccagcagcaactacttcaccgccatgtggaccatcgccaagagactgagcgacgaccagaagagattcgagaagagactgatgttcagccaccccgccttcaaccagctgtgcgagcacatgatgagagaggccaagatcatgcagtacaagtacctgctgttcagcctgcacgccatcgtgaagctgggcatcccccagaacaccatcctggtgcagaccctgctgagagtgacccaggagagaatcaacgagtgcgacgagatctgcctgagcgtgctgagcaccgtgctggaggccatggagccctgcaagaacgtgcacgtgctgagaaccggcttcagaatcctggtggaccagcaggtgtggaagatcgaggacgtgttcaccctgcaggtggtgatgaagtgcatcggcaaggacgcccccatcgccctgaagagaaagctggagatgaaggccctgagagagctggacagattcagcgtgctgaacagccagcacatgttcgaggtgctggccgccatgaaccacagaagcctgatcctgctggacgagtgcagcaaggtggtgctggacaacatccacggctgccccctgagaatcatgatcaacatcctgcagagctgcaaggacctgcagtaccacaacctggacctgttcaagggcctggccgactacgtggccgccaccttcgacatctggaagttcagaaaggtgctgttcatcctgatcctgttcgagaacctgggcttcagacccgtgggcctgatggacctgttcatgaagagaatcgtggaggaccccgagagcctgaacatgaagaacatcctgagcatcctgcacacctacagcagcctgaaccacgtgtacaagtgccagaacaaggagcagttcgtggaggtgatggccagcgccctgaccggctacctgcacaccatcagcagcgagaacctgctggacgccgtgtacagcttctgcctgatgaactacttccccctggcccccttcaaccagctgctgcagaaggacatcatcagcgagctgctgaccagcgacgacatgaagaacgcctacaagctgcacaccctggacacctgcctgaagctggacgacaccgtgtacctgagagacatcgccctgagcctgccccagctgcccagagagctgcccagcagccacaccaacgccaaggtggccgaggtgctgagcagcctgctgggcggcgagggccacttcagcaaggacgtgcacctgccccacaactaccacatcgacttcgagatcagaatggacaccaacagaaaccaggtgctgcccctgagcgacgtggacaccaccagcgccaccgacatccagagagtggccgtgctgtgcgtgagcagaagcgcctactgcctgggcagcagccaccccagaggcttcctggccatgaagatgagacacctgaacgccatgggcttccacgtgatcctggtgaacaactgggagatggacaagctggagatggaggacgccgtgaccttcctgaagaccaagatctacagcgtggaggccctgcccgtggccgccgtgaacgtgcagagcacccagtag

SEQ ID NO: 81301 - DNA, 2133 bp, synthetic construct; identical to SEQ ID NO: 81300
  misc_feature 1..2133: note = Description of Artificial Sequence: Synthetic coding sequence
  source 1..2133: mol_type = other DNA

SEQ ID NO: 81302 - DNA, 2133 bp, synthetic construct; identical to SEQ ID NO: 81300
  misc_feature 1..2133: note = Description of Artificial Sequence: Synthetic coding sequence
  source 1..2133: mol_type = other DNA

SEQ ID NO: 81303 - DNA, 375 bp, synthetic construct
  misc_feature 1..375: note = Description of Artificial Sequence: Synthetic coding sequence
  source 1..375: mol_type = other DNA
atgctgaccaccctgaagcccttcggcagcgtgagcgtggagagcaagatgaacaacaaggccggcagcttcttctggaacctgagacagttcagcaccctggtgagcaccagcagaaccatgagactgtgctgcctgggcctgtgcaagcccaagatcgtgcacagcaactggaacatcctgaacaacttccacaacagaatgcagagcaccgacatcatcagatacctgttccaggacgccttcatcttcaagagcgacgtgggcttccagaccaagggcatcagcaccctgaccgccctgagaatcgagagactgctgtacgccaagagactgttcttcgacagcaagcagagcctggtgcccgtggactag

SEQ ID NO: 81304 - DNA, 2295 bp, synthetic construct
  misc_feature 1..2295: note = Description of Artificial Sequence: Synthetic coding sequence
  source 1..2295: mol_type = other DNA
atggccgccaccctgaagagcctgaagctggtgagatacagagccttctgcagccccagcgccttcggcgccgtgagaagcgtgagctactggaacgtgagcagcacccagcacggcggccaggacccccccgagcacatcagcctgtgccacagcgccaagaaggtgaagaacatctgcagcaccttcagcagcagaagaatcctgaccaccagcagcgcccaccccggcctggagttcagcaagaccagcagcagcaaggccagcaccctgcagctgggcagccccagagccaccggcgtggacgaggaggacgtggaggtgttcgacagcttcgagaacatgagagtgttcctgcagctgagacccgagtacagagtgcacagctacaacgccagcgagaccagccagctgctgagcgtgagcgagggcgagctgatcctgcacaaggtgagagtgaaccagaacaacctgcaggcccaggtgatcgtggactacctgtgcaagctgagcagcctgcccgccgagcagcaccccgtgctgctgggcagcaccagcttcgccctgctgtgccagctgagcgtgaagaagatccagctgttcgacacccaggacctgatcaacgtgctgaaggccttcgtgatcctgggcatcccccacagccacagcatgctggacgtgtacgagaccaagtgctgccaccaggtgtgggagatgaacatggaccagctgctgctggtggccgacctgtggagatacctgggcagaaaggtgcccagattcctgaacatcttcagcagctacctgaacctgcactggaaggacctgagcctgagccagctggtgcacctgatctacgtgatcggcgagaacagacaggtgagccaggacctgatgcagaagctggagagcctgatcctgaagtacatcgacctgatcaacctggaggaggtgggcaccatctgcctgggcttcttcaagagcagcaccaacctgagcgagttcgtgatgagaaagatcggcgacctggcctgcgccaacatccagcacctgagcagcagaagcctggtgaacatcgtgaagatgttcagattcacccacgtggaccacatcaacttcatgaagcagatcggcgagatcgccccccagagaatccccagcctgggcgtgcagggcgtgatgcacctgaccctgtactgcagcgccctgagattcctgaacgagggcgtgatgaacgccgtggccgccagcctgccccccagagtggcccactgcagaagcaaggacgtggccaagatcctgtggagcttcggcaccctgaactacaagccccccaacgccgaggagttctacagcagcctgatcagcgagatccacagaaagatgcccgagttcaaccagtaccccgagcacctgcccacctgcctgctgggcctggccttcctggagtacttccccgtggagctgatcgacttcgccctgagccccggcttcgtgagactggcccaggagagaaccaagttcgacctgctgaaggagctgtacaccctggacggcaccgtgggcatcgagtgccccgactacagaggcaacagactgagcacccacctgcagcaggagggcagcgagctgctgtggtacctggccgagaaggacatgaacagcaagcccgagttcctggagaccgtgttcctgctggagaccatgctgggcggcccccagtacgtgaagcaccacatgatcctgccccacaccagaagcagcgacctggaggtgcagctggacgtgaacctgaagcccctgcccttcaacagagaggccacccccgccgagaacgtggccaagctgagactggagcacgtgggcgtgagcctgaccgacgacctgatgaacaagctgctgaagggcaaggccagaggccacttccagggcaagaccgagagcgagcccggccagcagcccatggagctggagaacaaggccgccgtgcccctgggcggcttcctgtgcaacgtggccgacaagagcggcgccatggagatggccggcctgtgccccgccgcctgcatgcagacccccagaatgaagctggccgtgcagttcaccaacagaaaccagtactgctacggcagcagagacctgctgggcctgcacaacatgaagagaagacagctggccagactgggctacagagtggtggagctgagctactgggagtggctgcccctgctgaagagaaccagactggagaagctggccttcctgcacgagaaggtgttcaccagcgccctgtag

SEQ ID NO: 81305 - DNA, 183 bp, synthetic construct
  misc_feature 1..183: note = Description of Artificial Sequence: Synthetic coding sequence
  source 1..183: mol_type = other DNA
atggcctgccagggcagagaggagtgctggtgccagagcagaatcgccagaaccctgcccgccgaccagaagcccgagtgcagaccctactgggagaaggacgacgccagcatgcccctgcccttcgacctgaccgacatcgtgagcgagctgagaggccagctgctggaggccaagccctag

SEQ ID NO: 81306 - DNA, 630 bp, synthetic construct
  misc_feature 1..630: note = Description of Artificial Sequence: Synthetic coding sequence
  source 1..630: mol_type = other DNA
atgctggacgacctgaacgccacccaccagcactgcgtgctggccggcagccagcccagattcagcagcacccacagagtggccgagtgcagcaccggcaccctggactacatcctgcagagatgccagctggccctgcagaacgtgtgcgacgacgtggacaacgacgacgtgagcctgaagagcttcgagcccgccgtgctgaagcagggcgaggagatccacaacgaggtggagttcgagtggctgagacagttctggttccagggcaacagatacagaaagtgcaccgactggtggtgccagcccatggcccagctggaggccctgtggaagaagatggagggcgtgaccaacgccgtgctgcacgaggtgaagagagagggcctgcccgtggagcagagaaacgagatcctgaccgccatcctggccagcctgaccgccagacagaacctgagaagagagtggcacgccagatgccagagcagaatcgccagaaccctgcccgccgaccagaagcccgagtgcagaccctactgggagaaggacgacgccagcatgcccctgcccttcgacctgaccgacatcgtgagcgagctgagaggccagctgctggaggccaagccctag

SEQ ID NO: 81307 - DNA, 321 bp, synthetic construct
  misc_feature 1..321: note = Description of Artificial Sequence: Synthetic coding sequence
  source 1..321: mol_type = other DNA
atggcccagctggaggccctgtggaagaagatggagggcgtgaccaacgccgtgctgcacgaggtgaagagagagggcctgcccgtggagcagagaaacgagatcctgaccgccatcctggccagcctgaccgccagacagaacctgagaagagagtggcacgccagatgccagagcagaatcgccagaaccctgcccgccgaccagaagcccgagtgcagaccctactgggagaaggacgacgccagcatgcccctgcccttcgacctgaccgacatcgtgagcgagctgagaggccagctgctggaggccaagccctag

SEQ ID NO: 81308 - DNA, 321 bp, synthetic construct; identical to SEQ ID NO: 81307
  misc_feature 1..321: note = Description of Artificial Sequence: Synthetic coding sequence
  source 1..321: mol_type = other DNA

SEQ ID NO: 81309 - DNA, 384 bp, synthetic construct
  misc_feature 1..384: note = Description of Artificial Sequence: Synthetic coding sequence
  source 1..384: mol_type = other DNA
atggagtggagaaaggtgagcgagtgcaacagcgtggagccctgcagagaggtgaagaagtggccctacagatgcatccaccacggcaagaacttcagcagaatgaccaacgccgtgctgcacgaggtgaagagagagggcctgcccgtggagcagagaaacgagatcctgaccgccatcctggccagcctgaccgccagacagaacctgagaagagagtggcacgccagatgccagagcagaatcgccagaaccctgcccgccgaccagaagcccgagtgcagaccctactgggagaaggacgacgccagcatgcccctgcccttcgacctgaccgacatcgtgagcgagctgagaggccagctgctggaggccaagccctag

SEQ ID NO: 81310 - DNA, 1518 bp, synthetic construct
  misc_feature 1..1518: note = Description of Artificial Sequence: Synthetic coding sequence
  source 1..1518: mol_type = other DNA
atgaagagaacccccaccgccgaggagagagagagagaggccaagaagctgagactgctggaggagctggaggacacctggctgccctacctgacccccaaggacgacgagttctaccagcagtggcagctgaagtaccccaagctgatcctgagagaggccagcagcgtgagcgaggagctgcacaaggaggtgcaggaggccttcctgaccctgcacaagcacggctgcctgttcagagacctggtgagaatccagggcaaggacctgctgacccccgtgagcagaatcctgatcggcaaccccggctgcacctacaagtacctgaacaccagactgttcaccgtgccctggcccgtgaagggcagcaacatcaagcacaccgaggccgagatcgccgccgcctgcgagaccttcctgaagctgaacgactacctgcagatcgagaccatccaggccctggaggagctggccgccaaggagaaggccaacgaggacgccgtgcccctgtgcatgagcgccgacttccccagagtgggcatgggcagcagctacaacggccaggacgaggtggacatcaagagcagagccgcctacaacgtgaccctgctgaacttcatggacccccagaagatgccctacctgaaggaggagccctacttcggcatgggcaagatggccgtgagctggcaccacgacgagaacctggtggacagaagcgccgtggccgtgtacagctacagctgcgagggccccgaggaggagagcgaggacgacagccacctggagggcagagaccccgacatctggcacgtgggcttcaagatcagctgggacatcgagacccccggcctggccatccccctgcaccagggcgactgctacttcatgctggacgacctgaacgccacccaccagcactgcgtgctggccggcagccagcccagattcagcagcacccacagagtggccgagtgcagcaccggcaccctggactacatcctgcagagatgccagctggccctgcagaacgtgtgcgacgacgtggacaacgacgacgtgagcctgaagagcttcgagcccgccgtgctgaagcagggcgaggagatccacaacgaggtggagttcgagtggctgagacagttctggttccagggcaacagatacagaaagtgcaccgactggtggtgccagcccatggcccagctggaggccctgtggaagaagatggagggcgtgaccaacgccgtgctgcacgaggtgaagagagagggcctgcccgtggagcagagaaacgagatcctgaccgccatcctggccagcctgaccgccagacagaacctgagaagagagtggcacgccagatgccagagcagaatcgccagaaccctgcccgccgaccagaagcccgagtgcagaccctactgggagaaggacgacgccagcatgcccctgcccttcgacctgaccgacatcgtgagcgagctgagaggccagctgctggaggccaagccctag

SEQ ID NO: 81311 - DNA, 321 bp, synthetic construct; identical to SEQ ID NO: 81307
  misc_feature 1..321: note = Description of Artificial Sequence: Synthetic coding sequence
  source 1..321: mol_type = other DNA

SEQ ID NO: 81312 - DNA, 13050 bp, synthetic construct
  misc_feature 1..13050: note = Description of Artificial Sequence: Synthetic coding sequence
  source 1..13050: mol_type = other DNA
atgaccatcgccctgctgggcttcgccatcttcctgctgcactgcgccacctgcgagaagcccctggagggcatcctgagcagcagcgcctggcacttcacccacagccactacaacgccaccatctacgagaacagcagccccaagacctacgtggagagcttcgagaagatgggcatctacctggccgagccccagtgggccgtgagatacagaatcatcagcggcgacgtggccaacgtgttcaagaccgaggagtacgtggtgggcaacttctgcttcctgagaatcagaaccaagagcagcaacaccgccctgctgaacagagaggtgagagacagctacaccctgatcatccaggccaccgagaagaccctggagctggaggccctgaccagagtggtggtgcacatcctggaccagaacgacctgaagcccctgttcagcccccccagctacagagtgaccatcagcgaggacatgcccctgaagagccccatctgcaaggtgaccgccaccgacgccgacctgggccagaacgccgagttctactacgccttcaacaccagaagcgagatgttcgccatccaccccaccagcggcgtggtgaccgtggccggcaagctgaacgtgacctggagaggcaagcacgagctgcaggtgctggccgtggacagaatgagaaagatcagcgagggcaacggcttcggcagcctggccgccctggtggtgcacgtggagcccgccctgagaaagccccccgccatcgccagcgtggtggtgaccccccccgacagcaacgacggcaccacctacgccaccgtgctggtggacgccaacagcagcggcgccgaggtggagagcgtggaggtggtgggcggcgaccccggcaagcacttcaaggccatcaagagctacgccagaagcaacgagttcagcctggtgagcgtgaaggacatcaactggatggagtacctgcacggcttcaacctgagcctgcaggccagaagcggcagcggcccctacttctacagccagatcagaggcttccacctgccccccagcaagctgagcagcctgaagttcgagaaggccgtgtacagagtgcagctgagcgagttcagcccccccggcagcagagtggtgatggtgagagtgacccccgccttccccaacctgcagtacgtgctgaagcccagcagcgagaacgtgggcttcaagctgaacgccagaaccggcctgatcaccaccaccaagctgatggacttccacgacagagcccactaccagctgcacatcagaaccagccccggccaggccagcaccgtggtggtgatcgacatcgtggactgcaacaaccacgcccccctgttcaacagaagcagctacgacggcaccctggacgagaacatcccccccggcaccagcgtgctggccgtgaccgccaccgacagagaccacggcgagaacggctacgtgacctacagcatcgccggccccaaggccctgcccttcagcatcgacccctacctgggcatcatcagcaccagcaagcccatggactacgagctgatgaagagaatctacaccttcagagtgagagccagcgactggggcagccccttcagaagagagaaggaggtgagcatcttcctgcagctgagaaacctgaacgacaaccagcccatgttcgaggaggtgaactgcaccggcagcatcagacaggactggcccgtgggcaagagcatcatgaccatgagcgccatcgacgtggacgagctgcagaacctgaagtacgagatcgtgagcggcaacgagctggagtacttcgacctgaaccacttcagcggcgtgatcagcctgaagagacccttcatcaacctgaccgccggccagcccaccagctacagcctgaagatcaccgccagcgacggcaagaactacgccagccccaccaccctgaacatcaccgtggtgaaggacccccacttcgaggtgcccgtgacctgcgacaagaccggcgtgctgacccagttcaccaagaccatcctgcacttcatcggcctgcagaaccaggagagcagcgacgaggagttcaccagcctgagcacctaccagatcaaccactacaccccccagttcgaggaccacttcccccagagcatcgacgtgctggagagcgtgcccatcaacacccccctggccagactggccgccaccgaccccgacgccggcttcaacggcaagctggtgtacgtgatcgccgacggcaacgaggagggctgcttcgacatcgagctggagaccggcctgctgaccgtggccgcccccctggactacgaggccaccaacttctacatcctgaacgtgaccgtgtacgacctgggcaccccccagaagagcagctggaagctgctgaccgtgaacgtgaaggactggaacgacaacgcccccagattcccccccggcggctaccagctgaccatcagcgaggacaccgaggtgggcaccaccatcgccgagctgaccaccaaggacgccgacagcgaggacaacggcagagtgagatacaccctgctgagccccaccgagaagttcagcctgcaccccctgaccggcgagctggtggtgaccggccacctggacagagagagcgagcccagatacatcctgaaggtggaggccagagaccagcccagcaagggccaccagctgttcagcgtgaccgacctgatcatcaccctggaggacgtgaacgacaacagcccccagtgcatcaccgagcacaacagactgaaggtgcccgaggacctgccccccggcaccgtgctgaccttcctggacgccagcgaccccgacctgggccccgccggcgaggtgagatacgtgctgatggacggcgcccacggcaccttcagagtggacctgatgaccggcgccctgatcctggagagagagctggacttcgagagaagagccggctacaacctgagcctgtgggccagcgacggcggcagacccctggccagaagaaccctgtgccacgtggaggtgatcgtgctggacgtgaacgagaacctgcaccccccccacttcgccagcttcgtgcaccagggccaggtgcaggagaacagccccagcggcacccaggtgatcgtggtggccgcccaggacgacgacagcggcctggacggcgagctgcagtacttcctgagagccggcaccggcctggccgccttcagcatcaaccaggacaccggcatgatccagaccctggcccccctggacagagagttcgccagctactactggctgaccgtgctggccgtggacagaggcagcgtgcccctgagcagcgtgaccgaggtgtacatcgaggtgaccgacgccaacgacaaccccccccagatgagccaggccgtgttctaccccagcatccaggaggacgcccccgtgggcaccagcgtgctgcagctggacgcctgggaccccgacagcagcagcaagggcaagctgaccttcaacatcaccagcggcaactacatgggcttcttcatgatccaccccgtgaccggcctgctgagcaccgcccagcagctggacagagagaacaaggacgagcacatcctggaggtgaccgtgctggacaacggcgagcccagcctgaagagcaccagcagagtggtggtgggcatcctggacgtgaacgacaacccccccatcttcagccacaagctgttcaacgtgagactgcccgagagactgagccccgtgagccccggccccgtgtacagactggtggccagcgacctggacgagggcctgaacggcagagtgacctacagcatcgaggacagcgacgaggaggccttcagcatcgacctggtgaccggcgtggtgagcagcagcagcaccttcaccgccggcgagtacaacatcctgaccatcaaggccaccgacagcggccagccccccctgagcgccagcgtgagactgcacatcgagtggatcccctggcccagacccagcagcatccccctggccttcgacgagacctactacagcttcaccgtgatggagaccgaccccgtgaaccacatggtgggcgtgatcagcgtggagggcagacccggcctgttctggttcaacatcagcggcggcgacaaggacatggacttcgacatcgagaagaccaccggcagcatcgtgatcgccagacccctggacaccagaagaagaagcaactacaacctgaccgtggaggtgaccgacggcagcagaaccatcgccacccaggtgcacatcttcatgatcgccaacatcaaccaccacagaccccagttcctggagaccagatacgaggtgagagtgccccaggacaccgtgcccggcgtggagctgctgagagtgcaggccatcgaccaggacaagggcaagagcctgatctacaccatccacggcagccaggaccccggcagcgccagcctgttccagctggaccccagcagcggcgtgctggtgaccgtgggcaagctggacctgggcagcggccccagccagcacaccctgaccgtgatggtgagagaccaggagatccccatcaagagaaacttcgtgtgggtgaccatccacgtggaggacggcaacctgcacccccccagattcacccagctgcactacgaggccagcgtgcccgacaccatcgcccccggcaccgagctgctgcaggtgagagccatggacgccgacagaggcgtgaacgccgaggtgcactacagcctgctgaagggcaacagcgagggcttcttcaacatcaacgccctgctgggcatcatcaccctggcccagaagctggaccaggccaaccacgccccccacaccctgaccgtgaaggccgaggaccagggcagcccccagtggcacgacctggccaccgtgatcatccacgtgtaccccagcgacagaagcgcccccatcttcagcaagagcgagtacttcgtggagatccccgagagcatccccgtgggcagccccatcctgctggtgagcgccatgagccccagcgaggtgacctacgagctgagagagggcaacaaggacggcgtgttcagcatgaacagctacagcggcctgatcagcacccagaagaagctggaccacgagaagatcagcagctaccagctgaagatcagaggcagcaacatggccggcgccttcaccgacgtgatggtggtggtggacatcatcgacgagaacgacaacgcccccatgttcctgaagagcaccttcgtgggccagatcagcgaggccgcccccctgtacagcatgatcatggacaagaacaacaaccccttcgtgatccacgccagcgacagcgacaaggaggccaacagcctgctggtgtacaagatcctggagcccgaggccctgaagttcttcaagatcgaccccagcatgggcaccctgaccatcgtgagcgagatggactacgagagcatgcccagcttccagttctgcgtgtacgtgcacgaccagggcagccccgtgctgttcgcccccagacccgcccaggtgatcatccacgtgagagacgtgaacgacagcccccccagattcagcgagcagatctacgaggtggccatcgtgggccccatccaccccggcatggagctgctgatggtgagagccagcgacgaggacagcgaggtgaactacagcatcaagaccggcaacgccgacgaggccgtgaccatccaccccgtgaccggcagcatcagcgtgctgaaccccgccttcctgggcctgagcagaaagctgaccatcagagccagcgacggcctgtaccaggacaccgccctggtgaagatcagcctgacccaggtgctggacaagagcctgcagttcgaccaggacgtgtactgggccgccgtgaaggagaacctgcaggacagaaaggccctggtgatcctgggcgcccagggcaaccacctgaacgacaccctgagctacttcctgctgaacggcaccgacatgttccacatggtgcagagcgccggcgtgctgcagaccagaggcgtggccttcgacagagagcagcaggacacccacgagctggccgtggaggtgagagacaacagaaccccccagagagtggcccagggcctggtgagagtgagcatcgaggacgtgaacgacaacccccccaagttcaagcacctgccctactacaccatcatccaggacggcaccgagcccggcgacgtgctgttccaggtgagcgccaccgacgaggacctgggcaccaacggcgccgtgacctacgagttcgccgaggactacacctacttcagaatcgacccctacctgggcgacatcagcctgaagaagcccttcgactaccaggccctgaacaagtaccacctgaaggtgatcgccagagacggcggcacccccagcctgcagagcgaggaggaggtgctggtgaccgtgagaaacaagagcaaccccctgttccagagcccctactacaaggtgagagtgcccgagaacatcaccctgtacacccccatcctgcacacccaggccagaagccccgagggcctgagactgatctacaacatcgtggaggaggagcccctgatgctgttcaccaccgacttcaagaccggcgtgctgaccgtgaccggccccctggactacgagagcaagaccaagcacgtgttcaccgtgagagccaccgacaccgccctgggcagcttcagcgaggccaccgtggaggtgctggtggaggacgtgaacgacaacccccccaccttcagccagctggtgtacaccaccagcatcagcgagggcctgcccgcccagacccccgtgatccagctgctggccagcgaccaggacagcggcagaaacagagacgtgagctaccagatcgtggaggacggcagcgacgtgagcaagttcttccagatcaacggcagcaccggcgagatgagcaccgtgcaggagctggactacgaggcccagcagcacttccacgtgaaggtgagagccatggacaagggcgacccccccctgaccggcgagaccctggtggtggtgaacgtgagcgacatcaacgacaacccccccgagttcagacagccccagtacgaggccaacgtgagcgagctggccacctgcggccacctggtgctgaaggtgcaggccatcgaccccgacagcagagacaccagcagactggagtacctgatcctgagcggcaaccaggacagacacttcttcatcaacagcagcagcggcatcatcagcatgttcaacctgtgcaagaagcacctggacagcagctacaacctgagagtgggcgccagcgacggcgtgttcagagccaccgtgcccgtgtacatcaacaccaccaacgccaacaagtacagccccgagttccagcagcacctgtacgaggccgagctggccgagaacgccatggtgggcaccaaggtgatcgacctgctggccatcgacaaggacagcggcccctacggcaccatcgactacaccatcatcaacaagctggccagcgagaagttcagcatcaaccccaacggccagatcgccaccctgcagaagctggacagagagaacagcaccgagagagtgatcgccatcaaggtgatggccagagacggcggcggcagagtggccttctgcaccgtgaagatcatcctgaccgacgagaacgacaaccccccccagttcaaggccagcgagtacaccgtgagcatccagagcaacgtgagcaaggacagccccgtgatccaggtgctggcctacgacgccgacgagggccagaacgccgacgtgacctacagcgtgaaccccgaggacctggtgaaggacgtgatcgagatcaaccccgtgaccggcgtggtgaaggtgaaggacagcctggtgggcctggagaaccagaccctggacttcttcatcaaggcccaggacggcggccccccccactggaacagcctggtgcccgtgagactgcaggtggtgcccaagaaggtgagcctgcccaagttcagcgagcccctgtacaccttcagcgcccccgaggacctgcccgagggcagcgagatcggcatcgtgaaggccgtggccgcccaggaccccgtgatctacagcctggtgagaggcaccacccccgagagcaacaaggacggcgtgttcagcctggaccccgacaccggcgtgatcaaggtgagaaagcccatggaccacgagagcaccaagctgtaccagatcgacgtgatggcccactgcctgcagaacaccgacgtggtgagcctggtgagcgtgaacatccaggtgggcgacgtgaacgacaacagacccgtgttcgaggccgacccctacaaggccgtgctgaccgagaacatgcccgtgggcaccagcgtgatccaggtgaccgccatcgacaaggacaccggcagagacggccaggtgagctacagactgagcgccgaccccggcagcaacgtgcacgagctgttcgccatcgacagcgagagcggctggatcaccaccctgcaggagctggactgcgagacctgccagacctaccacttccacgtggtggcctacgaccacggccagaccatccagctgagcagccaggccctggtgcaggtgagcatcaccgacgagaacgacaacgcccccagattcgccagcgaggagtacagaggcagcgtggtggagaacagcgagcccggcgagctggtggccaccctgaagaccctggacgccgacatcagcgagcagaacagacaggtgacctgctacatcaccgagggcgaccccctgggccagttcggcatcagccaggtgggcgacgagtggagaatcagcagcagaaagaccctggacagagagcacaccgccaagtacctgctgagagtgaccgccagcgacggcaagttccaggccagcgtgaccgtggagatcttcgtgctggacgtgaacgacaacagcccccagtgcagccagctgctgtacaccggcaaggtgcacgaggacgtgttccccggccacttcatcctgaaggtgagcgccaccgacctggacaccgacaccaacgcccagatcacctacagcctgcacggccccggcgcccacgagttcaagctggacccccacaccggcgagctgaccaccctgaccgccctggacagagagagaaaggacgtgttcaacctggtggccaaggccaccgacggcggcggcagaagctgccaggccgacatcaccctgcacgtggaggacgtgaacgacaacgcccccagattcttccccagccactgcgccgtggccgtgttcgacaacaccaccgtgaagacccccgtggccgtggtgttcgccagagaccccgaccagggcgccaacgcccaggtggtgtacagcctgcccgacagcgccgagggccacttcagcatcgacgccaccaccggcgtgatcagactggagaagcccctgcaggtgagaccccaggcccccctggagctgaccgtgagagccagcgacctgggcacccccatccccctgagcaccctgggcaccgtgaccgtgagcgtggtgggcctggaggactacctgcccgtgttcctgaacaccgagcacagcgtgcaggtgcccgaggacgccccccccggcaccgaggtgctgcagctggccaccctgaccagacccggcgccgagaagaccggctacagagtggtgagcggcaacgagcagggcagattcagactggacgccagaaccggcatcctgtacgtgaacgccagcctggacttcgagaccagccccaagtacttcctgagcatcgagtgcagcagaaagagcagcagcagcctgagcgacgtgaccaccgtgatggtgaacatcaccgacgtgaacgagcacagaccccagttcccccaggacccctacagcaccagagtgctggagaacgccctggtgggcgacgtgatcctgaccgtgagcgccaccgacgaggacggccccctgaacagcgacatcacctacagcctgatcggcggcaaccagctgggccacttcaccatccaccccaagaagggcgagctgcaggtggccaaggccctggacagagagcaggccagcagctacagcctgaagctgagagccaccgacagcggccagccccccctgcacgaggacaccgacatcgccatccaggtggccgacgtgaacgacaacccccccagattcttccagctgaactacagcaccaccgtgcaggagaacagccccatcggcagcaaggtgctgcagctgatcctgagcgaccccgacagccccgagaacggccccccctacagcttcagaatcaccaagggcaacaacggcagcgccttcagagtgacccccgacggctggctggtgaccgccgagggcctgagcagaagagcccaggagtggtaccagctgcagatccaggccagcgacagcggcatcccccccctgagcagcctgaccagcgtgagagtgcacgtgaccgagcagagccactacgcccccagcgccctgcccctggagatcttcatcaccgtgggcgaggacgagttccagggcggcatggtgggcaagatccacgccaccgacagagacccccaggacaccctgacctacagcctggccgaggaggagaccctgggcagacacttcagcgtgggcgcccccgacggcaagatcatcgccgcccagggcctgcccagaggccactacagcttcaacgtgaccgtgagcgacggcaccttcaccaccaccgccggcgtgcacgtgtacgtgtggcacgtgggccaggaggccctgcagcaggccatgtggatgggcttctaccagctgacccccgaggagctggtgagcgaccactggagaaacctgcagagattcctgagccacaagctggacatcaagagagccaacatccacctggccagcctgcagcccgccgaggccgtggccggcgtggacgtgctgctggtgttcgagggccacagcggcaccttctacgagttccaggagctggccagcatcatcacccacagcgccaaggagatggagcacagcgtgggcgtgcagatgagaagcgccatgcccatggtgccctgccagggccccacctgccagggccagatctgccacaacaccgtgcacctggaccccaaggtgggccccacctacagcaccgccagactgagcatcctgacccccagacaccacctgcagagaagctgcagctgcaacggcaccgccaccagattcagcggccagagctacgtgagatacagagcccccgccgccagaaactggcacatccacttctacctgaagaccctgcagccccaggccatcctgctgttcaccaacgagaccgccagcgtgagcctgaagctggccagcggcgtgccccagctggagtaccactgcctgggcggcttctacggcaacctgagcagccagagacacgtgaacgaccacgagtggcacagcatcctggtggaggagatggacgccagcatcagactgatggtggacagcatgggcaacaccagcctggtggtgcccgagaactgcagaggcctgagacccgagagacacctgctgctgggcggcctgatcctgctgcacagcagcagcaacgtgagccagggcttcgagggctgcctggacgccgtggtggtgaacgaggaggccctggacctgctggcccccggcaagaccgtggccggcctgctggagacccaggccctgacccagtgctgcctgcacagcgactactgcagccagaacacctgcctgaacggcggcaagtgcagctggacccacggcgccggctacgtgtgcaagtgccccccccagttcagcggcaagcactgcgagcagggcagagagaactgcaccttcgccccctgcctggagggcggcacctgcatcctgagccccaagggcgccagctgcaactgcccccacccctacaccggcgacagatgcgagatggaggccagaggctgcagcgagggccactgcctggtgacccccgagatccagagaggcgactggggccagcaggagctgctgatcatcaccgtggccgtggccttcatcatcatcagcaccgtgggcctgctgttctactgcagaagatgcaagagccacaagcccgtggccatggaggaccccgacctgctggccagaagcgtgggcgtggacacccaggccatgcccgccatcgagctgaaccccctgagcgccagcagctgcaacaacctgaaccagcccgagcccagcaaggccagcgtgcccaacgagctggtgaccttcggccccaacagcaagcagagacccgtggtgtgcagcgtgccccccagactgccccccgccgccgtgcccagccacagcgacaacgagcccgtgatcaagagaacctggagcagcgaggagatggtgtaccccggcggcgccatggtgtggccccccacctacagcagaaacgagagatgggagtacccccacagcgaggtgacccagggccccctgccccccagcgcccacagacacagcacccccgtggtgatgcccgagcccaacggcctgtacggcggcttccccttccccctggagatggagaacaagagagcccccctgccccccagatacagcaaccagaacctggaggacctgatgcccagcagaccccccagccccagagagagactggtggccccctgcctgaacgagtacaccgccatcagctactaccacagccagttcagacagggcggcggcggcccctgcctggccgacggcggctacaagggcgtgggcatgagactgagcagagccggccccagctacgccgtgtgcgaggtggagggcgcccccctggccggccagggccagcccagagtgccccccaactacgagggcagcgacatggtggagagcgactacggcagctgcgaggaggtgatgttctag

SEQ ID NO: 81313 - DNA, 13770 bp, synthetic construct
  misc_feature 1..13770: note = Description of Artificial Sequence: Synthetic coding sequence
  source 1..13770: mol_type = other DNA
atggacatcatcatgggccactgcgtgggcaccagaccccccgcctgctgcctgatcctgctgctgttcaagctgctggccaccgtgagccagggcctgcccggcaccggccccctgggcttccacttcacccacagcatctacaacgccaccgtgtacgagaacagcgccgccagaacctacgtgaacagccagagcagaatgggcatcaccctgatcgacctgagctgggacatcaagtacagaatcgtgagcggcgacgaggagggcttcttcaaggccgaggaggtgatcatcgccgacttctgcttcctgagaatcagaaccaagggcggcaacagcgccatcctgaacagagagatccaggacaactacctgctgatcgtgaagggcagcgtgagaggcgaggacctggaggcctggaccaaggtgaacatccaggtgctggacatgaacgacctgagacccctgttcagccccaccacctacagcgtgaccatcgccgagagcacccccctgagaaccagcgtggcccaggtgaccgccaccgacgccgacatcggcagcaacggcgagttctactactacttcaagaacaaggtggacctgttcagcgtgcaccccaccagcggcgtgatcagcctgagcggcagactgaactacgacgagaagaacagatacgacctggagatcctggccgtggacagaggcatgaagctgtacggcaacaacggcgtgagcagcaccgccaagctgtacgtgcacatcgagagaatcaacgagcacgcccccaccatccacgtggtgacccacgtgcccttcagcctggagaaggagcccacctacgccgtggtgaccgtggacgacctggacgacggcgccaacggcgagatcgagagcgtgagcatcgtggccggcgaccccctggaccagttcttcctggccaaggagggcaagtggctgaacgagtacaagatcaaggagagaaagcagatcgactgggagagcttcccctacggctacaacctgaccctgcaggccaaggacaagggcagcccccagaagtgcagcgccctgaaggccgtgtacatcggcaaccccaccagagacaccgtgcccatcagattcgagaaggaggtgtacgacgtgagcatcagcgagttcagcccccccggcgtggtggtggccatcgtgaagctgagccccgagcccatcgacgtggagtacaagctgagccccggcgaggacgccgtgtacttcaagatcaaccccagaagcggcctgatcgtgaccgccagacccctgaacaccgtgaagaaggaggtgtacaagctggaggtgaccaacaaggagggcgacctgaaggcccaggtgaccatcagcatcgaggacgccaacgaccacacccccgagttccagcagcccctgtacgacgcctacgtgaacgagagcgtgcccgtgggcaccagcgtgctgaccgtgagcgccagcgacaaggacaagggcgagaacggctacatcacctacagcatcgccagcctgaacctgctgcccttcgtgatcaaccagttcaccggcgtgatcagcaccaccgaggagctggacttcgagagcagccccgagatctacagattcatcgtgagagccagcgactggggcagcccctacagacacgagagcgaggtgaacgtgaccatcagaatcggcaacgtgaacgacaacagccccctgttcgagaaggtggcctgccagggcgtgatcagctacgacttccccgtgggcggccacatcaccgccgtgagcgccatcgacatcgacgagctggagctggtgaagtacaagatcatcagcggcaacgagctgggcttcttctacctgaaccccgacagcggcgtgctgcagctgaagaagagcctgaccaacagcggcatcaagaacggcaacttcgccctgagaatcaccgccaccgacggcgagaacctggccgaccccatgagcatcaacatcagcgtgctgcacggcaaggtgagcagcaagagcttcagctgcagagagaccagagtggcccagaagctggccgagaagctgctgatcaaggccaaggccaacggcaagctgaacctggaggacggcttcctggacttctacagcatcaacagacagggcccctacttcgacaagagcttccccagcgacgtggccgtgaaggaggacctgcccgtgggcgccaacatcctgaagatcaaggcctacgacgccgacagcggcttcaacggcaaggtgctgttcaccatcagcgacggcaacaccgacagctgcttcaacatcgacatggagaccggccagctgaaggtgctgatgcccatggacagagagcacaccgacctgtacctgctgaacatcaccatctacgacctgggcaacccccagaagagcagctggagactgctgaccatcaacgtggaggacgccaacgacaacagccccgtgttcatccaggacagctacagcgtgaacatcctggagagcagcggcatcggcaccgagatcatccaggtggaggccagagacaaggacctgggcagcaacggcgaggtgacctacagcgtgctgaccgacacccagcagttcgccatcaacagcagcaccggcatcgtgtacgtggccgaccagctggacagagagagcaaggccaactacagcctgaagatcgaggccagagacaaggccgagagcggccagcagctgttcagcgtggtgaccctgaaggtgttcctggacgacgtgaacgactgcagccccgccttcatccccagcagctacagcgtgaaggtgctggaggacctgcccgtgggcaccgtgatcgcctggctggagacccacgaccccgacctgggcctgggcggccaggtgagatacagcctggtgaacgactacaacggcagattcgagatcgacaaggccagcggcgccatcagactgagcaaggagctggactacgagaagcagcagttctacaacctgaccgtgagagccaaggacaagggcagacccgtgagcctgagcagcgtgagcttcgtggaggtggaggtggtggacgtgaacgagaacctgcacaccccctacttccccgacttcgccgtggtgggcagcgtgaaggagaacagcagaatcggcaccagcgtgctgcaggtgaccgccagagacgaggacagcggcagagacggcgagatccagtacagcatcagagacggcagcggcctgggcagattcagcatcgacgacgagagcggcgtgatcaccgccgccgacatcctggacagagagaccatgggcagctactggctgaccgtgtacgccaccgacagaggcgtggtgcccctgtacagcaccatcgaggtgtacatcgaggtggaggacgtgaacgacaacgcccccctgaccagcgagcccatctactaccccgtggtgatggagaacagccccaaggacgtgagcgtgatccagatccaggccgaggaccccgacagcagcagcaacgagaagctgacctacagaatcaccagcggcaacccccagaacttcttcgccatcaacatcaagaccggcctgatcaccaccaccagcagaaagctggacagagagcagcaggccgagcacttcctggaggtgaccgtgaccgacggcggccccagccccaagcagagcaccatctgggtggtggtgcaggtgctggacgagaacgacaacaagccccagttccccgagaaggtgtaccagatcaagctgcccgagagagacagaaagaagagaggcgagcccatctacagagccttcgccttcgacagagacgagggccccaacgccgagatcagctacagcatcgtggacggcaacgacgacggcaagttcttcatcgaccccaagaccggcatggtgagcagcagaaagcagttcaccgccggcagctacgacatcctgaccatcaaggccgtggacaacggcagaccccagaagagcagcaccgccagactgcacatcgagtggatcaagaagcccccccccagccccatccccctgaccttcgacgagcccttctacaacttcaccgtgatggagagcgacagagtgaccgagatcgtgggcgtggtgagcgtgcagcccgccaacacccccctgtggttcgacatcgtgggcggcaacttcgacagcgccttcgacgccgagaagggcgtgggcaccatcgtgatcgccaagcccctggacgccgagcagagaagcatctacaacatgagcgtggaggtgaccgacggcaccaacgtggccgtgacccaggtgttcatcaaggtgctggacaacaacgacaacggccccgagttcagccagcccaactacgacgtgaccatcagcgaggacgtgctgcccgacaccgagatcctgcagatcgaggccaccgacagagacgagaagcacaagctgagctacaccgtgcacagcagcatcgacagcatcagcatgagaaagttcagaatcgaccccagcaccggcgtgctgtacaccgccgagagactggaccacgaggcccaggacaagcacatcctgaacatcatggtgagagaccaggagttcccctacagaagaaacctggccagagtgatcgtgaacgtggaggacgccaacgaccacagcccctacttcaccaaccccctgtacgaggccagcgtgttcgagagcgccgccctgggcagcgccgtgctgcaggtgaccgccctggacaaggacaagggcgagaacgccgagctgatctacaccatcgaggccggcaacaccggcaacatgttcaagatcgagcccgtgctgggcatcatcaccatctgcaaggagcccgacatgaccaccatgggccagttcgtgctgagcatcaaggtgaccgaccagggcagcccccccatgagcgccaccgccatcgtgagaatcagcgtgaccatgagcgacaacagccaccccaagttcatccacaaggactaccaggccgaggtgaacgagaacgtggacatcggcaccagcgtgatcctgatcagcgccatcagccagagcaccctgatctacgaggtgaaggacggcgacatcaacggcatcttcaccatcaacccctacagcggcgtgatcaccacccagaaggccctggactacgagagaaccagcagctaccagctgatcatccaggccaccaacatggccggcatggccagcaacgccaccgtgaacatccagatcgtggacgagaacgacaacgcccccgtgttcctgttcagccagtacagcggcagcctgagcgaggccgcccccatcaacagcatcgtgagaagcctggacaacagccccctggtgatcagagccaccgacgccgacagcaacagaaacgccctgctggtgtaccagatcgtggagagcaccgccaagaagttcttcaccgtggacagcagcaccggcgccatcagaaccatcgccaacctggaccacgagaccatcgcccacttccacttccacgtgcacgtgagagacagcggcagcccccagctgaccgccgagagccccgtggaggtgaacatcgaggtgaccgacgtgaacgacaacccccccgtgttcacccaggccgtgttcgagaccatcctgctgctgcccacctacgtgggcgtggaggtgctgaaggtgagcgccaccgaccccgacagcgaggtgccccccgagctgacctacagcctgatggagggcagcctggaccacttcctgatcgacagcaacagcggcgtgctgaccatcaagaacaacaacctgagcaaggaccactacatgctgatcgtgaaggtgagcgacggcaagttctacagcaccagcatggtgaccatcatggtgaaggaggccatggacagcggcctgcacttcacccagagcttctacagcaccagcatcagcgagaacaacaccaacatcaccaaggtggccatcgtgaacgccgtgggcaacagactgaacgagcccctgaagtacagcatcctgaaccccggcaacaagttcaagatcaagagcaccagcggcgtgatccagaccaccggcgtgcccttcgacagagaggagcaggagctgtacgagctggtggtggaggccagcagagagctggaccacctgagagtggccagagtggtggtgagagtgaacatcgaggacatcaacgacaacagccccgtgttcgtgggcctgccctactacgccgccgtgcaggtggacgccgagcccggcaccctgatctaccaggtgaccgccatcgacaaggacaagggccccaacggcgaggtgacctacgtgctgcaggacgactacggccacttcgagatcaaccccaacagcggcaacgtgatcctgaaggaggccttcaacagcgacctgagcaacatcgagtacggcgtgaccatcctggccaaggacggcggcaagcccagcctgagcaccagcgtggagctgcccatcaccatcgtgaacaaggccatgcccgtgttcgacaagcccttctacaccgccagcgtgaacgaggacatcagaatgaacacccccatcctgagcatcaacgccaccagccccgagggccagggcatcatctacatcatcatcgacggcgaccccttcaagcagttcaacatcgacttcgacaccggcgtgctgaaggtggtgagccccctggactacgaggtgaccagcgcctacaagctgaccatcagagccagcgacgccctgaccggcgccagagccgaggtgaccgtggacctgctggtgaacgacgtgaacgacaacccccccatcttcgaccagcccacctacaacaccaccctgagcgaggccagcctgatcggcacccccgtgctgcaggtggtgagcatcgacgccgacagcgagaacaacaagatggtgcactaccagatcgtgcaggacacctacaacagcaccgactacttccacatcgacagcagcagcggcctgatcctgaccgccagaatgctggaccacgagctggtgcagcactgcaccctgaaggtgagaagcatcgacagcggcttccccagcctgagcagcgaggtgctggtgcacatctacatcagcgacgtgaacgacaacccccccgtgttcaaccagctgatctacgagagctacgtgagcgagctggcccccagaggccacttcgtgacctgcgtgcaggccagcgacgccgacagcagcgacttcgacagactggagtacagcatcctgagcggcaacgacagaaccagcttcctgatggacagcaagagcggcgtgatcaccctgagcaaccacagaaagcagagaatggagcccctgtacagcctgaacgtgagcgtgagcgacggcctgttcaccagcaccgcccaggtgcacatcagagtgctgggcgccaacctgtacagccccgccttcagccagagcacctacgtggccgaggtgagagagaacgtggccgccggcaccaaggtgatccacgtgagagccaccgacggcgaccccggcacctacggccagatcagctacgccatcatcaacgacttcgccaaggacagattcctgatcgacagcaacggccaggtgatcaccaccgagagactggacagagagaaccccctggagggcgacgtgagcatcttcgtgagagccctggacggcggcggcagaaccaccttctgcaccgtgagagtgatcgtggtggacgagaacgacaacgccccccagttcatgaccgtggagtacagagccagcgtgagagccgacgtgggcagaggccacctggtgacccaggtgcaggccatcgaccccgacgacggcgccaacagcagaatcacctacagcctgtacagcgaggccagcgtgagcgtggccgacctgctggagatcgaccccgacaacggctggatggtgaccaagggcaacttcaaccagctgaagaacaccgtgctgagcttcttcgtgaaggccgtggacggcggcatccccgtgaagcacagcctgatccccgtgtacatccacgtgctgccccccgagaccttcctgcccagcttcacccagagccagtacagcttcaccatcgccgaggacaccgccatcggcagcaccgtggacaccctgagaatcctgcccagccagaacgtgtggttcagcaccgtgaacggcgagagacccgagaacaacaagggcggcatcttcgtgatcgagcaggagaccggcaccatcaagctggacaagagactggacagagagaccagccccgccttccacttcaaggtggccgccaccatccccctggacaaggtggacatcgtgttcaccgtggacgtggacatcaaggtgctggacctgaacgacaacaagcccgtgttcgagaccagcagctacgacaccatcatcatggagggcatgcccgtgggcaccaagctgacccaggtgagagccatcgacatggactggggcgccaacggccaggtgacctacagcctgcacagcgacagccagcccgagaaggtgatggaggccttcaacatcgacagcaacaccggctggatcagcaccctgaaggacctggaccacgagaccgaccccaccttcaccttcagcgtggtggccagcgacctgggcgaggccttcagcctgagcagcaccgccctggtgagcgtgagagtgaccgacatcaacgacaacgcccccgtgttcgcccaggaggtgtacagaggcaacgtgaaggagagcgacccccccggcgaggtggtggccgtgctgagcacctgggacagagacaccagcgacgtgaacagacaggtgagctaccacatcaccggcggcaaccccagaggcagattcgccctgggcctggtgcagagcgagtggaaggtgtacgtgaagagacccctggacagagaggagcaggacatctacttcctgaacatcaccgccaccgacggcctgttcgtgacccaggccatggtggaggtgagcgtgagcgacgtgaacgacaacagccccgtgtgcgaccaggtggcctacaccgccctgctgcccgaggacatccccagcaacaagatcatcctgaaggtgagcgccaaggacgccgacatcggcagcaacggctacatcagatacagcctgtacggcagcggcaacagcgagttcttcctggaccccgagagcggcgagctgaagaccctggccctgctggacagagagagaatccccgtgtacagcctgatggccaaggccaccgacggcggcggcagattctgccagagcaacatccacctgatcctggaggacgtgaacgacaacccccccgtgttcagcagcgaccactacaacacctgcgtgtacgagaacaccgccaccaaggccctgctgaccagagtgcaggccgtggaccccgacatcggcatcaacagaaaggtggtgtacagcctggccgacagcgccggcggcgtgttcagcatcgacagcagcagcggcatcatcatcctggagcagcccctggacagagagcagcagagcagctacaacatcagcgtgagagccaccgaccagagccccggccagagcctgagcagcctgaccaccgtgaccatcaccgtgctggacatcaacgacaacccccccgtgttcgagagaagagactacctggtgaccgtgcccgaggacaccagccccggcacccaggtgctggccgtgttcgccaccagcaaggacatcggcaccaacgccgagatcacctacctgatcagaagcggcaacgagcagggcaagttcaagatcaaccccaagaccggcggcatcagcgtgagcgaggtgctggactacgagctgtgcaagagattctacctggtggtggaggccaaggacggcggcacccccgccctgagcgccgtggccaccgtgaacatcaacctgaccgacgtgaacgacaacccccccaagttcagccaggacgtgtacagcgccgtgatcagcgaggacgccctggtgggcgacagcgtgatcctgctgatcgccgaggacgtggacagccagcccaacggccagatccacttcagcatcgtgaacggcgacagagacaacgagttcaccgtggaccccgtgctgggcctggtgaaggtgaagaagaagctggacagagagagagtgagcggctacagcctgctggtgcaggccgtggacagcggcatccccgccatgagcagcaccgccaccgtgaacatcgacatcagcgacgtgaacgacaacagccccgtgttcacccccgccaactacaccgccgtgatccaggagaacaagcccgtgggcaccagcatcctgcagctggtggtgaccgacagagacagcttccacaacggcccccccttcagcttcagcatcctgagcggcaacgaggaggaggagttcgtgctggacccccacggcatcctgagaagcgccgtggtgttccagcacaccgagagcctggagtacgtgctgtgcgtgcaggccaaggacagcggcaagccccagcaggtgagccacacctacatcagagtgagagtgatcgaggagagcacccacaagcccaccgccatccccctggagatcttcatcgtgaccatggaggacgacttccccggcggcgtgatcggcaagatccacgccaccgaccaggacatgtacgacgtgctgaccttcgccctgaagagcgagcagaagagcctgttcaaggtgaacagccacgacggcaagatcatcgccctgggcggcctggacagcggcaagtacgtgctgaacgtgagcgtgagcgacggcagattccaggtgcccatcgacgtggtggtgcacgtggagcagctggtgcacgagatgctgcagaacaccgtgaccatcagattcgagaacgtgagccccgaggacttcgtgggcctgcacatgcacggcttcagaagaaccctgagaaacgccgtgctgacccagaagcaggacagcctgagaatcatcagcatccagcccgtggccggcaccaaccagctggacatgctgttcgccgtggagatgcacagcagcgagttctacaagcccgcctacctgatccagaagctgagcaacgccagaagacacctggagaacatcatgagaatcagcgccatcctggagaagaactgcagcggcctggactgccaggagcagcactgcgagcagggcctgagcctggacagccacgccctgatgacctacagcaccgccagaatcagcttcgtgtgccccagattctacagaaacgtgagatgcacctgcaacggcggcctgtgccccggcagcaacgacccctgcgtggagaagccctgccccggcgacatgcagtgcgtgagctacgaggccagcagaagacccttcctgtgccagtgcccccccggcaagctgggcgagtgcagcggccacaccagcctgagcttcgccggcaacagctacatcaagtacagactgagcgagaacagcaaggaggaggacttcaagctggccctgagactgagaaccctgcagagcaacggcatcatcatgtacaccagagccaacccctgcatcatcctgaagatcgtggacggcaagctgtggttccagctggactgcggcagcggccccggcatcctgggcatcagcggcagagccgtgaacgacggcagctggcacagcgtgttcctggagctgaacagaaacttcaccagcctgagcctggacgacagctacgtggagagaagaagagcccccctgtacttccagaccctgagcaccgagagcagcatctacttcggcgccctggtgcaggccgacaacatcagaagcctgaccgacaccagagtgacccaggtgctgagcggcttccagggctgcctggacagcgtgatcctgaacaacaacgagctgcccctgcagaacaagagaagcagcttcgccgaggtggtgggcctgaccgagctgaagctgggctgcgtgctgtaccccgacgcctgcaagagaagcccctgccagcacggcggcagctgcaccggcctgcccagcggcggctaccagtgcacctgcctgagccagttcaccggcagaaactgcgagagcgagatcaccgcctgcttccccaacccctgcagaaacggcggcagctgcgaccccatcggcaacaccttcatctgcaactgcaaggccggcctgaccggcgtgacctgcgaggaggacatcaacgagtgcgagagagaggagtgcgagaacggcggcagctgcgtgaacgtgttcggcagcttcctgtgcaactgcacccccggctacgtgggccagtactgcggcctgagacccgtggtggtgcccaacatccaggccggccacagctacgtgggcaaggaggagctgatcggcatcgccgtggtgctgttcgtgatcttcatcctggtggtgctgttcatcgtgttcagaaagaaggtgttcagaaagaactacagcagaaacaacatcaccctggtgcaggaccccgccaccgccgccctgctgaacaagagcaacggcatccccttcagaaacctgagaggcagcggcgacggcagaaacgtgtaccaggaggtgggccccccccaggtgcccgtgagacccatggcctacaccccctgcttccagagcgacagcagaagcaacctggacaagatcgtggacggcctgggcggcgagcaccaggagatgaccaccttccaccccgagagccccagaatcctgaccgccagaagaggcgtggtggtgtgcagcgtggcccccaacctgcccgccgtgagcccctgcagaagcgactgcgacagcatcagaaagaacggctgggacgccggcaccgagaacaagggcgtggacgaccccggcgaggtgacctgcttcgccggcagcaacaagggcagcaacagcgaggtgcagagcctgagcagcttccagagcgacagcggcgacgacaacgccagcatcgtgaccgtgatccagctggtgaacaacgtggtggacaccatcgagaacgaggtgagcgtgatggaccagggccagaactacaacagagcctaccactgggacaccagcgactggatgcccggcgccagactgagcgacatcgaggaggtgcccaactacgagaaccaggacggcggcagcgcccaccagggcagcaccagagagctggagagcgactactacctgggcggctacgacatcgacagcgagtacccccccccccacgaggaggagttcctgagccaggaccagctgcccccccccctgcccgaggacttccccgaccagtacgaggccctgccccccagccagcccgtgagcctggccagcaccctgagccccgactgcagaagaagaccccagttccaccccagccagtacctgcccccccaccccttccccaacgagaccgacctggtgggcccccccgccagctgcgagttcagcaccttcgccgtgagcatgaaccagggcaccgagcccaccggccccgccgacagcgtgagcctgagcctgcacaacagcagaggcaccagcagcagcgacgtgagcgccaactgcggcttcgacgacagcgaggtggccatgagcgactacgagagcgtgggcgagctgagcctggccagcctgcacatccccttcgtggagacccagcaccagacccaggtgtag

SEQ ID NO: 81314 - DNA, 13674 bp, synthetic construct
  misc_feature 1..13674: note = Description of Artificial Sequence: Synthetic coding sequence
  source 1..13674: mol_type = other DNA
atggacatcatcatgggccactgcgtgggcaccagaccccccgcctgctgcctgatcctgctgctgttcaagctgctggccaccgtgagccagggcctgcccggcaccggccccctgggcttccacttcacccacagcatctacaacgccaccgtgtacgagaacagcgccgccagaacctacgtgaacagccagagcagaatgggcatcaccctgatcgacctgagctgggacatcaagtacagaatcgtgagcggcgacgaggagggcttcttcaaggccgaggaggtgatcatcgccgacttctgcttcctgagaatcagaaccaagggcggcaacagcgccatcctgaacagagagatccaggacaactacctgctgatcgtgaagggcagcgtgagaggcgaggacctggaggcctggaccaaggtgaacatccaggtgctggacatgaacgacctgagacccctgttcagccccaccacctacagcgtgaccatcgccgagagcacccccctgagaaccagcgtggcccaggtgaccgccaccgacgccgacatcggcagcaacggcgagttctactactacttcaagaacaaggtggacctgttcagcgtgcaccccaccagcggcgtgatcagcctgagcggcagactgaactacgacgagaagaacagatacgacctggagatcctggccgtggacagaggcatgaagctgtacggcaacaacggcgtgagcagcaccgccaagctgtacgtgcacatcgagagaatcaacgagcacgcccccaccatccacgtggtgacccacgtgcccttcagcctggagaaggagcccacctacgccgtggtgaccgtggacgacctggacgacggcgccaacggcgagatcgagagcgtgagcatcgtggccggcgaccccctggaccagttcttcctggccaaggagggcaagtggctgaacgagtacaagatcaaggagagaaagcagatcgactgggagagcttcccctacggctacaacctgaccctgcaggccaaggacaagggcagcccccagaagtgcagcgccctgaaggccgtgtacatcggcaaccccaccagagacaccgtgcccatcagattcgagaaggaggtgtacgacgtgagcatcagcgagttcagcccccccggcgtggtggtggccatcgtgaagctgagccccgagcccatcgacgtggagtacaagctgagccccggcgaggacgccgtgtacttcaagatcaaccccagaagcggcctgatcgtgaccgccagacccctgaacaccgtgaagaaggaggtgtacaagctggaggtgaccaacaaggagggcgacctgaaggcccaggtgaccatcagcatcgaggacgccaacgaccacacccccgagttccagcagcccctgtacgacgcctacgtgaacgagagcgtgcccgtgggcaccagcgtgctgaccgtgagcgccagcgacaaggacaagggcgagaacggctacatcacctacagcatcgccagcctgaacctgctgcccttcgtgatcaaccagttcaccggcgtgatcagcaccaccgaggagctggacttcgagagcagccccgagatctacagattcatcgtgagagccagcgactggggcagcccctacagacacgagagcgaggtgaacgtgaccatcagaatcggcaacgtgaacgacaacagccccctgttcgagaaggtggcctgccagggcgtgatcagctacgacttccccgtgggcggccacatcaccgccgtgagcgccatcgacatcgacgagctggagctggtgaagtacaagatcatcagcggcaacgagctgggcttcttctacctgaaccccgacagcggcgtgctgcagctgaagaagagcctgaccaacagcggcatcaagaacggcaacttcgccctgagaatcaccgccaccgacggcgagaacctggccgaccccatgagcatcaacatcagcgtgctgcacggcaaggtgagcagcaagagcttcagctgcagagagaccagagtggcccagaagctggccgagaagctgctgatcaaggccaaggccaacggcaagctgaacctggaggacggcttcctggacttctacagcatcaacagacagggcccctacttcgacaagagcttccccagcgacgtggccgtgaaggaggacctgcccgtgggcgccaacatcctgaagatcaaggcctacgacgccgacagcggcttcaacggcaaggtgctgttcaccatcagcgacggcaacaccgacagctgcttcaacatcgacatggagaccggccagctgaaggtgctgatgcccatggacagagagcacaccgacctgtacctgctgaacatcaccatctacgacctgggcaacccccagaagagcagctggagactgctgaccatcaacgtggaggacgccaacgacaacagccccgtgttcatccaggacagctacagcgtgaacatcctggagagcagcggcatcggcaccgagatcatccaggtggaggccagagacaaggacctgggcagcaacggcgaggtgacctacagcgtgctgaccgacacccagcagttcgccatcaacagcagcaccggcatcgtgtacgtggccgaccagctggacagagagagcaaggccaactacagcctgaagatcgaggccagagacaaggccgagagcggccagcagctgttcagcgtggtgaccctgaaggtgttcctggacgacgtgaacgactgcagccccgccttcatccccagcagctacagcgtgaaggtgctggaggacctgcccgtgggcaccgtgatcgcctggctggagacccacgaccccgacctgggcctgggcggccaggtgagatacagcctggtgaacgactacaacggcagattcgagatcgacaaggccagcggcgccatcagactgagcaaggagctggactacgagaagcagcagttctacaacctgaccgtgagagccaaggacaagggcagacccgtgagcctgagcagcgtgagcttcgtggaggtggaggtggtggacgtgaacgagaacctgcacaccccctacttccccgacttcgccgtggtgggcagcgtgaaggagaacagcagaatcggcaccagcgtgctgcaggtgaccgccagagacgaggacagcggcagagacggcgagatccagtacagcatcagagacggcagcggcctgggcagattcagcatcgacgacgagagcggcgtgatcaccgccgccgacatcctggacagagagaccatgggcagctactggctgaccgtgtacgccaccgacagaggcgtggtgcccctgtacagcaccatcgaggtgtacatcgaggtggaggacgtgaacgacaacgcccccctgaccagcgagcccatctactaccccgtggtgatggagaacagccccaaggacgtgagcgtgatccagatccaggccgaggaccccgacagcagcagcaacgagaagctgacctacagaatcaccagcggcaacccccagaacttcttcgccatcaacatcaagaccggcctgatcaccaccaccagcagaaagctggacagagagcagcaggccgagcacttcctggaggtgaccgtgaccgacggcggccccagccccaagcagagcaccatctgggtggtggtgcaggtgctggacgagaacgacaacaagccccagttccccgagaaggtgtaccagatcaagctgcccgagagagacagaaagaagagaggcgagcccatctacagagccttcgccttcgacagagacgagggccccaacgccgagatcagctacagcatcgtggacggcaacgacgacggcaagttcttcatcgaccccaagaccggcatggtgagcagcagaaagcagttcaccgccggcagctacgacatcctgaccatcaaggccgtggacaacggcagaccccagaagagcagcaccgccagactgcacatcgagtggatcaagaagcccccccccagccccatccccctgaccttcgacgagcccttctacaacttcaccgtgatggagagcgacagagtgaccgagatcgtgggcgtggtgagcgtgcagcccgccaacacccccctgtggttcgacatcgtgggcggcaacttcgacagcgccttcgacgccgagaagggcgtgggcaccatcgtgatcgccaagcccctggacgccgagcagagaagcatctacaacatgagcgtggaggtgaccgacggcaccaacgtggccgtgacccaggtgttcatcaaggtgctggacaacaacgacaacggccccgagttcagccagcccaactacgacgtgaccatcagcgaggacgtgctgcccgacaccgagatcctgcagatcgaggccaccgacagagacgagaagcacaagctgagctacaccgtgcacagcagcatcgacagcatcagcatgagaaagttcagaatcgaccccagcaccggcgtgctgtacaccgccgagagactggaccacgaggcccaggacaagcacatcctgaacatcatggtgagagaccaggagttcccctacagaagaaacctggccagagtgatcgtgaacgtggaggacgccaacgaccacagcccctacttcaccaaccccctgtacgaggccagcgtgttcgagagcgccgccctgggcagcgccgtgctgcaggtgaccgccctggacaaggacaagggcgagaacgccgagctgatctacaccatcgaggccggcaacaccggcaacatgttcaagatcgagcccgtgctgggcatcatcaccatctgcaaggagcccgacatgaccaccatgggccagttcgtgctgagcatcaaggtgaccgaccagggcagcccccccatgagcgccaccgccatcgtgagaatcagcgtgaccatgagcgacaacagccaccccaagttcatccacaaggactaccaggccgaggtgaacgagaacgtggacatcggcaccagcgtgatcctgatcagcgccatcagccagagcaccctgatctacgaggtgaaggacggcgacatcaacggcatcttcaccatcaacccctacagcggcgtgatcaccacccagaaggccctggactacgagagaaccagcagctaccagctgatcatccaggccaccaacatggccggcatggccagcaacgccaccgtgaacatccagatcgtggacgagaacgacaacgcccccgtgttcctgttcagccagtacagcggcagcctgagcgaggccgcccccatcaacagcatcgtgagaagcctggacaacagccccctggtgatcagagccaccgacgccgacagcaacagaaacgccctgctggtgtaccagatcgtggagagcaccgccaagaagttcttcaccgtggacagcagcaccggcgccatcagaaccatcgccaacctggaccacgagaccatcgcccacttccacttccacgtgcacgtgagagacagcggcagcccccagctgaccgccgagagccccgtggaggtgaacatcgaggtgaccgacgtgaacgacaacccccccgtgttcacccaggccgtgttcgagaccatcctgctgctgcccacctacgtgggcgtggaggtgctgaaggtgagcgccaccgaccccgacagcgaggtgccccccgagctgacctacagcctgatggagggcagcctggaccacttcctgatcgacagcaacagcggcgtgctgaccatcaagaacaacaacctgagcaaggaccactacatgctgatcgtgaaggtgagcgacggcaagttctacagcaccagcatggtgaccatcatggtgaaggaggccatggacagcggcctgcacttcacccagagcttctacagcaccagcatcagcgagaacaacaccaacatcaccaaggtggccatcgtgaacgccgtgggcaacagactgaacgagcccctgaagtacagcatcctgaaccccggcaacaagttcaagatcaagagcaccagcggcgtgatccagaccaccggcgtgcccttcgacagagaggagcaggagctgtacgagctggtggtggaggccagcagagagctggaccacctgagagtggccagagtggtggtgagagtgaacatcgaggacatcaacgacaacagccccgtgttcgtgggcctgccctactacgccgccgtgcaggtggacgccgagcccggcaccctgatctaccaggtgaccgccatcgacaaggacaagggccccaacggcgaggtgacctacgtgctgcaggacgactacggccacttcgagatcaaccccaacagcggcaacgtgatcctgaaggaggccttcaacagcgacctgagcaacatcgagtacggcgtgaccatcctggccaaggacggcggcaagcccagcctgagcaccagcgtggagctgcccatcaccatcgtgaacaaggccatgcccgtgttcgacaagcccttctacaccgccagcgtgaacgaggacatcagaatgaacacccccatcctgagcatcaacgccaccagccccgagggccagggcatcatctacatcatcatcgacggcgaccccttcaagcagttcaacatcgacttcgacaccggcgtgctgaaggtggtgagccccctggactacgaggtgaccagcgcctacaagctgaccatcagagccagcgacgccctgaccggcgccagagccgaggtgaccgtggacctgctggtgaacgacgtgaacgacaacccccccatcttcgaccagcccacctacaacaccaccctgagcgaggccagcctgatcggcacccccgtgctgcaggtggtgagcatcgacgccgacagcgagaacaacaagatggtgcactaccagatcgtgcaggacacctacaacagcaccgactacttccacatcgacagcagcagcggcctgatcctgaccgccagaatgctggaccacgagctggtgcagcactgcaccctgaaggtgagaagcatcgacagcggcttccccagcctgagcagcgaggtgctggtgcacatctacatcagcgacgtgaacgacaacccccccgtgttcaaccagctgatctacgagagctacgtgagcgagctggcccccagaggccacttcgtgacctgcgtgcaggccagcgacgccgacagcagcgacttcgacagactggagtacagcatcctgagcggcaacgacagaaccagcttcctgatggacagcaagagcggcgtgatcaccctgagcaaccacagaaagcagagaatggagcccctgtacagcctgaacgtgagcgtgagcgacggcctgttcaccagcaccgcccaggtgcacatcagagtgctgggcgccaacctgtacagccccgccttcagccagagcacctacgtggccgaggtgagagagaacgtggccgccggcaccaaggtgatccacgtgagagccaccgacggcgaccccggcacctacggccagatcagctacgccatcatcaacgacttcgccaaggacagattcctgatcgacagcaacggccaggtgatcaccaccgagagactggacagagagaaccccctggagggcgacgtgagcatcttcgtgagagccctggacggcggcggcagaaccaccttctgcaccgtgagagtgatcgtggtggacgagaacgacaacgccccccagttcatgaccgtggagtacagagccagcgtgagagccgacgtgggcagaggccacctggtgacccaggtgcaggccatcgaccccgacgacggcgccaacagcagaatcacctacagcctgtacagcgaggccagcgtgagcgtggccgacctgctggagatcgaccccgacaacggctggatggtgaccaagggcaacttcaaccagctgaagaacaccgtgctgagcttcttcgtgaaggccgtggacggcggcatccccgtgaagcacagcctgatccccgtgtacatccacgtgctgccccccgagaccttcctgcccagcttcacccagagccagtacagcttcaccatcgccgaggacaccgccatcggcagcaccgtggacaccctgagaatcctgcccagccagaacgtgtggttcagcaccgtgaacggcgagagacccgagaacaacaagggcggcatcttcgtgatcgagcaggagaccggcaccatcaagctggacaagagactggacagagagaccagccccgccttccacttcaaggtggccgccaccatccccctggacaaggtggacatcgtgttcaccgtggacgtggacatcaaggtgctggacctgaacgacaacaagcccgtgttcgagaccagcagctacgacaccatcatcatggagggcatgcccgtgggcaccaagctgacccaggtgagagccatcgacatggactggggcgccaacggccaggtgacctacagcctgcacagcgacagccagcccgagaaggtgatggaggccttcaacatcgacagcaacaccggctggatcagcaccctgaaggacctggaccacgagaccgaccccaccttcaccttcagcgtggtggccagcgacctgggcgaggccttcagcctgagcagcaccgccctggtgagcgtgagagtgaccgacatcaacgacaacgcccccgtgttcgcccaggaggtgtacagaggcaacgtgaaggagagcgacccccccggcgaggtggtggccgtgctgagcacctgggacagagacaccagcgacgtgaacagacaggtgagctaccacatcaccggcggcaaccccagaggcagattcgccctgggcctggtgcagagcgagtggaaggtgtacgtgaagagacccctggacagagaggagcaggacatctacttcctgaacatcaccgccaccgacggcctgttcgtgacccaggccatggtggaggtgagcgtgagcgacgtgaacgacaacagccccgtgtgcgaccaggtggcctacaccgccctgctgcccgaggacatccccagcaacaagatcatcctgaaggtgagcgccaaggacgccgacatcggcagcaacggctacatcagatacagcctgtacggcagcggcaacagcgagttcttcctggaccccgagagcggcgagctgaagaccctggccctgctggacagagagagaatccccgtgtacagcctgatggccaaggccaccgacggcggcggcagattctgccagagcaacatccacctgatcctggaggacgtgaacgacaacccccccgtgttcagcagcgaccactacaacacctgcgtgtacgagaacaccgccaccaaggccctgctgaccagagtgcaggccgtggaccccgacatcggcatcaacagaaaggtggtgtacagcctggccgacagcgccggcggcgtgttcagcatcgacagcagcagcggcatcatcatcctggagcagcccctggacagagagcagcagagcagctacaacatcagcgtgagagccaccgaccagagccccggccagagcctgagcagcctgaccaccgtgaccatcaccgtgctggacatcaacgacaacccccccgtgttcgagagaagagactacctggtgaccgtgcccgaggacaccagccccggcacccaggtgctggccgtgttcgccaccagcaaggacatcggcaccaacgccgagatcacctacctgatcagaagcggcaacgagcagggcaagttcaagatcaaccccaagaccggcggcatcagcgtgagcgaggtgctggactacgagctgtgcaagagattctacctggtggtggaggccaaggacggcggcacccccgccctgagcgccgtggccaccgtgaacatcaacctgaccgacgtgaacgacaacccccccaagttcagccaggacgtgtacagcgccgtgatcagcgaggacgccctggtgggcgacagcgtgatcctgctgatcgccgaggacgtggacagccagcccaacggccagatccacttcagcatcgtgaacggcgacagagacaacgagttcaccgtggaccccgtgctgggcctggtgaaggtgaagaagaagctggacagagagagagtgagcggctacagcctgctggtgcaggccgtggacagcggcatccccgccatgagcagcaccgccaccgtgaacatcgacatcagcgacgtgaacgacaacagccccgtgttcacccccgccaactacaccgccgtgatccaggagaacaagcccgtgggcaccagcatcctgcagctggtggtgaccgacagagacagcttccacaacggcccccccttcagcttcagcatcctgagcggcaacgaggaggaggagttcgtgctggacccccacggcatcctgagaagcgccgtggtgttccagcacaccgagagcctggagtacgtgctgtgcgtgcaggccaaggacagcggcaagccccagcaggtgagccacacctacatcagagtgagagtgatcgaggagagcacccacaagcccaccgccatccccctggagatcttcatcgtgaccatggaggacgacttccccggcggcgtgatcggcaagatccacgccaccgaccaggacatgtacgacgtgctgaccttcgccctgaagagcgagcagaagagcctgttcaaggtgaacagccacgacggcaagatcatcgccctgggcggcctggacagcggcaagtacgtgctgaacgtgagcgtgagcgacggcagattccaggtgcccatcgacgtggtggtgcacgtggagcagctggtgcacgagatgctgcagaacaccgtgaccatcagattcgagaacgtgagccccgaggacttcgtgggcctgcacatgcacggcttcagaagaaccctgagaaacgccgtgctgacccagaagcaggacagcctgagaatcatcagcatccagcccgtggccggcaccaaccagctggacatgctgttcgccgtggagatgcacagcagcgagttctacaagcccgcctacctgatccagaagctgagcaacgccagaagacacctggagaacatcatgagaatcagcgccatcctggagaagaactgcagcggcctggactgccaggagcagcactgcgagcagggcctgagcctggacagccacgccctgatgacctacagcaccgccagaatcagcttcgtgtgccccagattctacagaaacgtgagatgcacctgcaacggcggcctgtgccccggcagcaacgacccctgcgtggagaagccctgccccggcgacatgcagtgcgtgagctacgaggccagcagaagacccttcctgtgccagtgcccccccggcaagctgggcgagtgcagcggccacaccagcctgagcttcgccggcaacagctacatcaagtacagactgagcgagaacagcaaggaggaggacttcaagctggccctgagactgagaaccctgcagagcaacggcatcatcatgtacaccagagccaacccctgcatcatcctgaagatcgtggacggcaagctgtggttccagctggactgcggcagcggccccggcatcctgggcatcagcggcagagccgtgaacgacggcagctggcacagcgtgttcctggagctgaacagaaacttcaccagcctgagcctggacgacagctacgtggagagaagaagagcccccctgtacttccagaccctgagcaccgagagcagcatctacttcggcgccctggtgcaggccgacaacatcagaagcctgaccgacaccagagtgacccaggtgctgagcggcttccagggctgcctggacagcgtgatcctgaacaacaacgagctgcccctgcagaacaagagaagcagcttcgccgaggtggtgggcctgaccgagctgaagctgggctgcgtgctgtaccccgacgcctgcaagagaagcccctgccagcacggcggcagctgcaccggcctgcccagcggcggctaccagtgcacctgcctgagccagttcaccggcagaaactgcgagagcgagatcaccgcctgcttccccaacccctgcagaaacggcggcagctgcgaccccatcggcaacaccttcatctgcaactgcaaggccggcctgaccggcgtgacctgcgaggaggacatcaacgagtgcgagagagaggagtgcgagaacggcggcagctgcgtgaacgtgttcggcagcttcctgtgcaactgcacccccggctacgtgggccagtactgcggcctgagacccgtggtggtgcccaacatccaggccggccacagctacgtgggcaaggaggagctgatcggcatcgccgtggtgctgttcgtgatcttcatcctggtggtgctgttcatcgtgttcagaaagaaggtgttcagaaagaactacagcagaaacaacatcaccctggtgcaggaccccgccaccgccgccctgctgaacaagagcaacggcatccccttcagaaacctgagaggcagcggcgacggcagaaacgtgtaccaggaggtgggccccccccaggtgcccgtgagacccatggcctacaccccctgcttccagagcgacagcagaagcaacctggacaagatcgtggacggcctgggcggcgagcaccaggagatgaccaccttccaccccgagagccccagaatcctgaccgccagaagaggcgtggtggtgtgcagcgtggcccccaacctgcccgccgtgagcccctgcagaagcgactgcgacagcatcagaaagaacggctgggacgccggcaccgagaacaagggcgtggacgaccccggcgaggtgacctgcttcgccggcagcaacaagggcagcaacagcgaggtgcagagcctgagcagcttccagagcgacagcggcgacgacaacgcctaccactgggacaccagcgactggatgcccggcgccagactgagcgacatcgaggaggtgcccaactacgagaaccaggacggcggcagcgcccaccagggcagcaccagagagctggagagcgactactacctgggcggctacgacatcgacagcgagtacccccccccccacgaggaggagttcctgagccaggaccagctgcccccccccctgcccgaggacttccccgaccagtacgaggccctgccccccagccagcccgtgagcctggccagcaccctgagccccgactgcagaagaagaccccagttccaccccagccagtacctgcccccccaccccttccccaacgagaccgacctggtgggcccccccgccagctgcgagttcagcaccttcgccgtgagcatgaaccagggcaccgagcccaccggccccgccgacagcgtgagcctgagcctgcacaacagcagaggcaccagcagcagcgacgtgagcgccaactgcggcttcgacgacagcgaggtggccatgagcgactacgagagcgtgggcgagctgagcctggccagcctgcacatccccttcgtggagacccagcaccagacccaggtgtag

SEQ ID NO: 81315 - DNA, 3765 bp, synthetic construct
  misc_feature 1..3765: note = Description of Artificial Sequence: Synthetic coding sequence
  source 1..3765: mol_type = other DNA
atggacatcatcatgggccactgcgtgggcaccagaccccccgcctgctgcctgatcctgctgctgttcaagctgctggccaccgtgagccagggcctgcccggcaccggccccctgggcttccacttcacccacagcatctacaacgccaccgtgtacgagaacagcgccgccagaacctacgtgaacagccagagcagaatgggcatcaccctgatcgacctgagctgggacatcaagtacagaatcgtgagcggcgacgaggagggcttcttcaaggccgaggaggtgatcatcgccgacttctgcttcctgagaatcagaaccaagggcggcaacagcgccatcctgaacagagagatccaggacaactacctgctgatcgtgaagggcagcgtgagaggcgaggacctggaggcctggaccaaggtgaacatccaggtgctggacatgaacgacctgagacccctgttcagccccaccacctacagcgtgaccatcgccgagagcacccccctgagaaccagcgtggcccaggtgaccgccaccgacgccgacatcggcagcaacggcgagttctactactacttcaagaacaaggtggacctgttcagcgtgcaccccaccagcggcgtgatcagcctgagcggcagactgaactacgacgagaagaacagatacgacctggagatcctggccgtggacagaggcatgaagctgtacggcaacaacggcgtgagcagcaccgccaagctgtacgtgcacatcgagagaatcaacgagcacgcccccaccatccacgtggtgacccacgtgcccttcagcctggagaaggagcccacctacgccgtggtgaccgtggacgacctggacgacggcgccaacggcgagatcgagagcgtgagcatcgtggccggcgaccccctggaccagttcttcctggccaaggagggcaagtggctgaacgagtacaagatcaaggagagaaagcagatcgactgggagagcttcccctacggctacaacctgaccctgcaggccaaggacaagggcagcccccagaagtgcagcgccctgaaggccgtgtacatcggcaaccccaccagagacaccgtgcccatcagattcgagaaggaggtgtacgacgtgagcatcagcgagttcagcccccccggcgtggtggtggccatcgtgaagctgagccccgagcccatcgacgtggagtacaagctgagccccggcgaggacgccgtgtacttcaagatcaaccccagaagcggcctgatcgtgaccgccagacccctgaacaccgtgaagaaggaggtgtacaagctggaggtgaccaacaaggagggcgacctgaaggcccaggtgaccatcagcatcgaggacgccaacgaccacacccccgagttccagcagcccctgtacgacgcctacgtgaacgagagcgtgcccgtgggcaccagcgtgctgaccgtgagcgccagcgacaaggacaagggcgagaacggctacatcacctacagcatcgccagcctgaacctgctgcccttcgtgatcaaccagttcaccggcgtgatcagcaccaccgaggagctggacttcgagagcagccccgagatctacagattcatcgtgagagccagcgactggggcagcccctacagacacgagagcgaggtgaacgtgaccatcagaatcggcaacgtgaacgacaacagccccctgttcgagaaggtggcctgccagggcgtgatcagctacgacttccccgtgggcggccacatcaccgccgtgagcgccatcgacatcgacgagctggagctggtgaagtacaagatcatcagcggcaacgagctgggcttcttctacctgaaccccgacagcggcgtgctgcagctgaagaagagcctgaccaacagcggcatcaagaacggcaacttcgccctgagaatcaccgccaccgacggcgagaacctggccgaccccatgagcatcaacatcagcgtgctgcacggcaaggtgagcagcaagagcttcagctgcagagagaccagagtggcccagaagctggccgagaagctgctgatcaaggccaaggccaacggcaagctgaacctggaggacggcttcctggacttctacagcatcaacagacagggcccctacttcgacaagagcttccccagcgacgtggccgtgaaggaggacctgcccgtgggcgccaacatcctgaagatcaaggcctacgacgccgacagcggcttcaacggcaaggtgctgttcaccatcagcgacggcaacaccgacagctgcttcaacatcgacatggagaccggccagctgaaggtgctgatgcccatggacagagagcacaccgacctgtacctgctgaacatcaccatctacgacctgggcaacccccagaagagcagctggagactgctgaccatcaacgtggaggacgccaacgacaacagccccgtgttcatccaggacagctacagcgtgaacatcctggagagcagcggcatcggcaccgagatcatccaggtggaggccagagacaaggacctgggcagcaacggcgaggtgacctacagcgtgctgaccgacacccagcagttcgccatcaacagcagcaccggcatcgtgtacgtggccgaccagctggacagagagagcaaggccaactacagcctgaagatcgaggccagagacaaggccgagagcggccagcagctgttcagcgtggtgaccctgaaggtgttcctggacgacgtgaacgactgcagccccgccttcatccccagcagctacagcgtgaaggtgctggaggacctgcccgtgggcaccgtgatcgcctggctggagacccacgaccccgacctgggcctgggcggccaggtgagatacagcctggtgaacgactacaacggcagattcgagatcgacaaggccagcggcgccatcagactgagcaaggagctggactacgagaagcagcagttctacaacctgaccgtgagagccaaggacaagggcagacccgtgagcctgagcagcgtgagcttcgtggaggtggaggtggtggacgtgaacgagaacctgcacaccccctacttccccgacttcgccgtggtgggcagcgtgaaggagaacagcagaatcggcaccagcgtgctgcaggtgaccgccagagacgaggacagcggcagagacggcgagatccagtacagcatcagagacggcagcggcctgggcagattcagcatcgacgacgagagcggcgtgatcaccgccgccgacatcctggacagagagaccatgggcagctactggctgaccgtgtacgccaccgacagaggcgtggtgcccctgtacagcaccatcgaggtgtacatcgaggtggaggacgtgaacgacaacgcccccctgaccagcgagcccatctactaccccgtggtgatggagaacagccccaaggacgtgagcgtgatccagatccaggccgaggaccccgacagcagcagcaacgagaagctgacctacagaatcaccagcggcaacccccagaacttcttcgccatcaacatcaagaccggcagctgcagcgtggcccaggccggcatgcagtggcacgaccacagcagcctgcagagcagaacccccggcttcaagggctacccctgcctgagcctgctgagcagctgggactacagacacgcccccccctgccccgccaccttcctgaacagctag

SEQ ID NO: 81316 - DNA, 9669 bp, synthetic construct
  misc_feature 1..9669: note = Description of Artificial Sequence: Synthetic coding sequence
  source 1..9669: mol_type = other DNA
atggtgaccaccgtggtggccgtgggcgacaccctggcccagcccctggccgccgccgaggtgttcatcgtggagatcaccctgcaggacatcaacgacaacccccccgtgttccccaccgacatgctggacctgaccgtggaggagaacatcggcgacggcagcaagatcatgcagctgaccgccatggacgccgacgagggcgccaacgccctggtgacctacaccatcatcagcggcgccgacgacagcttcagaatcgaccccgagagcggcgacctgatcgccaccagaagactggacagagagagaagaagcaagtacagcctgctggtgagagccgacgacggcctgcagagcagcgacatgagaatcaacatcaccgtgagcgacgtgaacgaccacacccccaagttcagcagacccgtgtacagcttcgacatccccgaggacaccatccccggcagcctggtggccgccatcctggccaccgacgacgacagcggcgtgaacggcgagatcacctacatcgtgaacgaggacgacgaggacggcatcttcttcctgaaccccatcaccggcgtgttcaacctgaccagactgctggactacgaggtgcagcagtactacatcctgaccgtgagagccgaggacggcggcggccagttcaccaccatcagagtgtacttcaacatcctggacgtgaacgacaacccccccatcttcagcctgaacagctacagcaccagcctgatggagaacctgcccgtgggcagcaccgtgctggtgttcaacgtgaccgacgccgacgacggcatcaacagccagctgacctacagcatcgccagcggcgacagcctgggccagttcaccgtggacaagaacggcgtgctgaaggtgctgaaggccctggacagagagagccagagcttctacaacctggtggtgcaggtgcacgacctgccccagatccccgccagcagattcaccagcaccgcccaggtgagcatcatcctgctggacgtgaacgacaacccccccaccttcctgagccccaagctgacctacatccccgagaacacccccatcgacaccgtggtgttcaaggcccaggccaccgaccccgacagcggccccaacagctacatcgagtacaccctgctgaaccccctgggcaacaagttcagcatcggcaccatcgacggcgaggtgagactgaccggcgagctggacagagaggaggtgagcaactacaccctgaccgtggtggccaccgacaagggccagcccagcctgagcagcagcaccgaggtggtggtgatggtgctggacatcaacgacaacaaccccatcttcgcccaggccctgtacaaggtggagatcaacgagaacaccctgaccggcaccgacatcatccaggtgttcgccgccgacggcgacgagggcaccaacggccaggtgagatacggcatcgtgaacggcaacaccaaccaggagttcagaatcgacagcgtgaccggcgccatcaccgtggccaagcccctggacagagagaagacccccacctaccacctgaccgtgcaggccaccgacagaggcagcacccccagaaccgacaccagcaccgtgagcatcgtgctgctggacatcaacgacttcgtgcccgtgttcgagctgagcccctacagcgtgaacgtgcccgagaacctgggcaccctgcccagaaccatcctgcaggtggtggccagagacgacgacagaggcagcaacagcaagctgagctacgtgctgttcggcggcaacgaggacaacgccttcaccctgagcgccagcggcgagctgggcgtgacccagagcctggacagagagaccaaggagagattcgtgctgatgatcaccgccaccgacagcggcagccccgccctgaccggcaccggcaccatcaacgtgatcgtggacgacgtgaacgacaacgtgcccaccttcgccagcaaggcctacttcaccaccatccccgaggacgcccccaccggcaccgacgtgctgctggtgaacgccagcgacgccgacgccagcaagaacgccgtgatcagaatcatcggcggcaacagccagttcaccatcaaccccagcaccggccagatcatcaccagcgccctgctggacagagagaccaaggacaactacaccctggtggtggtgtgcagcgacgccggcagccccgagcccctgagcagcagcaccagcgtgctggtgaccgtgaccgacgtgaacgacaacccccccagattccagcaccacccctacgtgacccacatccccagccccaccctgcccggcagcttcgtgttcgccgtgaccgtgaccgacgccgacatcggccccaacagcgagctgcactacagcctgagcggcagaaacagcgagaagttccacatcgaccccctgagaggcgccatcatggccgccggccccctgaacggcgccagcgaggtgaccttcagcgtgcacgtgaaggacggcggcagcttccccaagaccgacagcaccaccgtgaccgtgagattcgtgaacaaggccgacttccccaaggtgagagccaaggagcagaccttcatgttccccgagaaccagcccgtgagcagcctggtgaccaccatcaccggcagcagcctgagaggcgagcccatgagctactacatcgccagcggcaacctgggcaacaccttccagatcgaccagctgaccggccaggtgagcatcagccagcccctggacttcgagaagatccagaagtacgtggtgtggatcgaggccagagacggcggcttcccccccttcagcagctacgagaagctggacatcaccgtgctggacgtgaacgacaacgcccccatcttcaaggaggaccccttcatcagcgagatcctggagaacctgagccccagaaagatcctgaccgtgagcgccatggacaaggacagcggccccaacggccagctggactacgagatcgtgaacggcaacatggagaacagcttcagcatcaaccacgccaccggcgagatcagaagcgtgagacccctggacagagagaaggtgagccactacgtgctgaccatcaagagcagcgacaagggcagccccagccagagcaccagcgtgaaggtgatgatcaacatcctggacgagaacgacaacgcccccagattcagccagatcttcagcgcccacgtgcccgagaacagccccctgggctacaccgtgaccagagtgaccaccagcgacgaggacatcggcatcaacgccatcagcagatacagcatcatggacgccagcctgcccttcaccatcaaccccagcaccggcgacatcgtgatcagcagacccctgaacagagaggacaccgacagatacagaatcagagtgagcgcccacgacagcggctggaccgtgagcaccgacgtgaccatcttcgtgaccgacatcaacgacaacgcccccagattcagcagaaccagctactacctggactgccccgagctgaccgagatcggcagcaaggtgacccaggtgttcgccaccgaccccgacgagggcagcaacggccaggtgttctacttcatcaagagccagagcgagtacttcagaatcaacgccaccaccggcgagatcttcaacaagcagatcctgaagtaccagaacgtgaccggcttcagcaacgtgaacatcaacagacacagcttcatcgtgaccagcagcgacagaggcaagcccagcctgatcagcgagaccaccgtgaccatcaacatcgtggacagcaacgacaacgccccccagttcctgaagagcaagtacttcacccccgtgaccaagaacgtgaaggtgggcaccaagctgatcagagtgaccgccatcgacgacaaggacttcggcctgaacagcgaggtggagtacttcatcagcaacgacaaccacctgggcaagttcaagctggacaacgacaccggctggatcagcgtggccagcagcctgatcagcgacctgaaccagaacttcttcatcaccgtgaccgccaaggacaagggcaacccccccctgagcagccaggccaccgtgcacatcaccgtgaccgaggagaactaccacacccccgagttcagccagagccacatgagcgccaccatccccgagagccacagcatcggcagcatcgtgagaaccgtgagcgccagagacagagacgccgccatgaacggcctgatcaagtacagcatcagcagcggcaacgaggagggcatcttcgccatcaacagcagcaccggcatcctgaccctggccaaggccctggactacgagctgtgccagaagcacgagatgaccatcagcgccatcgacggcggctgggtggccagaaccggctactgcagcgtgaccgtgaacgtgatcgacgtgaacgacaacagccccgtgttcctgagcgacgactacttccccaccgtgctggagaacgcccccagcggcaccaccgtgatccacctgaacgccaccgacgccgacagcggcaccaacgccgtgatcgcctacaccgtgcagagcagcgacagcgacctgttcgtgatcgaccccaacaccggcgtgatcaccacccagggcttcctggacttcgagaccaagcagagctaccacctgaccgtgaaggccttcaacgtgcccgacgaggagagatgcagcttcgccaccgtgaacatccagctgaagggcaccaacgagtacgtgcccagattcgtgagcaagctgtactacttcgagatcagcgaggccgcccccaagggcaccatcgtgggcgaggtgttcgccagcgacagagacctgggcaccgacggcgaggtgcactacctgatcttcggcaacagcagaaagaagggcttccagatcaacaagaagaccggccagatctacgtgagcggcatcctggacagagagaaggaggagagagtgagcctgaaggtgctggccaagaacttcggcagcatcagaggcgccgacatcgacgaggtgaccgtgaacgtgaccgtgctggacgccaacgacccccccatcttcaccctgaacatctacagcgtgcagatcagcgagggcgtgcccatcggcacccacgtgaccttcgtgagcgccttcgacagcgacagcatccccagctggagcagattcagctacttcatcggcagcggcaacgagaacggcgccttcagcatcaacccccagaccggccagatcaccgtgaccgccgagctggacagagagaccctgcccatctacaacctgagcgtgctggccgtggacagcggcacccccagcgccaccggcagcgccagcctgctggtgaccctggaggacatcaacgacaacggccccatgctgaccgtgagcgagggcgaggtgatggagaacaagagacccggcaccctggtgatgaccctgcagagcaccgaccccgacctgccccccaaccagggccccttcacctactacctgctgagcaccggccccgccaccagctacttcagcctgagcaccgccggcgtgctgagcaccaccagagagatcgacagagagcagatcgccgacttctacctgagcgtggtgaccaaggacagcggcgtgccccagatgagcagcaccggcaccgtgcacatcaccgtgatcgaccagaacgacaaccccagccagagcagaaccgtggagatcttcgtgaactactacggcaacctgttccccggcggcatcctgggcagcgtgaagccccaggaccccgacgtgctggacagcttccactgcagcctgaccagcggcgtgaccagcctgttcagcatccccggcggcacctgcgacctgaacagccagcccagaagcaccgacggcaccttcgacctgaccgtgctgagcaacgacggcgtgcacagcaccgtgaccagcaacatcagagtgttcttcgccggcttcagcaacgccaccgtggacaacagcatcctgctgagactgggcgtgcccaccgtgaaggacttcctgaccaaccactacctgcacttcctgagaatcgccagcagccagctgaccggcctgggcaccgccgtgcagctgtacagcgcctacgaggagaacaacagaaccttcctgctggccgccgtgaagagaaaccacaaccagtacgtgaaccccagcggcgtggccaccttcttcgagagcatcaaggagatcctgctgagacagagcggcgtgaaggtggagagcgtggaccacgacagctgcgtgcacggcccctgccagaacggcggcagctgcctgagaagactggccgtgagcagcgtgctgaagagcagagagagcctgcccgtgatcatcgtggccaacgagcccctgcagcccttcctgtgcaagtgcctgcccggctacgccggcagctggtgcgagatcgacatcgacgagtgcctgcccagcccctgccacagcggcggcacctgccacaacctggtgggcggcttcagctgcagctgccccgacggcttcaccggcagagcctgcgagagagacatcaacgagtgcctgcagagcccctgcaagaacggcgccatctgccagaacttccccggcagcttcaactgcgtgtgcaagaccggctacaccggcgtgttcggcaagcactgcgagctgaacagctacggcttcgaggagctgagctacatggagttccccagcctggaccccaacaacaactacatctacgtgaagttcgccaccatcaagagccacgccctgctgctgtacaactacgacaaccagaccggcgacagagccgagttcctggccctggagatcgccgaggagagactgagattcagctacaacctgggcagcggcacctacaagctgaccaccatgaagaaggtgagcgacggccacttccacaccgtgatcgccagaagagccggcatggccgccagcctgaccgtggacagctgcagcgagaaccaggagcccggctactgcaccgtgagcaacgtggccgtgagcgacgactggaccctggacgtgcagcccaacagagtgaccgtgggcggcatcagaagcctggagcccatcctgcagagaagaggccacgtggagagccacgacttcgtgggctgcatcatggagttcgccgtgaacggcagacccctggagcccagccaggccctggccgcccagggcatcctggaccagtacggcgacttcatcagctactgcttcaaggagaagaagtgcaagaaggtgtgcttcaccgtgacccccgacaccgccctgagcctggagggcaagggcagactggactaccacatgagccagaacgagaagagagagtacctgctgagacagagcctgagaggcgccatgctggagcccttcggcgtgaacagcctggaggtgaagttcagaaccagaagcgagaacggcgtgctgatccacatccaggagagcagcaactacaccaccgtgaagatcaagaacggcaaggtgtacttcaccagcgacgccggcatcgccggcaaggtggagagaaacatccccgaggtgtacgtggccgacggccactggcacaccttcctgatcggcaagaacggcaccgccaccgtgctgagcgtggacagaatctacaacagagacatcatccaccccacccaggacttcggcggcctggacgtgctgaccatcagcctgggcggcatcccccccaaccaggcccacagagacgcccagaccgccggcttcgacggctgcatcgccagcatgtggtacggcggcgagagcctgcccttcagcggcaagcacagcctggccagcatcagcaagaccgaccccagcgtgaagatcggctgcagaggccccaacatctgcgccagcaacccctgctggggcgacctgctgtgcatcaaccagtggtacgcctacagatgcgtgccccccggcgactgcgccagccacccctgccagaacggcggcagctgcgagcccggcctgcacagcggcttcacctgcagctgccccgacagccacaccggcagaacctgcgagatggtggtggcctgcctgggcgtgctgtgcccccagggcaaggtgtgcaaggccggcagccccgccggccacgtgtgcgtgctgagccagggccccgaggagatcagcctgcccctgtgggccgtgcccgccatcgtgggcagctgcgccaccgtgctggccctgctggtgctgagcctgatcctgtgcaaccagtgcagaggcaagaaggccaagaaccccaaggaggagaagaagcccaaggagaagaagaagaagggcagcgagaacgtggccttcgacgaccccgacaacatccccccctacggcgacgacatgaccgtgagaaagcagcccgagggcaaccccaagcccgacatcatcgagagagagaacccctacctgatctacgacgagaccgacatcccccacaacagcgagaccatccccagcgcccccctggccagccccgagcaggagatcgagcactacgacatcgacaacgccagcagcatcgcccccagcgacgccgacatcatccagcactacaagcagttcagaagccacacccccaagttcagcatccagagacacagccccctgggcttcgccagacagagccccatgcccctgggcgccagcagcctgacctaccagcccagctacggccagggcctgagaaccagcagcctgagccacagcgcctgccccacccccaaccccctgagcagacacagccccgcccccttcagcaagagcagcaccttctacagaaacagccccgccagagagctgcacctgcccatcagagacggcaacaccctggagatgcacggcgacacctgccagcccggcatcttcaactacgccaccagactgggcagaagaagcaagagcccccaggccatggccagccacggcagcagacccggcagcagactgaagcagcccatcggccagatccccctggagagcagcccccccgtgggcctgagcatcgaggaggtggagagactgaacacccccagacccagaaaccccagcatctgcagcgccgaccacggcagaagcagcagcgaggaggactgcagaagacccctgagcagaaccagaaaccccgccgacggcatccccgcccccgagagcagcagcgacagcgacagccacgagagcttcacctgcagcgagatggagtacgacagagagaagcccatggtgtacaccagcagaatgcccaagctgagccaggtgaacgagagcgacgccgacgacgaggacaactacggcgccagactgaagcccagaagataccacggcagaagagccgagggcggccccgtgggcacccaggccgccgcccccggcaccgccgacaacaccctgcccatgaagctgggccagcaggccggcaccttcaactgggacaacctgctgaactggggccccggcttcggccactacgtggacgtgttcaaggacctggccagcctgcccgagaaggccgccgccaacgaggagggcaaggccggcaccaccaagcccgtgcccaaggacggcgaggccgagcagtacgtgtag

SEQ ID NO: 81317 - DNA, 14946 bp, synthetic construct
  misc_feature 1..14946: note = Description of Artificial Sequence: Synthetic coding sequence
  source 1..14946: mol_type = other DNA
atggacctggcccccgacagagccaccggcagaccctggctgcccctgcacaccctgagcgtgagccagctgctgagagtgttctggctgctgagcctgctgcccggccaggcctgggtgcacggcgccgagcccagacaggtgttccaggtgctggaggagcagccccccggcaccctggtgggcaccatccagaccagacccggcttcacctacagactgagcgagagccacgccctgttcgccatcaacagcagcaccggcgccctgtacaccaccagcaccatcgacagagagagcctgcccagcgacgtgatcaacctggtggtgctgagcagcgcccccacctaccccaccgaggtgagagtgctggtgagagacctgaacgacaacgcccccgtgttccccgaccccagcatcgtggtgaccttcaaggaggacagcagcagcggcagacaggtgatcctggacaccgccaccgacagcgacatcggcagcaacggcgtggaccacagaagctacagaatcatcagaggcaacgaggccggcagattcagactggacatcaccctgaaccccagcggcgagggcgccttcctgcacctggtgagcaagggcggcctggacagagaggtgaccccccagtaccagctgctggtggaggtggaggacaagggcgagcccaagagaagaggctacctgcaggtgaacgtgaccgtgcaggacatcaacgacaacccccccgtgttcggcagcagccactaccaggccggcgtgcccgaggacgccgtggtgggcagcagcgtgctgcaggtggccgccgccgacgccgacgagggcaccaacgccgacatcagatacagactgcaggacgagggcacccccttccagatggaccccgagaccggcctgatcaccgtgagagagcccctggacttcgaggccagaagacagtacagcctgaccgtgcaggccatggacagaggcgtgcccagcctgaccggcagagccgaggccctgatccagctgctggacgtgaacgacaacgaccccgtggtgaagttcagatacttccccgccaccagcagatacgccagcgtggacgagaacgcccaggtgggcaccgtggtggccctgctgaccgtgaccgacgccgacagccccgccgccaacggcaacatcagcgtgcagatcctgggcggcaacgagcagagacacttcgaggtgcagagcagcaaggtgcccaacctgagcctgatcaaggtggccagcgccctggacagagagagaatccccagctacaacctgaccgtgagcgtgagcgacaactacggcgccccccccggcgccgccgtgcaggccagaagcagcgtggccagcctggtgatcttcgtgaacgacatcaacgaccacccccccgtgttcagccagcaggtgtacagagtgaacctgagcgaggaggccccccccggcagctacgtgagcggcatcagcgccaccgacggcgacagcggcctgaacgccaacctgagatacagcatcgtgagcggcaacggcctgggctggttccacatcagcgagcacagcggcctggtgaccaccggcagcagcggcggcctggacagagagctggccagccagatcgtgctgaacatcagcgccagagaccagggcgtgcaccccaaggtgagctacgcccagctggtggtgaccctgctggacgtgaacgacgagaagcccgtgttcagccagcccgagggctacgacgtgagcgtggtggagaacgcccccaccggcaccgagctgctgatgctgagagccaccgacggcgacctgggcgacaacggcaccgtgagattcagcctgcaggaggccgagaccgacagaagaagcttcagactggaccccgtgagcggcagactgagcaccatcagcagcctggacagagaggagcaggccttctacagcctgctggtgctggccaccgacctgggcagccccccccagagcagcatggccagaatcaacgtgagcctgctggacatcaacgacaacagccccgtgttctaccccgtgcagtacttcgcccacatcaaggagaacgagcccggcggcagctacatcaccaccgtgagcgccaccgaccccgacctgggcaccaacggcaccgtgaagtacagcatcagcgccggcgacagaagcagattccaggtgaacgcccagagcggcgtgatcagcaccagaatggccctggacagagaggagaagaccgcctaccagctgcagatcgtggccaccgacggcggcaacctgcagagccccaaccaggccatcgtgaccatcaccgtgctggacacccaggacaacccccccgtgttcagccaggtggcctacagcttcgtggtgttcgagaacgtggccctgggctaccacgtgggcagcgtgagcgccagcaccatggacctgaacagcaacatcagctacctgatcaccaccggcgaccagaagggcatgttcgccatcaaccaggtgaccggccagctgaccaccgccaacgtgatcgacagagaggagcagagcttctaccagctgaaggtggtggccagcggcggcaccgtgaccggcgacaccatggtgaacatcaccgtgaaggacctgaacgacaacagcccccacttcctgcaggccatcgagagcgtgaacgtggtggagaactggcaggccggccacagcatcttccaggccaaggccgtggaccccgacgagggcgtgaacggcatggtgctgtacagcctgaagcagaaccccaagaacctgttcgccatcaacgagaagaacggcaccatcagcctgctgggccccctggacgtgcacgccggcagctaccagatcgagatcctggccagcgacatgggcgtgccccagctgagcagcagcgtgatcctgaccgtgtacgtgcacgacgtgaacgacaacagccccgtgttcgaccagctgagctacgaggtgaccctgagcgagagcgagcccgtgaacagcagattcttcaaggtgcaggccagcgacaaggacagcggcgccaacggcgagatcgcctacaccatcgccgagggcaacaccggcgacgccttcggcatcttccccgacggccagctgtacatcaagagcgagctggacagagagctgcaggacagatacgtgctgatggtggtggccagcgacagagccgtggagcccctgagcgccaccgtgaacgtgaccgtgatcctggaggacgtgaacgacaacagacccctgttcaacagcaccaactacaccttctacttcgaggaggagcagagagccggcagcttcgtgggcaaggtgagcgccgtggacaaggacttcggccccaacggcgaggtgagatacagcttcgagatggtgcagcccgacttcgagctgcacgccatcagcggcgagatcaccaacacccaccagttcgacagagagagcctgatgagaagaagaggcaccgccgtgttcagcttcaccgtgatcgccaccgaccagggcatcccccagcccctgaaggaccaggccaccgtgcacgtgtacatgaaggacatcaacgacaacgcccccaagttcctgaaggacttctaccaggccaccatcagcgagagcgccgccaacctgacccaggtgctgagagtgagcgccagcgacgtggacgagggcaacaacggcctgatccactacagcatcatcaagggcaacgaggagagacagttcgccatcgacagcaccagcggccaggtgaccctgatcggcaagctggactacgaggccacccccgcctacagcctggtgatccaggccgtggacagcggcaccatccccctgaacagcacctgcaccctgaacatcgacatcctggacgagaacgacaacacccccagcttccccaagagcaccctgttcgtggacgtgctggagaacatgagaatcggcgagctggtgagcagcgtgaccgccaccgacagcgacagcggcgacaacgccgacctgtactacagcatcaccggcaccaacaaccacggcaccttcagcatcagccccaacaccggcagcatcttcctggccaagaagctggacttcgagacccagagcctgtacaagctgaacatcaccgccaaggaccagggcagaccccccagaagcagcaccatgagcgtggtgatccacgtgagagacttcaacgacaacccccccagcttcccccccggcgacatcttcaagagcatcgtggagaacatccccatcggcaccagcgtgatcagcgtgaccgcccacgaccccgacgccgacatcaacggccagctgagctacaccatcatccagcagatgcccagaggcaaccacttcaccatcgacgaggtgaagggcaccatctacaccaacgccgagatcgacagagagttcgccaacctgttcgagctgaccgtgaaggccaacgaccaggccgtgcccatcgagaccagaagatacgccctgaagaacgtgaccatcctggtgaccgacctgaacgacaacgtgcccatgttcatcagccagaacgccctggccgccgaccccagcgccgtgatcggcagcgtgctgaccaccatcatggccgccgaccccgacgagggcgccaacggcgagatcgagtacgagatcatcaacggcgacaccgacaccttcatcgtggacagatacagcggcgacctgagagtggccagcgccctggtgcccagccagctgatctacaacctgatcgtgagcgccaccgacctgggccccgagagaagaaagagcaccaccgagctgaccatcatcctgcagggcctggacggccccgtgttcacccagcccaagtacatcaccatcctgaaggagggcgagcccatcggcaccaacgtgatcagcatcgaggccgccagccccagaggcagcgaggcccccgtggagtactacatcgtgagcgtgagatgcgaggagaagaccgtgggcagactgttcaccatcggcagacacaccggcatcatccagaccgccgccatcctggacagagagcagggcgcctgcctgtacctggtggacgtgtacgccatcgagaagagcaccgccttccccagaacccagagagccgaggtggagatcaccctgcaggacatcaacgacaacccccccgtgttccccaccgacatgctggacctgaccgtggaggagaacatcggcgacggcagcaagatcatgcagctgaccgccatggacgccgacgagggcgccaacgccctggtgacctacaccatcatcagcggcgccgacgacagcttcagaatcgaccccgagagcggcgacctgatcgccaccagaagactggacagagagagaagaagcaagtacagcctgctggtgagagccgacgacggcctgcagagcagcgacatgagaatcaacatcaccgtgagcgacgtgaacgaccacacccccaagttcagcagacccgtgtacagcttcgacatccccgaggacaccatccccggcagcctggtggccgccatcctggccaccgacgacgacagcggcgtgaacggcgagatcacctacatcgtgaacgaggacgacgaggacggcatcttcttcctgaaccccatcaccggcgtgttcaacctgaccagactgctggactacgaggtgcagcagtactacatcctgaccgtgagagccgaggacggcggcggccagttcaccaccatcagagtgtacttcaacatcctggacgtgaacgacaacccccccatcttcagcctgaacagctacagcaccagcctgatggagaacctgcccgtgggcagcaccgtgctggtgttcaacgtgaccgacgccgacgacggcatcaacagccagctgacctacagcatcgccagcggcgacagcctgggccagttcaccgtggacaagaacggcgtgctgaaggtgctgaaggccctggacagagagagccagagcttctacaacctggtggtgcaggtgcacgacctgccccagatccccgccagcagattcaccagcaccgcccaggtgagcatcatcctgctggacgtgaacgacaacccccccaccttcctgagccccaagctgacctacatccccgagaacacccccatcgacaccgtggtgttcaaggcccaggccaccgaccccgacagcggccccaacagctacatcgagtacaccctgctgaaccccctgggcaacaagttcagcatcggcaccatcgacggcgaggtgagactgaccggcgagctggacagagaggaggtgagcaactacaccctgaccgtggtggccaccgacaagggccagcccagcctgagcagcagcaccgaggtggtggtgatggtgctggacatcaacgacaacaaccccatcttcgcccaggccctgtacaaggtggagatcaacgagaacaccctgaccggcaccgacatcatccaggtgttcgccgccgacggcgacgagggcaccaacggccaggtgagatacggcatcgtgaacggcaacaccaaccaggagttcagaatcgacagcgtgaccggcgccatcaccgtggccaagcccctggacagagagaagacccccacctaccacctgaccgtgcaggccaccgacagaggcagcacccccagaaccgacaccagcaccgtgagcatcgtgctgctggacatcaacgacttcgtgcccgtgttcgagctgagcccctacagcgtgaacgtgcccgagaacctgggcaccctgcccagaaccatcctgcaggtggtggccagagacgacgacagaggcagcaacagcaagctgagctacgtgctgttcggcggcaacgaggacaacgccttcaccctgagcgccagcggcgagctgggcgtgacccagagcctggacagagagaccaaggagagattcgtgctgatgatcaccgccaccgacagcggcagccccgccctgaccggcaccggcaccatcaacgtgatcgtggacgacgtgaacgacaacgtgcccaccttcgccagcaaggcctacttcaccaccatccccgaggacgcccccaccggcaccgacgtgctgctggtgaacgccagcgacgccgacgccagcaagaacgccgtgatcagaatcatcggcggcaacagccagttcaccatcaaccccagcaccggccagatcatcaccagcgccctgctggacagagagaccaaggacaactacaccctggtggtggtgtgcagcgacgccggcagccccgagcccctgagcagcagcaccagcgtgctggtgaccgtgaccgacgtgaacgacaacccccccagattccagcaccacccctacgtgacccacatccccagccccaccctgcccggcagcttcgtgttcgccgtgaccgtgaccgacgccgacatcggccccaacagcgagctgcactacagcctgagcggcagaaacagcgagaagttccacatcgaccccctgagaggcgccatcatggccgccggccccctgaacggcgccagcgaggtgaccttcagcgtgcacgtgaaggacggcggcagcttccccaagaccgacagcaccaccgtgaccgtgagattcgtgaacaaggccgacttccccaaggtgagagccaaggagcagaccttcatgttccccgagaaccagcccgtgagcagcctggtgaccaccatcaccggcagcagcctgagaggcgagcccatgagctactacatcgccagcggcaacctgggcaacaccttccagatcgaccagctgaccggccaggtgagcatcagccagcccctggacttcgagaagatccagaagtacgtggtgtggatcgaggccagagacggcggcttcccccccttcagcagctacgagaagctggacatcaccgtgctggacgtgaacgacaacgcccccatcttcaaggaggaccccttcatcagcgagatcctggagaacctgagccccagaaagatcctgaccgtgagcgccatggacaaggacagcggccccaacggccagctggactacgagatcgtgaacggcaacatggagaacagcttcagcatcaaccacgccaccggcgagatcagaagcgtgagacccctggacagagagaaggtgagccactacgtgctgaccatcaagagcagcgacaagggcagccccagccagagcaccagcgtgaaggtgatgatcaacatcctggacgagaacgacaacgcccccagattcagccagatcttcagcgcccacgtgcccgagaacagccccctgggctacaccgtgaccagagtgaccaccagcgacgaggacatcggcatcaacgccatcagcagatacagcatcatggacgccagcctgcccttcaccatcaaccccagcaccggcgacatcgtgatcagcagacccctgaacagagaggacaccgacagatacagaatcagagtgagcgcccacgacagcggctggaccgtgagcaccgacgtgaccatcttcgtgaccgacatcaacgacaacgcccccagattcagcagaaccagctactacctggactgccccgagctgaccgagatcggcagcaaggtgacccaggtgttcgccaccgaccccgacgagggcagcaacggccaggtgttctacttcatcaagagccagagcgagtacttcagaatcaacgccaccaccggcgagatcttcaacaagcagatcctgaagtaccagaacgtgaccggcttcagcaacgtgaacatcaacagacacagcttcatcgtgaccagcagcgacagaggcaagcccagcctgatcagcgagaccaccgtgaccatcaacatcgtggacagcaacgacaacgccccccagttcctgaagagcaagtacttcacccccgtgaccaagaacgtgaaggtgggcaccaagctgatcagagtgaccgccatcgacgacaaggacttcggcctgaacagcgaggtggagtacttcatcagcaacgacaaccacctgggcaagttcaagctggacaacgacaccggctggatcagcgtggccagcagcctgatcagcgacctgaaccagaacttcttcatcaccgtgaccgccaaggacaagggcaacccccccctgagcagccaggccaccgtgcacatcaccgtgaccgaggagaactaccacacccccgagttcagccagagccacatgagcgccaccatccccgagagccacagcatcggcagcatcgtgagaaccgtgagcgccagagacagagacgccgccatgaacggcctgatcaagtacagcatcagcagcggcaacgaggagggcatcttcgccatcaacagcagcaccggcatcctgaccctggccaaggccctggactacgagctgtgccagaagcacgagatgaccatcagcgccatcgacggcggctgggtggccagaaccggctactgcagcgtgaccgtgaacgtgatcgacgtgaacgacaacagccccgtgttcctgagcgacgactacttccccaccgtgctggagaacgcccccagcggcaccaccgtgatccacctgaacgccaccgacgccgacagcggcaccaacgccgtgatcgcctacaccgtgcagagcagcgacagcgacctgttcgtgatcgaccccaacaccggcgtgatcaccacccagggcttcctggacttcgagaccaagcagagctaccacctgaccgtgaaggccttcaacgtgcccgacgaggagagatgcagcttcgccaccgtgaacatccagctgaagggcaccaacgagtacgtgcccagattcgtgagcaagctgtactacttcgagatcagcgaggccgcccccaagggcaccatcgtgggcgaggtgttcgccagcgacagagacctgggcaccgacggcgaggtgcactacctgatcttcggcaacagcagaaagaagggcttccagatcaacaagaagaccggccagatctacgtgagcggcatcctggacagagagaaggaggagagagtgagcctgaaggtgctggccaagaacttcggcagcatcagaggcgccgacatcgacgaggtgaccgtgaacgtgaccgtgctggacgccaacgacccccccatcttcaccctgaacatctacagcgtgcagatcagcgagggcgtgcccatcggcacccacgtgaccttcgtgagcgccttcgacagcgacagcatccccagctggagcagattcagctacttcatcggcagcggcaacgagaacggcgccttcagcatcaacccccagaccggccagatcaccgtgaccgccgagctggacagagagaccctgcccatctacaacctgagcgtgctggccgtggacagcggcacccccagcgccaccggcagcgccagcctgctggtgaccctggaggacatcaacgacaacggccccatgctgaccgtgagcgagggcgaggtgatggagaacaagagacccggcaccctggtgatgaccctgcagagcaccgaccccgacctgccccccaaccagggccccttcacctactacctgctgagcaccggccccgccaccagctacttcagcctgagcaccgccggcgtgctgagcaccaccagagagatcgacagagagcagatcgccgacttctacctgagcgtggtgaccaaggacagcggcgtgccccagatgagcagcaccggcaccgtgcacatcaccgtgatcgaccagaacgacaaccccagccagagcagaaccgtggagatcttcgtgaactactacggcaacctgttccccggcggcatcctgggcagcgtgaagccccaggaccccgacgtgctggacagcttccactgcagcctgaccagcggcgtgaccagcctgttcagcatccccggcggcacctgcgacctgaacagccagcccagaagcaccgacggcaccttcgacctgaccgtgctgagcaacgacggcgtgcacagcaccgtgaccagcaacatcagagtgttcttcgccggcttcagcaacgccaccgtggacaacagcatcctgctgagactgggcgtgcccaccgtgaaggacttcctgaccaaccactacctgcacttcctgagaatcgccagcagccagctgaccggcctgggcaccgccgtgcagctgtacagcgcctacgaggagaacaacagaaccttcctgctggccgccgtgaagagaaaccacaaccagtacgtgaaccccagcggcgtggccaccttcttcgagagcatcaaggagatcctgctgagacagagcggcgtgaaggtggagagcgtggaccacgacagctgcgtgcacggcccctgccagaacggcggcagctgcctgagaagactggccgtgagcagcgtgctgaagagcagagagagcctgcccgtgatcatcgtggccaacgagcccctgcagcccttcctgtgcaagtgcctgcccggctacgccggcagctggtgcgagatcgacatcgacgagtgcctgcccagcccctgccacagcggcggcacctgccacaacctggtgggcggcttcagctgcagctgccccgacggcttcaccggcagagcctgcgagagagacatcaacgagtgcctgcagagcccctgcaagaacggcgccatctgccagaacttccccggcagcttcaactgcgtgtgcaagaccggctacaccggcaagatgtgcgagagcagcgtgaactactgcgagtgcaacccctgcttcaacggcggcagctgccagagcggcgtggacagctactactgccactgccccttcggcgtgttcggcaagcactgcgagctgaacagctacggcttcgaggagctgagctacatggagttccccagcctggaccccaacaacaactacatctacgtgaagttcgccaccatcaagagccacgccctgctgctgtacaactacgacaaccagaccggcgacagagccgagttcctggccctggagatcgccgaggagagactgagattcagctacaacctgggcagcggcacctacaagctgaccaccatgaagaaggtgagcgacggccacttccacaccgtgatcgccagaagagccggcatggccgccagcctgaccgtggacagctgcagcgagaaccaggagcccggctactgcaccgtgagcaacgtggccgtgagcgacgactggaccctggacgtgcagcccaacagagtgaccgtgggcggcatcagaagcctggagcccatcctgcagagaagaggccacgtggagagccacgacttcgtgggctgcatcatggagttcgccgtgaacggcagacccctggagcccagccaggccctggccgcccagggcatcctggaccagtgccccagactggagggcgcctgcaccagaagcccctgccagcacggcggcacctgcatggactactggagctggcagcagtgccactgcaaggagggcctgaccggcaagtactgcgagaagagcgtgacccccgacaccgccctgagcctggagggcaagggcagactggactaccacatgagccagaacgagaagagagagtacctgctgagacagagcctgagaggcgccatgctggagcccttcggcgtgaacagcctggaggtgaagttcagaaccagaagcgagaacggcgtgctgatccacatccaggagagcagcaactacaccaccgtgaagatcaagaacggcaaggtgtacttcaccagcgacgccggcatcgccggcaaggtggagagaaacatccccgaggtgtacgtggccgacggccactggcacaccttcctgatcggcaagaacggcaccgccaccgtgctgagcgtggacagaatctacaacagagacatcatccaccccacccaggacttcggcggcctggacgtgctgaccatcagcctgggcggcatcccccccaaccaggcccacagagacgcccagaccgccggcttcgacggctgcatcgccagcatgtggtacggcggcgagagcctgcccttcagcggcaagcacagcctggccagcatcagcaagaccgaccccagcgtgaagatcggctgcagaggccccaacatctgcgccagcaacccctgctggggcgacctgctgtgcatcaaccagtggtacgcctacagatgcgtgccccccggcgactgcgccagccacccctgccagaacggcggcagctgcgagcccggcctgcacagcggcttcacctgcagctgccccgacagccacaccggcagaacctgcgagatggtggtggcctgcctgggcgtgctgtgcccccagggcaaggtgtgcaaggccggcagccccgccggccacgtgtgcgtgctgagccagggccccgaggagatcagcctgcccctgtgggccgtgcccgccatcgtgggcagctgcgccaccgtgctggccctgctggtgctgagcctgatcctgtgcaaccagtgcagaggcaagaaggccaagaaccccaaggaggagaagaagcccaaggagaagaagaagaagggcagcgagaacgtggccttcgacgaccccgacaacatccccccctacggcgacgacatgaccgtgagaaagcagcccgagggcaaccccaagcccgacatcatcgagagagagaacccctacctgatctacgacgagaccgacatcccccacaacagcgagaccatccccagcgcccccctggccagccccgagcaggagatcgagcactacgacatcgacaacgccagcagcatcgcccccagcgacgccgacatcatccagcactacaagcagttcagaagccacacccccaagttcagcatccagagacacagccccctgggcttcgccagacagagccccatgcccctgggcgccagcagcctgacctaccagcccagctacggccagggcctgagaaccagcagcctgagccacagcgcctgccccacccccaaccccctgagcagacacagccccgcccccttcagcaagagcagcaccttctacagaaacagccccgccagagagctgcacctgcccatcagagacggcaacaccctggagatgcacggcgacacctgccagcccggcatcttcaactacgccaccagactgggcagaagaagcaagagcccccaggccatggccagccacggcagcagacccggcagcagactgaagcagcccatcggccagatccccctggagagcagcccccccgtgggcctgagcatcgaggaggtggagagactgaacacccccagacccagaaaccccagcatctgcagcgccgaccacggcagaagcagcagcgaggaggactgcagaagacccctgagcagaaccagaaaccccgccgacggcatccccgcccccgagagcagcagcgacagcgacagccacgagagcttcacctgcagcgagatggagtacgacagagagaagcccatggtgtacaccagcagaatgcccaagctgagccaggtgaacgagagcgacgccgacgacgaggacaactacggcgccagactgaagcccagaagataccacggcagaagagccgagggcggccccgtgggcacccaggccgccgcccccggcaccgccgacaacaccctgcccatgaagctgggccagcaggccggcaccttcaactgggacaacctgctgaactggggccccggcttcggccactacgtggacgtgttcaaggacctggccagcctgcccgagaaggccgccgccaacgaggagggcaaggccggcaccaccaagcccgtgcccaaggacggcgaggccgagcagtacgtgtag

SEQ ID NO: 81318 - DNA, 1239 bp, synthetic construct
  misc_feature 1..1239: note = Description of Artificial Sequence: Synthetic coding sequence
  source 1..1239: mol_type = other DNA
atgggcctgcacctgagaccctacagagtgggcctgctgcccgacggcctgctgttcctgctgctgctgctgatgctgctggccgaccccgccctgcccgccggcagacacccccccgtggtgctggtgcccggcgacctgggcaaccagctggaggccaagctggacaagcccaccgtggtgcactacctgtgcagcaagaagaccgagagctacttcaccatctggctgaacctggagctgctgctgcccgtgatcatcgactgctggatcgacaacatcagactggtgtacaacaagaccagcagagccacccagttccccgacggcgtggacgtgagagtgcccggcttcggcaagaccttcagcctggagttcctggaccccagcaagagcagcgtgggcagctacttccacaccatggtggagagcctggtgggctggggctacaccagaggcgaggacgtgagaggcgccccctacgactggagaagagcccccaacgagaacggcccctacttcctggccctgagagagatgatcgaggagatgtaccagctgtacggcggccccgtggtgctggtggcccacagcatgggcaacatgtacaccctgtacttcctgcagagacagccccaggcctggaaggacaagtacatcagagccttcgtgagcctgggcgccccctggggcggcgtggccaagaccctgagagtgctggccagcggcgacaacaacagaatccccgtgatcggccccctgaagatcagagagcagcagagaagcgccgtgagcaccagctggctgctgccctacaactacacctggagccccgagaaggtgttcgtgcagacccccaccatcaactacaccctgagagactacagaaagttcttccaggacatcggcttcgaggacggctggctgatgagacaggacaccgagggcctggtggaggccaccatgccccccggcgtgcagctgcactgcctgtacggcaccggcgtgcccacccccgacagcttctactacgagagcttccccgacagagaccccaagatctgcttcggcgacggcgacggcaccgtgaacctgaagagcgccctgcagtgccaggcctggcagagcagacaggagcaccaggtgctgctgcaggagctgcccggcagcgagcacatcgagatgctggccaacgccaccaccctggcctacctgaagagagtgctgctgggcccctag

SEQ ID NO: 81319 - DNA, 480 bp, synthetic construct
  misc_feature 1..480: note = Description of Artificial Sequence: Synthetic coding sequence
  source 1..480: mol_type = other DNA
atgttccccggcctgttcatgctgggcaccttcctgtggagcctgatcgagtacctgatccacagattcctgttccacatgaagccccccagcgacagctactacctgatcatgctgcacttcgtgatgcacggccagcaccacaaggcccccttcgacggcagcagactggtgttcccccccgtgcccgccagcctggtgatcggcgtgttctacctgtgcatgcagctgatcctgcccgaggccgtgggcggcaccgtgttcgccggcggcctgctgggctacgtgctgtacgacatgacccactactacctgcacttcggcagcccccacaagggcagctacctgtacagcctgaaggcccaccacgtgaagcaccacttcgcccaccagaagagcggcttcggcatcagcaccaagctgtgggactactgcttccacaccctgacccccgagaagccccacctgaagacccagtag

SEQ ID NO: 81320 - DNA, 1740 bp, synthetic construct
  misc_feature 1..1740: note = Description of Artificial Sequence: Synthetic coding sequence
  source 1..1740: mol_type = other DNA
atggtgcagtacgagctgtgggccgccctgcccggcgccagcggcgtggccctggcctgctgcttcgtggccgccgccgtggccctgagatggagcggcagaagaaccgccagaggcgccgtggtgagagccagacagagacagagagccggcctggagaacatggacagagccgcccagagattcagactgcagaaccccgacctggacagcgaggccctgctggccctgcccctgccccagctggtgcagaagctgcacagcagagagctggcccccgaggccgtgctgttcacctacgtgggcaaggcctgggaggtgaacaagggcaccaactgcgtgaccagctacctggccgactgcgagacccagctgagccaggcccccagacagggcctgctgtacggcgtgcccgtgagcctgaaggagtgcttcacctacaagggccaggacagcaccctgggcctgagcctgaacgagggcgtgcccgccgagtgcgacagcgtggtggtgcacgtgctgaagctgcagggcgccgtgcccttcgtgcacaccaacgtgccccagagcatgttcagctacgactgcagcaaccccctgttcggccagaccgtgaacccctggaagagcagcaagagccccggcggcagcagcggcggcgagggcgccctgatcggcagcggcggcagccccctgggcctgggcaccgacatcggcggcagcatcagattccccagcagcttctgcggcatctgcggcctgaagcccaccggcaacagactgagcaagagcggcctgaagggctgcgtgtacggccaggaggccgtgagactgagcgtgggccccatggccagagacgtggagagcctggccctgtgcctgagagccctgctgtgcgaggacatgttcagactggaccccaccgtgccccccctgcccttcagagaggaggtgtacaccagcagccagcccctgagagtgggctactacgagaccgacaactacaccatgcccagccccgccatgagaagagccgtgctggagaccaagcagagcctggaggccgccggccacaccctggtgcccttcctgcccagcaacatcccccacgccctggagaccctgagcaccggcggcctgttcagcgacggcggccacaccttcctgcagaacttcaagggcgacttcgtggacccctgcctgggcgacctggtgagcatcctgaagctgccccagtggctgaagggcctgctggccttcctggtgaagcccctgctgcccagactgagcgccttcctgagcaacatgaagagcagaagcgccggcaagctgtgggagctgcagcacgagatcgaggtgtacagaaagaccgtgatcgcccagtggagagccctggacctggacgtggtgctgacccccatgctggcccccgccctggacctgaacgcccccggcagagccaccggcgccgtgagctacaccatgctgtacaactgcctggacttccccgccggcgtggtgcccgtgaccaccgtgaccgccgaggacgaggcccagatggagcactacagaggctacttcggcgacatctgggacaagatgctgcagaagggcatgaagaagagcgtgggcctgcccgtggccgtgcagtgcgtggccctgccctggcaggaggagctgtgcctgagattcatgagagaggtggagagactgatgacccccgagaagcagagcagctag

SEQ ID NO: 81321 - DNA, 456 bp, synthetic construct
  misc_feature 1..456: note = Description of Artificial Sequence: Synthetic coding sequence
  source 1..456: mol_type = other DNA
agaagacagcaccccctgcccctgctgctgctgagacacctgagaccccaggcccacagagagcccccccaggtgtacaccagcagccagcccctgagagtgggctactacgagaccgacaactacaccatgcccagccccgccatgagaagagccgtgctggagaccaagcagagcctggaggccgccggccacaccctggtgcccttcctgcccagcaacatcccccacgccctggagaccctgagcaccggcggcctgttcagcgacggcggccacaccttcctgcagaacttcaagggcgacttcgtggacccctgcctgggcgacctggtgagcatcctgaagctgccccagtggctgaagggcctgctggccttcctggtgaagcccctgctgcccagactgagcgccttcctgagcaacatgaagagcagatgcagacccctgccctag

SEQ ID NO: 81322 - DNA, 1599 bp, synthetic construct
  misc_feature 1..1599: note = Description of Artificial Sequence: Synthetic coding sequence
  source 1..1599: mol_type = other DNA
atggcccccagcttcaccgccagaatccagctgttcctgctgagagccctgggcttcctgatcggcctggtgggcagagccgccctggtgctgggcggccccaagttcgccagcaagacccccagacccgtgaccgagcccctgctgctgctgagcggcatgcagctggccaagctgatcagacagagaaaggtgaagtgcatcgacgtggtgcaggcctacatcaacagaatcaaggacgtgaaccccatgatcaacggcatcgtgaagtacagattcgaggaggccatgaaggaggcccacgccgtggaccagaagctggccgagaagcaggaggacgaggccaccctggagaacaagtggcccttcctgggcgtgcccctgaccgtgaaggaggccttccagctgcagggcatgcccaacagcagcggcctgatgaacagaagagacgccatcgccaagaccgacgccaccgtggtggccctgctgaagggcgccggcgccatccccctgggcatcaccaactgcagcgagctgtgcatgtggtacgagagcagcaacaagatctacggcagaagcaacaacccctacgacctgcagcacatcgtgggcggcagcagcggcggcgagggctgcaccctggccgccgcctgcagcgtgatcggcgtgggcagcgacatcggcggcagcatcagaatgcccgccttcttcaacggcatcttcggccacaagcccagccccggcgtggtgcccaacaagggccagttccccctggccgtgggcgcccaggagctgttcctgtgcaccggccccatgtgcagatacgccgaggacctggcccccatgctgaaggtgatggccggccccggcatcaagagactgaagctggacaccaaggtgcacctgaaggacctgaagttctactggatggagcacgacggcggcagcttcctgatgagcaaggtggaccaggacctgatcatgacccagaagaaggtggtggtgcacctggagaccatcctgggcgccagcgtgcagcacgtgaagctgaagaagatgaagtacagcttccagctgtggatcgccatgatgagcgccaagggccacgacggcaaggagcccgtgaagttcgtggacctgctgggcgaccacggcaagcacgtgagccccctgtgggagctgatcaagtggtgcctgggcctgagcgtgtacaccatccccagcatcggcctggccctgctggaggagaagctgagatacagcaacgagaagtaccagaagttcaaggccgtggaggagagcctgagaaaggagctggtggacatgctgggcgacgacggcgtgttcctgtaccccagccaccccaccgtggcccccaagcaccacgtgcccctgaccagacccttcaacttcgcctacaccggcgtgttcagcgccctgggcctgcccgtgacccagtgccccctgggcctgaacgccaagggcctgcccctgggcatccaggtggtggccggccccttcaacgaccacctgaccctggccgtggcccagtacctggagaagaccttcggcggctgggtgtgccccggcaagttctag

SEQ ID NO: 81323 - DNA, 384 bp, synthetic construct
  misc_feature 1..384: note = Description of Artificial Sequence: Synthetic coding sequence
  source 1..384: mol_type = other DNA
atgagcttcagcggcaagtaccagctgcagagccaggagaacttcgaggccttcatgaaggccatcggcctgcccgaggagctgatccagaagggcaaggacatcaagggcgtgagcgagatcgtgcagaacggcaagcacttcaagttcaccatcaccgccggcagcaaggtgatccagaacgagttcaccgtgggcgaggagtgcgagctggagaccatgaccggcgagaaggtgaagaccgtggtgcagctggagggcgacaacaagctggtgaccaccttcaagaacatcaagagcgtgaccgagctgaacggcgacatcatcaccaacaccatgaccctgggcgacatcgtgttcaagagaatcagcaagagaatctag

SEQ ID NO: 81324 - DNA, 399 bp, synthetic construct
  misc_feature 1..399: note = Description of Artificial Sequence: Synthetic coding sequence
  source 1..399: mol_type = other DNA
atggccttcgacagcacctggaaggtggacagaagcgagaactacgacaagttcatggagaagatgggcgtgaacatcgtgaagagaaagctggccgcccacgacaacctgaagctgaccatcacccaggagggcaacaagttcaccgtgaaggagagcagcaccttcagaaacatcgaggtggtgttcgagctgggcgtgaccttcaactacaacctggccgacggcaccgagctgagaggcacctggagcctggagggcaacaagctgatcggcaagttcaagagaaccgacaacggcaacgagctgaacaccgtgagagagatcatcggcgacgagctggtgcagacctacgtgtacgagggcgtggaggccaagagaatcttcaagaaggactag

SEQ ID NO: 81325 - DNA, 402 bp, synthetic construct
  misc_feature 1..402: note = Description of Artificial Sequence: Synthetic coding sequence
  source 1..402: mol_type = other DNA
atggtggacgccttcctgggcacctggaagctggtggacagcaagaacttcgacgactacatgaagagcctgggcgtgggcttcgccaccagacaggtggccagcatgaccaagcccaccaccatcatcgagaagaacggcgacatcctgaccctgaagacccacagcaccttcaagaacaccgagatcagcttcaagctgggcgtggagttcgacgagaccaccgccgacgacagaaaggtgaagagcatcgtgaccctggacggcggcaagctggtgcacctgcagaagtgggacggccaggagaccaccctggtgagagagctgatcgacggcaagctgatcctgaccctgacccacggcaccgccgtgtgcaccagaacctacgagaaggaggcctag

SEQ ID NO: 81326 - DNA, 408 bp, synthetic construct
  misc_feature 1..408: note = Description of Artificial Sequence: Synthetic coding sequence
  source 1..408: mol_type = other DNA
atggccaccgtgcagcagctggagggcagatggagactggtggacagcaagggcttcgacgagtacatgaaggagctgggcgtgggcatcgccctgagaaagatgggcgccatggccaagcccgactgcatcatcacctgcgacggcaagaacctgaccatcaagaccgagagcaccctgaagaccacccagttcagctgcaccctgggcgagaagttcgaggagaccaccgccgacggcagaaagacccagaccgtgtgcaacttcaccgacggcgccctggtgcagcaccaggagtgggacggcaaggagagcaccatcaccagaaagctgaaggacggcaagctggtggtggagtgcgtgatgaacaacgtgacctgcaccagaatctacgagaaggtggagtag

SEQ ID NO: 81327 - DNA, 534 bp, synthetic construct
  misc_feature 1..534: note = Description of Artificial Sequence: Synthetic coding sequence
  source 1..534: mol_type = other DNA
atgaagaccgtgaccatgatgatggtggtggagatgcaggccctgacccaggtgctgagagccgtgctgagcgcctgcacctgggtgagcagaaagggcgacctgcagagaatgaagcagacccacaagggcaagccccccagcagcatggccttcaccggcaagttcgagatggagagcgagaagaactacgacgagttcatgaagctgctgggcatcagcagcgacgtgatcgagaaggccagaaacttcaagatcgtgaccgaggtgcagcaggacggccaggacttcacctggagccagcactacagcggcggccacaccatgaccaacaagttcaccgtgggcaaggagagcaacatccagaccatgggcggcaagaccttcaaggccaccgtgcagatggagggcggcaagctggtggtgaacttccccaactaccaccagaccagcgagatcgtgggcgacaagctggtggaggtgagcaccatcggcggcgtgacctacgagagagtgagcaagagactggcctag

SEQ ID NO: 81328 - DNA, 534 bp, synthetic construct; identical to SEQ ID NO: 81327
  misc_feature 1..534: note = Description of Artificial Sequence: Synthetic coding sequence
  source 1..534: mol_type = other DNA

SEQ ID NO: 81329 - DNA, 387 bp, synthetic construct
  misc_feature 1..387: note = Description of Artificial Sequence: Synthetic coding sequence
  source 1..387: mol_type = other DNA
atggccttcaccggcaagttcgagatggagagcgagaagaactacgacgagttcatgaagctgctgggcatcagcagcgacgtgatcgagaaggccagaaacttcaagatcgtgaccgaggtgcagcaggacggccaggacttcacctggagccagcactacagcggcggccacaccatgaccaacaagttcaccgtgggcaaggagagcaacatccagaccatgggcggcaagaccttcaaggccaccgtgcagatggagggcggcaagctggtggtgaacttccccaactaccaccagaccagcgagatcgtgggcgacaagctggtggaggtgagcaccatcggcggcgtgacctacgagagagtgagcaagagactggcctag

SEQ ID NO: 81330 - DNA, 501 bp, synthetic construct
  misc_feature 1..501: note = Description of Artificial Sequence: Synthetic coding sequence
  source 1..501: mol_type = other DNA
atggtggaggccttctgcgccacctggaagctgaccaacagccagaacttcgacgagtacatgaaggccctgggcgtgggcttcgccaccagacaggtgggcaacgtgaccaagcccaccgtgatcatcagccaggagggcgacaaggtggtgatcagaaccctgagcaccttcaagaacaccgagatcagcttccagctgggcgaggagttcgacgagaccaccgccgacgacagaaactgcaagagcgtggtgagcctggacggcgacaagctggtgcacatccagaagtgggacggcaaggagaccaacttcgtgagagagatcaaggacggcaagatggtgatggtgagcaacgacaacagccccttcttcctggtgttcttcagcagcccccacaccagccacctgctgcccagcagcagcctgctgctgcccttcttcctgctgcccagcttcttcaacaacaccagcctggccagattcttcaactacatgtag

SEQ ID NO: 81331 - DNA, 399 bp, synthetic construct
  misc_feature 1..399: note = Description of Artificial Sequence: Synthetic coding sequence
  source 1..399: mol_type = other DNA
atggtggaggccttctgcgccacctggaagctgaccaacagccagaacttcgacgagtacatgaaggccctgggcgtgggcttcgccaccagacaggtgggcaacgtgaccaagcccaccgtgatcatcagccaggagggcgacaaggtggtgatcagaaccctgagcaccttcaagaacaccgagatcagcttccagctgggcgaggagttcgacgagaccaccgccgacgacagaaactgcaagagcgtggtgagcctggacggcgacaagctggtgcacatccagaagtgggacggcaaggagaccaacttcgtgagagagatcaaggacggcaagatggtgatgaccctgaccttcggcgacgtggtggccgtgagacactacgagaaggcctag

SEQ ID NO: 81332 - DNA, 1506 bp, synthetic construct
  misc_feature 1..1506: note = Description of Artificial Sequence: Synthetic coding sequence
  source 1..1506: mol_type = other DNA
atgggcaccagagccgccagacccgccggcctgccctgcggcgccgagaaccccgccagaagaagactggccctgggcgccagacagcagatccacagctggagccccagaacccccagcaccagactgaccgcccccgccggccccgccagaggcgtggccagacccgccatggcccccgaccccgtggccgccgagaccgccgcccagggccccacccccagatacttcacctgggacgaggtggcccagagaagcggctgcgaggagagatggctggtgatcgacagaaaggtgtacaacatcagcgagttcaccagaagacaccccggcggcagcagagtgatcagccactacgccggccaggacgccaccgaccccttcgtggccttccacatcaacaagggcctggtgaagaagtacatgaacagcctgctgatcggcgagctgagccccgagcagcccagcttcgagcccaccaagaacaaggagctgaccgacgagttcagagagctgagagccaccgtggagagaatgggcctgatgaaggccaaccacgtgttcttcctgctgtacctgctgcacatcctgctgctggacggcgccgcctggctgaccctgtgggtgttcggcaccagcttcctgcccttcctgctgtgcgccgtgctgctgagcgccgtgcaggcccaggccggctggctgcagcacgacttcggccacctgagcgtgttcagcaccagcaagtggaaccacctgctgcaccacttcgtgatcggccacctgaagggcgcccccgccagctggtggaaccacatgcacttccagcaccacgccaagcccaactgcttcagaaaggaccccgacatcaacatgcaccccttcttcttcgccctgggcaagatcctgagcgtggagctgggcaagcagaagaagaagtacatgccctacaaccaccagcacaagtacttcttcctgatcggcccccccgccctgctgcccctgtacttccagtggtacatcttctacttcgtgatccagagaaagaagtgggtggacctggcctggatgatcaccttctacgtgagattcttcctgacctacgtgcccctgctgggcctgaaggccttcctgggcctgttcttcatcgtgagattcctggagagcaactggttcgtgtgggtgacccagatgaaccacatccccatgcacatcgaccacgacagaaacatggactgggtgagcacccagctgcaggccacctgcaacgtgcacaagagcgccttcaacgactggttcagcggccacctgaacttccagatcgagcaccacctgttccccaccatgcccagacacaactaccacaaggtggcccccctggtgcagagcctgtgcgccaagcacggcatcgagtaccagagcaagcccctgctgagcgccttcgccgacatcatccacagcctgaaggagagcggccagctgtggctggacgcctacctgcaccagtag

SEQ ID NO: 81333 - DNA, 1083 bp, synthetic construct
  misc_feature 1..1083: note = Description of Artificial Sequence: Synthetic coding sequence
  source 1..1083: mol_type = other DNA
atgaacagcctgctgatcggcgagctgagccccgagcagcccagcttcgagcccaccaagaacaaggagctgaccgacgagttcagagagctgagagccaccgtggagagaatgggcctgatgaaggccaaccacgtgttcttcctgctgtacctgctgcacatcctgctgctggacggcgccgcctggctgaccctgtgggtgttcggcaccagcttcctgcccttcctgctgtgcgccgtgctgctgagcgccgtgcaggcccaggccggctggctgcagcacgacttcggccacctgagcgtgttcagcaccagcaagtggaaccacctgctgcaccacttcgtgatcggccacctgaagggcgcccccgccagctggtggaaccacatgcacttccagcaccacgccaagcccaactgcttcagaaaggaccccgacatcaacatgcaccccttcttcttcgccctgggcaagatcctgagcgtggagctgggcaagcagaagaagaagtacatgccctacaaccaccagcacaagtacttcttcctgatcggcccccccgccctgctgcccctgtacttccagtggtacatcttctacttcgtgatccagagaaagaagtgggtggacctggcctggatgatcaccttctacgtgagattcttcctgacctacgtgcccctgctgggcctgaaggccttcctgggcctgttcttcatcgtgagattcctggagagcaactggttcgtgtgggtgacccagatgaaccacatccccatgcacatcgaccacgacagaaacatggactgggtgagcacccagctgcaggccacctgcaacgtgcacaagagcgccttcaacgactggttcagcggccacctgaacttccagatcgagcaccacctgttccccaccatgcccagacacaactaccacaaggtggcccccctggtgcagagcctgtgcgccaagcacggcatcgagtaccagagcaagcccctgctgagcgccttcgccgacatcatccacagcctgaaggagagcggccagctgtggctggacgcctacctgcaccagtag

SEQ ID NO: 81334 - DNA, 1083 bp, synthetic construct; identical to SEQ ID NO: 81333
  misc_feature 1..1083: note = Description of Artificial Sequence: Synthetic coding sequence
  source 1..1083: mol_type = other DNA

SEQ ID NO: 81335 - DNA, 1083 bp, synthetic construct; identical to SEQ ID NO: 81333
  misc_feature 1..1083: note = Description of Artificial Sequence: Synthetic coding sequence
  source 1..1083: mol_type = other DNA

SEQ ID NO: 81336 - DNA, 1131 bp, synthetic construct
  misc_feature 1..1131: note = Description of Artificial Sequence: Synthetic coding sequence
  source 1..1131: mol_type = other DNA
caggacgccttcagagccttccaccaggacctgaacttcgtgagaaagttcctgcagcccctgctgatcggcgagctggcccccgaggagcccagccaggacggccccctgaacgcccagctggtggaggacttcagagccctgcaccaggccgccgaggacatgaagctgttcgacgccagccccaccttcttcgccttcctgctgggccacatcctggccatggaggtgctggcctggctgctgatctacctgctgggccccggctgggtgcccagcgccctggccgccttcatcctggccatcagccaggcccaggccggctggctgcagcacgacttcggccacctgagcgtgttcagcaccagcaagtggaaccacctgctgcaccacttcgtgatcggccacctgaagggcgcccccgccagctggtggaaccacatgcacttccagcaccacgccaagcccaactgcttcagaaaggaccccgacatcaacatgcaccccttcttcttcgccctgggcaagatcctgagcgtggagctgggcaagcagaagaagaagtacatgccctacaaccaccagcacaagtacttcttcctgatcggcccccccgccctgctgcccctgtacttccagtggtacatcttctacttcgtgatccagagaaagaagtgggtggacctggcctggatgatcaccttctacgtgagattcttcctgacctacgtgcccctgctgggcctgaaggccttcctgggcctgttcttcatcagattcctggagagcaactggttcgtgtgggtgacccagatgaaccacatccccatgcacatcgaccacgacagaaacatggactgggtgagcacccagctgcaggccacctgcaacgtgcacaagagcgccttcaacgactggttcagcggccacctgaacttccagatcgagcaccacctgttccccaccatgcccagacacaactaccacaaggtggcccccctggtgcagagcctgtgcgccaagcacggcatcgagtaccagagcaagcccctgctgagcgccttcgccgacatcatccacagcctgaaggagagcggccagctgtggctggacgcctacctgcaccagtag

SEQ ID NO: 81337 - DNA, 1269 bp, synthetic construct
  misc_feature 1..1269: note = Description of Artificial Sequence: Synthetic coding sequence
  source 1..1269: mol_type = other DNA
atgcacggcagagaggccggccccttcgtgtgcgtgtgcgtgctgctggccagcatccccaccccccagacccccctgctgcaggccagcctgccccccttccaccccgccagcgccggccaccccatcaccggccagcaggacgccttcagagccttccaccccgacctggagttcgtgggcaagttcctgaagcccctgctgatcggcgagctggcccccgaggagcccagccaggaccacggcaagaacagcaagatcaccgaggacttcagagccctgagaaagaccgccgaggacatgaacctgttcaagaccaaccacgtgttcttcctgctgctgctggcccacatcatcgccctggagagcatcgcctggttcaccgtgttctacttcggcaacggctggatccccaccctgatcaccgccttcgtgctggccaccagccaggcccaggccggctggctgcagcacgactacggccacctgagcgtgtacagaaagcccaagtggaaccacctggtgcacaagttcgtgatcggccacctgaagggcgccagcgccaactggtggaaccacagacacttccagcaccacgccaagcccaacatcttccacaaggaccccgacgtgaacatgctgcacgtgttcgtgctgggcgagtggcagcccatcgagtacggcaagaagaagctgaagtacctgccctacaaccaccagcacgagtacttcttcctgatcggcccccccctgctgatccccatgtacttccagtaccagatcatcatgaccatgatcgtgcacaagaactgggtggacctggcctgggccgtgagctactacatcagattcttcatcacctacatccccttctacggcatcctgggcgccctgctgttcctgaacttcatcagattcctggagagccactggttcgtgtgggtgacccagatgaaccacatcgtgatggagatcgaccaggaggcctacagagactggttcagcagccagctgaccgccacctgcaacgtggagcagagcttcttcaacgactggttcagcggccacctgaacttccagatcgagcaccacctgttccccaccatgcccagacacaacctgcacaagatcgcccccctggtgaagagcctgtgcgccaagcacggcatcgagtaccaggagaagcccctgctgagagccctgctggacatcatcagaagcctgaagaagagcggcaagctgtggctggacgcctacctgcacaagtag

SEQ ID NO: 81338 - DNA, 1335 bp, synthetic construct
  misc_feature 1..1335: note = Description of Artificial Sequence: Synthetic coding sequence
  source 1..1335: mol_type = other DNA
atgggcaagggcggcaaccagggcgagggcgccgccgagagagaggtgagcgtgcccaccttcagctgggaggagatccagaagcacaacctgagaaccgacagatggctggtgatcgacagaaaggtgtacaacatcaccaagtggagcatccagcaccccggcggccagagagtgatcggccactacgccggcgaggacgccaccgacgccttcagagccttccaccccgacctggagttcgtgggcaagttcctgaagcccctgctgatcggcgagctggcccccgaggagcccagccaggaccacggcaagaacagcaagatcaccgaggacttcagagccctgagaaagaccgccgaggacatgaacctgttcaagaccaaccacgtgttcttcctgctgctgctggcccacatcatcgccctggagagcatcgcctggttcaccgtgttctacttcggcaacggctggatccccaccctgatcaccgccttcgtgctggccaccagccaggcccaggccggctggctgcagcacgactacggccacctgagcgtgtacagaaagcccaagtggaaccacctggtgcacaagttcgtgatcggccacctgaagggcgccagcgccaactggtggaaccacagacacttccagcaccacgccaagcccaacatcttccacaaggaccccgacgtgaacatgctgcacgtgttcgtgctgggcgagtggcagcccatcgagtacggcaagaagaagctgaagtacctgccctacaaccaccagcacgagtacttcttcctgatcggcccccccctgctgatccccatgtacttccagtaccagatcatcatgaccatgatcgtgcacaagaactgggtggacctggcctgggccgtgagctactacatcagattcttcatcacctacatccccttctacggcatcctgggcgccctgctgttcctgaacttcatcagattcctggagagccactggttcgtgtgggtgacccagatgaaccacatcgtgatggagatcgaccaggaggcctacagagactggttcagcagccagctgaccgccacctgcaacgtggagcagagcttcttcaacgactggttcagcggccacctgaacttccagatcgagcaccacctgttccccaccatgcccagacacaacctgcacaagatcgcccccctggtgaagagcctgtgcgccaagcacggcatcgagtaccaggagaagcccctgctgagagccctgctggacatcatcagaagcctgaagaagagcggcaagctgtggctggacgcctacctgcacaagtag

SEQ ID NO: 81339 - DNA, 1161 bp, synthetic construct
  misc_feature 1..1161: note = Description of Artificial Sequence: Synthetic coding sequence
  source 1..1161: mol_type = other DNA
atgggcaagggcggcaaccagggcgagggcgccgccgagagagaggtgagcgtgcccaccttcagctgggaggagatccagaagcacaacctgagaaccgacagatggctggtgatcgacagaaaggtgtacaacatcaccaagtggagcatccagcaccccggcggccagagagtgatcggccactacgccggcgaggacgccaccgacgccttcagagccttccaccccgacctggagttcgtgggcaagttcctgaagcccctgctgatcggcgagctggcccccgaggagcccagccaggaccacggcaagaacagcaagatcaccgaggacttcagagccctgagaaagaccgccgaggacatgaacctgttcaagaccaaccacgtgttcttcctgctgctgctggcccacatcatcgccctggagagcatcgcctggttcaccgtgttctacttcggcaacggctggatccccaccctgatcaccgccttcgtgctggccaccagccaggcccaggccggctggctgcagcacgactacggccacctgagcgtgtacagaaagcccaagtggaaccacctggtgcacaagttcgtgatcggccacctgaagggcgccagcgccaactggtggaaccacagacacttccagcaccacgccaagcccaacatcttccacaaggaccccgacgtgaacatgctgcacgtgttcgtgctgggcgagtggcagcccatcgagtacggcaagaagaagctgaagtacctgccctacaaccaccagcacgagtacttcttcctgatcggcccccccctgctgatccccatgtacttccagtaccagatcatcatgaccatgatcgtgcacaagaactgggtggacctggcctgggccgtgagctactacatcagattcttcatcacctacatccccttctacggcatcctgggcgccctgctgttcctgaacttcatcagattcctggagagccactggttcgtgtgggtgacccagatgaaccacatcgtgatggagatcgaccaggaggcctacagagactggttcagcagccagctgaccgccacctgcaacgtggagcagagcttcttcaacgactggttcagcggccacctgaacttccagatcgagcaccagtag

SEQ ID NO: 81340 - DNA, 1338 bp, synthetic construct
  misc_feature 1..1338: note = Description of Artificial Sequence: Synthetic coding sequence
  source 1..1338: mol_type = other DNA
atgggcggcgtgggcgagcccggccccagagagggccccgcccagcccggcgcccccctgcccaccttctgctgggagcagatcagagcccacgaccagcccggcgacaagtggctggtgatcgagagaagagtgtacgacatcagcagatgggcccagagacaccccggcggcagcagactgatcggccaccacggcgccgaggacgccaccgacgccttcagagccttccaccaggacctgaacttcgtgagaaagttcctgcagcccctgctgatcggcgagctggcccccgaggagcccagccaggacggccccctgaacgcccagctggtggaggacttcagagccctgcaccaggccgccgaggacatgaagctgttcgacgccagccccaccttcttcgccttcctgctgggccacatcctggccatggaggtgctggcctggctgctgatctacctgctgggccccggctgggtgcccagcgccctggccgccttcatcctggccatcagccaggcccagagctggtgcctgcagcacgacctgggccacgccagcatcttcaagaagagctggtggaaccacgtggcccagaagttcgtgatgggccagctgaagggcttcagcgcccactggtggaacttcagacacttccagcaccacgccaagcccaacatcttccacaaggaccccgacgtgaccgtggcccccgtgttcctgctgggcgagagcagcgtggagtacggcaagaagaagagaagatacctgccctacaaccagcagcacctgtacttcttcctgatcggcccccccctgctgaccctggtgaacttcgaggtggagaacctggcctacatgctggtgtgcatgcagtgggccgacctgctgtgggccgccagcttctacgccagattcttcctgagctacctgcccttctacggcgtgcccggcgtgctgctgttcttcgtggccgtgagagtgctggagagccactggttcgtgtggatcacccagatgaaccacatccccaaggagatcggccacgagaagcacagagactgggtgagcagccagctggccgccacctgcaacgtggagcccagcctgttcaccaactggttcagcggccacctgaacttccagatcgagcaccacctgttccccagaatgcccagacacaactacagcagagtggcccccctggtgaagagcctgtgcgccaagcacggcctgagctacgaggtgaagcccttcctgaccgccctggtggacatcgtgagaagcctgaagaagagcggcgacatctggctggacgcctacctgcaccagtag

SEQ ID NO: 81341 - DNA, 1158 bp, synthetic construct
  misc_feature 1..1158: note = Description of Artificial Sequence: Synthetic coding sequence
  source 1..1158: mol_type = other DNA
atgggcggcgtgggcgagcccggccccagagagggccccgcccagcccggcgcccccctgcccaccttctgctgggagcagatcagagcccacgaccagcccggcgacaagtggctggtgatcgagagaagagtgtacgacatcagcagatgggcccagagacaccccggcggcagcagactgatcggccaccacggcgccgaggacgccaccgacgccttcagagccttccaccaggacctgaacttcgtgagaaagttcctgcagcccctgctgatcggcgagctggcccccgaggagcccagccaggacggccccctgaacgcccagctggtggaggacttcagagccctgcaccaggccgccgaggacatgaagctgttcgacgccagccccaccttcttcgccttcctgctgggccacatcctggccatggaggtgctggcctggctgctgatctacctgctgggccccggctgggtgcccagcgccctggccgccttcatcctggccatcagccaggcccagagctggtgcctgcagcacgacctgggccacgccagcatcttcaagaagagctggtggaaccacgtggcccagaagttcgtgatgggccagctgaagggcttcagcgcccactggtggaacttcagacacttccagcaccacgccaagcccaacatcttccacaaggaccccgacgtgaccgtggcccccgtgttcctgctgggcgagagcagcgtggagtacggcaagaagaagagaagatacctgccctacaaccagcagcacctgtacttcttcctgatcggcccccccctgctgaccctggtgaacttcgaggtggagaacctggcctacatgctggtgtgcatgcagtgggccgacctgctgtgggccgccagcttctacgccagattcttcctgagctacctgcccttctacggcgtgcccggcgtgctgctgttcttcgtggccgtgagatacggcagagagtggagaggccacacccaggccaccggcgacccccactgcagccccccccccgagctgcccttcagcagactgcagaacggcgccagcggcaccgccagcctggcctgctggtggaaccacatcaacaccagcgtggccggcgcccagggcagatgggtgtag

SEQ ID NO: 81342 - DNA, 1017 bp, synthetic construct
  misc_feature 1..1017: note = Description of Artificial Sequence: Synthetic coding sequence
  source 1..1017: mol_type = other DNA
atgttccaggccttccccggcgactacgacagcggcagcagatgcagcagcagccccagcgccgagagccagtacctgagcagcgtggacagcttcggcagcccccccaccgccgccgccagccaggagtgcgccggcctgggcgagatgcccggcagcttcgtgcccaccgtgaccgccatcaccaccagccaggacctgcagtggctggtgcagcccaccctgatcagcagcatggcccagagccagggccagcccctggccagccagccccccgtggtggacccctacgacatgcccggcaccagctacagcacccccggcatgagcggctacagcagcggcggcgccagcggcagcggcggccccagcaccagcggcaccaccagcggccccggccccgccagacccgccagagccagacccagaagacccagagaggagaccctgacccccgaggaggaggagaagagaagagtgagaagagagagaaacaagctggccgccgccaagtgcagaaacagaagaagagagctgaccgacagactgcaggccgagaccgaccagctggaggaggagaaggccgagctggagagcgagatcgccgagctgcagaaggagaaggagagactggagttcgtgctggtggcccacaagcccggctgcaagatcccctacgaggagggccccggccccggccccctggccgaggtgagagacctgcccggcagcgcccccgccaaggaggacggcttcagctggctgctgcccccccccccccccccccccctgcccttccagaccagccaggacgccccccccaacctgaccgccagcctgttcacccacagcgaggtgcaggtgctgggcgaccccttccccgtggtgaaccccagctacaccagcagcttcgtgctgacctgccccgaggtgagcgccttcgccggcgcccagagaaccagcggcagcgaccagcccagcgaccccctgaacagccccagcctgctggccctgtag

SEQ ID NO: 81343 - DNA, 909 bp, synthetic construct
  misc_feature 1..909: note = Description of Artificial Sequence: Synthetic coding sequence
  source 1..909: mol_type = other DNA
atgttccaggccttccccggcgactacgacagcggcagcagatgcagcagcagccccagcgccgagagccagtacctgagcagcgtggacagcttcggcagcccccccaccgccgccgccagccaggagtgcgccggcctgggcgagatgcccggcagcttcgtgcccaccgtgaccgccatcaccaccagccaggacctgcagtggctggtgcagcccaccctgatcagcagcatggcccagagccagggccagcccctggccagccagccccccgtggtggacccctacgacatgcccggcaccagctacagcacccccggcatgagcggctacagcagcggcggcgccagcggcagcggcggccccagcaccagcggcaccaccagcggccccggccccgccagacccgccagagccagacccagaagacccagagaggagaccgagaccgaccagctggaggaggagaaggccgagctggagagcgagatcgccgagctgcagaaggagaaggagagactggagttcgtgctggtggcccacaagcccggctgcaagatcccctacgaggagggccccggccccggccccctggccgaggtgagagacctgcccggcagcgcccccgccaaggaggacggcttcagctggctgctgcccccccccccccccccccccctgcccttccagaccagccaggacgccccccccaacctgaccgccagcctgttcacccacagcgaggtgcaggtgctgggcgaccccttccccgtggtgaaccccagctacaccagcagcttcgtgctgacctgccccgaggtgagcgccttcgccggcgcccagagaaccagcggcagcgaccagcccagcgaccccctgaacagccccagcctgctggccctgtag

SEQ ID NO: 81344 - DNA, 588 bp, synthetic construct
  misc_feature 1..588: note = Description of Artificial Sequence: Synthetic coding sequence
  source 1..588: mol_type = other DNA
atgttccaggccttccccggcgactacgacagcggcagcagatgcagcagcagccccagcgccgagagccagtacctgagcagcgtggacagcttcggcagcccccccaccgccgccgccagccaggagaccgaccagctggaggaggagaaggccgagctggagagcgagatcgccgagctgcagaaggagaaggagagactggagttcgtgctggtggcccacaagcccggctgcaagatcccctacgaggagggccccggccccggccccctggccgaggtgagagacctgcccggcagcgcccccgccaaggaggacggcttcagctggctgctgcccccccccccccccccccccctgcccttccagaccagccaggacgccccccccaacctgaccgccagcctgttcacccacagcgaggtgcaggtgctgggcgaccccttccccgtggtgaaccccagctacaccagcagcttcgtgctgacctgccccgaggtgagcgccttcgccggcgcccagagaaccagcggcagcgaccagcccagcgaccccctgaacagccccagcctgctggccctgtag

SEQ ID NO: 81345 - DNA, 876 bp, synthetic construct
  misc_feature 1..876: note = Description of Artificial Sequence: Synthetic coding sequence
  source 1..876: mol_type = other DNA
atgttccaggccttccccggcgactacgacagcggcagcagatgcagcagcagccccagcgccgagagccagtacctgagcagcgtggacagcttcggcagcccccccaccgccgccgccagccaggagtgcgccggcctgggcgagatgcccggcagcttcgtgcccaccgtgaccgccatcaccaccagccaggacctgcagtggctggtgcagcccaccctgatcagcagcatggcccagagccagggccagcccctggccagccagccccccgtggtggacccctacgacatgcccggcaccagctacagcacccccggcatgagcggctacagcagcggcggcgccagcggcagcggcggccccagcaccagcggcaccaccagcggccccggccccgccagacccgccagagccagacccagaagacccagagaggagaccctgacccccgaggaggaggagaagagaagagtgagaagagagagaaacaagctggccgccgccaagtgcagaaacagaagaagagagctgaccgacagactgcaggccgagaccgaccagctggaggaggagaaggccgagctggagagcgagatcgccgagctgcagaaggagaaggagagactggagttcgtgctggtggcccacaagcccggctgcaagatcccctacgaggagggccccggccccggccccctggccgaggaggtgcaggtgctgggcgaccccttccccgtggtgaaccccagctacaccagcagcttcgtgctgacctgccccgaggtgagcgccttcgccggcgcccagagaaccagcggcagcgaccagcccagcgaccccctgaacagccccagcctgctggccctgtag

SEQ ID NO: 81346 - DNA, 912 bp, synthetic construct
  misc_feature 1..912: note = Description of Artificial Sequence: Synthetic coding sequence
  source 1..912: mol_type = other DNA
atgagcgacaacggcgtgtgcgtgctggccttcaagtgccccggcctgctgagatacaccgcctacagatgcaagcagctgagcgacaccagcatcatcgccgtggccagccactgccccctgctgcagaaggtgcacgtgggcaaccaggacaagctgaccgacgagggcctgaagcagctgggcagcaagtgcagagagctgaaggacatccacttcggccagtgctacaagatcagcgacgagggcatgatcgtgatcgccaagggctgcctgaagctgcagagaatctacatgcaggagaacaagctggtgaccgaccagagcgtgaaggccttcgccgagcactgccccgagctgcagtacgtgggcttcatgggctgcagcgtgaccagcaagggcgtgatccacctgaccaagctgagaaacctgagcagcctggacctgagacacatcaccgagctggacaacgagaccgtgatggagatcgtgaagagatgcaagaacctgagcagcctgaacctgtgcctgaactggatcatcaacgacagatgcgtggaggtgatcgccaaggagggccagaacctgaaggagctgtacctggtgagctgcaagatcaccgactacgccctgatcgccatcggcagatacagcatgaccatcgagaccgtggacgtgggctggtgcaaggagatcaccgaccagggcgccaccctgatcgcccagagcagcaagagcctgagatacctgggcctgatgagatgcgacaaggtgaacgaggtgaccgtggagcagctggtgcagcagtacccccacatcaccttcagcaccgtgctgcaggactgcaagagaaccctggagagagcctaccagatgggctggacccccaacatgagcgccgccagcagctag

SEQ ID NO: 81347 - DNA, 945 bp, synthetic construct
  misc_feature 1..945: note = Description of Artificial Sequence: Synthetic coding sequence
  source 1..945: mol_type = other DNA
atgagcgacaacggcgtgtgcgtgctggccttcaagtgccccggcctgctgagatacaccgcctacagatgcaagcagctgagcgacaccagcatcatcgccgtggccagccactgccccctgctgcagaaggtgcacgtgggcaaccaggacaagctgaccgacgagggcctgaagcagctgggcagcaagtgcagagagctgaaggacatccacttcggccagtgctacaagatcagcgacgagggcatgatcgtgatcgccaagggctgcctgaagctgcagagaatctacatgcaggagaacaagctggtgaccgaccagagcgtgaaggccttcgccgagcactgccccgagctgcagtacgtgggcttcatgggctgcagcgtgaccagcaagggcgtgatccacctgaccaagctgagaaacctgagcagcctggacctgagacacatcaccgagctggacaacgagaccgtgatggagatcgtgaagagatgcaagaacctgagcagcctgaacctgtgcctgaactggatcatcaacgacagatgcgtggaggtgatcgccaaggagggccagaacctgaaggagctgtacctggtgagctgcaagatcaccgactacgccctgatcgccatcggcagatacagcatgaccatcgagaccgtggacgtgggctggtgcaaggagatcaccgaccagggcgccaccctgatcgcccagagcagcaagagcctgagatacctgggcctgatgagatgcgacaaggtgagagtggactaccaggtggtgtgcttcctgcacatcagcatcgtgaacagcctgatgagctaccccctgagcttcagcatcagcacccccgtgtactacatcctgtacatccacttcatctgcatctacgccatcatcgccatgcactgcctgcccgccttcgtgaactag

SEQ ID NO: 81348 - DNA, 2106 bp, synthetic construct
  misc_feature 1..2106: note = Description of Artificial Sequence: Synthetic coding sequence
  source 1..2106: mol_type = other DNA
atgggccacctgctgagcaaggagcccagaaacagacccagccagaagagacccagatgctgcagctggtgcagaagaagaagacccctgctgagactgcccagaagaacccccgccaaggtgcccccccagcccgccgcccccagaagcagagactgcttcttcagaggcccctgcatgctgtgcttcatcgtgcacagccccggcgcccccgcccccgccggccccgaggaggagccccccctgagccccccccccagagacggcgcctacgccgccgccagcagcagccagcacctggccagaagatacgccgccctggccgccgaggactgcgccgccgccgccagaagattcctgctgagcagcgccgccgccgccgccgccgccgccgccagcgccagcagccccgccagctgctgcaaggagctgggcctggccgccgccgccgcctgggagcagcagggcagaagcctgttcctggccagcctgggccccgtgagattcctgggcccccccgccgccgtgcagctgttcagaggccccacccccagccccgccgagctgcccaccccccccgagatggtgtgcaagagaaagggcgccggcgtgcccgcctgcaccccctgcaagcagcccagatgcggcggcggcggctgcggcggcggcggcggcggcggcggcggcggcggccccgccggcggcggcgccagcccccccagaccccccgacgccggctgctgccaggcccccgagcagcccccccagcccctgtgccccccccccagcagccccaccagcgagggcgcccccaccgaggccggcggcgacgccgtgagagccggcggcaccgcccccctgagcgcccagcagcagcacgagtgcggcgacgccgactgcagagagagccccgagaacccctgcgactgccacagagagcccccccccgagacccccgacatcaaccagctgccccccagcatcctgctgaagatcttcagcaacctgagcctggacgagagatgcctgagcgccagcctggtgtgcaagtactggagagacctgtgcctggacttccagttctggaagcagctggacctgagcagcagacagcaggtgaccgacgagctgctggagaagatcgccagcagaagccagaacatcatcgagatcaacatcagcgactgcagaagcatgagcgacaacggcgtgtgcgtgctggccttcaagtgccccggcctgctgagatacaccgcctacagatgcaagcagctgagcgacaccagcatcatcgccgtggccagccactgccccctgctgcagaaggtgcacgtgggcaaccaggacaagctgaccgacgagggcctgaagcagctgggcagcaagtgcagagagctgaaggacatccacttcggccagtgctacaagatcagcgacgagggcatgatcgtgatcgccaagggctgcctgaagctgcagagaatctacatgcaggagaacaagctggtgaccgaccagagcgtgaaggccttcgccgagcactgccccgagctgcagtacgtgggcttcatgggctgcagcgtgaccagcaagggcgtgatccacctgaccaagctgagaaacctgagcagcctggacctgagacacatcaccgagctggacaacgagaccgtgatggagatcgtgaagagatgcaagaacctgagcagcctgaacctgtgcctgaactggatcatcaacgacagatgcgtggaggtgatcgccaaggagggccagaacctgaaggagctgtacctggtgagctgcaagatcaccgactacgccctgatcgccatcggcagatacagcatgaccatcgagaccgtggacgtgggctggtgcaaggagatcaccgaccagggcgccaccctgatcgcccagagcagcaagagcctgagatacctgggcctgatgagatgcgacaaggtgaacgaggtgaccgtggagcagctggtgcagcagtacccccacatcaccttcagcaccgtgctgcaggactgcaagagaaccctggagagagcctaccagatgggctggacccccaacatgagcgccgccagcagctag

SEQ ID NO: 81349 - DNA, 2025 bp, synthetic construct
  misc_feature 1..2025: note = Description of Artificial Sequence: Synthetic coding sequence
  source 1..2025: mol_type = other DNA
atgagcagcagcagcagaggccccggcgccggcgccagaagaagaagaaccagatgcagaagatgcagagcctgcgtgagaaccgagtgcggcgactgccacttctgcagagacatgaagaagttcggcggccccggcagaatgaagcagagctgcctgctgagacagtgcaccgcccccgtgctgccccacaccgccgtgtgcctgctgtgcggcgaggccggcaaggaggacaccgtggagggcgaggaggagaagttcggcctgagcctgatggagtgcaccatctgcaacgagatcgtgcaccccggctgcctgaagatgggcaaggccgagggcgtgatcaacgccgagatccccaactgctgggagtgccccagatgcacccaggagggcagaaccagcaaggacagcggcgagggccccggcagaagaagagccgacaacggcgaggagggcgccagcctgggcagcggctggaagctgaccgaggagccccccctgcccccccccccccccagaagaaagggccccctgcccgccggccccccccccgaggacgtgcccggcccccccaagagaaaggagagagaggccggcaacgagccccccacccccagaaagaaggtgaagggcggcagagagagacacctgaagaaggtgggcggcgacgcctgcctgctgagaggcagcgaccccggcggccccggcctgctgccccccagagtgctgaaccccagccaggccttcagcagctgccaccccggcctgccccccgagaactgggagaagcccaagccccccctggccagcgccgagggccccgccgtgcccagccccagcccccagagagagaagctggagagattcaagagaatgtgccagctgctggagagagtgcccgacaccagcagcagcagcagcgacagcgacagcgacagcgacagcagcggcaccagcctgagcgaggacgaggcccccggcgaggccagaaacggcagaagacccgccagaggcagcagcggcgagaaggagaacagaggcggcagaagagccgtgagacccggcagcggcggccccctgctgagctggcccctgggccccgcccccccccccagacccccccagctggagagacacgtggtgagacccccccccagaagccccgagcccgacaccctgcccctggccgccggcagcgaccaccccctgcccagagccgcctggctgagagtgttccagcacctgggccccagagagctgtgcatctgcatgagagtgtgcagaacctggagcagatggtgctacgacaagagactgtggcccagaatggacctgagcagaagaaagagcctgaccccccccatgctgagcggcgtggtgagaagacagcccagagccctggacctgagctggaccggcgtgagcaagaagcagctgatgtggctgctgaacagactgcagggcctgcaggagctggtgctgagcggctgcagctggctgagcgtgagcgccctgggcagcgcccccctgcccgccctgagactgctggacctgagatggatcgaggacgtgaaggacagccagctgagagagctgctgctgcccccccccgacaccaagcccggccagaccgagagcagaggcagactgcagggcgtggccgagctgagactggccggcctggagctgaccgacgccagcctgagactgctgctgagacacgccccccagctgagcgccctggacctgagccactgcgcccacgtgggcgaccccagcgtgcacctgctgaccgcccccaccagccccctgagagagaccctggtgcacctgaacctggccggctgccacagactgaccgaccactgcctgcccctgttcagaagatgccccagactgagaagactggacctgagaagctgcagacagctgagccccgaggcctgcgccagactggccgccgccggcccccccggccccttcagatgccccgaggagaagctgctgctgaaggacagctag

SEQ ID NO: 81350 - DNA, 2085 bp, synthetic construct
  misc_feature 1..2085: note = Description of Artificial Sequence: Synthetic coding sequence
  source 1..2085: mol_type = other DNA
atgggcatgaaggtgcccggcaagggcgagagcggccccagcgccctgctgaccccccccatgagcagcagcagcagaggccccggcgccggcgccagaagaagaagaaccagatgcagaagatgcagagcctgcgtgagaaccgagtgcggcgactgccacttctgcagagacatgaagaagttcggcggccccggcagaatgaagcagagctgcctgctgagacagtgcaccgcccccgtgctgccccacaccgccgtgtgcctgctgtgcggcgaggccggcaaggaggacaccgtggagggcgaggaggagaagttcggcctgagcctgatggagtgcaccatctgcaacgagatcgtgcaccccggctgcctgaagatgggcaaggccgagggcgtgatcaacgccgagatccccaactgctgggagtgccccagatgcacccaggagggcagaaccagcaaggacagcggcgagggccccggcagaagaagagccgacaacggcgaggagggcgccagcctgggcagcggctggaagctgaccgaggagccccccctgcccccccccccccccagaagaaagggccccctgcccgccggccccccccccgaggacgtgcccggcccccccaagagaaaggagagagaggccggcaacgagccccccacccccagaaagaaggtgaagggcggcagagagagacacctgaagaaggtgggcggcgacgcctgcctgctgagaggcagcgaccccggcggccccggcctgctgccccccagagtgctgaaccccagccaggccttcagcagctgccaccccggcctgccccccgagaactgggagaagcccaagccccccctggccagcgccgagggccccgccgtgcccagccccagcccccagagagagaagctggagagattcaagagaatgtgccagctgctggagagagtgcccgacaccagcagcagcagcagcgacagcgacagcgacagcgacagcagcggcaccagcctgagcgaggacgaggcccccggcgaggccagaaacggcagaagacccgccagaggcagcagcggcgagaaggagaacagaggcggcagaagagccgtgagacccggcagcggcggccccctgctgagctggcccctgggccccgcccccccccccagacccccccagctggagagacacgtggtgagacccccccccagaagccccgagcccgacaccctgcccctggccgccggcagcgaccaccccctgcccagagccgcctggctgagagtgttccagcacctgggccccagagagctgtgcatctgcatgagagtgtgcagaacctggagcagatggtgctacgacaagagactgtggcccagaatggacctgagcagaagaaagagcctgaccccccccatgctgagcggcgtggtgagaagacagcccagagccctggacctgagctggaccggcgtgagcaagaagcagctgatgtggctgctgaacagactgcagggcctgcaggagctggtgctgagcggctgcagctggctgagcgtgagcgccctgggcagcgcccccctgcccgccctgagactgctggacctgagatggatcgaggacgtgaaggacagccagctgagagagctgctgctgcccccccccgacaccaagcccggccagaccgagagcagaggcagactgcagggcgtggccgagctgagactggccggcctggagctgaccgacgccagcctgagactgctgctgagacacgccccccagctgagcgccctggacctgagccactgcgcccacgtgggcgaccccagcgtgcacctgctgaccgcccccaccagccccctgagagagaccctggtgcacctgaacctggccggctgccacagactgaccgaccactgcctgcccctgttcagaagatgccccagactgagaagactggacctgagaagctgcagacagctgagccccgaggcctgcgccagactggccgccgccggcccccccggccccttcagatgccccgaggagaagctgctgctgaaggacagctag

SEQ ID NO: 81351 - DNA, 1761 bp, synthetic construct
  misc_feature 1..1761: note = Description of Artificial Sequence: Synthetic coding sequence
  source 1..1761: mol_type = other DNA
tgaagaatgaagcagagctgcctgctgagacagtgcaccgcccccgtgctgccccacaccgccgtgtgcctgctgtgcggcgaggccggcaaggaggacaccgtggagggcgaggaggagaagttcggcctgagcctgatggagtgcaccatctgcaacgagatcgtgcaccccggctgcctgaagatgggcaaggccgagggcgtgatcaacgccgagatccccaactgctgggagtgccccagatgcacccaggagggcagaaccagcaaggacagcggcgagggccccggcagaagaagagccgacaacggcgaggagggcgccagcctgggcagcggctggaagctgaccgaggagccccccctgcccccccccccccccagaagaaagggccccctgcccgccggccccccccccgaggacgtgcccggcccccccaagagaaaggagagagaggccggcaacgagccccccacccccagaaagaaggtgaagggcggcagagagagacacctgaagaagaagcccaagccccccctggccagcgccgagggccccgccgtgcccagccccagcccccagagagagaagctggagagattcaagagaatgtgccagctgctggagagagtgcccgacaccagcagcagcagcagcgacagcgacagcgacagcgacagcagcggcaccagcctgagcgaggacgaggcccccggcgaggccagaaacggcagaagacccgccagaggcagcagcggcgagaaggagaacagaggcggcagaagagccgtgagacccggcagcggcggccccctgctgagctggcccctgggccccgcccccccccccagacccccccagctggagagacacgtggtgagacccccccccagaagccccgagcccgacaccctgcccctggccgccggcagcgaccaccccctgcccagagccgcctggctgagagtgttccagcacctgggccccagagagctgtgcatctgcatgagagtgtgcagaacctggagcagatggtgctacgacaagagactgtggcccagaatggacctgagcagaagaaagagcctgaccccccccatgctgagcggcgtggtgagaagacagcccagagccctggacctgagctggaccggcgtgagcaagaagcagctgatgtggctgctgaacagactgcagggcctgcaggagctggtgctgagcggctgcagctggctgagcgtgagcgccctgggcagcgcccccctgcccgccctgagactgctggacctgagatggatcgaggacgtgaaggacagccagctgagagagctgctgctgcccccccccgacaccaagcccggccagaccgagagcagaggcagactgcagggcgtggccgagctgagactggccggcctggagctgaccgacgccagcctgagactgctgctgagacacgccccccagctgagcgccctggacctgagccactgcgcccacgtgggcgaccccagcgtgcacctgctgaccgcccccaccagccccctgagagagaccctggtgcacctgaacctggccggctgccacagactgaccgaccactgcctgcccctgttcagaagatgccccagactgagaagactggacctgagaagctgcagacagctgagccccgaggcctgcgccagactggccgccgccggcccccccggccccttcagatgccccgaggagaagctgctgctgaaggacagctag

SEQ ID NO: 81352 - DNA, 495 bp, synthetic construct
  misc_feature 1..495: note = Description of Artificial Sequence: Synthetic coding sequence
  source 1..495: mol_type = other DNA
atggacctggaggagtgcatcctgatcaccgacagcaccctgatccagctgagcatccactgccccaagctgcaggccctggtgagcctgagcttcagcgacatcatccacctgctgaagatgaaggagcccagccaccacaacaagaagctgttcggcttcagcttctgcaagagcctgagccactgcgagctgatcaccgacgacggcatcctgcacctgagcaacagcacctgcggccacgagagactgagagtgctggagctggacaactgcctgctgatcaccgacgtggccctggagcacctggagaactgcagaggcctggagagactggagctgtacgactgccagcaggtgaccagagccggcatcaagagaatgagagcccagctgccccacgtgaaggtgcacgcctacttcgcccccgtgaccccccccaccgccgtggccggcagcggccagagactgtgcagatgctgcgtgatcctgtag

SEQ ID NO: 81353 - DNA, 1272 bp, synthetic construct
  misc_feature 1..1272: note = Description of Artificial Sequence: Synthetic coding sequence
  source 1..1272: mol_type = other DNA
atggtgttcagcaacaacgacgagggcctgatcaacaagaagctgcccaaggagctgctgctgagaatcttcagcttcctggacatcgtgaccctgtgcagatgcgcccagatcagcaaggcctggaacatcctggccctggacggcagcaactggcagagaatcgacctgttcaacttccagaccgacgtggagggcagagtggtggagaacatcagcaagagatgcggcggcttcctgagaaagctgagcctgagaggctgcatcggcgtgggcgacagcagcctgaagaccttcgcccagaactgcagaaacatcgagcacctgaacctgaacggctgcaccaagatcaccgacagcacctgctacagcctgagcagattctgcagcaagctgaagcacctggacctgaccagctgcgtgagcatcaccaacagcagcctgaagggcatcagcgagggctgcagaaacctggagtacctgaacctgagctggtgcgaccagatcaccaaggacggcatcgaggccctggtgagaggctgcagaggcctgaaggccctgctgctgagaggctgcacccagctggaggacgaggccctgaagcacatccagaactactgccacgagctggtgagcctgaacctgcagagctgcagcagaatcaccgacgagggcgtggtgcagatctgcagaggctgccacagactgcaggccctgtgcctgagcggctgcagcaacctgaccgacgccagcctgaccgccctgggcctgaactgccccagactgcagatcctggaggccgccagatgcagccacctgaccgacgccggcttcaccctgctggccagaaactgccacgagctggagaagatggacctggaggagtgcatcctgatcaccgacagcaccctgatccagctgagcatccactgccccaagctgcaggccctgagcctgagccactgcgagctgatcaccgacgacggcatcctgcacctgagcaacagcacctgcggccacgagagactgagagtgctggagctggacaactgcctgctgatcaccgacgtggccctggagcacctggagaactgcagaggcctggagagactggagctgtacgactgccagcaggtgaccagagccggcatcaagagaatgagagcccagctgccccacgtgaaggtgcacgcctacttcgcccccgtgaccccccccaccgccgtggccggcagcggccagagactgtgcagatgctgcgtgatcctgtag

SEQ ID NO: 81354 - DNA, 1020 bp, synthetic construct
  misc_feature 1..1020: note = Description of Artificial Sequence: Synthetic coding sequence
  source 1..1020: mol_type = other DNA
atgtacatcgccctggtgtggatcctgttcgtgatgtggaccttcgcccagaactgcagaaacatcgagcacctgaacctgaacggctgcaccaagatcaccgacagcacctgctacagcctgagcagattctgcagcaagctgaagcacctggacctgaccagctgcgtgagcatcaccaacagcagcctgaagggcatcagcgagggctgcagaaacctggagtacctgaacctgagctggtgcgaccagatcaccaaggacggcatcgaggccctggtgagaggctgcagaggcctgaaggccctgctgctgagaggctgcacccagctggaggacgaggccctgaagcacatccagaactactgccacgagctggtgagcctgaacctgcagagctgcagcagaatcaccgacgagggcgtggtgcagatctgcagaggctgccacagactgcaggccctgtgcctgagcggctgcagcaacctgaccgacgccagcctgaccgccctgggcctgaactgccccagactgcagatcctggaggccgccagatgcagccacctgaccgacgccggcttcaccctgctggccagaaactgccacgagctggagaagatggacctggaggagtgcatcctgatcaccgacagcaccctgatccagctgagcatccactgccccaagctgcaggccctgagcctgagccactgcgagctgatcaccgacgacggcatcctgcacctgagcaacagcacctgcggccacgagagactgagagtgctggagctggacaactgcctgctgatcaccgacgtggccctggagcacctggagaactgcagaggcctggagagactggagctgtacgactgccagcaggtgaccagagccggcatcaagagaatgagagcccagctgccccacgtgaaggtgcacgcctacttcgcccccgtgaccccccccaccgccgtggccggcagcggccagagactgtgcagatgctgcgtgatcctgtag

SEQ ID NO: 81355 - DNA, 1068 bp, synthetic construct
  misc_feature 1..1068: note = Description of Artificial Sequence: Synthetic coding sequence
  source 1..1068: mol_type = other DNA
atggtgttcagcaacaacgacgagggcctgatcaacaagaagctgcccaaggagctgctgctgagaatcttcagcttcctggacatcgtgaccctgtgcagatgcgcccagatcagcaaggcctggaacatcctggccctggacggcagcaactggcagagaatcgacctgttcaacttccagaccgacgtggagggcagagtggtggagaacatcagcaagagatgcggcggcttcctgagaaagctgagcctgagaggctgcatcggcgtgggcgacagcagcctgaagaccttcgcccagaactgcagaaacatcgagcacctgaacctgaacggctgcaccaagatcaccgacagcacctgctacagcctgagcagattctgcagcaagctgaagcacatccagaactactgccacgagctggtgagcctgaacctgcagagctgcagcagaatcaccgacgagggcgtggtgcagatctgcagaggctgccacagactgcaggccctgtgcctgagcggctgcagcaacctgaccgacgccagcctgaccgccctgggcctgaactgccccagactgcagatcctggaggccgccagatgcagccacctgaccgacgccggcttcaccctgctggccagaaactgccacgagctggagaagatggacctggaggagtgcatcctgatcaccgacagcaccctgatccagctgagcatccactgccccaagctgcaggccctgagcctgagccactgcgagctgatcaccgacgacggcatcctgcacctgagcaacagcacctgcggccacgagagactgagagtgctggagctggacaactgcctgctgatcaccgacgtggccctggagcacctggagaactgcagaggcctggagagactggagctgtacgactgccagcaggtgaccagagccggcatcaagagaatgagagcccagctgccccacgtgaaggtgcacgcctacttcgcccccgtgaccccccccaccgccgtggccggcagcggccagagactgtgcagatgctgcgtgatcctgtag

SEQ ID NO: 81356 - DNA, 402 bp, synthetic construct
  misc_feature 1..402: note = Description of Artificial Sequence: Synthetic coding sequence
  source 1..402: mol_type = other DNA
atggacctggaggagtgcatcctgatcaccgacagcaccctgatccagctgagcatccactgccccaagctgcaggccctgagcctgagccactgcgagctgatcaccgacgacggcatcctgcacctgagcaacagcacctgcggccacgagagactgagagtgctggagctggacaactgcctgctgatcaccgacgtggccctggagcacctggagaactgcagaggcctggagagactggagctgtacgactgccagcaggtgaccagagccggcatcaagagaatgagagcccagctgccccacgtgaaggtgcacgcctacttcgcccccgtgaccccccccaccgccgtggccggcagcggccagagactgtgcagatgctgcgtgatcctgtag

SEQ ID NO: 81357 - DNA, 1068 bp, synthetic construct; identical to SEQ ID NO: 81355
  misc_feature 1..1068: note = Description of Artificial Sequence: Synthetic coding sequence
  source 1..1068: mol_type = other DNA

SEQ ID NO: 81358 - DNA, 1260 bp, synthetic construct
  misc_feature 1..1260: note = Description of Artificial Sequence: Synthetic coding sequence
  source 1..1260: mol_type = other DNA
atggtgttcagcgccgtgctgaccgccttccacaccggcaccagcaacaccaccttcgtggtgtacgagaacacctacatgaacatcaccctgcccccccccttccagcaccccgacctgagccccctgctgagatacagcttcgagaccatggcccccaccggcctgagcagcctgaccgtgaacagcaccgccgtgcccaccacccccgccgccttcaagagcctgaacctgcccctgcagatcaccctgagcgccatcatgatcttcatcctgttcgtgagcttcctgggcaacctggtggtgtgcctgatggtgtaccagaaggccgccatgagaagcgccatcaacatcctgctggccagcctggccttcgccgacatgctgctggccgtgctgaacatgcccttcgccctggtgaccatcctgaccaccagatggatcttcggcaagttcttctgcagagtgagcgccatgttcttctggctgttcgtgatcgagggcgtggccatcctgctgatcatcagcatcgacagattcctgatcatcgtgcagagacaggacaagctgaacccctacagagccaaggtgctgatcgccgtgagctgggccaccagcttctgcgtggccttccccctggccgtgggcaaccccgacctgcagatccccagcagagccccccagtgcgtgttcggctacaccaccaaccccggctaccaggcctacgtgatcctgatcagcctgatcagcttcttcatccccttcctggtgatcctgtacagcttcatgggcatcctgaacaccctgagacacaacgccctgagaatccacagctaccccgagggcatctgcctgagccaggccagcaagctgggcctgatgagcctgcagagacccttccagatgagcatcgacatgggcttcaagaccagagccttcaccaccatcctgatcctgttcgccgtgttcatcgtgtgctgggcccccttcaccacctacagcctggtggccaccttcagcaagcacttctactaccagcacaacttcttcgagatcagcacctggctgctgtggctgtgctacctgaagagcgccctgaaccccctgatctactactggagaatcaagaagttccacgacgcctgcctggacatgatgcccaagagcttcaagttcctgccccagctgcccggccacaccaagagaagaatcagacccagcgccgtgtacgtgtgcggcgagcacagaaccgtggtgtag

SEQ ID NO: 81359 - DNA, 1866 bp, synthetic construct
  misc_feature 1..1866: note = Description of Artificial Sequence: Synthetic coding sequence
  source 1..1866: mol_type = other DNA
atgagccccgtgttccccatgctgaccgtgctgaccatgttctactacatctgcctgagaagaagagccagaaccgccaccagaggcgagatgatgaacacccacagagccatcgagagcaacagccagaccagccccctgaacgccgaggtggtgcagtacgccaaggaggtggtggacttcagcagccactacggcagcgagaacagcatgagctacaccatgtggaacctggccggcgtgcccaacgtgttccccagcagcggcgacttcacccagaccgccgtgttcagaacctacggcacctggtgggaccagtgccccagcgccagcctgcccttcaagagaaccccccccaacttccagagccaggactacgtggagctgaccttcgagcagcaggtgtaccccaccgccgtgcacgtgctggagacctaccaccccggcgccgtgatcagaatcctggcctgcagcgccaacccctacagccccaacccccccgccgaggtgagatgggagatcctgtggagcgagagacccaccaaggtgaacgccagccaggccagacagttcaagccctgcatcaagcagatcaacttccccaccaacctgatcagactggaggtgaacagcagcctgctggagtactacaccgagctggacgccgtggtgctgcacggcgtgaaggacaagcccgtgctgagcctgaagaccagcctgatcgacatgaacgacatcgaggacgacgcctacgccgagaaggacggctgcggcatggacagcctgaacaagaagttcagcagcgccgtgctgggcgagggccccaacaacggctacttcgacaagctgccctacgagctgatccagctgatcctgaaccacctgaccctgcccgacctgtgcagactggcccagacctgcaagctgctgagccagcactgctgcgaccccctgcagtacatccacctgaacctgcagccctactgggccaagctggacgacaccagcctggagttcctgcagagcagatgcaccctggtgcagtggctgaacctgagctggaccggcaacagaggcttcatcagcgtggccggcttcagcagattcctgaaggtgtgcggcagcgagctggtgagactggagctgagctgcagccacttcctgaacgagacctgcctggaggtgatcagcgagatgtgccccaacctgcaggccctgaacctgagcagctgcgacaagctgcccccccaggccttcaaccacatcgccaagctgtgcagcctgaagagactggtgctgtacagaaccaaggtggagcagaccgccctgctgagcatcctgaacttctgcagcgagctgcagcacctgagcctgggcagctgcgtgatgatcgaggactacgacgtgatcgccagcatgatcggcgccaagtgcaagaagctgagaaccctggacctgtggagatgcaagaacatcaccgagaacggcatcgccgagctggccagcggctgccccctgctggaggagctggacctgggctggtgccccaccctgcagagcagcaccggctgcttcaccagactggcccaccagctgcccaacctgcagaagctgttcctgaccgccaacagaagcgtgtgcgacaccgacatcgacgagctggcctgcaactgcaccagactgcagcagctggacatcctgggcaccagaatggtgagccccgccagcctgagaaagctgctggagagctgcaaggacctgagcctgctggacgtgagcttctgcagccagatcgacaacagagccgtgctggagctgaacgccagcttccccaaggtgttcatcaagaagagcttcacccagtag

SEQ ID NO: 81360 - DNA, 2076 bp, synthetic construct
  misc_feature 1..2076: note = Description of Artificial Sequence: Synthetic coding sequence
  source 1..2076: mol_type = other DNA
atggcccccttccccgaggaggtggacgtgttcaccgccccccactggagaatgaagcagctggtgggcctgtactgcgacaagctgagcaagaccaacttcagcaacaacaacgacttcagagccctgctgcagagcctgtacgccaccttcaaggagttcaagatgcacgagcagatcgagaacgagtacatcatcggcctgctgcagcagagaagccagaccatctacaacgtgcacagcgacaacaagctgagcgagatgctgagcctgttcgagaagggcctgaagaacgtgaagaacgagtacgagcagctgaactacgccaagcagctgaaggagagactggaggccttcaccagagacttcctgccccacatgaaggaggaggaggaggtgttccagcccatgctgatggagtacttcacctacgaggagctgaaggacatcaagaagaaggtgatcgcccagcactgcagccagaaggacaccgccgagctgctgagaggcctgagcctgtggaaccacgccgaggagagacagaagttcttcaagtacagcgtggacgagaagagcgacaaggaggccgaggtgagcgagcacagcaccggcatcacccacctgccccccgaggtgatgctgagcatcttcagctacctgaacccccaggagctgtgcagatgcagccaggtgagcatgaagtggagccagctgaccaagaccggcagcctgtggaagcacctgtaccccgtgcactgggccagaggcgactggtacagcggccccgccaccgagctggacaccgagcccgacgacgagtgggtgaagaacagaaaggacgagagcagagccttccacgagtgggacgaggacgccgacatcgacgagagcgaggagagcgccgaggagagcatcgccatcagcatcgcccagatggagaagagactgctgcacggcctgatccacaacgtgctgccctacgtgggcaccagcgtgaagaccctggtgctggcctacagcagcgccgtgagcagcaagatggtgagacagatcctggagctgtgccccaacctggagcacctggacctgacccagaccgacatcagcgacagcgccttcgacagctggagctggctgggctgctgccagagcctgagacacctggacctgagcggctgcgagaagatcaccgacgtggccctggagaagatcagcagagccctgggcatcctgaccagccaccagagcggcttcctgaagaccagcaccagcaagatcaccagcaccgcctggaagaacaaggacatcaccatgcagagcaccaagcagtacgcctgcctgcacgacctgaccaacaagggcatcggcgaggagatcgacaacgagcacccctggaccaagcccgtgagcagcgagaacttcaccagcccctacgtgtggatgctggacgccgaggacctggccgacatcgaggacaccgtggagtggagacacagaaacgtggagagcctgtgcgtgatggagaccgccagcaacttcagctgcagcaccagcggctgcttcagcaaggacatcgtgggcctgagaaccagcgtgtgctggcagcagcactgcgccagccccgccttcgcctactgcggccacagcttctgctgcaccggcaccgccctgagaaccatgagcagcctgcccgagagcagcgccatgtgcagaaaggccgccagaaccagactgcccagaggcaaggacctgatctacttcggcagcgagaagagcgaccaggagaccggcagagtgctgctgttcctgagcctgagcggctgctaccagatcaccgaccacggcctgagagtgctgaccctgggcggcggcctgccctacctggagcacctgaacctgagcggctgcctgaccatcaccggcgccggcctgcaggacctggtgagcgcctgccccagcctgaacgacgagtacttctactactgcgacaacatcaacggcccccacgccgacaccgccagcggctgccagaacctgcagtgcggcttcagagcctgctgcagaagcggcgagtag

SEQ ID NO: 81361 - DNA, 1698 bp, synthetic construct
  misc_feature 1..1698: note = Description of Artificial Sequence: Synthetic coding sequence
  source 1..1698: mol_type = other DNA
atgaaggaggaggaggaggtgttccagcccatgctgatggagtacttcacctacgaggagctgaaggacatcaagaagaaggtgatcgcccagcactgcagccagaaggacaccgccgagctgctgagaggcctgagcctgtggaaccacgccgaggagagacagaagttcttcaagtacagcgtggacgagaagagcgacaaggaggccgaggtgagcgagcacagcaccggcatcacccacctgccccccgaggtgatgctgagcatcttcagctacctgaacccccaggagctgtgcagatgcagccaggtgagcatgaagtggagccagctgaccaagaccggcagcctgtggaagcacctgtaccccgtgcactgggccagaggcgactggtacagcggccccgccaccgagctggacaccgagcccgacgacgagtgggtgaagaacagaaaggacgagagcagagccttccacgagtgggacgaggacgccgacatcgacgagagcgaggagagcgccgaggagagcatcgccatcagcatcgcccagatggagaagagactgctgcacggcctgatccacaacgtgctgccctacgtgggcaccagcgtgaagaccctggtgctggcctacagcagcgccgtgagcagcaagatggtgagacagatcctggagctgtgccccaacctggagcacctggacctgacccagaccgacatcagcgacagcgccttcgacagctggagctggctgggctgctgccagagcctgagacacctggacctgagcggctgcgagaagatcaccgacgtggccctggagaagatcagcagagccctgggcatcctgaccagccaccagagcggcttcctgaagaccagcaccagcaagatcaccagcaccgcctggaagaacaaggacatcaccatgcagagcaccaagcagtacgcctgcctgcacgacctgaccaacaagggcatcggcgaggagatcgacaacgagcacccctggaccaagcccgtgagcagcgagaacttcaccagcccctacgtgtggatgctggacgccgaggacctggccgacatcgaggacaccgtggagtggagacacagaaacgtggagagcctgtgcgtgatggagaccgccagcaacttcagctgcagcaccagcggctgcttcagcaaggacatcgtgggcctgagaaccagcgtgtgctggcagcagcactgcgccagccccgccttcgcctactgcggccacagcttctgctgcaccggcaccgccctgagaaccatgagcagcctgcccgagagcagcgccatgtgcagaaaggccgccagaaccagactgcccagaggcaaggacctgatctacttcggcagcgagaagagcgaccaggagaccggcagagtgctgctgttcctgagcctgagcggctgctaccagatcaccgaccacggcctgagagtgctgaccctgggcggcggcctgccctacctggagcacctgaacctgagcggctgcctgaccatcaccggcgccggcctgcaggacctggtgagcgcctgccccagcctgaacgacgagtacttctactactgcgacaacatcaacggcccccacgccgacaccgccagcggctgccagaacctgcagtgcggcttcagagcctgctgcagaagcggcgagtag

SEQ ID NO: 81362 - DNA, 2025 bp, synthetic construct
  misc_feature 1..2025: note = Description of Artificial Sequence: Synthetic coding sequence
  source 1..2025: mol_type = other DNA
atggcccccttccccgaggaggtggacgtgttcaccgccccccactggagaatgaagcagctggtgggcctgtactgcgacaagagcctgtacgccaccttcaaggagttcaagatgcacgagcagatcgagaacgagtacatcatcggcctgctgcagcagagaagccagaccatctacaacgtgcacagcgacaacaagctgagcgagatgctgagcctgttcgagaagggcctgaagaacgtgaagaacgagtacgagcagctgaactacgccaagcagctgaaggagagactggaggccttcaccagagacttcctgccccacatgaaggaggaggaggaggtgttccagcccatgctgatggagtacttcacctacgaggagctgaaggacatcaagaagaaggtgatcgcccagcactgcagccagaaggacaccgccgagctgctgagaggcctgagcctgtggaaccacgccgaggagagacagaagttcttcaagtacagcgtggacgagaagagcgacaaggaggccgaggtgagcgagcacagcaccggcatcacccacctgccccccgaggtgatgctgagcatcttcagctacctgaacccccaggagctgtgcagatgcagccaggtgagcatgaagtggagccagctgaccaagaccggcagcctgtggaagcacctgtaccccgtgcactgggccagaggcgactggtacagcggccccgccaccgagctggacaccgagcccgacgacgagtgggtgaagaacagaaaggacgagagcagagccttccacgagtgggacgaggacgccgacatcgacgagagcgaggagagcgccgaggagagcatcgccatcagcatcgcccagatggagaagagactgctgcacggcctgatccacaacgtgctgccctacgtgggcaccagcgtgaagaccctggtgctggcctacagcagcgccgtgagcagcaagatggtgagacagatcctggagctgtgccccaacctggagcacctggacctgacccagaccgacatcagcgacagcgccttcgacagctggagctggctgggctgctgccagagcctgagacacctggacctgagcggctgcgagaagatcaccgacgtggccctggagaagatcagcagagccctgggcatcctgaccagccaccagagcggcttcctgaagaccagcaccagcaagatcaccagcaccgcctggaagaacaaggacatcaccatgcagagcaccaagcagtacgcctgcctgcacgacctgaccaacaagggcatcggcgaggagatcgacaacgagcacccctggaccaagcccgtgagcagcgagaacttcaccagcccctacgtgtggatgctggacgccgaggacctggccgacatcgaggacaccgtggagtggagacacagaaacgtggagagcctgtgcgtgatggagaccgccagcaacttcagctgcagcaccagcggctgcttcagcaaggacatcgtgggcctgagaaccagcgtgtgctggcagcagcactgcgccagccccgccttcgcctactgcggccacagcttctgctgcaccggcaccgccctgagaaccatgagcagcctgcccgagagcagcgccatgtgcagaaaggccgccagaaccagactgcccagaggcaaggacctgatctacttcggcagcgagaagagcgaccaggagaccggcagagtgctgctgttcctgagcctgagcggctgctaccagatcaccgaccacggcctgagagtgctgaccctgggcggcggcctgccctacctggagcacctgaacctgagcggctgcctgaccatcaccggcgccggcctgcaggacctggtgagcgcctgccccagcctgaacgacgagtacttctactactgcgacaacatcaacggcccccacgccgacaccgccagcggctgccagaacctgcagtgcggcttcagagcctgctgcagaagcggcgagtag

SEQ ID NO: 81363 - DNA, 1440 bp, synthetic construct
  misc_feature 1..1440: note = Description of Artificial Sequence: Synthetic coding sequence
  source 1..1440: mol_type = other DNA
ggcaagggcagcagcagcatcagcagcgacgtgagcagcagcaccgaccacacccccaccaaggcccagaagaacgtggccaccagcgaggacagcgacctgagcatgagaaccctgagcacccccagccccgccctgatctgcccccccaacctgcccggcttccagaacggcagaggcagcagcaccagcagcagcagcatcaccggcgagaccgtggccatggtgcacagccccccccccaccagactgacccaccccctgatcagactggccagcagaccccagaaggagcaggccagcatcgacagactgcccgaccacagcatggtgcagatcttcagcttcctgcccaccaaccagctgtgcagatgcgccagagtgtgcagaagatggtacaacctggcctgggaccccagactgtggagaaccatcagactgaccggcgagaccatcaacgtggacagagccctgaaggtgctgaccagaagactgtgccaggacacccccaacgtgtgcctgatgctggagaccgtgaccgtgagcggctgcagaagactgaccgacagaggcctgtacaccatcgcccagtgctgccccgagctgagaagactggaggtgagcggctgctacaacatcagcaacgaggccgtgttcgacgtggtgagcctgtgccccaacctggagcacctggacgtgagcggctgcagcaaggtgacctgcatcagcctgaccagagaggccagcatcaagctgagccccctgcacggcaagcagatcagcatcagatacctggacatgaccgactgcttcgtgctggaggacgagggcctgcacaccatcgccgcccactgcacccagctgacccacctgtacctgagaagatgcgtgagactgaccgacgagggcctgagatacctggtgatctactgcgccagcatcaaggagctgagcgtgagcgactgcagattcgtgagcgacttcggcctgagagagatcgccaagctggagagcagactgagatacctgagcatcgcccactgcggcagagtgaccgacgtgggcatcagatacgtggccaagtactgcagcaagctgagatacctgaacgccagaggctgcgagggcatcaccgaccacggcgtggagtacctggccaagaactgcaccaagctgaagagcctggacatcggcaagtgccccctggtgagcgacaccggcctggagtgcctggccctgaactgcttcaacctgaagagactgagcctgaagagctgcgagagcatcaccggccagggcctgcagatcgtggccgccaactgcttcgacctgcagaccctgaacgtgcaggactgcgaggtgagcgtggaggccctgagattcgtgaagagacactgcaagagatgcgtgatcgagcacaccaaccccgccttcttctag

SEQ ID NO: 81364 - DNA, 1476 bp, synthetic construct
  misc_feature 1..1476: note = Description of Artificial Sequence: Synthetic coding sequence
  source 1..1476: mol_type = other DNA
atgggcgccaacaacggcaagcagtacggcagcgagggcaagggcagcagcagcatcagcagcgacgtgagcagcagcaccgaccacacccccaccaaggcccagaagaacgtggccaccagcgaggacagcgacctgagcatgagaaccctgagcacccccagccccgccctgatctgcccccccaacctgcccggcttccagaacggcagaggcagcagcaccagcagcagcagcatcaccggcgagaccgtggccatggtgcacagccccccccccaccagactgacccaccccctgatcagactggccagcagaccccagaaggagcaggccagcatcgacagactgcccgaccacagcatggtgcagatcttcagcttcctgcccaccaaccagctgtgcagatgcgccagagtgtgcagaagatggtacaacctggcctgggaccccagactgtggagaaccatcagactgaccggcgagaccatcaacgtggacagagccctgaaggtgctgaccagaagactgtgccaggacacccccaacgtgtgcctgatgctggagaccgtgaccgtgagcggctgcagaagactgaccgacagaggcctgtacaccatcgcccagtgctgccccgagctgagaagactggaggtgagcggctgctacaacatcagcaacgaggccgtgttcgacgtggtgagcctgtgccccaacctggagcacctggacgtgagcggctgcagcaaggtgacctgcatcagcctgaccagagaggccagcatcaagctgagccccctgcacggcaagcagatcagcatcagatacctggacatgaccgactgcttcgtgctggaggacgagggcctgcacaccatcgccgcccactgcacccagctgacccacctgtacctgagaagatgcgtgagactgaccgacgagggcctgagatacctggtgatctactgcgccagcatcaaggagctgagcgtgagcgactgcagattcgtgagcgacttcggcctgagagagatcgccaagctggagagcagactgagatacctgagcatcgcccactgcggcagagtgaccgacgtgggcatcagatacgtggccaagtactgcagcaagctgagatacctgaacgccagaggctgcgagggcatcaccgaccacggcgtggagtacctggccaagaactgcaccaagctgaagagcctggacatcggcaagtgccccctggtgagcgacaccggcctggagtgcctggccctgaactgcttcaacctgaagagactgagcctgaagagctgcgagagcatcaccggccagggcctgcagatcgtggccgccaactgcttcgacctgcagaccctgaacgtgcaggactgcgaggtgagcgtggaggccctgagattcgtgaagagacactgcaagagatgcgtgatcgagcacaccaaccccgccttcttctag

SEQ ID NO: 81365 - DNA, 3000 bp, synthetic construct
  misc_feature 1..3000: note = Description of Artificial Sequence: Synthetic coding sequence
  source 1..3000: mol_type = other DNA
atggagaacctggagagcagactgaagaacgccccctacttcagatgcgagaagggcaccgacagcatccccctgtgcagaaagtgcgagacctgcgtgctggcctggaagatcttcagcaccaaggagtggttctgcagaatcaacgacatcagccagagaagattcctggtgggcatcctgaagcagctgaacagcctgtacctgctgcactacttccagaacatcctgcagaccacccagggcaaggacttcatctacaacagaagcagaatcaacctgagcaagaaggagggcaaggtggtgaagagcagcctgaaccagatgctggacaagaccgtggagcagaagatgaaggagatcctgtactggttcgccaacagcacccagtggaccaaggccaactacaccctgctgctgctgcagatgtgcaaccccaagctgctgctgaccgccgccaacgtgatcagagtgctgttcctgagagaggagaacaacatcagcggcctgaaccaggacatcaccgacgtgtgcttcagccccgagaaggaccacagcagcaagagcgccaccagccaggtgtactggaccgccaagacccagcacaccagcctgcccctgagcaaggcccccgagaacgagcacctgctgggcgccgccagcaaccccgaggagccctggagaaacagcctgagatgcatcagcgagatgaacagactgttcagcggcaagggcgacatcaccaagcccggctacgacccctgcaacctgctggtggacctggacgacatcagagacctgagcagcggcttcagcaagtacagagacttcatcagatacctgcccatccacctgagcaagtacatcctgagaatgctggacagacacaccctgaacaagtgcgccagcgtgagccagcactgggccgccatggcccagcaggtgaagatggacctgagcgcccacggcttcatccagaaccagatcaccttcctgcagggcagctacaccagaggcatcgaccccaactacgccaacaaggtgagcatccccgtgcccaagatggtggacgacggcaagagcatgagagtgaagcaccccaagtggaagctgagaaccaagaacgagtacaacctgtggaccgcctaccagaacgaggagacccagcaggtgctgatcgaggagagaaacgtgttctgcggcacctacaacgtgagaatcctgagcgacacctgggaccagaacagagtgatccactacagcggcggcgacctgatcgccgtgagcagcaacagaaagatccacctgctggacatcatccaggtgaaggccatccccgtggagttcagaggccacgccggcagcgtgagagccctgttcctgtgcgaggaggagaacttcctgctgagcggcagctacgacctgagcatcagatactgggacctgaagagcggcgtgtgcaccagaatcttcggcggccaccagggcaccatcacctgcatggacctgtgcaagaacagactggtgagcggcggcagagactgccaggtgaaggtgtgggacgtggacaccggcaagtgcctgaagaccttcagacacaaggaccccatcctggccaccagaatcaacgacacctacatcgtgagcagctgcgagagaggcctggtgaaggtgtggcacatcgccatggcccagctggtgaagaccctgagcggccacgagggcgccgtgaagtgcctgttcttcgaccagtggcacctgctgagcggcagcaccgacggcctggtgatggcctggagcatggtgggcaagtacgagagatgcctgatggccttcaagcaccccaagatggtggtgaacaccgagagcaacgtgctgatgttccagttcgagcacatcaagtggcagtacgccgtggagaagaccaagcagaagaagaacaaggagaaggaggaggagaaggaggagaacagcctgatggagatcctgagcaagtgcaacatccaggtgcacagccccagagagagcgtgagcagcaagcagaccgtgatccaggagctgctgcccggcaagccccccaagagcagagtgctgctgaagcccgccaagttcagcagcgccgtgctgatcgaggagctgcagagccagggcaagagcaagagccccagaagagacgccgacgacgtggagaaggcccagaagcagggccagctggagacccccggcaagctgcccagccaccccaagaagaagagctggaagatccccatgagccccgaccagttcctgctgaccgtgagcgccctgcagcacgcccacaacagcggcgagttcgcctacccctgcagaccccagaccgagatcaccgacgtgtggggccccagcatcagctaccccagaaaggtgctgaacttcaagggcaagagcatccagagagccgtggacagactgagactgagcaacccccccatcgacgtgaagagaaccagcatccccctggagatccagaagctgcagcccaacctgaagatcagcctgcacagccccagagtgcagagcaccatcccccagcccatgatcatcagaagcagattcagcggcagcctgaagggcggcgaccaggtgaccagcagcatcgagagagccgtgtgcagcaccggccccctgaccagcatgcaggtgatcaagcccaacagaatgctggccccccaggtgggcaccgccaccctgagcctgaagaaggagagacccagaatctacaccgccctggaccccttcagagtgaacaccgagttcgtgctgctgaccgtgaaggaggagaaggagcaccaggaggccaagatgaaggagtaccaggccagagagagcaccggcgtggtggaccccggcaaggtgagcaaggccgcctggatcagaaagatcaagggcctgcccatcgacaacttcaccaagcagggcaagaccgccgcccccgagctgggccagaacgtgttcatctag

SEQ ID NO: 81366 - DNA, 3186 bp, synthetic construct
  misc_feature 1..3186: note = Description of Artificial Sequence: Synthetic coding sequence
  source 1..3186: mol_type = other DNA
atggagaacctggagagcagactgaagaacgccccctacttcagatgcgagaagggcaccgacagcatccccctgtgcagaaagtgcgagacctgcgtgctggcctggaagatcttcagcaccaaggagtggttctgcagaatcaacgacatcagccagagaagattcctggtgggcatcctgaagcagctgaacagcctgtacctgctgcactacttccagaacatcctgcagaccacccagggcaaggacttcatctacaacagaagcagaatcaacctgagcaagaaggagggcaaggtggtgaagagcagcctgaaccagatgctggacaagaccgtggagcagaagatgaaggagatcctgtactggttcgccaacagcacccagtggaccaaggccaactacaccctgctgctgctgcagatgtgcaaccccaagctgctgctgaccgccgccaacgtgatcagagtgctgttcctgagagaggagaacaacatcagcggcctgaaccaggacatcaccgacgtgtgcttcagccccgagaaggaccacagcagcaagagcgccaccagccaggtgtactggaccgccaagacccagcacaccagcctgcccctgagcaaggcccccgagaacgagcacctgctgggcgccgccagcaaccccgaggagccctggagaaacagcctgagatgcatcagcgagatgaacagactgttcagcggcaagggcgacatcaccaagcccggctacgacccctgcaacctgctggtggacctggacgacatcagagacctgagcagcggcttcagcaagtacagagacttcatcagatacctgcccatccacctgagcaagtacatcctgagcatgctgggctgcatgagaggcttccccagacacctgcccagctggcccagcagcggcgtgagcggcagcatcttcttcttccccggcatgctggacagacacaccctgaacaagtgcgccagcgtgagccagcactgggccgccatggcccagcaggtgaagatggacctgagcgcccacggcttcatccagaaccagatcaccttcctgcagggcagctacaccagaggcatcgaccccaactacgccaacaaggtgagcatccccgtgcccaagatggtggacgacggcaagagcatgagagtgaagcaccccaagtggaagctgagaaccaagaacgagtacaacctgtggaccgcctaccagaacgaggagacccagcaggtgctgatcgaggagagaaacgtgttctgcggcacctacaacgtgagaatcctgagcgacacctgggaccagaacagagtgatccactacagcggcggcgacctgatcgccgtgagcagcaacagaaagatccacctgctggacatcatccaggtgaaggccatccccgtggagttcagaggccacgccggcagcgtgagagccctgttcctgtgcgaggaggagaacttcctgctgagcggcagctacgacctgagcatcagatactgggacctgaagagcggcgtgtgcaccagaatcttcggcggccaccagggcaccatcacctgcatggacctgtgcaagaacagactggtgagcggcggcagagactgccaggtgaaggtgtgggacgtggacaccggcaagtgcctgaagaccttcagacacaaggaccccatcctggccaccagaatcaacgacacctacatcgtgagcagctgcgagagaggcctggtgaaggtgtggcacatcgccatggcccagctggtgaagaccctgagcggccacgagggcgccgtgaagtgcctgttcttcgaccagtggcacctgctgagcggcagcaccgacggcctggtgatggcctggagcatggtgggcaagtacgagagatgcctgatggccttcaagcaccccaaggaggtgctggacgtgagcctgctgttcctgagagtgatcagcgcctgcgccgacggcaagatcagaatctacaacttcctgaacggcaactgcatgaaggtgctgaaggccaacggcagaggcgaccccgtgctgagcttcttcatccagggcaacagaatggtggtgaacaccgagagcaacgtgctgatgttccagttcgagcacatcaagtggcagtacgccgtggagaagaccaagcagaagaagaacaaggagaaggaggaggagaaggaggagaacagcctgatggagatcctgagcaagtgcaacatccaggtgcacagccccagagagagcgtgagcagcaagcagaccgtgatccaggagctgctgcccggcaagccccccaagagcagagtgctgctgaagcccgccaagttcagcagcgacgacgtggagaaggcccagaagcagggccagctggagacccccggcaagctgcccagccaccccaagaagaagagctggaagatccccatgagccccgaccagttcctgctgaccgtgagcgccctgcagcacgcccacaacagcggcgagttcgcctacccctgcagaccccagaccgagatcaccgacgtgtggggccccagcatcagctaccccagaaaggtgctgaacttcaagggcaagagcatccagagagccgtggacagactgagactgagcaacccccccatcgacgtgaagagaaccagcatccccctggagatccagaagctgcagcccaacctgaagatcagcctgcacagccccagagtgcagagcaccatcccccagcccatgatcatcagaagcagattcagcggcagcctgaagggcggcgaccaggtgaccagcagcatcgagagagccgtgtgcagcaccggccccctgaccagcatgcaggtgatcaagcccaacagaatgctggccccccaggtgggcaccgccaccctgagcctgaagaaggagagacccagaatctacaccgccctggaccccttcagagtgaacaccgagttcgtgctgctgaccgtgaaggaggagaaggagcaccaggaggccaagatgaaggagtaccaggccagagagagcaccggcgtggtggaccccggcaaggtgagcaaggccgcctggatcagaaagatcaagggcctgcccatcgacaacttcaccaagcagggcaagaccgccgcccccgagctgggccagaacgtgttcatctag

SEQ ID NO: 81367 - DNA, 3159 bp, synthetic construct
  misc_feature 1..3159: note = Description of Artificial Sequence: Synthetic coding sequence
  source 1..3159: mol_type = other DNA
atggagaacctggagagcagactgaagaacgccccctacttcagatgcgagaagggcaccgacagcatccccctgtgcagaaagtgcgagacctgcgtgctggcctggaagatcttcagcaccaaggagtggttctgcagaatcaacgacatcagccagagaagattcctggtgggcatcctgaagcagctgaacagcctgtacctgctgcactacttccagaacatcctgcagaccacccagggcaaggacttcatctacaacagaagcagaatcaacctgagcaagaaggagggcaaggtggtgaagagcagcctgaaccagatgctggacaagaccgtggagcagaagatgaaggagatcctgtactggttcgccaacagcacccagtggaccaaggccaactacaccctgctgctgctgcagatgtgcaaccccaagctgctgctgaccgccgccaacgtgatcagagtgctgttcctgagagaggagaacaacatcagcggcctgaaccaggacatcaccgacgtgtgcttcagccccgagaaggaccacagcagcaagagcgccaccagccaggtgtactggaccgccaagacccagcacaccagcctgcccctgagcaaggcccccgagaacgagcacctgctgggcgccgccagcaaccccgaggagccctggagaaacagcctgagatgcatcagcgagatgaacagactgttcagcggcaagggcgacatcaccaagcccggctacgacccctgcaacctgctggtggacctggacgacatcagagacctgagcagcggcttcagcaagtacagagacttcatcagatacctgcccatccacctgagcaagtacatcctgagaatgctggacagacacaccctgaacaagtgcgccagcgtgagccagcactgggccgccatggcccagcaggtgaagatggacctgagcgcccacggcttcatccagaaccagatcaccttcctgcagggcagctacaccagaggcatcgaccccaactacgccaacaaggtgagcatccccgtgcccaagatggtggacgacggcaagagcatgagagtgaagcaccccaagtggaagctgagaaccaagaacgagtacaacctgtggaccgcctaccagaacgaggagacccagcaggtgctgatcgaggagagaaacgtgttctgcggcacctacaacgtgagaatcctgagcgacacctgggaccagaacagagtgatccactacagcggcggcgacctgatcgccgtgagcagcaacagaaagatccacctgctggacatcatccaggtgaaggccatccccgtggagttcagaggccacgccggcagcgtgagagccctgttcctgtgcgaggaggagaacttcctgctgagcggcagctacgacctgagcatcagatactgggacctgaagagcggcgtgtgcaccagaatcttcggcggccaccagggcaccatcacctgcatggacctgtgcaagaacagactggtgagcggcggcagagactgccaggtgaaggtgtgggacgtggacaccggcaagtgcctgaagaccttcagacacaaggaccccatcctggccaccagaatcaacgacacctacatcgtgagcagctgcgagagaggcctggtgaaggtgtggcacatcgccatggcccagctggtgaagaccctgagcggccacgagggcgccgtgaagtgcctgttcttcgaccagtggcacctgctgagcggcagcaccgacggcctggtgatggcctggagcatggtgggcaagtacgagagatgcctgatggccttcaagcaccccaaggaggtgctggacgtgagcctgctgttcctgagagtgatcagcgcctgcgccgacggcaagatcagaatctacaacttcctgaacggcaactgcatgaaggtgctgaaggccaacggcagaggcgaccccgtgctgagcttcttcatccagggcaacagaatggtggtgaacaccgagagcaacgtgctgatgttccagttcgagcacatcaagtggcagtacgccgtggagaagaccaagcagaagaagaacaaggagaaggaggaggagaaggaggagaacagcctgatggagatcctgagcaagtgcaacatccaggtgcacagccccagagagagcgtgagcagcaagcagaccgtgatccaggagctgctgcccggcaagccccccaagagcagagtgctgctgaagcccgccaagttcagcagcgccgtgctgatcgaggagctgcagagccagggcaagagcaagagccccagaagagacgccgacgacgtggagaaggcccagaagcagggccagctggagacccccggcaagctgcccagccaccccaagaagaagagctggaagatccccatgagccccgaccagttcctgctgaccgtgagcgccctgcagcacgcccacaacagcggcgagttcgcctacccctgcagaccccagaccgagatcaccgacgtgtggggccccagcatcagctaccccagaaaggtgctgaacttcaagggcaagagcatccagagagccgtggacagactgagactgagcaacccccccatcgacgtgaagagaaccagcatccccctggagatccagaagctgcagcccaacctgaagatcagcctgcacagccccagagtgcagagcaccatcccccagcccatgatcatcagaagcagattcagcggcagcctgaagggcggcgaccaggtgaccagcagcatcgagagagccgtgtgcagcaccggccccctgaccagcatgcaggtgatcaagcccaacagaatgctggccccccaggtgggcaccgccaccctgagcctgaagaaggagagacccagaatctacaccgccctggaccccttcagagtgaacaccgagttcgtgctgctgaccgtgaaggaggagaaggagcaccaggaggccaagatgaaggagtaccaggccagagagagcaccggcgtggtggaccccggcaaggtgagcaaggccgcctggatcagaaagatcaagggcctgcccatcgacaacttcaccaagcagggcaagaccgccgcccccgagctgggccagaacgtgttcatctag

SEQ ID NO: 81368 - DNA, 3156 bp, synthetic construct
  misc_feature 1..3156: note = Description of Artificial Sequence: Synthetic coding sequence
  source 1..3156: mol_type = other DNA
atggagaacctggagagcagactgaagaacgccccctacttcagatgcgagaagggcaccgacagcatccccctgtgcagaaagtgcgagacctgcgtgctggcctggaagatcttcagcaccaaggagtggttctgcagaatcaacgacatcagccagagaagattcctggtgggcatcctgaagcagctgaacagcctgtacctgctgcactacttccagaacatcctgcagaccacccagggcaaggacttcatctacaacagaagcagaatcaacctgagcaagaaggagggcaaggtggtgaagagcagcctgaaccagatgctggacaagaccgtggagcagaagatgaaggagatcctgtactggttcgccaacagcacccagtggaccaaggccaactacaccctgctgctgctgcagatgtgcaaccccaagctgctgctgaccgccgccaacgtgatcagagtgctgttcctgagagaggagaacaacatcagcggcctgaaccaggacatcaccgacgtgtgcttcagccccgagaaggaccacagcagcaagagcgccaccagccaggtgtactggaccgccaagacccagcacaccagcctgcccctgagcaaggcccccgagaacgagcacctgctgggcgccgccagcaaccccgaggagccctggagaaacagcctgagatgcatcagcgagatgaacagactgttcagcggcaagggcgacatcaccaagcccggctacgacccctgcaacctgctggtggacctggacgacatcagagacctgagcagcggcttcagcaagtacagagacttcatcagatacctgcccatccacctgagcaagtacatcctgagaatgctggacagacacaccctgaacaagtgcgccagcgtgagccagcactgggccgccatggcccagcaggtgaagatggacctgagcgcccacggcttcatccagaaccagatcaccttcctgcagggcagctacaccagaggcatcgaccccaactacgccaacaaggtgagcatccccgtgcccaagatggtggacgacggcaagagcatgagagtgaagcaccccaagtggaagctgagaaccaagaacgagtacaacctgtggaccgcctaccagaacgaggagacccagcaggtgctgatcgaggagagaaacgtgttctgcggcacctacaacgtgagaatcctgagcgacacctgggaccagaacagagtgatccactacagcggcggcgacctgatcgccgtgagcagcaacagaaagatccacctgctggacatcatccaggtgaaggccatccccgtggagttcagaggccacgccggcagcgtgagagccctgttcctgtgcgaggaggagaacttcctgctgagcggcagctacgacctgagcatcagatactgggacctgaagagcggcgtgtgcaccagaatcttcggcggccaccagggcaccatcacctgcatggacctgtgcaagaacagactggtgagcggcggcagagactgccaggtgaaggtgtgggacgtggacaccggcaagtgcctgaagaccttcagacacaaggaccccatcctggccaccagaatcaacgacacctacatcgtgagcagctgcgagagaggcctggtgaaggtgtggcacatcgccatggcccagctggtgaagaccctgagcggccacgagggcgccgtgaagtgcctgttcttcgaccagtggcacctgctgagcggcagcaccgacggcctggtgatggcctggagcatggtgggcaagtacgagagatgcctgatggccttcaagcaccccaaggaggtgctggacgtgagcctgctgttcctgagagtgatcagcgcctgcgccgacggcaagatcagaatctacaacttcctgaacggcaactgcatgaaggtgctgaaggccaacggcagaggcgaccccgtgctgagcttcttcatccagggcaacagaatggtggtgaacaccgagagcaacgtgctgatgttccagttcgagcacatcaagtggcagtacgccgtggagaagaccaagcagaagaagaacaaggagaaggaggaggagaaggaggagaacagcctgatggagatcctgagcaagtgcaacatccaggtgcacagccccagagagagcgtgagcagcaagcagaccgtgatccaggagctgctgcccggcaagccccccaagagcagagtgctgctgaagcccgccaagttcagcagcgccgtgctgatcgaggagctgcagagccagggcaagagcaagagccccagaagagacgacgacgtggagaaggcccagaagcagggccagctggagacccccggcaagctgcccagccaccccaagaagaagagctggaagatccccatgagccccgaccagttcctgctgaccgtgagcgccctgcagcacgcccacaacagcggcgagttcgcctacccctgcagaccccagaccgagatcaccgacgtgtggggccccagcatcagctaccccagaaaggtgctgaacttcaagggcaagagcatccagagagccgtggacagactgagactgagcaacccccccatcgacgtgaagagaaccagcatccccctggagatccagaagctgcagcccaacctgaagatcagcctgcacagccccagagtgcagagcaccatcccccagcccatgatcatcagaagcagattcagcggcagcctgaagggcggcgaccaggtgaccagcagcatcgagagagccgtgtgcagcaccggccccctgaccagcatgcaggtgatcaagcccaacagaatgctggccccccaggtgggcaccgccaccctgagcctgaagaaggagagacccagaatctacaccgccctggaccccttcagagtgaacaccgagttcgtgctgctgaccgtgaaggaggagaaggagcaccaggaggccaagatgaaggagtaccaggccagagagagcaccggcgtggtggaccccggcaaggtgagcaaggccgcctggatcagaaagatcaagggcctgcccatcgacaacttcaccaagcagggcaagaccgccgcccccgagctgggccagaacgtgttcatctag

SEQ ID NO: 81369 - DNA, 1629 bp, synthetic construct
  misc_feature 1..1629: note = Description of Artificial Sequence: Synthetic coding sequence
  source 1..1629: mol_type = other DNA
atggagcccgacagcgtgatcgaggacaagaccatcgagctgatgtgcagcgtgcccagaagcctgtggctgggctgcgccaacctggtggagagcatgtgcgccctgagctgcctgcagagcatgcccagcgtgagatgcctgcagatcagcaacggcaccagcagcgtgatcgtgagcagaaagagacccagcgagggcaactaccagaaggagaaggacctgtgcatcaagtacttcgaccagtggagcgagagcgaccaggtggagttcgtggagcacctgatcagcagaatgtgccactaccagcacggccacatcaacagctacctgaagcccatgctgcagagagacttcatcaccgccctgcccgagcagggcctggaccacatcgccgagaacatcctgagctacctggacgccagaagcctgtgcgccgccgagctggtgtgcaaggagtggcagagagtgatcagcgagggcatgctgtggaagaagctgatcgagagaatggtgagaaccgaccccctgtggaagggcctgagcgagagaagaggctgggaccagtacctgttcaagaacagacccaccgacggcccccccaacagcttctacagaagcctgtaccccaagatcatccaggacatcgagaccatcgagagcaactggagatgcggcagacacaacctgcagagaatccagtgcagaagcgagaacagcaagggcgtgtactgcctgcagtacgacgacgagaagatcatcagcggcctgagagacaacagcatcaagatctgggacaagaccagcctggagtgcctgaaggtgctgaccggccacaccggcagcgtgctgtgcctgcagtacgacgagagagtgatcgtgaccggcagcagcgacagcaccgtgagagtgtgggacgtgaacaccggcgaggtgctgaacaccctgatccaccacaacgaggccgtgctgcacctgagattcagcaacggcctgatggtgacctgcagcaaggacagaagcatcgccgtgtgggacatggccagcgccaccgacatcaccctgagaagagtgctggtgggccacagagccgccgtgaacgtggtggacttcgacgacaagtacatcgtgagcgccagcggcgacagaaccatcaaggtgtggagcaccagcacctgcgagttcgtgagaaccctgaacggccacaagagaggcatcgcctgcctgcagtacagagacagactggtggtgagcggcagcagcgacaacaccatcagactgtgggacatcgagtgcggcgcctgcctgagagtgctggagggccacgaggagctggtgagatgcatcagattcgacaacaagagaatcgtgagcggcgcctacgacggcaagatcaaggtgtgggacctgcaggccgccctggaccccagagcccccgccagcaccctgtgcctgagaaccctggtggagcacagcggcagagtgttcagactgcagttcgacgagttccagatcatcagcagcagccacgacgacaccatcctgatctgggacttcctgaacgtgccccccagcgcccagaacgagaccagaagccccagcagaacctacacctacatcagcagatag

SEQ ID NO: 81370 - DNA, 1590 bp, synthetic construct
  misc_feature 1..1590: note = Description of Artificial Sequence: Synthetic coding sequence
  source 1..1590: mol_type = other DNA
atggagcccgacagcgtgatcgaggacaagaccatcgagctgatgaacaccagcgtgatggaggaccagaacgaggacgagagccccaagaagaacaccctgtggcagatcagcaacggcaccagcagcgtgatcgtgagcagaaagagacccagcgagggcaactaccagaaggagaaggacctgtgcatcaagtacttcgaccagtggagcgagagcgaccaggtggagttcgtggagcacctgatcagcagaatgtgccactaccagcacggccacatcaacagctacctgaagcccatgctgcagagagacttcatcaccgccctgcccgagcagggcctggaccacatcgccgagaacatcctgagctacctggacgccagaagcctgtgcgccgccgagctggtgtgcaaggagtggcagagagtgatcagcgagggcatgctgtggaagaagctgatcgagagaatggtgagaaccgaccccctgtggaagggcctgagcgagagaagaggctgggaccagtacctgttcaagaacagacccaccgacggcccccccaacagcttctacagaagcctgtaccccaagatcatccaggacatcgagaccatcgagagcaactggagatgcggcagacacaacctgcagagaatccagtgcagaagcgagaacagcaagggcgtgtactgcctgcagtacgacgacgagaagatcatcagcggcctgagagacaacagcatcaagatctgggacaagaccagcctggagtgcctgaaggtgctgaccggccacaccggcagcgtgctgtgcctgcagtacgacgagagagtgatcgtgaccggcagcagcgacagcaccgtgagagtgtgggacgtgaacaccggcgaggtgctgaacaccctgatccaccacaacgaggccgtgctgcacctgagattcagcaacggcctgatggtgacctgcagcaaggacagaagcatcgccgtgtgggacatggccagcgccaccgacatcaccctgagaagagtgctggtgggccacagagccgccgtgaacgtggtggacttcgacgacaagtacatcgtgagcgccagcggcgacagaaccatcaaggtgtggagcaccagcacctgcgagttcgtgagaaccctgaacggccacaagagaggcatcgcctgcctgcagtacagagacagactggtggtgagcggcagcagcgacaacaccatcagactgtgggacatcgagtgcggcgcctgcctgagagtgctggagggccacgaggagctggtgagatgcatcagattcgacaacaagagaatcgtgagcggcgcctacgacggcaagatcaaggtgtgggacctgcaggccgccctggaccccagagcccccgccagcaccctgtgcctgagaaccctggtggagcacagcggcagagtgttcagactgcagttcgacgagttccagatcatcagcagcagccacgacgacaccatcctgatctgggacttcctgaacgtgccccccagcgcccagaacgagaccagaagccccagcagaacctacacctacatcagcagatag

SEQ ID NO: 81371 - DNA, 1527 bp, synthetic construct
  misc_feature 1..1527: note = Description of Artificial Sequence: Synthetic coding sequence
  source 1..1527: mol_type = other DNA
atggagcccgacagcgtgatcgaggacaagaccatcgagctgatgatcagcaacggcaccagcagcgtgatcgtgagcagaaagagacccagcgagggcaactaccagaaggagaaggacctgtgcatcaagtacttcgaccagtggagcgagagcgaccaggtggagttcgtggagcacctgatcagcagaatgtgccactaccagcacggccacatcaacagctacctgaagcccatgctgcagagagacttcatcaccgccctgcccgagcagggcctggaccacatcgccgagaacatcctgagctacctggacgccagaagcctgtgcgccgccgagctggtgtgcaaggagtggcagagagtgatcagcgagggcatgctgtggaagaagctgatcgagagaatggtgagaaccgaccccctgtggaagggcctgagcgagagaagaggctgggaccagtacctgttcaagaacagacccaccgacggcccccccaacagcttctacagaagcctgtaccccaagatcatccaggacatcgagaccatcgagagcaactggagatgcggcagacacaacctgcagagaatccagtgcagaagcgagaacagcaagggcgtgtactgcctgcagtacgacgacgagaagatcatcagcggcctgagagacaacagcatcaagatctgggacaagaccagcctggagtgcctgaaggtgctgaccggccacaccggcagcgtgctgtgcctgcagtacgacgagagagtgatcgtgaccggcagcagcgacagcaccgtgagagtgtgggacgtgaacaccggcgaggtgctgaacaccctgatccaccacaacgaggccgtgctgcacctgagattcagcaacggcctgatggtgacctgcagcaaggacagaagcatcgccgtgtgggacatggccagcgccaccgacatcaccctgagaagagtgctggtgggccacagagccgccgtgaacgtggtggacttcgacgacaagtacatcgtgagcgccagcggcgacagaaccatcaaggtgtggagcaccagcacctgcgagttcgtgagaaccctgaacggccacaagagaggcatcgcctgcctgcagtacagagacagactggtggtgagcggcagcagcgacaacaccatcagactgtgggacatcgagtgcggcgcctgcctgagagtgctggagggccacgaggagctggtgagatgcatcagattcgacaacaagagaatcgtgagcggcgcctacgacggcaagatcaaggtgtgggacctgcaggccgccctggaccccagagcccccgccagcaccctgtgcctgagaaccctggtggagcacagcggcagagtgttcagactgcagttcgacgagttccagatcatcagcagcagccacgacgacaccatcctgatctgggacttcctgaacgtgccccccagcgcccagaacgagaccagaagccccagcagaacctacacctacatcagcagatag

SEQ ID NO: 81372 - DNA, 1533 bp, synthetic construct
  misc_feature 1..1533: note = Description of Artificial Sequence: Synthetic coding sequence
  source 1..1533: mol_type = other DNA
atggaggaccagaacgaggacgagagccccaagaagaacaccctgtggcagatcagcaacggcaccagcagcgtgatcgtgagcagaaagagacccagcgagggcaactaccagaaggagaaggacctgtgcatcaagtacttcgaccagtggagcgagagcgaccaggtggagttcgtggagcacctgatcagcagaatgtgccactaccagcacggccacatcaacagctacctgaagcccatgctgcagagagacttcatcaccgccctgcccgagcagggcctggaccacatcgccgagaacatcctgagctacctggacgccagaagcctgtgcgccgccgagctggtgtgcaaggagtggcagagagtgatcagcgagggcatgctgtggaagaagctgatcgagagaatggtgagaaccgaccccctgtggaagggcctgagcgagagaagaggctgggaccagtacctgttcaagaacagacccaccgacggcccccccaacagcttctacagaagcctgtaccccaagatcatccaggacatcgagaccatcgagagcaactggagatgcggcagacacaacctgcagagaatccagtgcagaagcgagaacagcaagggcgtgtactgcctgcagtacgacgacgagaagatcatcagcggcctgagagacaacagcatcaagatctgggacaagaccagcctggagtgcctgaaggtgctgaccggccacaccggcagcgtgctgtgcctgcagtacgacgagagagtgatcgtgaccggcagcagcgacagcaccgtgagagtgtgggacgtgaacaccggcgaggtgctgaacaccctgatccaccacaacgaggccgtgctgcacctgagattcagcaacggcctgatggtgacctgcagcaaggacagaagcatcgccgtgtgggacatggccagcgccaccgacatcaccctgagaagagtgctggtgggccacagagccgccgtgaacgtggtggacttcgacgacaagtacatcgtgagcgccagcggcgacagaaccatcaaggtgtggagcaccagcacctgcgagttcgtgagaaccctgaacggccacaagagaggcatcgcctgcctgcagtacagagacagactggtggtgagcggcagcagcgacaacaccatcagactgtgggacatcgagtgcggcgcctgcctgagagtgctggagggccacgaggagctggtgagatgcatcagattcgacaacaagagaatcgtgagcggcgcctacgacggcaagatcaaggtgtgggacctgcaggccgccctggaccccagagcccccgccagcaccctgtgcctgagaaccctggtggagcacagcggcagagtgttcagactgcagttcgacgagttccagatcatcagcagcagccacgacgacaccatcctgatctgggacttcctgaacgtgccccccagcgcccagaacgagaccagaagccccagcagaacctacacctacatcagcagatag

SEQ ID NO: 81373 - DNA, 1395 bp, synthetic construct
  misc_feature 1..1395: note = Description of Artificial Sequence: Synthetic coding sequence
  source 1..1395: mol_type = other DNA
atggagatcagactgcccgacctggccctgaagagaatcttcagcttcctggacctgttcggcctgctgcaggtgagccaggtgaacaagcactggaacagaatcgccgacagcgactacctgtggagaagcctgagcctgcagagatgggactgcagcaacttcaccaaccagcacctgggcacccacacctggaagcagttcttcctgcaccagagaagaaaggagctgagactggccctggcccagccccacaacttcatctacaaggtgaccaagaacatcgccttcgagaccgagctggcctacctgagcggcaacagactgaccgtggacgagcaggagaagagcatcatctgcagcgtgagccccaagcaggagctgtgcgcctgggacgtgcaggagggcaccatgatctggagcagccccgtgcaggagttccacttcagcaacctggtgaccctgccccagatgcacctggccatcaccatggacagaaagaagaccatcaaggtgtggaactgccaggacagagacgccctggccgtgctgcccatgccccagccctgctactgcatggaggcctacctgaccaaggacggccccttcctgatggtgggcgacgccgccggcgacatctacaccttcaccctgcccggcctgagagacgtgagcaaggtgaccgccttccagtacggcatcgtgctgctgcactgcagccccgacaagaagtgggtgttcgcctgcggcacctacagcagaaccctgccccaggtgttcctgaccgagagcctgctgagacccagcgagggcagcgtgcccctgagcaccttcctgccccacaagctgtgcgccagcgcctgctggacccccaaggtgaagaacagaatcaccctgatgagccagagcagcaccggcaagaagaccgagttcatcaccttcgacctgaccaccaagaagaccggcggccagaccgtgatccaggcctacgagatcgccagcttccaggtggccgcccacctgaagtgccccatctggatgggcgccagcgacggctacatgatcgtgttcaccagcggcccctacctgctgctgttcagcatcaccggcttcctgctgcagagattcgaggaccaccaggccgccatcaacaacttctgggtggacccctgctacgtgctgaccaccagcgagaacagcgtgcacgtgtacatgtgggaggagggcggcagacacccctacctgagaagctgctgccacctggagaacacctggcacgaccacaccaccgacagctgcatcagcagcgtgatgtgcgacaacgccagcatcgtgctgagagtgagaaaggtgagcgacagcagcatcctggtgatgtacagcctgaacacctag

SEQ ID NO: 81374 - DNA, 1092 bp, synthetic construct
  misc_feature 1..1092: note = Description of Artificial Sequence: Synthetic coding sequence
  source 1..1092: mol_type = other DNA
atgctggccctgagagacgagccccacagccccgacagcagaagccaggccttcgagaccgagctggcctacctgagcggcaacagactgaccgtggacgagcaggagaagagcatcatctgcagcgtgagccccaagcaggagctgtgcgcctgggacgtgcaggagatgcacctggccatcaccatggacagaaagaagaccatcaaggtgtggaactgccaggacagagacgccctggccgtgctgcccatgccccagccctgctactgcatggaggcctacctgaccaaggacggccccttcctgatggtgggcgacgccgccggcgacatctacaccttcaccctgcccggcctgagagacgtgagcaaggtgaccgccttccagtacggcatcgtgctgctgcactgcagccccgacaagaagtgggtgttcgcctgcggcacctacagcagaaccctgccccaggtgttcctgaccgagagcctgctgagacccagcgagggcagcgtgcccctgagcaccttcctgccccacaagctgtgcgccagcgcctgctggacccccaaggtgaagaacagaatcaccctgatgagccagagcagcaccggcaagaagaccgagttcatcaccttcgacctgaccaccaagaagaccggcggccagaccgtgatccaggcctacgagatcgccagcttccaggtggccgcccacctgaagtgccccatctggatgggcgccagcgacggctacatgatcgtgttcaccagcggcccctacctgctgctgttcagcatcaccggcttcctgctgcagagattcgaggaccaccaggccgccatcaacaacttctgggtggacccctgctacgtgctgaccaccagcgagaacagcgtgcacgtgtacatgtgggaggagggcggcagacacccctacctgagaagctgctgccacctggagaacacctggcacgaccacaccaccgacagctgcatcagcagcgtgatgtgcgacaacgccagcatcgtgctgagagtgagaaaggtgagcgacagcagcatcctggtgatgtacagcctgaacacctag

SEQ ID NO: 81375 - DNA, 1185 bp, synthetic construct
  misc_feature 1..1185: note = Description of Artificial Sequence: Synthetic coding sequence
  source 1..1185: mol_type = other DNA
atggagatcagactgcccgacctggccctgaagagaatcttcagcttcctggacctgttcggcctgctgcaggtgagccaggtgaacaagcactggaacagaatcgccgacagcgactacctgtggagaagcctgagcctgcagagatgggactgcagcaacttcaccaaccagcacctgggcacccacacctggaagcagttcttcctgcaccagagaagaaaggagctgagactggccctggcccagccccacaacttcatctacaaggtgaccaagaacatcgccttcgagaccgagctggcctacctgagcggcaacagactgaccgtggacgagcaggagaagagcatcatctgcagcgtgagccccaagcaggagctgtgcgcctgggacgtgcaggaggtgggcgacgccgccggcgacatctacaccttcaccctgcccggcctgagagacgtgagcaaggtgaccgccttccagtacggcatcgtgctgctgcactgcagccccgacaagaagtgggtgttcgcctgcggcacctacagcagaaccctgccccaggtgttcctgaccgagagcctgctgagacccagcgagggcagcgtgcccctgagcaccttcctgccccacaagctgtgcgccagcgcctgctggacccccaaggtgaagaacagaatcaccctgatgagccagagcagcaccggcaagaagaccgagttcatcaccttcgacctgaccaccaagaagaccggcggccagaccgtgatccaggcctacgagatcgccagcttccaggtggccgcccacctgaagtgccccatctggatgggcgccagcgacggctacatgatcgtgttcaccagcggcccctacctgctgctgttcagcatcaccggcttcctgctgcagagattcgaggaccaccaggccgccatcaacaacttctgggtggacccctgctacgtgctgaccaccagcgagaacagcgtgcacgtgtacatgtgggaggagggcggcagacacccctacctgagaagctgctgccacctggagaacacctggcacgaccacaccaccgacagctgcatcagcagcgtgatgtgcgacaacgccagcatcgtgctgagagtgagaaaggtgagcgacagcagcatcctggtgatgtacagcctgaacacctag

SEQ ID NO: 81376 - DNA, 1338 bp, synthetic construct
  misc_feature 1..1338: note = Description of Artificial Sequence: Synthetic coding sequence
  source 1..1338: mol_type = other DNA
atgagccccacccaccagatccaggaccccaagcactggaacagaatcgccgacagcgactacctgtggagaagcctgagcctgcagagatgggactgcagcaacttcaccaaccagcacctgggcacccacacctggaagcagttcttcctgcaccagagaagaaaggagctgagactggccctggcccagccccacaacttcatctacaaggtgaccaagaacatcgccttcgagaccgagctggcctacctgagcggcaacagactgaccgtggacgagcaggagaagagcatcatctgcagcgtgagccccaagcaggagctgtgcgcctgggacgtgcaggagggcaccatgatctggagcagccccgtgcaggagttccacttcagcaacctggtgaccctgccccagatgcacctggccatcaccatggacagaaagaagaccatcaaggtgtggaactgccaggacagagacgccctggccgtgctgcccatgccccagccctgctactgcatggaggcctacctgaccaaggacggccccttcctgatggtgggcgacgccgccggcgacatctacaccttcaccctgcccggcctgagagacgtgagcaaggtgaccgccttccagtacggcatcgtgctgctgcactgcagccccgacaagaagtgggtgttcgcctgcggcacctacagcagaaccctgccccaggtgttcctgaccgagagcctgctgagacccagcgagggcagcgtgcccctgagcaccttcctgccccacaagctgtgcgccagcgcctgctggacccccaaggtgaagaacagaatcaccctgatgagccagagcagcaccggcaagaagaccgagttcatcaccttcgacctgaccaccaagaagaccggcggccagaccgtgatccaggcctacgagatcgccagcttccaggtggccgcccacctgaagtgccccatctggatgggcgccagcgacggctacatgatcgtgttcaccagcggcccctacctgctgctgttcagcatcaccggcttcctgctgcagagattcgaggaccaccaggccgccatcaacaacttctgggtggacccctgctacgtgctgaccaccagcgagaacagcgtgcacgtgtacatgtgggaggagggcggcagacacccctacctgagaagctgctgccacctggagaacacctggcacgaccacaccaccgacagctgcatcagcagcgtgatgtgcgacaacgccagcatcgtgctgagagtgagaaaggtgagcgacagcagcatcctggtgatgtacagcctgaacacctag

SEQ ID NO: 81377 - DNA, 1239 bp, synthetic construct
  misc_feature 1..1239: note = Description of Artificial Sequence: Synthetic coding sequence
  source 1..1239: mol_type = other DNA
atggccgccgccgccggcgaggaggaggaggaggaggaggccgccagagagagcgccgccagacccgccgccggccccgccctgtggagactgcccgaggagctgctgctgctgatctgcagctacctggacatgagagccctgggcagactggcccaggtgtgcagatggctgagaagattcaccagctgcgacctgctgtggagaagaatcgccagagccagcctgaacagcggcttcaccagactgggcaccgacctgatgaccagcgtgcccgtgaaggagagagtgaaggtgagccagaactggagactgggcagatgcagagagggcatcctgctgaagtggagatgcagacagatgccctggatgcagctggaggacgacagcctgtacatcagccaggccaacttcatcctggcctaccagttcagacccgacggcgccagcctgaacagaagacccctgggcgtgttcgccggccacgacgaggacgtgtgccacttcgtgctggccaacagccacatcgtgagcgccggcggcgacggcaagatcggcatccacaagatccacagcaccttcaccgtgaagtacagcgcccacgagcaggaggtgaactgcgtggactgcaagggcggcatcatcgtgagcggcagcagagacagaaccgccaaggtgtggcccctggccagcggcagactgggccagtgcctgcacaccatccagaccgaggacagagtgtggagcatcgccatcagccccctgctgagcagcttcgtgaccggcaccgcctgctgcggccacttcagccccctgagaatctgggacctgaacagcggccagctgatgacccacctgggcagcgacttcccccccggcgccggcgtgctggacgtgatgtacgagagccccttcaccctgctgagctgcggctacgacacctacgtgagatactgggacctgagaaccagcgtgagaaagtgcgtgatggagtgggaggagccccacgacagcaccctgtactgcctgcagaccgacggcaaccacctgctggccaccggcagcagctactacggcgtggtgagactgtgggacagaagacagagagcctgcctgcacgccttccccctgaccagcacccccctgagcagccccgtgtactgcctgagactgaccaccaagcacctgtacgccgccctgagctacaacctgcacgtgctggacttccagaacccctag

SEQ ID NO: 81378 - DNA, 1239 bp, synthetic construct
  misc_feature 1..1239: note = Description of Artificial Sequence: Synthetic coding sequence
  source 1..1239: mol_type = other DNA
atggccgccgccgccggcgaggaggaggaggaggaggaggccgccagagagagcgccgccagacccgccgccggccccgccctgtggagactgcccgaggagctgctgctgctgatctgcagctacctggacatgagagccctgggcagactggcccaggtgtgcagatggctgagaagattcaccagctgcgacctgctgtggagaagaatcgccagagccagcctgaacagcggcttcaccagactgggcaccgacctgatgaccagcgtgcccgtgaaggagagagtgaaggtgagccagaactggagactgggcagatgcagagagggcatcctgctgaagtggagatgcagccagatgccctggatgcagctggaggacgacagcctgtacatcagccaggccaacttcatcctggcctaccagttcagacccgacggcgccagcctgaacagaagacccctgggcgtgttcgccggccacgacgaggacgtgtgccacttcgtgctggccaacagccacatcgtgagcgccggcggcgacggcaagatcggcatccacaagatccacagcaccttcaccgtgaagtacagcgcccacgagcaggaggtgaactgcgtggactgcaagggcggcatcatcgtgagcggcagcagagacagaaccgccaaggtgtggcccctggccagcggcagactgggccagtgcctgcacaccatccagaccgaggacagagtgtggagcatcgccatcagccccctgctgagcagcttcgtgaccggcaccgcctgctgcggccacttcagccccctgagaatctgggacctgaacagcggccagctgatgacccacctgggcagcgacttcccccccggcgccggcgtgctggacgtgatgtacgagagccccttcaccctgctgagctgcggctacgacacctacgtgagatactgggacctgagaaccagcgtgagaaagtgcgtgatggagtgggaggagccccacgacagcaccctgtactgcctgcagaccgacggcaaccacctgctggccaccggcagcagctactacggcgtggtgagactgtgggacagaagacagagagcctgcctgcacgccttccccctgaccagcacccccctgagcagccccgtgtactgcctgagactgaccaccaagcacctgtacgccgccctgagctacaacctgcacgtgctggacttccagaacccctag

SEQ ID NO: 81379 - DNA, 639 bp, synthetic construct
  misc_feature 1..639: note = Description of Artificial Sequence: Synthetic coding sequence
  source 1..639: mol_type = other DNA
atgagagccctgggcagactggcccaggtgtgcagatggctgagaagattcaccagctgcgacctgctgtggagaagaatcgccagagccagcctgaacagcggcttcaccagactgggcaccgacctgatgaccagcgtgcccgtgaaggagagagtgaaggtgagccagaactggagactgggcagatgcagagagggcatcctgctgaagtggagatgcagacagatgccctggatgcagctggaggacgacagcctgtacatcagccaggccaacttcatcctggcctaccagttcagacccgacggcgccagcctgaacagaagacccctgggcgtgttcgccggccacgacgaggacgtgtgccacttcgtgctggccaacagccacatcgtgagcgccggcggcgacggcaagatcggcatccacaagatccacagcaccttcaccgtgaagtacagcgcccacgagcaggaggtgaactgcgtggactgcaagggcggcatcatcgtgagcggcagcagagacagaaccgccaaggtgtggcccctggccagcggcagactgggccagtgcctgcacaccatccagaccgaggacagagtgtggagcatcgccatcagccccctgctgtag

SEQ ID NO: 81380 - DNA, 576 bp, synthetic construct
  misc_feature 1..576: note = Description of Artificial Sequence: Synthetic coding sequence
  source 1..576: mol_type = other DNA
atgaccagcgtgcccgtgaaggagagagtgaaggtgagccagaactggagactgggcagatgcagagagggcatcctgctgaagtggagatgcagacagatgccctggatgcagctggaggacgacagcctgtacatcagccaggccaacttcatcctggcctaccagttcagacccgacggcgccagcctgaacagaagacccctgggcgtgttcgccggccacgacgaggacgtgtgccacttcgtgctggccaacagccacatcgtgagcgccggcggcgacggcaagatcggcatccacaagatccacagcaccttcaccgtgaagtacagcgcccacgagcaggaggtgaactgcgtggactgcaagggcggcatcatcgtgagcggcagcagagacagaaccgccaaggtgtggcccctggccagcggcagactgggccagtgcctgcacaccatccagaccgaggacagagtgtggagcatcgccatcagccccctgctgagcagcttcgtgaccggcaccgcctgctgcggccacttcagccccctgagaatctgggacctgaactag

SEQ ID NO: 81381 - DNA, 1884 bp, synthetic construct
  misc_feature 1..1884: note = Description of Artificial Sequence: Synthetic coding sequence
  source 1..1884: mol_type = other DNA
atgtgcgtgcccagaagcggcctgatcctgagctgcatctgcctgtactgcggcgtgctgctgcccgtgctgctgcccaacctgcccttcctgacctgcctgagcatgagcaccctggagagcgtgacctacctgcccgagaagggcctgtactgccagagactgcccagcagcagaacccacggcggcaccgagagcctgaagggcaagaacaccgagaacatgggcttctacggcaccctgaagatgatcttctacaagatgaagagaaagctggaccacggcagcgaggtgagaagcttcagcctgggcaagaagccctgcaaggtgagcgagtacaccagcaccaccggcctggtgccctgcagcgccacccccaccaccttcggcgacctgagagccgccaacggccagggccagcagagaagaagaatcaccagcgtgcagccccccaccggcctgcaggagtggctgaagatgttccagagctggagcggccccgagaagctgctggccctggacgagctgatcgacagctgcgagcccacccaggtgaagcacatgatgcaggtgatcgagccccagttccagagagacttcatcagcctgctgcccaaggagctggccctgtacgtgctgagcttcctggagcccaaggacctgctgcaggccgcccagacctgcagatactggagaatcctggccgaggacaacctgctgtggagagagaagtgcaaggaggagggcatcgacgagcccctgcacatcaagagaagaaaggtgatcaagcccggcttcatccacagcccctggaagagcgcctacatcagacagcacagaatcgacaccaactggagaagaggcgagctgaagagccccaaggtgctgaagggccacgacgaccacgtgatcacctgcctgcagttctgcggcaacagaatcgtgagcggcagcgacgacaacaccctgaaggtgtggagcgccgtgaccggcaagtgcctgagaaccctggtgggccacaccggcggcgtgtggagcagccagatgagagacaacatcatcatcagcggcagcaccgacagaaccctgaaggtgtggaacgccgagaccggcgagtgcatccacaccctgtacggccacaccagcaccgtgagatgcatgcacctgcacgagaagagagtggtgagcggcagcagagacgccaccctgagagtgtgggacatcgagaccggccagtgcctgcacgtgctgatgggccacgtggccgccgtgagatgcgtgcagtacgacggcagaagagtggtgagcggcgcctacgacttcatggtgaaggtgtgggaccccgagaccgagacctgcctgcacaccctgcagggccacaccaacagagtgtacagcctgcagttcgacggcatccacgtggtgagcggcagcctggacaccagcatcagagtgtgggacgtggagaccggcaactgcatccacaccctgaccggccaccagagcctgaccagcggcatggagctgaaggacaacatcctggtgagcggcaacgccgacagcaccgtgaagatctgggacatcaagaccggccagtgcctgcagaccctgcagggccccaacaagcaccagagcgccgtgacctgcctgcagttcaacaagaacttcgtgatcaccagcagcgacgacggcaccgtgaagctgtgggacctgaagaccggcgagttcatcagaaacctggtgaccctggagagcggcggcagcggcggcgtggtgtggagaatcagagccagcaacaccaagctggtgtgcgccgtgggcagcagaaacggcaccgaggagaccaagctgctggtgctggacttcgacgtggacatgaagtag

SEQ ID NO: 81382 - DNA, 2124 bp, synthetic construct
  misc_feature 1..2124: note = Description of Artificial Sequence: Synthetic coding sequence
  source 1..2124: mol_type = other DNA
atgaaccaggagctgctgagcgtgggcagcaagagaagaagaaccggcggcagcctgagaggcaaccccagcagcagccaggtggacgaggagcagatgaacagagtggtggaggaggagcagcagcagcagctgagacagcaggaggaggagcacaccgccagaaacggcgaggtggtgggcgtggagcccagacccggcggccagaacgacagccagcagggccagctggaggagaacaacaacagattcatcagcgtggacgaggacagcagcggcaaccaggaggagcaggaggaggacgaggagcacgccggcgagcaggacgaggaggacgaggaggaggaggagatggaccaggagagcgacgacttcgaccagagcgacgacagcagcagagaggacgagcacacccacaccaacagcgtgaccaacagcagcagcatcgtggacctgcccgtgcaccagctgagcagccccttctacaccaagaccaccaagatgaagagaaagctggaccacggcagcgaggtgagaagcttcagcctgggcaagaagccctgcaaggtgagcgagtacaccagcaccaccggcctggtgccctgcagcgccacccccaccaccttcggcgacctgagagccgccaacggccagggccagcagagaagaagaatcaccagcgtgcagccccccaccggcctgcaggagtggctgaagatgttccagagctggagcggccccgagaagctgctggccctggacgagctgatcgacagctgcgagcccacccaggtgaagcacatgatgcaggtgatcgagccccagttccagagagacttcatcagcctgctgcccaaggagctggccctgtacgtgctgagcttcctggagcccaaggacctgctgcaggccgcccagacctgcagatactggagaatcctggccgaggacaacctgctgtggagagagaagtgcaaggaggagggcatcgacgagcccctgcacatcaagagaagaaaggtgatcaagcccggcttcatccacagcccctggaagagcgcctacatcagacagcacagaatcgacaccaactggagaagaggcgagctgaagagccccaaggtgctgaagggccacgacgaccacgtgatcacctgcctgcagttctgcggcaacagaatcgtgagcggcagcgacgacaacaccctgaaggtgtggagcgccgtgaccggcaagtgcctgagaaccctggtgggccacaccggcggcgtgtggagcagccagatgagagacaacatcatcatcagcggcagcaccgacagaaccctgaaggtgtggaacgccgagaccggcgagtgcatccacaccctgtacggccacaccagcaccgtgagatgcatgcacctgcacgagaagagagtggtgagcggcagcagagacgccaccctgagagtgtgggacatcgagaccggccagtgcctgcacgtgctgatgggccacgtggccgccgtgagatgcgtgcagtacgacggcagaagagtggtgagcggcgcctacgacttcatggtgaaggtgtgggaccccgagaccgagacctgcctgcacaccctgcagggccacaccaacagagtgtacagcctgcagttcgacggcatccacgtggtgagcggcagcctggacaccagcatcagagtgtgggacgtggagaccggcaactgcatccacaccctgaccggccaccagagcctgaccagcggcatggagctgaaggacaacatcctggtgagcggcaacgccgacagcaccgtgaagatctgggacatcaagaccggccagtgcctgcagaccctgcagggccccaacaagcaccagagcgccgtgacctgcctgcagttcaacaagaacttcgtgatcaccagcagcgacgacggcaccgtgaagctgtgggacctgaagaccggcgagttcatcagaaacctggtgaccctggagagcggcggcagcggcggcgtggtgtggagaatcagagccagcaacaccaagctggtgtgcgccgtgggcagcagaaacggcaccgaggagaccaagctgctggtgctggacttcgacgtggacatgaagtag

SEQ ID NO: 81383 - DNA, 1770 bp, synthetic construct
  misc_feature 1..1770: note = Description of Artificial Sequence: Synthetic coding sequence
  source 1..1770: mol_type = other DNA
atgagcaagcccggcaagcccaccctgaaccacggcctggtgcccgtggacctgaagagcgccaaggagcccctgccccaccagaccgtgatgaagatcttcagcatcagcatcatcgcccagggcctgcccttctgcagaagaagaatgaagagaaagctggaccacggcagcgaggtgagaagcttcagcctgggcaagaagccctgcaaggtgagcgagtacaccagcaccaccggcctggtgccctgcagcgccacccccaccaccttcggcgacctgagagccgccaacggccagggccagcagagaagaagaatcaccagcgtgcagccccccaccggcctgcaggagtggctgaagatgttccagagctggagcggccccgagaagctgctggccctggacgagctgatcgacagctgcgagcccacccaggtgaagcacatgatgcaggtgatcgagccccagttccagagagacttcatcagcctgctgcccaaggagctggccctgtacgtgctgagcttcctggagcccaaggacctgctgcaggccgcccagacctgcagatactggagaatcctggccgaggacaacctgctgtggagagagaagtgcaaggaggagggcatcgacgagcccctgcacatcaagagaagaaaggtgatcaagcccggcttcatccacagcccctggaagagcgcctacatcagacagcacagaatcgacaccaactggagaagaggcgagctgaagagccccaaggtgctgaagggccacgacgaccacgtgatcacctgcctgcagttctgcggcaacagaatcgtgagcggcagcgacgacaacaccctgaaggtgtggagcgccgtgaccggcaagtgcctgagaaccctggtgggccacaccggcggcgtgtggagcagccagatgagagacaacatcatcatcagcggcagcaccgacagaaccctgaaggtgtggaacgccgagaccggcgagtgcatccacaccctgtacggccacaccagcaccgtgagatgcatgcacctgcacgagaagagagtggtgagcggcagcagagacgccaccctgagagtgtgggacatcgagaccggccagtgcctgcacgtgctgatgggccacgtggccgccgtgagatgcgtgcagtacgacggcagaagagtggtgagcggcgcctacgacttcatggtgaaggtgtgggaccccgagaccgagacctgcctgcacaccctgcagggccacaccaacagagtgtacagcctgcagttcgacggcatccacgtggtgagcggcagcctggacaccagcatcagagtgtgggacgtggagaccggcaactgcatccacaccctgaccggccaccagagcctgaccagcggcatggagctgaaggacaacatcctggtgagcggcaacgccgacagcaccgtgaagatctgggacatcaagaccggccagtgcctgcagaccctgcagggccccaacaagcaccagagcgccgtgacctgcctgcagttcaacaagaacttcgtgatcaccagcagcgacgacggcaccgtgaagctgtgggacctgaagaccggcgagttcatcagaaacctggtgaccctggagagcggcggcagcggcggcgtggtgtggagaatcagagccagcaacaccaagctggtgtgcgccgtgggcagcagaaacggcaccgaggagaccaagctgctggtgctggacttcgacgtggacatgaagtag

SEQ ID NO: 81384 - DNA, 1596 bp, synthetic construct
  misc_feature 1..1596: note = Description of Artificial Sequence: Synthetic coding sequence
  source 1..1596: mol_type = other DNA
atgctgttcttcaagtgcatcagcctgctgctgatctggctgatccccggccagagcaccaccggcctggtgccctgcagcgccacccccaccaccttcggcgacctgagagccgccaacggccagggccagcagagaagaagaatcaccagcgtgcagccccccaccggcctgcaggagtggctgaagatgttccagagctggagcggccccgagaagctgctggccctggacgagctgatcgacagctgcgagcccacccaggtgaagcacatgatgcaggtgatcgagccccagttccagagagacttcatcagcctgctgcccaaggagctggccctgtacgtgctgagcttcctggagcccaaggacctgctgcaggccgcccagacctgcagatactggagaatcctggccgaggacaacctgctgtggagagagaagtgcaaggaggagggcatcgacgagcccctgcacatcaagagaagaaaggtgatcaagcccggcttcatccacagcccctggaagagcgcctacatcagacagcacagaatcgacaccaactggagaagaggcgagctgaagagccccaaggtgctgaagggccacgacgaccacgtgatcacctgcctgcagttctgcggcaacagaatcgtgagcggcagcgacgacaacaccctgaaggtgtggagcgccgtgaccggcaagtgcctgagaaccctggtgggccacaccggcggcgtgtggagcagccagatgagagacaacatcatcatcagcggcagcaccgacagaaccctgaaggtgtggaacgccgagaccggcgagtgcatccacaccctgtacggccacaccagcaccgtgagatgcatgcacctgcacgagaagagagtggtgagcggcagcagagacgccaccctgagagtgtgggacatcgagaccggccagtgcctgcacgtgctgatgggccacgtggccgccgtgagatgcgtgcagtacgacggcagaagagtggtgagcggcgcctacgacttcatggtgaaggtgtgggaccccgagaccgagacctgcctgcacaccctgcagggccacaccaacagagtgtacagcctgcagttcgacggcatccacgtggtgagcggcagcctggacaccagcatcagagtgtgggacgtggagaccggcaactgcatccacaccctgaccggccaccagagcctgaccagcggcatggagctgaaggacaacatcctggtgagcggcaacgccgacagcaccgtgaagatctgggacatcaagaccggccagtgcctgcagaccctgcagggccccaacaagcaccagagcgccgtgacctgcctgcagttcaacaagaacttcgtgatcaccagcagcgacgacggcaccgtgaagctgtgggacctgaagaccggcgagttcatcagaaacctggtgaccctggagagcggcggcagcggcggcgtggtgtggagaatcagagccagcaacaccaagctggtgtgcgccgtgggcagcagaaacggcaccgaggagaccaagctgctggtgctggacttcgacgtggacatgaagtag

SEQ ID NO: 81385 - DNA, 1797 bp, synthetic construct
  misc_feature 1..1797: note = Description of Artificial Sequence: Synthetic coding sequence
  source 1..1797: mol_type = other DNA
atggacgactacagcctggacgagttcagaagaagatggcaggaggagctggcccaggcccaggcccccaagaagagaagaagacccgaggccgccgagagaagagccagaagacccgaggtgggcagcggcagaggcgagcaggccagcggcgaccccgccctggcccagagactgctggagggcgccggcagaccccccgccgccagagccaccagagccgagggccaggacgtggccagcagaagcagaagccccctggccagagagggcgccggcggcggcgagcagctggtggaccagctgatcagagacctgaacgagatgaacgacgtgcccttcttcgacatccagctgccctacgagctggccatcaacatcttccagtacctggacagaaaggagctgggcagatgcgcccaggtgagcaagacctggaaggtgatcgccgaggacgaggtgctgtggtacagactgtgccagcaggagggccacctgcccgacagcagcatcagcgactacagctgctggaagctgatcttccaggagtgcagagccaaggagcacatgctgagaaccaactggaagaacagaaagggcgccgtgagcgagctggagcacgtgcccgacaccgtgctgtgcgacgtgcacagccacgacggcgtggtgatcgccggctacaccagcggcgacgtgagagtgtgggacaccagaacctgggactacgtggcccccttcctggagagcgaggacgaggaggacgagcccggcatgcagcccaacgtgagcttcgtgagaatcaacagcagcctggccgtggccgcctacgaggacggcttcctgaacatctgggacctgagaaccggcaagtaccccgtgcacagattcgagcacgacgccagaatccaggccctggccctgagccaggacgacgccaccgtggccaccgccagcgccttcgacgtggtgatgctgagccccaacgaggagggctactggcagatcgccgccgagttcgaggtgcccaagctggtgcagtacctggagatcgtgcccgagaccagaagataccccgtggccgtggccgccgccggcgacctgatgtacctgctgaaggccgaggacagcgccagaaccctgctgtacgcccacggcccccccgtgacctgcctggacgtgagcgccaaccaggtggccttcggcgtgcagggcctgggctgggtgtacgagggcagcaagatcctggtgtacagcctggaggccggcagaagactgctgaagctgggcaacgtgctgagagacttcacctgcgtgaacctgagcgacagcccccccaacctgatggtgagcggcaacatggacggcagagtgagaatccacgacctgagaagcggcaacatcgccctgagcctgagcgcccaccagctgagagtgagcgccgtgcagatggacgactggaagatcgtgagcggcggcgaggagggcctggtgagcgtgtgggactacagaatgaaccagaagctgtgggaggtgtacagcggccaccccgtgcagcacatcagcttcagcagccacagcctgatcaccgccaacgtgccctaccagaccgtgatgagaaacgccgacctggacagcttcaccacccacagaagacacagaggcctgatcagagcctacgagttcgccgtggaccagctggccttccagagccccctgcccgtgtgcagaagcagctgcgacgccatggccacccactactacgacctggccctggccttcccctacaaccacgtgtag

SEQ ID NO: 81386 - DNA, 1599 bp, synthetic construct
  misc_feature 1..1599: note = Description of Artificial Sequence: Synthetic coding sequence
  source 1..1599: mol_type = other DNA
atggacgactacagcctggacgagttcagaagaagatggcaggaggagctggcccaggcccaggcccccaagaagagaagaagacccgaggccgccgagagaagagccagaagacccgagaacgagatgaacgacgtgcccttcttcgacatccagctgccctacgagctggccatcaacatcttccagtacctggacagaaaggagctgggcagatgcgcccaggtgagcaagacctggaaggtgatcgccgaggacgaggtgctgtggtacagactgtgccagcaggagggccacctgcccgacagcagcatcagcgactacagctgctggaagctgatcttccaggagtgcagagccaaggagcacatgctgagaaccaactggaagaacagaaagggcgccgtgagcgagctggagcacgtgcccgacaccgtgctgtgcgacgtgcacagccacgacggcgtggtgatcgccggctacaccagcggcgacgtgagagtgtgggacaccagaacctgggactacgtggcccccttcctggagagcgaggacgaggaggacgagcccggcatgcagcccaacgtgagcttcgtgagaatcaacagcagcctggccgtggccgcctacgaggacggcttcctgaacatctgggacctgagaaccggcaagtaccccgtgcacagattcgagcacgacgccagaatccaggccctggccctgagccaggacgacgccaccgtggccaccgccagcgccttcgacgtggtgatgctgagccccaacgaggagggctactggcagatcgccgccgagttcgaggtgcccaagctggtgcagtacctggagatcgtgcccgagaccagaagataccccgtggccgtggccgccgccggcgacctgatgtacctgctgaaggccgaggacagcgccagaaccctgctgtacgcccacggcccccccgtgacctgcctggacgtgagcgccaaccaggtggccttcggcgtgcagggcctgggctgggtgtacgagggcagcaagatcctggtgtacagcctggaggccggcagaagactgctgaagctgggcaacgtgctgagagacttcacctgcgtgaacctgagcgacagcccccccaacctgatggtgagcggcaacatggacggcagagtgagaatccacgacctgagaagcggcaacatcgccctgagcctgagcgcccaccagctgagagtgagcgccgtgcagatggacgactggaagatcgtgagcggcggcgaggagggcctggtgagcgtgtgggactacagaatgaaccagaagctgtgggaggtgtacagcggccaccccgtgcagcacatcagcttcagcagccacagcctgatcaccgccaacgtgccctaccagaccgtgatgagaaacgccgacctggacagcttcaccacccacagaagacacagaggcctgatcagagcctacgagttcgccgtggaccagctggccttccagagccccctgcccgtgtgcagaagcagctgcgacgccatggccacccactactacgacctggccctggccttcccctacaaccacgtgtag

SEQ ID NO: 81387 - DNA, 1599 bp, synthetic construct; identical to SEQ ID NO: 81386
  misc_feature 1..1599: note = Description of Artificial Sequence: Synthetic coding sequence
  source 1..1599: mol_type = other DNA

SEQ ID NO: 81388 - DNA, 2871 bp, synthetic construct
  misc_feature 1..2871: note = Description of Artificial Sequence: Synthetic coding sequence
  source 1..2871: mol_type = other DNA
atggaggccggcggcctgcccctggagctgtggagaatgatcctggcctacctgcacctgcccgacctgggcagatgcagcctggtgtgcagagcctggtacgagctgatcctgagcctggacagcaccagatggagacagctgtgcctgggctgcaccgagtgcagacaccccaactggcccaaccagcccgacgtggagcccgagagctggagagaggccttcaagcagcactacctggccagcaagacctggaccaagaacgccctggacctggagagcagcatctgcttcagcctgttcagaagaagaagagagagaagaaccctgagcgtgggccccggcagagagttcgacagcctgggcagcgccctggccatggccagcctgtacgacagaatcgtgctgttccccggcgtgtacgaggagcagggcgagatcatcctgaaggtgcccgtggagatcgtgggccagggcaagctgggcgaggtggccctgctggccagcatcgaccagcactgcagcaccaccagactgtgcaacctggtgttcacccccgcctggttcagccccatcatgtacaagaccaccagcggccacgtgcagttcgacaactgcaacttcgagaacggccacatccaggtgcacggccccggcacctgccaggtgaagttctgcaccttcaagaacacccacatcttcctgcacaacgtgcccctgtgcgtgctggagaactgcgagttcgtgggcagcgagaacaacagcgtgaccgtggagggccaccccagcgccgacaagaactgggcctacaagtacctgctgggcctgatcaagagcagccccaccttcctgcccaccgaggacagcgacttcctgatgagcctggacctggagagcagagaccaggcctggagccccaagacctgcgacatcgtgatcgagggcagccagagccccaccagccccgccagcagcagccccaagcccggcagcaaggccggcagccaggaggccgaggtgggcagcgacggcgagagagtggcccagacccccgacagcagcgacggcggcctgagccccagcggcgaggacgaggacgaggaccagctgatgtacagactgagctaccaggtgcagggccccagacccgtgctgggcggcagcttcctgggcccccccctgcccggcgccagcatccagctgcccagctgcctggtgctgaacagcctgcagcaggagctgcagaaggacaaggaggccatggccctggccaacagcgtgcagggctgcctgatcagaaagtgcctgttcagagacggcaagggcggcgtgttcgtgtgcagccacggcagagccaagatggagggcaacatcttcagaaacctgacctacgccgtgagatgcatccacaacagcaagatcatcatgctgagaaacgacatctacagatgcagagccagcggcatcttcctgagactggagggcggcggcctgatcgccggcaacaacatctaccacaacgccgaggccggcgtggacatcagaaagaagagcaaccccctgatcctgtgcaaccagatccaccacggcctgagaagcggcatcgtggtgctgggcaacggcaagggcatcatcagaaacaaccagatcttcagcaacaaggaggccggcatctacatcctgtaccacggcaaccccgtggtgagcggcaaccacatcttcaagggcagagccgccggcatcgccgtgaacgagaacggcaagggcctgatcaccgagaacgtgatcagagagaaccagtggggcggcgtggacatcagaagaggcggcatccccgtgctgagaagcaacctgatctgcttcggctacagcgacggcgtggtggtgggcgacgagggcaagggcctgatcgagggcaacaccatctacgccaacaagggctgcggcgtgtggatgatgagcagcagcctgccccacgtgaccagcaaccacgtgagctacaacggcctgtacggcgtggccgtgttcagccagaaggacggcagcagcgagctgcccagaggccacagagcccaggagaacttcagcgaggacggcgacgccatcctgtgggagaccgagctggagaaggaggacgaccccctgagaagacccatcaccatcgccctggtggagagcaacagcatcaaccacaacggcgccagcggcctgtacgtgcagagcagcgaggccctgcacgtgatcaccaacgtgatccacgccaacggcgacagaggcatcaccgtggcccagagcagccagcccaccagagtggccaacaacagcatcagctgcaacagacagagcggcgtgaaggtggaggcccagtgcaaggtggagctgagaggcaacggcatctacgacaacagaggccacggcatcatcaccaagggcgacagcaccatcgtgatcgagaacgacatcatcggcaacagaggcagcggcctgcagctgctgcccagaagcgacaccaaggtgatcaagaacagaatccacagcttcagagcctacggcatcgccgtgagaggcagagccaaggccctggtgcaggagaacatcatcttccagggcaagaccagcaagaccatcttccagcagatcagcaacaacagagagtgcatcatgcagaacaacaagttcctggtgttcaagaagaagagcgacacctggagactggtgaacccccccgccagaccccacctggagaacagcctgagaagacccagcgccgcccacaacggccagaaggtgaccgccatggccaccagaatcaccgccagagtggagggcggctaccacagcaacagaagcgtgttctgcaccatcctgtag

SEQ ID NO: 81389 - DNA, 216 bp, synthetic construct
  misc_feature 1..216: note = Description of Artificial Sequence: Synthetic coding sequence
  source 1..216: mol_type = other DNA
atggaggccggcggcctgcccctggagctgtggagaatgatcctggcctacctgcacctgcccgacctgggcagatgcagcctggtgtgcagagcctggtacgagctgatcctgagcctggacagcaccagatggagacagctgtgcctgggctgcaccgagtgcagacaccccaactggcccaaccagcccgacgtggagcccgagagctggtag

SEQ ID NO: 81390 - DNA, 1446 bp, synthetic construct
  misc_feature 1..1446: note = Description of Artificial Sequence: Synthetic coding sequence
  source 1..1446: mol_type = other DNA
atgctgagaaacgacatctacagatgcagagccagcggcatcttcctgagactggagggcggcggcctgatcgccggcaacaacatctaccacaacgccgaggccggcgtggacatcagaaagaagagcaaccccctgatcctgtgcaaccagatccaccacggcctgagaagcggcatcgtggtgctgggcaacggcaagggcatcatcagaaacaaccagatcttcagcaacaaggaggccggcatctacatcctgtaccacggcaaccccgtggtgagcggcaaccacatcttcaagggcagagccgccggcatcgccgtgaacgagaacggcaagggcctgatcaccgagaacgtgatcagagagaaccagtggggcggcgtggacatcagaagaggcggcatccccgtgctgagaagcaacctgatctgcttcggctacagcgacggcgtggtggtgggcgacgagggcaagggcctgatcgagggcaacaccatctacgccaacaagggctgcggcgtgtggatgatgagcagcagcctgccccacgtgaccagcaaccacgtgagctacaacggcctgtacggcgtggccgtgttcagccagaaggacggcagcagcgagctgcccagaggccacagagcccaggagaacttcagcgaggacggcgacgccatcctgtgggagaccgagctggagaaggaggacgaccccctgagaagacccatcaccatcgccctggtggagagcaacagcatcaaccacaacggcgccagcggcctgtacgtgcagagcagcgaggccctgcacgtgatcaccaacgtgatccacgccaacggcgacagaggcatcaccgtggcccagagcagccagcccaccagagtggccaacaacagcatcagctgcaacagacagagcggcgtgaaggtggaggcccagtgcaaggtggagctgagaggcaacggcatctacgacaacagaggccacggcatcatcaccaagggcgacagcaccatcgtgatcgagaacgacatcatcggcaacagaggcagcggcctgcagctgctgcccagaagcgacaccaaggtgatcaagaacagaatccacagcttcagagcctacggcatcgccgtgagaggcagagccaaggccctggtgcaggagaacatcatcttccagggcaagaccagcaagaccatcttccagcagatcagcaacaacagagagtgcatcatgcagaacaacaagttcctggtgttcaagaagaagagcgacacctggagactggtgaacccccccgccagaccccacctggagaacagcctgagaagacccagcgccgcccacaacggccagaaggtgaccgccatggccaccagaatcaccgccagagtggagggcggctaccacagcaacagaagcgtgttctgcaccatcctgtag

SEQ ID NO: 81391 - DNA, 2532 bp, synthetic construct
  misc_feature 1..2532: note = Description of Artificial Sequence: Synthetic coding sequence
  source 1..2532: mol_type = other DNA
atggtggccgaggagagcggccccggcgcccagaacagcccctaccagctgagaagaaagaccctgctgcccaagagaaccgcctgccccaccaagaacagcatggagggcgccagcaccagcaccaccgagaacttcggccacagagccaagagagccagagtgagcggcaagagccaggacctgagcgccgcccccgccgagcagtacctgcaggagaagctgcccgacgaggtggtgctgaagatcttcagctacctgctggagcaggacctgtgcagagccgcctgcgtgtgcaagagattcagcgagctggccaacgaccccatcctgtggaagagactgtacatggaggtgttcgagtacaccagacccatgatgcaccccgagcccggcaagttctaccagatcaaccccgaggagtacgagcaccccaacccctggaaggagagcttccagcagctgtacaagggcgcccacgtgaagcccggcttcgccgagcacttctacagcaaccccgccagatacaagggcagagagaacatgctgtactacgacaccatcgaggacgccctgggcggcgtgcaggaggcccacttcgacggcctgatcttcgtgcacagcggcatctacaccgacgagtggatctacatcgagagccccatcaccatgatcggcgccgcccccggcaaggtggccgacaaggtgatcatcgagaacaccagagacagcaccttcgtgttcatggagggcagcgaggacgcctacgtgggctacatgaccatcagattcaaccccgacgacaagagcgcccagcaccacaacgcccaccactgcctggagatcaccgtgaactgcagccccatcatcgaccactgcatcatcagaagcacctgcaccgtgggcagcgccgtgtgcgtgagcggccagggcgcctgccccaccatcaagcactgcaacatcagcgactgcgagaacgtgggcctgtacatcaccgaccacgcccagggcatctacgaggacaacgagatcagcaacaacgccctggccggcatctgggtgaagaaccacggcaaccccatcatcagaagaaaccacatccaccacggcagagacgtgggcgtgttcaccttcgaccacggcatgggctacttcgagagctgcaacatccacagaaacagaatcgccggcttcgaggtgaaggcctacgccaaccccaccgtggtgagatgcgagatccaccacggccagaccggcggcatctacgtgcacgagaagggcagaggccagttcatcgagaacaagatctacgccaacaacttcgccggcgtgtggatcaccagcaacagcgaccccaccatcagaggcaacagcatcttcaacggcaaccagggcggcgtgtacatcttcggcgacggcagaggcctgatcgagggcaacgacatctacggcaacgccctggccggcatccagatcagaaccaacagctgccccatcgtgagacacaacaagatccacgacggccagcacggcggcatctacgtgcacgagaagggccagggcgtgatcgaggagaacgaggtgtacagcaacaccctggccggcgtgtgggtgaccaccggcagcacccccgtgctgagaagaaacagaatccacagcggcaagcaggtgggcgtgtacttctacgacaacggccacggcgtgctggaggacaacgacatctacaaccacatgtacagcggcgtgcagatcagaaccggcagcaaccccaagatcagaagaaacaagatctggggcggccagaacggcggcatcctggtgtacaacagcggcctgggctgcatcgaggacaacgagatcttcgacaacgccatggccggcgtgtggatcaagaccgacagcaaccccaccctgagaagaaacaagatccacgacggcagagacggcggcatctgcatcttcaacggcggcagaggcctgctggaggagaacgacatcttcagaaacgcccaggccggcgtgctgatcagcaccaacagccaccccatcctgagaaagaacagaatcttcgacggcttcgccgccggcatcgagatcaccaaccacgccaccgccaccctggagggcaaccagatcttcaacaacagattcggcggcctgttcctggccagcggcgtgaacgtgaccatgaaggacaacaagatcatgaacaaccaggacgccatcgagaaggccgtgagcagaggccagtgcctgtacaagatcagcagctacaccagctaccccatgcacgacttctacagatgccacacctgcaacaccaccgacagaaacgccatctgcgtgaactgcatcaagaagtgccaccagggccacgacgtggagttcatcagacacgacagattcttctgcgactgcggcgccggcaccctgagcaacccctgcaccctggccggcgagcccacccacgacaccgacaccctgtacgacagcgccccccccatcgagagcaacaccctgcagcacaactag

SEQ ID NO: 81392 - DNA, 282 bp, synthetic construct
  misc_feature 1..282: note = Description of Artificial Sequence: Synthetic coding sequence
  source 1..282: mol_type = other DNA
atggagggcgccagcaccagcaccaccgagaacttcggccacagagccaagagagccagagtgagcggcaagagccaggacctgagcgccgcccccgccgagcagtacctgcaggagaagctgcccgacgaggtggtgctgaagatcttcagctacctgctggagcaggacctgtgcagagccgcctgcgtgtgcaagagattcagcgagctggccaacgaccccatcctgtggctgggcgaggtggcccacgcctacaaccccagcaccctgggcggctag

SEQ ID NO: 81393 - DNA, 2532 bp, synthetic construct; identical to SEQ ID NO: 81391
  misc_feature 1..2532: note = Description of Artificial Sequence: Synthetic coding sequence
  source 1..2532: mol_type = other DNA

SEQ ID NO: 81394 - DNA, 2784 bp, synthetic construct
  misc_feature 1..2784: note = Description of Artificial Sequence: Synthetic coding sequence
  source 1..2784: mol_type = other DNA
atgaacagcgtgagagccgccaacagaagacccagaagagtgagcagacccagacccgtgcagcagcagcagcagcagcccccccagcagccccccccccagcccccccagcagcagcccccccagcagcagccccccccccccccccagcagcagcagcagcagcagccccccccccccccccccccccccccccccctgccccaggagagaaacaacgtgggcgagagagacgacgacgtgcccgccgacatggtggccgaggagagcggccccggcgcccagaacagcccctaccagctgagaagaaagaccctgctgcccaagagaaccgcctgccccaccaagaacagcatggagggcgccagcaccagcaccaccgagaacttcggccacagagccaagagagccagagtgagcggcaagagccaggacctgagcgccgcccccgccgagcagtacctgcaggagaagctgcccgacgaggtggtgctgaagatcttcagctacctgctggagcaggacctgtgcagagccgcctgcgtgtgcaagagattcagcgagctggccaacgaccccatcctgtggaagagactgtacatggaggtgttcgagtacaccagacccatgatgcaccccgagcccggcaagttctaccagatcaaccccgaggagtacgagcaccccaacccctggaaggagagcttccagcagctgtacaagggcgcccacgtgaagcccggcttcgccgagcacttctacagcaaccccgccagatacaagggcagagagaacatgctgtactacgacaccatcgaggacgccctgggcggcgtgcaggaggcccacttcgacggcctgatcttcgtgcacagcggcatctacaccgacgagtggatctacatcgagagccccatcaccatgatcggcgccgcccccggcaaggtggccgacaaggtgatcatcgagaacaccagagacagcaccttcgtgttcatggagggcagcgaggacgcctacgtgggctacatgaccatcagattcaaccccgacgacaagagcgcccagcaccacaacgcccaccactgcctggagatcaccgtgaactgcagccccatcatcgaccactgcatcatcagaagcacctgcaccgtgggcagcgccgtgtgcgtgagcggccagggcgcctgccccaccatcaagcactgcaacatcagcgactgcgagaacgtgggcctgtacatcaccgaccacgcccagggcatctacgaggacaacgagatcagcaacaacgccctggccggcatctgggtgaagaaccacggcaaccccatcatcagaagaaaccacatccaccacggcagagacgtgggcgtgttcaccttcgaccacggcatgggctacttcgagagctgcaacatccacagaaacagaatcgccggcttcgaggtgaaggcctacgccaaccccaccgtggtgagatgcgagatccaccacggccagaccggcggcatctacgtgcacgagaagggcagaggccagttcatcgagaacaagatctacgccaacaacttcgccggcgtgtggatcaccagcaacagcgaccccaccatcagaggcaacagcatcttcaacggcaaccagggcggcgtgtacatcttcggcgacggcagaggcctgatcgagggcaacgacatctacggcaacgccctggccggcatccagatcagaaccaacagctgccccatcgtgagacacaacaagatccacgacggccagcacggcggcatctacgtgcacgagaagggccagggcgtgatcgaggagaacgaggtgtacagcaacaccctggccggcgtgtgggtgaccaccggcagcacccccgtgctgagaagaaacagaatccacagcggcaagcaggtgggcgtgtacttctacgacaacggccacggcgtgctggaggacaacgacatctacaaccacatgtacagcggcgtgcagatcagaaccggcagcaaccccaagatcagaagaaacaagatctggggcggccagaacggcggcatcctggtgtacaacagcggcctgggctgcatcgaggacaacgagatcttcgacaacgccatggccggcgtgtggatcaagaccgacagcaaccccaccctgagaagaaacaagatccacgacggcagagacggcggcatctgcatcttcaacggcggcagaggcctgctggaggagaacgacatcttcagaaacgcccaggccggcgtgctgatcagcaccaacagccaccccatcctgagaaagaacagaatcttcgacggcttcgccgccggcatcgagatcaccaaccacgccaccgccaccctggagggcaaccagatcttcaacaacagattcggcggcctgttcctggccagcggcgtgaacgtgaccatgaaggacaacaagatcatgaacaaccaggacgccatcgagaaggccgtgagcagaggccagtgcctgtacaagatcagcagctacaccagctaccccatgcacgacttctacagatgccacacctgcaacaccaccgacagaaacgccatctgcgtgaactgcatcaagaagtgccaccagggccacgacgtggagttcatcagacacgacagattcttctgcgactgcggcgccggcaccctgagcaacccctgcaccctggccggcgagcccacccacgacaccgacaccctgtacgacagcgccccccccatcgagagcaacaccctgcagcacaactag

SEQ ID NO: 81395 - DNA, 1056 bp, synthetic construct
  misc_feature 1..1056: note = Description of Artificial Sequence: Synthetic coding sequence
  source 1..1056: mol_type = other DNA
atggagatcaaggaggagttcaccagcctggtgatggacgaggccctgctgaaggagatgaccttcatgcacgagaagggccagggcgtgatcgaggagaacgaggtgtacagcaacaccctggccggcgtgtgggtgaccaccggcagcacccccgtgctgagaagaaacagaatccacagcggcaagcaggtgggcgtgtacttctacgacaacggccacggcgtgctggaggacaacgacatctacaaccacatgtacagcggcgtgcagatcagaaccggcagcaaccccaagatcagaagaaacaagatctggggcggccagaacggcggcatcctggtgtacaacagcggcctgggctgcatcgaggacaacgagatcttcgacaacgccatggccggcgtgtggatcaagaccgacagcaaccccaccctgagaagaaacaagatccacgacggcagagacggcggcatctgcatcttcaacggcggcagaggcctgctggaggagaacgacatcttcagaaacgcccaggccggcgtgctgatcagcaccaacagccaccccatcctgagaaagaacagaatcttcgacggcttcgccgccggcatcgagatcaccaaccacgccaccgccaccctggagggcaaccagatcttcaacaacagattcggcggcctgttcctggccagcggcgtgaacgtgaccatgaaggacaacaagatcatgaacaaccaggacgccatcgagaaggccgtgagcagaggccagtgcctgtacaagatcagcagctacaccagctaccccatgcacgacttctacagatgccacacctgcaacaccaccgacagaaacgccatctgcgtgaactgcatcaagaagtgccaccagggccacgacgtggagttcatcagacacgacagattcttctgcgactgcggcgccggcaccctgagcaacccctgcaccctggccggcgagcccacccacgacaccgacaccctgtacgacagcgccccccccatcgagagcaacaccctgcagcacaactag

SEQ ID NO: 81396 - DNA, 1305 bp, synthetic construct
  misc_feature 1..1305: note = Description of Artificial Sequence: Synthetic coding sequence
  source 1..1305: mol_type = other DNA
atgcccagcgagatcctgctgaagatcttcagctacctggacgccgtgagcctgctgtgcaccggctgcgtgagcagaagattctaccacctggccaacgacaacttcatctggatcggcatctacagcaccgccttcagccccgccagaagcaactggaagttcaacagcgtggagaagatcgccatgagcatgagcttcctgagcgtgcaggacaaggaggccggctactggaagaaggagtacatcaccaagcagatcgccagcgtgaaggccgccctggccgacatcctgaagcccgtgaacccctacaccggcctgcccgtgaagaccaaggaggccctgagaatcttcggcctgggctgggccatcatcctgaaggagaagggcggcaaggagtacatcatggagcacgtggacctgagcatcaacgacaccagcgtgaccgtgatctggtacggcaagaagtggccctgcctggccagcctgagcaccctggacctgtgcggcatgacccccgtgttcaccgactggtacaagacccccaccaagcacagactgagatggcacagcctgatcgccaagtacaacctgagccacctgaccatcagcaccatgatcggctgcgacagactgatcagaatcttctgcctgcaccccggcctgctggtgggcgtgtggaagaaggaggaggagctggccttcgtgatggccaacctgcacttccaccacctggtggagagaagcaccctgggcagcgccaccatcccctacgagctgcccccccacagccccttcctggacgacagccccgagtacggcctgcacggctaccagctgcacgtggacctgcacagcggcggcgtgttctacctgtgcggcaccttcagaaacctgttcaccaagagaggcaacatcgagaacggccacgtgaagctgatcgtgatccacctgaagaacaacagagagcacctgcccctgatcggcaaggtgggcctgagctggaagaccgacatcttcgacggctgcatcaagagctgcagcatgatggacgtgaccctgctggacgagcacggcaagcccttctggtgcttcagcagccccgtgtgcctgagaagccccgccacccccagcgacagcagcagcttcctgggccagacctacaacgtggactacgtggacgccgagggcagagtgcacgtggagctggtgtggatcagagagaccgaggagtacctgatcgtgaacctggtgctgtacctgagcatcgccaagatcaaccactggttcggcaccgagtactag

SEQ ID NO: 81397 - DNA, 1533 bp, synthetic construct
  misc_feature 1..1533: note = Description of Artificial Sequence: Synthetic coding sequence
  source 1..1533: mol_type = other DNA
atggccaccggcagaggcagaatcctgcagcagcactggctgggcctgcagaccctgagaggccccagcagaggcggcggcgccgccagaggcagagccagagccttcggctgcagaaagggccccggcgtgaagctgagcgccggcagcgccgccctgagatgccacgccggcggcggccagcactgggagagcagcttcagctgctgcagcggcttcctggacggcatgcccagcgagatcctgctgaagatcttcagctacctggacgccgtgagcctgctgtgcaccggctgcgtgagcagaagattctaccacctggccaacgacaacttcatctggatcggcatctacagcaccgccttcagccccgccagaagcaactggaagttcaacagcgtggagaagatcgccatgagcatgagcttcctgagcgtgcaggacaaggaggccggctactggaagaaggagtacatcaccaagcagatcgccagcgtgaaggccgccctggccgacatcctgaagcccgtgaacccctacaccggcctgcccgtgaagaccaaggaggccctgagaatcttcggcctgggctgggccatcatcctgaaggagaagggcggcaaggagtacatcatggagcacgtggacctgagcatcaacgacaccagcgtgaccgtgatctggtacggcaagaagtggccctgcctggccagcctgagcaccctggacctgtgcggcatgacccccgtgttcaccgactggtacaagacccccaccaagcacagactgagatggcacagcctgatcgccaagtacaacctgagccacctgaccatcagcaccatgatcggctgcgacagactgatcagaatcttctgcctgcaccccggcctgctggtgggcgtgtggaagaaggaggaggagctggccttcgtgatggccaacctgcacttccaccacctggtggagagaagcaccctgggcagcgccaccatcccctacgagctgcccccccacagccccttcctggacgacagccccgagtacggcctgcacggctaccagctgcacgtggacctgcacagcggcggcgtgttctacctgtgcggcaccttcagaaacctgttcaccaagagaggcaacatcgagaacggccacgtgaagctgatcgtgatccacctgaagaacaacagagagcacctgcccctgatcggcaaggtgggcctgagctggaagaccgacatcttcgacggctgcatcaagagctgcagcatgatggacgtgaccctgctggacgagcacggcaagcccttctggtgcttcagcagccccgtgtgcctgagaagccccgccacccccagcgacagcagcagcttcctgggccagacctacaacgtggactacgtggacgccgagggcagagtgcacgtggagctggtgtggatcagagagaccgaggagtacctgatcgtgaacctggtgctgtacctgagcatcgccaagatcaaccactggttcggcaccgagtactag

SEQ ID NO: 81398 - DNA, 879 bp, synthetic construct
  misc_feature 1..879: note = Description of Artificial Sequence: Synthetic coding sequence
  source 1..879: mol_type = other DNA
atgatggccttcgccccccccaagaacaccgacggccccaagatgcagaccaagatgagcacctggacccccctgaaccaccagctgctgaacgacagagtgttcgaggagagaagagccctgctgggcaagtggttcgacaagtggaccgacagccagagaagaagaatcctgaccggcctgctggagagatgcagcctgagccagcagaagttctgctgcagaaagctgcaggagaagatccccgccgaggccctggacttcaccaccaagctgcccagagtgctgagcctgtacatcttcagcttcctggaccccagaagcctgtgcagatgcgcccaggtgtgctggcactggaagaacctggccgagctggaccagctgtggatgctgaagtgcctgagattcaactggtacatcaacttcagccccacccccttcgagcagggcatctggaagaagcactacatccagatggtgaaggagctgcacatcaccaagcccaagaccccccccaaggacggcttcgtgatcgccgacgtgcagctggtgaccagcaacagccccgaggagaagcagagccccctgagcgccttcagaagcagcagcagcctgagaaagaagaacaacagcggcgagaaggccctgcccccctggagaagcagcgacaagcaccccaccgacatcatcagattcaactacctggacaacagagaccccatggagaccgtgcagcagggcagaagaaagagaaaccagatgacccccgacttcagcagacagagccacgacaagaagaacaagctgcaggacagaaccagactgagaaaggcccagagcatgatgagcagaagaaaccccttccccctgtgcccctag

SEQ ID NO: 81399 - DNA, 891 bp, synthetic construct
  misc_feature 1..891: note = Description of Artificial Sequence: Synthetic coding sequence
  source 1..891: mol_type = other DNA
atggacggcgacggcgaccccgagagcgtgggccagcccgaggaggccagccccgaggagcagcccgaggaggccagcgccgaggaggagagacccgaggaccagcaggaggaggaggccgccgccgccgccgcctacctggacgagctgcccgagcccctgctgctgagagtgctggccgccctgcccgccgccgagctggtgcaggcctgcagactggtgtgcctgagatggaaggagctggtggacggcgcccccctgtggctgctgaagtgccagcaggagggcctggtgcccgagggcggcgtggaggaggagagagaccactggcagcagttctacttcctgagcaagagaagaagaaacctgctgagaaacccctgcggcgaggaggacctggagggctggtgcgacgtggagcacggcggcgacggctggagagtggaggagctgcccggcgacagcggcgtggagttcacccacgacgagagcgtgaagaagtacttcgccagcagcttcgagtggtgcagaaaggcccaggtgatcgacctgcaggccgagggctactgggaggagctgctggacaccacccagcccgccatcgtggtgaaggactggtacagcggcagaagcgacgccggctgcctgtacgagctgaccgtgaagctgctgagcgagcacgagaacgtgctggccgagttcagcagcggccaggtggccgtgccccaggacagcgacggcggcggctggatggagatcagccacaccttcaccgactacggccccggcgtgagattcgtgagattcgagcacggcggccaggacagcgtgtactggaagggctggttcggcgccagagtgaccaacagcagcgtgtgggtggagccctag

SEQ ID NO: 81400 - DNA, 594 bp, synthetic construct
  misc_feature 1..594: note = Description of Artificial Sequence: Synthetic coding sequence
  source 1..594: mol_type = other DNA
atggacggcgacggcgaccccgagagcgtgggccagcccgaggaggccagccccgaggagcagcccgaggaggccagcgccgaggaggagagacccgaggaccagcaggaggaggaggccgccgccgccgccgcctacctggacgagctgcccgagcccctgctgctgagagtgctggccgccctgcccgccgccgagctggtgcaggcctgcagactggtgtgcctgagatggaaggagctggtggacggcgcccccctgtggctgctgaagtgccagcaggagggcctggtgcccgagggcggcgtggaggaggagagagaccactggcagcagttctacttcctgagcaagagaagaagaaacctgctgagaaacccctgcggcgaggaggacctggagggctggtgcgacgtggagcacggcggcgacggctggagagtggaggagctgcccggcgacagcggcgtggagttcacccacgacgagagcgcccccgtgctgcccggcggcgtggccaagcacagaggcctgctgggcggcgccgccggccacgacagcgccggccacagaggcgagggcctggtgagatag

SEQ ID NO: 81401 - DNA, 1614 bp, synthetic construct
  misc_feature 1..1614: note = Description of Artificial Sequence: Synthetic coding sequence
  source 1..1614: mol_type = other DNA
atgaagcactacagccccaccgactacgtgaactggctggaggagtacaaggtgagacagaaggccggcctggaggccagaaagatcgtggccagcttcagcaagagattcttcagcgagcacgtgccctgcaacggcttcagcgacatcgagaacctggagggccccgagatcttcttcgaggacgagctggtgtgcatcctgaacatggagggcagaaaggccctgacctggaagtactacgccaagaagatcctgtactacctgagacagcagaagatcctgaacaacctgaaggccttcctgcagcagcccgacgactacgagagctacctggagggcgccgtgtacatcgaccagtactgcaaccccctgagcgacatcagcctgaaggacatccaggcccagatcgacagcatcgtggagctggtgtgcaagaccctgagaggcatcaacagcagacaccccagcctggccttcaaggccggcgagagcagcatgatcatggagatcgagctgcagagccaggtgctggacgccatgaactacgtgctgtacgaccagctgaagttcaagggcaacagaatggactactacaacgccctgaacctgtacatgcaccaggtgctgatcagaagaaccggcatccccatcagcatgagcctgctgtacctgaccatcgccagacagctgggcgtgcccctggagcccgtgaacttccccagccacttcctgctgagatggtgccagggcgccgagggcgccaccctggacatcttcgactacatctacatcgacgccttcggcaagggcaagcagctgaccgtgaaggagtgcgagtacctgatcggccagcacgtgaccgccgccctgtacggcgtggtgaacgtgaagaaggtgctgcagagaatggtgggcaacctgctgagcctgggcaagagagagggcatcgaccagagctaccagctgctgagagacagcctggacctgtacctggccatgtaccccgaccaggtgcagctgctgctgctgcaggccagactgtacttccacctgggcatctggcccgagaaggtgctggacatcctgcagcacatccagaccctggaccccggccagcacggcgccgtgggctacctggtgcagcacaccctggagcacatcgagagaaagaaggaggaggtgggcgtggaggtgaagctgagaagcgacgagaagcacagagacgtgtgctacagcatcggcctgatcatgaagcacaagagatacggctacaactgcgtgatctacggctgggaccccacctgcatgatgggccacgagtggatcagaaacatgaacgtgcacagcctgccccacggccaccaccagcccttctacaacgtgctggtggaggacggcagctgcagatacgccgcccaggagaacctggagtacaacgtggagccccaggagatcagccaccccgacgtgggcagatacttcagcgagttcaccggcacccactacatccccaacgccgagctggagatcagataccccgaggacctggagttcgtgtacgagaccgtgcagaacatctacagcgccaagaaggagaacatcgacgagtag

SEQ ID NO: 81402 - DNA, 1887 bp, synthetic construct
  misc_feature 1..1887: note = Description of Artificial Sequence: Synthetic coding sequence
  source 1..1887: mol_type = other DNA
atggccgccgccgccgtggacagcgccatggaggtggtgcccgccctggccgaggaggccgcccccgaggtggccggcctgagctgcctggtgaacctgcccggcgaggtgctggagtacatcctgtgctgcggcagcctgaccgccgccgacatcggcagagtgagcagcacctgcagaagactgagagagctgtgccagagcagcggcaaggtgtggaaggagcagttcagagtgagatggcccagcctgatgaagcactacagccccaccgactacgtgaactggctggaggagtacaaggtgagacagaaggccggcctggaggccagaaagatcgtggccagcttcagcaagagattcttcagcgagcacgtgccctgcaacggcttcagcgacatcgagaacctggagggccccgagatcttcttcgaggacgagctggtgtgcatcctgaacatggagggcagaaaggccctgacctggaagtactacgccaagaagatcctgtactacctgagacagcagaagatcctgaacaacctgaaggccttcctgcagcagcccgacgactacgagagctacctggagggcgccgtgtacatcgaccagtactgcaaccccctgagcgacatcagcctgaaggacatccaggcccagatcgacagcatcgtggagctggtgtgcaagaccctgagaggcatcaacagcagacaccccagcctggccttcaaggccggcgagagcagcatgatcatggagatcgagctgcagagccaggtgctggacgccatgaactacgtgctgtacgaccagctgaagttcaagggcaacagaatggactactacaacgccctgaacctgtacatgcaccaggtgctgatcagaagaaccggcatccccatcagcatgagcctgctgtacctgaccatcgccagacagctgggcgtgcccctggagcccgtgaacttccccagccacttcctgctgagatggtgccagggcgccgagggcgccaccctggacatcttcgactacatctacatcgacgccttcggcaagggcaagcagctgaccgtgaaggagtgcgagtacctgatcggccagcacgtgaccgccgccctgtacggcgtggtgaacgtgaagaaggtgctgcagagaatggtgggcaacctgctgagcctgggcaagagagagggcatcgaccagagctaccagctgctgagagacagcctggacctgtacctggccatgtaccccgaccaggtgcagctgctgctgctgcaggccagactgtacttccacctgggcatctggcccgagaagagcttctgcctggtgctgaaggtgctggacatcctgcagcacatccagaccctggaccccggccagcacggcgccgtgggctacctggtgcagcacaccctggagcacatcgagagaaagaaggaggaggtgggcgtggaggtgaagctgagaagcgacgagaagcacagagacgtgtgctacagcatcggcctgatcatgaagcacaagagatacggctacaactgcgtgatctacggctgggaccccacctgcatgatgggccacgagtggatcagaaacatgaacgtgcacagcctgccccacggccaccaccagcccttctacaacgtgctggtggaggacggcagctgcagatacgccgcccaggagaacctggagtacaacgtggagccccaggagatcagccaccccgacgtgggcagatacttcagcgagttcaccggcacccactacatccccaacgccgagctggagatcagataccccgaggacctggagttcgtgtacgagaccgtgcagaacatctacagcgccaagaaggagaacatcgacgagtag

SEQ ID NO: 81403 - DNA, 1866 bp, synthetic construct
  misc_feature 1..1866: note = Description of Artificial Sequence: Synthetic coding sequence
  source 1..1866: mol_type = other DNA
atggccgccgccgccgtggacagcgccatggaggtggtgcccgccctggccgaggaggccgcccccgaggtggccggcctgagctgcctggtgaacctgcccggcgaggtgctggagtacatcctgtgctgcggcagcctgaccgccgccgacatcggcagagtgagcagcacctgcagaagactgagagagctgtgccagagcagcggcaaggtgtggaaggagcagttcagagtgagatggcccagcctgatgaagcactacagccccaccgactacgtgaactggctggaggagtacaaggtgagacagaaggccggcctggaggccagaaagatcgtggccagcttcagcaagagattcttcagcgagcacgtgccctgcaacggcttcagcgacatcgagaacctggagggccccgagatcttcttcgaggacgagctggtgtgcatcctgaacatggagggcagaaaggccctgacctggaagtactacgccaagaagatcctgtactacctgagacagcagaagatcctgaacaacctgaaggccttcctgcagcagcccgacgactacgagagctacctggagggcgccgtgtacatcgaccagtactgcaaccccctgagcgacatcagcctgaaggacatccaggcccagatcgacagcatcgtggagctggtgtgcaagaccctgagaggcatcaacagcagacaccccagcctggccttcaaggccggcgagagcagcatgatcatggagatcgagctgcagagccaggtgctggacgccatgaactacgtgctgtacgaccagctgaagttcaagggcaacagaatggactactacaacgccctgaacctgtacatgcaccaggtgctgatcagaagaaccggcatccccatcagcatgagcctgctgtacctgaccatcgccagacagctgggcgtgcccctggagcccgtgaacttccccagccacttcctgctgagatggtgccagggcgccgagggcgccaccctggacatcttcgactacatctacatcgacgccttcggcaagggcaagcagctgaccgtgaaggagtgcgagtacctgatcggccagcacgtgaccgccgccctgtacggcgtggtgaacgtgaagaaggtgctgcagagaatggtgggcaacctgctgagcctgggcaagagagagggcatcgaccagagctaccagctgctgagagacagcctggacctgtacctggccatgtaccccgaccaggtgcagctgctgctgctgcaggccagactgtacttccacctgggcatctggcccgagaaggtgctggacatcctgcagcacatccagaccctggaccccggccagcacggcgccgtgggctacctggtgcagcacaccctggagcacatcgagagaaagaaggaggaggtgggcgtggaggtgaagctgagaagcgacgagaagcacagagacgtgtgctacagcatcggcctgatcatgaagcacaagagatacggctacaactgcgtgatctacggctgggaccccacctgcatgatgggccacgagtggatcagaaacatgaacgtgcacagcctgccccacggccaccaccagcccttctacaacgtgctggtggaggacggcagctgcagatacgccgcccaggagaacctggagtacaacgtggagccccaggagatcagccaccccgacgtgggcagatacttcagcgagttcaccggcacccactacatccccaacgccgagctggagatcagataccccgaggacctggagttcgtgtacgagaccgtgcagaacatctacagcgccaagaaggagaacatcgacgagtag

SEQ ID NO: 81404 - DNA, 1434 bp, synthetic construct
  misc_feature 1..1434: note = Description of Artificial Sequence: Synthetic coding sequence
  source 1..1434: mol_type = other DNA
atgaagcactacagccccaccgactacgtgaactggctggaggagtacaaggtgagacagaaggccggcctggaggccagaaagatcgtggccagcttcagcaagagattcttcagcgagcacgtgccctgcaacggcttcagcgacatcgagaacctggagggccccgagatcttcttcgaggacgagctggtgtgcatcctgaacatggagggcagaaaggccctgacctggaagtactacgccaagaagatcctgtactacctgagacagcagaagatcctgaacaacctgaaggccttcctgcagcagcccgacgactacgagagctacctggagggcgccgtgtacatcgaccagtactgcaaccccctgagcgacatcagcctgaaggacatccaggcccagatcgacagcatcgtggagctggtgtgcaagaccctgagaggcatcaacagcagacaccccagcctggccttcaaggccggcgagagcagcatgatcatggagatcgagctgcagagccaggtgctggacgccatgaactacgtgctgtacgaccagctgaagttcaagggcaacagaatggactactacaacgccctgaacctgtacatgcaccaggtgctgatcagaagaaccggcatccccatcagcatgagcctgctgtacctgaccatcgccagacagctgggcgtgcccctggagcccgtgaacttccccagccacttcctgctgagatggtgccagggcgccgagggcgagggcatcgaccagagctaccagctgctgagagacagcctggacctgtacctggccatgtaccccgaccaggtgcagctgctgctgctgcaggccagactgtacttccacctgggcatctggcccgagaaggtgctggacatcctgcagcacatccagaccctggaccccggccagcacggcgccgtgggctacctggtgcagcacaccctggagcacatcgagagaaagaaggaggaggtgggcgtggaggtgaagctgagaagcgacgagaagcacagagacgtgtgctacagcatcggcctgatcatgaagcacaagagatacggctacaactgcgtgatctacggctgggaccccacctgcatgatgggccacgagtggatcagaaacatgaacgtgcacagcctgccccacggccaccaccagcccttctacaacgtgctggtggaggacggcagctgcagatacgccgcccaggagaacctggagtacaacgtggagccccaggagatcagccaccccgacgtgggcagatacttcagcgagttcaccggcacccactacatccccaacgccgagctggagatcagataccccgaggacctggagttcgtgtacgagaccgtgcagaacatctacagcgccaagaaggagaacatcgacgagtag

SEQ ID NO: 81405 - DNA, 1212 bp, synthetic construct
  misc_feature 1..1212: note = Description of Artificial Sequence: Synthetic coding sequence
  source 1..1212: mol_type = other DNA
atggagcccgtgggctgctgcggcgagtgcagaggcagcagcgtggaccccagaagcaccttcgtgctgagcaacctggccgaggtggtggagagagtgctgaccttcctgcccgccaaggccctgctgagagtggcctgcgtgtgcagactgtggagagagtgcgtgagaagagtgctgagaacccacagaagcgtgacctggatcagcgccggcctggccgaggccggccacctggagggccactgcctggtgagagtggtggccgaggagctggagaacgtgagaatcctgccccacaccgtgctgtacatggccgacagcgagaccttcatcagcctggaggagtgcagaggccacaagagagccagaaagagaaccagcatggagaccgccctggccctggagaagctgttccccaagcagtgccaggtgctgggcatcgtgacccccggcatcgtggtgacccccatgggcagcggcagcaacagaccccaggagatcgagatcggcgagagcggcttcgccctgctgttcccccagatcgagggcatcaagatccagcccttccacttcatcaaggaccccaagaacctgaccctggagagacaccagctgaccgaggtgggcctgctggacaaccccgagctgagagtggtgctggtgttcggctacaactgctgcaaggtgggcgccagcaactacctgcagcaggtggtgagcaccttcagcgacatgaacatcatcctggccggcggccaggtggacaacctgagcagcctgaccagcgagaagaaccccctggacatcgacgccagcggcgtggtgggcctgagcttcagcggccacagaatccagagcgccaccgtgctgctgaacgaggacgtgagcgacgagaagaccgccgaggccgccatgcagagactgaaggccgccaacatccccgagcacaacaccatcggcttcatgttcgcctgcgtgggcagaggcttccagtactacagagccaagggcaacgtggaggccgacgccttcagaaagttcttccccagcgtgcccctgttcggcttcttcggcaacggcgagatcggctgcgacagaatcgtgaccggcaacttcatcctgagaaagtgcaacgaggtgaaggacgacgacctgttccacagctacaccaccatcatggccctgatccacctgggcagcagcaagtag

SEQ ID NO: 81406 - DNA, 831 bp, synthetic construct
  misc_feature 1..831: note = Description of Artificial Sequence: Synthetic coding sequence
  source 1..831: mol_type = other DNA
atggagcccgtgggctgctgcggcgagtgcagaggcagcagcgtggaccccagaagcaccttcgtgctgagcaacctggccgaggtggtggagagagtgctgaccttcctgcccgccaaggccctgctgagagtggcctgcgtgtgcagactgtggagagagtgcgtgagaagagtgctgagaacccacagaagcgtgacctggatcagcgccggcctggccgaggccggccacctggagggccactgcctggtgagagtggtggccgaggagctggagaacgtgagaatcctgccccacaccgtgctgtacatggccgacagcgagaccttcatcagcctggaggagtgcagaggccacaagagagccagaaagagaaccagcatggagaccgccctggccctggagaagctgttccccaagcagtgccaggtgctgggcatcgtgacccccggcatcgtggtgacccccatgggcagcggcagcaacagaccccaggagatcgagatcggcgagagcggcttcgccctgctgttcccccagatcgagggcatcaagatccagcccttccacttcatcaaggaccccaagaacctgaccctggagagacaccagctgaccgaggtgggcctgctggacaaccccgagctgagagtggtgctggtgttcggctacaactgctgcaaggtgggcgccagcaactacctgcagcaggtggtgagcaccttcagcgacatgaacatcatcctggccggcggccaggtggacaacctgagcagcctgaccagcgagaagtacgtgctgtgcgccagcgacttcgtgtgcgagtag

SEQ ID NO: 81407 - DNA, 900 bp, synthetic construct
  misc_feature 1..900: note = Description of Artificial Sequence: Synthetic coding sequence
  source 1..900: mol_type = other DNA
atggccgacagcgagaccttcatcagcctggaggagtgcagaggccacaagagagccagaaagagaaccagcatggagaccgccctggccctggagaagctgttccccaagcagtgccaggtgctgggcatcgtgacccccggcatcgtggtgacccccatgggcagcggcagcaacagaccccaggagatcgagatcggcgagagcggcttcgccctgctgttcccccagatcgagggcatcaagatccagcccttccacttcatcaaggaccccaagaacctgaccctggagagacaccagctgaccgaggtgggcctgctggacaaccccgagctgagagtggtgctggtgttcggctacaactgctgcaaggtgggcgccagcaactacctgcagcaggtggtgagcaccttcagcgacatgaacatcatcctggccggcggccaggtggacaacctgagcagcctgaccagcgagaagaaccccctggacatcgacgccagcggcgtggtgggcctgagcttcagcggccacagaatccagagcgccaccgtgctgctgaacgaggacgtgagcgacgagaagaccgccgaggccgccatgcagagactgaaggccgccaacatccccgagcacaacaccatcggcttcatgttcgcctgcgtgggcagaggcttccagtactacagagccaagggcaacgtggaggccgacgccttcagaaagttcttccccagcgtgcccctgttcggcttcttcggcaacggcgagatcggctgcgacagaatcgtgaccggcaacttcatcctgagaaagtgcaacgaggtgaaggacgacgacctgttccacagctacaccaccatcatggccctgatccacctgggcagcagcaagtag

SEQ ID NO: 81408 - DNA, 1743 bp, synthetic construct
  misc_feature 1..1743: note = Description of Artificial Sequence: Synthetic coding sequence
  source 1..1743: mol_type = other DNA
atgggcgagaaggccgtgcccctgctgagaagaagaagagtgaagagaagctgccccagctgcggcagcgagctgggcgtggaggagaagagaggcaagggcaaccccatcagcatccagctgttcccccccgagctggtggagcacatcatcagcttcctgcccgtgagagacctggtggccctgggccagacctgcagatacttccacgaggtgtgcgacggcgagggcgtgtggagaagaatctgcagaagactgagccccagactgcaggaccagggcagcggcgtgagaccctggaagagagccgccatcctgaactacaccaagggcctgtacttccaggccttcggcggcagaagaagatgcctgagcaagagcgtggcccccctgctggcccacggctacagaagattcctgcccaccaaggaccacgtgttcatcctggactacgtgggcaccctgttcttcctgaagaacgccctggtgagcaccctgggccagatgcagtggaagagagcctgcagatacgtggtgctgtgcagaggcgccaaggacttcgccagcgaccccagatgcgacaccgtgtacagaaagtacctgtacgtgctggccaccagagagccccaggaggtggtgggcaccaccagcagcagagcctgcgactgcgtggaggtgtacctgcagagcagcggccagagagtgttcaagatgaccttccaccacagcatgaccttcaagcagatcgtgctggtgggccaggagacccagagagccctgctgctgctgaccgaggagggcaagatctacagcctggtggtgaacgagacccagctggaccagcccagaagctacaccgtgcagctggccctgagaaaggtgagccactacctgccccacctgagagtggcctgcatgaccagcaaccagagcagcaccctgtacgtgaccgaccagggcggcgtgtacttcgaggtgcacacccccggcgtgtacagagacctgttcggcaccctgcaggccttcgaccccctggaccagcagatgcccctggccctgagcctgcccgccaagatcctgttctgcgccctgggctacaaccacctgggcctggtggacgagttcggcagaatcttcatgcagggcaacaacagatacggccagctgggcaccggcgacaagatggacagaggcgagcccacccaggtgtgctacctgcagagacccatcaccctgtggtgcggcctgaaccacagcctggtgctgagccagagcagcgagttcagcaaggagctgctgggctgcggctgcggcgccggcggcagactgcccggctggcccaagggcagcgccagcttcgtgaagctgcaggtgaaggtgcccctgtgcgcctgcgccctgtgcgccaccagagagtgcctgtacatcctgagcagccacgacatcgagcagcacgccccctacagacacctgcccgccagcagagtggtgggcacccccgagcccagcctgggcgccagagccccccaggaccccggcggcatggcccaggcctgcgaggagtacctgagccagatccacagctgccagaccctgcaggacagaaccgagaagatgaaggagatcgtgggctggatgcccctgatggccgcccagaaggacttcttctgggaggccctggacatgctgcagagagccgagggcggcggcggcggcgtgggcccccccgcccccgagacctag

SEQ ID NO: 81409 - DNA, 957 bp, synthetic construct
  misc_feature 1..957: note = Description of Artificial Sequence: Synthetic coding sequence
  source 1..957: mol_type = other DNA
atgggcgagaaggccgtgcccctgctgagaagaagaagagtgaagagaagctgccccagctgcggcagcgagctgggcgtggaggagaagagaggcaagggcaaccccatcagcatccagctgttcccccccgagctggtggagcacatcatcagcttcctgcccgtgagagacctggtggccctgggccagacctgcagatacttccacgaggtgtgcgacggcgagggcgtgtggagaagaatctgcagaagactgagccccagactgcaggaccaggacaccaagggcctgtacttccaggccttcggcggcagaagaagatgcctgagcaagagcgtggcccccctgctggcccacggctacagaagattcctgcccaccaaggaccacgtgttcatcctggactacgtgggcaccctgttcttcctgaagaacgccctggtgagcaccctgggccagatgcagtggaagagagcctgcagatacgtggtgctgtgcagaggcgccaaggacttcgccagcgaccccagatgcgacaccgtgtacagaaagtacctgtacgtgctggccaccagagagccccaggaggtggtgggcaccaccagcagcagagcctgcgactgcgtggaggtgtacctgcagagcagcggccagagagtgttcaagatgaccttccaccacagcatgaccttcaagcagatcgtgctggtgggccaggagacccagagagccctgctgctgctgaccgaggagggcaagatctacagcctggtggtgaacgagacccagctggaccagcccagaagctacaccgtgcagctggccctgagaaaggtgagccactacctgccccacctgagagtggcctgcatgaccagcaaccagagcagcaccctgtacgtgaccgaccccatcctgtgcagctggctgcagcccccctggcccggcggctag

SEQ ID NO: 81410 - DNA, 1857 bp, synthetic construct
  misc_feature 1..1857: note = Description of Artificial Sequence: Synthetic coding sequence
  source 1..1857: mol_type = other DNA
atggtgtgggagagccagcaggagagaggcggccagggccccagaagacaggagggcagaagcagagagggcgccatcagaatggtgagaggcagccagagaagaaagctgcagaagttcaccagactgtgcggcagagaggagggcctgagagtgaagagaagctgccccagctgcggcagcgagctgggcgtggaggagaagagaggcaagggcaaccccatcagcatccagctgttcccccccgagctggtggagcacatcatcagcttcctgcccgtgagagacctggtggccctgggccagacctgcagatacttccacgaggtgtgcgacggcgagggcgtgtggagaagaatctgcagaagactgagccccagactgcaggaccagggcagcggcgtgagaccctggaagagagccgccatcctgaactacaccaagggcctgtacttccaggccttcggcggcagaagaagatgcctgagcaagagcgtggcccccctgctggcccacggctacagaagattcctgcccaccaaggaccacgtgttcatcctggactacgtgggcaccctgttcttcctgaagaacgccctggtgagcaccctgggccagatgcagtggaagagagcctgcagatacgtggtgctgtgcagaggcgccaaggacttcgccagcgaccccagatgcgacaccgtgtacagaaagtacctgtacgtgctggccaccagagagccccaggaggtggtgggcaccaccagcagcagagcctgcgactgcgtggaggtgtacctgcagagcagcggccagagagtgttcaagatgaccttccaccacagcatgaccttcaagcagatcgtgctggtgggccaggagacccagagagccctgctgctgctgaccgaggagggcaagatctacagcctggtggtgaacgagacccagctggaccagcccagaagctacaccgtgcagctggccctgagaaaggtgagccactacctgccccacctgagagtggcctgcatgaccagcaaccagagcagcaccctgtacgtgaccgaccagggcggcgtgtacttcgaggtgcacacccccggcgtgtacagagacctgttcggcaccctgcaggccttcgaccccctggaccagcagatgcccctggccctgagcctgcccgccaagatcctgttctgcgccctgggctacaaccacctgggcctggtggacgagttcggcagaatcttcatgcagggcaacaacagatacggccagctgggcaccggcgacaagatggacagaggcgagcccacccaggtgtgctacctgcagagacccatcaccctgtggtgcggcctgaaccacagcctggtgctgagccagagcagcgagttcagcaaggagctgctgggctgcggctgcggcgccggcggcagactgcccggctggcccaagggcagcgccagcttcgtgaagctgcaggtgaaggtgcccctgtgcgcctgcgccctgtgcgccaccagagagtgcctgtacatcctgagcagccacgacatcgagcagcacgccccctacagacacctgcccgccagcagagtggtgggcacccccgagcccagcctgggcgccagagccccccaggaccccggcggcatggcccaggcctgcgaggagtacctgagccagatccacagctgccagaccctgcaggacagaaccgagaagatgaaggagatcgtgggctggatgcccctgatggccgcccagaaggacttcttctgggaggccctggacatgctgcagagagccgagggcggcggcggcggcgtgggcccccccgcccccgagacctag

SEQ ID NO: 81411 - DNA, 957 bp, synthetic construct; identical to SEQ ID NO: 81409
  misc_feature 1..957: note = Description of Artificial Sequence: Synthetic coding sequence
  source 1..957: mol_type = other DNA

SEQ ID NO: 81412 - DNA, 1707 bp, synthetic construct
  misc_feature 1..1707: note = Description of Artificial Sequence: Synthetic coding sequence
  source 1..1707: mol_type = other DNA
atggtgaagagaagctgccccagctgcggcagcgagctgggcgtggaggagaagagaggcaagggcaaccccatcagcatccagctgttcccccccgagctggtggagcacatcatcagcttcctgcccgtgagagacctggtggccctgggccagacctgcagatacttccacgaggtgtgcgacggcgagggcgtgtggagaagaatctgcagaagactgagccccagactgcaggaccagggcagcggcgtgagaccctggaagagagccgccatcctgaactacaccaagggcctgtacttccaggccttcggcggcagaagaagatgcctgagcaagagcgtggcccccctgctggcccacggctacagaagattcctgcccaccaaggaccacgtgttcatcctggactacgtgggcaccctgttcttcctgaagaacgccctggtgagcaccctgggccagatgcagtggaagagagcctgcagatacgtggtgctgtgcagaggcgccaaggacttcgccagcgaccccagatgcgacaccgtgtacagaaagtacctgtacgtgctggccaccagagagccccaggaggtggtgggcaccaccagcagcagagcctgcgactgcgtggaggtgtacctgcagagcagcggccagagagtgttcaagatgaccttccaccacagcatgaccttcaagcagatcgtgctggtgggccaggagacccagagagccctgctgctgctgaccgaggagggcaagatctacagcctggtggtgaacgagacccagctggaccagcccagaagctacaccgtgcagctggccctgagaaaggtgagccactacctgccccacctgagagtggcctgcatgaccagcaaccagagcagcaccctgtacgtgaccgaccagggcggcgtgtacttcgaggtgcacacccccggcgtgtacagagacctgttcggcaccctgcaggccttcgaccccctggaccagcagatgcccctggccctgagcctgcccgccaagatcctgttctgcgccctgggctacaaccacctgggcctggtggacgagttcggcagaatcttcatgcagggcaacaacagatacggccagctgggcaccggcgacaagatggacagaggcgagcccacccaggtgtgctacctgcagagacccatcaccctgtggtgcggcctgaaccacagcctggtgctgagccagagcagcgagttcagcaaggagctgctgggctgcggctgcggcgccggcggcagactgcccggctggcccaagggcagcgccagcttcgtgaagctgcaggtgaaggtgcccctgtgcgcctgcgccctgtgcgccaccagagagtgcctgtacatcctgagcagccacgacatcgagcagcacgccccctacagacacctgcccgccagcagagtggtgggcacccccgagcccagcctgggcgccagagccccccaggaccccggcggcatggcccaggcctgcgaggagtacctgagccagatccacagctgccagaccctgcaggacagaaccgagaagatgaaggagatcgtgggctggatgcccctgatggccgcccagaaggacttcttctgggaggccctggacatgctgcagagagccgagggcggcggcggcggcgtgggcccccccgcccccgagacctag

SEQ ID NO: 81413 - DNA, 1104 bp, synthetic construct
  misc_feature 1..1104: note = Description of Artificial Sequence: Synthetic coding sequence
  source 1..1104: mol_type = other DNA
atgcccttcctgggccaggactggagaagccccggctggagctggatcaagaccgaggacggctggaagagatgcgagagctgcagccagaagctggagagagagaacaacagatgcaacatcagccacagcatcatcctgaacagcgaggacggcgagatcttcaacaacgaggagcacgagtacgccagcaagaagagaaagaaggaccacttcagaaacgacaccaacacccagagcttctacagagagaagtggatctacgtgcacaaggagagcaccaaggagagacacggctactgcaccctgggcgaggccttcaacagactggacttcagcagcgccatccaggacatcagaagattcaactacgtggtgaagctgctgcagctgatcgccaagagccagctgaccagcctgagcggcgtggcccagaagaactacttcaacatcctggacaagatcgtgcagaaggtgctggacgaccaccacaaccccagactgatcaaggacctgctgcaggacctgagcagcaccctgtgcatcctgatcagaggcgtgggcaagagcgtgctggtgggcaacatcaacatctggatctgcagactggagaccatcctggcctggcagcagcagctgcaggacctgcagatgaccaagcaggtgaacaacggcctgaccctgagcgacctgcccctgcacatgctgaacaacatcctgtacagattcagcgacggctgggacatcatcaccctgggccaggtgacccccaccctgtacatgctgagcgaggacagacagctgtggaagaagctgtgccagtaccacttcgccgagaagcagttctgcagacacctgatcctgagcgagaagggccacatcgagtggaagctgatgtacttcgccctgcagaagcactaccccgccaaggagcagtacggcgacaccctgcacttctgcagacactgcagcatcctgttctggaaggactaccacctggccctgctgttcaaggacagcggccacccctgcaccgccgccgaccccgacagctgcttcacccccgtgagcccccagcacttcatcgacctgttcaagttctag

SEQ ID NO: 81414 - DNA, 1077 bp, synthetic construct
  misc_feature 1..1077: note = Description of Artificial Sequence: Synthetic coding sequence
  source 1..1077: mol_type = other DNA
atgcccttcctgggccaggactggagaagccccggctggagctggatcaagaccgaggacggctggaagagatgcgagagctgcagccagaagctggagagagagaacaacagatgcaacatcagccacagcatcatcctgaacagcgaggacggcgagatcttcaacaacgaggagcacgagtacgccagcaagaagagaaagaaggaccacttcagaaacgacaccaacacccagagcttctacagagagaagtggatctacgtgcacaaggagagcaccaaggagagacacggctactgcaccctgggcgaggccttcaacagactggacttcagcagcgccatccaggacatcagaagattcaactacgtggtgaagctgctgcagctgatcgccaagagccagctgaccagcctgagcggcgtggcccagaagaactacttcaacatcctggacaagatcgtgcagaaggtgctggacgaccaccacaaccccagactgatcaaggacctgctgcaggacctgagcagcaccctgtgcatcctgatcagaggcgtgggcaagagcgtgctggtgggcaacatcaacatctggatctgcagactggagaccatcctggcctggcagcagcagctgcaggacctgcagatgaccaagcaggtgaacaacggcctgaccctgagcgacctgcccctgcacatgctgaacaacatcctgtacagattcagcgacggctgggacatcatcaccctgggccaggtgacccccaccctgtacatgctgagcgaggacagacagctgtggaagaagctgtgccagtaccacttcgccgagaagcagttctgcagacacctgatcctgagcgagaagggccacatcgagtggaagctgatgtacttcgccctgcagaagcactaccccgccaaggagcagtacggcgacaccctgcacttctgcagacactgcagcatcctgttctggaaggacagcggccacccctgcaccgccgccgaccccgacagctgcttcacccccgtgagcccccagcacttcatcgacctgttcaagttctag

SEQ ID NO: 81415 - DNA, 876 bp, synthetic construct
  misc_feature 1..876: note = Description of Artificial Sequence: Synthetic coding sequence
  source 1..876: mol_type = other DNA
atggagaagtacagcatcatgaagagcatgaacatgcacagaaagaagggcaagagaaccatcctggagatgacccagatcctgaagagacacggctactgcaccctgggcgaggccttcaacagactggacttcagcagcgccatccaggacatcagaagattcaactacgtggtgaagctgctgcagctgatcgccaagagccagctgaccagcctgagcggcgtggcccagaagaactacttcaacatcctggacaagatcgtgcagaaggtgctggacgaccaccacaaccccagactgatcaaggacctgctgcaggacctgagcagcaccctgtgcatcctgatcagaggcgtgggcaagagcgtgctggtgggcaacatcaacatctggatctgcagactggagaccatcctggcctggcagcagcagctgcaggacctgcagatgaccaagcaggtgaacaacggcctgaccctgagcgacctgcccctgcacatgctgaacaacatcctgtacagattcagcgacggctgggacatcatcaccctgggccaggtgacccccaccctgtacatgctgagcgaggacagacagctgtggaagaagctgtgccagtaccacttcgccgagaagcagttctgcagacacctgatcctgagcgagaagggccacatcgagtggaagctgatgtacttcgccctgcagaagcactaccccgccaaggagcagtacggcgacaccctgcacttctgcagacactgcagcatcctgttctggaaggacagcggccacccctgcaccgccgccgaccccgacagctgcttcacccccgtgagcccccagcacttcatcgacctgttcaagttctag

SEQ ID NO: 81416 - DNA, 876 bp, synthetic construct; identical to SEQ ID NO: 81415
  misc_feature 1..876: note = Description of Artificial Sequence: Synthetic coding sequence
  source 1..876: mol_type = other DNA

SEQ ID NO: 81417 - DNA, 993 bp, synthetic construct
  misc_feature 1..993: note = Description of Artificial Sequence: Synthetic coding sequence
  source 1..993: mol_type = other DNA
atgcccttcctgggccaggactggagaagccccggctggagctggatcaagaccgaggacggctggaagagatgcgagagctgcagccagaagctggagagagagaacaacagatgcaacatcagccacagcatcatcctgaacagcgaggacggcgagatcttcaacaacgaggagcacgagtacgccagcaagaagagaaagaaggaccacttcagaaacgacaccaacacccagagcttctacagagagaagtggatctacgtgcacaaggagagcaccaaggagagacacggctactgcaccctgggcgaggccttcaacagactggacttcagcagcgccatccaggacatcagaagattcaactacgtggtgaagctgctgcagctgatcgccaagagccagctgaccagcctgagcggcgtggcccagaagaactacttcaacatcctggacaagatcgtgcagaaggtgctggacgaccaccacaaccccagactgatcaaggacctgctgcaggacctgagcagcaccctgtgcatcctgatcagaggcgtgggcaagagcgtgctggtgggcaacatcaacatctggatctgcagactggagaccatcctggcctggcagcagcagctgcaggacctgcagatgaccaagcaggtgaacaacggcctgaccctgagcgacctgcccctgctgagcgaggacagacagctgtggaagaagctgtgccagtaccacttcgccgagaagcagttctgcagacacctgatcctgagcgagaagggccacatcgagtggaagctgatgtacttcgccctgcagaagcactaccccgccaaggagcagtacggcgacaccctgcacttctgcagacactgcagcatcctgttctggaaggacagcggccacccctgcaccgccgccgaccccgacagctgcttcacccccgtgagcccccagcacttcatcgacctgttcaagttctag

SEQ ID NO: 81418 - DNA, 378 bp, synthetic construct
  misc_feature 1..378: note = Description of Artificial Sequence: Synthetic coding sequence
  source 1..378: mol_type = other DNA
atgcccttcctgggccaggactggagaagccccggctggagctggatcaagaccgaggacggctggaagagatgcgagagctgcagccagaagctggagagagagaacaacagatgcaacatcagccacagcatcatcctgaacagcgaggacggcgagatcttcaacaacgaggagcacgagtacgccagcaagaagagaaagaaggaccacttcagaaacgacaccaacacccagagcttctacagagagaagtggatctacgtgcacaaggagagcaccaaggagagacacggctactgcaccctgggcgaggccttcaacagactggacttcagcagcgccatccaggacatcagaagattcaactacgtgtag

SEQ ID NO: 81419 - DNA, 852 bp, synthetic construct
  misc_feature 1..852: note = Description of Artificial Sequence: Synthetic coding sequence
  source 1..852: mol_type = other DNA
atgggcgccagcgtgagcagaggcagagccgccagagtgcccgcccccgagcccgagcccgaggaggccctggacctgagccagctgccccccgagctgctgctggtggtgctgagccacgtgccccccagaaccctgctgggcagatgcagacaggtgtgcagaggctggagagccctggtggacggccaggccctgtggctgctgatcctggccagagaccacggcgccaccggcagagccctgctgcacctggccagaagctgccagagccccgccagaaacgccagaccctgccccctgggcagattctgcgccagaagacccatcggcagaaacctgatcagaaacccctgcggccaggagggcctgagaaagtggatggtgcagcacggcggcgacggctgggtggtggaggagaacagaaccaccgtgcccggcgcccccagccagacctgcttcgtgaccagcttcagctggtgctgcaagaagcaggtgctggacctggaggaggagggcctgtggcccgagctgctggacagcggcagaatcgagatctgcgtgagcgactggtggggcgccagacacgacagcggctgcatgtacagactgctggtgcagctgctggacgccaaccagaccgtgctggacaagttcagcgccgtgcccgaccccatcccccagtggaacaacaacgcctgcctgcacgtgacccacgtgttcagcaacatcaagatgggcgtgagattcgtgagcttcgagcacagaggccaggacacccagttctgggccggccactacggcgccagagtgaccaacagcagcgtgatcgtgagagtgagactgagctag

SEQ ID NO: 81420 - DNA, 852 bp, synthetic construct; identical to SEQ ID NO: 81419
  misc_feature 1..852: note = Description of Artificial Sequence: Synthetic coding sequence
  source 1..852: mol_type = other DNA

SEQ ID NO: 81421 - DNA, 1107 bp, synthetic construct
  misc_feature 1..1107: note = Description of Artificial Sequence: Synthetic coding sequence
  source 1..1107: mol_type = other DNA
atggccgccgccgccgaggagagaatggccgaggagggcggcggcggccagggcgacggcggcagcagcctggccagcggcagcacccagagacagccccccccccccgccccccagcacccccagcccggcagccaggccctgcccgcccccgccctggcccccgaccagctgccccagaacaacaccctggtggccctgcccatcgtggccatcgagaacatcctgagcttcatgagctacgacgagatcagccagctgagactggtgtgcaagagaatggacctggtgtgccagagaatgctgaaccagggcttcctgaaggtggagagataccacaacctgtgccagaagcaggtgaaggcccagctgcccagaagagagagcgagagaagaaaccacagcctggccagacacgccgacatcctggccgccgtggagaccagactgagcctgctgaacatgaccttcatgaagtacgtggacagcaacctgtgctgcttcatccccggcaaggtgatcgacgagatctacagagtgctgagatacgtgaacagcaccagagccccccagagagcccacgaggtgctgcaggagctgagagacatcagcagcatggccatggagtacttcgacgagaagatcgtgcccatcctgaagagaaagctgcccggcagcgacgtgagcggcagactgatgggcagcccccccgtgcccggccccagcgccgccctgaccaccatgcagctgttcagcaagcagaaccccagcagacaggaggtgaccaagctgcagcagcaggtgaagaccaacggcgccggcgtgaccgtgctgagaagagagatcagcgagctgagaaccaaggtgcaggagcagcagaagcagctgcaggaccaggaccagaagctgctggagcagacccagatcatcggcgagcagaacgccagactggccgagctggagagaaagctgagagaggtgatggagagcgccgtgggcaacagcagcggcagcggccagaacgaggagagccccagaaagagaaagaaggccaccgaggccatcgacagcctgagaaagagcaagagactgagaaacagaaagtag

SEQ ID NO: 81422 - DNA, 540 bp, synthetic construct
  misc_feature 1..540: note = Description of Artificial Sequence: Synthetic coding sequence
  source 1..540: mol_type = other DNA
atggccgccgccgccgaggagagaatggccgaggagggcggcggcggccagggcgacggcggcagcagcctggccagcggcagcacccagagacagccccccccccccgccccccagcacccccagcccggcagccaggccctgcccgcccccgccctggcccccgaccagctgccccagaacaacaccctggtggccctgcccatcgtggccatcgagaacatcctgagcttcatgagctacgacgagatcagccagctgagactggtgtgcaagagaatggacctggtgtgccagagaatgctgaaccagggcttcctgaaggtggagagataccacaacctgtgccagaagcaggtgaaggcccagctgcccagaagagagagcgagagaagaaaccacagcctggccagacacgccgacatcctggccgccgtggagaccagactgagcctgctgaacatgaccttcatgaagtacgtggacagcaacctgtgctgcttcatccccggcaagttccaggacagactgcagccctag

SEQ ID NO: 81423 - DNA, 1416 bp, synthetic construct
  misc_feature 1..1416: note = Description of Artificial Sequence: Synthetic coding sequence
  source 1..1416: mol_type = other DNA
atggccgccatggagaccgagaccgcccccctgaccctggagagcctgcccaccgaccccctgctgctgatcctgagcttcctggactacagagacctgatcaactgctgctacgtgagcagaagactgagccagctgagcagccacgaccccctgtggagaagacactgcaagaagtactggctgatcagcgaggaggagaagacccagaagaaccagtgctggaagagcctgttcatcgacacctacagcgacgtgggcagatacatcgaccactacgccgccatcaagaaggcctgggacgacctgaagaagtacctggagcccagatgccccagaatggtgctgagcctgaaggagggcgccagagaggaggacctggacgccgtggaggcccagatcggctgcaagctgcccgacgactacagatgcagctacagaatccacaacggccagaagctggtggtgcccggcctgctgggcagcatggccctgagcaaccactacagaagcgaggacctgctggacgtggacaccgccgccggcggcttccagcagagacagggcctgaagtactgcctgcccctgaccttctgcatccacaccggcctgagccagtacatcgccgtggaggccgccgagggcagaaacaagaacgaggtgttctaccagtgccccgaccagatggccagaaaccccgccgccatcgacatgttcatcatcggcgccaccttcaccgactggttcaccagctacgtgaagaacgtggtgagcggcggcttccccatcatcagagaccagatcttcagatacgtgcacgaccccgagtgcgtggccaccaccggcgacatcaccgtgagcgtgagcaccagcttcctgcccgagctgagcagcgtgcaccccccccactacttcttcacctacagaatcagaatcgagatgagcaaggacgccctgcccgagaaggcctgccagctggacagcagatactggagaatcaccaacgccaagggcgacgtggaggaggtgcagggccccggcgtggtgggcgagttccccatcatcagccccggcagagtgtacgagtacaccagctgcaccaccttcagcaccaccagcggctacatggagggctactacaccttccacttcctgtacttcaaggacaagatcttcaacgtggccatccccagattccacatggcctgccccaccttcagagtgagcatcgccagactggagatgggccccgacgagtacgaggagatggaggaggaggaggaggaggaggaggaggaggacgaggacgacgacagcgccgacatggacgagagcgacgaggacgacgaggaggagagaagaagaagagtgttcgacgtgcccatcagaagaagaagatgcagcagactgttctag

SEQ ID NO: 81424 - DNA, 519 bp, synthetic construct
  misc_feature 1..519: note = Description of Artificial Sequence: Synthetic coding sequence
  source 1..519: mol_type = other DNA
atggagaccgagaccgcccccctgaccctggagagcctgcccaccgaccccctgctgctgatcctgagcttcctggactacagagacctgatcaactgctgctacgtgagcagaagactgagccagctgagcagccacgaccccctgtggagaagacactgcaagaagtactggctgatcagcgaggaggagaagacccagaagaaccagtgctggaagagcctgttcatcgacacctacagcgacgtgggcagatacatcgaccactacgccgccatcaagaaggccggcatgatcagcagaaacatctggagccccggcgtgctgggctggttcgtgagcatcaacagaggctgcagcagaggcagacccagatgctgcggcagcgccgactggtgcaagctgcccgacgactacagatgcagctacagaatccacaacggccagaagctggtggtgcccggcagctactgggaggcctggcactgcctgatcaccatcgtgctgaagatctgctag

SEQ ID NO: 81425 - DNA, 1248 bp, synthetic construct
  misc_feature 1..1248: note = Description of Artificial Sequence: Synthetic coding sequence
  source 1..1248: mol_type = other DNA
atggccgccatggagaccgagaccgcccccctgaccctggagagcctgcccaccgaccccctgctgctgatcctgagcttcctggactacagagacctgatcaactgctgctacgtgagcagaagactgagccagctgagcagccacgaccccctgtggagaagacactgcaagaagtactggctgatcagcgaggaggagaagacccagaagaaccagtgctggaagagcctgttcatcgacacctacagcgacgtgggcagatacatcgaccactacgccgccatcaagaaggcctgggacgacctgaagaagtacctggagcccagatgccccagaatggtgctgagcctgaaggagggcgccagagaggaggacctggacgccgtggaggcccagatcggctgcaagctgcccgacgactacagatgcagctacagaatccacaacggccagaagctggtggtgcccggcctgctgggcagcatggccctgagcaaccactacagaagcgaggacctgctggacgtggacaccgccgccggcggcttccagcagagacagggcctgaagtactgcctgcccctgaccttctgcatccacaccggcctgagccagtacatcgccgtggaggccgccgagggcagaaacaagaacgaggtgttctaccagtgccccgaccagatggccagaaaccccgccgccatcgacatgttcatcatcggcgccaccttcaccgactggttcaccagctacgtgaagaacgtggtgagcggcggcttccccatcatcagagaccagatcttcagatacgtgcacgaccccgagtgcgtggccaccaccggcgacatcaccgtgagcgtgagcaccagcttcctgcccgagctgagcagcgtgcaccccccccactacttcttcacctacagaatcagaatcgagatgagcaaggacgccctgcccgagaaggcctgccagctggacagcagatactggagaatcaccaacgccaagggcgacgtggaggaggtgcagggccccggcgtggtgggcgagttccccatcatcagccccggcagagtgtacgagtacaccagctgcaccaccttcagcaccaccagcggctacatggagggctactacaccttccacttcctgtacttcaaggacaagatcttcaacgtggccatccccagattccacatggcctgccccaccttcagagtgagcatcgccagactggtgagctag

SEQ ID NO: 81426 - DNA, 2238 bp, synthetic construct
  misc_feature 1..2238: note = Description of Artificial Sequence: Synthetic coding sequence
  source 1..2238: mol_type = other DNA
atggaggaggagctgcagcacagccactgcgtgaactgcgtgagcagaagatgcatgaccagacccgagcccggcatcagctgcgacctgatcggctgccccctggtgtgcggcgccgtgttccacagctgcaaggccgacgagcacagactgctgtgccccttcgagagagtgccctgcctgaacagcgacttcggctgccccttcaccatggccagaaacaaggtggccgagcacctggagatgtgccccgccagcgtggtgtgctgcaccatggagtggaacagatggcccgtgagctacgccgacagaaagagctacgagaacctgagcagagacgtggacgaggtggcccagctggacatggccctggccctgcaggaccagagaatgctgctggagagcctgaaggtggccaccatgatgagcaaggccaccgacaaggtgagcaagcccagagagcagatcagcgtgaagagcagcgtgcccgagatcccccacgccaacggcctggtgagcgtggacgaggagagctacggcgccctgtaccaggccaccgtggagaccaccagaagcctggccgccgccctggacatcctgaacaccgccaccagagacatcggcatgctgaacaccagcgtgcccaacgacatggacgagcagcagaacgccagagagagcctggaggaccagaacctgaaggaccaggaccacctgtacgaggaggagatcggcgccgtgggcggcatcgactacaacgacaccaaccagaacgcccagagcgagcagaacggcagcagcgacctgctgtgcgacctgaacaccagcagctacgacaccagcgccctgtgcaacggcttccccctggagaacatctgcacccaggtgatcgaccagaaccagaacctgcacggcgacagcaagcagagcaacctgaccaacggcgactgcgtggccagcagcgacggcaccagcaagcccagcagcagcctggccgtggccgcccagctgagagagatcatccccagcagcgccctgcccaacggcaccgtgcagcacatcctgatgcccgacgacgagggcgagggcgagctgtgctggaagaaggtggacctgggcgacgtgaagaacgtggacgtgctgagcttcagccacgcccccagcttcaacttcctgagcaacagctgctggagcaagcccaaggaggacaaggccgtggacaccagcgacctggaggtggccgaggaccccatgggcctgcagggcatcgacctgatcaccgccgccctgctgttctgcctgggcgacagccccggcggcagaggcatcagcgacagcagaatggccgacatctaccacatcgacgtgggcacccagaccttcagcctgcccagcgccatcctggccaccagcaccatggtgggcgagatcgccagcgccagcgcctgcgaccacgccaacccccagctgagcaaccccagccccttccagaccctgggcctggacctggtgctggagtgcgtggccagataccagcccaagcagagaagcatgttcaccttcgtgtgcggccagctgttcagaagaaaggagttcagcagccacttcaagaacgtgcacggcgacatccacgccggcctgaacggctggatggagcagagatgccccctggcctactacggctgcacctacagccagagaagattctgccccagcatccagggcgccaagatcatccacgacagacacctgagaagcttcggcgtgcagccctgcgtgagcaccgtgctggtggagcccgccagaaactgcgtgctgggcctgcacaacgaccacctgagcagcctgcccttcgaggtgctgcagcacatcgccggcttcctggacggcttcagcctgtgccagctgagctgcgtgagcaagctgatgagagacgtgtgcggcagcctgctgcagagcagaggcatggtgatcctgcagtggggcaagagaaagtaccccgagggcaacagcagctggcagatcaaggagaaggtgtggagattcagcaccgccttctgcagcgtgaacgagtggaagttcgccgacatcctgagcatggccgaccacctgaagaagtgcagctacaacgtggtggagaagagagaggaggccatccccctgccctgcatgtgcgtgaccagagagctgaccaaggagggcagaagcctgagaagcgtgctgaagcccgtgctgtag

SEQ ID NO: 81427 - DNA, 1620 bp, synthetic construct
  misc_feature 1..1620: note = Description of Artificial Sequence: Synthetic coding sequence
  source 1..1620: mol_type = other DNA
atggccgtgtgcgccagactgtgcggcgtgggccccagcagaggctgcagaagaagacagcagagaagaggccccgccgagaccgccgccgccgacagcgagcccgacaccgaccccgaggaggagagaatcgaggccagcgccggcgtgggcggcggcctgtgcgccggccccagcccccccccccccagatgcagcctgctggagctgccccccgagctgctggtggagatcttcgccagcctgcccggcaccgacctgcccagcctggcccaggtgtgcaccaagttcagaagaatcctgcacaccgacaccatctggagaagaagatgcagagaggagtacggcgtgtgcgagaacctgagaaagctggagatcaccggcgtgagctgcagagacgtgtacgccaagctgctgcacagatacagacacatcctgggcctgtggcagcccgacatcggcccctacggcggcctgctgaacgtggtggtggacggcctgttcatcatcggctggatgtacctgcccccccacgacccccacgtggacgaccccatgagattcaagcccctgttcagaatccacctgatggagagaaaggccgccaccgtggagtgcatgtacggccacaagggcccccaccacggccacatccagatcgtgaagaaggacgagttcagcaccaagtgcaaccagaccgaccaccacagaatgagcggcggcagacaggaggagttcagaacctggctgagagaggagtggggcagaaccctggaggacatcttccacgagcacatgcaggagctgatcctgatgaagttcatctacaccagccagtacgacaactgcctgacctacagaagaatctacctgccccccagcagacccgacgacctgatcaagcccggcctgttcaagggcacctacggcagccacggcctggagatcgtgatgctgagcttccacggcagaagagccagaggcaccaagatcaccggcgaccccaacatccccgccggccagcagaccgtggagatcgacctgagacacagaatccagctgcccgacctggagaaccagagaaacttcaacgagctgagcagaatcgtgctggaggtgagagagagagtgagacaggagcagcaggagggcggccacgaggccggcgagggcagaggcagacagggccccagagagagccagcccagccccgcccagcccagagccgaggcccccagcaagggccccgacggcacccccggcgaggacggcggcgagcccggcgacgccgtggccgccgccgagcagcccgcccagtgcggccagggccagcccttcgtgctgcccgtgggcgtgagcagcagaaacgaggactaccccagaacctgcagaatgtgcttctacggcaccggcctgatcgccggccacggcttcaccagccccgagagaacccccggcgtgttcatcctgttcgacgaggacagattcggcttcgtgtggctggagctgaagagcttcagcctgtacagcagagtgcaggccaccttcagaaacgccgacgcccccagcccccaggccttcgacgagatgctgaagaacatccagagcctgaccagctag

SEQ ID NO: 81428 - DNA, 1068 bp, synthetic construct
  misc_feature 1..1068: note = Description of Artificial Sequence: Synthetic coding sequence
  source 1..1068: mol_type = other DNA
atgcccttcctgggccaggactggagaagccccggccagaactgggtgaagaccgccgacggctggaagagattcctggacgagaagagcggcagcttcgtgagcgacctgagcagctactgcaacaaggaggtgtacaacaaggagaacctgttcaacagcctgaactacgacgtggccgccaagaagagaaagaaggacatgctgaacagcaagaccaagacccagtacttccaccaggagaagtggatctacgtgcacaagggcagcaccaaggagagacacggctactgcaccctgggcgaggccttcaacagactggacttcagcaccgccatcctggacagcagaagattcaactacgtggtgagactgctggagctgatcgccaagagccagctgaccagcctgagcggcatcgcccagaagaacttcatgaacatcctggagaaggtggtgctgaaggtgctggaggaccagcagaacatcagactgatcagagagctgctgcagaccctgtacaccagcctgtgcaccctggtgcagagagtgggcaagagcgtgctggtgggcaacatcaacatgtgggtgtacagaatggagaccatcctgcactggcagcagcagctgaacaacatccagatcaccagacccgccttcaagggcctgaccttcaccgacctgcccctgtgcctgcagctgaacatcatgcagagactgagcgacggcagagacctggtgagcctgggccaggccgcccccgacctgcacgtgctgagcgaggacagactgctgtggaagaagctgtgccagtaccacttcagcgagagacagatcagaaagagactgatcctgagcgacaagggccagctggactggaagaagatgtacttcaagctggtgagatgctaccccagaaaggagcagtacggcgacaccctgcagctgtgcaagcactgccacatcctgagctggaagggcaccgaccacccctgcaccgccaacaaccccgagagctgcagcgtgagcctgagcccccaggacttcatcaacctgttcaagttctag

SEQ ID NO: 81429 - DNA, 789 bp, synthetic construct
  misc_feature 1..789: note = Description of Artificial Sequence: Synthetic coding sequence
  source 1..789: mol_type = other DNA
atgcccttcctgggccaggactggagaagccccggccagaactgggtgaagaccgccgacggctggaagagattcctggacgagaagagcggcagcttcgtgagcgacctgagcagctactgcaacaaggaggtgtacaacaaggagaacctgttcaacagcctgaactacgacgtggccgccaagaagagaaagaaggacatgctgaacagcaagaccaagacccagtacttccaccaggagaagtggatctacgtgcacaagggcagcaccaaggagagacacggctactgcaccctgggcgaggccttcaacagactggacttcagcaccgccatcctggacagcagaagattcaactacgtggtgagacccgccttcaagggcctgaccttcaccgacctgcccctgtgcctgcagctgaacatcatgcagagactgagcgacggcagagacctggtgagcctgggccaggccgcccccgacctgcacgtgctgagcgaggacagactgctgtggaagaagctgtgccagtaccacttcagcgagagacagatcagaaagagactgatcctgagcgacaagggccagctggactggaagaagatgtacttcaagctggtgagatgctaccccagaaaggagcagtacggcgacaccctgcagctgtgcaagcactgccacatcctgagctggaagggcaccgaccacccctgcaccgccaacaaccccgagagctgcagcgtgagcctgagcccccaggacttcatcaacctgttcaagttctag

SEQ ID NO: 81430 - DNA, 1668 bp, synthetic construct
  misc_feature 1..1668: note = Description of Artificial Sequence: Synthetic coding sequence
  source 1..1668: mol_type = other DNA
atgctgctgttcctgagcgtgccccagcccagaccccccggcgccagaaccagagccggcgccgccagagtggccagatggagaagactgagactgcagcagctgagaagactgagaggcctgctgagagtgctgagaggcagacccggcgccggcagcagaagaagaggcagaatggccctgtgcggccaggccgccggcgccgccagcctgcccagcgagctgatcgtgcacatcttcagcttcctgcccgcccccgacagactgagagccagcgccagctgcagccactggagagagtgcctgttctaccccgccctgtggccccagctgagaatctgcctgagagtgagccccgccgagcagcccagactggagttcctgatgagaaagtgcggctggttcgtgagagagctgagagtggagttcgccgccgagaactacctgagcggcggcggccccggcgacggcggcggcgccgacaccggcaccggcggcgaggaggtggaggccctgcagctgagcgccagatggctggaggtgctgagaacctacctggagctggtgctgtgcgtgctggtgagcatcagaaacaacagaaacctgcagaagttcagcctgttcggcgacatcagcgtgctgcagcagcagggcagcctgagcaacacctacctgagcaaggtggaccccgacggcaagaagatcaagcagatccagcagctgttcgaggagatcctgagcaacagcagacagctgaagtggctgagctgcggcttcatgctggagatcgtgacccccaccagcctgagcagcctgagcaacgccgtggccaacaccatggagcacctgagcctgctggacaacaacatccccggcaacagcaccctgatcaccgccgtggagctggagagattcgtgaacctgcacagcctggccctggacttctgcgacttcaccgccgagatggccagagtgctgaccgacagcaaccacgtgcccctgcagagactgagcctgctggtgcacaacgtgagcgtgatgcacaagagcctggacaacatgcccaacgacgagcactggaaggccctgagcagaaagagcaccagcttcagagtgtacatcatggccttcgacatcaagagcgaggacatgctgaagatcctgaagcccagcatccccctggagagaatccacttcgacagctacatcacctgcgtgagcggcgccatcgtggacctgatcagcagacagtacgacaagttcctgacccacttcatcctgatgaacgacgtgatcgacaccagcggcttccccgacctgagcgacaacagaaacgaggaccccctggtgctgctggcctggagatgcaccaagctgagcctgctggccatccacggctacaccgtgtgggcccacaacctgatcgccatcgccagactgagaggcagcgacctgaaggtgctggaggtgaccgaggagagcatcgacttcgaccagggcgagctggccgaccaggacgtggaccccgtgcacaacctgatcgagcaggtgagcctgggcctgggccagccctggcacgccgtgatggacatcgagagcctgagcgtgttcaccgagcccaacagacacttctacagagagatgcagagcttcagcgaggacatctag

SEQ ID NO: 81431 - skipped

SEQ ID NO: 81432 - DNA, 2136 bp, synthetic construct
  misc_feature 1..2136: note = Description of Artificial Sequence: Synthetic coding sequence
  source 1..2136: mol_type = other DNA
atgcacctgaagccctactggaagctgcagaagaaggagcacccccccgaggtgagcagagagacccagagaacccccatgaaccaccagaaggccgtgaacgacgagacctgcaaggccagccacatcaccagcagcgtgttccccagcgccagcctgggcaaggccagcagcagaaagcccttcggcatcctgagccccaacgtgctgtgcagcatgagcggcaagagccccgtggagagcagcctgaacgtgaagaccaagaagaacgcccccagcgccaccatccaccagggcgaggaggagggccccctggacatctgggccgtggtgaagcccggcaacaccaaggagaagatcgccttcttcgccagccaccagtgcagcaacagaatcggcagcatgaagatcaagagcagctgggacatcgacggcagagccaccaagagaagaaagaagagcggcgacctgaagaaggccaaggtgcaggtggagagaatgagagaggtgaacagcagatgctaccagcccgagcccttcgcctgcggcatcgagcactgcagcgtgcactacgtgagcgacagcggcgacggcgtgtacgccggcagacccctgagcgtgatccagatggtggccttcctggagcagagagccagcgccctgctggccagctgcagcaagaactgcaccaacagccccgccatcgtgagattcagcggccagagcagaggcgtgcccgccgtgagcgagagctacagcgcccccggcgcctgcgaggagcccaccgagagaggcaacctggaggtgggcgagccccagagcgagcccgtgagagtgctggacatggtggccaagctggagagcgagtgcctgaagagacagggccagagagagcccggcagcctgagcagaaacaacagcttcagaagaaacgtgggcagagtgctgctggccaacagcacccaggccgacgagggcaagaccaagaagggcgtgctggaggcccccgacacccaggtgaaccccgtgggcagcgtgagcgtggactgcggccccagcagagccgacagatgcagccccaaggaggaccaggcctgggacggcgccagccaggactgcccccccctgcccgccggcgtgagcttccacatcgacagcgccgagctggagcccggcagccagaccgccgtgaagaacagcaacagatacgacgtggagatgaccgacgagctggtgggcctgcccttcagcagccacacctacagccaggccagcgagctgcccaccgacgccgtggactgcatgagcagagagctggtgagcctgaccagcagaaaccccgaccagagaaaggagagcctgtgcatcagcatcaccgtgagcaaggtggacaaggaccagcccagcatcctgaacagctgcgaggaccccgtgcccggcatgctgttcttcctgccccccggccagcacctgagcgactacagccagctgaacgagagcaccaccaaggagagcagcgaggccagccagctggaggacgccgccggcggcgacagcgccagcgaggagaagagcggcagcgccgagcccttcgtgctgcccgccagcagcgtggagagcaccctgcccgtgctggaggccagcagctggaagaagcaggtgagccacgacttcctggagaccagattcaagatccagcagctgctggagccccagcagtacatggccttcctgccccaccacatcatggtgaagatcttcagactgctgcccaccaagagcctggtggccctgaagtgcacctgctgctacttcaagttcatcatcgagtactacaacatcagacccgccgacagcagatgggtgagagaccccagatacagagaggacccctgcaagcagtgcaagaagaagtacgtgaagggcgacgtgagcctgtgcagatggcaccccaagccctactgccaggccctgccctacggccccggctactggatgtgctgccacagaagccagaagggcttccccggctgcaagctgggcctgcacgacaaccactgggtgcccgcctgccacagcttcaacagagccatccacaagaaggccaagggcaccgaggccgaggaggagtactag

SEQ ID NO: 81433 - DNA, 2136 bp, synthetic construct; identical to SEQ ID NO: 81432
  misc_feature 1..2136: note = Description of Artificial Sequence: Synthetic coding sequence
  source 1..2136: mol_type = other DNA

SEQ ID NO: 81434 - DNA, 567 bp, synthetic construct
  misc_feature 1..567: note = Description of Artificial Sequence: Synthetic coding sequence
  source 1..567: mol_type = other DNA
atggccagctggctgcccgagaccctgttcgagaccgtgggccagggccccccccccagcaaggactactaccagctgctggtgaccagaagccaggtgatcttcagatggtggaagatcagcctgagaagcgagtacagaagcaccaagcccggcgaggccaaggagacccacgaggacttcctggagaacagccacctgcagggccagaccgccctgatcttcggcgccagaatcctggactacgtgatcaacctgtgcaagggcaagttcgacttcctggagagactgagcgacgacctgctgctgaccatcatcagctacctggacctggaggacatcgccagactgtgccagaccagccacagattcgccaagctgtgcatgagcgacaagctgtgggagcagatcgtgcagagcacctgcgacaccatcacccccgacgtgagagccctggccgaggacaccggctggagacagctgttcttcaccaacaagctgcagctgcagagacagctgagaaagagaaagcagaagtacggcaacctgagagagaagcagccctag

SEQ ID NO: 81435 - DNA, 2832 bp, synthetic construct
  misc_feature 1..2832: note = Description of Artificial Sequence: Synthetic coding sequence
  source 1..2832: mol_type = other DNA
atgggccccagaaagaagagcgtgaagacctgcatcatgaacaacgagatccccgaggagatgaccgccgacgagaccaaggactacatgaaccagctgagccacgaggtgctgtgccacatcttcagatacctgcccctgcaggacatcatgtgcatggagtgcctgagcagaaagctgaaggaggccgtgaccctgtacctgagagtggtgagagtggtggacctgtgcgccggcagatggtgggagtacatgcccagcggcttcaccgacgccagcttcctgaccctgctgaagaagatgcccgacgtggagcagctgtacggcctgcaccccagatacctggagagaagaagagtgagaggccacgaggccttcagcatccccggcgtgctggaggccctgcaggcctgccccaacctggtgggcgtggagaccagccacctggagctggtggagagcatctggacctacatgccccacgtgcacatcctgggcaagttcagaaacagaaacggcgccttccccatcccccccgagaacaagctgaagatccccatcggcgccaagatccagaccctgcacctggtgggcgtgaacgtgcccgagatcccctgcatccccatgctgagacacctgtacatgaagtgggtgagactgaccaagccccagcccttcaaggacttcctgtgcatcagcctgagaaccttcgtgatgagaaactgcgccggccccaccaacagcctgaagtacgtgcccctggtgaccggcctggccagcgccagaaacctggagcacctggagatggtgagagtgcccttcctgggcggcctgatccagcacgtggtggaggacagctggagaagcggcggcttcagaaacctgcacaccatcgtgctgggcgcctgcaagaacgccctggaggtggacctgggctacctgatcatcaccgccgccagaagactgcacgaggtgagaatccagcccagcctgaccaaggacggcgtgttcagcgccctgaagatggccgagctggagttcccccagttcgagaccctgcacctgggctacgtggacgagttcctgctgcagagcagaatggccaacgccgacctggtgaagtacggcctggccgacgtggtggagaaccccggcatcatcaccgacatcggcatgaaggccgtgaacgaggtgttcagctgcatcaagtacctggccatctacaactgcccccacctgcacaacccctacaactggatcagcgaccacagcagatggaccagactggtggacatcaacctggtgagatgccacgccctgaagctggacagcttcggccagttcatcgagctgctgcccagcctggagttcatcagcctggaccagatgttcagagagccccccaagggctgcgccagagtgggcctgagcgccggcaccggcatcggcgtgagcagcgccctggtgagcaaccagaacagcaacaacgacgacaacaacgcccagaacaacaacgccaacatccacgacaacaaccaccaccaccccgacgacagcgacgaggagaacgacttcagacaggacctgcagcccggcgagcagcagttcgccgccgacgccctgaacgagatggaggacatcgtgcaggaggacggcgaggtggtggccgagagcggcaacaacacccccgcccacagccaggccatcatccccgtggacgtggacgaggagcaggccggccccagcggcctgcagagagtggtgaagcccaccagcatcaccgtgcacgacagcgagagcgacgacgaggaggacagcctggagctgcaggaggtgtggatccccaagaacggcaccagaagatacagcgagagagaggagaagaccggcgagagcgtgcagagcagagagctgagcgaggtggccaagaccaagcccagacacgccatgaagagaaagagaaccgccgacaagagcaccagcaccagcgaccccgtgatcgaggacgaccacgtgcaggtgctggtgctgaagagcaagaacctggtgggcgtgaccatgaccaactgcggcatcaccgacctggtgctgaaggactgccccaagatgatgttcatccacgccaccagatgcagagtgctgaagcacctgaaggtggagaacgcccccatcgtgaacagattcgactacgcccagtgcaagaagctgaacatggaccaggtgctggaccagatcctgagaatgccccccgagagaaacagaatcatctacctgagacccatgcagcaggtggacaccctgaccctggagcagaagctgttcagcggcccctacccctaccacatctgcatcatccacgagttcagcaacccccccaacgtgagaaacaaggtgagaatcagaagctggatggacaccatcgccaacatcaaccaggagctgatcaagtacgagttcttccccgaggccaccagaagcgaggaggacctgaagaagtaccccaagtacccctggggcagagagatctacaccctggagggcgtggtggacggcgccccctacagcatgatcagcgacttcccctggctgagaagcctgagagccgccgagcccaacagcttcgccagatacgacttcgaggacgacgaggagagcaccatctacgcccccagaagaaagggccagctgagcgccgacatctgcatggagaccatcggcgaggagatcagcgagatgagacagatgaagaagggcgtgttccagagagtggtggccatcttcatccactactgcgacgtgaacggcgagcccgtggaggacgactacatctag

SEQ ID NO: 81436 - DNA, 3567 bp, synthetic construct
  misc_feature 1..3567: note = Description of Artificial Sequence: Synthetic coding sequence
  source 1..3567: mol_type = other DNA
atgggccccagaaagaagagcgtgaagacctgcatcatgaacaacgagatccccgaggagatgaccgccgacgagaccaaggactacatgaaccagctgagccacgaggtgctgtgccacatcttcagatacctgcccctgcaggacatcatgtgcatggagtgcctgagcagaaagctgaaggaggccgtgaccctgtacctgagagtggtgagagtggtggacctgtgcgccggcagatggtgggagtacatgcccagcggcttcaccgacgccagcttcctgaccctgctgaagaagatgcccgacgtggagcagctgtacggcctgcaccccagatacctggagagaagaagagtgagaggccacgaggccttcagcatccccggcgtgctggaggccctgcaggcctgccccaacctggtgggcgtggagaccagccacctggagctggtggagagcatctggacctacatgccccacgtgcacatcctgggcaagttcagaaacagaaacggcgccttccccatcccccccgagaacaagctgaagatccccatcggcgccaagatccagaccctgcacctggtgggcgtgaacgtgcccgagatcccctgcatccccatgctgagacacctgtacatgaagtgggtgagactgaccaagccccagcccttcaaggacttcctgtgcatcagcctgagaaccttcgtgatgagaaactgcgccggccccaccaacagcctgaagtacgtgcccctggtgaccggcctggccagcgccagaaacctggagcacctggagatggtgagagtgcccttcctgggcggcctgatccagcacgtggtggaggacagctggagaagcggcggcttcagaaacctgcacaccatcgtgctgggcgcctgcaagaacgccctggaggtggacctgggctacctgatcatcaccgccgccagaagactgcacgaggtgagaatccagcccagcctgaccaaggacggcgtgttcagcgccctgaagatggccgagctggagttcccccagttcgagaccctgcacctgggctacgtggacgagttcctgctgcagagcagaatggccaacgccgacctggtgaagtacggcctggccgacgtggtggagaaccccggcatcatcaccgacatcggcatgaaggccgtgaacgaggtgttcagctgcatcaagtacctggccatctacaactgcccccacctgcacaacccctacaactggatcagcgaccacagcagatggaccagactggtggacatcaacctggtgagatgccacgccctgaagctggacagcttcggccagttcatcgagctgctgcccagcctggagttcatcagcctggaccagatgttcagagagccccccaagggctgcgccagagtgggcctgagcgccggcaccggcatcggcgtgagcagcgccctggtgagcaaccagaacagcaacaacgacgacaacaacgcccagaacaacaacgccaacatccacgacaacaaccaccaccaccccgacgacagcgacgaggagaacgacttcagacaggacctgcagcccggcgagcagcagttcgccgccgacgccctgaacgagatggaggacatcgtgcaggaggacggcgaggtggtggccgagagcggcaacaacacccccgcccacagccaggccatcatccccgtggacgtggacgaggagcaggccggccccagcggcctgcagagagtggtgaagcccaccagcatcaccgtgcacgacagcgagagcgacgacgaggaggacagcctggagctgcaggaggtgtggatccccaagaacggcaccagaagatacagcgagagagaggagaagaccggcgagagcgtgcagagcagagagctgagcgtgagcggcaagggcaagacccccctgagaaagagatacaacagccaccagatgggccagagcaagcagttccccctggaggagagcagctgcgagaagggctgccaggtgaccagcgagcagatcaaggccgacatgaaggccgccagagacatccccgagaagaagaagaacaaggacgtgtaccccagctgcagcagcaccaccgccagcaccgtgggcaacagcagcagccacaacaccgccagccagagccccgacttcgtgagaaccgtgaacagcggcggcagcagcgagcccagccccaccgaggtggacgtgagcagacagtgcgcctgcagccccggcggcagcgaggacagcgaggccatggaggagggcgacgccgagagcagcgtgtgccccagatgctgctgccacagaccccaggagagccagagaagaaccagcagatgcagcgacgaggagagacccagcaccagcagagcctgcgtggtgaacggccccgacggcaccagaagcgccttcagcttcagaaccctgccccagggcggcagcagcggccccgcccacgacgagagaaccaacggcagcggcagcggcgccaccggcgaggacagaagaggcagcagccagcccgagagctgcgacgtgcagagcaacgaggactaccccagaagacccctgaccagagccagaagcagactgagccacgtgctgctggtgagcgagagcgaggtggccaagaccaagcccagacacgccatgaagagaaagagaaccgccgacaagagcaccagcaccagcgaccccgtgatcgaggacgaccacgtgcaggtgctggtgctgaagagcaagaacctggtgggcgtgaccatgaccaactgcggcatcaccgacctggtgctgaaggactgccccaagatgatgttcatccacgccaccagatgcagagtgctgaagcacctgaaggtggagaacgcccccatcgtgaacagattcgactacgcccagtgcaagaagctgaacatggaccaggtgctggaccagatcctgagaatgccccccgagagaaacagaatcatctacctgagacccatgcagcaggtggacaccctgaccctggagcagaagctgttcagcggcccctacccctaccacatctgcatcatccacgagttcagcaacccccccaacgtgagaaacaaggtgagaatcagaagctggatggacaccatcgccaacatcaaccaggagctgatcaagtacgagttcttccccgaggccaccagaagcgaggaggacctgaagaagtaccccaagtacccctggggcagagagatctacaccctggagggcgtggtggacggcgccccctacagcatgatcagcgacttcccctggctgagaagcctgagagccgccgagcccaacagcttcgccagatacgacttcgaggacgacgaggagagcaccatctacgcccccagaagaaagggccagctgagcgccgacatctgcatggagaccatcggcgaggagatcagcgagatgagacagatgaagaagggcgtgttccagagagtggtggccatcttcatccactactgcgacgtgaacggcgagcccgtggaggacgactacatctag

SEQ ID NO: 81437 - DNA, 3342 bp, synthetic construct
  misc_feature 1..3342: note = Description of Artificial Sequence: Synthetic coding sequence
  source 1..3342: mol_type = other DNA
atgggccccagaaagaagagcgtgaagacctgcatcatgaacaacgagatccccgaggagatgaccgccgacgagaccaaggactacatgaaccagctgagccacgaggtgctgtgccacatcttcagatacctgcccctgcaggacatcatgtgcatggagtgcctgagcagaaagctgaaggaggccgtgaccctgtacctgagagtggtgagagtggtggacctgtgcgccggcagatggtgggagtacatgcccagcggcttcaccgacgccagcttcctgaccctgctgaagaagatgcccgacgtggagcagctgtacggcctgcaccccagatacctggagagaagaagagtgagaggccacgaggccttcagcatccccggcgtgctggaggccctgcaggcctgccccaacctggtgggcgtggagaccagccacctggagctggtggagagcatctggacctacatgccccacgtgcacatcctgggcaagttcagaaacagaaacggcgccttccccatcccccccgagaacaagctgaagatccccatcggcgccaagatccagaccctgcacctggtgggcgtgaacgtgcccgagatcccctgcatccccatgctgagacacctgtacatgaagtgggtgagactgaccaagccccagcccttcaaggacttcctgtgcatcagcctgagaaccttcgtgatgagaaactgcgccggccccaccaacagcctgaagtacgtgcccctggtgaccggcctggccagcgccagaaacctggagcacctggagatggtgagagtgcccttcctgggcggcctgatccagcacgtggtggaggacagctggagaagcggcggcttcagaaacctgcacaccatcgtgctgggcgcctgcaagaacgccctggaggtggacctgggctacctgatcatcaccgccgccagaagactgcacgaggtgagaatccagcccagcctgaccaaggacggcgtgttcagcgccctgaagatggccgagctggagttcccccagttcgagaccctgcacctgggctacgtggacgagttcctgctgcagagcagaatggccaacgccgacctggtgaagtacggcctggccgacgtggtggagaaccccggcatcatcaccgacatcggcatgaaggccgtgaacgaggtgttcagctgcatcaagtacctggccatctacaactgcccccacctgcacaacccctacaactggatcagcgaccacagcagatggaccagactggtggacatcaacctggtgagatgccacgccctgaagctggacagcttcggccagttcatcgagctgctgcccagcctggagttcatcagcctggaccagatgttcagagagccccccaagggctgcgccagagtgggcctgagcgccggcaccggcatcggcgtgagcagcgccctggtgagcaaccagaacagcaacaacgacgacaacaacgcccagaacaacaacgccaacatccacgacaacaaccaccaccaccccgacgacagcgacgaggagaacgacttcagacaggacctgcagcccggcgagcagcagttcgccgccgacgccctgaacgagatggaggacatcgtgcaggaggacggcgaggtggtggccgagagcggcaacaacacccccgcccacagccaggccatcatccccgtggacgtggacgaggagcaggccggccccagcggcctgcagagagtggtgaagcccaccagcatcaccgtgcacgacagcgagagcgacgacgaggaggacagcctggagctgcaggaggtgtggatccccaagaacggcaccagaagatacagcgagagagaggagaagaccggcgagagcgtgcagagcagagagctgagcgtgagcggcaagggcaagacccccctgagaaagagatacaacagccaccagatgggccagagcaagcagttccccctggaggagagcagctgcgagaagggctgccaggtgaccagcgagcagatcaaggccgacatgaaggccgccagagacatccccgagaagaagaagaacaaggacgtgtaccccagctgcagcagcaccaccgccagcaccgtgggcaacagcagcagccacaacaccgccagccagagccccgacttcgtgagaaccgtgaacagcggcggcagcagcgagcccagccccaccgaggtggacgtgagcagacagtgcgcctgcagccccggcggcagcgaggacagcgaggccatggaggagggcgacgccgagagcagcgtgtgccccagatgctgctgccacagaccccaggagagccagagaagaaccagcagatgcagcgacgaggagagacccagcaccagcagagcctgcgtggtgaacggccccgacgaggtggccaagaccaagcccagacacgccatgaagagaaagagaaccgccgacaagagcaccagcaccagcgaccccgtgatcgaggacgaccacgtgcaggtgctggtgctgaagagcaagaacctggtgggcgtgaccatgaccaactgcggcatcaccgacctggtgctgaaggactgccccaagatgatgttcatccacgccaccagatgcagagtgctgaagcacctgaaggtggagaacgcccccatcgtgaacagattcgactacgcccagtgcaagaagctgaacatggaccaggtgctggaccagatcctgagaatgccccccgagagaaacagaatcatctacctgagacccatgcagcaggtggacaccctgaccctggagcagaagctgttcagcggcccctacccctaccacatctgcatcatccacgagttcagcaacccccccaacgtgagaaacaaggtgagaatcagaagctggatggacaccatcgccaacatcaaccaggagctgatcaagtacgagttcttccccgaggccaccagaagcgaggaggacctgaagaagtaccccaagtacccctggggcagagagatctacaccctggagggcgtggtggacggcgccccctacagcatgatcagcgacttcccctggctgagaagcctgagagccgccgagcccaacagcttcgccagatacgacttcgaggacgacgaggagagcaccatctacgcccccagaagaaagggccagctgagcgccgacatctgcatggagaccatcggcgaggagatcagcgagatgagacagatgaagaagggcgtgttccagagagtggtggccatcttcatccactactgcgacgtgaacggcgagcccgtggaggacgactacatctag

SEQ ID NO: 81438 - DNA, 2832 bp, synthetic construct; identical to SEQ ID NO: 81435
  misc_feature 1..2832: note = Description of Artificial Sequence: Synthetic coding sequence
  source 1..2832: mol_type = other DNA

SEQ ID NO: 81439 - DNA, 1329 bp, synthetic construct
  misc_feature 1..1329: note = Description of Artificial Sequence: Synthetic coding sequence
  source 1..1329: mol_type = other DNA
atggacgaggagagcgagctgatccagccccaggaccagagctgctgggccttcctgcccgacctgtgcctgtgcagagtgttctggtggctgggcgacagagacagaagcagagccgccctggtgtgcagaaagtggaaccagatgatgtacagcgccgagctgtggagatacagaaccatcaccttcagcggcagacccagcagagtgcacgccagcgaggtggagagcgccgtgtggtacgtgaagaagttcggcagatacctggagcacctggaggtgaagttcatgaacccctacaacgccgtgctgaccaagaagttccaggtgaccatgagaggcctgctgagctgcctgagcaagagcaacaacagactgaagagcctgagcatccagtacctggagctggacagactggtgtggagaaacagcatcagaagcagcttcatcagcagcctgagcttcttcctgaagaagatgggcaagagactggactacctgaacctgaagggcgccagactgaccgtggagcagggctgccagatcctggacagcctgagctacatgagaaacgagaacgtgatcagcgagctgaacatcgaggactacttcagccaccacctggccgtgtacaacagcccccagttcaagaagaccatgagcaccttccacaacctggtgagcctgaacctgaactacaactgcatcagcgacgagctgctggagaacctgtgcgagaacgccagcaccctgagaaccatcaacatcaagtgccacgtgcacgacccccacggccaggtgatctggggcatgagctgggccaagctggccagacaggccaccaacctgaaggtgaacttcttcttcgagagaatcatgaagtacgagagactggccagaatcctgctgcaggagatccccatcagaagcatcagcctgagaagctgctacttcagcgaccccgactgcagcatgagacccaccctgatcgacctgctgcccaccttcagacacaccctgcagaagctgacctgcgagttcaacaacaaccacgagagcctggacgaggagctgcacctgctgatcatcagctgcagaaagctgttctacttcaagatctgggccttcctggacgtgagcttcgtggagagaatcctgaagagccagaaggagagacagtgcgccctgagagtgttcaaggccagaatctacaccaacagatacgagaccaacgaggaggacaagaccctgcaggagatctacagaaagtacagaaagctgatcgagagcgagctgagctacttcgtgatcgtgtacagcgtgatgtag

SEQ ID NO: 81440 - DNA, 1164 bp, synthetic construct
  misc_feature 1..1164: note = Description of Artificial Sequence: Synthetic coding sequence
  source 1..1164: mol_type = other DNA
atggccggcagcgagcccagaagcggcaccaacagcccccccccccccttcagcgactggggcagactggaggccgccatcctgagcggctggaagaccttctggcagagcgtgagcaaggagagagtggccagaaccaccagcagagaggaggtggacgaggccgccagcaccctgaccagactgcccatcgacgtgcagctgtacatcctgagcttcctgagcccccacgacctgtgccagctgggcagcaccaaccactactggaacgagaccgtgagagaccccatcctgtggagatacttcctgctgagagacctgcccagctggagcagcgtggactggaagagcctgcccgacctggagatcctgaagaagcccatcagcgaggtgaccgacggcgccttcttcgactacatggccgtgtacagaatgtgctgcccctacaccagaagagccagcaagagcagcagacccatgtacggcgccgtgaccagcttcctgcacagcctgatcatccagaacgagcccagattcgccatgttcggccccggcctggaggagctgaacaccagcctggtgctgagcctgatgagcagcgaggagctgtgccccaccgccggcctgccccagagacagatcgacggcatcggcagcggcgtgaacttccagctgaacaaccagcacaagttcaacatcctgatcctgtacagcaccaccagaaaggagagagacagagccagagaggagcacaccagcgccgtgaacaagatgttcagcagacacaacgagggcgacgaccagcagggcagcagatacagcgtgatcccccagatccagaaggtgtgcgaggtggtggacggcttcatctacgtggccaacgccgaggcccacaagagacacgagtggcaggacgagttcagccacatcatggccatgaccgaccccgccttcggcagcagcggcagacccctgctggtgctgagctgcatcagccagggcgacgtgaagagaatgccctgcttctacctggcccacgagctgcacctgaacctgctgaaccacccctggctggtgcaggacaccgaggccgagaccctgaccggcttcctgaacggcatcgagtggatcctggaggaggtggagagcaagagagccagatag

SEQ ID NO: 81441 - DNA, 924 bp, synthetic construct
  misc_feature 1..924: note = Description of Artificial Sequence: Synthetic coding sequence
  source 1..924: mol_type = other DNA
atggccggcagcgagcccagaagcggcaccaacagcccccccccccccttcagcgactggggcagactggaggccgccatcctgagcggctggaagaccttctggcagagcgtgagcaaggagagagtggccagaaccaccagcagagaggaggtggacgaggccgccagcaccctgaccagactgcccatcgacgtgcagctgtacatcctgagcttcctgagcccccacgacctgtgccagctgggcagcaccaaccactactggaacgagaccgtgagagaccccatcctgtggagatacttcctgctgagagacctgcccagctggagcagcgtggactggaagagcctgcccgacctggagatcctgaagaagcccatcagcgaggtgaccgacggcgccttcttcgactacatggccgtgtacagaatgtgctgcccctacaccagaagagccagcaagagcagcagacccatgtacggcgccgtgaccagcttcctgcacagcctgatcatccagaacgagcccagattcgccatgttcggccccggcctggaggagctgaacaccagcctggtgctgagcctgatgagcagcgaggagctgtgccccaccgccggcctgccccagagacagatcgacggcatcggcagcggcgtgaacttccagctgaacaaccagcacaagttcaacatcctgatcctgtacagcaccaccagaaaggagagagacagagccagagaggagcacaccagcgccgtgaacaagatgttcagcagacacaacgagggcgacgaccagcagggcagcagatacagcgtgatcccccagatccagaaggtgtgcgaggtggtggacggcttcatctacgtggccaacgccgaggcccacaagagcaagtacagctacgtgcacttctag

SEQ ID NO: 81442 - DNA, 2130 bp, synthetic construct
  misc_feature 1..2130: note = Description of Artificial Sequence: Synthetic coding sequence
  source 1..2130: mol_type = other DNA
atgggcaaggccagaagaagcccccccggccaccacagacactgcgagggctgcttcaacagacactgccacatccccgtggagcccaacaccagctgcctggtgatcagctgccacctgctgtgcggcgccaccttccacatgtgcaaggaggccgagcaccagctgctgtgccccctggagcaggtgccctgcctgaacagcgagtacggctgccccctgagcatgagcagacacaagctggccaagcacctgcaggtgtgccccgccagcgtggtgtgctgcagcatggagtggaacagatggcccaacgtggacagcgagaccaccctgcacgagaacatcatgaaggagacccccagcgaggagtgcctggacaccgccctggccctgcaggaccagaaggtgctgttcagaagcctgaagatggtggagctgttccccgagaccagagaggccaccgaggaggagcccaccatgaacggcgagaccagcgtggaggagatgggcggcgccgtgggcggcgtggacatcggcctggtgccccacggcctgagcgccaccaacggcgagatggccgagctgagccaggaggagagagaggtgctggccaagaccaaggagggcatggacctggtgaagttcggccagtgggagaacatcttcagcaaggagcacgccgccagcgccctgaccaacagcagcgccagctgcgagagcaagaacaagaacgacagcgagaaggagcagatcagcagcggccacaacatggtggagggcgagggcgcccccaagaagaaggagccccaggagaaccagaagcagcaggacgtgagaaccgccatggagaccaccggcctggccccctggcaggacggcgtgctggagagactgaagaccgccgtggacgccaaggactacaacatgtacctggtgcacaacggcagaatgctgatccacttcggccagatgcccgcctgcacccccaaggagagagacttcgtgtacggcaagctggaggcccaggaggtgaagaccgtgtacaccttcaaggtgcccgtgagctactgcggcaagagagccagactgggcgacgccatgctgagctgcaagcccagcgagcacaaggccgtggacaccagcgacctgggcatcaccgtggaggacctgcccaagagcgacctgatcaagaccaccctgcagtgcgccctggagagagagctgaagggccacgtgatcagcgagagcagaagcatcgacggcctgttcatggacttcgccacccagacctacaacttcgagcccgagcagttcagcagcggcaccgtgctggccgacctgaccgccgccacccccggcggcctgcacgtggagctgcacagcgagtgcgtgaccagaagacacaacaagagcagcagcgccttcaccttcacctgcaacaagttcttcagaagagacgagttccccctgcacttcaagaacgtgcacaccgacatccagagctgcctgaacggctggttccagcacagatgccccctggcctacctgggctgcaccttcgtgcagaaccacttcagaccccccggccagaaggccaaggtgatctacagccaggagctgaagaccttcgccatcaagcccgaggtggcccccgagctgagcgagggcagaaagaacaaccacctgctgggccacggcggcaagagccagaacagcctgaccagcctgcccctggagatcctgaagtacatcgccggcttcctggacagcgtgagcctggcccagctgagccaggtgagcgtgctgatgagaaacatctgcgccaccctgctgcaggagagaggcatggtgctgctgcagtggaagaagaagagatacagccacggcggcaccagctggagagtgcacagagagatctggcagttcagcagcctgttcagcaagatcaagagctgggagttcaacgaggtgaccagcatgagcgagcacctgaagagctgccccttcaacatcgtggagcacaagaccgaccccatcctgctgaccagcatgtgccagcccagagagcaggccagagagagcctggtgagcaccttcagaatcagacccagaggcagatacgtgagctag

SEQ ID NO: 81443 - DNA, 2811 bp, synthetic construct
  misc_feature 1..2811: note = Description of Artificial Sequence: Synthetic coding sequence
  source 1..2811: mol_type = other DNA
atgaccaccggcctgagcgaccagcaggtggtgtgcgacctggaccacagagccgtggaggccctgctgcaggccgtgagaaagagaatggccggcgccagccccgccgtgccccacgagagagccagactgaccggcggcgccgccgccgtggagcccgcctgcagaggcggcggcggcgccatggccagcctggacctgccctacagatgccccagatgcggcgagcacaagagattcagaagcctgagcagcctgagagcccacctggagtacagccacacctacgagaccctgtacatcctgagcaagaccaacagcatctgcgacggcgccgccgccgccgccgccgccgccgccgccgccagcggcttccccctggcccccgagcccgccgccctgctggccgtgcccggcgccagaagagaggtgttcgagagcaccagcttccagggcaaggagcaggccgccggccccagccccgccgccccccacctgctgcaccaccaccaccaccacgcccccctggcccacttccccggcgacctggtgcccgccagcctgccctgcgaggagctggccgagcccggcctggtgcccgccgccgccgccagatacgccctgagagagatcgagatccccctgggcgagctgttcgccagaaagagcgtggccagcagcgcctgcagcacccccccccccggccccggccccggcccctgccccggccccgccagcgccagccccgccagccccagccccgccgacgtggcctacgaggagggcctggccagactgaagatcagagccctggagaagctggaggtggacagaagactggagagactgagcgaggaggtggagcagaagatcgccggccaggtgggcagactgcaggccgagctggagagaaaggccgccgagctggagaccgccagacaggagagcgccagactgggcagagagaaggaggagctggaggagagagccagcgagctgagcagacaggtggacgtgagcgtggagctgctggccagcctgaagcaggacctggtgcacaaggagcaggagctgagcagaaagcagcaggaggtggtgcagatcgaccagttcctgaaggagaccgccgccagagaggccagcgccaagctgagactgcagcagttcatcgaggagctgctggagagagccgacagagccgagagacagctgcaggtgatcagcagcagctgcggcagcacccccagcgccagcctgggcagaggcggcggcggcggcggcgccggccccaacgccagaggccccggcagaatgagagagcaccacgtgggccccgccgtgcccaacacctacgccgtgagcagacacggcagcagccccagcaccggcgccagcagcagagtgcccgccgccagccagagcagcggctgctacgacagcgacagcctggagctgcccagacccgaggagggcgcccccgaggacagcggccccggcggcctgggcaccagagcccaggccgccaacggcggcagcgagagaagccagccccccagaagcagcggcctgagaagacaggccatccagaactggcagagaagacccagaagacacagcaccgagggcgaggagggcgacgtgagcgacgtgggcagcagaaccaccgagagcgaggccgagggccccctggacgcccccagacccggccccgccatggccggccccctgagcagctgcagactgagcgccagacccgagggcggcagcggcagaggcagaagagccgagagagtgagccccagcagaagcaacgaggtgatcagccccgagatcctgaagatgagagccgccctgttctgcatcttcacctacctggacaccagaaccctgctgcacgccgccgaggtgtgcagagactggagattcgtggccagacaccccgccgtgtggaccagagtgctgctggagaacgccagagtgtgcagcaagttcctggccatgctggcccagtggtgcacccaggcccacagcctgaccctgcagaacctgaagcccagacagagaggcaagaaggagagcaaggaggagtacgccagaagcaccagaggctgcctggaggccggcctggagagcctgctgaaggccgccggcggcaacctgctgatcctgagaatcagccactgccccaacatcctgaccgacagaagcctgtggctggccagctgctactgcagagccctgcaggccgtgacctacagaagcgccaccgaccccgtgggccacgaggtgatctgggccctgggcgccggctgcagagagatcgtgagcctgcaggtggcccccctgcacccctgccagcagcccaccagattcagcaacagatgcctgcagatgatcggcagatgctggccccacctgagagccctgggcgtgggcggcgccggctgcggcgtgcagggcctggccagcctggccagaaactgcatgagactgcaggtgctggagctggaccacgtgagcgagatcacccaggaggtggccgccgaggtgtgcagagagggcctgaagggcctggagatgctggtgctgaccgccacccccgtgacccccaaggccctgctgcacttcaacagcatctgcagaaacctgaagagcatcgtggtgcagatcggcatcgccgactacttcaaggagcccagcagccccgaggcccagaagctgttcgaggacatggtgaccaagctgcaggccctgagaagaagacccggcttcagcaagatcctgcacatcaaggtggagggcggctgctag

SEQ ID NO: 81444 - DNA, 2628 bp, synthetic construct
  misc_feature 1..2628: note = Description of Artificial Sequence: Synthetic coding sequence
  source 1..2628: mol_type = other DNA
atggccagcctggacctgccctacagatgccccagatgcggcgagcacaagagattcagaagcctgagcagcctgagagcccacctggagtacagccacacctacgagaccctgtacatcctgagcaagaccaacagcatctgcgacggcgccgccgccgccgccgccgccgccgccgccgccagcggcttccccctggcccccgagcccgccgccctgctggccgtgcccggcgccagaagagaggtgttcgagagcaccagcttccagggcaaggagcaggccgccggccccagccccgccgccccccacctgctgcaccaccaccaccaccacgcccccctggcccacttccccggcgacctggtgcccgccagcctgccctgcgaggagctggccgagcccggcctggtgcccgccgccgccgccagatacgccctgagagagatcgagatccccctgggcgagctgttcgccagaaagagcgtggccagcagcgcctgcagcacccccccccccggccccggccccggcccctgccccggccccgccagcgccagccccgccagccccagccccgccgacgtggcctacgaggagggcctggccagactgaagatcagagccctggagaagctggaggtggacagaagactggagagactgagcgaggaggtggagcagaagatcgccggccaggtgggcagactgcaggccgagctggagagaaaggccgccgagctggagaccgccagacaggagagcgccagactgggcagagagaaggaggagctggaggagagagccagcgagctgagcagacaggtggacgtgagcgtggagctgctggccagcctgaagcaggacctggtgcacaaggagcaggagctgagcagaaagcagcaggaggtggtgcagatcgaccagttcctgaaggagaccgccgccagagaggccagcgccaagctgagactgcagcagttcatcgaggagctgctggagagagccgacagagccgagagacagctgcaggtgatcagcagcagctgcggcagcacccccagcgccagcctgggcagaggcggcggcggcggcggcgccggccccaacgccagaggccccggcagaatgagagagcaccacgtgggccccgccgtgcccaacacctacgccgtgagcagacacggcagcagccccagcaccggcgccagcagcagagtgcccgccgccagccagagcagcggctgctacgacagcgacagcctggagctgcccagacccgaggagggcgcccccgaggacagcggccccggcggcctgggcaccagagcccaggccgccaacggcggcagcgagagaagccagccccccagaagcagcggcctgagaagacaggccatccagaactggcagagaagacccagaagacacagcaccgagggcgaggagggcgacgtgagcgacgtgggcagcagaaccaccgagagcgaggccgagggccccctggacgcccccagacccggccccgccatggccggccccctgagcagctgcagactgagcgccagacccgagggcggcagcggcagaggcagaagagccgagagagtgagccccagcagaagcaacgaggtgatcagccccgagatcctgaagatgagagccgccctgttctgcatcttcacctacctggacaccagaaccctgctgcacgccgccgaggtgtgcagagactggagattcgtggccagacaccccgccgtgtggaccagagtgctgctggagaacgccagagtgtgcagcaagttcctggccatgctggcccagtggtgcacccaggcccacagcctgaccctgcagaacctgaagcccagacagagaggcaagaaggagagcaaggaggagtacgccagaagcaccagaggctgcctggaggccggcctggagagcctgctgaaggccgccggcggcaacctgctgatcctgagaatcagccactgccccaacatcctgaccgacagaagcctgtggctggccagctgctactgcagagccctgcaggccgtgacctacagaagcgccaccgaccccgtgggccacgaggtgatctgggccctgggcgccggctgcagagagatcgtgagcctgcaggtggcccccctgcacccctgccagcagcccaccagattcagcaacagatgcctgcagatgatcggcagatgctggccccacctgagagccctgggcgtgggcggcgccggctgcggcgtgcagggcctggccagcctggccagaaactgcatgagactgcaggtgctggagctggaccacgtgagcgagatcacccaggaggtggccgccgaggtgtgcagagagggcctgaagggcctggagatgctggtgctgaccgccacccccgtgacccccaaggccctgctgcacttcaacagcatctgcagaaacctgaagagcatcgtggtgcagatcggcatcgccgactacttcaaggagcccagcagccccgaggcccagaagctgttcgaggacatggtgaccaagctgcaggccctgagaagaagacccggcttcagcaagatcctgcacatcaaggtggagggcggctgctag

SEQ ID NO: 81445 - DNA, 2154 bp, synthetic construct
  misc_feature 1..2154: note = Description of Artificial Sequence: Synthetic coding sequence
  source 1..2154: mol_type = other DNA
atggccagcagcagcgacagcgaggacgacagcttcatggccgtggaccaggaggagaccgtgctggagggcaccatggaccaggacgaggagccccaccccgtgctggaggccgaggagaccagacacaacagaagcatgagcgagctgcccgaggaggtgctggagtacatcctgagcttcctgagcccctaccaggagcacaagaccgccgccctggtgtgcaagcagtggtacagactgatcaagggcgtggcccaccagtgctaccacggcttcatgaaggccgtgcaggagggcaacatccagtgggagagcagaacctacccctaccccggcacccccatcacccagagattcagccacagcgcctgctactacgacgccaaccagagcatgtacgtgttcggcggctgcacccagagcagctgcaacgccgccttcaacgacctgtggagactggacctgaacagcaaggagtggatcagacccctggccagcggcagctaccccagccccaaggccggcgccaccctggtggtgtacaaggacctgctggtgctgttcggcggctggaccagacccagcccctaccccctgcaccagcccgagagattcttcgacgagatccacacctacagccccagcaagaactggtggaactgcatcgtgaccacccacggccccccccccatggccggccacagcagctgcgtgatcgacgacaagatgatcgtgttcggcggcagcctgggcagcagacagatgagcaacgacgtgtgggtgctggacctggagcagtgggcctggagcaagcccaacatcagcggccccagcccccaccccagaggcggccagagccagatcgtgatcgacgacgccaccatcctgatcctgggcggctgcggcggccccaacgccctgttcaaggacgcctggctgctgcacatgcacagcggcccctgggcctggcagcccctgaaggtggagaacgaggagcacggcgcccccgagctgtggtgccaccccgcctgcagagtgggccagtgcgtggtggtgttcagccaggcccccagcggcagagcccccctgagccccagcctgaacagcagacccagccccatcagcgccaccccccccgccctggtgcccgagaccagagagtacagaagccagagccccgtgagaagcatggacgaggccccctgcgtgaacggcagatggggcaccctgagacccagagcccagagacagacccccagcggcagcagagagggcagcctgagccccgccagaggcgacggcagccccatcctgaacggcggcagcctgagccccggcaccgccgccgtgggcggcagcagcctggacagccccgtgcaggccatcagccccagcacccccagcgcccccgagggctacgacctgaagatcggcctgagcctggcccccagaagaggcagcctgcccgaccagaaggacctgagactgggcagcatcgacctgaactgggacctgaagcccgccagcagcagcaaccccatggacggcatggacaacagaaccgtgggcggcagcatgagacacccccccgagcagaccaacggcgtgcacacccccccccacgtggccagcgccctggccggcgccgtgagccccggcgccctgagaagaagcctggaggccatcaaggccatgagcagcaagggccccagcgccagcgccgccctgagcccccccctgggcagcagccccggcagccccggcagccagagcctgagcagcggcgagaccgtgcccatccccagacccggccccgcccagggcgacggccacagcctgccccccatcgccagaagactgggccaccaccccccccagagcctgaacgtgggcaagcccctgtaccagagcatgaactgcaagcccatgcagatgtacgtgctggacatcaaggacaccaaggagaagggcagagtgaagtggaaggtgttcaacagcagcagcgtggtgggcccccccgagaccagcctgcacaccgtggtgcagggcagaggcgagctgatcatcttcggcggcctgatggacaagaagcagaacgtgaagtactaccccaagaccaacgccctgtacttcgtgagagccaagagatag

SEQ ID NO: 81446 - DNA, 900 bp, synthetic construct
  misc_feature 1..900: note = Description of Artificial Sequence: Synthetic coding sequence
  source 1..900: mol_type = other DNA
atgagcagccccccccagatcgtgatcgacgacgccaccatcctgatcctgggcggctgcggcggccccaacgccctgttcaaggacgcctggctgctgcacatgcacagcggcccctgggcctggcagcccctgaaggtggagaacgaggagcacggcgcccccgagctgtggtgccaccccgcctgcagagtgggccagtgcgtggtggtgttcagccaggcccccagcggcagagcccccctgagccccagcctgaacagcagacccagccccatcagcgccaccccccccgccctggtgcccgagaccagagagtacagaagccagagccccgtgagaagcatggacgaggccccctgcgtgaacggcagatggggcaccctgagacccagagcccagagacagacccccagcggcagcagagagggcagcctgagccccgccagaggcgacggcagccccatcctgaacggcggcagcctgagccccggcaccgccgccgtgggcggcagcagcctggacagccccgtgcaggccatcagccccagcacccccagcgcccccgagggctacgacctgaagatcggcctgagcctggcccccagaagaggcagcctgcccgaccagaaggacctgagactgggcagcatcgacctgaactgggacctgaagcccgccagcagcagcaaccccatggacggcatggacaacagaaccgtgggcggcagcatgagacacccccccgagcagaccaacggcgtgcacacccccccccacgtggccagcgccctggccggcgccgtgagccccggcgccctgagaagaagcctggaggccatcaaggccatgagcagcaagggccccagcgccagcgccgccctgagcccccccctgtag

SEQ ID NO: 81447 - DNA, 900 bp, synthetic construct; identical to SEQ ID NO: 81446
  misc_feature 1..900: note = Description of Artificial Sequence: Synthetic coding sequence
  source 1..900: mol_type = other DNA

SEQ ID NO: 81448 - DNA, 2127 bp, synthetic construct
  misc_feature 1..2127: note = Description of Artificial Sequence: Synthetic coding sequence
  source 1..2127: mol_type = other DNA
atgagcttcaaggacaaggacgagagaatcagctgcctggaggcctacgtgaccctgaccagcaagagcagcagattcaccgacgagaccgagatcctgaagatgagccagagacacagcggccaggccggcaccgaggccggcaacggcgccgacagcccccccatcgtgaacagcaagtacagcaccttcagagacttctgcagcaccagcagcttccaggacagcggctacaacgagctgaagagctgcagcttcgacaacatcgacaaggagtacctgggcaagaaggagaagggccccaccctgctgtacgagcaccccgagaccagcggcctgggcctgacccaccccctggagagccccacccagaagaagaagtgcatcctgcccagaaaggagaaggacaagacccccgagctgtgcgagacccccaagatcagcggcaagaagtgcctgcccagaagaagactgaacgtgagcttcgccctgctgaagggcgacttcgagagccagaacagcagcctggagagcagcatcagccaggtgatcaacctggagaagaacatccccagcagcgccagcggcttcagcagagccaacaacttcagccccctggtgaccagcaccctgaagaccgaggaggtgaccagctgcagccagaagctgagactgaacttcagccagcagaagaccagcaccatcgacgacagcaaggacgactgcagcctgttcgaggtggagtgcatcagccccatccagggcaacaacttcaaggacagcatcacccacgacttcagcgacagcagcctgtgcatcaacgacgagaacgcctgccccgagctgctgggcagcagcgtgagcggcaccacctgcggcaccgacgaggacatcttcgtgacccccatcagcaacctggtggccaacatcagattcaacgccagccagatcctgagccccagccccgaggtgagaggcagcatcagcacccccgaggacagcggcttcaacagcctgagcctggagaagagcgaggacagcctgagcgaccaggagggcagcttccaggagctgctgcagaagcacaagggcacccccaaggtgggcgacaccatcagaaagaccagacacctgggcagaagcagaagactgagcaccctgagagagcagagcagccagagcgagaccgaggaggagaagcagatcgtgcaccccgacagcgagaagagagccgccgccgccagcgccatcagcgagggccagctgagcagcgacgagagcggcgacctgaccttcagcctgaagaacctgagcaagacccccgccctgcagctggtgcacgagctgttcatgaagagcaagagaaagagactgcaggagaacagcggccacgagttcctggagcagggcgacggcgagaagatcgccgtgctgcagtgcatcctggccggcctgatcggcaagaagatgggcatcgagaagctggacatcctgaccgagctgaagtacagaaacctgaagcacatcctggccatggtgctggagagcctgaccgccgagagcctgtgcagcgtgtggaaggtgagcagaaactggagagagatcgtggtgcaggacaagaacgccaacagaagaagaaagttctacatcacccagctgaagaccgacagcgagggcgccgtgctgaacgtggaggacgccgccaccagactgcagctgctgaacagaagcgccctgagaagcgtgcaggcccaggccagaatccccggcagccagagagagcagggcagcaccctgagcccctggggcgaggtgctgacccccctggccagcagcagcgtgacccacctgagcagcaagcaggaggagtacgtgaaggtggccaagaccctgttcaccgacgaggccctgaagccctgccccagatgccagagccccgccaagtaccagccctacaagaagagaggcctgtgcagcagaaccgcctgcggcttcgacttctgcgtgctgtgcctgtgcgcctaccacggcagcgaggagtgcagcagaggcgccgccaagcccagaaacagaaaggacgccctgcccggcagcgcccagagcaagagaaacctgaagagactgtag

SEQ ID NO: 81449 - DNA, 675 bp, synthetic construct
  misc_feature 1..675: note = Description of Artificial Sequence: Synthetic coding sequence
  source 1..675: mol_type = other DNA
atggccgtgggcaacatcaacgagctgcccgagaacatcctgctggagctgttcacccacgtgcccgccagacagctgctgctgaactgcagactggtgtgcagcctgtggagagacctgatcgacctggtgaccctgtggaagagaaagtgcctgagagagggcttcatcaccgaggactgggaccagcccgtggccgactggaagatcttctacttcctgagaagcctgcacagaaacctgctgcacaacccctgcgccgaggagggcttcgagttctggagcctggacgtgaacggcggcgacgagtggaaggtggaggacctgagcagagaccagagaaaggagttccccaacgaccaggtgagaagccaggccagactgagagtgcaggtgcccgccgtgagaagcgcccccgtggtgagagccagagccagcggcgacctgcccgccagacccggcgaccaccccgccgaggagagatgccaggtggagggcggcctgccccacatcctgcagctgcccgccagaagacccctgcacctggtgagcgccagaagaagaggccacagcctgctgggcagactggtgagacccgagggccaccagcagcagcaccaccacagagcccccgccgccctgaccccccccgagccccccagcgccgagccctag

SEQ ID NO: 81450 - DNA, 768 bp, synthetic construct
  misc_feature 1..768: note = Description of Artificial Sequence: Synthetic coding sequence
  source 1..768: mol_type = other DNA
atggccgtgggcaacatcaacgagctgcccgagaacatcctgctggagctgttcacccacgtgcccgccagacagctgctgctgaactgcagactggtgtgcagcctgtggagagacctgatcgacctggtgaccctgtggaagagaaagtgcctgagagagggcttcatcaccgaggactgggaccagcccgtggccgactggaagatcttctacttcctgagaagcctgcacagaaacctgctgcacaacccctgcgccgaggagggcttcgagttctggagcctggacgtgaacggcggcgacgagtggaaggtggaggacctgagcagagaccagagaaaggagttccccaacgaccaggtgaagaagtacttcgtgaccagctactacacctgcctgaagagccaggtggtggacctgaaggccgagggctactgggaggagctgatggacaccaccagacccgacatcgaggtgaaggactggttcgccgccagacccgactgcggcagcaagtaccagctgtgcgtgcagctgctgagcagcgcccacgcccccctgggcaccttccagcccgaccccgccaccatccagcagaagagcgacgccaagtggagagaggtgagccacaccttcagcaactacccccccggcgtgagatacatctggttccagcacggcggcgtggacacccactactgggccggctggtacggccccagagtgaccaacagcagcatcaccatcggcccccccctgccctag

SEQ ID NO: 81451 - DNA, 675 bp, synthetic construct; identical to SEQ ID NO: 81449
  misc_feature 1..675: note = Description of Artificial Sequence: Synthetic coding sequence
  source 1..675: mol_type = other DNA

SEQ ID NO: 81452 - DNA, 675 bp, synthetic construct; identical to SEQ ID NO: 81449
  misc_feature 1..675: note = Description of Artificial Sequence: Synthetic coding sequence
  source 1..675: mol_type = other DNA

SEQ ID NO: 81453 - DNA, 771 bp, synthetic construct
  misc_feature 1..771: note = Description of Artificial Sequence: Synthetic coding sequence
  source 1..771: mol_type = other DNA
atggccgtgggcaacatcaacgagctgcccgagaacatcctgctggagctgttcacccacgtgcccgccagacagctgctgctgaactgcagactggtgtgcagcctgtggagagacctgatcgacctggtgaccctgtggaagagaaagtgcctgagagagggcttcatcaccgaggactgggaccagcccgtggccgactggaagatcttctacttcctgagaagcctgcacagaaacctgctgcacaacccctgcgccgaggagggcttcgagttctggagcctggacgtgaacggcggcgacgagtggaaggtggaggacctgagcagagaccagagaaaggagttccccaacgaccagcacctgccccaggtgcccggcggcggcccccagggcagaagagtgctgggcggcgccgacggctaccacaccgccggccacagaggccagggcctggtgagaagccaggccagactgagagtgcaggtgcccgccgtgagaagcgcccccgtggtgagagccagagccagcggcgacctgcccgccagacccggcgaccaccccgccgaggagagatgccaggtggagggcggcctgccccacatcctgcagctgcccgccagaagacccctgcacctggtgagcgccagaagaagaggccacagcctgctgggcagactggtgagacccgagggccaccagcagcagcaccaccacagagcccccgccgccctgaccccccccgagccccccagcgccgagccctag

SEQ ID NO: 81454 - DNA, 768 bp, synthetic construct; identical to SEQ ID NO: 81450
  misc_feature 1..768: note = Description of Artificial Sequence: Synthetic coding sequence
  source 1..768: mol_type = other DNA

SEQ ID NO: 81455 - DNA, 498 bp, synthetic construct
  misc_feature 1..498: note = Description of Artificial Sequence: Synthetic coding sequence
  source 1..498: mol_type = other DNA
atggccgtgggcaacatcaacgagctgcccgagaacatcctgctggagctgttcacccacgtgcccgccagacagctgctgctgaactgcagactggtgtgcagcctgtggagagacctgatcgacctggtgaccctgtggaagagaaagtgcctgagagagggcttcatcaccgaggactgggaccagcccgtggccgactggaagatcttctacttcctgagaagcctgcacagaaacctgctgcacaacccctgcgccgaggagggcttcgagttctggagcctggacgtgaacggcggcgacgagtggaaggtggaggacctgagcagagaccagagaaaggagttccccaacgaccaggtgagaagccaggccagactgagagtgcaggtgcccgccgtgagaagcgcccccgtggtgagagccagagccagcggcgacctgcccgccagacccggcgaccaccccgccgaggagagatgccaggtggagtag

SEQ ID NO: 81456 - DNA, 861 bp, synthetic construct
  misc_feature 1..861: note = Description of Artificial Sequence: Synthetic coding sequence
  source 1..861: mol_type = other DNA
atggccgcccccgcccccggcgccggcgccgccagcggcggcgccggctgcagcggcggcggcgccggcgccggcgccggcagcggcagcggcgccgccggcgccggcggcagactgcccagcagagtgctggagctggtgttcagctacctggagctgagcgagctgagaagctgcgccctggtgtgcaagcactggtacagatgcctgcacggcgacgagaacagcgaggtgtggagaagcctgtgcgccagaagcctggccgaggaggccctgagaaccgacatcctgtgcaacctgcccagctacaaggccaagatcagagccttccagcacgccttcagcaccaacgactgcagcagaaacgtgtacatcaagaagaacggcttcaccctgcacagaaaccccatcgcccagagcaccgacggcgccagaaccaagatcggcttcagcgagggcagacacgcctgggaggtgtggtgggagggccccctgggcaccgtggccgtgatcggcatcgccaccaagagagcccccatgcagtgccagggctacgtggccctgctgggcagcgacgaccagagctggggctggaacctggtggacaacaacctgctgcacaacggcgaggtgaacggcagcttcccccagtgcaacaacgcccccaagtaccagatcggcgagagaatcagagtgatcctggacatggaggacaagaccctggccttcgagagaggctacgagttcctgggcgtggccttcagaggcctgcccaaggtgtgcctgtaccccgccgtgagcgccgtgtacggcaacaccgaggtgaccctggtgtacctgggcaagcccctggacggctag

SEQ ID NO: 81457 - DNA, 1812 bp, synthetic construct
  misc_feature 1..1812: note = Description of Artificial Sequence: Synthetic coding sequence
  source 1..1812: mol_type = other DNA
atggacagaggcagcctgctgcccttccagctgtggtgccccagacccttcggcacctacagccagaaccagcccagaccccccagcgccgccctgaagcccagcgcctgccccgagcccggcggcggcgccgagcccgaccacggccccgcccacagcgagaacaccccccccgccctggccaccgaggtgcccgccagccagcccgcccccctgctgagcgccgccgccgccggcgacgagggcagagtgctgctggacacctggtacgtgatcaagcccggcaacaccaaggagaaggtggccttcttcgtggcccaccagtgcggcggcggcagcagagccagcagcatgaaggtgaagggccactggggcagcgacagcagcaaggccaagagaagaagaagatgcctggaccccaccaaggccccccccgaccccggcggcagagagggcccccccgccgccgaggagggccccgccagcgccggcgaggacgtggacctgctgagcgtggccgagatggtggccctggtggagcagagagccgccctggccctgcagagctaccccagacccaccacccccgcccccgtggtgttcgtgagcgccgagcagggcggccccgccaagggcgtgggcagcgagagaagaagcggcggcggcgactgcagcagagtggccgaggccgtggcccacttcgaggcccagagagacagcccccccaccaagggcctgagaaaggaggagagacccggccccggccccggcgaggtgagaatcgccttcagaatcagcaacggcagagagcccagagcccccgacagcggcctgcccagcggcggcggcggcagacccggctgcgcctaccccggcagccccggccccggcgccagagccaaggacaagatcacctgcgacctgtaccagctgatcagccccagcagagacgccctgcccagcaacgtggagttcctgctggccagagccgacgaggccagcgagggcgacagccccgcccccgccagacccgaggacaccccccccgcccccccccccccccccgccagagactgcggcgccagcggcttccacgtggacgtggtggtgaccggcgtggtggacgagtgcatcttcttcggcaaggacggcaccaagaacgtgaaggaggagaccgtgtgcctgaccgtgagccccgaggagccccccccccccggccagctgttcttcctgcagaacagaggccccgacggcccccccgagcccccccccgccgacagccccgccaccgcccccggccccgacgacgccgagggcaccgccgacaccagcctgtgcagactgtacagacacgtgagccacgacttcctggagatcagattcaagatccagagactgctggagcccagacagtacatgctgctgctgcccgagcacgtgctggtgaagatcttcagcttcctgcccaccagagccctggccgccctgaagtgcacctgccaccacttcaagggcatcatcgaggccttcggcgtgagagccaccgacagcagatggagcagagaccccctgtacagagacgacccctgcaagcagtgcagaaagagatacgagaagggcgacgtgagcctgtgcagatggcaccccaagccctaccaccacgacctgccctacggcagaagctactggatgtgctgcagaagagccgacagagagacccccggctgcagactgggcctgcacgacaacaactgggtgctgccctgcaacggccccggcggcggcagagccggcagagaggagggcagatag

SEQ ID NO: 81458 - DNA, 609 bp, synthetic construct
  misc_feature 1..609: note = Description of Artificial Sequence: Synthetic coding sequence
  source 1..609: mol_type = other DNA
atgacctgcctgaccgacgtgcccaccggctgcgccgccgtggagcccaccgccagactgcccgccgccgcctgggccagcaccatcaccaccggctgctgccccgccatgggccaggccggcgccggccccgccggcagaagaggcggcgaggccggcggcggcgagggcagagcccaccacgcccaccccagccccctgcccagagagcccagagtgagaaccggcccccccgcccacagccccacccccggcagcatcgaccccagccccgagctgagctggggcagcgccggcgtgacccaggagagccccctgctggaccccgtggacttcctgctgttcagaaccagagccgtggaccccctgagaagagtgttcttcttcttctaccagcacctgaccttcttcagcatccagccccagccccccccctgccacgccttccaccccaaggacccccccgccggcagcagaagacagctgatcctggtgcccctgaagggcccccccatcctggcccccatcctgagcctgacccccatcctgagcagatggagctgctacttccccagaagcagaatcgcccagggctggcacctgagctag

SEQ ID NO: 81459 - DNA, 1359 bp, synthetic construct
  misc_feature 1..1359: note = Description of Artificial Sequence: Synthetic coding sequence
  source 1..1359: mol_type = other DNA
atggccagcagaatcaacaccaacttcaccctgatccccaaccagaagctgagaagaagcaacagacagaccagctgctacagcaagaccctgggcagcggcttccagcccatcagcaccttcggcaacttcaaggccctgcccctggagatcttccagatcatcctgaagtacctgagcgtgaaggacatcagcatgctgagcatggtgagcaagaccgtgagccagcacatcatcaactacatcagcaccagcagcggcagcaagagactgctgctgcaggacttccacaacctggagctgcccgacagaagacaggacagcgccatcctggagcactacagaagcctgggcctgctgttcaagagatgcaccctgctgctgcccaccaaggagagactgaagtacatccacaagatcctgaccgaggtgagctgcttcaagttcaacggctgcgccgcccccatgcagtgcctgggcctgacctgctacggcatgttcctgcagaccctgaccgccggctgggacgagctggagtgccacagagtgtacaacttcctgtgcgagctgaccaacctgtgcagaaagatccagatggccgtgtgcagcaagcccggcagcgcccagaagctggagctgagaatcagactgttctgcagaaacgtgctgctggaccactggacccacagaagcgacagcgccttctggctgaccagaatcctgaagccctggcccatggtgaaccaggccagactgctgtacatcatcttcggccccatcagcccccaggacggccaggtggtgtggcaggagatgatcgaggagcccaccgacgagttcagcctgaagggcctggccgacgccatcaagctgctgtacgacgccagcaccaaggagtggaccgccgacgacgtgatcagcctggtggacgagctgagcgtggtgcccagagagtggctgctggagaacaacgccagactgctgatgctgagcggcaacaacatctgcttcagcttcatggccagcaaggccgtgaacggcagaaccatcgagctggccagactggtggtgttcctggccctggtgtgcgagaaggagctgtactgcatggactggaccgtgaagatgatgcagaaggtgtgcaaggtgttcagcacccccgtggagagaaagaacttcctgcagaacgtggccaacgccttcgcctgcgtgatcatggagatgctgcagagcatcatgagcggcgacagagacgaggacgacagaagcttcctgaacctgttccacctggtgcacgcccaggccaacttccacaaggaggtgctgtacctgaccatgaacacccccctgagcacctag

SEQ ID NO: 81460 - DNA, 2133 bp, synthetic construct
  misc_feature 1..2133: note = Description of Artificial Sequence: Synthetic coding sequence
  source 1..2133: mol_type = other DNA
atgggcggcaagcagagagacgaggacgacgaggcctacggcaagcccgtgaagtacgaccccagcttcagaggccccatcaagaacagaagctgcaccgacgtgatctgctgcgtgctgttcctgctgttcatcctgggctacatcgtggtgggcatcgtggcctggctgtacggcgaccccagacaggtgctgtaccccagaaacagcaccggcgcctactgcggcatgggcgagaacaaggacaagccctacctgctgtacttcaacatcttcagctgcatcctgagcagcaacatcatcagcgtggccgagaacggcctgcagtgccccaccccccaggtgtgcgtgagcagctgccccgaggacccctggaccgtgggcaagaacgagttcagccagaccgtgggcgaggtgttctacaccaagaacagaaacttctgcctgcccggcgtgccctggaacatgaccgtgatcaccagcctgcagcaggagctgtgccccagcttcctgctgcccagcgcccccgccctgggcagatgcttcccctggaccaacgtgaccccccccgccctgcccggcatcaccaacgacaccaccatccagcagggcatcagcggcctgatcgacagcctgaacgccagagacatcagcgtgaagatcttcgaggacttcgcccagagctggtactggatcctggtggccctgggcgtggccctggtgctgagcctgctgttcatcctgctgctgagactggtggccggccccctggtgctggtgctgatcctgggcgtgctgggcgtgctggcctacggcatctactactgctgggaggagtacagagtgctgagagacaagggcgccagcatcagccagctgggcttcaccaccaacctgagcgcctaccagagcgtgcaggagacctggctggccgccctgatcgtgctggccgtgctggaggccatcctgctgctgatgctgatcttcctgagacagagaatcagaatcgccatcgccctgctgaaggaggccagcaaggccgtgggccagatgatgagcaccatgttctaccccctggtgaccttcgtgctgctgctgatctgcatcgcctactgggccatgaccgccctgtacctggccaccagcggccagccccagtacgtgctgtgggccagcaacatcagcagccccggctgcgagaaggtgcccatcaacaccagctgcaaccccaccgcccacctggtgaacagcagctgccccggcctgatgtgcgtgttccagggctacagcagcaagggcctgatccagagaagcgtgttcaacctgcagatctacggcgtgctgggcctgttctggaccctgaactgggtgctggccctgggccagtgcgtgctggccggcgccttcgccagcttctactgggccttccacaagccccaggacatccccaccttccccctgatcagcgccttcatcagaaccctgagataccacaccggcagcctggccttcggcgccctgatcctgaccctggtgcagatcgccagagtgatcctggagtacatcgaccacaagctgagaggcgtgcagaaccccgtggccagatgcatcatgtgctgcttcaagtgctgcctgtggtgcctggagaagttcatcaagttcctgaacagaaacgcctacatcatgatcgccatctacggcaagaacttctgcgtgagcgccaagaacgccttcatgctgctgatgagaaacatcgtgagagtggtggtgctggacaaggtgaccgacctgctgctgttcttcggcaagctgctggtggtgggcggcgtgggcgtgctgagcttcttcttcttcagcggcagaatccccggcctgggcaaggacttcaagagcccccacctgaactactactggctgcccatcatgaccagcatcctgggcgcctacgtgatcgccagcggcttcttcagcgtgttcggcatgtgcgtggacaccctgttcctgtgcttcctggaggacctggagagaaacaacggcagcctggacagaccctactacatgagcaagagcctgctgaagatcctgggcaagaagaacgaggccccccccgacaacaagaagagaaagaagtag

SEQ ID NO: 81461 - DNA, 1206 bp, synthetic construct
  misc_feature 1..1206: note = Description of Artificial Sequence: Synthetic coding sequence
  source 1..1206: mol_type = other DNA
atgaagtgcgacttcaactgcaaccacgtgcacagcggcctgaagctggtgaagcccgacgacatcggcagactggtgagctacacccccgcctacctggagggcagctgcaaggactgcatcaaggactacgagagactgagctgcatcggcagccccatcgtgagccccagaatcgtgcagctggagaccgagagcaagagactgcacaacaaggagaaccagcacgtgcagcagaccctgaacagcaccaacgagatcgaggccctggagaccagcagactgtacgaggacagcggctacagcagcttcagcctgcagagcggcctgagcgagcacgaggagggcagcctgctggaggagaacttcggcgacagcctgcagagctgcctgctgcagatccagagccccgaccagtaccccaacaagaacctgctgcccgtgctgcacttcgagaaggtggtgtgcagcaccctgaagaagaacgccaagagaaaccccaaggtggacagagagatgctgaaggagatcatcgccagaggcaacttcagactgcagaacatcatcggcagaaagatgggcctggagtgcgtggacatcctgagcgagctgttcagaagaggcctgagacacgtgctggccaccatcctggcccagctgagcgacatggacctgatcaacgtgagcaaggtgagcaccacctggaagaagatcctggaggacgacaagggcgccttccagctgtacagcaaggccatccagagagtgaccgagaacaacaacaagttcagcccccacgccagcaccagagagtacgtgatgttcagaacccccctggccagcgtgcagaagagcgccgcccagaccagcctgaagaaggacgcccagaccaagctgagcaaccagggcgaccagaagggcagcacctacagcagacacaacgagttcagcgaggtggccaagaccctgaagaagaacgagagcctgaaggcctgcatcagatgcaacagccccgccaagtacgactgctacctgcagagagccacctgcaagagagagggctgcggcttcgactactgcaccaagtgcctgtgcaactaccacaccaccaaggactgcagcgacggcaagctgctgaaggccagctgcaagatcggccccctgcccggcaccaagaagagcaagaagaacctgagaagactgtag

SEQ ID NO: 81462 - DNA, 882 bp, synthetic construct
  misc_feature 1..882: note = Description of Artificial Sequence: Synthetic coding sequence
  source 1..882: mol_type = other DNA
atggacgccccccacagcaaggccgccctggacagcatcaacgagctgcccgagaacatcctgctggagctgttcacccacgtgcccgccagacagctgctgctgaactgcagactggtgtgcagcctgtggagagacctgatcgacctgatgaccctgtggaagagaaagtgcctgagagagggcttcatcaccaaggactgggaccagcccgtggccgactggaagatcttctacttcctgagaagcctgcacagaaacctgctgagaaacccctgcgccgaggaggacatgttcgcctggcagatcgacttcaacggcggcgacagatggaaggtggagagcctgcccggcgcccacggcaccgacttccccgaccccaaggtgaagaagtacttcgtgaccagctacgagatgtgcctgaagagccagctggtggacctggtggccgagggctactgggaggagctgctggacaccttcagacccgacatcgtggtgaaggactggttcgccgccagagccgactgcggctgcacctaccagctgaaggtgcagctggccagcgccgactacttcgtgctggccagcttcgagcccccccccgtgaccatccagcagtggaacaacgccacctggaccgaggtgagctacaccttcagcgactaccccagaggcgtgagatacatcctgttccagcacggcggcagagacacccagtactgggccggctggtacggccccagagtgaccaacagcagcatcgtggtgagccccaagatgaccagaaaccaggccagcagcgaggcccagcccggccagaagcacggccaggaggaggccgcccagagcccctacagagccgtggtgcagatcttctag

SEQ ID NO: 81463 - DNA, 750 bp, synthetic construct
  misc_feature 1..750: note = Description of Artificial Sequence: Synthetic coding sequence
  source 1..750: mol_type = other DNA
tgaaacgagctgcccgagaacatcctgctggagctgttcacccacgtgcccgccagacagctgctgctgaactgcagactggtgtgcagcctgtggagagacctgatcgacctgatgaccctgtggaagagaaagtgcctgagagagggcttcatcaccaaggactgggaccagcccgtggccgactggaagatcttctacttcctgagaagcctgcacagaaacctgctgagaaacccctgcgccgaggaggacatgttcgcctggcagatcgacttcaacggcggcgacagatggaaggtggagagcctgcccggcgcccacggcaccgacttccccgaccccaaggtgaagaagtacttcgtgaccagctacgagttcgccgccagagccgactgcggctgcacctaccagctgaaggtgcagctggccagcgccgactacttcgtgctggccagcttcgagcccccccccgtgaccatccagcagtggaacaacgccacctggaccgaggtgagctacaccttcagcgactaccccagaggcgtgagatacatcctgttccagcacggcggcagagacacccagtactgggccggctggtacggccccagagtgaccaacagcagcatcgtggtgagccccaagatgaccagaaaccaggccagcagcgaggcccagcccggccagaagcacggccaggaggaggccgcccagagcccctacagagccgtggtgcagatcttctag

SEQ ID NO: 81464 - DNA, 1569 bp, synthetic construct
  misc_feature 1..1569: note = Description of Artificial Sequence: Synthetic coding sequence
  source 1..1569: mol_type = other DNA
atgagactgagagtgagactgctgaagagaacctggcccctggaggtgcccgagaccgagcccaccctgggccacctgagaagccacctgagacagagcctgctgtgcacctggggctacagcagcaacaccagattcaccatcaccctgaactacaaggaccccctgaccggcgacgaggagaccctggccagctacggcatcgtgagcggcgacctgatctgcctgatcctgcaggacgacatccccgcccccaacatccccagcagcaccgacagcgagcacagcagcctgcagaacaacgagcagcccagcctggccaccagcagcaaccagaccagcatgcaggacgagcagcccagcgacagcttccagggccaggccgcccagagcggcgtgtggaacgacgacagcatgctgggccccagccagaacttcgaggccgagagcatccaggacaacgcccacatggccgagggcaccggcttctaccccagcgagcccatgctgtgcagcgagagcgtggagggccaggtgccccacagcctggagaccctgtaccagagcgccgactgcagcgacgccaacgacgccctgatcgtgctgatccacctgctgatgctggagagcggctacatcccccagggcaccgaggccaaggccctgagcatgcccgagaagtggaagctgagcggcgtgtacaagctgcagtacatgcaccccctgtgcgagggcagcagcgccaccctgacctgcgtgcccctgggcaacctgatcgtggtgaacgccaccctgaagatcaacaacgagatcagaagcgtgaagagactgcagctgctgcccgagagcttcatctgcaaggagaagctgggcgagaacgtggccaacatctacaaggacctgcagaagctgagcagactgttcaaggaccagctggtgtaccccctgctggccttcaccagacaggccctgaacctgcccgacgtgttcggcctggtggtgctgcccctggagctgaagctgagaatcttcagactgctggacgtgagaagcgtgctgagcctgagcgccgtgtgcagagacctgttcaccgccagcaacgaccccctgctgtggagattcctgtacctgagagacttcagagacaacaccgtgagagtgcaggacaccgactggaaggagctgtacagaaagagacacatccagagaaaggagagccccaagggcagattcgtgatgctgctgcccagcagcacccacaccatccccttctaccccaaccccctgcaccccagacccttccccagcagcagactgccccccggcatcatcggcggcgagtacgaccagagacccaccctgccctacgtgggcgaccccatcagcagcctgatccccggccccggcgagacccccagccagttcccccccctgagacccagattcgaccccgtgggccccctgcccggccccaaccccatcctgcccggcagaggcggccccaacgacagattccccttcagacccagcagaggcagacccaccgacggcagactgagcttcatgtag

SEQ ID NO: 81465 - DNA, 1332 bp, synthetic construct
  misc_feature 1..1332: note = Description of Artificial Sequence: Synthetic coding sequence
  source 1..1332: mol_type = other DNA
atggccagaccccccggcggcagcggccccctgctggacagcgagcacagcagcctgcagaacaacgagcagcccagcctggccaccagcagcaaccagaccagcatgcaggacgagcagcccagcgacagcttccagggccaggccgcccagagcggcgtgtggaacgacgacagcatgctgggccccagccagaacttcgaggccgagagcatccaggacaacgcccacatggccgagggcaccggcttctaccccagcgagcccatgctgtgcagcgagagcgtggagggccaggtgccccacagcctggagaccctgtaccagagcgccgactgcagcgacgccaacgacgccctgatcgtgctgatccacctgctgatgctggagagcggctacatcccccagggcaccgaggccaaggccctgagcatgcccgagaagtggaagctgagcggcgtgtacaagctgcagtacatgcaccccctgtgcgagggcagcagcgccaccctgacctgcgtgcccctgggcaacctgatcgtggtgaacgccaccctgaagatcaacaacgagatcagaagcgtgaagagactgcagctgctgcccgagagcttcatctgcaaggagaagctgggcgagaacgtggccaacatctacaaggacctgcagaagctgagcagactgttcaaggaccagctggtgtaccccctgctggccttcaccagacaggccctgaacctgcccgacgtgttcggcctggtggtgctgcccctggagctgaagctgagaatcttcagactgctggacgtgagaagcgtgctgagcctgagcgccgtgtgcagagacctgttcaccgccagcaacgaccccctgctgtggagattcctgtacctgagagacttcagagacaacaccgtgagagtgcaggacaccgactggaaggagctgtacagaaagagacacatccagagaaaggagagccccaagggcagattcgtgatgctgctgcccagcagcacccacaccatccccttctaccccaaccccctgcaccccagacccttccccagcagcagactgccccccggcatcatcggcggcgagtacgaccagagacccaccctgccctacgtgggcgaccccatcagcagcctgatccccggccccggcgagacccccagccagttcccccccctgagacccagattcgaccccgtgggccccctgcccggccccaaccccatcctgcccggcagaggcggccccaacgacagattccccttcagacccagcagaggcagacccaccgacggcagactgagcttcatgtag

SEQ ID NO: 81466 - DNA, 1227 bp, synthetic construct
  misc_feature 1..1227: note = Description of Artificial Sequence: Synthetic coding sequence
  source 1..1227: mol_type = other DNA
atgcaggacgagcagcccagcgacagcttccagggccaggccgcccagagcggcgtgtggaacgacgacagcatgctgggccccagccagaacttcgaggccgagagcatccaggacaacgcccacatggccgagggcaccggcttctaccccagcgagcccatgctgtgcagcgagagcgtggagggccaggtgccccacagcctggagaccctgtaccagagcgccgactgcagcgacgccaacgacgccctgatcgtgctgatccacctgctgatgctggagagcggctacatcccccagggcaccgaggccaaggccctgagcatgcccgagaagtggaagctgagcggcgtgtacaagctgcagtacatgcaccccctgtgcgagggcagcagcgccaccctgacctgcgtgcccctgggcaacctgatcgtggtgaacgccaccctgaagatcaacaacgagatcagaagcgtgaagagactgcagctgctgcccgagagcttcatctgcaaggagaagctgggcgagaacgtggccaacatctacaaggacctgcagaagctgagcagactgttcaaggaccagctggtgtaccccctgctggccttcaccagacaggccctgaacctgcccgacgtgttcggcctggtggtgctgcccctggagctgaagctgagaatcttcagactgctggacgtgagaagcgtgctgagcctgagcgccgtgtgcagagacctgttcaccgccagcaacgaccccctgctgtggagattcctgtacctgagagacttcagagacaacaccgtgagagtgcaggacaccgactggaaggagctgtacagaaagagacacatccagagaaaggagagccccaagggcagattcgtgatgctgctgcccagcagcacccacaccatccccttctaccccaaccccctgcaccccagacccttccccagcagcagactgccccccggcatcatcggcggcgagtacgaccagagacccaccctgccctacgtgggcgaccccatcagcagcctgatccccggccccggcgagacccccagccagttcccccccctgagacccagattcgaccccgtgggccccctgcccggccccaaccccatcctgcccggcagaggcggccccaacgacagattccccttcagacccagcagaggcagacccaccgacggcagactgagcttcatgtag

SEQ ID NO: 81467 - DNA, 699 bp, synthetic construct
  misc_feature 1..699: note = Description of Artificial Sequence: Synthetic coding sequence
  source 1..699: mol_type = other DNA
atgcagctgaccttcgcctggctgcacgtgttcggcagaaccctgagaatgatgaacttcagcggcaagggctgcgccaacccctggggccactgcagcatctacaacaagaacccccccctgggcttcagcttcagaaagctgtacatgcagctggacgagggcagcctgaccttcaacgccaaccccgacgagggcgtgaactacttcatgagcaagggcatcctggacgacagccccaaggagatcgccaagttcatcttctgcaccagaaccctgaactggaagaagctgagaatctacctggacgagagaagagacgtgctggacgacctggtgaccctgcacaacttcagaaaccagttcctgcccaacgccctgagagagttcttcagacacatccacgcccccgaggagagaggcgagtacctggagaccctgatcaccaagttcagccacagattctgcgcctgcaaccccgacctgatgagagagctgggcctgagccccgacgccgtgtacgtgctgtgctacagcctgatcctgctgagcatcgacctgaccagcccccacgtgaagaacaagatgagcaagagagagttcatcagaaacaccagaagagccgcccagaacatcagcgaggacttcgtgggccacctgtacgacaacatctacctgatcggccacgtggccgcctag

SEQ ID NO: 81468 - DNA, 960 bp, synthetic construct
  misc_feature 1..960: note = Description of Artificial Sequence: Synthetic coding sequence
  source 1..960: mol_type = other DNA
atgggccagggcctgtggagagtggtgagaaaccagcagctgcagcaggagggctacagcgagcagggctacctgaccagagagcagagcagaagaatggccgccagcaacatcagcaacaccaaccacagaaagcaggtgcagggcggcatcgacatctaccacctgctgaaggccagaaagagcaaggagcaggagggcttcatcaacctggagatgctgccccccgagctgagcttcaccatcctgagctacctgaacgccaccgacctgtgcctggccagctgcgtgtggcaggacctggccaacgacgagctgctgtggcagggcctgtgcaagagcacctggggccactgcagcatctacaacaagaacccccccctgggcttcagcttcagaaagctgtacatgcagctggacgagggcagcctgaccttcaacgccaaccccgacgagggcgtgaactacttcatgagcaagggcatcctggacgacagccccaaggagatcgccaagttcatcttctgcaccagaaccctgaactggaagaagctgagaatctacctggacgagagaagagacgtgctggacgacctggtgaccctgcacaacttcagaaaccagttcctgcccaacgccctgagagagttcttcagacacatccacgcccccgaggagagaggcgagtacctggagaccctgatcaccaagttcagccacagattctgcgcctgcaaccccgacctgatgagagagctgggcctgagccccgacgccgtgtacgtgctgtgctacagcctgatcctgctgagcatcgacctgaccagcccccacgtgaagaacaagatgagcaagagagagttcatcagaaacaccagaagagccgcccagaacatcagcgaggacttcgtgggccacctgtacgacaacatctacctgatcggccacgtggccgcctag

SEQ ID NO: 81469 - DNA, 555 bp, synthetic construct
  misc_feature 1..555: note = Description of Artificial Sequence: Synthetic coding sequence
  source 1..555: mol_type = other DNA
atgggccagggcctgtggagagtggtgagaaaccagcagctgcagcaggagggctacagcgagcagggctacctgaccagagagcagagcagaagaatggccgccagcaacatcagcaacaccaaccacagaaagcaggtgcagggcggcatcgacatctaccacctgctgaaggccagaaagagcaaggagcaggagggcttcatcaacctggagatgctgccccccgagctgagcttcaccatcctgagctacctgaacgccaccgacctgtgcctggccagctgcgtgtggcaggacctggccaacgacgagctgctgtggcagggcctgtgcaagagcacctggggccactgcagcatctacaacaagaacccccccctgggcttcagcttcagaaagctgtacatgcagctggacgagggcagcctgaccttcaacgccaaccccgacgagggcgtgaactacttcatgagcaagggcatcctggacgacagccccaaggagatcgccaagttcatcttctgcaccagaaccctgaactggaagaagtag

SEQ ID NO: 81470 - DNA, 1344 bp, synthetic construct
  misc_feature 1..1344: note = Description of Artificial Sequence: Synthetic coding sequence
  source 1..1344: mol_type = other DNA
atgcccgacatcatctgggtgttccccccccaggccgaggccgaggaggactgccacagcgacaccgtgagagccgacgacgacgaggagaacgagagccccgccgagaccgacctgcaggcccagctgcagatgttcagagcccagtggatgttcgagctggcccccggcgtgagcagcagcaacctggagaacagaccctgcagagccgccagaggcagcctgcagaagaccagcgccgacaccaagggcaagcaggagcaggccaaggaggagaaggccagagagctgttcctgaaggccgtggaggaggagcagaacggcgccctgtacgaggccatcaagttctacagaagagccatgcagctggtgcccgacatcgagttcaagatcacctacaccagaagccccgacggcgacggcgtgggcaacagctacatcgaggacaacgacgacgacagcaagatggccgacctgctgagctacttccagcagcagctgaccttccaggagagcgtgctgaagctgtgccagcccgagctggagagcagccagatccacatcagcgtgctgcccatggaggtgctgatgtacatcttcagatgggtggtgagcagcgacctggacctgagaagcctggagcagctgagcctggtgtgcagaggcttctacatctgcgccagagaccccgagatctggagactggcctgcctgaaggtgtggggcagaagctgcatcaagctggtgccctacaccagctggagagagatgttcctggagagacccagagtgagattcgacggcgtgtacatcagcaagaccacctacatcagacagggcgagcagagcctggacggcttctacagagcctggcaccaggtggagtactacagatacatcagattcttccccgacggccacgtgatgatgctgaccacccccgaggagccccagagcatcgtgcccagactgagaaccagaaacaccagaaccgacgccatcctgctgggccactacagactgagccaggacaccgacaaccagaccaaggtgttcgccgtgatcaccaagaagaaggaggagaagcccctggactacaagtacagatacttcagaagagtgcccgtgcaggaggccgaccagagcttccacgtgggcctgcagctgtgcagcagcggccaccagagattcaacaagctgatctggatccaccacagctgccacatcacctacaagagcaccggcgagaccgccgtgagcgccttcgagatcgacaagatgtacacccccctgttcttcgccagagtgagaagctacaccgccttcagcgagagacccctgtag

SEQ ID NO: 81471 - DNA, 1314 bp, synthetic construct
  misc_feature 1..1314: note = Description of Artificial Sequence: Synthetic coding sequence
  source 1..1314: mol_type = other DNA
atggccgaggccgaggaggactgccacagcgacaccgtgagagccgacgacgacgaggagaacgagagccccgccgagaccgacctgcaggcccagctgcagatgttcagagcccagtggatgttcgagctggcccccggcgtgagcagcagcaacctggagaacagaccctgcagagccgccagaggcagcctgcagaagaccagcgccgacaccaagggcaagcaggagcaggccaaggaggagaaggccagagagctgttcctgaaggccgtggaggaggagcagaacggcgccctgtacgaggccatcaagttctacagaagagccatgcagctggtgcccgacatcgagttcaagatcacctacaccagaagccccgacggcgacggcgtgggcaacagctacatcgaggacaacgacgacgacagcaagatggccgacctgctgagctacttccagcagcagctgaccttccaggagagcgtgctgaagctgtgccagcccgagctggagagcagccagatccacatcagcgtgctgcccatggaggtgctgatgtacatcttcagatgggtggtgagcagcgacctggacctgagaagcctggagcagctgagcctggtgtgcagaggcttctacatctgcgccagagaccccgagatctggagactggcctgcctgaaggtgtggggcagaagctgcatcaagctggtgccctacaccagctggagagagatgttcctggagagacccagagtgagattcgacggcgtgtacatcagcaagaccacctacatcagacagggcgagcagagcctggacggcttctacagagcctggcaccaggtggagtactacagatacatcagattcttccccgacggccacgtgatgatgctgaccacccccgaggagccccagagcatcgtgcccagactgagaaccagaaacaccagaaccgacgccatcctgctgggccactacagactgagccaggacaccgacaaccagaccaaggtgttcgccgtgatcaccaagaagaaggaggagaagcccctggactacaagtacagatacttcagaagagtgcccgtgcaggaggccgaccagagcttccacgtgggcctgcagctgtgcagcagcggccaccagagattcaacaagctgatctggatccaccacagctgccacatcacctacaagagcaccggcgagaccgccgtgagcgccttcgagatcgacaagatgtacacccccctgttcttcgccagagtgagaagctacaccgccttcagcgagagacccctgtag

SEQ ID NO: 81472 - DNA, 1212 bp, synthetic construct
  misc_feature 1..1212: note = Description of Artificial Sequence: Synthetic coding sequence
  source 1..1212: mol_type = other DNA
atgttcagagcccagtggatgttcgagctggcccccggcgtgagcagcagcaacctggagaacagaccctgcagagccgccagaggcagcctgcagaagaccagcgccgacaccaagggcaagcaggagcaggccaaggaggagaaggccagagagctgttcctgaaggccgtggaggaggagcagaacggcgccctgtacgaggccatcaagttctacagaagagccatgcagctggtgcccgacatcgagttcaagatcacctacaccagaagccccgacggcgacggcgtgggcaacagctacatcgaggacaacgacgacgacagcaagatggccgacctgctgagctacttccagcagcagctgaccttccaggagagcgtgctgaagctgtgccagcccgagctggagagcagccagatccacatcagcgtgctgcccatggaggtgctgatgtacatcttcagatgggtggtgagcagcgacctggacctgagaagcctggagcagctgagcctggtgtgcagaggcttctacatctgcgccagagaccccgagatctggagactggcctgcctgaaggtgtggggcagaagctgcatcaagctggtgccctacaccagctggagagagatgttcctggagagacccagagtgagattcgacggcgtgtacatcagcaagaccacctacatcagacagggcgagcagagcctggacggcttctacagagcctggcaccaggtggagtactacagatacatcagattcttccccgacggccacgtgatgatgctgaccacccccgaggagccccagagcatcgtgcccagactgagaaccagaaacaccagaaccgacgccatcctgctgggccactacagactgagccaggacaccgacaaccagaccaaggtgttcgccgtgatcaccaagaagaaggaggagaagcccctggactacaagtacagatacttcagaagagtgcccgtgcaggaggccgaccagagcttccacgtgggcctgcagctgtgcagcagcggccaccagagattcaacaagctgatctggatccaccacagctgccacatcacctacaagagcaccggcgagaccgccgtgagcgccttcgagatcgacaagatgtacacccccctgttcttcgccagagtgagaagctacaccgccttcagcgagagacccctgtag

SEQ ID NO: 81473 - DNA, 147 bp, synthetic construct
  misc_feature 1..147: note = Description of Artificial Sequence: Synthetic coding sequence
  source 1..147: mol_type = other DNA
atgttcagagcccagtggatgttcgagctggcccccggcgtgagcagcagcaacctggagaacagaccctgcagagccgccagaggcagcctgcagaagaccagcgccgacaccaagggcaagcaggagcaggccaaggaggagtag

SEQ ID NO: 81474 - DNA, 357 bp, synthetic construct
  misc_feature 1..357: note = Description of Artificial Sequence: Synthetic coding sequence
  source 1..357: mol_type = other DNA
atgttcagagcccagtggatgttcgagctggcccccggcgtgagcagcagcaacctggagaacagaccctgcagagccgccagaggcagcctgcagaagaccagcgccgacaccaagggcaagcaggagcaggccaaggaggagaaggccagagagctgttcctgaaggccgtggaggaggagcagaacggcgccctgtacgaggccatcaagttctacagaagagccatgcagctggtgcccgacatcgagttcaagatcacctacaccagaagccccgacggcgacggcgtgggcaacagctacatcgaggacaacgacgacgacagcaagatggccgacctgctgagctactag

SEQ ID NO: 81475 - DNA, 438 bp, synthetic construct
  misc_feature 1..438: note = Description of Artificial Sequence: Synthetic coding sequence
  source 1..438: mol_type = other DNA
atgttcagagcccagtggatgttcgagctggcccccggcgtgagcagcagcaacctggagaacagaccctgcagagccgccagaggcagcctgcagaagaccagcgccgacaccaagggcaagcaggagcaggccaaggaggagaaggccagagagctgttcctgaaggccgtggaggaggagcagaacggcgccctgtacgaggccatcaagttctacagaagagccatgcagctggtgcccgacatcgagttcaagatcacctacaccagaagccccgacggcgacggcgtgggcaacagctacatcgaggacaacgacgacgacagcaagatggccgacctgctgagctacttccagcagcagctgaccttccaggagagcgtgctgaagctgtgccagcccgagctggagagcagccagatccacatcagctag

SEQ ID NO: 81476 - DNA, 3132 bp, synthetic construct
  misc_feature 1..3132: note = Description of Artificial Sequence: Synthetic coding sequence
  source 1..3132: mol_type = other DNA
atgagaagattcaagagaaagcacctgaccgccatcgactgccagcacctggccagaagccacctggccgtgacccagcccttcggccagagatggaccaacagagaccccaaccacggcctgtaccccaagcccagaaccaagagaggcagcagaggccagggcagccagagatgcatccccgagttcttcctggccggcaagcagccctgcaccaacgacatggccaagagcaacagcgtgggccaggacagctgccaggacagcgagggcgacatgatcttccccgccgagagcagctgcgccctgccccaggagggcagcgccggccccggcagccccggcagcgccccccccagcagaaagagaagctggagcagcgaggaggagagcaaccaggccaccggcaccagcagatgggacggcgtgagcaagaaggcccccagacaccacctgagcgtgccctgcaccagacccagagaggccagacaggaggccgaggacagcaccagcagactgagcgccgagagcggcgagaccgaccaggacgccggcgacgtgggccccgaccccatccccgacagctactacggcctgctgggcaccctgccctgccaggaggccctgagccacatctgcagcctgcccagcgaggtgctgagacacgtgttcgccttcctgcccgtggaggacctgtactggaacctgagcctggtgtgccacctgtggagagagatcatcagcgaccccctgttcatcccctggaagaagctgtaccacagatacctgatgaacgaggagcaggccgtgagcaaggtggacggcatcctgagcaactgcggcatcgagaaggagagcgacctgtgcgtgctgaacctgatcagatacaccgccaccaccaagtgcagccccagcgtggaccccgagagagtgctgtggagcctgagagaccaccccctgctgcccgaggccgaggcctgcgtgagacagcacctgcccgacctgtacgccgccgccggcggcgtgaacatctgggccctggtggccgccgtggtgctgctgagcagcagcgtgaacgacatccagagactgctgttctgcctgagaagacccagcagcaccgtgaccatgcccgacgtgaccgagaccctgtactgcatcgccgtgctgctgtacgccatgagagagaagggcatcaacatcagcaacagaatccactacaacatcttctactgcctgtacctgcaggagaacagctgcacccaggccaccaaggtgaaggaggagcccagcgtgtggcccggcaagaagaccatccagctgacccacgagcagcagctgatcctgaaccacaagatggagcccctgcaggtggtgaagatcatggccttcgccggcaccggcaagaccagcaccctggtgaagtacgccgagaagtggagccagagcagattcctgtacgtgaccttcaacaagagcatcgccaagcaggccgagagagtgttccccagcaacgtgatctgcaagaccttccacagcatggcctacggccacatcggcagaaagtaccagagcaagaagaagctgaacctgttcaagctgacccccttcatggtgaacagcgtgctggccgagggcaagggcggcttcatcagagccaagctggtgtgcaagaccctggagaacttcttcgccagcgccgacgaggagctgaccatcgaccacgtgcccatctggtgcaagaacagccagggccagagagtgatggtggagcagagcgagaagctgaacggcgtgctggaggccagcagactgtgggacaacatgagaaagctgggcgagtgcaccgaggaggcccaccagatgacccacgacggctacctgaagctgtggcagctgagcaagcccagcctggccagcttcgacgccatcttcgtggacgaggcccaggactgcacccccgccatcatgaacatcgtgctgagccagccctgcggcaagatcttcgtgggcgacccccaccagcagatctacaccttcagaggcgccgtgaacgccctgttcaccgtgccccacacccacgtgttctacctgacccagagcttcagattcggcgtggagatcgcctacgtgggcgccaccatcctggacgtgtgcaagagagtgagaaagaagaccctggtgggcggcaaccaccagagcggcatcagaggcgacgccaagggccaggtggccctgctgagcagaaccaacgccaacgtgttcgacgaggccgtgagagtgaccgagggcgagttccccagcagaatccacctgatcggcggcatcaagagcttcggcctggacagaatcatcgacatctggatcctgctgcagcccgaggaggagagaagaaagcagaacctggtgatcaaggacaagttcatcagaagatgggtgcacaaggagggcttcagcggcttcaagagatacgtgaccgccgccgaggacaaggagctggaggccaagatcgccgtggtggagaagtacaacatcagaatccccgagctggtgcagagaatcgagaagtgccacatcgaggacctggacttcgccgagtacatcctgggcaccgtgcacaaggccaagggcctggagttcgacaccgtgcacgtgctggacgacttcgtgaaggtgccctgcgccagacacaacctgccccagctgccccacttcagagtggagagcttcagcgaggacgagtggaacctgctgtacgtggccgtgaccagagccaagaagagactgatcatgaccaagagcctggagaacatcctgaccctggccggcgagtacttcctgcaggccgagctgaccagcaacgtgctgaagaccggcgtggtgagatgctgcgtgggccagtgcaacaacgccatccccgtggacaccgtgctgaccatgaagaagctgcccatcacctacagcaacagaaaggagaacaagggcggctacctgtgccacagctgcgccgagcagagaatcggccccctggccttcctgaccgccagccccgagcaggtgagagccatggagagaaccgtggagaacatcgtgctgcccagacacgaggccctgctgttcctggtgttctag

SEQ ID NO: 81477 - DNA, 1215 bp, synthetic construct
  misc_feature 1..1215: note = Description of Artificial Sequence: Synthetic coding sequence
  source 1..1215: mol_type = other DNA
atgaacgaggagcaggccgtgagcaaggtggacggcatcctgagcaactgcggcatcgagaaggagagcgacctgtgcgtgctgaacctgatcagatacaccgccaccaccaagtgcagccccagcgtggaccccgagagagtgctgtggagcctgagagaccaccccctgctgcccgaggccgaggcctgcgtgagacagcacctgcccgacctgtacgccgccgccggcggcgtgaacatctgggccctggtggccgccgtggtgctgctgagcagcagcgtgaacgacatccagagactgctgttctgcctgagaagacccagcagcaccgtgaccatgcccgacgtgaccgagaccctgtactgcatcgccgtgctgctgtacgccatgagagagaagggcatcaacatcagcaacagaatccactacaacatcttctactgcctgtacctgcaggagaacagctgcacccaggccaccaaggtgaaggaggagcccagcgtgtggcccggcaagaagaccatccagctgacccacgagcagcagctgatcctgaaccacaagatggagcccctgcaggtggtgaagatcatggccttcgccggcaccggcaagaccagcaccctggtgaagtacgccgagaagtggagccagagcagattcctgtacgtgaccttcaacaagagcatcgccaagcaggccgagagagtgttccccagcaacgtgatctgcaagaccttccacagcatggcctacggccacatcggcagaaagtaccagagcaagaagaagctgaacctgttcaagctgacccccttcatggtgaacagcgtgctggccgagggcaagggcggcttcatcagagccaagctggtgtgcaagaccctggagaacttcttcgccagcgccgacgaggagctgaccatcgaccacgtgcccatctggtgcaagaacagccagggccagagagtgatggtggagcagagcgagaagctgaacggcgtgctggaggccagcagactgtgggacaacatgagaaagctgggcgagtgcaccgaggaggcccaccagatgacccacgacggctacctgaagctgtggcagctgagcaagcccagcctggccagcttcgacgccatcttcgtggacgaggcccaggccggcgccagacacggcgcccactgcggcgagcacagaaccgcccccgcctag

SEQ ID NO: 81478 - DNA, 3285 bp, synthetic construct
  misc_feature 1..3285: note = Description of Artificial Sequence: Synthetic coding sequence
  source 1..3285: mol_type = other DNA
atgagctacgaggtgaccagcggctgccactggacctgccaggtgcccgagagctgcgacaacggcctgcactgcgccggccccctgggccacctgcacagaagatgccagagaaccagcgcccacctgctggtgttcaccgagcacgccgagatgagaagattcaagagaaagcacctgaccgccatcgactgccagcacctggccagaagccacctggccgtgacccagcccttcggccagagatggaccaacagagaccccaaccacggcctgtaccccaagcccagaaccaagagaggcagcagaggccagggcagccagagatgcatccccgagttcttcctggccggcaagcagccctgcaccaacgacatggccaagagcaacagcgtgggccaggacagctgccaggacagcgagggcgacatgatcttccccgccgagagcagctgcgccctgccccaggagggcagcgccggccccggcagccccggcagcgccccccccagcagaaagagaagctggagcagcgaggaggagagcaaccaggccaccggcaccagcagatgggacggcgtgagcaagaaggcccccagacaccacctgagcgtgccctgcaccagacccagagaggccagacaggaggccgaggacagcaccagcagactgagcgccgagagcggcgagaccgaccaggacgccggcgacgtgggccccgaccccatccccgacagctactacggcctgctgggcaccctgccctgccaggaggccctgagccacatctgcagcctgcccagcgaggtgctgagacacgtgttcgccttcctgcccgtggaggacctgtactggaacctgagcctggtgtgccacctgtggagagagatcatcagcgaccccctgttcatcccctggaagaagctgtaccacagatacctgatgaacgaggagcaggccgtgagcaaggtggacggcatcctgagcaactgcggcatcgagaaggagagcgacctgtgcgtgctgaacctgatcagatacaccgccaccaccaagtgcagccccagcgtggaccccgagagagtgctgtggagcctgagagaccaccccctgctgcccgaggccgaggcctgcgtgagacagcacctgcccgacctgtacgccgccgccggcggcgtgaacatctgggccctggtggccgccgtggtgctgctgagcagcagcgtgaacgacatccagagactgctgttctgcctgagaagacccagcagcaccgtgaccatgcccgacgtgaccgagaccctgtactgcatcgccgtgctgctgtacgccatgagagagaagggcatcaacatcagcaacagaatccactacaacatcttctactgcctgtacctgcaggagaacagctgcacccaggccaccaaggtgaaggaggagcccagcgtgtggcccggcaagaagaccatccagctgacccacgagcagcagctgatcctgaaccacaagatggagcccctgcaggtggtgaagatcatggccttcgccggcaccggcaagaccagcaccctggtgaagtacgccgagaagtggagccagagcagattcctgtacgtgaccttcaacaagagcatcgccaagcaggccgagagagtgttccccagcaacgtgatctgcaagaccttccacagcatggcctacggccacatcggcagaaagtaccagagcaagaagaagctgaacctgttcaagctgacccccttcatggtgaacagcgtgctggccgagggcaagggcggcttcatcagagccaagctggtgtgcaagaccctggagaacttcttcgccagcgccgacgaggagctgaccatcgaccacgtgcccatctggtgcaagaacagccagggccagagagtgatggtggagcagagcgagaagctgaacggcgtgctggaggccagcagactgtgggacaacatgagaaagctgggcgagtgcaccgaggaggcccaccagatgacccacgacggctacctgaagctgtggcagctgagcaagcccagcctggccagcttcgacgccatcttcgtggacgaggcccaggactgcacccccgccatcatgaacatcgtgctgagccagccctgcggcaagatcttcgtgggcgacccccaccagcagatctacaccttcagaggcgccgtgaacgccctgttcaccgtgccccacacccacgtgttctacctgacccagagcttcagattcggcgtggagatcgcctacgtgggcgccaccatcctggacgtgtgcaagagagtgagaaagaagaccctggtgggcggcaaccaccagagcggcatcagaggcgacgccaagggccaggtggccctgctgagcagaaccaacgccaacgtgttcgacgaggccgtgagagtgaccgagggcgagttccccagcagaatccacctgatcggcggcatcaagagcttcggcctggacagaatcatcgacatctggatcctgctgcagcccgaggaggagagaagaaagcagaacctggtgatcaaggacaagttcatcagaagatgggtgcacaaggagggcttcagcggcttcaagagatacgtgaccgccgccgaggacaaggagctggaggccaagatcgccgtggtggagaagtacaacatcagaatccccgagctggtgcagagaatcgagaagtgccacatcgaggacctggacttcgccgagtacatcctgggcaccgtgcacaaggccaagggcctggagttcgacaccgtgcacgtgctggacgacttcgtgaaggtgccctgcgccagacacaacctgccccagctgccccacttcagagtggagagcttcagcgaggacgagtggaacctgctgtacgtggccgtgaccagagccaagaagagactgatcatgaccaagagcctggagaacatcctgaccctggccggcgagtacttcctgcaggccgagctgaccagcaacgtgctgaagaccggcgtggtgagatgctgcgtgggccagtgcaacaacgccatccccgtggacaccgtgctgaccatgaagaagctgcccatcacctacagcaacagaaaggagaacaagggcggctacctgtgccacagctgcgccgagcagagaatcggccccctggccttcctgaccgccagccccgagcaggtgagagccatggagagaaccgtggagaacatcgtgctgcccagacacgaggccctgctgttcctggtgttctag

SEQ ID NO: 81479 - DNA, 1644 bp, synthetic construct
  misc_feature 1..1644: note = Description of Artificial Sequence: Synthetic coding sequence
  source 1..1644: mol_type = other DNA
atggcctacggccacatcggcagaaagtaccagagcaagaagaagctgaacctgttcaagctgacccccttcatggtgaacagcgtgctggccgagggcaagggcggcttcatcagagccaagctggtgtgcaagaccctggagaacttcttcgccagcgccgacgaggagctgaccatcgaccacgtgcccatctggtgcaagaacagccagggccagagagtgatggtggagcagagcgagaagctgaacggcgtgctggaggccagcagactgtgggacaacatgagaaagctgggcgagtgcaccgaggaggcccaccagatgacccacgacggctacctgaagctgtggcagctgagcaagcccagcctggccagcttcgacgccatcttcgtggacgaggcccaggactgcacccccgccatcatgaacatcgtgctgagccagccctgcggcaagatcttcgtgggcgacccccaccagcagatctacaccttcagaggcgccgtgaacgccctgttcaccgtgccccacacccacgtgttctacctgacccagagcttcagattcggcgtggagatcgcctacgtgggcgccaccatcctggacgtgtgcaagagagtgagaaagaagaccctggtgggcggcaaccaccagagcggcatcagaggcgacgccaagggccaggtggccctgctgagcagaaccaacgccaacgtgttcgacgaggccgtgagagtgaccgagggcgagttccccagcagaatccacctgatcggcggcatcaagagcttcggcctggacagaatcatcgacatctggatcctgctgcagcccgaggaggagagaagaaagcagaacctggtgatcaaggacaagttcatcagaagatgggtgcacaaggagggcttcagcggcttcaagagatacgtgaccgccgccgaggacaaggagctggaggccaagatcgccgtggtggagaagtacaacatcagaatccccgagctggtgcagagaatcgagaagtgccacatcgaggacctggacttcgccgagatggagagccaccacgtgggccaggccggcctggagctgcccaccagcgagtacatcctgggcaccgtgcacaaggccaagggcctggagttcgacaccgtgcacgtgctggacgacttcgtgaaggtgccctgcgccagacacaacctgccccagctgccccacttcagagtggagagcttcagcgaggacgagtggaacctgctgtacgtggccgtgaccagagccaagaagagactgatcatgaccaagagcctggagaacatcctgaccctggccggcgagtacttcctgcaggccgagctgaccagcaacgtgctgaagaccggcgtggtgagatgctgcgtgggccagtgcaacaacgccatccccgtggacaccgtgctgaccatgaagaagctgcccatcacctacagcaacagaaaggagaacaagggcggctacctgtgccacagctgcgccgagcagagaatcggccccctggccttcctgaccgccagccccgagcaggtgagagccatggagagaaccgtggagaacatcgtgctgcccagacacgaggccctgctgttcctggtgttctag

SEQ ID NO: 81480 - DNA, 1215 bp, synthetic construct; identical to SEQ ID NO: 81477
  misc_feature 1..1215: note = Description of Artificial Sequence: Synthetic coding sequence
  source 1..1215: mol_type = other DNA

SEQ ID NO: 81481 - DNA, 576 bp, synthetic construct
  misc_feature 1..576: note = Description of Artificial Sequence: Synthetic coding sequence
  source 1..576: mol_type = other DNA
atggaccccaagcagaccaccctgctgtgcctggtgctgtgcctgggccagagaatccaggcccaggagggcgacttccccatgcccttcatcagcgccaagagcagccccgtgatccccctggacggcagcgtgaagatccagtgccaggccatcagagaggcctacctgacccagctgatgatcatcaagaacagcacctacagagagatcggcagaagactgaagttctggaacgagaccgaccccgagttcgtgatcgaccacatggacgccaacaaggccggcagataccagtgccagtacagaatcggccactacagattcagatacagcgacaccctggagctggtggtgaccgacagcatccaccaggactacaccacccagaacctgatcagaatggccgtggccggcctggtgctggtggccctgctggccatcctggtggagaactggcacagccacaccgccctgaacaaggaggccagcgccgacgtggccgagcccagctggagccagcagatgtgccagcccggcctgaccttcgccagaacccccagcgtgtgcaagtag

SEQ ID NO: 81482 - DNA, 537 bp, synthetic construct
  misc_feature 1..537: note = Description of Artificial Sequence: Synthetic coding sequence
  source 1..537: mol_type = other DNA
atggaccccaagcagaccaccctgctgtgcctgggcctgtacggcaagcccttcctgagcgccgacagaggcctggtgctgatgcccggcgagaacatcagcctgacctgcagcagcgcccacatccccttcgacagattcagcctggccaaggagggcgagctgagcctgccccagcaccagagcggcgagcaccccgccaacttcagcctgggccccgtggacctgaacgtgagcggcatctacagatgctacggctggtacaacagaagcccctacctgtggagcttccccagcaacgccctggagctggtggtgaccgacagcatccaccaggactacaccacccagaacctgatcagaatggccgtggccggcctggtgctggtggccctgctggccatcctggtggagaactggcacagccacaccgccctgaacaaggaggccagcgccgacgtggccgagcccagctggagccagcagatgtgccagcccggcctgaccttcgccagaacccccagcgtgtgcaagtag

SEQ ID NO: 81483 - DNA, 864 bp, synthetic construct
  misc_feature 1..864: note = Description of Artificial Sequence: Synthetic coding sequence
  source 1..864: mol_type = other DNA
atggaccccaagcagaccaccctgctgtgcctggtgctgtgcctgggccagagaatccaggcccaggagggcgacttccccatgcccttcatcagcgccaagagcagccccgtgatccccctggacggcagcgtgaagatccagtgccaggccatcagagaggcctacctgacccagctgatgatcatcaagaacagcacctacagagagatcggcagaagactgaagttctggaacgagaccgaccccgagttcgtgatcgaccacatggacgccaacaaggccggcagataccagtgccagtacagaatcggccactacagattcagatacagcgacaccctggagctggtggtgaccggcctgtacggcaagcccttcctgagcgccgacagaggcctggtgctgatgcccggcgagaacatcagcctgacctgcagcagcgcccacatccccttcgacagattcagcctggccaaggagggcgagctgagcctgccccagcaccagagcggcgagcaccccgccaacttcagcctgggccccgtggacctgaacgtgagcggcatctacagatgctacggctggtacaacagaagcccctacctgtggagcttccccagcaacgccctggagctggtggtgaccgacagcatccaccaggactacaccacccagaacctgatcagaatggccgtggccggcctggtgctggtggccctgctggccatcctggtggagaactggcacagccacaccgccctgaacaaggaggccagcgccgacgtggccgagcccagctggagccagcagatgtgccagcccggcctgaccttcgccagaacccccagcgtgtgcaagtag

SEQ ID NO: 81484 - DNA, 828 bp, synthetic construct
  misc_feature 1..828: note = Description of Artificial Sequence: Synthetic coding sequence
  source 1..828: mol_type = other DNA
atggaccccaagcagaccaccctgctgtgcctgggcgacttccccatgcccttcatcagcgccaagagcagccccgtgatccccctggacggcagcgtgaagatccagtgccaggccatcagagaggcctacctgacccagctgatgatcatcaagaacagcacctacagagagatcggcagaagactgaagttctggaacgagaccgaccccgagttcgtgatcgaccacatggacgccaacaaggccggcagataccagtgccagtacagaatcggccactacagattcagatacagcgacaccctggagctggtggtgaccggcctgtacggcaagcccttcctgagcgccgacagaggcctggtgctgatgcccggcgagaacatcagcctgacctgcagcagcgcccacatccccttcgacagattcagcctggccaaggagggcgagctgagcctgccccagcaccagagcggcgagcaccccgccaacttcagcctgggccccgtggacctgaacgtgagcggcatctacagatgctacggctggtacaacagaagcccctacctgtggagcttccccagcaacgccctggagctggtggtgaccgacagcatccaccaggactacaccacccagaacctgatcagaatggccgtggccggcctggtgctggtggccctgctggccatcctggtggagaactggcacagccacaccgccctgaacaaggaggccagcgccgacgtggccgagcccagctggagccagcagatgtgccagcccggcctgaccttcgccagaacccccagcgtgtgcaagtag

SEQ ID NO: 81485 - DNA, 630 bp, synthetic construct
  misc_feature 1..630: note = Description of Artificial Sequence: Synthetic coding sequence
  source 1..630: mol_type = other DNA
atggaccccaagcagaccaccctgctgtgcctgggcgacttccccatgcccttcatcagcgccaagagcagccccgtgatccccctggacggcagcgtgaagatccagtgccaggccatcagagaggcctacctgacccagctgatgatcatcaagaacagcacctacagagagatcggcagaagactgaagttctggaacgagaccgaccccgagttcgtgatcgaccacatggacgccaacaaggccggcagataccagtgccagtacagaatcggccactacagattcagatacagcgacaccctggagctggtggtgaccggcctgtacggcaagcccttcctgagcgccgacagaggcctggtgctgatgcccggcgagaacatcagcctgacctgcagcagcgcccacatccccttcgacagattcagcctggccaaggagggcgagctgagcctgccccagcaccagagcggcgagcaccccgccaacttcagcctgggccccgtggacctgaacgtgagcggcatctacagactgcacccccccagactgcacgacgccgagctggacccccacggcagaggcagaaccggccccagaggcagcctgggccacaccggctag

SEQ ID NO: 81486 - DNA, 762 bp, synthetic construct
  misc_feature 1..762: note = Description of Artificial Sequence: Synthetic coding sequence
  source 1..762: mol_type = other DNA
atggaccccaagcagaccaccctgctgtgcctgggcgacttccccatgcccttcatcagcgccaagagcagccccgtgatccccctggacggcagcgtgaagatccagtgccaggccatcagagaggcctacctgacccagctgatgatcatcaagaacagcacctacagagagatcggcagaagactgaagttctggaacgagaccgaccccgagttcgtgatcgaccacatggacgccaacaaggccggcagataccagtgccagtacagaatcggccactacagattcagatacagcgacaccctggagctggtggtgaccggcctgtacggcaagcccttcctgagcgccgacagaggcctggtgctgatgcccggcgagaacatcagcctgacctgcagcagcgcccacatccccttcgacagattcagcctggccaaggagggcgagctgagcctgccccagcaccagagcggcgagcaccccgccaacttcagcctgggccccgtggacctgaacgtgagcggcatctacagatgctacgacagcatccaccaggactacaccacccagaacctgatcagaatggccgtggccggcctggtgctggtggccctgctggccatcctggtggagaactggcacagccacaccgccctgaacaaggaggccagcgccgacgtggccgagcccagctggagccagcagatgtgccagcccggcctgaccttcgccagaacccccagcgtgtgcaagtag

SEQ ID NO: 81487 - DNA, 798 bp, synthetic construct
  misc_feature 1..798: note = Description of Artificial Sequence: Synthetic coding sequence
  source 1..798: mol_type = other DNA
atggaccccaagcagaccaccctgctgtgcctggtgctgtgcctgggccagagaatccaggcccaggagggcgacttccccatgcccttcatcagcgccaagagcagccccgtgatccccctggacggcagcgtgaagatccagtgccaggccatcagagaggcctacctgacccagctgatgatcatcaagaacagcacctacagagagatcggcagaagactgaagttctggaacgagaccgaccccgagttcgtgatcgaccacatggacgccaacaaggccggcagataccagtgccagtacagaatcggccactacagattcagatacagcgacaccctggagctggtggtgaccggcctgtacggcaagcccttcctgagcgccgacagaggcctggtgctgatgcccggcgagaacatcagcctgacctgcagcagcgcccacatccccttcgacagattcagcctggccaaggagggcgagctgagcctgccccagcaccagagcggcgagcaccccgccaacttcagcctgggccccgtggacctgaacgtgagcggcatctacagatgctacgacagcatccaccaggactacaccacccagaacctgatcagaatggccgtggccggcctggtgctggtggccctgctggccatcctggtggagaactggcacagccacaccgccctgaacaaggaggccagcgccgacgtggccgagcccagctggagccagcagatgtgccagcccggcctgaccttcgccagaacccccagcgtgtgcaagtag

SEQ ID NO: 81488 - DNA, 540 bp, synthetic construct
  misc_feature 1..540: note = Description of Artificial Sequence: Synthetic coding sequence
  source 1..540: mol_type = other DNA
atggaccccaagcagaccaccctgctgtgcctgggcgacttccccatgcccttcatcagcgccaagagcagccccgtgatccccctggacggcagcgtgaagatccagtgccaggccatcagagaggcctacctgacccagctgatgatcatcaagaacagcacctacagagagatcggcagaagactgaagttctggaacgagaccgaccccgagttcgtgatcgaccacatggacgccaacaaggccggcagataccagtgccagtacagaatcggccactacagattcagatacagcgacaccctggagctggtggtgaccgacagcatccaccaggactacaccacccagaacctgatcagaatggccgtggccggcctggtgctggtggccctgctggccatcctggtggagaactggcacagccacaccgccctgaacaaggaggccagcgccgacgtggccgagcccagctggagccagcagatgtgccagcccggcctgaccttcgccagaacccccagcgtgtgcaagtag

SEQ ID NO: 81489 - DNA, 720 bp, synthetic construct
  misc_feature 1..720: note = Description of Artificial Sequence: Synthetic coding sequence
  source 1..720: mol_type = other DNA
atggaccccaagcagaccaccctgctgtgcctggtgctgtgcctgggccagagaatccaggcccaggagggcgacttccccatgcccttcatcagcgccaagagcagccccgtgatccccctggacggcagcgtgaagatccagtgccaggccatcagagaggcctacctgacccagctgatgatcatcaagaacagcacctacagagagatcggcagaagactgaagttctggaacgagaccgaccccgagttcgtgatcgaccacatggacgccaacaaggccggcagataccagtgccagtacagaatcggccactacagattcagatacagcgacaccctggagctggtggtgaccggcctgtacggcaagcccttcctgagcgccgacagaggcctggtgctgatgcccggcgagaacatcagcctgacctgcagcagcgcccacatccccttcgacagattcagcctggccaaggagggcgagctgagcctgccccagcaccagagcggcgagcaccccgccaacttcagcctgggccccgtggacctgaacgtgagcggcatctacagatgctacggctggtacaacagaagcccctacctgtggagcttccccagcaacgccctggagctggtggtgaccggcagatacagacccgtgcagccctgcgtgtgggtgggctgccccggcccctgccacagagccggcatctag

SEQ ID NO: 81490 - DNA, 774 bp, synthetic construct
  misc_feature 1..774: note = Description of Artificial Sequence: Synthetic coding sequence
  source 1..774: mol_type = other DNA
atggcccccgccatggagagccccaccctgctgtgcgtggccctgctgttcttcgcccccgacggcgtgctggccgtgccccagaagcccaaggtgagcctgaaccccccctggaacagaatcttcaagggcgagaacgtgaccctgacctgcaacggcaacaacttcttcgaggtgagcagcaccaagtggttccacaacggcagcctgagcgaggagaccaacagcagcctgaacatcgtgaacgccaagttcgaggacagcggcgagtacaagtgccagcaccagcaggtgaacgagagcgagcccgtgtacctggaggtgttcagcgactggctgctgctgcaggccagcgccgaggtggtgatggagggccagcccctgttcctgagatgccacggctggagaaactgggacgtgtacaaggtgatctactacaaggacggcgaggccctgaagtactggtacgagaaccacaacatcagcatcaccaacgccaccgtggaggacagcggcacctactactgcaccggcaaggtgtggcagctggactacgagagcgagcccctgaacatcaccgtgatcaaggcccccagagagaagtactggctgcagttcttcatccccctgctggtggtgatcctgttcgccgtggacaccggcctgttcatcagcacccagcagcaggtgaccttcctgctgaagatcaagagaaccagaaagggcttcagactgctgaacccccaccccaagcccaaccccaagaacaactag

SEQ ID NO: 81491 - DNA, 261 bp, synthetic construct
  misc_feature 1..261: note = Description of Artificial Sequence: Synthetic coding sequence
  source 1..261: mol_type = other DNA
atgatccccgccgtggtgctgctgctgctgctgctggtggagcaggccgccgccctgggcgagccccagctgtgctacatcctggacgccatcctgttcctgtacggcatcgtgctgaccctgctgtactgcagactgaagatccaggtgagaaaggccgccatcaccagctacgagaagagcgacggcgtgtacaccggcctgagcaccagaaaccaggagacctacgagaccctgaagcacgagaagcccccccagtag

SEQ ID NO: 81492 - DNA, 339 bp, synthetic construct
  misc_feature 1..339: note = Description of Artificial Sequence: Synthetic coding sequence
  source 1..339: mol_type = other DNA
atgatccccgccgtggtgctgctgctgctgctgctggtggagcaggccgccgccctgggcgagccccagctgtgctacatcctggacgccatcctgttcctgtacggcatcgtgctgaccctgctgtactgcagactgaagatccaggtgagaaaggccgccatcaccagctacgagaagagcgacggcgtgtacaccatggagagccccagcatcaccagactggagtgcagcggcatgatctgggcccactgcaacctgtgcctgctgggcagcagagacagcagagccagccccagcagagtggccaagaccaccggcaccaccatgcccagctag

SEQ ID NO: 81493 - DNA, 792 bp, synthetic construct
  misc_feature 1..792: note = Description of Artificial Sequence: Synthetic coding sequence
  source 1..792: mol_type = other DNA
tgatgcagcttcggcgtgcagctgatgggcaagtgggtgccctgggtgagcgtgttccaggaggagaccgtgaccctgcactgcgaggtgctgcacctgcccggcagcagcagcacccagtggttcctgaacggcaccgccacccagaccagcacccccagctacagaatcaccagcgccagcgtgaacgacagcggcgagtacagatgccagagaggcctgagcggcagaagcgaccccatccagctggagatccacagaggctggctgctgctgcaggtgagcagcagagtgttcatggagggcgagcccctggccctgagatgccacgcctggaaggacaagctggtgtacaacgtgctgtactacagaaacggcaaggccttcaagttcttccactggaacagcaacctgaccatcctgaagaccaacatcagccacaacggcacctaccactgcagcggcatgggcaagcacagatacaccagcgccggcatcagccagtacaccgtgaagggcctgcagctgcccacccccgtgtggttccacgtgctgttctacctggccgtgggcatcatgttcctggtgaacaccgtgctgtgggtgaccatcagaaaggagctgaagagaaagaagaagtggaacctggagatcagcctggacagcggccacgagaagaaggtgatcagcagcctgcaggaggacagacacctggaggaggagctgaagtgccaggagcagaaggaggagcagctgcaggagggcgtgcacagaaaggagccccagggctag

SEQ ID NO: 81494 - DNA, 567 bp, synthetic construct
  misc_feature 1..567: note = Description of Artificial Sequence: Synthetic coding sequence
  source 1..567: mol_type = other DNA
atgtggttcctgaccaccctgctgctgtggggctggctgctgctgcaggtgagcagcagagtgttcatggagggcgagcccctggccctgagatgccacgcctggaaggacaagctggtgtacaacgtgctgtactacagaaacggcaaggccttcaagttcttccactggaacagcaacctgaccatcctgaagaccaacatcagccacaacggcacctaccactgcagcggcatgggcaagcacagatacaccagcgccggcatcagccagtacaccgtgaagggcctgcagctgcccacccccgtgtggttccacgtgctgttctacctggccgtgggcatcatgttcctggtgaacaccgtgctgtgggtgaccatcagaaaggagctgaagagaaagaagaagtggaacctggagatcagcctggacagcggccacgagaagaaggtgatcagcagcctgcaggaggacagacacctggaggaggagctgaagtgccaggagcagaaggaggagcagctgcaggagggcgtgcacagaaaggagccccagggcgccacctag

SEQ ID NO: 81495 - DNA, 843 bp, synthetic construct
  misc_feature 1..843: note = Description of Artificial Sequence: Synthetic coding sequence
  source 1..843: mol_type = other DNA
atgtggttcctgaccaccctgctgctgtgggtgcccgtggacggccaggtggacaccaccaaggccgtgatcaccctgcagcccccctgggtgagcgtgttccaggaggagaccgtgaccctgcactgcgaggtgctgcacctgcccggcagcagcagcacccagtggttcctgaacggcaccgccacccagaccagcacccccagctacagaatcaccagcgccagcgtgaacgacagcggcgagtacagatgccagagaggcctgagcggcagaagcgaccccatccagctggagatccacagaggctggctgctgctgcaggtgagcagcagagtgttcatggagggcgagcccctggccctgagatgccacgcctggaaggacaagctggtgtacaacgtgctgtactacagaaacggcaaggccttcaagttcttccactggaacagcaacctgaccatcctgaagaccaacatcagccacaacggcacctaccactgcagcggcatgggcaagcacagatacaccagcgccggcatcagccagtacaccgtgaagggcctgcagctgcccacccccgtgtggttccacgtgctgttctacctggccgtgggcatcatgttcctggtgaacaccgtgctgtgggtgaccatcagaaaggagctgaagagaaagaagaagtggaacctggagatcagcctggacagcggccacgagaagaaggtgatcagcagcctgcaggaggacagacacctggaggaggagctgaagtgccaggagcagaaggaggagcagctgcaggagggcgtgcacagaaaggagccccagggcgccacctag

SEQ ID NO: 81496 - DNA, 954 bp, synthetic construct
  misc_feature 1..954: note = Description of Artificial Sequence: Synthetic coding sequence
  source 1..954: mol_type = other DNA
atgaccatggagacccagatgagccagaacgtgtgccccagaaacctgtggctgctgcagcccctgaccgtgctgctgctgctggccagcgccgacagccaggccgccgccccccccaaggccgtgctgaagctggagcccccctggatcaacgtgctgcaggaggacagcgtgaccctgacctgccagggcgccagaagccccgagagcgacagcatccagtggttccacaacggcaacctgatccccacccacacccagcccagctacagattcaaggccaacaacaacgacagcggcgagtacacctgccagaccggccagaccagcctgagcgaccccgtgcacctgaccgtgctgagcgagtggctggtgctgcagaccccccacctggagttccaggagggcgagaccatcatgctgagatgccacagctggaaggacaagcccctggtgaaggtgaccttcttccagaacggcaagagccagaagttcagccacctggaccccaccttcagcatcccccaggccaaccacagccacagcggcgactaccactgcaccggcaacatcggctacaccctgttcagcagcaagcccgtgaccatcaccgtgcaggtgcccagcatgggcagcagcagccccatgggcatcatcgtggccgtggtgatcgccaccgccgtggccgccatcgtggccgccgtggtggccctgatctactgcagaaagaagagaatcagcgccaacagcaccgaccccgtgaaggccgcccagttcgagccccccggcagacagatgatcgccatcagaaagagacagctggaggagaccaacaacgactacgagaccgccgacggcggctacatgaccctgaaccccagagcccccaccgacgacgacaagaacatctacctgaccctgccccccaacgaccacgtgaacagcaacaactag

SEQ ID NO: 81497 - DNA, 951 bp, synthetic construct
  misc_feature 1..951: note = Description of Artificial Sequence: Synthetic coding sequence
  source 1..951: mol_type = other DNA
atgaccatggagacccagatgagccagaacgtgtgccccagaaacctgtggctgctgcagcccctgaccgtgctgctgctgctggccagcgccgacagccaggccgccccccccaaggccgtgctgaagctggagcccccctggatcaacgtgctgcaggaggacagcgtgaccctgacctgccagggcgccagaagccccgagagcgacagcatccagtggttccacaacggcaacctgatccccacccacacccagcccagctacagattcaaggccaacaacaacgacagcggcgagtacacctgccagaccggccagaccagcctgagcgaccccgtgcacctgaccgtgctgagcgagtggctggtgctgcagaccccccacctggagttccaggagggcgagaccatcatgctgagatgccacagctggaaggacaagcccctggtgaaggtgaccttcttccagaacggcaagagccagaagttcagccacctggaccccaccttcagcatcccccaggccaaccacagccacagcggcgactaccactgcaccggcaacatcggctacaccctgttcagcagcaagcccgtgaccatcaccgtgcaggtgcccagcatgggcagcagcagccccatgggcatcatcgtggccgtggtgatcgccaccgccgtggccgccatcgtggccgccgtggtggccctgatctactgcagaaagaagagaatcagcgccaacagcaccgaccccgtgaaggccgcccagttcgagccccccggcagacagatgatcgccatcagaaagagacagctggaggagaccaacaacgactacgagaccgccgacggcggctacatgaccctgaaccccagagcccccaccgacgacgacaagaacatctacctgaccctgccccccaacgaccacgtgaacagcaacaactag

SEQ ID NO: 81498 - DNA, 876 bp, synthetic construct
  misc_feature 1..876: note = Description of Artificial Sequence: Synthetic coding sequence
  source 1..876: mol_type = other DNA
atgggcatcctgagcttcctgcccgtgctggccaccgagagcgactgggccgactgcaagagcccccagccctggggccacatgctgctgtggaccgccgtgctgttcctggcccccgtggccggcacccccgccgccccccccaaggccgtgctgaagctggagccccagtggatcaacgtgctgcaggaggacagcgtgaccctgacctgcagaggcacccacagccccgagagcgacagcatccagtggttccacaacggcaacctgatccccacccacacccagcccagctacagattcaaggccaacaacaacgacagcggcgagtacacctgccagaccggccagaccagcctgagcgaccccgtgcacctgaccgtgctgagcgagtggctggtgctgcagaccccccacctggagttccaggagggcgagaccatcgtgctgagatgccacagctggaaggacaagcccctggtgaaggtgaccttcttccagaacggcaagagcaagaagttcagcagaagcgaccccaacttcagcatcccccaggccaaccacagccacagcggcgactaccactgcaccggcaacatcggctacaccctgtacagcagcaagcccgtgaccatcaccgtgcaggcccccagcagcagccccatgggcatcatcgtggccgtggtgaccggcatcgccgtggccgccatcgtggccgccgtggtggccctgatctactgcagaaagaagagaatcagcgccaaccccaccaaccccgacgaggccgacaaggtgggcgccgagaacaccatcacctacagcctgctgatgcaccccgacgccctggaggagcccgacgaccagaacagaatctag

SEQ ID NO: 81499 - DNA, 933 bp, synthetic construct
  misc_feature 1..933: note = Description of Artificial Sequence: Synthetic coding sequence
  source 1..933: mol_type = other DNA
atgggcatcctgagcttcctgcccgtgctggccaccgagagcgactgggccgactgcaagagcccccagccctggggccacatgctgctgtggaccgccgtgctgttcctggcccccgtggccggcacccccgccgccccccccaaggccgtgctgaagctggagccccagtggatcaacgtgctgcaggaggacagcgtgaccctgacctgcagaggcacccacagccccgagagcgacagcatccagtggttccacaacggcaacctgatccccacccacacccagcccagctacagattcaaggccaacaacaacgacagcggcgagtacacctgccagaccggccagaccagcctgagcgaccccgtgcacctgaccgtgctgagcgagtggctggtgctgcagaccccccacctggagttccaggagggcgagaccatcgtgctgagatgccacagctggaaggacaagcccctggtgaaggtgaccttcttccagaacggcaagagcaagaagttcagcagaagcgaccccaacttcagcatcccccaggccaaccacagccacagcggcgactaccactgcaccggcaacatcggctacaccctgtacagcagcaagcccgtgaccatcaccgtgcaggcccccagcagcagccccatgggcatcatcgtggccgtggtgaccggcatcgccgtggccgccatcgtggccgccgtggtggccctgatctactgcagaaagaagagaatcagcgccctgcccggctaccccgagtgcagagagatgggcgagaccctgcccgagaagcccgccaaccccaccaaccccgacgaggccgacaaggtgggcgccgagaacaccatcacctacagcctgctgatgcaccccgacgccctggaggagcccgacgaccagaacagaatctag

SEQ ID NO: 81500 - DNA, 912 bp, synthetic construct
  misc_feature 1..912: note = Description of Artificial Sequence: Synthetic coding sequence
  source 1..912: mol_type = other DNA
atgggcatcctgagcttcctgcccgtgctggccaccgagagcgactgggccgactgcaagagcccccagccctggggccacatgctgctgtggaccgccgtgctgttcctggccgccccccccaaggccgtgctgaagctggagccccagtggatcaacgtgctgcaggaggacagcgtgaccctgacctgcagaggcacccacagccccgagagcgacagcatccagtggttccacaacggcaacctgatccccacccacacccagcccagctacagattcaaggccaacaacaacgacagcggcgagtacacctgccagaccggccagaccagcctgagcgaccccgtgcacctgaccgtgctgagcgagtggctggtgctgcagaccccccacctggagttccaggagggcgagaccatcgtgctgagatgccacagctggaaggacaagcccctggtgaaggtgaccttcttccagaacggcaagagcaagaagttcagcagaagcgaccccaacttcagcatcccccaggccaaccacagccacagcggcgactaccactgcaccggcaacatcggctacaccctgtacagcagcaagcccgtgaccatcaccgtgcaggcccccagcagcagccccatgggcatcatcgtggccgtggtgaccggcatcgccgtggccgccatcgtggccgccgtggtggccctgatctactgcagaaagaagagaatcagcgccctgcccggctaccccgagtgcagagagatgggcgagaccctgcccgagaagcccgccaaccccaccaaccccgacgaggccgacaaggtgggcgccgagaacaccatcacctacagcctgctgatgcaccccgacgccctggaggagcccgacgaccagaacagaatctag

SEQ ID NO: 81501 - DNA, 912 bp, synthetic construct; identical to SEQ ID NO: 81500
  misc_feature 1..912: note = Description of Artificial Sequence: Synthetic coding sequence
  source 1..912: mol_type = other DNA

SEQ ID NO: 81502 - DNA, 933 bp, synthetic construct; identical to SEQ ID NO: 81499
  misc_feature 1..933: note = Description of Artificial Sequence: Synthetic coding sequence
  source 1..933: mol_type = other DNA

SEQ ID NO: 81503 - DNA, 876 bp, synthetic construct; identical to SEQ ID NO: 81498
  misc_feature 1..876: note = Description of Artificial Sequence: Synthetic coding sequence
  source 1..876: mol_type = other DNA

SEQ ID NO: 81504 - DNA, 705 bp, synthetic construct
  misc_feature 1..705: note = Description of Artificial Sequence: Synthetic coding sequence
  source 1..705: mol_type = other DNA
atgggcatcctgagcttcctgcccgtgctggccaccgagagcgactgggccgactgcaagagcccccagccctggggccacatgctgctgtggaccgccgtgctgttcctggcccccgtggccggcacccccgccgccccccccaaggccgtgctgaagctggagccccagtggatcaacgtgctgcaggaggacagcgtgaccctgacctgcagaggcacccacagccccgagagcgacagcatccagtggttccacaacggcaacctgatccccacccacacccagcccagctacagattcaaggccaacaacaacgacagcggcgagtacacctgccagaccggccagaccagcctgagcgaccccgtgcacctgaccgtgctgagcgagtggctggtgctgcagaccccccacctggagttccaggagggcgagaccatcgtgctgagatgccacagctggaaggacaagcccctggtgaaggtgaccttcttccagaacggcaagagcaagaagttcagcagaagcgaccccaacttcagcatcccccaggccaaccacagccacagcggcgactaccactgcaccggcaacatcggctacaccctgtacagcagcaagcccgtgaccatcaccgtgcagggccccagactgagaaccgccgccaagcagagcagcctggtgggcgccgaggtgccctag

SEQ ID NO: 81505 - DNA, 771 bp, synthetic construct
  misc_feature 1..771: note = Description of Artificial Sequence: Synthetic coding sequence
  source 1..771: mol_type = other DNA
atgggcatcctgagcttcctgcccgtgctggccaccgagagcgactgggccgactgcaagagcccccagccctggggccacatgctgctgtggaccgccgtgctgttcctgggcgagagcggcccccccgccgccccccccaaggccgtgctgaagctggagccccagtggatcaacgtgctgcaggaggacagcgtgaccctgacctgcagaggcacccacagccccgagagcgacagcatccagtggttccacaacggcaacctgatccccacccacacccagcccagctacagattcaaggccaacaacaacgacagcggcgagtacacctgccagaccggccagaccagcctgagcgaccccgtgcacctgaccgtgctgagcgagtggctggtgctgcagaccccccacctggagttccaggagggcgagaccatcgtgctgagatgccacagctggaaggacaagcccctggtgaaggtgaccttcttccagaacggcaagagcaagaagttcagcagaagcgaccccaacttcagcatcccccaggccaaccacagccacagcggcgactaccactgcaccggcaacatcggctacaccctgtacagcagcaagcccgtgaccatcaccgtgcaggcccccagcagcagccccatgggcatcatcgtggccgtggtgaccggcatcgccgtggccgccatcgtggccgccgtggtggccctgatctactgcagaaagaagagaatcagcgtgagcacctggtag

SEQ ID NO: 81506 - DNA, 765 bp, synthetic construct
  misc_feature 1..765: note = Description of Artificial Sequence: Synthetic coding sequence
  source 1..765: mol_type = other DNA
atgtggcagctgctgctgcccaccgccctgctgctgctggtgagcgccggcatgagaaccgaggacctgcccaaggccgtggtgttcctggagccccagtggtacagagtgctggagaaggacagcgtgaccctgaagtgccagggcgcctacagccccgaggacaacagcacccagtggttccacaacgagagcctgatcagcagccaggccagcagctacttcatcgacgccgccaccgtggacgacagcggcgagtacagatgccagaccaacctgagcaccctgagcgaccccgtgcagctggaggtgcacatcggctggctgctgctgcaggcccccagatgggtgttcaaggaggaggaccccatccacctgagatgccacagctggaagaacaccgccctgcacaaggtgacctacctgcagaacggcaagggcagaaagtacttccaccacaacagcgacttctacatccccaaggccaccctgaaggacagcggcagctacttctgcagaggcctgttcggcagcaagaacgtgagcagcgagaccgtgaacatcaccatcacccagggcctggccgtgagcaccatcagcagcttcttcccccccggctaccaggtgagcttctgcctggtgatggtgctgctgttcgccgtggacaccggcctgtacttcagcgtgaagaccaacatcagaagcagcaccagagactggaaggaccacaagttcaagtggagaaaggacccccaggacaagtag

SEQ ID NO: 81507 - DNA, 873 bp, synthetic construct
  misc_feature 1..873: note = Description of Artificial Sequence: Synthetic coding sequence
  source 1..873: mol_type = other DNA
atgggcggcggcgccggcgagagactgttcaccagcagctgcctggtgggcctggtgcccctgggcctgagaatcagcctggtgacctgccccctgcagtgcggcatcatgtggcagctgctgctgcccaccgccctgctgctgctggtgagcgccggcatgagaaccgaggacctgcccaaggccgtggtgttcctggagccccagtggtacagagtgctggagaaggacagcgtgaccctgaagtgccagggcgcctacagccccgaggacaacagcacccagtggttccacaacgagagcctgatcagcagccaggccagcagctacttcatcgacgccgccaccgtggacgacagcggcgagtacagatgccagaccaacctgagcaccctgagcgaccccgtgcagctggaggtgcacatcggctggctgctgctgcaggcccccagatgggtgttcaaggaggaggaccccatccacctgagatgccacagctggaagaacaccgccctgcacaaggtgacctacctgcagaacggcaagggcagaaagtacttccaccacaacagcgacttctacatccccaaggccaccctgaaggacagcggcagctacttctgcagaggcctgttcggcagcaagaacgtgagcagcgagaccgtgaacatcaccatcacccagggcctggccgtgagcaccatcagcagcttcttcccccccggctaccaggtgagcttctgcctggtgatggtgctgctgttcgccgtggacaccggcctgtacttcagcgtgaagaccaacatcagaagcagcaccagagactggaaggaccacaagttcaagtggagaaaggacccccaggacaagtag

SEQ ID NO: 81508 - DNA, 816 bp, synthetic construct
  misc_feature 1..816: note = Description of Artificial Sequence: Synthetic coding sequence
  source 1..816: mol_type = other DNA
tgacccctgggcctgagaatcagcctggtgacctgccccctgcagtgcggcatcatgtggcagctgctgctgcccaccgccctgctgctgctggtgagcgccggcatgagaaccgacctgcccaaggccgtggtgttcctggagccccagtggtacagagtgctggagaaggacagcgtgaccctgaagtgccagggcgcctacagccccgaggacaacagcacccagtggttccacaacgagagcctgatcagcagccaggccagcagctacttcatcgacgccgccaccgtggacgacagcggcgagtacagatgccagaccaacctgagcaccctgagcgaccccgtgcagctggaggtgcacatcggctggctgctgctgcaggcccccagatgggtgttcaaggaggaggaccccatccacctgagatgccacagctggaagaacaccgccctgcacaaggtgacctacctgcagaacggcaagggcagaaagtacttccaccacaacagcgacttctacatccccaaggccaccctgaaggacagcggcagctacttctgcagaggcctgttcggcagcaagaacgtgagcagcgagaccgtgaacatcaccatcacccagggcctggccgtgagcaccatcagcagcttcttcccccccggctaccaggtgagcttctgcctggtgatggtgctgctgttcgccgtggacaccggcctgtacttcagcgtgaagaccaacatcagaagcagcaccagagactggaaggaccacaagttcaagtggagaaaggacccccaggacaagtag

SEQ ID NO: 81509 - DNA, 765 bp, synthetic construct; identical to SEQ ID NO: 81506
  misc_feature 1..765: note = Description of Artificial Sequence: Synthetic coding sequence
  source 1..765: mol_type = other DNA

SEQ ID NO: 81510 - DNA, 318 bp, synthetic construct
  misc_feature 1..318: note = Description of Artificial Sequence: Synthetic coding sequence
  source 1..318: mol_type = other DNA
atgtggcagctgctgctgcccaccgccctgctgctgctggtgagcgccggcatgagaaccgacctgcccaaggccgtggtgttcctggagccccagtggtacagagtgctggagaaggacagcgtgaccctgaagtgccagggcgcctacagccccgaggacaacagcacccagtggttccacaacgagagcctgatcagcagccaggccagcagctacttcatcgacgccgccaccgtggacgacagcggcgagtacagatgccagaccaacctgagcaccctgagcgaccccgtgcagctggaggtgcacatctag

SEQ ID NO: 81511 - DNA, 870 bp, synthetic construct
  misc_feature 1..870: note = Description of Artificial Sequence: Synthetic coding sequence
  source 1..870: mol_type = other DNA
atgggcggcggcgccggcgagagactgttcaccagcagctgcctggtgggcctggtgcccctgggcctgagaatcagcctggtgacctgccccctgcagtgcggcatcatgtggcagctgctgctgcccaccgccctgctgctgctggtgagcgccggcatgagaaccgacctgcccaaggccgtggtgttcctggagccccagtggtacagagtgctggagaaggacagcgtgaccctgaagtgccagggcgcctacagccccgaggacaacagcacccagtggttccacaacgagagcctgatcagcagccaggccagcagctacttcatcgacgccgccaccgtggacgacagcggcgagtacagatgccagaccaacctgagcaccctgagcgaccccgtgcagctggaggtgcacatcggctggctgctgctgcaggcccccagatgggtgttcaaggaggaggaccccatccacctgagatgccacagctggaagaacaccgccctgcacaaggtgacctacctgcagaacggcaagggcagaaagtacttccaccacaacagcgacttctacatccccaaggccaccctgaaggacagcggcagctacttctgcagaggcctgttcggcagcaagaacgtgagcagcgagaccgtgaacatcaccatcacccagggcctggccgtgagcaccatcagcagcttcttcccccccggctaccaggtgagcttctgcctggtgatggtgctgctgttcgccgtggacaccggcctgtacttcagcgtgaagaccaacatcagaagcagcaccagagactggaaggaccacaagttcaagtggagaaaggacccccaggacaagtag

SEQ ID NO: 81512 - DNA, 765 bp, synthetic construct; identical to SEQ ID NO: 81506
  misc_feature 1..765: note = Description of Artificial Sequence: Synthetic coding sequence
  source 1..765: mol_type = other DNA

SEQ ID NO: 81513 - DNA, 702 bp, synthetic construct
  misc_feature 1..702: note = Description of Artificial Sequence: Synthetic coding sequence
  source 1..702: mol_type = other DNA
atgtggcagctgctgctgcccaccgccctgctgctgctggtgagcgccggcatgagaaccgaggacctgcccaaggccgtggtgttcctggagccccagtggtacagcgtgctggagaaggacagcgtgaccctgaagtgccagggcgcctacagccccgaggacaacagcacccagtggttccacaacgagaacctgatcagcagccaggccagcagctacttcatcgacgccgccaccgtgaacgacagcggcgagtacagatgccagaccaacctgagcaccctgagcgaccccgtgcagctggaggtgcacatcggctggctgctgctgcaggcccccagatgggtgttcaaggaggaggaccccatccacctgagatgccacagctggaagaacaccgccctgcacaaggtgacctacctgcagaacggcaaggacagaaagtacttccaccacaacagcgacttccacatccccaaggccaccctgaaggacagcggcagctacttctgcagaggcctggtgggcagcaagaacgtgagcagcgagaccgtgaacatcaccatcacccagggcctggccgtgagcaccatcagcagcttcagcccccccggctaccaggtgagcttctgcctggtgatggtgctgctgttcgccgtggacaccggcctgtacttcagcgtgaagaccaacatctag

SEQ ID NO: 81514 - DNA, 702 bp, synthetic construct; identical to SEQ ID NO: 81513
  misc_feature 1..702: note = Description of Artificial Sequence: Synthetic coding sequence
  source 1..702: mol_type = other DNA

SEQ ID NO: 81515 - DNA, 2076 bp, synthetic construct
  misc_feature 1..2076: note = Description of Artificial Sequence: Synthetic coding sequence
  source 1..2076: mol_type = other DNA
atggagatcgccccccaggaggccccccccgtgcccggcgccgacggcgacatcgaggaggcccccgccgaggccggcagccccagccccgccagcccccccgccgacggcagactgaaggccgccgccaagagagtgaccttccccagcgacgaggacatcgtgagcggcgccgtggagcccaaggacccctggagacacgcccagaacgtgaccgtggacgaggtgatcggcgcctacaagcaggcctgccagaagctgaactgcagacagatccccaagctgctgagacagctgcaggagttcaccgacctgggccacagactggactgcctggacctgaagggcgagaagctggactacaagacctgcgaggccctggaggaggtgttcaagagactgcagttcaaggtggtggacctggagcagaccaacctggacgaggacggcgccagcgccctgttcgacatgatcgagtactacgagagcgccacccacctgaacatcagcttcaacaagcacatcggcaccagaggctggcaggccgccgcccacatgatgagaaagaccagctgcctgcagtacctggacgccagaaacacccccctgctggaccacagcgcccccttcgtggccagagccctgagaatcagaagcagcctggccgtgctgcacctggagaacgccagcctgagcggcagacccctgatgctgctggccaccgccctgaagatgaacatgaacctgagagagctgtacctggccgacaacaagctgaacggcctgcaggacagcgcccagctgggcaacctgctgaagttcaactgcagcctgcagatcctggacctgagaaacaaccacgtgctggacagcggcctggcctacatctgcgagggcctgaaggagcagagaaagggcctggtgaccctggtgctgtggaacaaccagctgacccacaccggcatggccttcctgggcatgaccctgccccacacccagagcctggagaccctgaacctgggccacaaccccatcggcaacgagggcgtgagacacctgaagaacggcctgatcagcaacagaagcgtgctgagactgggcctggccagcaccaagctgacctgcgagggcgccgtggccgtggccgagttcatcgccgagagccccagactgctgagactggacctgagagagaacgagatcaagaccggcggcctgatggccctgagcctggccctgaaggtgaaccacagcctgctgagactggacctggacagagagcccaagaaggaggccgtgaagagcttcatcgagacccagaaggccctgctggccgagatccagaacggctgcaagagaaacctggtgctggccagagagagagaggagaaggagcagcccccccagctgagcgccagcatgcccgagaccaccgccaccgagccccagcccgacgacgagcccgccgccggcgtgcagaacggcgcccccagccccgcccccagccccgacagcgacagcgacagcgacagcgacggcgaggaggaggaggaggaggagggcgagagagacgagaccccctgccccgccctggtgccccccaccgacagcctgggccccggcgacagaagcccccccggcagccccagcacccccaccgagcagagaatcagcgtgagcagccccggcagaggccacaaggtgttcgtggtgaccagagtggagagcccccccgagagagccgagccccccgccagccccaccccccccagccccccccccccccccagcccccccgccagccccagcctgccccccgccggcgccatcgacaccagagacaccggcagcagcgagccccagcccccccccgagccccccagaagcggcccccccctgcccaacggcctgaagcccgagttcgccctggccctgccccccgagcccccccccggccccgaggtgaagggcggcagctgcggcctggagcacgagctgagctgcagcaagaacgagaaggagctggaggagctgctgctggaggccagccaggagagcggccaggagaccctgtag

SEQ ID NO: 81516 - DNA, 459 bp, synthetic construct
  misc_feature 1..459: note = Description of Artificial Sequence: Synthetic coding sequence
  source 1..459: mol_type = other DNA
atgggcgtgcccagaccccagccctgggccctgggcctgctgctgttcctgctgcccggcagcctgggcgccgagagccacctgagcctgctgtaccacctgaccgccgtgagcagccccgcccccggcacccccgccttctgggtgagcggctggctgggcccccagcagtacctgagctacaacagcctgagaggcgaggccgagccctgcggcgcctgggtgtgggagaaccaggtgagctggtactgggagaaggagaccaccgacctgagaatcaaggagaagctgttcctggaggccttcaaggccctgggcggcaagggcccctacaccctgcagggcctgctgggctgcgagctgggccccgacaacaccagcgtgcccaccgcctgcggcagcacctggagaggcgccgccgagacctggagcggcagaagcccccccccctgcgcctag

SEQ ID NO: 81517 - DNA, 1098 bp, synthetic construct; identical to SEQ ID NO: 77753
  misc_feature 1..1098: note = Description of Artificial Sequence: Synthetic coding sequence
  source 1..1098: mol_type = other DNA

SEQ ID NO: 81518 - DNA, 708 bp, synthetic construct
  misc_feature 1..708: note = Description of Artificial Sequence: Synthetic coding sequence
  source 1..708: mol_type = other DNA
atgggcgtgcccagaccccagccctgggccctgggcctgctgctgttcctgctgcccggcagcctgggcgccgagagccacctgagcctgctgtaccacctgaccgccgtgagcagccccgcccccggcacccccgccttctgggtgagcggctggctgggcccccagcagtacctgagctacaacagcctgagaggcgaggccgagccctgcggcgcctgggtgtgggagaaccaggtgagctggtactgggagaaggagaccaccgacctgagaatcaaggagaagctgttcctggaggccttcaaggccctgggcggcaagggcccctacaccctgcagggcctgctgggctgcgagctgggccccgacaacaccagcgtgcccaccgccaagttcgccctgaacggcgaggagttcatgaacttcgacctgaagcagggcacctggggcggcgactggcccgaggccctggccatcagccagagatggcagcagcaggacaaggccgccaacaaggagctgaccttcctgctgttcagctgcccccacagactgagagagcacctggagagaggcagaggcaacctggagtggaagggctgctggaccaagatcgacaccagctggggctgcgcccagatcttcatccccagcgccaccaaggagaagctgagactgaaccagagcccccccccctgcgcctag

SEQ ID NO: 81519 - DNA, 1734 bp, synthetic construct
  misc_feature 1..1734: note = Description of Artificial Sequence: Synthetic coding sequence
  source 1..1734: mol_type = other DNA
atggacggcgaggccaccgtgaagcccggcgagcagaaggaggtggtgagaagaggcagagaggtggactacagcagactgatcgccggcaccctgccccagagccacgtgaccagcagaagagccggctggaagatgcccctgttcctgatcctgtgcctgctgcagggcagcagcttcgccctgccccagaagagaccccaccccagatggctgtgggagggcagcctgcccagcagaacccacctgagagccatgggcaccctgagacccagcagccccctgtgctggagagaggagagcagcttcgccgcccccaacagcctgaagggcagcagactggtgagcggcgagcccggcggcgccgtgaccatccagtgccactacgcccccagcagcgtgaacagacaccagagaaagtactggtgcagactgggcccccccagatggatctgccagaccatcgtgagcaccaaccagtacacccaccacagatacagagacagagtggccctgaccgacttcccccagagaggcctgttcgtggtgagactgagccagctgagccccgacgacatcggctgctacctgtgcggcatcggcagcgagaacaacatgctgttcctgagcatgaacctgaccatcagcgccggccccgccagcaccctgcccaccgccacccccgccgccggcgagctgaccatgagaagctacggcaccgccagccccgtggccaacagatggacccccggcaccacccagaccctgggccagggcaccgcctgggacaccgtggccagcacccccggcaccagcaagaccaccgccagcgccgagggcagaagaacccccggcgccaccagacccgccgcccccggcaccggcagctgggccgagggcagcgtgaaggcccccgcccccatccccgagagcccccccagcaagagcagaagcatgagcaacaccaccgagggcgtgtgggagggcaccagaagcagcgtgaccaacagagccagagccagcaaggacagaagagagatgaccaccaccaaggccgacagacccagagaggacatcgagggcgtgagaatcgccctggacgccgccaagaaggtgctgggcaccatcggcccccccgccctggtgagcgagaccctggcctgggagatcctgccccaggccacccccgtgagcaagcagcagagccagggcagcatcggcgagaccacccccgccgccggcatgtggaccctgggcacccccgccgccgacgtgtggatcctgggcacccccgccgccgacgtgtggaccagcatggaggccgccagcggcgagggcagcgccgccggcgacctggacgccgccaccggcgacagaggcccccaggccaccctgagccagacccccgccgtgggcccctggggcccccccggcaaggagagcagcgtgaagagaaccttccccgaggacgagagcagcagcagaaccctggcccccgtgagcaccatgctggccctgttcatgctgatggccctggtgctgctgcagagaaagctgtggagaagaagaaccagccaggaggccgagagagtgaccctgatccagatgacccacttcctggaggtgaacccccaggccgaccagctgccccacgtggagagaaagatgctgcaggacgacagcctgcccgccggcgccagcctgaccgcccccgagagaaaccccggcccctag

SEQ ID NO: 81520 - DNA, 1608 bp, synthetic construct
  misc_feature 1..1608: note = Description of Artificial Sequence: Synthetic coding sequence
  source 1..1608: mol_type = other DNA
atggacggcgaggccaccgtgaagcccggcgagcagaaggtgcccctgtggacccacggctggccccccgacgaccccagccccagcttcgccgccggcagcagcttcgccctgccccagaagagaccccaccccagatggctgtgggagggcagcctgcccagcagaacccacctgagagccatgggcaccctgagacccagcagccccctgtgctggagagaggagagcagcttcgccgcccccaacagcctgaagggcagcagactggtgagcggcgagcccggcggcgccgtgaccatccagtgccactacgcccccagcagcgtgaacagacaccagagaaagtactggtgcagactgggcccccccagatggatctgccagaccatcgtgagcaccaaccagtacacccaccacagatacagagacagagtggccctgaccgacttcccccagagaggcctgttcgtggtgagactgagccagctgagccccgacgacatcggctgctacctgtgcggcatcggcagcgagaacaacatgctgttcctgagcatgaacctgaccatcagcgccggccccgccagcaccctgcccaccgccacccccgccgccggcgagctgaccatgagaagctacggcaccgccagccccgtggccaacagatggacccccggcaccacccagaccctgggccagggcaccgcctgggacaccgtggccagcacccccggcaccagcaagaccaccgccagcgccgagggcagaagaacccccggcgccaccagacccgccgcccccggcaccggcagctgggccgagggcagcgtgaaggcccccgcccccatccccgagagcccccccagcaagagcagaagcatgagcaacaccaccgagggcgtgtgggagggcaccagaagcagcgtgaccaacagagccagagccagcaaggacagaagagagatgaccaccaccaaggccgacagacccagagaggacatcgagggcgtgagaatcgccctggacgccgccaagaaggtgctgggcaccatcggcccccccgccctggtgagcgagaccctggcctgggagatcctgccccaggccacccccgtgagcaagcagcagagccagggcagcatcggcgagaccacccccgccgccggcatgtggaccctgggcacccccgccgccgacgtgtggatcaccagcatggaggccgccagcggcgagggcagcgccgccggcgacctggacgccgccaccggcgacagaggcccccaggccaccctgagccagacccccgccgtgggcccctggggcccccccggcaaggagagcagcgtgaagagagccacctgccccggcctgagcaccctgaaggagatcaaggtgagcgccgtgctgacccagaacccccacagcctgctgtgcgtgagcgccgcccaggaggccgagagagtgaccctgatccagatgacccacttcctggaggtgaacccccaggccgaccagctgccccacgtggagagaaagatgctgcaggacgacagcctgcccgccggcgccagcctgaccgcccccgagagaaaccccggcccctag

SEQ ID NO: 81521 - DNA, 798 bp, synthetic construct
  misc_feature 1..798: note = Description of Artificial Sequence: Synthetic coding sequence
  source 1..798: mol_type = other DNA
atggacggcgaggccaccgtgaagcccggcgagcagaaggaggtggtgagaagaggcagagaggtggactacagcagactgatcgccggcaccctgccccagagccacgtgaccagcagaagagccggctggaagatgcccctgttcctgatcctgtgcctgctgcagggcagcagcttcgccctgccccagaagagaccccaccccagatggctgtgggagggcagcctgcccagcagaacccacctgagagccatgggcaccctgagacccagcagccccctgtgctggagagaggagagcagcttcgccgcccccaacagcctgaagggcagcagactggtgagcggcgagcccggcggcgccgtgaccatccagtgccactacgcccccagcagcgtgaacagacaccagagaaagtactggtgcagactgggcccccccagatggatctgccagaccatcgtgagcaccaaccagtacacccaccacagatacagagacagagtggccctgaccgacttcccccagagaggcctgttcgtggtgagactgagccagctgagccccgacgacatcggctgctacctgtgcggcatcggcagcgagaacaacatgctgttcctgagcatgaacctgaccatcagcgccgtgctgttccagaagatgaaggccgccctgggcccctggctgctgagcctgccctgctggccctgcctgtgcctgtggctgtggttctactgcaagggcagcagcggcgagggcggccccctgagaagacagaagggcagcccctag

SEQ ID NO: 81522 - DNA, 798 bp, synthetic construct; identical to SEQ ID NO: 81521
  misc_feature 1..798: note = Description of Artificial Sequence: Synthetic coding sequence
  source 1..798: mol_type = other DNA

SEQ ID NO: 81523 - DNA, 1101 bp, synthetic construct
  misc_feature 1..1101: note = Description of Artificial Sequence: Synthetic coding sequence
  source 1..1101: mol_type = other DNA
atgctgcccagactgctgctgctgatctgcgcccccctgtgcgagcccgccgagctgttcctgatcgccagccccagccaccccaccgagggcagccccgtgaccctgacctgcaagatgcccttcctgcagagcagcgacgcccagttccagttctgcttcttcagagacaccagagccctgggccccggctggagcagcagccccaagctgcagatcgccgccatgtggaaggaggacaccggcagctactggtgcgaggcccagaccatggccagcaaggtgctgagaagcagaagaagccagatcaacgtgcacagagtgcccgtggccgacgtgagcctggagacccagccccccggcggccaggtgatggagggcgacagactggtgctgatctgcagcgtggccatgggcaccggcgacatcaccttcctgtggtacaagggcgccgtgggcctgaacctgcagagcaagacccagagaagcctgaccgccgagtacgagatccccagcgtgagagagagcgacgccgagcagtactactgcgtggccgagaacggctacggccccagccccagcggcctggtgagcatcaccgtgagaatccccgtgagcagacccatcctgatgctgagagcccccagagcccaggccgccgtggaggacgtgctggagctgcactgcgaggccctgagaggcagcccccccatcctgtactggttctaccacgaggacatcaccctgggcagcagaagcgcccccagcggcggcggcgccagcttcaacctgagcctgaccgaggagcacagcggcaactacagctgcgaggccaacaacggcctgggcgcccagagaagcgaggccgtgaccctgaacttcaccggcagaagaagcgccagagaccccctgagaagcctgcccagccccctgccccaggagttcacctacctgaacagccccacccccggccagctgcagcccatctacgagaacgagcccagagagcagagcgtggccgtgcacggcagacagcagcacagcagcgagcagaaggcccagaagccctggggccacatctggagaaccagattcccctag

SEQ ID NO: 81524 - DNA, 1290 bp, synthetic construct
  misc_feature 1..1290: note = Description of Artificial Sequence: Synthetic coding sequence
  source 1..1290: mol_type = other DNA
atgctgcccagactgctgctgctgatctgcgcccccctgtgcgagcccgccgagctgttcctgatcgccagccccagccaccccaccgagggcagccccgtgaccctgacctgcaagatgcccttcctgcagagcagcgacgcccagttccagttctgcttcttcagagacaccagagccctgggccccggctggagcagcagccccaagctgcagatcgccgccatgtggaaggaggacaccggcagctactggtgcgaggcccagaccatggccagcaaggtgctgagaagcagaagaagccagatcaacgtgcacagagtgcccgtggccgacgtgagcctggagacccagccccccggcggccaggtgatggagggcgacagactggtgctgatctgcagcgtggccatgggcaccggcgacatcaccttcctgtggtacaagggcgccgtgggcctgaacctgcagagcaagacccagagaagcctgaccgccgagtacgagatccccagcgtgagagagagcgacgccgagcagtactactgcgtggccgagaacggctacggccccagccccagcggcctggtgagcatcaccgtgagaatccccgtgagcagacccatcctgatgctgagagcccccagagcccaggccgccgtggaggacgtgctggagctgcactgcgaggccctgagaggcagcccccccatcctgtactggttctaccacgaggacatcaccctgggcagcagaagcgcccccagcggcggcggcgccagcttcaacctgagcctgaccgaggagcacagcggcaactacagctgcgaggccaacaacggcctgggcgcccagagaagcgaggccgtgaccctgaacttcaccgtgcccaccggcgccagaagcaaccacctgaccagcggcgtgatcgagggcctgctgagcaccctgggccccgccaccgtggccctgctgttctgctacggcctgaagagaaagatcggcagaagaagcgccagagaccccctgagaagcctgcccagccccctgccccaggagttcacctacctgaacagccccacccccggccagctgcagcccatctacgagaacgtgaacgtggtgagcggcgacgaggtgtacagcctggcctactacaaccagcccgagcaggagagcgtggccgccgagaccctgggcacccacatggaggacaaggtgagcctggacatctacagcagactgagaaaggccaacatcaccgacgtggactacgaggacgccatgtag

SEQ ID NO: 81525 - DNA, 1287 bp, synthetic construct
  misc_feature 1..1287: note = Description of Artificial Sequence: Synthetic coding sequence
  source 1..1287: mol_type = other DNA
atgctgcccagactgctgctgctgatctgcgcccccctgtgcgagcccgccgagctgttcctgatcgccagccccagccaccccaccgagggcagccccgtgaccctgacctgcaagatgcccttcctgcagagcagcgacgcccagttccagttctgcttcttcagagacaccagagccctgggccccggctggagcagcagccccaagctgcagatcgccgccatgtggaaggaggacaccggcagctactggtgcgaggcccagaccatggccagcaaggtgctgagaagcagaagaagccagatcaacgtgcacagagtgcccgtggccgacgtgagcctggagacccagccccccggcggccaggtgatggagggcgacagactggtgctgatctgcagcgtggccatgggcaccggcgacatcaccttcctgtggtacaagggcgccgtgggcctgaacctgcagagcaagacccagagaagcctgaccgccgagtacgagatccccagcgtgagagagagcgacgccgagcagtactactgcgtggccgagaacggctacggccccagccccagcggcctggtgagcatcaccgtgagaatccccgtgagcagacccatcctgatgctgagagcccccagagcccaggccgccgtggaggacgtgctggagctgcactgcgaggccctgagaggcagcccccccatcctgtactggttctaccacgaggacatcaccctgggcagcagaagcgcccccagcggcggcggcgccagcttcaacctgagcctgaccgaggagcacagcggcaactacagctgcgaggccaacaacggcctgggcgcccagagaagcgaggccgtgaccctgaacttcaccgtgcccaccggcgccagaagcaaccacctgaccagcggcgtgatcgagggcctgctgagcaccctgggccccgccaccgtggccctgctgttctgctacggcctgaagagaaagatcggcagaagaagcgccagagaccccctgagaagcctgcccagccccctgccccaggagttcacctacctgaacagccccacccccggccagctgcagcccatctacgagaacgtgaacgtggtgagcggcgacgaggtgtacagcctggcctactacaaccagcccgagcaggagagcgtggccgagaccctgggcacccacatggaggacaaggtgagcctggacatctacagcagactgagaaaggccaacatcaccgacgtggactacgaggacgccatgtag

SEQ ID NO: 81526 - DNA, 2670 bp, synthetic construct
  misc_feature 1..2670: note = Description of Artificial Sequence: Synthetic coding sequence
  source 1..2670: mol_type = other DNA
atgagctacttcggcgagcacttctggggcgagaagaaccacggcttcgaggtgctgtaccacagcgtgaagcagggccccatcagcaccaaggagctggccgacttcatcagagagagagccaccatcgaggagacctacagcaaggccatggccaagctgagcaagctggccagcaacggcacccccatgggcaccttcgcccccctgtgggaggtgttcagagtgagcagcgacaagctggccctgtgccacctggagctgaccagaaagctgcaggacctgatcaaggacgtgctgagatacggcgaggagcagctgaagacccacaagaagtgcaaggaggaggtggtgagcaccctggacgccgtgcaggtgctgagcggcgtgagccagctgctgcccaagagcagagagaactacctgaacagatgcatggaccaggagagactgagaagagagagcaccagccagaaggagatggacaaggccgagaccaagaccaagaaggccgccgagagcctgagaagaagcgtggagaagtacaacagcgccagagccgacttcgagcagaagatgctggacagcgccctgagattccaggccatggaggagacccacctgagacacatgaaggccctgctgggcagctacgcccacagcgtggaggacacccacgtgcagatcggccaggtgcacgaggagttcaagcagaacatcgagaacgtgagcgtggagatgctgctgagaaagttcgccgagagcaagggcaccggcagagagaagcccggccccctggacttcgaggcctacagcgccgccgccctgcaggaggccatgaagagactgagaggcgccaaggccttcagactgcccggcctgagcagaagagagagagagcccgagccccccgccgccgtggacttcctggagcccgacagcggcacctgccccgaggtggacgaggagggcttcaccgtgagacccgacgtgacccagaacagcaccgccgagcccagcagattcagcagcagcgacagcgacttcgacgacgaggagcccagaaagttctacgtgcacatcaagcccgcccccgccagagcccccgcctgcagccccgaggccgccgccgcccagctgagagccaccgccggcagcctgatcctgccccccggccccggcggcaccatgaagagacacagcagcagagacgccgccggcaagccccagagacccagaagcgcccccagaaccagcagctgcgccgagagactgcagagcgaggagcaggtgagcaagaacctgttcggcccccccctggagagcgccttcgaccacgaggacttcaccggcagcagcagcctgggcttcaccagcagccccagccccttcagcagcagcagccccgagaacgtggaggacagcggcctggacagccccagccacgccgcccccggccccagccccgacagctgggtgcccagacccggcaccccccagagcccccccagctgcagagcccccccccccgaggccagaggcatcagagccccccccctgcccgacagcccccagcccctggccagcagccccggcccctggggcctggaggccctggccggcggcgacctgatgcccgcccccgccgaccccaccgccagagagggcctggccgccccccccagaagactgagaagcagaaaggtgagctgccccctgaccagaagcaacggcgacctgagcagaagcctgagccccagccccctgggcagcagcgccgccagcaccgccctggagagacccagcttcctgagccagaccggccacggcgtgagcagaggccccagccccgtggtgctgggcagccaggacgccctgcccatcgccaccgccttcaccgagtacgtgcacgcctacttcagaggccacagccccagctgcctggccagagtgaccggcgagctgaccatgaccttccccgccggcatcgtgagagtgttcagcggcaccccccccccccccgtgctgagcttcagactggtgcacaccaccgccatcgagcacttccagcccaacgccgacctgctgttcagcgaccccagccagagcgaccccgagaccaaggacttctggctgaacatggccgccctgaccgaggccctgcagagacaggccgagcagaaccccaccgccagctactacaacgtggtgctgctgagataccagttcagcagacccggcccccagagcgtgcccctgcagctgagcgcccactggcagtgcggcgccaccctgacccaggtgagcgtggagtacggctacagacccggcgccaccgccgtgcccacccccctgaccaacgtgcagatcctgctgcccgtgggcgagcccgtgaccaacgtgagactgcagcccgccgccacctggaacctggaggagaagagactgacctggagactgcccgacgtgagcgaggccggcggcagcggcagactgagcgccagctgggagcccctgagcggccccagcacccccagccccgtggccgcccagttcaccagcgagggcaccaccctgagcggcgtggacctggagctggtgggcagcggctacagaatgagcctggtgaagagaagattcgccaccggcatgtacctggtgagctgctag

SEQ ID NO: 81527 - DNA, 2670 bp, synthetic construct; identical to SEQ ID NO: 81526
  misc_feature 1..2670: note = Description of Artificial Sequence: Synthetic coding sequence
  source 1..2670: mol_type = other DNA

SEQ ID NO: 81528 - DNA, 2670 bp, synthetic construct; identical to SEQ ID NO: 81526
  misc_feature 1..2670: note = Description of Artificial Sequence: Synthetic coding sequence
  source 1..2670: mol_type = other DNA

SEQ ID NO: 81529 - DNA, 2676 bp, synthetic construct
  misc_feature 1..2676: note = Description of Artificial Sequence: Synthetic coding sequence
  source 1..2676: mol_type = other DNA
atgagctacttcggcgagcacttctggggcgagaagaaccacggcttcgaggtgctgtaccacagcgtgaagcagggccccatcagcaccaaggagctggccgacttcatcagagagagagccaccatcgaggagacctacagcaaggccatggccaagctgagcaagctggccagcaacggcacccccatgggcaccttcgcccccctgtgggaggtgttcagagtgagcagcgacaagctggccctgtgccacctggagctgaccagaaagctgcaggacctgatcaaggacgtgctgagatacggcgaggagcagctgaagacccacaagaagtgcaaggaggaggtggtgagcaccctggacgccgtgcaggtgctgagcggcgtgagccagctgctgcccaagagcagagagaactacctgaacagatgcatggaccaggagagactgagaagagagagcaccagccagaaggagatggacaaggccgagaccaagaccaagaaggccgccgagagcctgagaagaagcgtggagaagtacaacagcgccagagccgacttcgagcagaagatgctggacagcgccctgagattccaggccatggaggagacccacctgagacacatgaaggccctgctgggcagctacgcccacagcgtggaggacacccacgtgcagatcggccaggtgcacgaggagttcaagcagaacatcgagaacgtgagcgtggagatgctgctgagaaagttcgccgagagcaagggcaccggcagagagaagcccggccccctggacttcgaggcctacagcgccgccgccctgcaggaggccatgaagagactgagaggcgccaaggccttcagactgcccggcctgagcagaagagagagagagcccgagccccccgccgccgtggacttcctggagcccgacagcggcacctgccccgaggtggacgaggagggcttcaccgtgagacccgacgtgacccagaacagcaccgccgagcccagcagattcagcagcagcgacagcgacttcgacgacgaggagcccagaaagttctacgtgcacatcaagcccgcccccgccagagcccccgcctgcagccccgaggccgccgccgcccagctgagagccaccgccggcagcctgatcctgccccccggccccggcggcaccatgaagagacacagcagcagagacgccgccggcaagccccagagacccagaagcgcccccagaaccagcagctgcgccgagagactgcagagcgaggagcaggtgagcaagaacctgttcggcccccccctggagagcgccttcgaccacgaggacttcaccggcagcagcagcctgggcttcaccagcagccccagccccttcagcagcagcagccccgagaacgtggaggacagcggcctggacagccccagccacgccgcccccggccccagccccgacagctgggtgcccagacccggcaccccccagagcccccccagctgcagagcccccccccccgaggccagaggcatcagagccccccccctgcccgacagcccccagcccctggccagcagccccggcccctggggcctggaggccctggccggcggcgacctgatgcccgcccccgccgaccccaccgccagagagggcctggccgccccccccagaagactgagaagcagaaaggtgagctgccccctgaccagaagcaacggcgacctgagcagaagcctgagccccagccccctgggcagcagcgccgccagcaccgccctggagagacccagcttcctgagccagaccggccacggcgtgagcagaggccccagccccgtggtgctgggcagccaggacgccctgcccatcgccaccgccttcaccgagtacgtgcacgcctacttcagaggccacagccccagctgcctggccagagtgaccggcgagctgaccatgaccttccccgccggcatcgtgagagtgttcagcggcaccccccccccccccgtgctgagcttcagactggtgcacaccaccgccatcgagcacttccagcccaacgccgacctgctgttcagcgaccccagccagagcgaccccgagaccaaggacttctggctgaacatggccgccctgaccgaggccctgcagagacaggccgagcagaaccccaccgccagctactacaacgtggtgctgctgagataccagttcagcagacccggcccccagagcgtgcccctgcagctgagcgcccactggcagtgcggcgccaccctgacccaggtgagcgtggagtacggctacagacccggcgccaccgccgtgcccacccccctgaccaacgtgcagatcctgctgcccgtgggcgagcccgtgaccaacgtgagactgcagcccgccgccacctggaacctggaggagaagagactgacctggagactgcccgacgtgagcgaggccggcggcagcggcagactgagcgccagctgggagcccctgagcggccccagcacccccagccccgtggccgcccagttcaccagcgagggcaccaccctgagcggcgtggacctggagctggtgggcagcggctacagaatgagcctggtgaagagaagattcgccaccgccgcccccccccagggctgcacctggtag

SEQ ID NO: 81530 - DNA, 2520 bp, synthetic construct
  misc_feature 1..2520: note = Description of Artificial Sequence: Synthetic coding sequence
  source 1..2520: mol_type = other DNA
atggccaagctgagcaagctggccagcaacggcacccccatgggcaccttcgcccccctgtgggaggtgttcagagtgagcagcgacaagctggccctgtgccacctggagctgaccagaaagctgcaggacctgatcaaggacgtgctgagatacggcgaggagcagctgaagacccacaagaagtgcaaggaggaggtggtgagcaccctggacgccgtgcaggtgctgagcggcgtgagccagctgctgcccaagagcagagagaactacctgaacagatgcatggaccaggagagactgagaagagagagcaccagccagaaggagatggacaaggccgagaccaagaccaagaaggccgccgagagcctgagaagaagcgtggagaagtacaacagcgccagagccgacttcgagcagaagatgctggacagcgccctgagattccaggccatggaggagacccacctgagacacatgaaggccctgctgggcagctacgcccacagcgtggaggacacccacgtgcagatcggccaggtgcacgaggagttcaagcagaacatcgagaacgtgagcgtggagatgctgctgagaaagttcgccgagagcaagggcaccggcagagagaagcccggccccctggacttcgaggcctacagcgccgccgccctgcaggaggccatgaagagactgagaggcgccaaggccttcagactgcccggcctgagcagaagagagagagagcccgagccccccgccgccgtggacttcctggagcccgacagcggcacctgccccgaggtggacgaggagggcttcaccgtgagacccgacgtgacccagaacagcaccgccgagcccagcagattcagcagcagcgacagcgacttcgacgacgaggagcccagaaagttctacgtgcacatcaagcccgcccccgccagagcccccgcctgcagccccgaggccgccgccgcccagctgagagccaccgccggcagcctgatcctgccccccggccccggcggcaccatgaagagacacagcagcagagacgccgccggcaagccccagagacccagaagcgcccccagaaccagcagctgcgccgagagactgcagagcgaggagcaggtgagcaagaacctgttcggcccccccctggagagcgccttcgaccacgaggacttcaccggcagcagcagcctgggcttcaccagcagccccagccccttcagcagcagcagccccgagaacgtggaggacagcggcctggacagccccagccacgccgcccccggccccagccccgacagctgggtgcccagacccggcaccccccagagcccccccagctgcagagcccccccccccgaggccagaggcatcagagccccccccctgcccgacagcccccagcccctggccagcagccccggcccctggggcctggaggccctggccggcggcgacctgatgcccgcccccgccgaccccaccgccagagagggcctggccgccccccccagaagactgagaagcagaaaggtgagctgccccctgaccagaagcaacggcgacctgagcagaagcctgagccccagccccctgggcagcagcgccgccagcaccgccctggagagacccagcttcctgagccagaccggccacggcgtgagcagaggccccagccccgtggtgctgggcagccaggacgccctgcccatcgccaccgccttcaccgagtacgtgcacgcctacttcagaggccacagccccagctgcctggccagagtgaccggcgagctgaccatgaccttccccgccggcatcgtgagagtgttcagcggcaccccccccccccccgtgctgagcttcagactggtgcacaccaccgccatcgagcacttccagcccaacgccgacctgctgttcagcgaccccagccagagcgaccccgagaccaaggacttctggctgaacatggccgccctgaccgaggccctgcagagacaggccgagcagaaccccaccgccagctactacaacgtggtgctgctgagataccagttcagcagacccggcccccagagcgtgcccctgcagctgagcgcccactggcagtgcggcgccaccctgacccaggtgagcgtggagtacggctacagacccggcgccaccgccgtgcccacccccctgaccaacgtgcagatcctgctgcccgtgggcgagcccgtgaccaacgtgagactgcagcccgccgccacctggaacctggaggagaagagactgacctggagactgcccgacgtgagcgaggccggcggcagcggcagactgagcgccagctgggagcccctgagcggccccagcacccccagccccgtggccgcccagttcaccagcgagggcaccaccctgagcggcgtggacctggagctggtgggcagcggctacagaatgagcctggtgaagagaagattcgccaccggcatgtacctggtgagctgctag

SEQ ID NO: 81531 - DNA, 2670 bp, synthetic construct; identical to SEQ ID NO: 81526
  misc_feature 1..2670: note = Description of Artificial Sequence: Synthetic coding sequence
  source 1..2670: mol_type = other DNA

SEQ ID NO: 81532 - DNA, 2670 bp, synthetic construct; identical to SEQ ID NO: 81526
  misc_feature 1..2670: note = Description of Artificial Sequence: Synthetic coding sequence
  source 1..2670: mol_type = other DNA

SEQ ID NO: 81533 - DNA, 1137 bp, synthetic construct
  misc_feature 1..1137: note = Description of Artificial Sequence: Synthetic coding sequence
  source 1..1137: mol_type = other DNA
atggtgatggcctacttcgtggagaacttctggggcgagaagaacagcggcttcgacgtgctgtaccacaacatgaagcacggccagatcagcaccaaggagctggccgacttcgtgagagagagagccaccatcgaggaggcctacagcagaagcatgaccaagctggccaagagcgccagcaactacagccagctgggcaccttcgcccccgtgtgggacgtgttcaagaccagcaccgagaagctggccaactgccacctggacctggtgagaaagctgcaggagctgatcaaggaggtgcagaagtacggcgaggagcaggtgaagagccacaagaagaccaaggaggaggtggccggcaccctggaggccgtgcagaccatccagagcatcacccaggccctgcagaagagcaaggagaactacaacgccaagtgcgtggagcaggagagactgaagaaggagggcgccacccagagagagatcgagaaggccgccgtgaagagcaagaaggccaccgacacctacaagctgtacgtggagaagtacgccctggccaaggccgacttcgagcagaagatgaccgagaccgcccagaagttccaggacatcgaggagacccacctgatccacatcaaggagatcatcggcagcctgagcaacgccatcaaggagatccacctgcagatcggccaggtgcacgaggagttcatcaacaacatggccaacaccaccgtggagagcctgatccagaagttcgccgagagcaagggcaccggcaaggagagacccggcctgatcgagttcgaggagtgcgacaccgccagcgccgtggagggcatcaagcccagaaagagaaagaccttcgccctgcccggcatcatcaagaaggagaaggacgccgagagcgtgtggagcttcaccgtggtggcccaggtgggcatgcagtggagagacctgggcctgctgcacagccccccccccagattcaagagattcagcagctacctgagcctgcccagcagctggaactacggcgcccaccaccacatctggctgatcttctgcatcttcagcagagacagagtgagcccctactggcccggctggagcagaacccccgacctgagatag

SEQ ID NO: 81534 - DNA, 2433 bp, synthetic construct
  misc_feature 1..2433: note = Description of Artificial Sequence: Synthetic coding sequence
  source 1..2433: mol_type = other DNA
atggtgatggcctacttcgtggagaacttctggggcgagaagaacagcggcttcgacgtgctgtaccacaacatgaagcacggccagatcagcaccaaggagctggccgacttcgtgagagagagagccaccatcgaggaggcctacagcagaagcatgaccaagctggccaagagcgccagcaactacagccagctgggcaccttcgcccccgtgtgggacgtgttcaagaccagcaccgagaagctggccaactgccacctggacctggtgagaaagctgcaggagctgatcaaggaggtgcagaagtacggcgaggagcaggtgaagagccacaagaagaccaaggaggaggtggccggcaccctggaggccgtgcagaccatccagagcatcacccaggccctgcagaagagcaaggagaactacaacgccaagtgcgtggagcaggagagactgaagaaggagggcgccacccagagagagatcgagaaggccgccgtgaagagcaagaaggccaccgacacctacaagctgtacgtggagaagtacgccctggccaaggccgacttcgagcagaagatgaccgagaccgcccagaagttccaggacatcgaggagacccacctgatccacatcaaggagatcatcggcagcctgagcaacgccatcaaggagatccacctgcagatcggccaggtgcacgaggagttcatcaacaacatggccaacaccaccgtggagagcctgatccagaagttcgccgagagcaagggcaccggcaaggagagacccggcctgatcgagttcgaggagtgcgacaccgccagcgccgtggagggcatcaagcccagaaagagaaagaccttcgccctgcccggcatcatcaagaaggagaaggacgccgagagcgtggagtgccccgacgccgacagcctgaacatccccgacgtggacgaggagggctacagcatcaagcccgagaccaaccagaacgacaccaaggagaaccacttctacagcagcagcgacagcgacagcgaggacgaggagcccaagaagtacagaatcgagatcaagcccatgcaccccaacaacagccaccacaccatggccagcctggacgagctgaaggtgagcatcggcaacatcaccctgagccccgccatcagcgtgagcaccaacaccagactgaacagaaacttcaacgacgaggagctgaccaagagcaagcccagcgccccccccaacgagaagggcaccagcgacctgctggcctgggaccccctgttcggccccagcctggacagcagcagcagcagcagcctgaccagcagcagcagcgccagacccaccacccccctgagcgtgggcaccatcgtgcccccccccagacccgccagcagacccaagctgaccagcggcaagctgagcggcatcaacgagatccccagacccttcagcccccccgtgaccagcaacaccagccccccccccgccgcccccctggccagagccgagagcagcagcagcatcagcagcagcgccagcctgagcgccgccaacacccccaccgtgggcgtgagcagaggccccagccccgtgagcctgggcaaccaggacaccctgcccgtggccgtggccctgaccgagagcgtgaacgcctacttcaagggcgccgaccccaccaagtgcatcgtgaagatcaccggcgacatgaccatgagcttccccagcggcatcatcaaggtgttcaccagcaaccccacccccgccgtgctgtgcttcagagtgaagaacatcagcagactggagcagatcctgcccaacgcccagctggtgttcagcgaccccagccagtgcgacagcaacaccaaggacttctggatgaacatgcaggccgtgaccgtgtacctgaagaagctgagcgagcagaaccccgccgccagctactacaacgtggacgtgctgaagtaccaggtgagcagcaacggcatccagagcacccccctgaacctggccacctactggaagtgcagcgccagcaccaccgacctgagagtggactacaagtacaaccccgaggccatggtggcccccagcgtgctgagcaacatccaggtggtggtgcccgtggacggcggcgtgaccaacatgcagagcctgccccccgccatctggaacgccgagcagatgaaggccttctggaagctgagcagcatcagcgagaagagcgagaacggcggcagcggcagcctgagagccaagttcgacctgagcgagggccccagcaagcccaccaccctggccgtgcagttcctgagcgagggcagcaccctgagcggcgtggacttcgagctggtgggcaccggctacagactgagcctgatcaagaagagattcgccaccggcagatacctggccgactgctag

SEQ ID NO: 81535 - DNA, 2433 bp, synthetic construct
  misc_feature 1..2433: note = Description of Artificial Sequence: Synthetic coding sequence
  source 1..2433: mol_type = other DNA
atggtgatggcctacttcgtggagaacttctggggcgagaagaacagcggcttcgacgtgctgtaccacaacatgaagcacggccagatcagcaccaaggagctggccgacttcgtgagagagagagccaccatcgaggaggcctacagcagaagcatgaccaagctggccaagagcgccagcaactacagccagctgggcaccttcgcccccgtgtgggacgtgttcaagaccagcaccgagaagctggccaactgccacctggacctggtgagaaagctgcaggagctgatcaaggaggtgcagaagtacggcgaggagcaggtgaagagccacaagaagaccaaggaggaggtggccggcaccctggaggccgtgcagaccatccagagcatcacccaggccctgcagaagagcaaggagaactacaacgccaagtgcgtggagcaggagagactgaagaaggagggcgccacccagagagagatcgagaaggccgccgtgaagagcaagaaggccaccgacacctacaagctgtacgtggagaagtacgccctggccaaggccgacttcgagcagaagatgaccgagaccgcccagaagttccaggacatcgaggagacccacctgatccacatcaaggagatcatcggcagcctgagcaacgccatcaaggagatccacctgcagatcggccaggtgcacgaggagttcatcaacaacatggccaacaccaccgtggagagcctgatccagaagttcgccgagagcaagggcaccggcaaggagagacccggcctgatcgagttcgaggagtgcgacaccgccagcgccgtggagggcatcaagcccagaaagagaaagaccttcgccctgcccggcatcatcaagaaggagaaggacgccgagagcgtggagtgccccgacgccgacagcctgaacatccccgacgtggacgaggagggctacagcatcaagcccgagaccaaccagaacgacaccaaggagaaccacttctacagcagcagcgacagcgacagcgaggacgaggagcccaagaagtacagaatcgagatcaagcccatgcaccccaacaacagccaccacaccatggccagcctggacgagctgaaggtgagcatcggcaacatcaccctgagccccgccatcagcagacacagccccgtgcagatgaacagaaacctgagcaacgaggagctgaccaagagcaagcccagcgccccccccaacgagaagggcaccagcgacctgctggcctgggaccccctgttcggccccagcctggacagcagcagcagcagcagcctgaccagcagcagcagcgccagacccaccacccccctgagcgtgggcaccatcgtgcccccccccagacccgccagcagacccaagctgaccagcggcaagctgagcggcatcaacgagatccccagacccttcagcccccccgtgaccagcaacaccagccccccccccgccgcccccctggccagagccgagagcagcagcagcatcagcagcagcgccagcctgagcgccgccaacacccccaccgtgggcgtgagcagaggccccagccccgtgagcctgggcaaccaggacaccctgcccgtggccgtggccctgaccgagagcgtgaacgcctacttcaagggcgccgaccccaccaagtgcatcgtgaagatcaccggcgacatgaccatgagcttccccagcggcatcatcaaggtgttcaccagcaaccccacccccgccgtgctgtgcttcagagtgaagaacatcagcagactggagcagatcctgcccaacgcccagctggtgttcagcgaccccagccagtgcgacagcaacaccaaggacttctggatgaacatgcaggccgtgaccgtgtacctgaagaagctgagcgagcagaaccccgccgccagctactacaacgtggacgtgctgaagtaccaggtgagcagcaacggcatccagagcacccccctgaacctggccacctactggaagtgcagcgccagcaccaccgacctgagagtggactacaagtacaaccccgaggccatggtggcccccagcgtgctgagcaacatccaggtggtggtgcccgtggacggcggcgtgaccaacatgcagagcctgccccccgccatctggaacgccgagcagatgaaggccttctggaagctgagcagcatcagcgagaagagcgagaacggcggcagcggcagcctgagagccaagttcgacctgagcgagggccccagcaagcccaccaccctggccgtgcagttcctgagcgagggcagcaccctgagcggcgtggacttcgagctggtgggcaccggctacagactgagcctgatcaagaagagattcgccaccggcagatacctggccgactgctag

SEQ ID NO: 81536 - DNA, 2334 bp, synthetic construct
  misc_feature 1..2334: note = Description of Artificial Sequence: Synthetic coding sequence
  source 1..2334: mol_type = other DNA
atggtgatggcctacttcgtggagaacttctggggcgagaagaacagcggcttcgacgtgctgtaccacaacatgaagcacggccagatcagcaccaaggagctggccgacttcgtgagagagagagccaccatcgaggaggcctacagcagaagcatgaccaagctggccaagagcgccagcaactacagccagctgggcaccttcgcccccgtgtgggacgtgttcaagaccagcaccgagaagctggccaactgccacctggacctggtgagaaagctgcaggagctgatcaaggaggtgcagaagtacggcgaggagcaggtgaagagccacaagaagaccaaggaggaggtggccggcaccctggaggccgtgcagaccatccagagcatcacccaggccctgcagaagagcaaggagaactacaacgccaagtgcgtggagcaggagagactgaagaaggagggcgccacccagagagagatcgagaaggccgccgtgaagagcaagaaggccaccgacacctacaagctgtacgtggagaagtacgccctggccaaggccgacttcgagcagaagatgaccgagaccgcccaggtgcacgaggagttcatcaacaacatggccaacaccaccgtggagagcctgatccagaagttcgccgagagcaagggcaccggcaaggagagacccggcctgatcgagttcgaggagtgcgacaccgccagcgccgtggagggcatcaagcccagaaagagaaagaccttcgccctgcccggcatcatcaagaaggagaaggacgccgagagcgtggagtgccccgacgccgacagcctgaacatccccgacgtggacgaggagggctacagcatcaagcccgagaccaaccagaacgacaccaaggagaaccacttctacagcagcagcgacagcgacagcgaggacgaggagcccaagaagtacagaatcgagatcaagcccatgcaccccaacaacagccaccacaccatggccagcctggacgagctgaaggtgagcatcggcaacatcaccctgagccccgccatcagcagacacagccccgtgcagatgaacagaaacctgagcaacgaggagctgaccaagagcaagcccagcgccccccccaacgagaagggcaccagcgacctgctggcctgggaccccctgttcggccccagcctggacagcagcagcagcagcagcctgaccagcagcagcagcgccagacccaccacccccctgagcgtgggcaccatcgtgcccccccccagacccgccagcagacccaagctgaccagcggcaagctgagcggcatcaacgagatccccagacccttcagcccccccgtgaccagcaacaccagccccccccccgccgcccccctggccagagccgagagcagcagcagcatcagcagcagcgccagcctgagcgccgccaacacccccaccgtgggcgtgagcagaggccccagccccgtgagcctgggcaaccaggacaccctgcccgtggccgtggccctgaccgagagcgtgaacgcctacttcaagggcgccgaccccaccaagtgcatcgtgaagatcaccggcgacatgaccatgagcttccccagcggcatcatcaaggtgttcaccagcaaccccacccccgccgtgctgtgcttcagagtgaagaacatcagcagactggagcagatcctgcccaacgcccagctggtgttcagcgaccccagccagtgcgacagcaacaccaaggacttctggatgaacatgcaggccgtgaccgtgtacctgaagaagctgagcgagcagaaccccgccgccagctactacaacgtggacgtgctgaagtaccaggtgagcagcaacggcatccagagcacccccctgaacctggccacctactggaagtgcagcgccagcaccaccgacctgagagtggactacaagtacaaccccgaggccatggtggcccccagcgtgctgagcaacatccaggtggtggtgcccgtggacggcggcgtgaccaacatgcagagcctgccccccgccatctggaacgccgagcagatgaaggccttctggaagctgagcagcatcagcgagaagagcgagaacggcggcagcggcagcctgagagccaagttcgacctgagcgagggccccagcaagcccaccaccctggccgtgcagttcctgagcgagggcagcaccctgagcggcgtggacttcgagctggtgggcaccggctacagactgagcctgatcaagaagagattcgccaccggcagatacctggccgactgctag

SEQ ID NO: 81537 - DNA, 1668 bp, synthetic construct
  misc_feature 1..1668: note = Description of Artificial Sequence: Synthetic coding sequence
  source 1..1668: mol_type = other DNA
atggccagacccgacgacgaggagggcgccgccgtggcccccggccaccccctggccaagggctacctgcccctgcccagaggcgcccccgtgggcaaggagagcgtggagctgcagaacggccccaaggccggcaccttccccgtgaacggcgcccccagagacagcctggccgccgccagcggcgtgctgggcggcccccagacccccctggcccccgaggaggagacccaggccagactgctgcccgccggcgccggcgccgagacccccggcgccgagagcagccccctgcccctgaccgccctgagccccagaagattcgtggtgctgctgatcttcagcctgtacagcctggtgaacgccttccagtggatccagtacagcatcatcagcaacgtgttcgagggcttctacggcgtgaccctgctgcacatcgactggctgagcatggtgtacatgctggcctacgtgcccctgatcttccccgccacctggctgctggacaccagaggcctgagactgaccgccctgctgggcagcggcctgaactgcctgggcgcctggatcaagtgcggcagcgtgcagcagcacctgttctgggtgaccatgctgggccagtgcctgtgcagcgtggcccaggtgttcatcctgggcctgcccagcagaatcgccagcgtgtggttcggccccaaggaggtgagcaccgcctgcgccaccgccgtgctgggcaaccagctgggcaccgccgtgggcttcctgctgccccccgtgctggtgcccaacacccagaacgacaccaacctgctggcctgcaacatcagcaccatgttctacggcaccagcgccgtggccaccctgctgttcatcctgaccgccatcgccttcaaggagaagcccagatacccccccagccaggcccaggccgccctgcaggacagcccccccgaggagtacagctacaagaagagcatcagaaacctgttcaagaacatccccttcgtgctgctgctgatcacctacggcatcatgaccggcgccttctacagcgtgagcaccctgctgaaccagatgatcctgacctactacgagggcgaggaggtgaacgccggcagaatcggcctgaccctggtggtggccggcatggtgggcagcatcctgtgcggcctgtggctggactacaccaagacctacaagcagaccaccctgatcgtgtacatcctgagcttcatcggcatggtgatcttcaccttcaccctggacctgagatacatcatcatcgtgttcgtgaccggcggcgtgctgggcttcttcatgaccggctacctgcccctgggcttcgagttcgccgtggagatcacctaccccgagagcgagggcaccagcagcggcctgctgaacgccagcgcccagatcttcggcatcctgttcaccctggcccagggcaagctgaccagcgactacggccccaaggccggcaacatcttcctgtgcgtgtggatgttcatcggcatcatcctgaccgccctgatcaagagcgacctgagaagacacaacatcaacatcggcatcaccaacgtggacgtgaaggccatccccgccgacagccccaccgaccaggagcccaagaccgtgatgctgagcaagcagagcgagagcgccatctag

SEQ ID NO: 81538 - DNA, 2469 bp, synthetic construct
  misc_feature 1..2469: note = Description of Artificial Sequence: Synthetic coding sequence
  source 1..2469: mol_type = other DNA
atgggcttcggcagcgacctgaagaacagccacgaggccgtgctgaagctgcaggactgggagctgagactgctggagaccgtgaagaagttcatggccctgagaatcaagagcgacaaggagtacgccagcaccctgcagaacctgtgcaaccaggtggacaaggagagcaccgtgcagatgaactacgtgagcaacgtgagcaagagctggctgctgatgatccagcagaccgagcagctgagcagaatcatgaagacccacgccgaggacctgaacagcggccccctgcacagactgaccatgatgatcaaggacaagcagcaggtgaagaagagctacatcggcgtgcaccagcagatcgaggccgagatgatcaaggtgaccaagaccgagctggagaagctgaagtgcagctacagacagctgatcaaggagatgaacagcgccaaggagaagtacaaggaggccctggccaagggcaaggagaccgagaaggccaaggagagatacgacaaggccaccatgaagctgcacatgctgcacaaccagtacgtgctggccctgaagggcgcccagctgcaccagaaccagtactacgacatcaccctgcccctgctgctggacagcctgcagaagatgcaggaggagatgatcaaggccctgaagggcatcttcgacgagtacagccagatcaccagcctggtgaccgaggagatcgtgaacgtgcacaaggagatccagatgagcgtggagcagatcgaccccagcaccgagtacaacaacttcatcgacgtgcacagaaccaccgccgccaaggagcaggagatcgagttcgacaccagcctgctggaggagaacgagaacctgcaggccaacgagatcatgtggaacaacctgaccgccgagagcctgcaggtgatgctgaagaccctggccgaggagctgatgcagacccagcagatgctgctgaacaaggaggaggccgtgctggagctggagaagagaatcgaggagagcagcgagacctgcgagaagaagagcgacatcgtgctgctgctgagccagaagcaggccctggaggagctgaagcagagcgtgcagcagctgagatgcaccgaggccaagttcagcgcccagaaggagctgctggagcagaaggtgcaggagaacgacggcaaggagcccccccccgtggtgaactacgaggaggacgccagaagcgtgaccagcatggagagaaaggagagactgagcaagttcgagagcatcagacacagcatcgccggcatcatcagaagccccaagagcgccctgggcagcagcgccctgagcgacatgatcagcatcagcgagaagcccctggccgagcaggactggtaccacggcgccatccccagaatcgaggcccaggagctgctgaagaagcagggcgacttcctggtgagagagagccacggcaagcccggcgagtacgtgctgagcgtgtacagcgacggccagagaagacacttcatcatccagtacgtggacaacatgtacagattcgagggcaccggcttcagcaacatcccccagctgatcgaccaccactacaccaccaagcaggtgatcaccaagaagagcggcgtggtgctgctgaaccccatccccaaggacaagaagtggatcctgagccacgaggacgtgatcctgggcgagctgctgggcaagggcaacttcggcgaggtgtacaagggcaccctgaaggacaagaccagcgtggccgtgaagacctgcaaggaggacctgccccaggagctgaagatcaagttcctgcaggaggccaagatcctgaagcagtacgaccaccccaacatcgtgaagctgatcggcgtgtgcacccagagacagcccgtgtacatcatcatggagctggtgagcggcggcgacttcctgaccttcctgagaagaaagaaggacgagctgaagctgaagcagctggtgaagttcagcctggacgccgccgccggcatgctgtacctggagagcaagaactgcatccacagagacctggccgccagaaactgcctggtgggcgagaacaacgtgctgaagatcagcgacttcggcatgagcagacaggaggacggcggcgtgtacagcagcagcggcctgaagcagatccccatcaagtggaccgcccccgaggccctgaactacggcagatacagcagcgagagcgacgtgtggagcttcggcatcctgctgtgggagaccttcagcctgggcgtgtgcccctaccccggcatgaccaaccagcaggccagagagcaggtggagagaggctacagaatgagcgccccccagcactgccccgaggacatcagcaagatcatgatgaagtgctgggactacaagcccgagaacagacccaagttcagcgagctgcagaaggagctgaccatcatcaagagaaagctgacctag

SEQ ID NO: 81539 - DNA, 1944 bp, synthetic construct
  misc_feature 1..1944: note = Description of Artificial Sequence: Synthetic coding sequence
  source 1..1944: mol_type = other DNA
atgaagctgcacatgctgcacaaccagtacgtgctggccctgaagggcgcccagctgcaccagaaccagtactacgacatcaccctgcccctgctgctggacagcctgcagaagatgcaggaggagatgatcaaggccctgaagggcatcttcgacgagtacagccagatcaccagcctggtgaccgaggagatcgtgaacgtgcacaaggagatccagatgagcgtggagcagatcgaccccagcaccgagtacaacaacttcatcgacgtgcacagaaccaccgccgccaaggagcaggagatcgagttcgacaccagcctgctggaggagaacgagaacctgcaggccaacgagatcatgtggaacaacctgaccgccgagagcctgcaggtgatgctgaagaccctggccgaggagctgatgcagacccagcagatgctgctgaacaaggaggaggccgtgctggagctggagaagagaatcgaggagagcagcgagacctgcgagaagaagagcgacatcgtgctgctgctgagccagaagcaggccctggaggagctgaagcagagcgtgcagcagctgagatgcaccgaggccaagttcagcgcccagaaggagctgctggagcagaaggtgcaggagaacgacggcaaggagcccccccccgtggtgaactacgaggaggacgccagaagcgtgaccagcatggagagaaaggagagactgagcaagttcgagagcatcagacacagcatcgccggcatcatcagaagccccaagagcgccctgggcagcagcgccctgagcgacatgatcagcatcagcgagaagcccctggccgagcaggactggtaccacggcgccatccccagaatcgaggcccaggagctgctgaagaagcagggcgacttcctggtgagagagagccacggcaagcccggcgagtacgtgctgagcgtgtacagcgacggccagagaagacacttcatcatccagtacgtggacaacatgtacagattcgagggcaccggcttcagcaacatcccccagctgatcgaccaccactacaccaccaagcaggtgatcaccaagaagagcggcgtggtgctgctgaaccccatccccaaggacaagaagtggatcctgagccacgaggacgtgatcctgggcgagctgctgggcaagggcaacttcggcgaggtgtacaagggcaccctgaaggacaagaccagcgtggccgtgaagacctgcaaggaggacctgccccaggagctgaagatcaagttcctgcaggaggccaagatcctgaagcagtacgaccaccccaacatcgtgaagctgatcggcgtgtgcacccagagacagcccgtgtacatcatcatggagctggtgagcggcggcgacttcctgaccttcctgagaagaaagaaggacgagctgaagctgaagcagctggtgaagttcagcctggacgccgccgccggcatgctgtacctggagagcaagaactgcatccacagagacctggccgccagaaactgcctggtgggcgagaacaacgtgctgaagatcagcgacttcggcatgagcagacaggaggacggcggcgtgtacagcagcagcggcctgaagcagatccccatcaagtggaccgcccccgaggccctgaactacggcagatacagcagcgagagcgacgtgtggagcttcggcatcctgctgtgggagaccttcagcctgggcgtgtgcccctaccccggcatgaccaaccagcaggccagagagcaggtggagagaggctacagaatgagcgccccccagcactgccccgaggacatcagcaagatcatgatgaagtgctgggactacaagcccgagaacagacccaagttcagcgagctgcagaaggagctgaccatcatcaagagaaagctgacctag

SEQ ID NO: 81540 - DNA, 981 bp, synthetic construct
  misc_feature 1..981: note = Description of Artificial Sequence: Synthetic coding sequence
  source 1..981: mol_type = other DNA
atgggcttcggcagcgacctgaagaacagccacgaggccgtgctgaagctgcaggactgggagctgagactgctggagaccgtgaagaagttcatggccctgagaatcaagagcgacaaggagtacgccagcaccctgcagaacctgtgcaaccaggtggacaaggagagcaccgtgcagatgaactacgtgagcaacgtgagcaagagctggctgctgatgatccagcagaccgagcagctgagcagaatcatgaagacccacgccgaggacctgaacagcggccccctgcacagactgaccatgatgatcaaggacaagcagcaggtgaagaagagctacatcggcgtgcaccagcagatcgaggccgagatgatcaaggtgaccaagaccgagctggagaagctgaagtgcagctacagacagctgatcaaggagatgaacagcgccaaggagaagtacaaggaggccctggccaagggcaaggagaccgagaaggccaaggagagatacgacaaggccaccatgaagctgcacatgctgcacaaccagtacgtgctggccctgaagggcgcccagctgcaccagaaccagtactacgacatcaccctgcccctgctgctggacagcctgcagaagatgcaggaggagatgatcaaggccctgaagggcatcttcgacgagtacagccagatcaccagcctggtgaccgaggagatcgtgaacgtgcacaaggagatccagatgagcgtggagcagatcgaccccagcaccgagtacaacaacttcatcgacgtgcacagaaccaccgccgccaaggagcaggagatcgagttcgacaccagcctgctggaggagaacgagaacctgcaggccaacgagatcatgtggaacaacctgaccgccgagagcctgcaggtgatgaaggagagaagaggctaccccaacctgaacctgttcgtgatccagctgctggagtag

SEQ ID NO: 81541 - DNA, 3855 bp, synthetic construct
  misc_feature 1..3855: note = Description of Artificial Sequence: Synthetic coding sequence
  source 1..3855: mol_type = other DNA
atgcacgtgttcatcgtgggcatgagcctgagcagcgtgaccctggccagcgccctgcaggtgagaggcgaggccctgagcgaggaggagatctggagcctgctgttcctggccgccgagcagctgctggaggacctgagaaacgacagcagcgactacgtggtgtgcccctggagcgccctgctgagcgccgccggcagcctgagcttccagggcagagtgagccacatcgaggccgcccccttcaaggcccccgagctgctgcagggccagagcgaggacgagcagcccgacgccagccagcccctgcagctgtgcgagcccctgcacagcatcctgctgaccatgtgcgaggaccagccccacagaagatgcaccctgcagagcgtgctggaggcctgcagagtgcacgagaaggaggtgagcgtgtaccccgcccccgccggcctgcacatcagaagactggtgggcctggtgctgggcaccatcagcgaggtggagaagagagtggtggaggagagcagcagcgtgcagcagaacagaagctacctgctgagaaagagactgagaggcaccagcagcgagagccccgccgcccaggcccccgagtgcctgcacccctgcagagtgagcgagagaagcaccgagacccagagcagccccgagccccactggagcaccctgacccacagccactgcagcctgctggtgaacagagccctgcccggcgccgacccccaggaccagcaggccggcagaagactgagcagcggcagcgtgcacagcgccgccgacagcagctggcccaccacccccagccagagaggcttcctgcagagaagaagcaagttcagcagacccgagttcatcctgctggccggcgaggcccccatgaccctgcacctgcccggcagcgtggtgaccaagaagggcaagagctacctggccctgagagacctgtgcgtggtgctgctgaacggccagcacctggaggtgaagtgcgacgtggagagcaccgtgggcgccgtgttcaacgccgtgaccagcttcgccaacctggaggagctgacctacttcggcctggcctacatgaagagcaaggagttcttcttcctggacagcgagaccagactgtgcaagatcgcccccgagggctggagagagcagccccagaagaccagcatgaacaccttcaccctgttcctgagaatcaagttcttcgtgagccactacggcctgctgcagcacagcctgaccagacaccagttctacctgcagctgagaaaggacatcctggaggagagactgtactgcaacgaggagatcctgctgcagctgggcgtgctggccctgcaggccgagttcggcaactaccccaaggaggtggagagcaagccctacttccacgtggaggactacatccccgccagcctgatcgagagaatgaccgccctgagagtgcaggtggaggtgagcgagatgcacagactgagcagcgccctgtggggcgaggacgccgagctgaagttcctgagagtgacccagcagctgcccgagtacggcgtgctggtgcaccaggtgttcagcgagaagagaagacccgaggaggagatggccctgggcatctgcgccaagggcgtgatcgtgtacgaggtgaagaacaacagcagaatcgccatgctgagattccagtggagagagaccggcaagatcagcacctaccagaagaagttcaccatcaccagcagcgtgaccggcaagaagcacaccttcgtgaccgacagcgccaagaccagcaagtacctgctggacctgtgcagcgcccagcacggcttcaacgcccagatgggcagcggccagcccagccacgtgctgttcgaccacgacaagttcgtgcagatggccaacctgagccccgcccaccaggccagaagcaagcccctgatctggatccagagactgagctgcagcgagaacgagctgttcgtgagcagactgcagggcgccgccggcggcctgctgagcaccagcatggacaacttcaacgtggacggcagcaaggaggccggcgccgagggcatcggcagaagcccctgcaccggcagagagcagctgaagagcgcctgcgtgatccagaagcccatgacctgggacagcctgagcggcccccccgtgcagagcatgcacgccggcagcaagaacaacagaagaaagagcttcatcgccgagcccggcagagagatcgtgagagtgaccctgaagagagacccccacagaggcttcggcttcgtgatcaacgagggcgagtacagcggccaggccgaccccggcatcttcatcagcagcatcatccccggcggccccgccgagaaggccaagaccatcaagcccggcggccagatcctggccctgaaccacatcagcctggagggcttcaccttcaacatggccgtgagaatgatccagaacagccccgacaacatcgagctgatcatcagccagagcaagggcgtgggcggcaacaaccccgacgaggagaagaacagcaccgccaacagcggcgtgagcagcaccgacatcctgagcttcggctaccagggcagcctgctgagccacacccaggaccaggacagaaacaccgaggagctggacatggccggcgtgcagagcctggtgcccagactgagacaccagctgagcttcctgcccctgaagggcgccggcagcagctgcccccccagcccccccgagatcagcgccggcgagatctacttcgtggagctggtgaaggaggacggcaccctgggcttcagcgtgaccggcggcatcaacaccagcgtgccctacggcggcatctacgtgaagagcatcgtgcccggcggccccgccgccaaggagggccagatcctgcagggcgacagactgctgcaggtggacggcgtgatcctgtgcggcctgacccacaagcaggccgtgcagtgcctgaccggccccggccaggtggccagactggtgctggagagaagagtgcccagaagcacccagcagtgccccagcgccaacgacagcatgggcgacgagagaaccgccgtgagcctggtgaccgccctgcccggcagacccagcagctgcgtgagcgtgaccgacggccccaagttcgaggtgaagctgaagaagaacgccaacggcctgggcttcagcttcgtgcagatggagaaggagagctgcagccacctgaagagcgacctggtgagaatcaagagactgttccccggccagcccgccgaggagaacggcgccatcgccgccggcgacatcatcctggccgtgaacggcagaagcaccgagggcctgatcttccaggaggtgctgcacctgctgagaggcgccccccaggaggtgaccctgctgctgtgcagacccccccccggcgccctgcccgagctggagcaggagtggcagacccccgagctgagcgccgacaaggagttcaccagagccacctgcaccgacagctgcaccagccccatcctggaccaggaggacagctggagagacagcgccagccccgacgccggcgagggcctgggcctgagacccgagagcagccagaaggccatcagagaggcccagtggggccagaacagagagagaccctgggccagcagcctgacccacagccccgagagccacccccacctgtgcaagctgcaccaggagagagacgagagcaccctggccaccagcctggagaaggacgtgagacagaactgctacagcgtgtgcgacatcatgagactgggcagatacagcttcagcagccccctgaccagactgagcaccgacatcttctag

SEQ ID NO: 81542 - DNA, 3930 bp, synthetic construct
  misc_feature 1..3930: note = Description of Artificial Sequence: Synthetic coding sequence
  source 1..3930: mol_type = other DNA
atgcagcccctgaccaaggacgccggcatgagcctgagcagcgtgaccctggccagcgccctgcaggtgagaggcgaggccctgagcgaggaggagatctggagcctgctgttcctggccgccgagcagctgctggaggacctgagaaacgacagcagcgactacgtggtgtgcccctggagcgccctgctgagcgccgccggcagcctgagcttccagggcagagtgagccacatcgaggccgcccccttcaaggcccccgagctgctgcagggccagagcgaggacgagcagcccgacgccagccagatgcacgtgtacagcctgggcatgaccctgtactggagcgccggcttccacgtgcccccccaccagcccctgcagctgtgcgagcccctgcacagcatcctgctgaccatgtgcgaggaccagccccacagaagatgcaccctgcagagcgtgctggaggcctgcagagtgcacgagaaggaggtgagcgtgtaccccgcccccgccggcctgcacatcagaagactggtgggcctggtgctgggcaccatcagcgaggtggagaagagagtggtggaggagagcagcagcgtgcagcagaacagaagctacctgctgagaaagagactgagaggcaccagcagcgagagccccgccgcccaggcccccgagtgcctgcacccctgcagagtgagcgagagaagcaccgagacccagagcagccccgagccccactggagcaccctgacccacagccactgcagcctgctggtgaacagagccctgcccggcgccgacccccaggaccagcaggccggcagaagactgagcagcggcagcgtgcacagcgccgccgacagcagctggcccaccacccccagccagagaggcttcctgcagagaagaagcaagttcagcagacccgagttcatcctgctggccggcgaggcccccatgaccctgcacctgcccggcagcgtggtgaccaagaagggcaagagctacctggccctgagagacctgtgcgtggtgctgctgaacggccagcacctggaggtgaagtgcgacgtggagagcaccgtgggcgccgtgttcaacgccgtgaccagcttcgccaacctggaggagctgacctacttcggcctggcctacatgaagagcaaggagttcttcttcctggacagcgagaccagactgtgcaagatcgcccccgagggctggagagagcagccccagaagaccagcatgaacaccttcaccctgttcctgagaatcaagttcttcgtgagccactacggcctgctgcagcacagcctgaccagacaccagttctacctgcagctgagaaaggacatcctggaggagagactgtactgcaacgaggagatcctgctgcagctgggcgtgctggccctgcaggccgagttcggcaactaccccaaggagcaggtggagagcaagccctacttccacgtggaggactacatccccgccagcctgatcgagagaatgaccgccctgagagtgcaggtggaggtgagcgagatgcacagactgagcagcgccctgtggggcgaggacgccgagctgaagttcctgagagtgacccagcagctgcccgagtacggcgtgctggtgcaccaggtgttcagcgagaagagaagacccgaggaggagatggccctgggcatctgcgccaagggcgtgatcgtgtacgaggtgaagaacaacagcagaatcgccatgctgagattccagtggagagagaccggcaagatcagcacctaccagaagaagttcaccatcaccagcagcgtgaccggcaagaagcacaccttcgtgaccgacagcgccaagaccagcaagtacctgctggacctgtgcagcgcccagcacggcttcaacgcccagatgggcagcggccagcccagccacgtgctgttcgaccacgacaagttcgtgcagatggccaacctgagccccgcccaccaggccagaagcaagcccctgatctggatccagagactgagctgcagcgagaacgagctgttcgtgagcagactgcagggcgccgccggcggcctgctgagcaccagcatggacaacttcaacgtggacggcagcaaggaggccggcgccgagggcatcggcagaagcccctgcaccggcagagagcagctgaagagcgcctgcgtgatccagaagcccatgacctgggacagcctgagcggcccccccgtgcagagcatgcacgccggcagcaagaacaacagaagaaagagcttcatcgccgagcccggcagagagatcgtgagagtgaccctgaagagagacccccacagaggcttcggcttcgtgatcaacgagggcgagtacagcggccaggccgaccccggcatcttcatcagcagcatcatccccggcggccccgccgagaaggccaagaccatcaagcccggcggccagatcctggccctgaaccacatcagcctggagggcttcaccttcaacatggccgtgagaatgatccagaacagccccgacaacatcgagctgatcatcagccagagcaagggcgtgggcggcaacaaccccgacgaggagaagaacagcaccgccaacagcggcgtgagcagcaccgacatcctgagcttcggctaccagggcagcctgctgagccacacccaggaccaggacagaaacaccgaggagctggacatggccggcgtgcagagcctggtgcccagactgagacaccagctgagcttcctgcccctgaagggcgccggcagcagctgcccccccagcccccccgagatcagcgccggcgagatctacttcgtggagctggtgaaggaggacggcaccctgggcttcagcgtgaccggcggcatcaacaccagcgtgccctacggcggcatctacgtgaagagcatcgtgcccggcggccccgccgccaaggagggccagatcctgcagggcgacagactgctgcaggtggacggcgtgatcctgtgcggcctgacccacaagcaggccgtgcagtgcctgaccggccccggccaggtggccagactggtgctggagagaagagtgcccagaagcacccagcagtgccccagcgccaacgacagcatgggcgacgagagaaccgccgtgagcctggtgaccgccctgcccggcagacccagcagctgcgtgagcgtgaccgacggccccaagttcgaggtgaagctgaagaagaacgccaacggcctgggcttcagcttcgtgcagatggagaaggagagctgcagccacctgaagagcgacctggtgagaatcaagagactgttccccggccagcccgccgaggagaacggcgccatcgccgccggcgacatcatcctggccgtgaacggcagaagcaccgagggcctgatcttccaggaggtgctgcacctgctgagaggcgccccccaggaggtgaccctgctgctgtgcagacccccccccggcgccctgcccgagctggagcaggagtggcagacccccgagctgagcgccgacaaggagttcaccagagccacctgcaccgacagctgcaccagccccatcctggaccaggaggacagctggagagacagcgccagccccgacgccggcgagggcctgggcctgagacccgagagcagccagaaggccatcagagaggcccagtggggccagaacagagagagaccctgggccagcagcctgacccacagccccgagagccacccccacctgtgcaagctgcaccaggagagagacgagagcaccctggccaccagcctggagaaggacgtgagacagaactgctacagcgtgtgcgacatcatgagactgggcagatacagcttcagcagccccctgaccagactgagcaccgacatcttctag

SEQ ID NO: 81543 - DNA, 3834 bp, synthetic construct
  misc_feature 1..3834: note = Description of Artificial Sequence: Synthetic coding sequence
  source 1..3834: mol_type = other DNA
atgagcctgagcagcgtgaccctggccagcgccctgcaggtgagaggcgaggccctgagcgaggaggagatctggagcctgctgttcctggccgccgagcagctgctggaggacctgagaaacgacagcagcgactacgtggtgtgcccctggagcgccctgctgagcgccgccggcagcctgagcttccagggcagagtgagccacatcgaggccgcccccttcaaggcccccgagctgctgcagggccagagcgaggacgagcagcccgacgccagccagcccctgcagctgtgcgagcccctgcacagcatcctgctgaccatgtgcgaggaccagccccacagaagatgcaccctgcagagcgtgctggaggcctgcagagtgcacgagaaggaggtgagcgtgtaccccgcccccgccggcctgcacatcagaagactggtgggcctggtgctgggcaccatcagcgaggtggagaagagagtggtggaggagagcagcagcgtgcagcagaacagaagctacctgctgagaaagagactgagaggcaccagcagcgagagccccgccgcccaggcccccgagtgcctgcacccctgcagagtgagcgagagaagcaccgagacccagagcagccccgagccccactggagcaccctgacccacagccactgcagcctgctggtgaacagagccctgcccggcgccgacccccaggaccagcaggccggcagaagactgagcagcggcagcgtgcacagcgccgccgacagcagctggcccaccacccccagccagagaggcttcctgcagagaagaagcaagttcagcagacccgagttcatcctgctggccggcgaggcccccatgaccctgcacctgcccggcagcgtggtgaccaagaagggcaagagctacctggccctgagagacctgtgcgtggtgctgctgaacggccagcacctggaggtgaagtgcgacgtggagagcaccgtgggcgccgtgttcaacgccgtgaccagcttcgccaacctggaggagctgacctacttcggcctggcctacatgaagagcaaggagttcttcttcctggacagcgagaccagactgtgcaagatcgcccccgagggctggagagagcagccccagaagaccagcatgaacaccttcaccctgttcctgagaatcaagttcttcgtgagccactacggcctgctgcagcacagcctgaccagacaccagttctacctgcagctgagaaaggacatcctggaggagagactgtactgcaacgaggagatcctgctgcagctgggcgtgctggccctgcaggccgagttcggcaactaccccaaggaggtggagagcaagccctacttccacgtggaggactacatccccgccagcctgatcgagagaatgaccgccctgagagtgcaggtggaggtgagcgagatgcacagactgagcagcgccctgtggggcgaggacgccgagctgaagttcctgagagtgacccagcagctgcccgagtacggcgtgctggtgcaccaggtgttcagcgagaagagaagacccgaggaggagatggccctgggcatctgcgccaagggcgtgatcgtgtacgaggtgaagaacaacagcagaatcgccatgctgagattccagtggagagagaccggcaagatcagcacctaccagaagaagttcaccatcaccagcagcgtgaccggcaagaagcacaccttcgtgaccgacagcgccaagaccagcaagtacctgctggacctgtgcagcgcccagcacggcttcaacgcccagatgggcagcggccagcccagccacgtgctgttcgaccacgacaagttcgtgcagatggccaacctgagccccgcccaccaggccagaagcaagcccctgatctggatccagagactgagctgcagcgagaacgagctgttcgtgagcagactgcagggcgccgccggcggcctgctgagcaccagcatggacaacttcaacgtggacggcagcaaggaggccggcgccgagggcatcggcagaagcccctgcaccggcagagagcagctgaagagcgcctgcgtgatccagaagcccatgacctgggacagcctgagcggcccccccgtgcagagcatgcacgccggcagcaagaacaacagaagaaagagcttcatcgccgagcccggcagagagatcgtgagagtgaccctgaagagagacccccacagaggcttcggcttcgtgatcaacgagggcgagtacagcggccaggccgaccccggcatcttcatcagcagcatcatccccggcggccccgccgagaaggccaagaccatcaagcccggcggccagatcctggccctgaaccacatcagcctggagggcttcaccttcaacatggccgtgagaatgatccagaacagccccgacaacatcgagctgatcatcagccagagcaagggcgtgggcggcaacaaccccgacgaggagaagaacagcaccgccaacagcggcgtgagcagcaccgacatcctgagcttcggctaccagggcagcctgctgagccacacccaggaccaggacagaaacaccgaggagctggacatggccggcgtgcagagcctggtgcccagactgagacaccagctgagcttcctgcccctgaagggcgccggcagcagctgcccccccagcccccccgagatcagcgccggcgagatctacttcgtggagctggtgaaggaggacggcaccctgggcttcagcgtgaccggcggcatcaacaccagcgtgccctacggcggcatctacgtgaagagcatcgtgcccggcggccccgccgccaaggagggccagatcctgcagggcgacagactgctgcaggtggacggcgtgatcctgtgcggcctgacccacaagcaggccgtgcagtgcctgaccggccccggccaggtggccagactggtgctggagagaagagtgcccagaagcacccagcagtgccccagcgccaacgacagcatgggcgacgagagaaccgccgtgagcctggtgaccgccctgcccggcagacccagcagctgcgtgagcgtgaccgacggccccaagttcgaggtgaagctgaagaagaacgccaacggcctgggcttcagcttcgtgcagatggagaaggagagctgcagccacctgaagagcgacctggtgagaatcaagagactgttccccggccagcccgccgaggagaacggcgccatcgccgccggcgacatcatcctggccgtgaacggcagaagcaccgagggcctgatcttccaggaggtgctgcacctgctgagaggcgccccccaggaggtgaccctgctgctgtgcagacccccccccggcgccctgcccgagctggagcaggagtggcagacccccgagctgagcgccgacaaggagttcaccagagccacctgcaccgacagctgcaccagccccatcctggaccaggaggacagctggagagacagcgccagccccgacgccggcgagggcctgggcctgagacccgagagcagccagaaggccatcagagaggcccagtggggccagaacagagagagaccctgggccagcagcctgacccacagccccgagagccacccccacctgtgcaagctgcaccaggagagagacgagagcaccctggccaccagcctggagaaggacgtgagacagaactgctacagcgtgtgcgacatcatgagactgggcagatacagcttcagcagccccctgaccagactgagcaccgacatcttctag

SEQ ID NO: 81544 - DNA, 786 bp, synthetic construct
  misc_feature 1..786: note = Description of Artificial Sequence: Synthetic coding sequence
  source 1..786: mol_type = other DNA
atgggcgacgagagaaccgccgtgagcctggtgaccgccctgcccggcagacccagcagctgcgtgagcgtgaccgacggccccaagttcgaggtgaagctgaagaagaacgccaacggcctgggcttcagcttcgtgcagatggagaaggagagctgcagccacctgaagagcgacctggtgagaatcaagagactgttccccggccagcccgccgaggagaacggcgccatcgccgccggcgacatcatcctggccgtgaacggcagaagcaccgagggcctgatcttccaggaggtgctgcacctgctgagaggcgccccccaggaggtgaccctgctgctgtgcagacccccccccggcgccctgcccgagctggagcaggagtggcagacccccgagctgagcgccgacaaggagttcaccagagccacctgcaccgacagctgcaccagccccatcctggaccaggaggacagctggagagacagcgccagccccgacgccggcgagggcctgggcctgagacccgagagcagccagaaggccatcagagaggcccagtggggccagaacagagagagaccctgggccagcagcctgacccacagccccgagagccacccccacctgtgcaagctgcaccaggagagagacgagagcaccctggccaccagcctggagaaggacgtgagacagaactgctacagcgtgtgcgacatcatgagactgggcagatacagcttcagcagccccctgaccagactgagcaccgacatcttctag

SEQ ID NO: 81545 - DNA, 3936 bp, synthetic construct
  misc_feature 1..3936: note = Description of Artificial Sequence: Synthetic coding sequence
  source 1..3936: mol_type = other DNA
ttcagcagccacagaaccaagagcagcggctggcccccccccagcggcacctggggcctgagccaggtgcccccctacggctgggagatgaccgccaacagagacggcagagactacttcatcaaccacatgacccaggccatccccttcgacgaccccagactggagagctgccagatcatcccccccgcccccagaaaggtggagatgagaagagaccccgtgctgggcttcggcttcgtggccggcagcgagaagcccgtggtggtgagaagcgtgacccccggcggccccagcgagggcaagctgatccccggcgaccagatcgtgatgatcaacgacgagcccgtgagcgccgcccccagagagagagtgatcgacctggtgagaagctgcaaggagagcatcctgctgaccgtgatccagccctaccccagccccaagagcgccttcatcagcgccgccaagaaggccagactgaagagcaaccccgtgaaggtgagattcagcgaggaggtgatcatcaacggccaggtgagcgagaccgtgaaggacaacagcctgctgttcatgcccaacgtgctgaaggtgtacctggagaacggccagaccaagagcttcagattcgactgcagcaccagcatcaaggacgtgatcctgaccctgcaggagaagctgagcatcaagggcatcgagcacttcagcctgatgctggagcagagaaccgagggcgccggcaccaagctgctgctgctgcacgagcaggagaccctgacccaggtgacccagagacccagcagccacaagatgagatgcctgttcagaatcagcttcgtgcccaaggaccccatcgacctgctgagaagagaccccgtggccttcgagtacctgtacgtgcagagctgcaacgacgtggtgcaggagagattcggccccgagctgaagtacgacatcgccctgagactggccgccctgcagatgtacatcgccaccgtgaccaccaagcagacccagaagatcagcctgaagtacatcgagaaggagtggggcctggagaccttcctgcccagcgccgtgctgcagagcatgaaggagaagaacatcaagaaggccctgagccacctggtgaaggccaaccagaacctggtgccccccggcaagaagctgagcgccctgcaggccaaggtgcactacctgaagttcctgagcgacctgagactgtacggcggcagagtgttcaaggccaccctggtgcaggccgagaagagaagcgaggtgaccctgctggtgggccccagatacggcatcagccacgtgatcaacaccaagaccaacctggtggccctgctggccgacttcagccacgtgaacagaatcgagatgttcagcgaggaggagagcctggtgagagtggagctgcacgtgctggacgtgaagcccatcaccctgctgatggagagcagcgacgccatgaacctggcctgcctgaccgccggctactacagactgctggtggacagcagaagaagcatcttcaacatggccaacaagaagaacaccgccacccaggagaccggccccgagaacaagggcaagcacaacctgctgggccccgactggaactgcatcccccagatgaccaccttcatcggcgagggcgagcaggaggcccagatcacctacatcgacagcaagcagaagaccgtggagatcaccgacagcaccatgtgccccaaggagcacagacacctgtacatcgacaacgcctacagcagcgacggcctgaaccagcagctgagccagcccggcgaggccccctgcgaggccgactacagaagcctggcccagagaagcctgctgaccctgagcggccccgagaccctgaagaaggcccaggagagccccagaggcgccaaggtgagcttcatcttcggcgacttcgccctggacgacggcatcagcccccccaccctgggctacgagaccctgctggacgagggccccgagatgctggagaagcagagaaacctgtacatcggcagcgccaacgacatgaagggcctggacctgacccccgaggccgagggcatccagttcgtggagaacagcgtgtacgccaacatcggcgacgtgaagagcttccaggccgccgagggcatcgaggagcccctgctgcacgacatctgctacgccgagaacaccgacgacgccgaggacgaggacgaggtgagctgcgaggaggacctggtggtgggcgagatgaaccagcccgccatcctgaacctgagcggcagcagcgacgacatcatcgacctgaccagcctgcccccccccgagggcgacgacaacgaggacgacttcctgctgagaagcctgaacatggccatcgccgcccccccccccggcttcagagacagcagcgacgaggaggacagccagagccaggccgccagcttccccgaggacaaggagaagggcagcagcctgcagaacgacgagatccccgtgagcctgatcgacgccgtgcccaccagcgccgagggcaagtgcgagaagggcctggacaacgccgtggtgagcaccctgggcgccctggaggccctgagcgtgagcgaggagcagcagaccagcgacaacagcggcgtggccatcctgagagcctacagccccgagagcagcagcgacagcggcaacgagaccaacagcagcgagatgaccgagagcagcgagctggccaccgcccagaagcagagcgagaacctgagcagaatgttcctggccacccacgagggctaccaccccctggccgaggagcagaccgagttccccgccagcaagacccccgccggcggcctgccccccaagagcagccacgccctggccgccagacccgccaccgacctgccccccaaggtggtgcccagcaagcagctgctgcacagcgaccacatggagatggagcccgagaccatggagaccaagagcgtgaccgactacttcagcaagctgcacatgggcagcgtggcctacagctgcaccagcaagagaaagagcaagctggccgacggcgagggcaaggccccccccaacggcaacaccaccggcaagaagcagcagggcaccaagaccgccgagatggaggaggaggccagcggcaagttcggcaccgtgagcagcagagacagccagcacctgagcaccttcaacctggagagaaccgccttcagaaaggacagccagagatggtacgtggccaccgagggcggcatggccgagaagagcggcctggaggccgccaccggcaagaccttccccagagccagcggcctgggcgccagagaggccgagggcaaggaggagggcgcccccgacggcgagaccagcgacggcagcggcctgggccagggcgacagattcctgaccgacgtgacctgcgccagcagcgccaaggacctggacaaccccgaggacgccgacagcagcacctgcgaccaccccagcaagctgcccgaggccgacgagagcgtggccagactgtgcgactaccacctggccaagagaatgagcagcctgcagagcgagggccacttcagcctgcagagcagccagggcagcagcgtggacgccggctgcggcaccggcagcagcggcagcgcctgcgccacccccgtggagagccccctgtgccccagcctgggcaagcacctgatccccgacgccagcggcaagggcgtgaactacatccccagcgaggagagagcccccggcctgcccaaccacggcgccaccttcaaggagctgcacccccagaccgagggcatgtgccccagaatgaccgtgcccgccctgcacaccgccatcaacaccgagcccctgttcggcaccctgagagacggctgccacagactgcccaagatcaaggagaccaccgtgtag

SEQ ID NO: 81546 - DNA, 3969 bp, synthetic construct
  misc_feature 1..3969: note = Description of Artificial Sequence: Synthetic coding sequence
  source 1..3969: mol_type = other DNA
atggacgtgttcagcttcgtgaagatcgccaagctgagcagccacagaaccaagagcagcggctggcccccccccagcggcacctggggcctgagccaggtgcccccctacggctgggagatgaccgccaacagagacggcagagactacttcatcaaccacatgacccaggccatccccttcgacgaccccagactggagagctgccagatcatcccccccgcccccagaaaggtggagatgagaagagaccccgtgctgggcttcggcttcgtggccggcagcgagaagcccgtggtggtgagaagcgtgacccccggcggccccagcgagggcaagctgatccccggcgaccagatcgtgatgatcaacgacgagcccgtgagcgccgcccccagagagagagtgatcgacctggtgagaagctgcaaggagagcatcctgctgaccgtgatccagccctaccccagccccaagagcgccttcatcagcgccgccaagaaggccagactgaagagcaaccccgtgaaggtgagattcagcgaggaggtgatcatcaacggccaggtgagcgagaccgtgaaggacaacagcctgctgttcatgcccaacgtgctgaaggtgtacctggagaacggccagaccaagagcttcagattcgactgcagcaccagcatcaaggacgtgatcctgaccctgcaggagaagctgagcatcaagggcatcgagcacttcagcctgatgctggagcagagaaccgagggcgccggcaccaagctgctgctgctgcacgagcaggagaccctgacccaggtgacccagagacccagcagccacaagatgagatgcctgttcagaatcagcttcgtgcccaaggaccccatcgacctgctgagaagagaccccgtggccttcgagtacctgtacgtgcagagctgcaacgacgtggtgcaggagagattcggccccgagctgaagtacgacatcgccctgagactggccgccctgcagatgtacatcgccaccgtgaccaccaagcagacccagaagatcagcctgaagtacatcgagaaggagtggggcctggagaccttcctgcccagcgccgtgctgcagagcatgaaggagaagaacatcaagaaggccctgagccacctggtgaaggccaaccagaacctggtgccccccggcaagaagctgagcgccctgcaggccaaggtgcactacctgaagttcctgagcgacctgagactgtacggcggcagagtgttcaaggccaccctggtgcaggccgagaagagaagcgaggtgaccctgctggtgggccccagatacggcatcagccacgtgatcaacaccaagaccaacctggtggccctgctggccgacttcagccacgtgaacagaatcgagatgttcagcgaggaggagagcctggtgagagtggagctgcacgtgctggacgtgaagcccatcaccctgctgatggagagcagcgacgccatgaacctggcctgcctgaccgccggctactacagactgctggtggacagcagaagaagcatcttcaacatggccaacaagaagaacaccgccacccaggagaccggccccgagaacaagggcaagcacaacctgctgggccccgactggaactgcatcccccagatgaccaccttcatcggcgagggcgagcaggaggcccagatcacctacatcgacagcaagcagaagaccgtggagatcaccgacagcaccatgtgccccaaggagcacagacacctgtacatcgacaacgcctacagcagcgacggcctgaaccagcagctgagccagcccggcgaggccccctgcgaggccgactacagaagcctggcccagagaagcctgctgaccctgagcggccccgagaccctgaagaaggcccaggagagccccagaggcgccaaggtgagcttcatcttcggcgacttcgccctggacgacggcatcagcccccccaccctgggctacgagaccctgctggacgagggccccgagatgctggagaagcagagaaacctgtacatcggcagcgccaacgacatgaagggcctggacctgacccccgaggccgagggcatccagttcgtggagaacagcgtgtacgccaacatcggcgacgtgaagagcttccaggccgccgagggcatcgaggagcccctgctgcacgacatctgctacgccgagaacaccgacgacgccgaggacgaggacgaggtgagctgcgaggaggacctggtggtgggcgagatgaaccagcccgccatcctgaacctgagcggcagcagcgacgacatcatcgacctgaccagcctgcccccccccgagggcgacgacaacgaggacgacttcctgctgagaagcctgaacatggccatcgccgcccccccccccggcttcagagacagcagcgacgaggaggacagccagagccaggccgccagcttccccgaggacaaggagaagggcagcagcctgcagaacgacgagatccccgtgagcctgatcgacgccgtgcccaccagcgccgagggcaagtgcgagaagggcctggacaacgccgtggtgagcaccctgggcgccctggaggccctgagcgtgagcgaggagcagcagaccagcgacaacagcggcgtggccatcctgagagcctacagccccgagagcagcagcgacagcggcaacgagaccaacagcagcgagatgaccgagagcagcgagctggccaccgcccagaagcagagcgagaacctgagcagaatgttcctggccacccacgagggctaccaccccctggccgaggagcagaccgagttccccgccagcaagacccccgccggcggcctgccccccaagagcagccacgccctggccgccagacccgccaccgacctgccccccaaggtggtgcccagcaagcagctgctgcacagcgaccacatggagatggagcccgagaccatggagaccaagagcgtgaccgactacttcagcaagctgcacatgggcagcgtggcctacagctgcaccagcaagagaaagagcaagctggccgacggcgagggcaaggccccccccaacggcaacaccaccggcaagaagcagcagggcaccaagaccgccgagatggaggaggaggccagcggcaagttcggcaccgtgagcagcagagacagccagcacctgagcaccttcaacctggagagaaccgccttcagaaaggacagccagagatggtacgtggccaccgagggcggcatggccgagaagagcggcctggaggccgccaccggcaagaccttccccagagccagcggcctgggcgccagagaggccgagggcaaggaggagggcgcccccgacggcgagaccagcgacggcagcggcctgggccagggcgacagattcctgaccgacgtgacctgcgccagcagcgccaaggacctggacaaccccgaggacgccgacagcagcacctgcgaccaccccagcaagctgcccgaggccgacgagagcgtggccagactgtgcgactaccacctggccaagagaatgagcagcctgcagagcgagggccacttcagcctgcagagcagccagggcagcagcgtggacgccggctgcggcaccggcagcagcggcagcgcctgcgccacccccgtggagagccccctgtgccccagcctgggcaagcacctgatccccgacgccagcggcaagggcgtgaactacatccccagcgaggagagagcccccggcctgcccaaccacggcgccaccttcaaggagctgcacccccagaccgagggcatgtgccccagaatgaccgtgcccgccctgcacaccgccatcaacaccgagcccctgttcggcaccctgagagacggctgccacagactgcccaagatcaaggagaccaccgtgtag

SEQ ID NO: 81547 - DNA, 3942 bp, synthetic construct
  misc_feature 1..3942: note = Description of Artificial Sequence: Synthetic coding sequence
  source 1..3942: mol_type = other DNA
aagagccacagcccccacagaaccaagagcagcggctggcccccccccagcggcacctggggcctgagccaggtgcccccctacggctgggagatgaccgccaacagagacggcagagactacttcatcaaccacatgacccaggccatccccttcgacgaccccagactggagagctgccagatcatcccccccgcccccagaaaggtggagatgagaagagaccccgtgctgggcttcggcttcgtggccggcagcgagaagcccgtggtggtgagaagcgtgacccccggcggccccagcgagggcaagctgatccccggcgaccagatcgtgatgatcaacgacgagcccgtgagcgccgcccccagagagagagtgatcgacctggtgagaagctgcaaggagagcatcctgctgaccgtgatccagccctaccccagccccaagagcgccttcatcagcgccgccaagaaggccagactgaagagcaaccccgtgaaggtgagattcagcgaggaggtgatcatcaacggccaggtgagcgagaccgtgaaggacaacagcctgctgttcatgcccaacgtgctgaaggtgtacctggagaacggccagaccaagagcttcagattcgactgcagcaccagcatcaaggacgtgatcctgaccctgcaggagaagctgagcatcaagggcatcgagcacttcagcctgatgctggagcagagaaccgagggcgccggcaccaagctgctgctgctgcacgagcaggagaccctgacccaggtgacccagagacccagcagccacaagatgagatgcctgttcagaatcagcttcgtgcccaaggaccccatcgacctgctgagaagagaccccgtggccttcgagtacctgtacgtgcagagctgcaacgacgtggtgcaggagagattcggccccgagctgaagtacgacatcgccctgagactggccgccctgcagatgtacatcgccaccgtgaccaccaagcagacccagaagatcagcctgaagtacatcgagaaggagtggggcctggagaccttcctgcccagcgccgtgctgcagagcatgaaggagaagaacatcaagaaggccctgagccacctggtgaaggccaaccagaacctggtgccccccggcaagaagctgagcgccctgcaggccaaggtgcactacctgaagttcctgagcgacctgagactgtacggcggcagagtgttcaaggccaccctggtgcaggccgagaagagaagcgaggtgaccctgctggtgggccccagatacggcatcagccacgtgatcaacaccaagaccaacctggtggccctgctggccgacttcagccacgtgaacagaatcgagatgttcagcgaggaggagagcctggtgagagtggagctgcacgtgctggacgtgaagcccatcaccctgctgatggagagcagcgacgccatgaacctggcctgcctgaccgccggctactacagactgctggtggacagcagaagaagcatcttcaacatggccaacaagaagaacaccgccacccaggagaccggccccgagaacaagggcaagcacaacctgctgggccccgactggaactgcatcccccagatgaccaccttcatcggcgagggcgagcaggaggcccagatcacctacatcgacagcaagcagaagaccgtggagatcaccgacagcaccatgtgccccaaggagcacagacacctgtacatcgacaacgcctacagcagcgacggcctgaaccagcagctgagccagcccggcgaggccccctgcgaggccgactacagaagcctggcccagagaagcctgctgaccctgagcggccccgagaccctgaagaaggcccaggagagccccagaggcgccaaggtgagcttcatcttcggcgacttcgccctggacgacggcatcagcccccccaccctgggctacgagaccctgctggacgagggccccgagatgctggagaagcagagaaacctgtacatcggcagcgccaacgacatgaagggcctggacctgacccccgaggccgagggcatccagttcgtggagaacagcgtgtacgccaacatcggcgacgtgaagagcttccaggccgccgagggcatcgaggagcccctgctgcacgacatctgctacgccgagaacaccgacgacgccgaggacgaggacgaggtgagctgcgaggaggacctggtggtgggcgagatgaaccagcccgccatcctgaacctgagcggcagcagcgacgacatcatcgacctgaccagcctgcccccccccgagggcgacgacaacgaggacgacttcctgctgagaagcctgaacatggccatcgccgcccccccccccggcttcagagacagcagcgacgaggaggacagccagagccaggccgccagcttccccgaggacaaggagaagggcagcagcctgcagaacgacgagatccccgtgagcctgatcgacgccgtgcccaccagcgccgagggcaagtgcgagaagggcctggacaacgccgtggtgagcaccctgggcgccctggaggccctgagcgtgagcgaggagcagcagaccagcgacaacagcggcgtggccatcctgagagcctacagccccgagagcagcagcgacagcggcaacgagaccaacagcagcgagatgaccgagagcagcgagctggccaccgcccagaagcagagcgagaacctgagcagaatgttcctggccacccacgagggctaccaccccctggccgaggagcagaccgagttccccgccagcaagacccccgccggcggcctgccccccaagagcagccacgccctggccgccagacccgccaccgacctgccccccaaggtggtgcccagcaagcagctgctgcacagcgaccacatggagatggagcccgagaccatggagaccaagagcgtgaccgactacttcagcaagctgcacatgggcagcgtggcctacagctgcaccagcaagagaaagagcaagctggccgacggcgagggcaaggccccccccaacggcaacaccaccggcaagaagcagcagggcaccaagaccgccgagatggaggaggaggccagcggcaagttcggcaccgtgagcagcagagacagccagcacctgagcaccttcaacctggagagaaccgccttcagaaaggacagccagagatggtacgtggccaccgagggcggcatggccgagaagagcggcctggaggccgccaccggcaagaccttccccagagccagcggcctgggcgccagagaggccgagggcaaggaggagggcgcccccgacggcgagaccagcgacggcagcggcctgggccagggcgacagattcctgaccgacgtgacctgcgccagcagcgccaaggacctggacaaccccgaggacgccgacagcagcacctgcgaccaccccagcaagctgcccgaggccgacgagagcgtggccagactgtgcgactaccacctggccaagagaatgagcagcctgcagagcgagggccacttcagcctgcagagcagccagggcagcagcgtggacgccggctgcggcaccggcagcagcggcagcgcctgcgccacccccgtggagagccccctgtgccccagcctgggcaagcacctgatccccgacgccagcggcaagggcgtgaactacatccccagcgaggagagagcccccggcctgcccaaccacggcgccaccttcaaggagctgcacccccagaccgagggcatgtgccccagaatgaccgtgcccgccctgcacaccgccatcaacaccgagcccctgttcggcaccctgagagacggctgccacagactgcccaagatcaaggagaccaccggctag

SEQ ID NO: 81548 - DNA, 1794 bp, synthetic construct
  misc_feature 1..1794: note = Description of Artificial Sequence: Synthetic coding sequence
  source 1..1794: mol_type = other DNA
atgttcgccagctgccactgcgtgcccagaggcagaagaaccatgaagatgatccacttcagaagcagcagcgtgaagagcctgagccaggagatgagatgcaccatcagactgctggacgacagcgagatcagctgccacatccagagagagaccaagggccagttcctgatcgaccacatctgcaactactacagcctgctggagaaggactacttcggcatcagatacgtggaccccgagaagcagagacactggctggagcccaacaagagcatcttcaagcagatgaagacccaccccccctacaccatgtgcttcagagtgaagttctacccccacgagcccctgaagatcaaggaggagctgaccagatacctgctgtacctgcagatcaagagagacatcttccacggcagactgctgtgcagcttcagcgacgccgcctacctgggcgcctgcatcgtgcaggccgagctgggcgactacgaccccgacgagcaccccgagaactacatcagcgagttcgagatcttccccaagcagagccagaagctggagagaaagatcgtggagatccacaagaacgagctgagaggccagagcccccccgtggccgagttcaacctgctgctgaaggcccacaccctggagacctacggcgtggacccccacccctgcaaggacagcaccggcaccaccaccttcctgggcttcaccgccgccggcttcgtggtgttccagggcaacaagagaatccacctgatcaagtggcccgacgtgtgcaagctgaagttcgagggcaagaccttctacgtgatcggcacccagaaggagaagaaggccatgctggccttccacaccagcacccccgccgcctgcaagcacctgtggaagtgcggcgtggagaaccaggccttctacaagtacgccaagagcagccagatcaagaccgtgagcagcagcaagatcttcttcaagggcagcagattcagatacagcggcaaggtggccaaggaggtggtggaggccagcagcaagatccagagagagccccccgaggtgcacagagccaacatcacccagagcagaagcagccacagcctgaacaagcagctgatcatcaacatggagcccctgcagcccctgctgcccagccccagcgagcaggaggaggagctgcccctgggcgagggcgtgcccctgcccaaggaggagaacatcagcgcccccctgatcagcagcagccccgtgaaggccgccagagagtacgaggacccccccagcgaggaggaggacaagatcaaggaggagcccctgaccatcagcgagctggtgtacaaccccagcgccagcctgctgcccacccccgtggacgacgacgagatcgacatgctgttcgactgccccagcagactggagctggagagagaggacaccgacagcttcgaggacctggaggccgacgagaacgccttcctgatcgccgaggaggaggagctgaaggaggccagaagagccctgagctggagctacgacatcctgaccggccacatcagagtgaaccccctggtgaagagcttcagcagactgctggtggtgggcctgggcctgctgctgttcgtgttccccctgctgctgctgctgctggagagcggcatcgacctgagcttcctgtgcgagatcagacagacccccgagttcgagcagttccactacgagtactactgccccctgaaggagtgggtggccggcaaggtgcacctgatcctgtacatgctgggctgcagctag

SEQ ID NO: 81549 - DNA, 642 bp, synthetic construct
  misc_feature 1..642: note = Description of Artificial Sequence: Synthetic coding sequence
  source 1..642: mol_type = other DNA
atgcaggccgaggagaccaagggcatcggcatcaccagcatggccaagtgcctggtgaagatccagaccagaagaagcctgcagctgcacatggtgaaccactgcaacagcaacgtgttcgtgagactgctgagactgggcagcaaggtgaccgccagaaacaccggcgtgcccctgcccaaggaggagaacatcagcgcccccctgatcagcagcagccccgtgaaggccgccagagagtacgaggacccccccagcgaggaggaggacaagatcaaggaggagcccctgaccatcagcgagctggtgtacaaccccagcgccagcctgctgcccacccccgtggacgacgacgagatcgacatgctgttcgactgccccagcagactggagctggagagagaggacaccgacagcttcgaggacctggaggccgacgagaacgccttcctgatcgccgaggaggaggagctgaaggaggccagaagagccctgagctggagctacgacatcctgaccggccacatcagagtgaaccccctggtgaagagcttcagcagactgctggtggtgggcctgggcctgctgctgttcgtgttccccctgctgctgctgctgctggagagcgtgagcatgcagtag

SEQ ID NO: 81550 - DNA, 804 bp, synthetic construct
  misc_feature 1..804: note = Description of Artificial Sequence: Synthetic coding sequence
  source 1..804: mol_type = other DNA
atgtgcttcagagtgaagttctacccccacgagcccctgaagatcaaggaggagctgaccagatacctgctgtacctgcagatcaagagagacatcttccacggcagactgctgtgcagcttcagcgacgccgcctacctgggcgcctgcatcgtgcaggccgagctgggcgactacgaccccgacgagcaccccgagaactacatcagcgagttcgagatcttccccaagcagagccagaagctggagagaaagatcgtggagatccacaagaacgagctgagaggccagagcccccccgtggccgagttcaacctgctgctgaaggcccacaccctggagacctacggcgtggacccccacccctgcaaggacagcaccggcaccaccaccttcctgggcttcaccgccgccggcttcgtggtgttccagggcaacaagagaatccacctgatcaagtggcccgacgtgtgcaagctgaagttcgagggcaagaccttctacgtgatcggcacccagaaggagaagaaggccatgctggccttccacaccagcacccccgccgcctgcaagcacctgtggaagtgcggcgtggagaaccaggccttctacaagtacgccaagagcagccagatcaagaccgtgagcagcagcaagatcttcttcaagggcagcagattcagatacagcggcaaggtggccaaggaggtggtggaggccagcagcaagatccagagagagccccccgaggtgcacagatgcgtgcagaagaagatctgcagctgcttcggcgtgacctggtag

SEQ ID NO: 81551 - DNA, 1089 bp, synthetic construct
  misc_feature 1..1089: note = Description of Artificial Sequence: Synthetic coding sequence
  source 1..1089: mol_type = other DNA
atggtgttcagaagaggccagagcccccccgtggccgagttcaacctgctgctgaaggcccacaccctggagacctacggcgtggacccccacccctgcaaggacagcaccggcaccaccaccttcctgggcttcaccgccgccggcttcgtggtgttccagggcaacaagagaatccacctgatcaagtggcccgacgtgtgcaagctgaagttcgagggcaagaccttctacgtgatcggcacccagaaggagaagaaggccatgctggccttccacaccagcacccccgccgcctgcaagcacctgtggaagtgcggcgtggagaaccaggccttctacaagtacgccaagagcagccagatcaagaccgtgagcagcagcaagatcttcttcaagggcagcagattcagatacagcggcaaggtggccaaggaggtggtggaggccagcagcaagatccagagagagccccccgaggtgcacagagccaacatcacccagagcagaagcagccacagcctgaacaagcagctgatcatcaacatggagcccctgcagcccctgctgcccagccccagcgagcaggaggaggagctgcccctgggcgagggcgtgcccctgcccaaggaggagaacatcagcgcccccctgatcagcagcagccccgtgaaggccgccagagagtacgaggacccccccagcgaggaggaggacaagatcaaggaggagcccctgaccatcagcgagctggtgtacaaccccagcgccagcctgctgcccacccccgtggacgacgacgagatcgacatgctgttcgactgccccagcagactggagctggagagagaggacaccgacagcttcgaggacctggaggccgacgagaacgccttcctgatcgccgaggaggaggagctgaaggaggccagaagagccctgagctggagctacgacatcctgaccggccacatcagagtgaaccccctggtgaagagcttcagcagactgctggtggtgggcctgggcctgctgctgttcgtgttccccctgctgctgctgctgctggagagcgtgagcatgcagtag

SEQ ID NO: 81552 - DNA, 1671 bp, synthetic construct
  misc_feature 1..1671: note = Description of Artificial Sequence: Synthetic coding sequence
  source 1..1671: mol_type = other DNA
atgttcgccagctgccactgcgtgcccagaggcagaagaaccatgaagatgatccacttcagaagcagcagcgtgaagagcctgagccaggagatgagatgcaccatcagactgctggacgacagcgagatcagctgccacatccagagagagaccaagggccagttcctgatcgaccacatctgcaactactacagcctgctggagaaggactacttcggcatcagatacgtggaccccgagaagcagagacactggctggagcccaacaagagcatcttcaagcagatgaagacccaccccccctacaccatgtgcttcagagtgaagttctacccccacgagcccctgaagatcaaggaggagctgaccagatacctgctgtacctgcagatcaagagagacatcttccacggcagactgctgtgcagcttcagcgacgccgcctacctgggcgcctgcatcgtgcaggccgagctgggcgactacgaccccgacgagcaccccgagaactacatcagcgagttcgagatcttccccaagcagagccagaagctggagagaaagatcgtggagatccacaagaacgagctgagaggccagagcccccccgtggccgagttcaacctgctgctgaaggcccacaccctggagacctacggcgtggacccccacccctgcaaggacagcaccggcaccaccaccttcctgggcttcaccgccgccggcttcgtggtgttccagggcaacaagagaatccacctgatcaagtggcccgacgtgtgcaagctgaagttcgagggcaagaccttctacgtgatcggcacccagaaggagaagaaggccatgctggccttccacaccagcacccccgccgcctgcaagcacctgtggaagtgcggcgtggagaaccaggccttctacaagtacgccaagagcagccagatcaagaccgtgagcagcagcaagatcttcttcaagggcagcagattcagatacagcggcaaggtggccaaggaggtggtggaggccagcagcaagatccagagagagccccccgaggtgcacagagccaacatcacccagagcagaagcagccacagcctgaacaagcagctgatcatcaacatggagcccctgcagcccctgctgcccagccccagcgagcaggaggaggagctgcccctgggcgagggcgtgcccctgcccaaggaggagaacatcagcgcccccctgatcagcagcagccccgtgaaggccgccagagagtacgaggacccccccagcgaggaggaggacaagatcaaggaggagcccctgaccatcagcgagctggtgtacaaccccagcgccagcctgctgcccacccccgtggacgacgacgagatcgacatgctgttcgactgccccagcagactggagctggagagagaggacaccgacagcttcgaggacctggaggccgacgagaacgccttcctgatcgccgaggaggaggagctgaaggaggccagaagagccctgagctggagctacgacatcctgaccggccacatcagagtgaaccccctggtgaagagcttcagcagactgctggtggtgggcctgggcctgctgctgttcgtgttccccctgctgctgctgctgctggagagcgtgagcatgcagtag

SEQ ID NO: 81553 - DNA, 423 bp, synthetic construct
  misc_feature 1..423: note = Description of Artificial Sequence: Synthetic coding sequence
  source 1..423: mol_type = other DNA
ggcaccaccaccttcctgggcttcaccgccgccggcttcgtggtgttccagggcaacaagagaatccacctgatcaagtggcccgacgtgtgcaagctgaagttcgagggcaagaccttctacgtgatcggcacccagaaggagaagaaggccatgctggccttccacaccagcacccccgccgcctgcaagcacctgtggaagtgcggcgtggagaaccaggccttctacaagtacgccaagagcagccagatcaagaccgtgagcagcagcaagatcttcttcaagggcagcagattcagatacagcggcaaggtggccaaggaggtggtggaggccagcagcaagatccagagagagccccccgaggtgcacagatgcgtgcagaagaagatctgcagctgcttcggcgtgacctggtag

SEQ ID NO: 81554 - DNA, 2145 bp, synthetic construct
  misc_feature 1..2145: note = Description of Artificial Sequence: Synthetic coding sequence
  source 1..2145: mol_type = other DNA
atgctgcacctgaaggtgcagttcctggacgacagccagaagatcttcgtggtggaccagaagagcagcggcaaggccctgttcaacctgagctgcagccacctgaacctggccgagaaggagtacttcggcctggagttctgcagccacagcggcaacaacgtgtggctggagctgctgaagcccatcaccaagcaggtgaagaaccccaaggagatcgtgttcaagttcatggtgaagttcttccccgtggaccccggccacctgagagaggagctgaccagatacctgttcaccctgcagatcaagaaggacctggccctgggcagactgccctgcagcgacaactgcaccgccctgatggtgagccacatcctgcagagcgagctgggcgacttccacgaggagaccgacagaaagcacctggcccagaccagatacctgcccaaccaggactgcctggagggcaagatcatgcacttccaccagaagcacatcggcagaagccccgccgagagcgacatcctgctgctggacatcgccagaaagctggacatgtacggcatcagaccccaccccgccagcgacggcgagggcatgcagatccacctggccgtggcccacatgggcgtgctggtgctgagaggcaacaccaagatcaacaccttcaactgggccaagatcagaaagctgagcttcaagagaaagcacttcctgatcaagctgcacgccaacatcctggtgctgtgcaaggacaccctggagttcaccatggccagcagagacgcctgcaaggccttctggaagacctgcgtggagtaccacgccttcttcagactgagcgaggagcccaagagcaagcccaagaccctgctgtgcagcaagggcagcagcttcagatacagcggcagaacccagagacagctgctggagtacggcagaaagggcagactgaagagcctgcccttcgagagaaagcactaccccagccagtaccacgagagacagtgcagaagcagccccgacctgctgagcgacgtgagcaagcaggtggaggacctgagactggcctacggcggcggctactaccagaacgtgaacggcgtgcacgccagcgagcccgtgctggagagcagaagaagaaacagcgccctggaggtgaccttcgccaccgagctggagcacagcaagcccgaggccgaccccaccctgctgcaccagagccagagcagcagcagcttccccttcatctacatggaccccgtgttcaacaccgagcccaaccccaaccccgaccccagagacatcttcagcgagagaagcagcctgagcagcttccagaccagctgcaagttcagcggcaaccacatgagcatctacagcggcctgaccagcaaggtgagacccgccaagcagctgacctacaccgacgtgccctacatcccctgcaccggccagcaggtgggcatcatgcccccccaggtgttcttctacgtggacaagcccccccaggtgcccagatggagccccatcagagccgaggagagaaccagcccccacagctacgtggagcccaccgccatgaagcccgccgagagaagccccagaaacatcagaatgaagagcttccagcaggacctgcaggtgctgcaggaggccatcgccagaaccagcggcagaagcaacatcaacgtgggcctggaggaggaggaccccaacctggaggacgccttcgtgtgcaacatccaggagcagacccccaagagaagccagagccagagcgacatgaagaccatcagattccccttcggcagcgagttcagacccctgggcccctgccccgccctgagccacaaggccgacctgttcaccgacatgttcgccgagcaggagctgcccgccgtgctgatggaccagagcaccgccgagagatacgtggccagcgagagcagcgacagcgagagcgagatcctgaagcccgactactacgccctgtacggcaaggagatcagaagccccatggccagaatcagactgagcagcggcagcctgcagctggacgaggaggacgaggacgcctacttcaacacccccaccgccgaggacagaaccagcctgaagccctgcaactacttcctggcctag

SEQ ID NO: 81555 - DNA, 1785 bp, synthetic construct
  misc_feature 1..1785: note = Description of Artificial Sequence: Synthetic coding sequence
  source 1..1785: mol_type = other DNA
atggtgagccacatcctgcagagcgagctgggcgacttccacgaggagaccgacagaaagcacctggcccagaccagatacctgcccaaccaggactgcctggagggcaagatcatgcacttccaccagaagcacatcggcagaagccccgccgagagcgacatcctgctgctggacatcgccagaaagctggacatgtacggcatcagaccccaccccgccagcgacggcgagggcatgcagatccacctggccgtggcccacatgggcgtgctggtgctgagaggcaacaccaagatcaacaccttcaactgggccaagatcagaaagctgagcttcaagagaaagcacttcctgatcaagctgcacgccaacatcctggtgctgtgcaaggacaccctggagttcaccatggccagcagagacgcctgcaaggccttctggaagacctgcgtggagtaccacgccttcttcagactgagcgaggagcccaagagcaagcccaagaccctgctgtgcagcaagggcagcagcttcagatacagcggcagaacccagagacagctgctggagtacggcagaaagggcagactgaagagcctgcccttcgagagaaagcactaccccagccagtaccacgagagacagtgcagaagcagccccgacctgctgagcgacgtgagcaagcaggtggaggacctgagactggcctacggcggcggctactaccagaacgtgaacggcgtgcacgccagcgagcccgtgctggagagcagaagaagaaacagcgccctggaggtgaccttcgccaccgagctggagcacagcaagcccgaggccgaccccaccctgctgcaccagagccagagcagcagcagcttccccttcatctacatggaccccgtgttcaacaccgagcccaaccccaaccccgaccccagagacatcttcagcgagagaagcagcctgagcagcttccagaccagctgcaagttcagcggcaaccacatgagcatctacagcggcctgaccagcaaggtgagacccgccaagcagctgacctacaccgacgtgccctacatcccctgcaccggccagcaggtgggcatcatgcccccccaggtgttcttctacgtggacaagcccccccaggtgcccagatggagccccatcagagccgaggagagaaccagcccccacagctacgtggagcccaccgccatgaagcccgccgagagaagccccagaaacatcagaatgaagagcttccagcaggacctgcaggtgctgcaggaggccatcgccagaaccagcggcagaagcaacatcaacgtgggcctggaggaggaggaccccaacctggaggacgccttcgtgtgcaacatccaggagcagacccccaagagaagccagagccagagcgacatgaagaccatcagattccccttcggcagcgagttcagacccctgggcccctgccccgccctgagccacaaggccgacctgttcaccgacatgttcgccgagcaggagctgcccgccgtgctgatggaccagagcaccgccgagagatacgtggccagcgagagcagcgacagcgagagcgagatcctgaagcccgactactacgccctgtacggcaaggagatcagaagccccatggccagaatcagactgagcagcggcagcctgcagctggacgaggaggacgaggacgcctacttcaacacccccaccgccgaggacagaaccagcctgaagccctgcaactacttcctggcctag

SEQ ID NO: 81556 - DNA, 2043 bp, synthetic construct
  misc_feature 1..2043: note = Description of Artificial Sequence: Synthetic coding sequence
  source 1..2043: mol_type = other DNA
atggccctggacggcatcagaatgcccgacggctgctacgccgacggcacctgggagctgagcgtgcacgtgaccgacctgaacagagacgtgaccctgagagtgaccggcgaggtgcacatcggcggcgtgatgctgaagctggtggagaagctggacgtgaagaaggactggagcgaccacgccctgtggtgggagaagaagagaacctggctgctgaagacccactggaccctggacaagtacggcatccaggccgacgccaagctgcagttcaccccccagcacaagctgctgagactgcagctgcccaacatgaagtacgtgaaggtgaaggtgaacttcagcgacagagtgttcaaggccgtgagcgacatctgcaagaccttcaacatcagacaccccgaggagctgagcctgctgaagaagcccagagaccccaccaagaagaagaagaagaagctggacgaccagagcgaggacgaggccctggagctggagggccccctgatcacccccggcagcggcagcatctacagcagccccggcctgtacagcaagaccatgacccccacctacgacgcccacgacggcagccccctgagccccaccagcgcctggttcggcgacagcgccctgagcgagggcaaccccggcatcctggccgtgagccagcccatcaccagccccgagatcctggccaagatgttcaagccccaggccctgctggacaaggccaagatcaaccagggctggctggacagcagcagaagcctgatggagcaggacgtgaaggagaacgaggccctgctgctgagattcaagtactacagcttcttcgacctgaaccccaagtacgacgccatcagaatcaaccagctgtacgagcaggccaagtgggccatcctgctggaggagatcgagtgcaccgaggaggagatgatgatgttcgccgccctgcagtaccacatcaacaagctgagcatcatgaccagcgagaaccacctgaacaacagcgacaaggaggtggacgaggtggacgccgccctgagcgacctggagatcaccctggagggcggcaagaccagcaccatcctgggcgacatcaccagcatccccgagctggccgactacatcaaggtgttcaagcccaagaagctgaccctgaagggctacaagcagtactggtgcaccttcaaggacaccagcatcagctgctacaagagcaaggaggagagcagcggcacccccgcccaccagatgaacctgagaggctgcgaggtgacccccgacgtgaacatcagcggccagaagttcaacatcaagctgctgatccccgtggccgagggcatgaacgagatctggctgagatgcgacaacgagaagcagtacgcccactggatggccgcctgcagactggccagcaagggcaagaccatggccgacagcagctacaacctggaggtgcagaacatcctgagcttcctgaagatgcagcacctgaaccccgacccccagctgatccccgagcagatcaccaccgacatcacccccgagtgcctggtgagccccagatacctgaagaagtacaagaacaagcagatcaccgccagaatcctggaggcccaccagaacgtggcccagatgagcctgatcgaggccaagatgagattcatccaggcctggcagagcctgcccgagttcggcatcacccacttcatcgccagattccagggcggcaagaaggaggagctgatcggcatcgcctacaacagactgatcagaatggacgccagcaccggcgacgccatcaagacctggagattcagcaacatgaagcagtggaacgtgaactgggagatcaagatggtgaccgtggagttcgccgacgaggtgagactgagcttcatctgcaccgaggtggactgcaaggtggtgcacgagttcatcggcggctacatcttcctgagcaccagagccaaggaccagaacgagagcctggacgaggagatgttctacaagctgaccagcggctgggtgtag

SEQ ID NO: 81557 - DNA, 2064 bp, synthetic construct
  misc_feature 1..2064: note = Description of Artificial Sequence: Synthetic coding sequence
  source 1..2064: mol_type = other DNA
atggccctggacggcatcagaatgcccgacggctgctacgccgacggcacctgggagctgagcgtgcacgtgaccgacctgaacagagacgtgaccctgagagtgaccggcgaggtgcacatcggcggcgtgatgctgaagctggtggagaagctggacgtgaagaaggactggagcgaccacgccctgtggtgggagaagaagagaacctggctgctgaagacccactggaccctggacaagtacggcatccaggccgacgccaagctgcagttcaccccccagcacaagctgctgagactgcagctgcccaacatgaagtacgtgaaggtgaaggtgaacttcagcgacagagtgttcaaggccgtgagcgacatctgcaagaccttcaacatcagacaccccgaggagctgagcctgctgaagaagcccagagaccccaccaagaagaagaagaagaagctggacgaccagagcgaggacgaggccctggagctggagggccccctgatcacccccggcagcggcagcatctacagcagccccggcctgtacagcaagaccatgacccccacctacgacgcccacgacggcagccccctgagccccaccagcgcctggttcggcgacagcgccctgagcgagggcaaccccggcatcctggccgtgagccagcccatcaccagccccgagatcctggccaagatgttcaagccccaggccctgctggacaaggccaagatcaaccagggctggctggacagcagcagaagcctgatggagcaggacgtgaaggagaacgaggccctgctgctgagattcaagtactacagcttcttcgacctgaaccccaagtacgacgccatcagaatcaaccagctgtacgagcaggccaagtgggccatcctgctggaggagatcgagtgcaccgaggaggagatgatgatgttcgccgccctgcagtaccacatcaacaagctgagcatcatgaccagcgagaaccacctgaacaacagcgacaaggaggtggacgaggtggacgccgccctgagcgacctggagatcaccctggagggcggcaagaccagcaccatcctgggcgacatcaccagcatccccgagctggccgactacatcaaggtgttcaagcccaagaagctgaccctgaagggctacaagcagtactggtgcaccttcaaggacaccagcatcagctgctacaagagcaaggaggagagcagcggcacccccgcccaccagatgaacctgagaggctgcgaggtgacccccgacgtgaacatcagcggccagaagttcaacatcaagctgctgatccccgtggccgagggcatgaacgagatctggctgagatgcgacaacgagaagcagtacgcccactggatggccgcctgcagactggccagcaagggcaagaccatggccgacagcagctacaacctggaggtgcagaacatcctgagcttcctgaagatgcagcacctgaaccccgacccccagctgatccccgagcagatcaccaccgacatcacccccgagtgcctggtgagccccagatacctgaagaagtacaagaacaagcagcccggctacatcagagacctgatcaccgccagaatcctggaggcccaccagaacgtggcccagatgagcctgatcgaggccaagatgagattcatccaggcctggcagagcctgcccgagttcggcatcacccacttcatcgccagattccagggcggcaagaaggaggagctgatcggcatcgcctacaacagactgatcagaatggacgccagcaccggcgacgccatcaagacctggagattcagcaacatgaagcagtggaacgtgaactgggagatcaagatggtgaccgtggagttcgccgacgaggtgagactgagcttcatctgcaccgaggtggactgcaaggtggtgcacgagttcatcggcggctacatcttcctgagcaccagagccaaggaccagaacgagagcctggacgaggagatgttctacaagctgaccagcggctgggtgtag

SEQ ID NO: 81558 - DNA, 2043 bp, synthetic construct; identical to SEQ ID NO: 81556
  misc_feature 1..2043: note = Description of Artificial Sequence: Synthetic coding sequence
  source 1..2043: mol_type = other DNA

SEQ ID NO: 81559 - DNA, 1902 bp, synthetic construct
  misc_feature 1..1902: note = Description of Artificial Sequence: Synthetic coding sequence
  source 1..1902: mol_type = other DNA
atggccctggacggcatcagaatgcccgacggctgctacgccgacggcacctgggagctgagcgtgcacgtgaccgacctgaacagagacgtgaccctgagagtgaccggcgaggtgcacatcggcggcgtgatgctgaagctggtggagaagctggacgtgaagaaggactggagcgaccacgccctgtggtgggagaagaagagaacctggctgctgaagacccactggaccctggacaagtacggcatccaggccgacgccaagctgcagttcaccccccagcacaagctgctgagactgcagctgcccaacatgaagtacgtgaaggtgaaggtgaacttcagcgacagagtgttcaaggccgtgagcgacatctgcaagaccttcaacatcagacaccccgaggagctgagcctgctgaagaagcccagagaccccaccaagaagaagaagaagaagctggacgaccagagcgaggacgaggccctggagctggagggccccctgatcacccccggcagcggcagcatctacagcagccccggcctgtacagcaagaccatgacccccacctacgacgcccacgacggcagccccctgagccccaccagcgcctggttcggcgacagcgccctgagcgagggcaaccccggcatcctggccgtgagccagcccatcaccagccccgagatcctggccaagatgttcaagccccaggccctgctggacaaggccaagatcaaccagggctggctggacagcagcagaagcctgatggagcaggacgtgaaggagaacgaggccctgctgctgagattcaagtactacagcttcttcgacctgaaccccaagtacgacgccatcagaatcaaccagctgtacgagcaggccaagtgggccatcctgctggaggagatcgagtgcaccgaggaggagatgatgatgttcgccgccctgcagtaccacatcaacaagctgagcatcatgaccagcgagaaccacctgaacaacagcgacaaggaggtggacgaggtggacgccgccctgagcgacctggagatcaccctggagggcggcaagaccagcaccatcctgggcgacatcaccagcatccccgagctggccgactacatcaaggtgttcaagcccaagaagctgaccctgaagggctacaagcagtactggtgcaccttcaaggacaccagcatcagctgctacaagagcaaggaggagagcagcggcacccccgcccaccagatgaacctgagaggctgcgaggtgacccccgacgtgaacatcagcggccagaagttcaacatcaagctgctgatccccgtggccgagggcatgaacgagatctggctgagatgcgacaacgagaagcagtacgcccactggatggccgcctgcagactggccagcaagggcaagaccatggccgacagcagctacaacctggaggtgcagaacatcctgagcttcctgaagatgcagcacctgaaccccgacccccagctgatccccgagcagatcaccaccgacatcacccccgagtgcctggtgagccccagatacctgaagaagtacaagaacaagcagcccggctacatcagagacctgatcaccgccagaatcctggaggcccaccagaacgtggcccagatgagcctgatcgaggccaagatgagattcatccaggcctggcagagcctgcccgagttcggcatcacccacttcatcgccagattccagggcggcaagaaggaggagctgatcggcatcgcctacaacagactgatcagaatggacgccagcaccggcgacgccatcaagacctggagattcagcaacatgaagcagtggaacgtgaactgggagatcaagatggtgaacagctag

SEQ ID NO: 81560 - DNA, 2064 bp, synthetic construct; identical to SEQ ID NO: 81557
  misc_feature 1..2064: note = Description of Artificial Sequence: Synthetic coding sequence
  source 1..2064: mol_type = other DNA

SEQ ID NO: 81561 - DNA, 462 bp, synthetic construct
  misc_feature 1..462: note = Description of Artificial Sequence: Synthetic coding sequence
  source 1..462: mol_type = other DNA
atggccctggacggcatcagaatgcccgacggctgctacgccgacggcacctgggagctgagcgtgcacgtgaccgacctgaacagagacgtgaccctgagagtgaccggcgaggtgcacatcggcggcgtgatgctgaagctggtggagaagctggacgtgaagaaggactggagcgaccacgccctgtggtgggagaagaagagaacctggctgctgaagacccactggaccctggacaagtacggcatccaggccgacgccaagctgcagttcaccccccagcacaagctgctgagactgcagctgcccaacatgaagtacgtgaaggtgaaggtgaacttcagcgacagagtgttcaaggccgtgagcgacatctgcaagaccttcaacatcagacaccccgaggagctgagcctgctgaagaagcccagagaccccaccaagaagaagaagaagtag

SEQ ID NO: 81562 - DNA, 2004 bp, synthetic construct
  misc_feature 1..2004: note = Description of Artificial Sequence: Synthetic coding sequence
  source 1..2004: mol_type = other DNA
atggccggcatgaagaccgccagcggcgactacatcgacagcagctgggagctgagagtgttcgtgggcgaggaggaccccgaggccgagagcgtgaccctgagagtgaccggcgagagccacatcggcggcgtgctgctgaagatcgtggagcagatcaacagaaagcaggactggagcgaccacgccatctggtgggagcagaagagacagtggctgctgcagacccactggaccctggacaagtacggcatcctggccgacgccagactgttcttcggcccccagcacagacccgtgatcctgagactgcccaacagaagagccctgagactgagagccagcttcagccagcccctgttccaggccgtggccgccatctgcagactgctgagcatcagacaccccgaggagctgagcctgctgagagcccccgagaagaaggagaagaagaagaaggagaaggagcccgaggaggagctgtacgacctgagcaaggtggtgctggccggcggcgtggcccccgccctgttcagaggcatgcccgcccacttcagcgacagcgcccagaccgaggcctgctaccacatgctgagcagaccccagcccccccccgaccccctgctgctgcagagactgcccagacccagcagcctgagcgacaagacccagctgcacagcagatggctggacagcagcagatgcctgatgcagcagggcatcaaggccggcgacgccctgtggctgagattcaagtactacagcttcttcgacctggaccccaagaccgaccccgtgagactgacccagctgtacgagcaggccagatgggacctgctgctggaggagatcgactgcaccgaggaggagatgatggtgttcgccgccctgcagtaccacatcaacaagctgagccagagcggcgaggtgggcgagcccgccggcaccgaccccggcctggacgacctggacgtggccctgagcaacctggaggtgaagctggagggcagcgcccccaccgacgtgctggacagcctgaccaccatccccgagctgaaggaccacctgagaatcttcagaatccccagaagacccagaaagctgaccctgaagggctacagacagcactgggtggtgttcaaggagaccaccctgagctactacaagagccaggacgaggcccccggcgaccccatccagcagctgaacctgaagggctgcgaggtggtgcccgacgtgaacgtgagcggccagaagttctgcatcaagctgctggtgcccagccccgagggcatgagcgagatctacctgagatgccaggacgagcagcagtacgccagatggatggccggctgcagactggccagcaagggcagaaccatggccgacagcagctacaccagcgaggtgcaggccatcctggccttcctgagcctgcagagaaccggcagcggcggccccggcaaccacccccacggccccgacgccagcgccgagggcctgaacccctacggcctggtggcccccagattccagagaaagttcaaggccaagcagctgacccccagaatcctggaggcccaccagaacgtggcccagctgagcctggccgaggcccagctgagattcatccaggcctggcagagcctgcccgacttcggcatcagctacgtgatggtgagattcaagggcagcagaaaggacgagatcctgggcatcgccaacaacagactgatcagaatcgacctggccgtgggcgacgtggtgaagacctggagattcagcaacatgagacagtggaacgtgaactgggacatcagacaggtggccatcgagttcgacgagcacatcaacgtggccttcagctgcgtgagcgccagctgcagaatcgtgcacgagtacatcggcggctacatcttcctgagcaccagagagagagccagaggcgaggagctggacgaggacctgttcctgcagctgaccggcggccacgaggccttctag

SEQ ID NO: 81563 - DNA, 1992 bp, synthetic construct
  misc_feature 1..1992: note = Description of Artificial Sequence: Synthetic coding sequence
  source 1..1992: mol_type = other DNA
atggccggcatgaagaccgccagcggcgactacatcgacagcagctgggagctgagagtgttcgtgggcgaggaggaccccgaggccgagagcgtgaccctgagagtgaccggcgagagccacatcggcggcgtgctgctgaagatcgtggagcagatcaacagaaagcaggactggagcgaccacgccatctggtgggagcagaagagacagtggctgctgcagacccactggaccctggacaagtacggcatcctggccgacgccagactgttcttcggcccccagcacagacccgtgatcctgagactgcccaacagaagagccctgagactgagagccagcttcagccagcccctgttccaggccgtggccgccatctgcagactgctgagcatcagacaccccgaggagctgagcctgctgagagcccccgagaagaaggagaagaagaagaaggagaaggagcccgaggaggagctgtacgacctgagcaaggtggtgctggccggcggcgtggcccccgccctgttcagaggcatgcccgcccacttcagcgacagcgcccagaccgaggcctgctaccacatgctgagcagaccccagcccccccccgaccccctgctgctgcagagactgcccagacccagcagcctgagcgacaagacccagctgcacagcagatggctggacagcagcagatgcctgatgcagcagggcatcaaggccggcgacgccctgtggctgagattcaagtactacagcttcttcgacctggaccccaagaccgaccccgtgagactgacccagctgtacgagcaggccagatgggacctgctgctggaggagatcgactgcaccgaggaggagatgatggtgttcgccgccctgcagtaccacatcaacaagctgagccagagcggcgaggtgggcgagcccgccggcaccgaccccggcctggacgacctggacgtggccctgagcaacctggaggtgaagctggagggcagcgcccccaccgacgtgctggacagcctgaccaccatccccgagctgaaggaccacctgagaatcttcagacccagaaagctgaccctgaagggctacagacagcactgggtggtgttcaaggagaccaccctgagctactacaagagccaggacgaggcccccggcgaccccatccagcagctgaacctgaagggctgcgaggtggtgcccgacgtgaacgtgagcggccagaagttctgcatcaagctgctggtgcccagccccgagggcatgagcgagatctacctgagatgccaggacgagcagcagtacgccagatggatggccggctgcagactggccagcaagggcagaaccatggccgacagcagctacaccagcgaggtgcaggccatcctggccttcctgagcctgcagagaaccggcagcggcggccccggcaaccacccccacggccccgacgccagcgccgagggcctgaacccctacggcctggtggcccccagattccagagaaagttcaaggccaagcagctgacccccagaatcctggaggcccaccagaacgtggcccagctgagcctggccgaggcccagctgagattcatccaggcctggcagagcctgcccgacttcggcatcagctacgtgatggtgagattcaagggcagcagaaaggacgagatcctgggcatcgccaacaacagactgatcagaatcgacctggccgtgggcgacgtggtgaagacctggagattcagcaacatgagacagtggaacgtgaactgggacatcagacaggtggccatcgagttcgacgagcacatcaacgtggccttcagctgcgtgagcgccagctgcagaatcgtgcacgagtacatcggcggctacatcttcctgagcaccagagagagagccagaggcgaggagctggacgaggacctgttcctgcagctgaccggcggccacgaggccttctag

SEQ ID NO: 81564 - DNA, 861 bp, synthetic construct
  misc_feature 1..861: note = Description of Artificial Sequence: Synthetic coding sequence
  source 1..861: mol_type = other DNA
atggccggcatgaagaccgccagcggcgactacatcgacagcagctgggagctgagagtgttcgtgggcgaggaggaccccgaggccgagagcgtgaccctgagagtgaccggcgagagccacatcggcggcgtgctgctgaagatcgtggagcagatcaacagaaagcaggactggagcgaccacgccatctggtgggagcagaagagacagtggctgctgcagacccactggaccctggacaagtacggcatcctggccgacgccagactgttcttcggcccccagcacagacccgtgatcctgagactgcccaacagaagagccctgagactgagagccagcttcagccagcccctgttccaggccgtggccgccatctgcagactgctgagcatcagacaccccgaggagctgagcctgctgagagcccccgagaagaaggagaagaagaagaaggagaaggagcccgaggaggagctgtacgacctgagcaaggtggtgctggccggcggcgtggcccccgccctgttcagaggcatgcccgcccacttcagcgacagcgcccagaccgaggcctgctaccacatgctgagcagaccccagcccccccccgaccccctgctgctgcagagactgcccagacccagcagcctgagcgacaagacccagctgcacagcagatggctggacagcagcagatgcctgatgcagcagggcatcaaggccggcgacgccctgtggctgagattcaagtactacagcttcttcgacctggaccccaagaccgaccccgtgagactgacccagctgtacgagcaggccagatgggacctgctgctggaggagatcgactgctag

SEQ ID NO: 81565 - DNA, 555 bp, synthetic construct
  misc_feature 1..555: note = Description of Artificial Sequence: Synthetic coding sequence
  source 1..555: mol_type = other DNA
atggccgccgccggcggcgccagactgctgagagccgccagcgccgtgctgggcggccccgccggcagatggctgcaccacgccggcagcagagccggcagcagcggcctgctgagaaacagaggccccggcggcagcgccgaggccagcagaagcctgagcgtgagcgccagagccagaagcagcagcgaggacaagatcaccgtgcacttcatcaacagagacggcgagaccctgaccaccaagggcaaggtgggcgacagcctgctggacgtggtggtggagaacaacctggacatcgacggcttcggcgcctgcgagggcaccctggcctgcagcacctgccacctgatcttcgaggaccacatctacgagaagctggacgccatcaccgacgaggagaacgacatgctggacctggcctacggcctgaccgacagaagcagactgggctgccagatctgcctgaccaagagcatggacaacatgaccgtgagagtgcccgagaccgtggccgacgccagacagagcatcgacgtgggcaagaccagctag

SEQ ID NO: 81566 - DNA, 1494 bp, synthetic construct
  misc_feature 1..1494: note = Description of Artificial Sequence: Synthetic coding sequence
  source 1..1494: mol_type = other DNA
atggccagcagatgctggagatggtggggctggagcgcctggcccagaaccagactgccccccgccggcagcacccccagcttctgccaccacttcagcacccaggagaagaccccccagatctgcgtggtgggcagcggccccgccggcttctacaccgcccagcacctgctgaagcacccccaggcccacgtggacatctacgagaagcagcccgtgcccttcggcctggtgagattcggcgtggcccccgaccaccccgaggtgaagaacgtgatcaacaccttcacccagaccgcccacagcggcagatgcgccttctggggcaacgtggaggtgggcagagacgtgaccgtgcccgagctgagagaggcctaccacgccgtggtgctgagctacggcgccgaggaccacagagccctggagatccccggcgaggagctgcccggcgtgtgcagcgccagagccttcgtgggctggtacaacggcctgcccgagaaccaggagctggagcccgacctgagctgcgacaccgccgtgatcctgggccagggcaacgtggccctggacgtggccagaatcctgctgaccccccccgagcacctggaggccctgctgctgtgccagagaaccgacatcaccaaggccgccctgggcgtgctgagacagagcagagtgaagaccgtgtggctggtgggcagaagaggccccctgcaggtggccttcaccatcaaggagctgagagagatgatccagctgcccggcgccagacccatcctggaccccgtggacttcctgggcctgcaggacaagatcaaggaggtgcccagacccagaaagagactgaccgagctgctgctgagaaccgccaccgagaagcccggccccgccgaggccgccagacaggccagcgccagcagagcctggggcctgagattcttcagaagcccccagcaggtgctgcccagccccgacggcagaagagccgccggcgtgagactggccgtgaccagactggagggcgtggacgaggccaccagagccgtgcccaccggcgacatggaggacctgccctgcggcctggtgctgagcagcatcggctacaagagcagacccgtggaccccagcgtgcccttcgacagcaagctgggcgtgatccccaacgtggagggcagagtgatggacgtgcccggcctgtactgcagcggctgggtgaagagaggccccaccggcgtgatcgccaccaccatgaccgacagcttcctgaccggccagatgctgctgcaggacctgaaggccggcctgctgcccagcggccccagacccggctacgccgccatccaggccctgctgagcagcagaggcgtgagacccgtgagcttcagcgactgggagaagctggacgccgaggaggtggccagaggccagggcaccggcaagcccagagagaagctggtggacccccaggagatgctgagactgctgggccactag

SEQ ID NO: 81567 - DNA, 1569 bp, synthetic construct
  misc_feature 1..1569: note = Description of Artificial Sequence: Synthetic coding sequence
  source 1..1569: mol_type = other DNA
atggccagcagatgctggagatggtggggctggagcgcctggcccagaaccagactgccccccgccggcagcacccccaccttcggcggcagcgacgaggtgagagaccccgccaacgccaaggccctgagaaacaagagaagaagaatgcaggtgagagtgaagctgggcaagttccagctgctgctggacatccaggagaagaccccccagatctgcgtggtgggcagcggccccgccggcttctacaccgcccagcacctgctgaagcacccccaggcccacgtggacatctacgagaagcagcccgtgcccttcggcctggtgagattcggcgtggcccccgaccaccccgaggtgaagaacgtgatcaacaccttcacccagaccgcccacagcggcagatgcgccttctggggcaacgtggaggtgggcagagacgtgaccgtgcccgagctgagagaggcctaccacgccgtggtgctgagctacggcgccgaggaccacagagccctggagatccccggcgaggagctgcccggcgtgtgcagcgccagagccttcgtgggctggtacaacggcctgcccgagaaccaggagctggagcccgacctgagctgcgacaccgccgtgatcctgggccagggcaacgtggccctggacgtggccagaatcctgctgaccccccccgagcacctggagagaaccgacatcaccaaggccgccctgggcgtgctgagacagagcagagtgaagaccgtgtggctggtgggcagaagaggccccctgcaggtggccttcaccatcaaggagctgagagagatgatccagctgcccggcgccagacccatcctggaccccgtggacttcctgggcctgcaggacaagatcaaggaggtgcccagacccagaaagagactgaccgagctgctgctgagaaccgccaccgagaagcccggccccgccgaggccgccagacaggccagcgccagcagagcctggggcctgagattcttcagaagcccccagcaggtgctgcccagccccgacggcagaagagccgccggcgtgagactggccgtgaccagactggagggcgtggacgaggccaccagagccgtgcccaccggcgacatggaggacctgccctgcggcctggtgctgagcagcatcggctacaagagcagacccgtggaccccagcgtgcccttcgacagcaagctgggcgtgatccccaacgtggagggcagagtgatggacgtgcccggcctgtactgcagcggctgggtgaagagaggccccaccggcgtgatcgccaccaccatgaccgacagcttcctgaccggccagatgctgctgcaggacctgaaggccggcctgctgcccagcggccccagacccggctacgccgccatccaggccctgctgagcagcagaggcgtgagacccgtgagcttcagcgactgggagaagctggacgccgaggaggtggccagaggccagggcaccggcaagcccagagagaagctggtggacccccaggagatgctgagactgctgggccactag

SEQ ID NO: 81568 - DNA, 1356 bp, synthetic construct
  misc_feature 1..1356: note = Description of Artificial Sequence: Synthetic coding sequence
  source 1..1356: mol_type = other DNA
atggccagcagatgctggagatggtggggctggagcgcctggcccagaaccagactgccccccgccggcagcacccccagcttctgccaccacttcagcacccaggagaagaccccccagatctgcgtggtgggcagcggccccgccggcttctacaccgcccagcacctgctgaagcagcacccccaggcccacgtggacatctacgagaagcagcccgtgcccttcggcctggtgagattcggcgtggcccccgaccaccccgaggtgaagagctacggcgccgaggaccacagagccctggagatccccggcgaggagctgcccggcgtgtgcagcgccagagccttcgtgggctggtacaacggcctgcccgagaaccaggagctggagcccgacctgagctgcgacaccgccgtgatcctgggccagggcaacgtggccctggacgtggccagaatcctgctgaccccccccgagcacctggagagaaccgacatcaccaaggccgccctgggcgtgctgagacagagcagagtgaagaccgtgtggctggtgggcagaagaggccccctgcaggtggccttcaccatcaaggagctgagagagatgatccagctgcccggcgccagacccatcctggaccccgtggacttcctgggcctgcaggacaagatcaaggaggtgcccagacccagaaagagactgaccgagctgctgctgagaaccgccaccgagaagcccggccccgccgaggccgccagacaggccagcgccagcagagcctggggcctgagattcttcagaagcccccagcaggtgctgcccagccccgacggcagaagagccgccggcgtgagactggccgtgaccagactggagggcgtggacgaggccaccagagccgtgcccaccggcgacatggaggacctgccctgcggcctggtgctgagcagcatcggctacaagagcagacccgtggaccccagcgtgcccttcgacagcaagctgggcgtgatccccaacgtggagggcagagtgatggacgtgcccggcctgtactgcagcggctgggtgaagagaggccccaccggcgtgatcgccaccaccatgaccgacagcttcctgaccggccagatgctgctgcaggacctgaaggccggcctgctgcccagcggccccagacccggctacgccgccatccaggccctgctgagcagcagaggcgtgagacccgtgagcttcagcgactgggagaagctggacgccgaggaggtggccagaggccagggcaccggcaagcccagagagaagctggtggacccccaggagatgctgagactgctgggccactag

SEQ ID NO: 81569 - DNA, 1605 bp, synthetic construct
  misc_feature 1..1605: note = Description of Artificial Sequence: Synthetic coding sequence
  source 1..1605: mol_type = other DNA
atggccagcagatgctggagatggtggggctggagcgcctggcccagaaccagactgccccccgccggcagcacccccagcttctgccaccacttcagcacccaggagaagaccccccagatctgcgtggtgggcagcggccccgccggcttctacaccgcccagcacctgctgaagagagtggaggccctgtgcagccagcccagagtgctgaacagccccgccctgagcggcgagggcgaggacctgggcgccagccagcccctgagcctggaccccaccagctgccaccccgtgccccagcagcacccccaggcccacgtggacatctacgagaagcagcccgtgcccttcggcctggtgagattcggcgtggcccccgaccaccccgaggtgaagaacgtgatcaacaccttcacccagaccgcccacagcggcagatgcgccttctggggcaacgtggaggtgggcagagacgtgaccgtgcccgagctgagagaggcctaccacgccgtggtgctgagctacggcgccgaggaccacagagccctggagatccccggcgaggagctgcccggcgtgtgcagcgccagagccttcgtgggctggtacaacggcctgcccgagaaccaggagctggagcccgacctgagctgcgacaccgccgtgatcctgggccagggcaacgtggccctggacgtggccagaatcctgctgaccccccccgagcacctggagagaaccgacatcaccaaggccgccctgggcgtgctgagacagagcagagtgaagaccgtgtggctggtgggcagaagaggccccctgcaggtggccttcaccatcaaggagctgagagagatgatccagctgcccggcgccagacccatcctggaccccgtggacttcctgggcctgcaggacaagatcaaggaggtgcccagacccagaaagagactgaccgagctgctgctgagaaccgccaccgagaagcccggccccgccgaggccgccagacaggccagcgccagcagagcctggggcctgagattcttcagaagcccccagcaggtgctgcccagccccgacggcagaagagccgccggcgtgagactggccgtgaccagactggagggcgtggacgaggccaccagagccgtgcccaccggcgacatggaggacctgccctgcggcctggtgctgagcagcatcggctacaagagcagacccgtggaccccagcgtgcccttcgacagcaagctgggcgtgatccccaacgtggagggcagagtgatggacgtgcccggcctgtactgcagcggctgggtgaagagaggccccaccggcgtgatcgccaccaccatgaccgacagcttcctgaccggccagatgctgctgcaggacctgaaggccggcctgctgcccagcggccccagacccggctacgccgccatccaggccctgctgagcagcagaggcgtgagacccgtgagcttcagcgactgggagaagctggacgccgaggaggtggccagaggccagggcaccggcaagcccagagagaagctggtggacccccaggagatgctgagactgctgggccactag

SEQ ID NO: 81570 - DNA, 1146 bp, synthetic construct
  misc_feature 1..1146: note = Description of Artificial Sequence: Synthetic coding sequence
  source 1..1146: mol_type = other DNA
atgaccacctgcaaggccggcgtggtgcccctggccagccagcagcacccccaggcccacgtggacatctacgagaagcagcccgtgcccttcggcctggtgagattcggcgtggcccccgaccaccccgaggtgaagaacgtgatcaacaccttcacccagaccgcccacagcggcagatgcgccttctggggcaacgtggaggtgggcagagacgtgaccgtgcccgagctgagagaggcctaccacgccgtggtgctgagctacggcgccgaggaccacagagccctggagatccccggcgaggagctgcccggcgtgtgcagcgccagagccttcgtgggctggtacaacggcctgcccgagaaccaggagctggagcccgacctgagctgcgacaccgccgtgatcctgggccagggcaacgtggccctggacgtggccagaatcctgctgaccccccccgagcacctggagagaaccgacatcaccaaggccgccctgggcgtgctgagacagagcagagtgaagaccgtgtggctggtgggcagaagaggccccctgcaggtggccttcaccatcaaggagctgagagagatgatccagctgcccggcgccagacccatcctggaccccgtggacttcctgggcctgcaggacaagatcaaggaggtgcccagacccagaaagagactgaccgagctgctgctgagaaccgccaccgagaagcccggccccgccgaggccgccagacaggccagcgccagcagagcctggggcctgagattcttcagaagcccccagcaggtgctgcccagccccgacggcagaagagccgccggcgtgagactggccgtgaccagactggaggtgagcctgatgttcctgaaggacacccccttccccggcctgtgccacccccccggcgtggcccacaccctgcccaacagagtgagcatgagaccccccgtgcagtgccccagagagacctggaagaccagcctggtgggctggtgcagcgccgccctgggcatcagagccgccctgagcacccaggcctgccccctgacccccagcctgggcagcagccccatgtggagagccggcctgtggatgtgccaggccagcaccgccgccgccggctag

SEQ ID NO: 81571 - DNA, 1320 bp, synthetic construct
  misc_feature 1..1320: note = Description of Artificial Sequence: Synthetic coding sequence
  source 1..1320: mol_type = other DNA
atggaggacaaggacagagagcacccccaggcccacgtggacatctacgagaagcagcccgtgcccttcggcctggtgagattcggcgtggcccccgaccaccccgaggtgaagaacgtgatcaacaccttcacccagaccgcccacagcggcagatgcgccttctggggcaacgtggaggtgggcagagacgtgaccgtgcccgagctgagagaggcctaccacgccgtggtgctgagctacggcgccgaggaccacagagccctggagatccccggcgaggagctgcccggcgtgtgcagcgccagagccttcgtgggctggtacaacggcctgcccgagaaccaggagctggagcccgacctgagctgcgacaccgccgtgatcctgggccagggcaacgtggccctggacgtggccagaatcctgctgaccccccccgagcacctggagagaaccgacatcaccaaggccgccctgggcgtgctgagacagagcagagtgaagaccgtgtggctggtgggcagaagaggccccctgcaggtggccttcaccatcaaggagctgagagagatgatccagctgcccggcgccagacccatcctggaccccgtggacttcctgggcctgcaggacaagatcaaggaggtgcccagacccagaaagagactgaccgagctgctgctgagaaccgccaccgagaagcccggccccgccgaggccgccagacaggccagcgccagcagagcctggggcctgagattcttcagaagcccccagcaggtgctgcccagccccgacggcagaagagccgccggcgtgagactggccgtgaccagactggagggcgtggacgaggccaccagagccgtgcccaccggcgacatggaggacctgccctgcggcctggtgctgagcagcatcggctacaagagcagacccgtggaccccagcgtgcccttcgacagcaagctgggcgtgatccccaacgtggagggcagagtgatggacgtgcccggcctgtactgcagcggctgggtgaagagaggccccaccggcgtgatcgccaccaccatgaccgacagcttcctgaccggccagatgctgctgcaggacctgaaggccggcctgctgcccagcggccccagacccggctacgccgccatccaggccctgctgagcagcagaggcgtgagacccgtgagcttcagcgactgggagaagctggacgccgaggaggtggccagaggccagggcaccggcaagcccagagagaagctggtggacccccaggagatgctgagactgctgggccactag

SEQ ID NO: 81572 - DNA, 1494 bp, synthetic construct; identical to SEQ ID NO: 81566
  misc_feature 1..1494: note = Description of Artificial Sequence: Synthetic coding sequence
  source 1..1494: mol_type = other DNA

SEQ ID NO: 81573 - DNA, 1452 bp, synthetic construct
  misc_feature 1..1452: note = Description of Artificial Sequence: Synthetic coding sequence
  source 1..1452: mol_type = other DNA
atggccagcagatgctggagatggtggggctggagcgcctggcccagaaccagactgccccccgccggcagcacccccagcttctgccaccacttcagcacccaggagaagaccccccagatctgcgtggtgggcagcggccccgccggcttctacaccgcccagcacctgctgaagcacccccaggcccacgtggacatctacgagaagcagcccgtgcccttcggcctggtgagattcggcgtggcccccgaccaccccgaggtgaagaccgcccacagcggcagatgcgccttctggggcaacgtggaggtgggcagagacgtgaccgtgcccgagctgagagaggcctaccacgccgtggtgctgagctacggcgccgaggaccacagagccctggagatccccggcgaggagctgcccggcgtgtgcagcgccagagccttcgtgggctggtacaacggcctgcccgagaaccaggagctggagcccgacctgagctgcgacaccgccgtgatcctgggccagggcaacgtggccctggacgtggccagaatcctgctgaccccccccgagcacctggagagaaccgacatcaccaaggccgccctgggcgtgctgagacagagcagagtgaagaccgtgtggctggtgggcagaagaggccccctgcaggtggccttcaccatcaaggagctgagagagatgatccagctgcccggcgccagacccatcctggaccccgtggacttcctgggcctgcaggacaagatcaaggaggtgcccagacccagaaagagactgaccgagctgctgctgagaaccgccaccgagaagcccggccccgccgaggccgccagacaggccagcgccagcagagcctggggcctgagattcttcagaagcccccagcaggtgctgcccagccccgacggcagaagagccgccggcgtgagactggccgtgaccagactggagggcgtggacgaggccaccagagccgtgcccaccggcgacatggaggacctgccctgcggcctggtgctgagcagcatcggctacaagagcagacccgtggaccccagcgtgcccttcgacagcaagctgggcgtgatccccaacgtggagggcagagtgatggacgtgcccggcctgtactgcagcggctgggtgaagagaggccccaccggcgtgatcgccaccaccatgaccgacagcttcctgaccggccagatgctgctgcaggacctgaaggccggcctgctgcccagcggccccagacccggctacgccgccatccaggccctgctgagcagcagaggcgtgagacccgtgagcttcagcgactgggagaagctggacgccgaggaggtggccagaggccagggcaccggcaagcccagagagaagctggtggacccccaggagatgctgagactgctgggccactag

SEQ ID NO: 81574 - DNA, 1881 bp, synthetic construct
  misc_feature 1..1881: note = Description of Artificial Sequence: Synthetic coding sequence
  source 1..1881: mol_type = other DNA
atggccgtgagcggcttcaccctgggcacctgcatcctgctgctgcacatcagctacgtggccaactaccccaacggcaaggtgacccagagctgccacggcatgatccccgagcacggccacagcccccagagcgtgcccgtgcacgacatctacgtgagccagatgaccttcagacccggcgaccagatcgaggtgaccctgagcggccaccccttcaagggcttcctgctggaggccagaaacgccgaggacctgaacggcccccccatcggcagcttcaccctgatcgacagcgaggtgagccagctgctgacctgcgaggacatccagggcagcgccgtgagccacagaagcgccagcaagaagaccgagatcaaggtgtactggaacgcccccagcagcgcccccaaccacacccagttcctggtgaccgtggtggagaagtacaagatctactgggtgaagatccccggccccatcatcagccagcccaacgccttccccttcaccacccccaaggccaccgtggtgcccctgcccaccctgccccccgtgagccacctgaccaagcccttcagcgccagcgactgcggcaacaagaagttctgcatcagaagccccctgaactgcgaccccgagaaggaggccagctgcgtgttcctgagcttcaccagagacgaccagagcgtgatggtggagatgagcggccccagcaagggctacctgagcttcgccctgagccacgaccagtggatgggcgacgacgacgcctacctgtgcatccacgaggaccagaccgtgtacatccagcccagccacctgaccggcagaagccaccccgtgatggacagcagagacaccctggaggacatggcctggagactggccgacggcgtgatgcagtgcagcttcagaagaaacatcaccctgcccggcgtgaagaacagattcgacctgaacaccagctactacatcttcctggccgacggcgccgccaacgacggcagaatctacaagcacagccagcagcccctgatcacctacgagaagtacgacgtgaccgacagccccaagaacatcggcggcagccacagcgtgctgctgctgaaggtgcacggcgccctgatgttcgtggcctggatgaccaccgtgagcatcggcgtgctggtggccagattcttcaagcccgtgtggagcaaggccttcctgctgggcgaggccgcctggttccaggtgcacagaatgctgatgttcaccaccaccgtgctgacctgcatcgccttcgtgatgcccttcatctacagaggcggctggagcagacacgccggctaccacccctacctgggctgcatcgtgatgaccctggccgtgctgcagcccctgctggccgtgttcagaccccccctgcacgaccccagaagacagatgttcaactggacccactggagcatgggcaccgccgccagaatcatcgccgtggccgccatgttcctgggcatggacctgcccggcctgaacctgcccgacagctggaagacctacgccatgaccggcttcgtggcctggcacgtgggcaccgaggtggtgctggagctgaagtactggatgatgaccgagttcagaagcttcagccacctgctgcagtggaagcagagagtgatgctgctgaagagacagtgctggcagttcatgagcgtgggcatgctgctgttcagcagctacttctacctgcagagcaccatctacgagcaggccaagaccctggccttcgccggccaggtgatcatcatcatcaagcccaagaagctggaggcctgccccgactgcctggagcacatctgcgagttcagcctgggcagactgggcagctgcctgtag

SEQ ID NO: 81575 - DNA, 1779 bp, synthetic construct
  misc_feature 1..1779: note = Description of Artificial Sequence: Synthetic coding sequence
  source 1..1779: mol_type = other DNA
atggccgtgagcggcttcaccctgggcacctgcatcctgctgctgcacatcagctacgtggccaactaccccaacggcaaggtgacccagagctgccacggcatgatccccgagcacggccacagcccccagagcgtgcccgtgcacgacatctacgtgagccagatgaccttcagacccggcgaccagatcgaggtgaccctgagcggccaccccttcaagggcttcctgctggaggccagaaacgccgaggacctgaacggcccccccatcggcagcttcaccctgatcgacagcgaggtgagccagctgctgacctgcgaggacatccagggcagcgccgtgagccacagaagcgccagcaagaagaccgagatcaaggtgtactggaacgcccccagcagcgcccccaaccacacccagttcctggtgaccgtggtggagaagtacaagatctactgggtgaagatccccggccccatcatcagccagcccaacgccttccccttcaccacccccaaggccaccgtggtgcccctgcccaccctgccccccgtgagccacctgaccaagcccttcagcgccagcgactgcggcaacaagaagttctgcatcagaagccccctgaactgcgaccccgagaaggaggccagctgcgtgttcctgagcttcaccagagacgaccagagcgtgatggtggagatgagcggccccagcaagggctacctgagcttcgccctgagccacgaccagtggatgggcgacgacgacgcctacctgtgcatccacgaggaccagaccgtgtacatccagcccagccacctgaccggcagaagccaccccgtgatggacagcagagacaccctggaggacatggcctggagactggccgacggcgtgatgcagtgcagcttcagaagaaacatcaccctgcccggcgtgaagaacagattcgacctgaacaccagctactacatcttcctggccgacggcgccgccaacgacggcagaatctacaagcacagccagcagcccctgatcacctacgagaagtacgacgtgaccgacagccccaagaacatcggcggcagccacagcgtgctgctgctgaaggtgcacggcgccctgatgttcgtggcctggatgaccaccgtgagcatcggcgtgctggtggccagattcttcaagcccgtgtggagcaaggccttcctgctgggcgaggccgcctggttccaggtgcacagaatgctgatgttcaccaccaccgtgctgacctgcatcgccttcgtgatgcccttcatctacagaggcggctggagcagacacgccggctaccacccctacctgggctgcatcgtgatgaccctggccgtgctgcagcccctgctggccgtgttcagaccccccctgcacgaccccagaagacagatgttcaactggacccactggagcatgggcaccgccgccagaatcatcgccgtggccgccatgttcctgggcatggacctgcccggcctgaacctgcccgacagctggaagacctacgccatgaccggcttcgtggcctggcacgtgggcaccgaggtggtgctggaggtgcacgcctacagactgagcagaaaggtggagatcctggacgacgacagaatccagatcctgcagagcttcaccgccgtggagaccgagggccacgccttcaagaaggccgtgctggccatctacgtgtgcggcaacgtgaccttcctgatcatcttcctgagcgccatcaaccacctgtag

SEQ ID NO: 81576 - DNA, 729 bp, synthetic construct
  misc_feature 1..729: note = Description of Artificial Sequence: Synthetic coding sequence
  source 1..729: mol_type = other DNA
atgctgagctgcttcagactgctgagcagacacatcagccccagcctggccagcctgagacccgtgagatgctgcttcgccctgcccctgagatgggcccccggcagacccctggaccccagacagatcgcccccagaagacccctggccgccgccgccagcagcagagaccccaccggccccgccgccggccccagcagagtgagacagaacttccaccccgacagcgaggccgccatcaacagacagatcaacctggagctgtacgccagctacgtgtacctgagcatggcctactacttcagcagagacgacgtggccctgaacaacttcagcagatacttcctgcaccagagcagagaggagaccgagcacgccgagaagctgatgagactgcagaaccagagaggcggcagaatcagactgcaggacatcaagaagcccgagcaggacgactgggagagcggcctgcacgccatggagtgcgccctgctgctggagaagaacgtgaaccagagcctgctggagctgcacgccctggccagcgacaagggcgacccccacctgtgcgacttcctggagacctactacctgaacgagcaggtgaagagcatcaaggagctgggcgaccacgtgcacaacctggtgaagatgggcgcccccgacgccggcctggccgagtacctgttcgacacccacaccctgggcaacgagaacaagcagaactag

SEQ ID NO: 81577 - DNA, 552 bp, synthetic construct
  misc_feature 1..552: note = Description of Artificial Sequence: Synthetic coding sequence
  source 1..552: mol_type = other DNA
atgaccaccgccagcaccagccaggtgagacagaactaccaccaggacagcgaggccgccatcaacagacagatcaacctggagctgtacgccagctacgtgtacctgagcatgagctactacttcgacagagacgacgtggccctgaagaacttcgccaagtacttcctgcaccagagccacgaggagagagagcacgccgagaagctgatgaagctgcagaaccagagaggcggcagaatcttcctgcaggacatcaagaagcccgactgcgacgactgggagagcggcctgaacgccatggagtgcgccctgcacctggagaagaacgtgaaccagagcctgctggagctgcacaagctggccaccgacaagaacgacccccacctgtgcgacttcatcgagacccactacctgaacgagcaggtgaaggccatcaaggagctgggcgaccacgtgaccaacctgagaaagatgggcgcccccgagagcggcctggccgagtacctgttcgacaagcacaccctgggcgacagcgacaacgagagctag

SEQ ID NO: 81578 - DNA, 699 bp, synthetic construct
  misc_feature 1..699: note = Description of Artificial Sequence: Synthetic coding sequence
  source 1..699: mol_type = other DNA
agcggcttccccgccagcaccgtgctgggcagaaaccccgccctggtgccccaccccggcagaccccccatcgccagcccccccagccccctgcacagaaccctgggcctgccccagggccccagaagactgagcctggtggccgccatgaccaccgccagcaccagccaggtgagacagaactaccaccaggacagcgaggccgccatcaacagacagatcaacctggagctgtacgccagctacgtgtacctgagcatgagctactacttcgacagagacgacgtggccctgaagaacttcgccaagtacttcctgcaccagagccacgaggagagagagcacgccgagaagctgatgaagctgcagaaccagagaggcggcagaatcttcctgcaggacatcaagaagcccgactgcgacgactgggagagcggcctgaacgccatggagtgcgccctgcacctggagaagaacgtgaaccagagcctgctggagctgcacaagctggccaccgacaagaacgacccccacctgtgcgacttcatcgagacccactacctgaacgagcaggtgaaggccatcaaggagctgggcgaccacgtgaccaacctgagaaagatgggcgcccccgagagcggcctggccgagtacctgttcgacaagcacaccctgggcgacagcgacaacgagagctag

SEQ ID NO: 81579 - DNA, 462 bp, synthetic construct
  misc_feature 1..462: note = Description of Artificial Sequence: Synthetic coding sequence
  source 1..462: mol_type = other DNA
atgaccaccgccagcaccagccagagctactacttcgacagagacgacgtggccctgaagaacttcgccaagtacttcctgcaccagagccacgaggagagagagcacgccgagaagctgatgaagctgcagaaccagagaggcggcagaatcttcctgcaggacatcaagaagcccgactgcgacgactgggagagcggcctgaacgccatggagtgcgccctgcacctggagaagaacgtgaaccagagcctgctggagctgcacaagctggccaccgacaagaacgacccccacctgtgcgacttcatcgagacccactacctgaacgagcaggtgaaggccatcaaggagctgggcgaccacgtgaccaacctgagaaagatgggcgcccccgagagcggcctggccgagtacctgttcgacaagcacaccctgggcgacagcgacaacgagagctag

SEQ ID NO: 81580 - DNA, 552 bp, synthetic construct
  misc_feature 1..552: note = Description of Artificial Sequence: Synthetic coding sequence
  source 1..552: mol_type = other DNA
atggccaccgcccagcccagccaggtgagacagaagtacgacaccaactgcgacgccgccatcaacagccacatcaccctggagctgtacaccagctacctgtacctgagcatggccttctacttcaacagagacgacgtggccctggagaacttcttcagatacttcctgagactgagcgacgacaagatggagcacgcccagaagctgatgagactgcagaacctgagaggcggccacatctgcctgcacgacatcagaaagcccgagtgccagggctgggagagcggcctggtggccatggagagcgccttccacctggagaagaacgtgaaccagagcctgctggacctgtaccagctggccgtggagaagggcgacccccagctgtgccacttcctggagagccactacctgcacgagcaggtgaagaccatcaaggagctgggcggctacgtgagcaacctgagaaagatctgcagccccgaggccggcctggccgagtacctgttcgacaagctgaccctgggcggcagagtgaaggagacctag

SEQ ID NO: 81581 - DNA, 528 bp, synthetic construct
  misc_feature 1..528: note = Description of Artificial Sequence: Synthetic coding sequence
  source 1..528: mol_type = other DNA
atgagcagccagatcagacagaactacagcaccgacgtggaggccgccgtgaacagcctggtgaacctgtacctgcaggccagctacacctacctgagcctgggcttctacttcgacagagacgacgtggccctggagggcgtgagccacttcttcagagagctggccgaggagaagagagagggctacgagagactgctgaagatgcagaaccagagaggcggcagagccctgttccaggacatcaagaagcccgccgaggacgagtggggcaagacccccgacgccatgaaggccgccatggccctggagaagaagctgaaccaggccctgctggacctgcacgccctgggcagcgccagaaccgacccccacctgtgcgacttcctggagacccacttcctggacgaggaggtgaagctgatcaagaagatgggcgaccacctgaccaacctgcacagactgggcggccccgaggccggcctgggcgagtacctgttcgagagactgaccctgaagcacgactag

SEQ ID NO: 81582 - DNA, 573 bp, synthetic construct
  misc_feature 1..573: note = Description of Artificial Sequence: Synthetic coding sequence
  source 1..573: mol_type = other DNA
atgagcagccagatcagacagaactacagcaccgacgtggaggccgccgtgaacagcctggtgaacctgtacctgcaggccagctacacctacctgagcctgggcttctacttcgacagagacgacgtggccctggagggcgtgagccacttcttcagagagctggccgaggagaagagagagggctacgagagactgctgaagatgcagaaccagagaggcggcagagccctgttccaggacatcaagaagcccgccgaggacgagtggggcaagacccccgacgccatgaaggccgccatggccctggagaagaagctgaaccaggccctgctggacctgcacgccctgggcagcgccagaaccgacccccacctgtgcgacttcctggagacccacttcctggacgaggaggtgaagctgatcaagaagatgggcgaccacctgaccaacctgcacagactgggcggccccgaggccggcctgggcgagtacctgagcaagggcagcctgagcagcaccaccaagagcctgctgagccccgccaccagcgagggccccctggccaagtag

SEQ ID NO: 81583 - DNA, 1272 bp, synthetic construct
  misc_feature 1..1272: note = Description of Artificial Sequence: Synthetic coding sequence
  source 1..1272: mol_type = other DNA
atgagaagcctgggcgccaacatggccgccgccctgagagccgccggcgtgctgctgagagaccccctggccagcagcagctggagagtgtgccagccctggagatggaagagcggcgccgccgccgccgccgtgaccaccgagaccgcccagcacgcccagggcgccaagccccaggtgcagccccagaagagaaagcccaagaccggcatcctgatgctgaacatgggcggccccgagaccctgggcgacgtgcacgacttcctgctgagactgttcctggacagagacctgatgaccctgcccatccagaacaagctggcccccttcatcgccaagagaagaacccccaagatccaggagcagtacagaagaatcggcggcggcagccccatcaagatctggaccagcaagcagggcgagggcatggtgaagctgctggacgagctgagccccaacaccgccccccacaagtactacatcggcttcagatacgtgcaccccctgaccgaggaggccatcgaggagatggagagagacggcctggagagagccatcgccttcacccagtacccccagtacagctgcagcaccaccggcagcagcctgaacgccatctacagatactacaaccaggtgggcagaaagcccaccatgaagtggagcaccatcgacagatggcccacccaccacctgctgatccagtgcttcgccgaccacatcctgaaggagctggaccacttccccctggagaagagaagcgaggtggtgatcctgttcagcgcccacagcctgcccatgagcgtggtgaacagaggcgacccctacccccaggaggtgagcgccaccgtgcagaaggtgatggagagactggagtactgcaacccctacagactggtgtggcagagcaaggtgggccccatgccctggctgggcccccagaccgacgagagcatcaagggcctgtgcgagagaggcagaaagaacatcctgctggtgcccatcgccttcaccagcgaccacatcgagaccctgtacgagctggacatcgagtacagccaggtgctggccaaggagtgcggcgtggagaacatcagaagagccgagagcctgaacggcaaccccctgttcagcaaggccctggccgacctggtgcacagccacatccagagcaacgagctgtgcagcaagcagctgaccctgagctgccccctgtgcgtgaaccccgtgtgcagagagaccaagagcttcttcaccagccagcagctgtag

SEQ ID NO: 81584 - DNA, 1290 bp, synthetic construct
  misc_feature 1..1290: note = Description of Artificial Sequence: Synthetic coding sequence
  source 1..1290: mol_type = other DNA
atgagaagcctgggcgccaacatggccgccgccctgagagccgccggcgtgctgctgagagaccccctggccagcagcagctggagagtgtgccagccctggagatggaagagcggcgccgccgccgccgccgtgaccaccgagaccgcccagcacgcccagggcgccaagccccaggtgcagccccagaagagatacgagagcaacatcagaaagcccaagaccggcatcctgatgctgaacatgggcggccccgagaccctgggcgacgtgcacgacttcctgctgagactgttcctggacagagacctgatgaccctgcccatccagaacaagctggcccccttcatcgccaagagaagaacccccaagatccaggagcagtacagaagaatcggcggcggcagccccatcaagatctggaccagcaagcagggcgagggcatggtgaagctgctggacgagctgagccccaacaccgccccccacaagtactacatcggcttcagatacgtgcaccccctgaccgaggaggccatcgaggagatggagagagacggcctggagagagccatcgccttcacccagtacccccagtacagctgcagcaccaccggcagcagcctgaacgccatctacagatactacaaccaggtgggcagaaagcccaccatgaagtggagcaccatcgacagatggcccacccaccacctgctgatccagtgcttcgccgaccacatcctgaaggagctggaccacttccccctggagaagagaagcgaggtggtgatcctgttcagcgcccacagcctgcccatgagcgtggtgaacagaggcgacccctacccccaggaggtgagcgccaccgtgcagaaggtgatggagagactggagtactgcaacccctacagactggtgtggcagagcaaggtgggccccatgccctggctgggcccccagaccgacgagagcatcaagggcctgtgcgagagaggcagaaagaacatcctgctggtgcccatcgccttcaccagcgaccacatcgagaccctgtacgagctggacatcgagtacagccaggtgctggccaaggagtgcggcgtggagaacatcagaagagccgagagcctgaacggcaaccccctgttcagcaaggccctggccgacctggtgcacagccacatccagagcaacgagctgtgcagcaagcagctgaccctgagctgccccctgtgcgtgaaccccgtgtgcagagagaccaagagcttcttcaccagccagcagctgtag

SEQ ID NO: 81585 - DNA, 1149 bp, synthetic construct
  misc_feature 1..1149: note = Description of Artificial Sequence: Synthetic coding sequence
  source 1..1149: mol_type = other DNA
atgggcctgctgctgcccctggccctgtgcatcctggtgctgtgctgcggcgccatgagccccccccagctggccctgaaccccagcgccctgctgagcagaggctgcaacgacagcgacgtgctggccgtggccggcttcgccctgagagacatcaacaaggacagaaaggacggctacgtgctgagactgaacagagtgaacgacgcccaggagtacagaagaggcggcctgggcagcctgttctacctgaccctggacgtgctggagaccgactgccacgtgctgagaaagaaggcctggcaggactgcggcatgagaatcttcttcgagagcgtgtacggccagtgcaaggccatcttctacatgaacaaccccagcagagtgctgtacctggccgcctacaactgcaccctgagacccgtgagcaagaagaagatctacatgacctgccccgactgccccagcagcatccccaccgacagcagcaaccaccaggtgctggaggccgccaccgagagcctggccaagtacaacaacgagaacaccagcaagcagtacagcctgttcaaggtgaccagagccagcagccagtgggtggtgggccccagctacttcgtggagtacctgatcaaggagagcccctgcaccaagagccaggccagcagctgcagcctgcagagcagcgacagcgtgcccgtgggcctgtgcaagggcagcctgaccagaacccactgggagaagttcgtgagcgtgacctgcgacttcttcgagagccaggcccccgccaccggcagcgagaacagcgccgtgaaccagaagcccaccaacctgcccaaggtggaggagagccagcagaagaacaccccccccaccgacagccccagcaaggccggccccagaggcagcgtgcagtacctgcccgacctggacgacaagaacagccaggagaagggcccccaggaggccttccccgtgcacctggacctgaccaccaacccccagggcgagaccctggacatcagcttcctgttcctggagcccatggaggagaagctggtggtgctgcccttccccaaggagaaggccagaaccgccgagtgccccggccccgcccagaacgccagccccctggtgctgcccccctag

SEQ ID NO: 81586 - DNA, 1149 bp, synthetic construct; identical to SEQ ID NO: 81585
  misc_feature 1..1149: note = Description of Artificial Sequence: Synthetic coding sequence
  source 1..1149: mol_type = other DNA

SEQ ID NO: 81587 - DNA, 705 bp, synthetic construct
  misc_feature 1..705: note = Description of Artificial Sequence: Synthetic coding sequence
  source 1..705: mol_type = other DNA
atgacctgccccgactgccccagcagcatccccaccgacagcagcaaccaccaggtgctggaggccgccaccgagagcctggccaagtacaacaacgagaacaccagcaagcagtacagcctgttcaaggtgaccagagccagcagccagtgggtggtgggccccagctacttcgtggagtacctgatcaaggagagcccctgcaccaagagccaggccagcagctgcagcctgcagagcagcgacagcgtgcccgtgggcctgtgcaagggcagcctgaccagaacccactgggagaagttcgtgagcgtgacctgcgacttcttcgagagccaggcccccgccaccggcagcgagaacagcgccgtgaaccagaagcccaccaacctgcccaaggtggaggagagccagcagaagaacaccccccccaccgacagccccagcaaggccggccccagaggcagcgtgcagtacctgcccgacctggacgacaagaacagccaggagaagggcccccaggaggccttccccgtgcacctggacctgaccaccaacccccagggcgagaccctggacatcagcttcctgttcctggagcccatggaggagaagctggtggtgctgcccttccccaaggagaaggccagaaccgccgagtgccccggccccgcccagaacgccagccccctggtgctgcccccctag

SEQ ID NO: 81588 - DNA, 717 bp, synthetic construct
  misc_feature 1..717: note = Description of Artificial Sequence: Synthetic coding sequence
  source 1..717: mol_type = other DNA
atgagacagagcggcgccagccagcccctgctgatcaacatgtacctgcccgaccccgtgggcgacggcctgttcaaggacggcaagaaccccagctggggccccctgagccccgccgtgcagaagggcagcggccagatccagctgtggcagttcctgctggagctgctggccgacagagccaacgccggctgcatcgcctgggagggcggccacggcgagttcaagctgaccgaccccgacgaggtggccagaagatggggcgagagaaagagcaagcccaacatgaactacgacaagctgagcagagccctgagatactactacgacaagaacatcatgagcaaggtgcacggcaagagatacgcctacagattcgacttccagggcctggcccaggcctgccagcccccccccgcccacgcccacgccgccgccgccgccgccgccgccgccgccgccgcccaggacggcgccctgtacaagctgcccgccggcctggcccccctgcccttccccggcctgagcaagctgaacctgatggccgccagcgccggcgtggcccccgccggcttcagctactggcccggccccggccccgccgccaccgccgccgccgccaccgccgccctgtaccccagccccagcctgcagcccccccccggccccttcggcgccgtggccgccgccagccacctgggcggccactaccactag

SEQ ID NO: 81589 - DNA, 1416 bp, synthetic construct
  misc_feature 1..1416: note = Description of Artificial Sequence: Synthetic coding sequence
  source 1..1416: mol_type = other DNA
atggacagcagctgccacaacgccaccaccaagatgctggccaccgcccccgccagaggcaacatgatgagcaccagcaagcccctggccttcagcatcgagagaatcatggccagaacccccgagcccaaggccctgcccgtgccccacttcctgcagggcgccctgcccaagggcgagcccaagcacagcctgcacctgaacagcagcatcccctgcatgatccccttcgtgcccgtggcctacgacaccagccccaaggccggcgtgaccggcagcgagcccagaaaggccagcctggaggcccccgccgcccccgccgccgtgcccagcgcccccgccttcagctgcagcgacctgctgaactgcgccctgagcctgaagggcgacctggccagagacgccctgcccctgcagcagtacaagctggtgagacccagagtggtgaaccacagcagcttccacgccatgggcgccctgtgctacctgaacagaggcgacggcccctgccaccccgccgccggcgtgaacatccaccccgtggccagctacttcctgagcagccccctgcacccccagcccaagacctacctggccgagagaaacaagctggtggtgcccgccgtggagaagtaccccagcggcgtggccttcaaggacctgagccaggcccagctgcagcactacatgaaggagagcgcccagctgctgagcgagaagatcgccttcaagaccagcgacttcagcagaggcagccccaacgccaagcccaaggtgttcacctgcgaggtgttcaacgcccactacaacctgaccagacacatgcccgtgcacaccggcgccagacccttcgtgtgcaaggtgtgcggcaagggcttcagacaggccagcaccctgtgcagacacaagatcatccacacccaggagaagccccacaagtgcaaccagtgcggcaaggccttcaacagaagcagcaccctgaacacccacaccagaatccacgccggctacaagcccttcgtgtgcgagttctgcggcaagggcttccaccagaagggcaactacaagaaccacaagctgacccacagcggcgagaagcagttcaagtgcaacatctgcaacaaggccttccaccaggtgtacaacctgaccttccacatgcacacccacaacgacaagaagcccttcacctgccccacctgcggcaagggcttctgcagaaacttcgacctgaagaagcacgtgagaaagctgcacgacagcagcctgggcctggccagaacccccgccggcgagcccggcaccgagccccccccccccctgccccagcagccccccatgaccctgccccccctgcagccccccctgcccacccccggccccctgcagcccggcctgcaccagggccaccagtag

SEQ ID NO: 81590 - DNA, 108 bp, synthetic construct
  misc_feature 1..108: note = Description of Artificial Sequence: Synthetic coding sequence
  source 1..108: mol_type = other DNA
atggacagcagctgccacaacgccaccaccaagatgctggccaccgcccccgccagaggcaacatgatgagcaccagcaagcccctggccttcagcatcgagagatag

SEQ ID NO: 81591 - DNA, 1278 bp, synthetic construct
  misc_feature 1..1278: note = Description of Artificial Sequence: Synthetic coding sequence
  source 1..1278: mol_type = other DNA
atggacagcagctgccacaacgccaccaccaagatgctggccaccgcccccgccagaggcaacatgatgagcaccagcaagcccctggccttcagcatcgagagaatcatggccagaacccccgagcccaaggccctgcccgtgccccacttcctgcagggcgccctgcccaagggcgagcccaagcacagcctgcacctgaacagcagcatcccctgcatgatccccttcgtgcccgtggcctacgacaccagccccaaggccggcgtgaccggcagcgagcccagaaaggccagcctggaggcccccgccgcccccgccgccgtgcccagcgcccccgccttcagctgcagcgacctgctgaactgcgccctgagcctgaagggcgacctggccagagacgccctgcccctgcagcagtacaagctgcccaagacctacctggccgagagaaacaagctggtggtgcccgccgtggagaagtaccccagcggcgtggccttcaaggacctgagccaggcccagctgcagcactacatgaaggagagcgcccagctgctgagcgagaagatcgccttcaagaccagcgacttcagcagaggcagccccaacgccaagcccaaggtgttcacctgcgaggtgtgcggcaaggtgttcaacgcccactacaacctgaccagacacatgcccgtgcacaccggcgccagacccttcgtgtgcaaggtgtgcggcaagggcttcagacaggccagcaccctgtgcagacacaagatcatccacacccaggagaagccccacaagtgcaaccagtgcggcaaggccttcaacagaagcagcaccctgaacacccacaccagaatccacgccggctacaagcccttcgtgtgcgagttctgcggcaagggcttccaccagaagggcaactacaagaaccacaagctgacccacagcggcgagaagcagttcaagtgcaacatctgcaacaaggccttccaccaggtgtacaacctgaccttccacatgcacacccacaacgacaagaagcccttcacctgccccacctgcggcaagggcttctgcagaaacttcgacctgaagaagcacgtgagaaagctgcacgacagcagcctgggcctggccagaacccccgccggcgagcccggcaccgagccccccccccccctgccccagcagccccccatgaccctgccccccctgcagccccccctgcccacccccggccccctgcagcccggcctgcaccagggccaccagtag

SEQ ID NO: 81592 - DNA, 1428 bp, synthetic construct
  misc_feature 1..1428: note = Description of Artificial Sequence: Synthetic coding sequence
  source 1..1428: mol_type = other DNA
atggacagcagctgccacaacgccaccaccaagatgctggccaccgcccccgccagaggcaacatgatgagcaccagcaagcccctggccttcagcatcgagagaatcatggccagaacccccgagcccaaggccctgcccgtgccccacttcctgcagggcgccctgcccaagggcgagcccaagcacagcctgcacctgaacagcagcatcccctgcatgatccccttcgtgcccgtggcctacgacaccagccccaaggccggcgtgaccggcagcgagcccagaaaggccagcctggaggcccccgccgcccccgccgccgtgcccagcgcccccgccttcagctgcagcgacctgctgaactgcgccctgagcctgaagggcgacctggccagagacgccctgcccctgcagcagtacaagctggtgagacccagagtggtgaaccacagcagcttccacgccatgggcgccctgtgctacctgaacagaggcgacggcccctgccaccccgccgccggcgtgaacatccaccccgtggccagctacttcctgagcagccccctgcacccccagcccaagacctacctggccgagagaaacaagctggtggtgcccgccgtggagaagtaccccagcggcgtggccttcaaggacctgagccaggcccagctgcagcactacatgaaggagagcgcccagctgctgagcgagaagatcgccttcaagaccagcgacttcagcagaggcagccccaacgccaagcccaaggtgttcacctgcgaggtgtgcggcaaggtgttcaacgcccactacaacctgaccagacacatgcccgtgcacaccggcgccagacccttcgtgtgcaaggtgtgcggcaagggcttcagacaggccagcaccctgtgcagacacaagatcatccacacccaggagaagccccacaagtgcaaccagtgcggcaaggccttcaacagaagcagcaccctgaacacccacaccagaatccacgccggctacaagcccttcgtgtgcgagttctgcggcaagggcttccaccagaagggcaactacaagaaccacaagctgacccacagcggcgagaagcagttcaagtgcaacatctgcaacaaggccttccaccaggtgtacaacctgaccttccacatgcacacccacaacgacaagaagcccttcacctgccccacctgcggcaagggcttctgcagaaacttcgacctgaagaagcacgtgagaaagctgcacgacagcagcctgggcctggccagaacccccgccggcgagcccggcaccgagccccccccccccctgccccagcagccccccatgaccctgccccccctgcagccccccctgcccacccccggccccctgcagcccggcctgcaccagggccaccagtag

SEQ ID NO: 81593 - DNA, 1380 bp, synthetic construct
  misc_feature 1..1380: note = Description of Artificial Sequence: Synthetic coding sequence
  source 1..1380: mol_type = other DNA
atggccagcagcgccagcctggagaccatggtgccccccgcctgccccagagccggcgccagccccgccaccagcaagaccctggccttcagcatcgagagaatcatggccaagaccagcgagcccagagcccccttcgagcccagacccggcgccctggaggccgacggcagccagggcaagaagctgctgaacctgtgcagccccctgccctgcatgatccccctgcagcccctgggctacgaggtgcccagcaagaccctgctgagctacagcgagctgtggaagagcagcctgagagccggcggcggcggcggcggcggcggcggcggcggcggcggcggcggcggcgcccccgtgtgcggcgccagcggcctgtgcaagaccaactgcggcgtgtgctgcaaggccgagctgggcctggcccccagcgccctgcccgccggcagagtgatcaagccccaggtgatcaaccaggccgtgggcctgcccgccagcggcagcctgtactacttcaactacctggacagcaccgcctacccccccagcgagctgctgagcggccacctgttccccagcggcctgctgaacgcccaggcccccgccgccctggccgcccaccccaagctgttcctgctggagaacgccaagctggccggcctggccgccgacaagttcccccaccccgccccctacccccacaaggagagactgcccgcccccctggagcaggtgctgaaggagaacagcgccctgaccgccgagagaggcggcgtgaagggccacagcaagctgcccggcggcagcgccgacggcaagcccaagaacttcacctgcgaggtgtgcggcaaggtgttcaacgcccactacaacctgaccagacacatgcccgtgcacaccggcgccagacccttcgtgtgcaaggtgtgcggcaagggcttcagacaggccagcaccctgtgcagacacaagatcatccacacccaggagaagccccacaagtgcaaccagtgcggcaaggccttcaacagaagcagcaccctgaacacccacatcagaatccacgccggctacaagcccttcgtgtgcgagttctgcggcaagggcttccaccagaagggcaactacaagaaccacaagctgacccacagcggcgagaagcagtacaagtgcaccatctgcaacaaggccttccaccaggtgtacaacctgaccttccacatgcacacccacaacgacaagaagcccttcacctgcgccacctgcggcaagggcttctgcagaaacttcgacctgaagaagcacgtgagaaagctgcacgacagcgtgggccccgccgcccccagcgccaaggacctgaccagaaccgtgcagagctag

SEQ ID NO: 81594 - DNA, 1380 bp, synthetic construct; identical to SEQ ID NO: 81593
  misc_feature 1..1380: note = Description of Artificial Sequence: Synthetic coding sequence
  source 1..1380: mol_type = other DNA

SEQ ID NO: 81595 - DNA, 1380 bp, synthetic construct; identical to SEQ ID NO: 81593
  misc_feature 1..1380: note = Description of Artificial Sequence: Synthetic coding sequence
  source 1..1380: mol_type = other DNA

SEQ ID NO: 81596 - DNA, 1140 bp, synthetic construct
  misc_feature 1..1140: note = Description of Artificial Sequence: Synthetic coding sequence
  source 1..1140: mol_type = other DNA
atggccgccaccgccgccgccgtggtggccgaggaggacaccgagctgagagacctgctggtgcagaccctggagaacagcggcgtgctgaacagaatcaaggccgagctgagagccgccgtgttcctggccctggaggagcaggagaaggtggagaacaagacccccctggtgaacgagagcctgaagaagttcctgaacaccaaggacggcagactggtggccagcctggtggccgagttcctgcagttcttcaacctggacttcaccctggccgtgttccagcccgagaccagcaccctgcagggcctggagggcagagagaacctggccagagacctgggcatcatcgaggccgagggcaccgtgggcggccccctgctgctggaggtgatcagaagatgccagcagaaggagaagggccccaccaccggcgagggcgccctggacctgagcgacgtgcacagcccccccaagagccccgagggcaagaccagcgcccagaccacccccagcaagaaggccaacgacgaggccaaccagagcgacaccagcgtgagcctgagcgagcccaagagcaagagcagcctgcacctgctgagccacgagaccaagatcggcagcttcctgagcaacagaaccctggacggcaaggacaaggccggcctgtgccccgacgaggacgacatggagggcgacagcttcttcgacgaccccatccccaagcccgagaagacctacggcctgagaaaggagcccagaaagcaggccggcagcctggccagcctgagcgacgccccccccctgaagagcggcctgagcagcctggccggcgcccccagcctgaaggacagcgagagcaagagaggcaacaccgtgctgaaggacctgaagctgatcagcgacaagatcggcagcctgggcctgggcaccggcgaggacgacgactacgtggacgacttcaacagcaccagccacagaagcgagaagagcgagatcagcatcggcgaggagatcgaggaggacctgagcgtggagatcgacgacatcaacaccagcgacaagctggacgacctgacccaggacctgaccgtgagccagctgagcgacgtggccgactacctggaggacgtggcctag

SEQ ID NO: 81597 - DNA, 1200 bp, synthetic construct
  misc_feature 1..1200: note = Description of Artificial Sequence: Synthetic coding sequence
  source 1..1200: mol_type = other DNA
atggccgccaccgccgccgccgtggtggccgaggaggacaccgagctgagagacctgctggtgcagaccctggagaacagcggcgtgctgaacagaatcaaggccgagctgagagccgccgtgttcctggccctggaggagcaggagaaggtggagaacaagacccccctggtgaacgagagcctgaagaagttcctgaacaccaaggacggcagactggtggccagcctggtggccgagttcctgcagttcttcaacctggacttcaccctggccgtgttccagcccgagaccagcaccctgcagggcctggagggcagagagaacctggccagagacctgggcatcatcgaggccgagggcaccgtgggcggccccctgctgctggaggtgatcagaagatgccagcagaaggagaagggccccaccaccggcgagggcgccctggacctgagcgacgtgcacagcccccccaagagccccgagggcaagaccagcgcccagaccacccccagcaagatccccagatacaagggccagggcaagaagaagaccagcggccagaaggccggcgacaagaaggccaacgacgaggccaaccagagcgacaccagcgtgagcctgagcgagcccaagagcaagagcagcctgcacctgctgagccacgagaccaagatcggcagcttcctgagcaacagaaccctggacggcaaggacaaggccggcctgtgccccgacgaggacgacatggagggcgacagcttcttcgacgaccccatccccaagcccgagaagacctacggcctgagaaaggagcccagaaagcaggccggcagcctggccagcctgagcgacgccccccccctgaagagcggcctgagcagcctggccggcgcccccagcctgaaggacagcgagagcaagagaggcaacaccgtgctgaaggacctgaagctgatcagcgacaagatcggcagcctgggcctgggcaccggcgaggacgacgactacgtggacgacttcaacagcaccagccacagaagcgagaagagcgagatcagcatcggcgaggagatcgaggaggacctgagcgtggagatcgacgacatcaacaccagcgacaagctggacgacctgacccaggacctgaccgtgagccagctgagcgacgtggccgactacctggaggacgtggcctag

SEQ ID NO: 81598 - DNA, 1095 bp, synthetic construct
  misc_feature 1..1095: note = Description of Artificial Sequence: Synthetic coding sequence
  source 1..1095: mol_type = other DNA
atggccgccaccgccgccgccgtggtggccgaggaggacaccgagctgagagacctgctggtgcagaccctggagaacagcggcgtgctgaacagaatcaaggccgagctgagagccgccgtgttcctggccctggaggagcaggagaaggtggagaacaagacccccctggtgaacgagagcctgaagaagttcctgaacaccaaggacggcagactggtggccagcctggtggccgagttcctgcagttcttcaacctggacttcaccctggccgtgttccagcccgagaccagcaccctgcagggcctggagggcagagagaacctggccagagacctgggcatcatcgaggccgagggcaccgtgggcggccccctgctgctggaggtgatcagaagatgccagcagaaggagaagggccccaccaccggcgagaaggccaacgacgaggccaaccagagcgacaccagcgtgagcctgagcgagcccaagagcaagagcagcctgcacctgctgagccacgagaccaagatcggcagcttcctgagcaacagaaccctggacggcaaggacaaggccggcctgtgccccgacgaggacgacatggagggcgacagcttcttcgacgaccccatccccaagcccgagaagacctacggcctgagaaaggagcccagaaagcaggccggcagcctggccagcctgagcgacgccccccccctgaagagcggcctgagcagcctggccggcgcccccagcctgaaggacagcgagagcaagagaggcaacaccgtgctgaaggacctgaagctgatcagcgacaagatcggcagcctgggcctgggcaccggcgaggacgacgactacgtggacgacttcaacagcaccagccacagaagcgagaagagcgagatcagcatcggcgaggagatcgaggaggacctgagcgtggagatcgacgacatcaacaccagcgacaagaccatcacccagctggagtgcctgctgagcatcggcgccctgcacttcaagaacaccgccgacatcttcaaggtgatcttcatcctgctgaacaagatcctgcccatctag

SEQ ID NO: 81599 - DNA, 420 bp, synthetic construct
  misc_feature 1..420: note = Description of Artificial Sequence: Synthetic coding sequence
  source 1..420: mol_type = other DNA
atgagcagcctgcccgtgccctacaagctgcccgtgagcctgagcgtgggcagctgcgtgatcatcaagggcacccccatccacagcttcatcaacgacccccagctgcaggtggacttctacaccgacatggacgaggacagcgacatcgccttcagattcagagtgcacttcggcaaccacgtggtgatgaacagaagagagttcggcatctggatgctggaggagaccaccgactacgtgcccttcgaggacggcaagcagttcgagctgtgcatctacgtgcactacaacgagtacgagatcaaggtgaacggcatcagaatctacggcttcgtgcacagaatcccccccagcttcgtgaagatggtgcaggtgagcagagacatcagcctgaccagcgtgtgcgtgtgcaactag

SEQ ID NO: 81600 - DNA, 8616 bp, synthetic construct
  misc_feature 1..8616: note = Description of Artificial Sequence: Synthetic coding sequence
  source 1..8616: mol_type = other DNA
atgagaagaggcagactgctggagatcgccctgggcttcaccgtgctgctggccagctacaccagccacggcgccgacgccaacctggaggccggcaacgtgaaggagaccagagccagcagagccaagagaagaggcggcggcggccacgacgccctgaagggccccaacgtgtgcggcagcagatacaacgcctactgctgccccggctggaagaccctgcccggcggcaaccagtgcatcgtgcccatctgcagacacagctgcggcgacggcttctgcagcagacccaacatgtgcacctgccccagcggccagatcgcccccagctgcggcagcagaagcatccagcactgcaacatcagatgcatgaacggcggcagctgcagcgacgaccactgcctgtgccagaagggctacatcggcacccactgcggccagcccgtgtgcgagagcggctgcctgaacggcggcagatgcgtggcccccaacagatgcgcctgcacctacggcttcaccggcccccagtgcgagagagactacagaaccggcccctgcttcaccgtgatcagcaaccagatgtgccagggccagctgagcggcatcgtgtgcaccaagaccctgtgctgcgccaccgtgggcagagcctggggccacccctgcgagatgtgccccgcccagccccacccctgcagaagaggcttcatccccaacatcagaaccggcgcctgccaggacgtggacgagtgccaggccatccccggcctgtgccagggcggcaactgcatcaacaccgtgggcagcttcgagtgcaagtgccccgccggccacaagctgaacgaggtgagccagaagtgcgaggacatcgacgagtgcagcaccatccccggcatctgcgagggcggcgagtgcaccaacaccgtgagcagctacttctgcaagtgcccccccggcttctacaccagccccgacggcaccagatgcatcgacgtgagacccggctactgctacaccgccctgaccaacggcagatgcagcaaccagctgccccagagcatcaccaagatgcagtgctgctgcgacgccggcagatgctggagccccggcgtgaccgtggcccccgagatgtgccccatcagagccaccgaggacttcaacaagctgtgcagcgtgcccatggtgatccccggcagacccgagtacccccccccccccctgggccccatcccccccgtgctgcccgtgccccccggcttcccccccggcccccagatccccgtgcccagaccccccgtggagtacctgtaccccagcagagagccccccagagtgctgcccgtgaacgtgaccgactactgccagctggtgagatacctgtgccagaacggcagatgcatccccacccccggcagctgcagatgcgagtgcaacaagggcttccagctggacctgagaggcgagtgcatcgacgtggacgagtgcgagaagaacccctgcgccggcggcgagtgcatcaacaaccagggcagctacacctgccagtgcagagccggctaccagagcaccctgaccagaaccgagtgcagagacatcgacgagtgcctgcagaacggcagaatctgcaacaacggcagatgcatcaacaccgacggcagcttccactgcgtgtgcaacgccggcttccacgtgaccagagacggcaagaactgcgaggacatggacgagtgcagcatcagaaacatgtgcctgaacggcatgtgcatcaacgaggacggcagcttcaagtgcatctgcaagcccggcttccagctggccagcgacggcagatactgcaaggacatcaacgagtgcgagacccccggcatctgcatgaacggcagatgcgtgaacaccgacggcagctacagatgcgagtgcttccccggcctggccgtgggcctggacggcagagtgtgcgtggacacccacatgagaagcacctgctacggcggctacaagagaggccagtgcatcaagcccctgttcggcgccgtgaccaagagcgagtgctgctgcgccagcaccgagtacgccttcggcgagccctgccagccctgccccgcccagaacagcgccgagtaccaggccctgtgcagcagcggccccggcatgaccagcgccggcagcgacatcaacgagtgcgccctggaccccgacatctgccccaacggcatctgcgagaacctgagaggcacctacaagtgcatctgcaacagcggctacgaggtggacagcaccggcaagaactgcgtggacatcaacgagtgcgtgctgaacagcctgctgtgcgacaacggccagtgcagaaacacccccggcagcttcgtgtgcacctgccccaagggcttcatctacaagcccgacctgaagacctgcgaggacatcgacgagtgcgagagcagcccctgcatcaacggcgtgtgcaagaacagccccggcagcttcatctgcgagtgcagcagcgagagcaccctggaccccaccaagaccatctgcatcgagaccatcaagggcacctgctggcagaccgtgatcgacggcagatgcgagatcaacatcaacggcgccaccctgaagagccagtgctgcagcagcctgggcgccgcctggggcagcccctgcaccctgtgccaggtggaccccatctgcggcaagggctacagcagaatcaagggcacccagtgcgaggacatcgacgagtgcgaggtgttccccggcgtgtgcaagaacggcctgtgcgtgaacaccagaggcagcttcaagtgccagtgccccagcggcatgaccctggacgccaccggcagaatctgcctggacatcagactggagacctgcttcctgagatacgaggacgaggagtgcaccctgcccatcgccggcagacacagaatggacgcctgctgctgcagcgtgggcgccgcctggggcaccgaggagtgcgaggagtgccccatgagaaacacccccgagtacgaggagctgtgccccagaggccccggcttcgccaccaaggagatcaccaacggcaagcccttcttcaaggacatcaacgagtgcaagatgatccccagcctgtgcacccacggcaagtgcagaaacaccatcggcagcttcaagtgcagatgcgacagcggcttcgccctggacagcgaggagagaaactgcaccgacatcgacgagtgcagaatcagccccgacctgtgcggcagaggccagtgcgtgaacacccccggcgacttcgagtgcaagtgcgacgagggctacgagagcggcttcatgatgatgaagaactgcatggacatcgacgagtgccagagagaccccctgctgtgcagaggcggcgtgtgccacaacaccgagggcagctacagatgcgagtgcccccccggccaccagctgagccccaacatcagcgcctgcatcgacatcaacgagtgcgagctgagcgcccacctgtgccccaacggcagatgcgtgaacctgatcggcaagtaccagtgcgcctgcaaccccggctaccacagcacccccgacagactgttctgcgtggacatcgacgagtgcagcatcatgaacggcggctgcgagaccttctgcaccaacagcgagggcagctacgagtgcagctgccagcccggcttcgccctgatgcccgaccagagaagctgcaccgacatcgacgagtgcgaggacaaccccaacatctgcgacggcggccagtgcaccaacatccccggcgagtacagatgcctgtgctacgacggcttcatggccagcgaggacatgaagacctgcgtggacgtgaacgagtgcgacctgaaccccaacatctgcctgagcggcacctgcgagaacaccaagggcagcttcatctgccactgcgacatgggctacagcggcaagaagggcaagaccggctgcaccgacatcaacgagtgcgagatcggcgcccacaactgcggcaagcacgccgtgtgcaccaacaccgccggcagcttcaagtgcagctgcagccccggctggatcggcgacggcatcaagtgcaccgacctggacgagtgcagcaacggcacccacatgtgcagccagcacgccgactgcaagaacaccatgggcagctacagatgcctgtgcaaggagggctacaccggcgacggcttcacctgcaccgacctggacgagtgcagcgagaacctgaacctgtgcggcaacggccagtgcctgaacgcccccggcggctacagatgcgagtgcgacatgggcttcgtgcccagcgccgacggcaaggcctgcgaggacatcgacgagtgcagcctgcccaacatctgcgtgttcggcacctgccacaacctgcccggcctgttcagatgcgagtgcgagatcggctacgagctggacagaagcggcggcaactgcaccgacgtgaacgagtgcctggaccccaccacctgcatcagcggcaactgcgtgaacacccccggcagctacatctgcgactgcccccccgacttcgagctgaaccccaccagagtgggctgcgtggacaccagaagcggcaactgctacctggacatcagacccagaggcgacaacggcgacaccgcctgcagcaacgagatcggcgtgggcgtgagcaaggccagctgctgctgcagcctgggcaaggcctggggcaccccctgcgagatgtgccccgccgtgaacaccagcgagtacaagatcctgtgccccggcggcgagggcttcagacccaaccccatcaccgtgatcctggaggacatcgacgagtgccaggagctgcccggcctgtgccagggcggcaagtgcatcaacaccttcggcagcttccagtgcagatgccccaccggctactacctgaacgaggacaccagagtgtgcgacgacgtgaacgagtgcgagacccccggcatctgcggccccggcacctgctacaacaccgtgggcaactacacctgcatctgcccccccgactacatgcaggtgaacggcggcaacaactgcatggacatgagaagaagcctgtgctacagaaactactacgccgacaaccagacctgcgacggcgagctgctgttcaacatgaccaagaagatgtgctgctgcagctacaacatcggcagagcctggaacaagccctgcgagcagtgccccatccccagcaccgacgagttcgccaccctgtgcggcagccagagacccggcttcgtgatcgacatctacaccggcctgcccgtggacatcgacgagtgcagagagatccccggcgtgtgcgagaacggcgtgtgcatcaacatggtgggcagcttcagatgcgagtgccccgtgggcttcttctacaacgacaagctgctggtgtgcgaggacatcgacgagtgccagaacggccccgtgtgccagagaaacgccgagtgcatcaacaccgccggcagctacagatgcgactgcaagcccggctacagattcaccagcaccggccagtgcaacgacagaaacgagtgccaggagatccccaacatctgcagccacggccagtgcatcgacaccgtgggcagcttctactgcctgtgccacaccggcttcaagaccaacgacgaccagaccatgtgcctggacatcaacgagtgcgagagagacgcctgcggcaacggcacctgcagaaacaccatcggcagcttcaactgcagatgcaaccacggcttcatcctgagccacaacaacgactgcatcgacgtggacgagtgcgccagcggcaacggcaacctgtgcagaaacggccagtgcatcaacaccgtgggcagcttccagtgccagtgcaacgagggctacgaggtggcccccgacggcagaacctgcgtggacatcaacgagtgcctgctggagcccagaaagtgcgcccccggcacctgccagaacctggacggcagctacagatgcatctgcccccccggctacagcctgcagaacgagaagtgcgaggacatcgacgagtgcgtggaggagcccgagatctgcgccctgggcacctgcagcaacaccgagggcagcttcaagtgcctgtgccccgagggcttcagcctgagcagcagcggcagaagatgccaggacctgagaatgagctactgctacgccaagttcgagggcggcaagtgcagcagccccaagagcagaaaccacagcaagcaggagtgctgctgcgccctgaagggcgagggctggggcgacccctgcgagctgtgccccaccgagcccgacgaggccttcagacagatctgcccctacggcagcggcatcatcgtgggccccgacgacagcgccgtggacatggacgagtgcaaggagcccgacgtgtgcaagcacggccagtgcatcaacaccgacggcagctacagatgcgagtgccccttcggctacatcctggccggcaacgagtgcgtggacaccgacgagtgcagcgtgggcaacccctgcggcaacggcacctgcaagaacgtgatcggcggcttcgagtgcacctgcgaggagggcttcgagcccggccccatgatgacctgcgaggacatcaacgagtgcgcccagaaccccctgctgtgcgccttcagatgcgtgaacacctacggcagctacgagtgcaagtgccccgtgggctacgtgctgagagaggacagaagaatgtgcaaggacgaggacgagtgcgaggagggcaagcacgactgcaccgagaagcagatggagtgcaagaacctgatcggcacctacatgtgcatctgcggccccggctaccagagaagacccgacggcgagggctgcgtggacgagaacgagtgccagaccaagcccggcatctgcgagaacggcagatgcctgaacaccagaggcagctacacctgcgagtgcaacgacggcttcaccgccagccccaaccaggacgagtgcctggacaacagagagggctactgcttcaccgaggtgctgcagaacatgtgccagatcggcagcagcaacagaaaccccgtgaccaagagcgagtgctgctgcgacggcggcagaggctggggcccccactgcgagatctgccccttccagggcaccgtggccttcaagaagctgtgcccccacggcagaggcttcatgaccaacggcgccgacatcgacgagtgcaaggtgatccacgacgtgtgcagaaacggcgagtgcgtgaacgacagaggcagctaccactgcatctgcaagaccggctacacccccgacatcaccggcaccagctgcgtggacctgaacgagtgcaaccaggcccccaagccctgcaacttcatctgcaagaacaccgagggcagctaccagtgcagctgccccaagggctacatcctgcaggaggacggcagaagctgcaaggacctggacgagtgcgccaccaagcagcacaactgccagttcctgtgcgtgaacaccatcggcggcttcacctgcaagtgcccccccggcttcacccagcaccacaccagctgcatcgacaacaacgagtgcaccagcgacatcaacctgtgcggcagcaagggcatctgccagaacacccccggcagcttcacctgcgagtgccagagaggcttcagcctggaccagaccggcagcagctgcgaggacgtggacgagtgcgagggcaaccacagatgccagcacggctgccagaacatcatcggcggctacagatgcagctgcccccagggctacctgcagcactaccagtggaaccagtgcgtggacgagaacgagtgcctgagcgcccacatctgcggcggcgccagctgccacaacaccctgggcagctacaagtgcatgtgccccgccggcttccagtacgagcagttcagcggcggctgccaggacatcaacgagtgcggcagcgcccaggccccctgcagctacggctgcagcaacaccgagggcggctacctgtgcggctgcccccccggctacttcagaatcggccagggccactgcgtgagcggcatgggcatgggcagaggcaaccccgagccccccgtgagcggcgagatggacgacaacagcctgagccccgaggcctgctacgagtgcaagatcaacggctaccccaagagaggcagaaagagaagaagcaccaacgagaccgacgccagcaacatcgaggaccagagcgagaccgaggccaacgtgagcctggccagctgggacgtggagaagaccgccatcttcgccttcaacatcagccacgtgagcaacaaggtgagaatcctggagctgctgcccgccctgaccaccctgaccaaccacaacagatacctgatcgagagcggcaacgaggacggcttcttcaagatcaaccagaaggagggcatcagctacctgcacttcaccaagaagaagcccgtggccggcacctacagcctgcagatcagcagcacccccctgtacaagaagaaggagctgaaccagctggaggacaagtacgacaaggactacctgagcggcgagctgggcgacaacctgaagatgaagatccaggtgctgctgcactag

SEQ ID NO: 81601 - DNA, 2958 bp, synthetic construct
  misc_feature 1..2958: note = Description of Artificial Sequence: Synthetic coding sequence
  source 1..2958: mol_type = other DNA
atgggcttcgtgcccagcgccgacggcaaggcctgcgaggacatcgacgagtgcagcctgcccaacatctgcgtgttcggcacctgccacaacctgcccggcctgttcagatgcgagtgcgagatcggctacgagctggacagaagcggcggcaactgcaccgacgtgaacgagtgcctggaccccaccacctgcatcagcggcaactgcgtgaacacccccggcagctacatctgcgactgcccccccgacttcgagctgaaccccaccagagtgggctgcgtggacaccagaagcggcaactgctacctggacatcagacccagaggcgacaacggcgacaccgcctgcagcaacgagatcggcgtgggcgtgagcaaggccagctgctgctgcagcctgggcaaggcctggggcaccccctgcgagatgtgccccgccgtgaacaccagcgagtacaagatcctgtgccccggcggcgagggcttcagacccaaccccatcaccgtgatcctggaggacatcgacgagtgccaggagctgcccggcctgtgccagggcggcaagtgcatcaacaccttcggcagcttccagtgcagatgccccaccggctactacctgaacgaggacaccagagtgtgcgacgacgtgaacgagtgcgagacccccggcatctgcggccccggcacctgctacaacaccgtgggcaactacacctgcatctgcccccccgactacatgcaggtgaacggcggcaacaactgcatggacatgagaagaagcctgtgctacagaaactactacgccgacaaccagacctgcgacggcgagctgctgttcaacatgaccaagaagatgtgctgctgcagctacaacatcggcagagcctggaacaagccctgcgagcagtgccccatccccagcaccgacgagttcgccaccctgtgcggcagccagagacccggcttcgtgatcgacatctacaccggcctgcccgtggacatcgacgagtgcagagagatccccggcgtgtgcgagaacggcgtgtgcatcaacatggtgggcagcttcagatgcgagtgccccgtgggcttcttctacaacgacaagctgctggtgtgcgaggacatcgacgagtgccagaacggccccgtgtgccagagaaacgccgagtgcatcaacaccgccggcagctacagatgcgactgcaagcccggctacagattcaccagcaccggccagtgcaacgacagaaacgagtgccaggagatccccaacatctgcagccacggccagtgcatcgacaccgtgggcagcttctactgcctgtgccacaccggcttcaagaccaacgacgaccagaccatgtgcctggacatcaacgagtgcgagagagacgcctgcggcaacggcacctgcagaaacaccatcggcagcttcaactgcagatgcaaccacggcttcatcctgagccacaacaacgactgcatcgacgtggacgagtgcgccagcggcaacggcaacctgtgcagaaacggccagtgcatcaacaccgtgggcagcttccagtgccagtgcaacgagggctacgaggtggcccccgacggcagaacctgcgtggacatcaacgagtgcctgctggagcccagaaagtgcgcccccggcacctgccagaacctggacggcagctacagatgcatctgcccccccggctacagcctgcagaacgagaagtgcgaggacatcgacgagtgcgtggaggagcccgagatctgcgccctgggcacctgcagcaacaccgagggcagcttcaagtgcctgtgccccgagggcttcagcctgagcagcagcggcagaagatgccaggacctgagaatgagctactgctacgccaagttcgagggcggcaagtgcagcagccccaagagcagaaaccacagcaagcaggagtgctgctgcgccctgaagggcgagggctggggcgacccctgcgagctgtgccccaccgagcccgacgaggccttcagacagatctgcccctacggcagcggcatcatcgtgggccccgacgacagcgccgtggacatggacgagtgcaaggagcccgacgtgtgcaagcacggccagtgcatcaacaccgacggcagctacagatgcgagtgccccttcggctacatcctggccggcaacgagtgcgtggacaccgacgagtgcagcgtgggcaacccctgcggcaacggcacctgcaagaacgtgatcggcggcttcgagtgcacctgcgaggagggcttcgagcccggccccatgatgacctgcgaggacatcaacgagtgcgcccagaaccccctgctgtgcgccttcagatgcgtgaacacctacggcagctacgagtgcaagtgccccgtgggctacgtgctgagagaggacagaagaatgtgcaaggacgaggacgagtgcgaggagggcaagcacgactgcaccgagaagcagatggagtgcaagaacctgatcggcacctacatgtgcatctgcggccccggctaccagagaagacccgacggcgagggctgcgtggacgagaacgagtgccagaccaagcccggcatctgcgagaacggcagatgcctgaacaccagaggcagctacacctgcgagtgcaacgacggcttcaccgccagccccaaccaggacgagtgcctggacgtgatcctgagcctgctgctgctgagccccgccttccccagctgcttcttcagccccagaaccatcggcaagggcaccgccagccagagatgctacaagacctgcgtgagaagcgcccccgccaccggcacccccagccccaacagaaacgccgccgtgaccgagggcgaggccggcgtgcccaccgtgagaagcgccctgagcagaggcctgtggctgagcagaaacagcgtgcccatggccgaggacagctag

SEQ ID NO: 81602 - DNA, 3450 bp, synthetic construct
  misc_feature 1..3450: note = Description of Artificial Sequence: Synthetic coding sequence
  source 1..3450: mol_type = other DNA
atgagaagaggcagactgctggagatcgccctgggcttcaccgtgctgctggccagctacaccagccacggcgccgacgccaacctggaggccggcaacgtgaaggagaccagagccagcagagccaagagaagaggcggcggcggccacgacgccctgaagggccccaacgtgtgcggcagcagatacaacgcctactgctgccccggctggaagaccctgcccggcggcaaccagtgcatcgtgcccatctgcagacacagctgcggcgacggcttctgcagcagacccaacatgtgcacctgccccagcggccagatcgcccccagctgcggcagcagaagcatccagcactgcaacatcagatgcatgaacggcggcagctgcagcgacgaccactgcctgtgccagaagggctacatcggcacccactgcggccagcccgtgtgcgagagcggctgcctgaacggcggcagatgcgtggcccccaacagatgcgcctgcacctacggcttcaccggcccccagtgcgagagagactacagaaccggcccctgcttcaccgtgatcagcaaccagatgtgccagggccagctgagcggcatcgtgtgcaccaagaccctgtgctgcacctacatcaacgagtgcgagatcggcgcccacaactgcggcaagcacgccgtgtgcaccaacaccgccggcagcttcaagtgcagctgcagccccggctggatcggcgacggcatcaagtgcaccgacctggacgagtgcagcaacggcacccacatgtgcagccagcacgccgactgcaagaacaccatgggcagctacagatgcctgtgcaaggagggctacaccggcgacggcttcacctgcaccgacctggacgagtgcagcgagaacctgaacctgtgcggcaacggccagtgcctgaacgcccccggcggctacagatgcgagtgcgacatgggcttcgtgcccagcgccgacggcaaggcctgcgaggacatcgacgagtgcagcctgcccaacatctgcgtgttcggcacctgccacaacctgcccggcctgttcagatgcgagtgcgagatcggctacgagctggacagaagcggcggcaactgcaccgacgtgaacgagtgcctggaccccaccacctgcatcagcggcaactgcgtgaacacccccggcagctacatctgcgactgcccccccgacttcgagctgaaccccaccagagtgggctgcgtggacaccagaagcggcaactgctacctggacatcagacccagaggcgacaacggcgacaccgcctgcagcaacgagatcggcgtgggcgtgagcaaggccagctgctgctgcagcctgggcaaggcctggggcaccccctgcgagatgtgccccgccgtgaacaccagcgagtacaagatcctgtgccccggcggcgagggcttcagacccaaccccatcaccgtgatcctggaggacatcgacgagtgccaggagctgcccggcctgtgccagggcggcaagtgcatcaacaccttcggcagcttccagtgcagatgccccaccggctactacctgaacgaggacaccagagtgtgcgacgacgtgaacgagtgcgagacccccggcatctgcggccccggcacctgctacaacaccgtgggcaactacacctgcatctgcccccccgactacatgcaggtgaacggcggcaacaactgcatggacatgagaagaagcctgtgctacagaaactactacgccgacaaccagacctgcgacggcgagctgctgttcaacatgaccaagaagatgtgctgctgcagctacaacatcggcagagcctggaacaagccctgcgagcagtgccccatccccagcaccgacgagttcgccaccctgtgcggcagccagagacccggcttcgtgatcgacatctacaccggcctgcccgtggacatcgacgagtgcagagagatccccggcgtgtgcgagaacggcgtgtgcatcaacatggtgggcagcttcagatgcgagtgccccgtgggcttcttctacaacgacaagctgctggtgtgcgaggacatcgacgagtgccagaacggccccgtgtgccagagaaacgccgagtgcatcaacaccgccggcagctacagatgcgactgcaagcccggctacagattcaccagcaccggccagtgcaacgacagaaacgagtgccaggagatccccaacatctgcagccacggccagtgcatcgacaccgtgggcagcttctactgcctgtgccacaccggcttcaagaccaacgacgaccagaccatgtgcctggacatcaacgagtgcgagagagacgcctgcggcaacggcacctgcagaaacaccatcggcagcttcaactgcagatgcaaccacggcttcatcctgagccacaacaacgactgcatcgacgtggacgagtgcgccagcggcaacggcaacctgtgcagaaacggccagtgcatcaacaccgtgggcagcttccagtgccagtgcaacgagggctacgaggtggcccccgacggcagaacctgcgtggacatcaacgagtgcctgctggagcccagaaagtgcgcccccggcacctgccagaacctggacggcagctacagatgcatctgcccccccggctacagcctgcagaacgagaagtgcgaggacatcgacgagtgcgtggaggagcccgagatctgcgccctgggcacctgcagcaacaccgagggcagcttcaagtgcctgtgccccgagggcttcagcctgagcagcagcggcagaagatgccaggacctgagaatgagctactgctacgccaagttcgagggcggcaagtgcagcagccccaagagcagaaaccacagcaagcaggagtgctgctgcgccctgaagggcgagggctggggcgacccctgcgagctgtgccccaccgagcccgacgaggccttcagacagatctgcccctacggcagcggcatcatcgtgggccccgacgacagcgccgtggacatggacgagtgcaaggagcccgacgtgtgcaagcacggccagtgcatcaacaccgacggcagctacagatgcgagtgccccttcggctacatcctggccggcaacgagtgcgtggacaccgacgagtgcagcgtgggcaacccctgcggcaacggcacctgcaagaacgtgatcggcggcttcgagtgcacctgcgaggagggcttcgagcccggccccatgatgacctgcgaggacatcaacgagtgcgcccagaaccccctgctgtgcgccttcagatgcgtgaacacctacggcagctacgagtgcaagtgccccgtgggctacgtgctgagagaggacagaagaatgtgcaaggacgaggacgagtgcgaggagggcaagcacgactgcacctag

SEQ ID NO: 81603 - DNA, 8739 bp, synthetic construct
  misc_feature 1..8739: note = Description of Artificial Sequence: Synthetic coding sequence
  source 1..8739: mol_type = other DNA
atgggcagaagaagaagactgtgcctgcagctgtacttcctgtggctgggctgcgtggtgctgtgggcccagggcaccgccggccagccccagccccccccccccaagccccccagaccccagccccccccccagcaggtgagaagcgccaccgccggcagcgagggcggcttcctggcccccgagtacagagaggagggcgccgccgtggccagcagagtgagaagaagaggccagcaggacgtgctgagaggccccaacgtgtgcggcagcagattccacagctactgctgccccggctggaagaccctgcccggcggcaaccagtgcatcgtgcccatctgcagaaacagctgcggcgacggcttctgcagcagacccaacatgtgcacctgcagcagcggccagatcagcagcacctgcggcagcaagagcatccagcagtgcagcgtgagatgcatgaacggcggcacctgcgccgacgaccactgccagtgccagaagggctacatcggcacctactgcggccagcccgtgtgcgagaacggctgccagaacggcggcagatgcatcggccccaacagatgcgcctgcgtgtacggcttcaccggcccccagtgcgagagagactacagaaccggcccctgcttcacccaggtgaacaaccagatgtgccagggccagctgaccggcatcgtgtgcaccaagaccctgtgctgcgccaccatcggcagagcctggggccacccctgcgagatgtgccccgcccagccccagccctgcagaagaggcttcatccccaacatcagaaccggcgcctgccaggacgtggacgagtgccaggccatccccggcatctgccagggcggcaactgcatcaacaccgtgggcagcttcgagtgcagatgccccgccggccacaagcagagcgagaccacccagaagtgcgaggacatcgacgagtgcagcatcatccccggcatctgcgagaccggcgagtgcagcaacaccgtgggcagctacttctgcgtgtgccccagaggctacgtgaccagcaccgacggcagcagatgcatcgaccagagaaccggcatgtgcttcagcggcctggtgaacggcagatgcgcccaggagctgcccggcagaatgaccaagatgcagtgctgctgcgagcccggcagatgctggggcatcggcaccatccccgaggcctgccccgtgagaggcagcgaggagtacagaagactgtgcatggacggcctgcccatgggcggcatccccggcagcgccggcagcagacccggcggcaccggcggcaacggcttcgcccccagcggcaacggcaacggctacggccccggcggcaccggcttcatccccatccccggcggcaacggcttcagccccggcgtgggcggcgccggcgtgggcgccggcggccagggccccatcatcaccggcctgaccatcctgaaccagaccatcgacatctgcaagcaccacgccaacctgtgcctgaacggcagatgcatccccaccgtgagcagctacagatgcgagtgcaacatgggctacaagcaggacgccaacggcgactgcatcgacgtggacgagtgcaccagcaacccctgcaccaacggcgactgcgtgaacacccccggcagctactactgcaagtgccacgccggcttccagagaacccccaccaagcaggcctgcatcgacatcgacgagtgcatccagaacggcgtgctgtgcaagaacggcagatgcgtgaacaccgacggcagcttccagtgcatctgcaacgccggcttcgagctgaccaccgacggcaagaactgcgtggaccacgacgagtgcaccaccaccaacatgtgcctgaacggcatgtgcatcaacgaggacggcagcttcaagtgcatctgcaagcccggcttcgtgctggcccccaacggcagatactgcaccgacgtggacgagtgccagacccccggcatctgcatgaacggccactgcatcaacagcgagggcagcttcagatgcgactgcccccccggcctggccgtgggcatggacggcagagtgtgcgtggacacccacatgagaagcacctgctacggcggcatcaagaagggcgtgtgcgtgagacccttccccggcgccgtgaccaagagcgagtgctgctgcgccaaccccgactacggcttcggcgagccctgccagccctgccccgccaagaacagcgccgagttccacggcctgtgcagcagcggcgtgggcatcaccgtggacggcagagacatcaacgagtgcgccctggaccccgacatctgcgccaacggcatctgcgagaacctgagaggcagctacagatgcaactgcaacagcggctacgagcccgacgccagcggcagaaactgcatcgacatcgacgagtgcctggtgaacagactgctgtgcgacaacggcctgtgcagaaacacccccggcagctacagctgcacctgcccccccggctacgtgttcagaaccgagaccgagacctgcgaggacatcaacgagtgcgagagcaacccctgcgtgaacggcgcctgcagaaacaacctgggcagcttcaactgcgagtgcagccccggcagcaagctgagcagcaccggcctgatctgcatcgacagcctgaagggcacctgctggctgaacatccaggacagcagatgcgaggtgaacatcaacggcgccaccctgaagagcgagtgctgcgccaccctgggcgccgcctggggcagcccctgcgagagatgcgagctggacaccgcctgccccagaggcctggccagaatcaagggcgtgacctgcgaggacgtgaacgagtgcgaggtgttccccggcgtgtgccccaacggcagatgcgtgaacagcaagggcagcttccactgcgagtgccccgagggcctgaccctggacggcaccggcagagtgtgcctggacatcagaatggagcagtgctacctgaagtgggacgaggacgagtgcatccaccccgtgcccggcaagttcagaatggacgcctgctgctgcgccgtgggcgccgcctggggcaccgagtgcgaggagtgccccaagcccggcaccaaggagtacgagaccctgtgccccagaggcgccggcttcgccaacagaggcgacgtgctgaccggcagacccttctacaaggacatcaacgagtgcaaggccttccccggcatgtgcacctacggcaagtgcagaaacaccatcggcagcttcaagtgcagatgcaacagcggcttcgccctggacatggaggagagaaactgcaccgacatcgacgagtgcagaatcagccccgacctgtgcggcagcggcatctgcgtgaacacccccggcagcttcgagtgcgagtgcttcgagggctacgagagcggcttcatgatgatgaagaactgcatggacatcgacgagtgcgagagaaaccccctgctgtgcagaggcggcacctgcgtgaacaccgagggcagcttccagtgcgactgccccctgggccacgagctgagccccagcagagaggactgcgtggacatcaacgagtgcagcctgagcgacaacctgtgcagaaacggcaagtgcgtgaacatgatcggcacctaccagtgcagctgcaaccccggctaccaggccacccccgacagacagggctgcaccgacatcgacgagtgcatgatcatgaacggcggctgcgacacccagtgcaccaacagcgagggcagctacgagtgcagctgcagcgagggctacgccctgatgcccgacggcagaagctgcgccgacatcgacgagtgcgagaacaaccccgacatctgcgacggcggccagtgcaccaacatccccggcgagtacagatgcctgtgctacgacggcttcatggccagcatggacatgaagacctgcatcgacgtgaacgagtgcgacctgaacagcaacatctgcatgttcggcgagtgcgagaacaccaagggcagcttcatctgccactgccagctgggctacagcgtgaagaagggcaccaccggctgcaccgacgtggacgagtgcgagatcggcgcccacaactgcgacatgcacgccagctgcctgaacatccccggcagcttcaagtgcagctgcagagagggctggatcggcaacggcatcaagtgcatcgacctggacgagtgcagcaacggcacccaccagtgcagcatcaacgcccagtgcgtgaacacccccggcagctacagatgcgcctgcagcgagggcttcaccggcgacggcttcacctgcagcgacgtggacgagtgcgccgagaacatcaacctgtgcgagaacggccagtgcctgaacgtgcccggcgcctacagatgcgagtgcgagatgggcttcacccccgccagcgacagcagaagctgccaggacatcgacgagtgcagcttccagaacatctgcgtgttcggcacctgcaacaacctgcccggcatgttccactgcatctgcgacgacggctacgagctggacagaaccggcggcaactgcaccgacatcgacgagtgcgccgaccccatcaactgcgtgaacggcctgtgcgtgaacacccccggcagatacgagtgcaactgcccccccgacttccagctgaaccccaccggcgtgggctgcgtggacaacagagtgggcaactgctacctgaagttcggccccagaggcgacggcagcctgagctgcaacaccgagatcggcgtgggcgtgagcagaagcagctgctgctgcagcctgggcaaggcctggggcaacccctgcgagacctgcccccccgtgaacagcaccgagtactacaccctgtgccccggcggcgagggcttcagacccaaccccatcaccatcatcctggaggacatcgacgagtgccaggagctgcccggcctgtgccagggcggcaactgcatcaacaccttcggcagcttccagtgcgagtgcccccagggctactacctgagcgaggacaccagaatctgcgaggacatcgacgagtgcttcgcccaccccggcgtgtgcggccccggcacctgctacaacaccctgggcaactacacctgcatctgcccccccgagtacatgcaggtgaacggcggccacaactgcatggacatgagaaagagcttctgctacagaagctacaacggcaccacctgcgagaacgagctgcccttcaacgtgaccaagagaatgtgctgctgcacctacaacgtgggcaaggcctggaacaagccctgcgagccctgccccacccccggcaccgccgacttcaagaccatctgcggcaacatccccggcttcaccttcgacatccacaccggcaaggccgtggacatcgacgagtgcaaggagatccccggcatctgcgccaacggcgtgtgcatcaaccagatcggcagcttcagatgcgagtgccccaccggcttcagctacaacgacctgctgctggtgtgcgaggacatcgacgagtgcagcaacggcgacaacctgtgccagagaaacgccgactgcatcaacagccccggcagctacagatgcgagtgcgccgccggcttcaagctgagccccaacggcgcctgcgtggacagaaacgagtgcctggagatccccaacgtgtgcagccacggcctgtgcgtggacctgcagggcagctaccagtgcatctgccacaacggcttcaaggccagccaggaccagaccatgtgcatggacgtggacgagtgcgagagacacccctgcggcaacggcacctgcaagaacaccgtgggcagctacaactgcctgtgctaccccggcttcgagctgacccacaacaacgactgcctggacatcgacgagtgcagcagcttcttcggccaggtgtgcagaaacggcagatgcttcaacgagatcggcagcttcaagtgcctgtgcaacgagggctacgagctgacccccgacggcaagaactgcatcgacaccaacgagtgcgtggccctgcccggcagctgcagccccggcacctgccagaacctggagggcagcttcagatgcatctgcccccccggctacgaggtgaagagcgagaactgcatcgacatcaacgagtgcgacgaggaccccaacatctgcctgttcggcagctgcaccaacacccccggcggcttccagtgcctgtgcccccccggcttcgtgctgagcgacaacggcagaagatgcttcgacaccagacagagcttctgcttcaccaacttcgagaacggcaagtgcagcgtgcccaaggccttcaacaccaccaaggccaagtgctgctgcagcaagatgcccggcgagggctggggcgacccctgcgagctgtgccccaaggacgacgaggtggccttccaggacctgtgcccctacggccacggcaccgtgcccagcctgcacgacaccagagaggacgtgaacgagtgcctggagagccccggcatctgcagcaacggccagtgcatcaacaccgacggcagcttcagatgcgagtgccccatgggctacaacctggactacaccggcgtgagatgcgtggacaccgacgagtgcagcatcggcaacccctgcggcaacggcacctgcaccaacgtgatcggcagcttcgagtgcaactgcaacgagggcttcgagcccggccccatgatgaactgcgaggacatcaacgagtgcgcccagaaccccctgctgtgcgccttcagatgcatgaacaccttcggcagctacgagtgcacctgccccatcggctacgccctgagagaggaccagaagatgtgcaaggacctggacgagtgcgccgagggcctgcacgactgcgagagcagaggcatgatgtgcaagaacctgatcggcaccttcatgtgcatctgcccccccggcatggccagaagacccgacggcgagggctgcgtggacgagaacgagtgcagaaccaagcccggcatctgcgagaacggcagatgcgtgaacatcatcggcagctacagatgcgagtgcaacgagggcttccagagcagcagcagcggcaccgagtgcctggacaacagacagggcctgtgcttcgccgaggtgctgcagaccatctgccagatggccagcagcagcagaaacctggtgaccaagagcgagtgctgctgcgacggcggcagaggctggggccaccagtgcgagctgtgccccctgcccggcaccgcccagtacaagaagatctgcccccacggccccggctacaccaccgacggcagagacatcgacgagtgcaaggtgatgcccaacctgtgcaccaacggccagtgcatcaacaccatgggcagcttcagatgcttctgcaaggtgggctacaccaccgacatcagcggcaccagctgcatcgacctggacgagtgcagccagagccccaagccctgcaactacatctgcaagaacaccgagggcagctaccagtgcagctgccccagaggctacgtgctgcaggaggacggcaagacctgcaaggacctggacgagtgccagaccaagcagcacaactgccagttcctgtgcgtgaacaccctgggcggcttcacctgcaagtgcccccccggcttcacccagcaccacaccgcctgcatcgacaacaacgagtgcggcagccagcccagcctgtgcggcgccaagggcatctgccagaacacccccggcagcttcagctgcgagtgccagagaggcttcagcctggacgccaccggcctgaactgcgaggacgtggacgagtgcgacggcaaccacagatgccagcacggctgccagaacatcctgggcggctacagatgcggctgcccccagggctacatccagcactaccagtggaaccagtgcgtggacgagaacgagtgcagcaaccccaacgcctgcggcagcgccagctgctacaacaccctgggcagctacaagtgcgcctgccccagcggcttcagcttcgaccagttcagcagcgcctgccacgacgtgaacgagtgcagcagcagcaagaacccctgcaactacggctgcagcaacaccgagggcggctacctgtgcggctgcccccccggctactacagagtgggccagggccactgcgtgagcggcatgggcttcaacaagggccagtacctgagcctggacaccgaggtggacgaggagaacgccctgagccccgaggcctgctacgagtgcaagatcaacggctacagcaagaaggacagcagacagaagagaagcatccacgagcccgaccccaccgccgtggagcagatcagcctggagagcgtggacatggacagccccgtgaacatgaagttcaacctgagccacctgggcagcaaggagcacatcctggagctgagacccgccatccagcccctgaacaaccacatcagatacgtgatcagccagggcaacgacgacagcgtgttcagaatccaccagagaaacggcctgagctacctgcacaccgccaagaagaagctgatgcccggcacctacaccctggagatcaccagcatccccctgtacaagaagaaggagctgaagaagctggaggagagcaacgaggacgactacctgctgggcgagctgggcgaggccctgagaatgagactgcagatccagctgtactag

SEQ ID NO: 81604 - DNA, 8739 bp, synthetic construct; identical to SEQ ID NO: 81603
  misc_feature 1..8739: note = Description of Artificial Sequence: Synthetic coding sequence
  source 1..8739: mol_type = other DNA

SEQ ID NO: 81605 - DNA, 597 bp, synthetic construct
  misc_feature 1..597: note = Description of Artificial Sequence: Synthetic coding sequence
  source 1..597: mol_type = other DNA
atgggcctgagaaagggccacggcaccctgggccagggcctgagcgccctgcagagcgagcagggcagactgatccagctgctgagcgagagccagggccacatggcccacctggtgaacagcgtgagcgacatcctggacgccctgcagagagacagaggcctgggcagacccagaaacaaggccgacctgcagagagcccccgccagaggcaccagacccagaggctgcgccaccggcagcagacccagagactgcctggacgtgctgctgagcggccagcaggacgacggcgtgtacagcgtgttccccacccactaccccgccggcttccaggtgtactgcgacatgagaaccgacggcggcggctggaccgtgttccagagaagagaggacggcagcgtgaacttcttcagaggctgggacgcctacagagacggcttcggcagactgaccggcgagcactggctgggccccctggactggtgcaccctgagcctggccctgctggtgcccgtggcccccagccccacccccccccacagcttcgtgaacgtgctgcacccccccgtgcccggcggccccaccctgcagtag

SEQ ID NO: 81606 - DNA, 912 bp, synthetic construct
  misc_feature 1..912: note = Description of Artificial Sequence: Synthetic coding sequence
  source 1..912: mol_type = other DNA
atgggcctgagaaagggccacggcaccctgggccagggcctgagcgccctgcagagcgagcagggcagactgatccagctgctgagcgagagccagggccacatggcccacctggtgaacagcgtgagcgacatcctggacgccctgcagagagacagaggcctgggcagacccagaaacaaggccgacctgcagagagcccccgccagaggcaccagacccagaggctgcgccaccggcagcagacccagagactgcctggacgtgctgctgagcggccagcaggacgacggcgtgtacagcgtgttccccacccactaccccgccggcttccaggtgtactgcgacatgagaaccgacggcggcggctggaccgtgttccagagaagagaggacggcagcgtgaacttcttcagaggctgggacgcctacagagacggcttcggcagactgaccggcgagcactggctgggcctgaagagaatccacgccctgaccacccaggccgcctacgagctgcacgtggacctggaggacttcgagaacggcaccgcctacgccagatacggcagcttcggcgtgggcctgttcagcgtggaccccgaggaggacggctaccccctgaccgtggccgactacagcggcaccgccggcgacagcctgctgaagcacagcggcatgagattcaccaccaaggacagagacagcgaccacagcgagaacaactgcgccgccttctacagaggcgcctggtggtacagaaactgccacaccagcaacctgaacggccagtacctgagaggcgcccacgccagctacgccgacggcgtggagtggagcagctggaccggctggcagtacagcctgaagttcagcgagatgaagatcagacccgtgagagaggacagatag

SEQ ID NO: 81607 - DNA, 1386 bp, synthetic construct
  misc_feature 1..1386: note = Description of Artificial Sequence: Synthetic coding sequence
  source 1..1386: mol_type = other DNA
atggtgaacgacagatggaagaccatgggcggcgccgcccagctggaggacagacccagagacaagccccagagacccagctgcggctacgtgctgtgcaccgtgctgctggccctggccgtgctgctggccgtggccgtgaccggcgccgtgctgttcctgaaccacgcccacgcccccggcaccgcccccccccccgtggtgagcaccggcgccgccagcgccaacagcgccctggtgaccgtggagagagccgacagcagccacctgagcatcctgatcgaccccagatgccccgacctgaccgacagcttcgccagactggagagcgcccaggccagcgtgctgcaggccctgaccgagcaccaggcccagcccagactggtgggcgaccaggagcaggagctgctggacaccctggccgaccagctgcccagactgctggccagagccagcgagctgcagaccgagtgcatgggcctgagaaagggccacggcaccctgggccagggcctgagcgccctgcagagcgagcagggcagactgatccagctgctgagcgagagccagggccacatggcccacctggtgaacagcgtgagcgacatcctggacgccctgcagagagacagaggcctgggcagacccagaaacaaggccgacctgcagagagcccccgccagaggcaccagacccagaggctgcgccaccggcagcagacccagagactgcctggacgtgctgctgagcggccagcaggacgacggcgtgtacagcgtgttccccacccactaccccgccggcttccaggtgtactgcgacatgagaaccgacggcggcggctggaccgtgttccagagaagagaggacggcagcgtgaacttcttcagaggctgggacgcctacagagacggcttcggcagactgaccggcgagcactggctgggcctgaagagaatccacgccctgaccacccaggccgcctacgagctgcacgtggacctggaggacttcgagaacggcaccgcctacgccagatacggcagcttcggcgtgggcctgttcagcgtggaccccgaggaggacggctaccccctgaccgtggccgactacagcggcaccgccggcgacagcctgctgaagcacagcggcatgagattcaccaccaaggacagagacagcgaccacagcgagaacaactgcgccgccttctacagaggcgcctggtggtacagaaactgccacaccagcaacctgaacggccagtacctgagaggcgcccacgccagctacgccgacggcgtggagtggagcagctggaccggctggcagtacagcctgaagttcagcgagatgaagatcagacccgtgagagaggacagatag

SEQ ID NO: 81608 - DNA, 933 bp, synthetic construct
  misc_feature 1..933: note = Description of Artificial Sequence: Synthetic coding sequence
  source 1..933: mol_type = other DNA
tgaaccggcgccgtgctgttcctgaaccacgcccacgcccccggcaccgcccccccccccgtggtgagcaccggcgccgccagcgccaacagcgccctggtgaccgtggagagagccgacagcagccacctgagcatcctgatcgaccccagatgccccgacctgaccgacagcttcgccagactggagagcgcccaggccagcgtgctgcaggccctgaccgagcaccaggcccagcccagactggtgggcgaccaggagcaggagctgctggacaccctggccgaccagctgcccagactgctggccagagccagcgagctgcagaccgagtgcatgggcctgagaaagggccacggcaccctgggccagggcctgagcgccctgcagagcgagcagggcagactgatccagctgctgagcgagagccagggccacatggcccacctggtgaacagcgtgagcgacatcctggacgccctgcagagagacagaggcctgggcagacccagaaacaaggccgacctgcagagagcccccgccagaggcaccagacccagaggctgcgccaccggcagcagacccagagactgcctggacgtgctgctgagcggccagcaggacgacggcgtgtacagcgtgttccccacccactaccccgccggcttccaggtgtactgcgacatgagaaccgacggcggcggctggaccgtgttccagagaagagaggacggcagcgtgaacttcttcagaggctgggacgcctacagagacggcttcggcagactgaccggcgagcactggctgggccccctggactggtgcaccctgagcctggccctgctggtgcccgtggcccccagccccacccccccccacagcttcgtgaacgtgctgcacccccccgtgcccggcggccccaccctgcagtag

SEQ ID NO: 81609 - DNA, 1386 bp, synthetic construct; identical to SEQ ID NO: 81607
  misc_feature 1..1386: note = Description of Artificial Sequence: Synthetic coding sequence
  source 1..1386: mol_type = other DNA

SEQ ID NO: 81610 - DNA, 870 bp, synthetic construct
  misc_feature 1..870: note = Description of Artificial Sequence: Synthetic coding sequence
  source 1..870: mol_type = other DNA
atggtgaacgacagatggaagaccatgggcggcgccgcccagctggaggacagacccagagacaagccccagagacccagctgcggctacgtgctgtgcaccgtgctgctggccctggccgtgctgctggccgtggccgtgaccggcgccgtgctgttcctgaaccacgcccacgcccccggcaccgcccccccccccgtggtgagcaccggcgccgccagcgccaacagcgccctggtgaccgtggagagagccgacagcagccacctgagcatcctgatcgaccccagatgccccgacctgaccgacagcttcgccagactggagagcgcccaggccagcgtgctgcaggccctgaccgagcaccaggcccagcccagactggtgggcgaccaggagcaggagctgctggacaccctggccgaccagctgcccagactgctggccagagccagcgagctgcagaccgagtgcatgggcctgagaaagggccacggcaccctgggccagggcctgagcgccctgcagagcgagcagggcagactgatccagctgctgagcgagagccagggccacatggcccacctggtgaacagcgtgagcgacatcctggacgccctgcagagagacagaggcctgggcagacccagaaacaaggccgacctgcagagagcccccgccagaggcaccagacccagaggctgcgccaccggcagcagacccagagactgcctggacgtgctgctgagcggccagcaggacgacggcgtgtacagcgtgttccccacccactaccccgccggcttccaggtgtactgcgacatgagaaccgacggcggcggctggaccgtgttccagagaagagagtag

SEQ ID NO: 81611 - DNA, 540 bp, synthetic construct
  misc_feature 1..540: note = Description of Artificial Sequence: Synthetic coding sequence
  source 1..540: mol_type = other DNA
atggtgaacgacagatggaagaccatgggcggcgccgcccagctggaggacagacccagagacaagccccaggccagaaagctgagactgagagagagacccagctgcggctacgtgctgtgcaccgtgctgctggccctggccgtgctgctggccgtggccgtgaccggcgccgtgctgttcctgaaccacgcccacgcccccggcaccgcccccccccccgtggtgagcaccggcgccgccagcgccaacagcgccctggtgaccgtggagagagccgacagcagccacctgagcatcctgatcgaccccagatgccccgacctgaccgacagcttcgccagactggagagcgcccaggccagcgtgctgcaggccctgaccgagcaccaggcccagcccagactggtgggcgaccaggagcaggagctgctggacaccctggccgaccagctgcccagactgctggccagagccagcgagctgcagaccgagtgcatgggcctgagaaagggccacggcaccctgggccagggctag

SEQ ID NO: 81612 - DNA, 1170 bp, synthetic construct
  misc_feature 1..1170: note = Description of Artificial Sequence: Synthetic coding sequence
  source 1..1170: mol_type = other DNA
atgagaagagtgaccctgttcctgaacggcagccccaagaacggcaaggtggtggccgtgtacggcaccctgagcgacctgctgagcgtggccagcagcaagctgggcatcaaggccaccagcgtgtacaacggcaagggcggcctgatcgacgacatcgccctgatcagagacgacgacgtgctgttcgtgtgcgagggcgagcccttcatcgacccccagaccgacagcaagccccccgagggcctgctgggcttccacaccgactggctgaccctgaacgtgggcggcagatacttcaccaccaccagaagcaccctggtgaacaaggagcccgacagcatgctggcccacatgttcaaggacaagggcgtgtggggcaacaagcaggaccacagaggcgccttcctgatcgacagaagccccgagtacttcgagcccatcctgaactacctgagacacggccagctgatcgtgaacgacggcatcaacctgctgggcgtgctggaggaggccagattcttcggcatcgacagcctgatcgagcacctggaggtggccatcaagaacagccagccccccgaggaccacagccccatcagcagaaaggagttcgtgagattcctgctggccacccccaccaagagcgagctgagatgccagggcctgaacttcagcggcgccgacctgagcagactggacctgagatacatcaacttcaagatggccaacctgagcagatgcaacctggcccacgccaacctgtgctgcgccaacctggagagagccgacctgagcggcagcgtgctggactgcgccaacctgcagggcgtgaagatgctgtgcagcaacgccgagggcgccagcctgaagctgtgcaacttcgaggaccccagcggcctgaaggccaacctggagggcgccaacctgaagggcgtggacatggagggcagccagatgaccggcatcaacctgagagtggccaccctgaagaacgccaagctgaagaactgcaacctgagaggcgccaccctggccggcaccgacctggagaactgcgacctgagcggctgcgacctgcaggaggccaacctgagaggcagcaacgtgaagggcgccatcttcgaggagatgctgacccccctgcacatgagccagagcgtgagatag

SEQ ID NO: 81613 - DNA, 939 bp, synthetic construct
  misc_feature 1..939: note = Description of Artificial Sequence: Synthetic coding sequence
  source 1..939: mol_type = other DNA
atggccaaggtgttcagcttcatcctggtgaccaccgccctgaccatgggcagagagatcagcgccctggaggactgcgcccaggagcagatgagactgagagcccaggtgagactgctggagaccagagtgaagcagcagcaggtgaagatcaagcagctgctgcaggagaacgaggtgcagttcctggacaagggcgacgagaacaccgtgatcgacctgggcagcaagagacagtacgccgactgcagcgagatcttcaacgacggctacaagctgagcggcttctacaagatcaagcccctgcagagccccgccgagttcagcgtgtactgcgacatgagcgacggcggcggctggaccgtgatccagagaagaagcgacggcagcgagaacttcaacagaggctggaaggactacgagaacggcttcggcaacttcgtgcagaagcacggcgagtactggctgggcaacaagaacctgcacttcctgaccacccaggaggactacaccctgaagatcgacctggccgacttcgagaagaacagcagatacgcccagtacaagaacttcaaggtgggcgacgagaagaacttctacgagctgaacatcggcgagtacagcggcaccgccggcgacagcctggccggcaacttccaccccgaggtgcagtggtgggccagccaccagagaatgaagttcagcacctgggacagagaccacgacaactacgagggcaactgcgccgaggaggaccagagcggctggtggttcaacagatgccacagcgccaacctgaacggcgtgtactacagcggcccctacaccgccaagaccgacaacggcatcgtgtggtacacctggcacggctggtggtacagcctgaagagcgtggtgatgaagatcagacccaacgacttcatccccaacgtgatctag

SEQ ID NO: 81614 - DNA, 939 bp, synthetic construct; identical to SEQ ID NO: 81613
  misc_feature 1..939: note = Description of Artificial Sequence: Synthetic coding sequence
  source 1..939: mol_type = other DNA

SEQ ID NO: 81615 - DNA, 939 bp, synthetic construct; identical to SEQ ID NO: 81613
  misc_feature 1..939: note = Description of Artificial Sequence: Synthetic coding sequence
  source 1..939: mol_type = other DNA

SEQ ID NO: 81616 - DNA, 939 bp, synthetic construct; identical to SEQ ID NO: 81613
  misc_feature 1..939: note = Description of Artificial Sequence: Synthetic coding sequence
  source 1..939: mol_type = other DNA

SEQ ID NO: 81617 - DNA, 939 bp, synthetic construct; identical to SEQ ID NO: 81613
  misc_feature 1..939: note = Description of Artificial Sequence: Synthetic coding sequence
  source 1..939: mol_type = other DNA

SEQ ID NO: 81618 - DNA, 939 bp, synthetic construct; identical to SEQ ID NO: 81613
  misc_feature 1..939: note = Description of Artificial Sequence: Synthetic coding sequence
  source 1..939: mol_type = other DNA

SEQ ID NO: 81619 - DNA, 849 bp, synthetic construct
  misc_feature 1..849: note = Description of Artificial Sequence: Synthetic coding sequence
  source 1..849: mol_type = other DNA
atgagactgagagcccaggtgagactgctggagaccagagtgaagcagcagcaggtgaagatcaagcagctgctgcaggagaacgaggtgcagttcctggacaagggcgacgagaacaccgtgatcgacctgggcagcaagagacagtacgccgactgcagcgagatcttcaacgacggctacaagctgagcggcttctacaagatcaagcccctgcagagccccgccgagttcagcgtgtactgcgacatgagcgacggcggcggctggaccgtgatccagagaagaagcgacggcagcgagaacttcaacagaggctggaaggactacgagaacggcttcggcaacttcgtgcagaagcacggcgagtactggctgggcaacaagaacctgcacttcctgaccacccaggaggactacaccctgaagatcgacctggccgacttcgagaagaacagcagatacgcccagtacaagaacttcaaggtgggcgacgagaagaacttctacgagctgaacatcggcgagtacagcggcaccgccggcgacagcctggccggcaacttccaccccgaggtgcagtggtgggccagccaccagagaatgaagttcagcacctgggacagagaccacgacaactacgagggcaactgcgccgaggaggaccagagcggctggtggttcaacagatgccacagcgccaacctgaacggcgtgtactacagcggcccctacaccgccaagaccgacaacggcatcgtgtggtacacctggcacggctggtggtacagcctgaagagcgtggtgatgaagatcagacccaacgacttcatccccaacgtgatctag

SEQ ID NO: 81620 - DNA, 939 bp, synthetic construct; identical to SEQ ID NO: 81613
  misc_feature 1..939: note = Description of Artificial Sequence: Synthetic coding sequence
  source 1..939: mol_type = other DNA

SEQ ID NO: 81621 - DNA, 1320 bp, synthetic construct
  misc_feature 1..1320: note = Description of Artificial Sequence: Synthetic coding sequence
  source 1..1320: mol_type = other DNA
atgaagctggccaactggtactggctgagcagcgccgtgctggccacctacggcttcctggtggtggccaacaacgagaccgaggagatcaaggacgagagagccaaggacgtgtgccccgtgagactggagagcagaggcaagtgcgaggaggccggcgagtgcccctaccaggtgagcctgccccccctgaccatccagctgcccaagcagttcagcagaatcgaggaggtgttcaaggaggtgcagaacctgaaggagatcgtgaacagcctgaagaagagctgccaggactgcaagctgcaggccgacgacaacggcgaccccggcagaaacggcctgctgctgcccagcaccggcgcccccggcgaggtgggcgacaacagagtgagagagctggagagcgaggtgaacaagctgagcagcgagctgaagaacgccaaggaggagatcaacgtgctgcacggcagactggagaagctgaacctggtgaacatgaacaacatcgagaactacgtggacagcaaggtggccaacctgaccttcgtggtgaacagcctggacggcaagtgcagcaagtgccccagccaggagcagatccagagcagacccgtgcagcacctgatctacaaggactgcagcgactactacgccatcggcaagagaagcagcgagacctacagagtgacccccgaccccaagaacagcagcttcgaggtgtactgcgacatggagaccatgggcggcggctggaccgtgctgcaggccagactggacggcagcaccaacttcaccagaacctggcaggactacaaggccggcttcggcaacctgagaagagagttctggctgggcaacgacaagatccacctgctgaccaagagcaaggagatgatcctgagaatcgacctggaggacttcaacggcgtggagctgtacgccctgtacgaccagttctacgtggccaacgagttcctgaagtacagactgcacgtgggcaactacaacggcaccgccggcgacgccctgagattcaacaagcactacaaccacgacctgaagttcttcaccacccccgacaaggacaacgacagataccccagcggcaactgcggcctgtactacagcagcggctggtggttcgacgcctgcctgagcgccaacctgaacggcaagtactaccaccagaagtacagaggcgtgagaaacggcatcttctggggcacctggcccggcgtgagcgaggcccaccccggcggctacaagagcagcttcaaggaggccaagatgatgatcagacccaagcacttcaagccctag

SEQ ID NO: 81622 - DNA, 1095 bp, synthetic construct
  misc_feature 1..1095: note = Description of Artificial Sequence: Synthetic coding sequence
  source 1..1095: mol_type = other DNA
atgaccagcgagctggacatcttcgtgggcaacaccaccctgatcgacgaggacgtgtacagactgtggctggacggctacagcgtgaccgacgccgtggccctgagagtgagaagcggcatcctggagcagaccggcgccaccgccgccgtgctgcagagcgacaccatggaccactacagaaccttccacatgctggagagactgctgcacgccccccccaagctgctgcaccagctgatcttccagatcccccccagcagacaggccctgctgatcgagagatactacgccttcgacgaggccttcgtgagagaggtgctgggcaagaagctgagcaagggcaccaagaaggacctggacgacatcagcaccaagaccggcatcaccctgaagagctgcagaagacagttcgacaacttcaagagagtgttcaaggtggtggaggagatgagaggcagcctggtggacaacatccagcagcacttcctgctgagcgacagactggccagagactacgccgccatcgtgttcttcgccaacaacagattcgagaccggcaagaagaagctgcagtacctgagcttcggcgacttcgccttctgcgccgagctgatgatccagaactggaccctgggcgccgtgggcgaggcccccaccgaccccgacagccagatggacgacatggacatggacctggacaaggagttcctgcaggacctgaaggagctgaaggtgctggtggccgacaaggacctgctggacctgcacaagagcctggtgtgcaccgccctgagaggcaagctgggcgtgttcagcgagatggaggccaacttcaagaacctgagcagaggcctggtgaacgtggccgccaagctgacccacaacaaggacgtgagagacctgttcgtggacctggtggagaagttcgtggagccctgcagaagcgaccactggcccctgagcgacgtgagattcttcctgaaccagtacagcgccagcgtgcacagcctggacggcttcagacaccaggccctgtgggacagatacatgggcaccctgagaggctgcctgctgagactgtaccacgactag

SEQ ID NO: 81623 - DNA, 1074 bp, synthetic construct
  misc_feature 1..1074: note = Description of Artificial Sequence: Synthetic coding sequence
  source 1..1074: mol_type = other DNA
atgaccagcgagctggacatcttcgtgggcaacaccaccctgatcgacgaggacgtgtacagactgtggctggacggctacagcgtgaccgacgccgtggccctgagagtgagaagcggcatcctggagcagaccggcgccaccgccgccgtgctgcagagcgacaccatggaccactacagaaccttccacatgctggagagactgctgcacgccccccccaagctgctgcaccagctgatcttccagatcccccccagcagacaggccctgctgatcgagagatactacgccttcgacgaggccttcgtgagagaggtgctgggcaagaagctgagcaagggcaccaagaaggacctggacgacatcagcaccaagaccggcatcaccctgaagagctgcagaagacagttcgacaacttcaagagagtgttcaaggtggtggaggagatgagaggcagcctggtggacaacatccagcagcacttcctgctgagcgacagactggccagagactacgccgccatcgtgttcttcgccaacaacagattcgagaccggcaagaagaagctgcagtacctgagcttcggcgacttcgccttctgcgccgagctgatgatccagaactggaccctgggcgccgtggacagccagatggacgacatggacatggacctggacaaggagttcctgcaggacctgaaggagctgaaggtgctggtggccgacaaggacctgctggacctgcacaagagcctggtgtgcaccgccctgagaggcaagctgggcgtgttcagcgagatggaggccaacttcaagaacctgagcagaggcctggtgaacgtggccgccaagctgacccacaacaaggacgtgagagacctgttcgtggacctggtggagaagttcgtggagccctgcagaagcgaccactggcccctgagcgacgtgagattcttcctgaaccagtacagcgccagcgtgcacagcctggacggcttcagacaccaggccctgtgggacagatacatgggcaccctgagaggctgcctgctgagactgtaccacgactag

SEQ ID NO: 81624 - DNA, 1989 bp, synthetic construct
  misc_feature 1..1989: note = Description of Artificial Sequence: Synthetic coding sequence
  source 1..1989: mol_type = other DNA
atgtggagctggaagtgcctgctgttctgggccgtgctggtgaccgccaccctgtgcaccgccagacccagccccaccctgcccgagcaggcccagccctggggcgcccccgtggaggtggagagcttcctggtgcaccccggcgacctgctgcagctgagatgcagactgagagacgacgtgcagagcatcaactggctgagagacggcgtgcagctggccgagagcaacagaaccagaatcaccggcgaggaggtggaggtgcaggacagcgtgcccgccgacagcggcctgtacgcctgcgtgaccagcagccccagcggcagcgacaccacctacttcagcgtgaacgtgagcgacgccctgcccagcagcgaggacgacgacgacgacgacgacagcagcagcgaggagaaggagaccgacaacaccaagcccaacagaatgcccgtggccccctactggaccagccccgagaagatggagaagaagctgcacgccgtgcccgccgccaagaccgtgaagttcaagtgccccagcagcggcacccccaaccccaccctgagatggctgaagaacggcaaggagttcaagcccgaccacagaatcggcggctacaaggtgagatacgccacctggagcatcatcatggacagcgtggtgcccagcgacaagggcaactacacctgcatcgtggagaacgagtacggcagcatcaaccacacctaccagctggacgtggtggagagaagcccccacagacccatcctgcaggccggcctgcccgccaacaagaccgtggccctgggcagcaacgtggagttcatgtgcaaggtgtacagcgacccccagccccacatccagtggctgaagcacatcgaggtgaacggcagcaagatcggccccgacaacctgccctacgtgcagatcctgaagaccgccggcgtgaacaccaccgacaaggagatggaggtgctgcacctgagaaacgtgagcttcgaggacgccggcgagtacacctgcctggccggcaacagcatcggcctgagccaccacagcgcctggctgaccgtgctggaggccctggaggagagacccgccgtgatgaccagccccctgtacctggagatcatcatctactgcaccggcgccttcctgatcagctgcatggtgggcagcgtgatcgtgtacaagatgaagagcggcaccaagaagagcgacttccacagccagatggccgtgcacaagctggccaagagcatccccctgagaagacaggtgaccgtgagcgccgacagcagcgccagcatgaacagcggcgtgctgctggtgagacccagcagactgagcagcagcggcacccccatgctggccggcgtgagcgagtacgagctgcccgaggaccccagatgggagctgcccagagacagactggtgctgggcaagcccctgggcgagggctgcttcggccaggtggtgctggccgaggccatcggcctggacaaggacaagcccaacagagtgaccaaggtggccgtgaagatgctgaagagcgacgccaccgagaaggacctgagcgacctgatcagcgagatggagatgatgaagatgatcggcaagcacaagaacatcatcaacctgctgggcgcctgcacccaggacggccccctgtacgtgatcgtggagtacgccagcaagggcaacctgagagagtacctgcaggccagaagaccccccggcctggagtactgctacaaccccagccacaaccccgaggagcagctgagcagcaaggacctggtgagctgcgcctaccaggtggccagaggcatggagtacctggccagcaagaaggtgtggaacctgaaggcccccctggtgcacacccccagacccggcagccaggagtgccccggcgacagaggccagtgcgacgaggacagcagactgtggcccagaaccggccacagcccccacagactgctgtag

SEQ ID NO: 81625 - DNA, 1104 bp, synthetic construct
  misc_feature 1..1104: note = Description of Artificial Sequence: Synthetic coding sequence
  source 1..1104: mol_type = other DNA
atgtggagctggaagtgcctgctgttctgggccgtgctggtgaccgccaccctgtgcaccgccagacccagccccaccctgcccgagcaggcccagccctggggcgcccccgtggaggtggagagcttcctggtgcaccccggcgacctgctgcagctgagatgcagactgagagacgacgtgcagagcatcaactggctgagagacggcgtgcagctggccgagagcaacagaaccagaatcaccggcgaggaggtggaggtgcaggacagcgtgcccgccgacagcggcctgtacgcctgcgtgaccagcagccccagcggcagcgacaccacctacttcagcgtgaacgtgagcgtgcccatcgacgccctgcccagcagcgaggacgacgacgacgacgacgacagcagcagcgaggagaaggagaccgacaacaccaagcccaaccccgtggccccctactggaccagccccgagaagatggagaagaagctgcacgccgtgcccgccgccaagaccgtgaagttcaagtgccccagcagcggcacccccaaccccaccctgagatggctgaagaacggcaaggagttcaagcccgaccacagaatcggcggctacaaggtgagatacgccacctggagcatcatcatggacagcgtggtgcccagcgacaagggcaactacacctgcatcgtggagaacgagtacggcagcatcaaccacacctaccagctggacgtggtggagagaagcccccacagacccatcctgcaggccggcctgcccgccaacaagaccgtggccctgggcagcaacgtggagttcatgtgcaaggtgtacagcgacccccagccccacatccagtggctgaagcacatcgaggtgaacggcagcaagatcggccccgacaacctgccctacgtgcagatcctgaagcacagcggcatcaacagcagcgacgccgaggtgctgaccctgttcaacgtgaccgaggcccagagcggcgagtacgtgtgcaaggtgagcaactacatcggcgaggccaaccagagcgcctggctgaccgtgaccagacccgtggccaaggactgctggagctag

SEQ ID NO: 81626 - DNA, 2196 bp, synthetic construct
  misc_feature 1..2196: note = Description of Artificial Sequence: Synthetic coding sequence
  source 1..2196: mol_type = other DNA
atgtggagctggaagtgcctgctgttctgggccgtgctggtgaccgccaccctgtgcaccgccagacccagccccaccctgcccgagcaggacgccctgcccagcagcgaggacgacgacgacgacgacgacagcagcagcgaggagaaggagaccgacaacaccaagcccaaccccgtggccccctactggaccagccccgagaagatggagaagaagctgcacgccgtgcccgccgccaagaccgtgaagttcaagtgccccagcagcggcacccccaaccccaccctgagatggctgaagaacggcaaggagttcaagcccgaccacagaatcggcggctacaaggtgagatacgccacctggagcatcatcatggacagcgtggtgcccagcgacaagggcaactacacctgcatcgtggagaacgagtacggcagcatcaaccacacctaccagctggacgtggtggagagaagcccccacagacccatcctgcaggccggcctgcccgccaacaagaccgtggccctgggcagcaacgtggagttcatgtgcaaggtgtacagcgacccccagccccacatccagtggctgaagcacatcgaggtgaacggcagcaagatcggccccgacaacctgccctacgtgcagatcctgaagaccgccggcgtgaacaccaccgacaaggagatggaggtgctgcacctgagaaacgtgagcttcgaggacgccggcgagtacacctgcctggccggcaacagcatcggcctgagccaccacagcgcctggctgaccgtgctggaggccctggaggagagacccgccgtgatgaccagccccctgtacctggagatcatcatctactgcaccggcgccttcctgatcagctgcatggtgggcagcgtgatcgtgtacaagatgaagagcggcaccaagaagagcgacttccacagccagatggccgtgcacaagctggccaagagcatccccctgagaagacaggtgaccgtgagcgccgacagcagcgccagcatgaacagcggcgtgctgctggtgagacccagcagactgagcagcagcggcacccccatgctggccggcgtgagcgagtacgagctgcccgaggaccccagatgggagctgcccagagacagactggtgctgggcaagcccctgggcgagggctgcttcggccaggtggtgctggccgaggccatcggcctggacaaggacaagcccaacagagtgaccaaggtggccgtgaagatgctgaagagcgacgccaccgagaaggacctgagcgacctgatcagcgagatggagatgatgaagatgatcggcaagcacaagaacatcatcaacctgctgggcgcctgcacccaggacggccccctgtacgtgatcgtggagtacgccagcaagggcaacctgagagagtacctgcaggccagaagaccccccggcctggagtactgctacaaccccagccacaaccccgaggagcagctgagcagcaaggacctggtgagctgcgcctaccaggtggccagaggcatggagtacctggccagcaagaagtgcatccacagagacctggccgccagaaacgtgctggtgaccgaggacaacgtgatgaagatcgccgacttcggcctggccagagacatccaccacatcgactactacaagaagaccaccaacggcagactgcccgtgaagtggatggcccccgaggccctgttcgacagaatctacacccaccagagcgacgtgtggagcttcggcgtgctgctgtgggagatcttcaccctgggcggcagcccctaccccggcgtgcccgtggaggagctgttcaagctgctgaaggagggccacagaatggacaagcccagcaactgcaccaacgagctgtacatgatgatgagagactgctggcacgccgtgcccagccagagacccaccttcaagcagctggtggaggacctggacagaatcgtggccctgaccagcaaccaggagtacctggacctgagcatgcccctggaccagtacagccccagcttccccgacaccagaagcagcacctgcagcagcggcgaggacagcgtgttcagccacgagcccctgcccgaggagccctgcctgcccagacaccccgcccagctggccaacggcggcctgaagagaagatag

SEQ ID NO: 81627 - DNA, 2439 bp, synthetic construct
  misc_feature 1..2439: note = Description of Artificial Sequence: Synthetic coding sequence
  source 1..2439: mol_type = other DNA
atggccgccgtgaccagagacttcggcgagatgctgctgcacagcggcagagtgctgcccgccgaggcccagccctggggcgcccccgtggaggtggagagcttcctggtgcaccccggcgacctgctgcagctgagatgcagactgagagacgacgtgcagagcatcaactggctgagagacggcgtgcagctggccgagagcaacagaaccagaatcaccggcgaggaggtggaggtgcaggacagcgtgcccgccgacagcggcctgtacgcctgcgtgaccagcagccccagcggcagcgacaccacctacttcagcgtgaacgtgagcgacgccctgcccagcagcgaggacgacgacgacgacgacgacagcagcagcgaggagaaggagaccgacaacaccaagcccaacagaatgcccgtggccccctactggaccagccccgagaagatggagaagaagctgcacgccgtgcccgccgccaagaccgtgaagttcaagtgccccagcagcggcacccccaaccccaccctgagatggctgaagaacggcaaggagttcaagcccgaccacagaatcggcggctacaaggtgagatacgccacctggagcatcatcatggacagcgtggtgcccagcgacaagggcaactacacctgcatcgtggagaacgagtacggcagcatcaaccacacctaccagctggacgtggtggagagaagcccccacagacccatcctgcaggccggcctgcccgccaacaagaccgtggccctgggcagcaacgtggagttcatgtgcaaggtgtacagcgacccccagccccacatccagtggctgaagcacatcgaggtgaacggcagcaagatcggccccgacaacctgccctacgtgcagatcctgaagaccgccggcgtgaacaccaccgacaaggagatggaggtgctgcacctgagaaacgtgagcttcgaggacgccggcgagtacacctgcctggccggcaacagcatcggcctgagccaccacagcgcctggctgaccgtgctggaggccctggaggagagacccgccgtgatgaccagccccctgtacctggagatcatcatctactgcaccggcgccttcctgatcagctgcatggtgggcagcgtgatcgtgtacaagatgaagagcggcaccaagaagagcgacttccacagccagatggccgtgcacaagctggccaagagcatccccctgagaagacaggtgagcgccgacagcagcgccagcatgaacagcggcgtgctgctggtgagacccagcagactgagcagcagcggcacccccatgctggccggcgtgagcgagtacgagctgcccgaggaccccagatgggagctgcccagagacagactggtgctgggcaagcccctgggcgagggctgcttcggccaggtggtgctggccgaggccatcggcctggacaaggacaagcccaacagagtgaccaaggtggccgtgaagatgctgaagagcgacgccaccgagaaggacctgagcgacctgatcagcgagatggagatgatgaagatgatcggcaagcacaagaacatcatcaacctgctgggcgcctgcacccaggacggccccctgtacgtgatcgtggagtacgccagcaagggcaacctgagagagtacctgcaggccagaagaccccccggcctggagtactgctacaaccccagccacaaccccgaggagcagctgagcagcaaggacctggtgagctgcgcctaccaggtggccagaggcatggagtacctggccagcaagaagtgcatccacagagacctggccgccagaaacgtgctggtgaccgaggacaacgtgatgaagatcgccgacttcggcctggccagagacatccaccacatcgactactacaagaagaccaccaacggcagactgcccgtgaagtggatggcccccgaggccctgttcgacagaatctacacccaccagagcgacgtgtggagcttcggcgtgctgctgtgggagatcttcaccctgggcggcagcccctaccccggcgtgcccgtggaggagctgttcaagctgctgaaggagggccacagaatggacaagcccagcaactgcaccaacgagctgtacatgatgatgagagactgctggcacgccgtgcccagccagagacccaccttcaagcagctggtggaggacctggacagaatcgtggccctgaccagcaaccaggagtacctggacctgagcatgcccctggaccagtacagccccagcttccccgacaccagaagcagcacctgcagcagcggcgaggacagcgtgttcagccacgagcccctgcccgaggagccctgcctgcccagacaccccgcccagctggccaacggcggcctgaagagaagatag

SEQ ID NO: 81628 - DNA, 2469 bp, synthetic construct
  misc_feature 1..2469: note = Description of Artificial Sequence: Synthetic coding sequence
  source 1..2469: mol_type = other DNA
atgtggagctggaagtgcctgctgttctgggccgtgctggtgaccgccaccctgtgcaccgccagacccagccccaccctgcccgagcaggcccagccctggggcgcccccgtggaggtggagagcttcctggtgcaccccggcgacctgctgcagctgagatgcagactgagagacgacgtgcagagcatcaactggctgagagacggcgtgcagctggccgagagcaacagaaccagaatcaccggcgaggaggtggaggtgcaggacagcgtgcccgccgacagcggcctgtacgcctgcgtgaccagcagccccagcggcagcgacaccacctacttcagcgtgaacgtgagcgtgcccatcgacgccctgcccagcagcgaggacgacgacgacgacgacgacagcagcagcgaggagaaggagaccgacaacaccaagcccaaccccgtggccccctactggaccagccccgagaagatggagaagaagctgcacgccgtgcccgccgccaagaccgtgaagttcaagtgccccagcagcggcacccccaaccccaccctgagatggctgaagaacggcaaggagttcaagcccgaccacagaatcggcggctacaaggtgagatacgccacctggagcatcatcatggacagcgtggtgcccagcgacaagggcaactacacctgcatcgtggagaacgagtacggcagcatcaaccacacctaccagctggacgtggtggagagaagcccccacagacccatcctgcaggccggcctgcccgccaacaagaccgtggccctgggcagcaacgtggagttcatgtgcaaggtgtacagcgacccccagccccacatccagtggctgaagcacatcgaggtgaacggcagcaagatcggccccgacaacctgccctacgtgcagatcctgaagcacagcggcatcaacagcagcgacgccgaggtgctgaccctgttcaacgtgaccgaggcccagagcggcgagtacgtgtgcaaggtgagcaactacatcggcgaggccaaccagagcgcctggctgaccgtgaccagacccgtgctggaggagagacccgccgtgatgaccagccccctgtacctggagatcatcatctactgcaccggcgccttcctgatcagctgcatggtgggcagcgtgatcgtgtacaagatgaagagcggcaccaagaagagcgacttccacagccagatggccgtgcacaagctggccaagagcatccccctgagaagacaggtgaccgtgagcgccgacagcagcgccagcatgaacagcggcgtgctgctggtgagacccagcagactgagcagcagcggcacccccatgctggccggcgtgagcgagtacgagctgcccgaggaccccagatgggagctgcccagagacagactggtgctgggcaagcccctgggcgagggctgcttcggccaggtggtgctggccgaggccatcggcctggacaaggacaagcccaacagagtgaccaaggtggccgtgaagatgctgaagagcgacgccaccgagaaggacctgagcgacctgatcagcgagatggagatgatgaagatgatcggcaagcacaagaacatcatcaacctgctgggcgcctgcacccaggacggccccctgtacgtgatcgtggagtacgccagcaagggcaacctgagagagtacctgcaggccagaagaccccccggcctggagtactgctacaaccccagccacaaccccgaggagcagctgagcagcaaggacctggtgagctgcgcctaccaggtggccagaggcatggagtacctggccagcaagaagtgcatccacagagacctggccgccagaaacgtgctggtgaccgaggacaacgtgatgaagatcgccgacttcggcctggccagagacatccaccacatcgactactacaagaagaccaccaacggcagactgcccgtgaagtggatggcccccgaggccctgttcgacagaatctacacccaccagagcgacgtgtggagcttcggcgtgctgctgtgggagatcttcaccctgggcggcagcccctaccccggcgtgcccgtggaggagctgttcaagctgctgaaggagggccacagaatggacaagcccagcaactgcaccaacgagctgtacatgatgatgagagactgctggcacgccgtgcccagccagagacccaccttcaagcagctggtggaggacctggacagaatcgtggccctgaccagcaaccaggagtacctggacctgagcatgcccctggaccagtacagccccagcttccccgacaccagaagcagcacctgcagcagcggcgaggacagcgtgttcagccacgagcccctgcccgaggagccctgcctgcccagacaccccgcccagctggccaacggcggcctgaagagaagatag

SEQ ID NO: 81629 - DNA, 2202 bp, synthetic construct
  misc_feature 1..2202: note = Description of Artificial Sequence: Synthetic coding sequence
  source 1..2202: mol_type = other DNA
atgtggagctggaagtgcctgctgttctgggccgtgctggtgaccgccaccctgtgcaccgccagacccagccccaccctgcccgagcaggacgccctgcccagcagcgaggacgacgacgacgacgacgacagcagcagcgaggagaaggagaccgacaacaccaagcccaacagaatgcccgtggccccctactggaccagccccgagaagatggagaagaagctgcacgccgtgcccgccgccaagaccgtgaagttcaagtgccccagcagcggcacccccaaccccaccctgagatggctgaagaacggcaaggagttcaagcccgaccacagaatcggcggctacaaggtgagatacgccacctggagcatcatcatggacagcgtggtgcccagcgacaagggcaactacacctgcatcgtggagaacgagtacggcagcatcaaccacacctaccagctggacgtggtggagagaagcccccacagacccatcctgcaggccggcctgcccgccaacaagaccgtggccctgggcagcaacgtggagttcatgtgcaaggtgtacagcgacccccagccccacatccagtggctgaagcacatcgaggtgaacggcagcaagatcggccccgacaacctgccctacgtgcagatcctgaagaccgccggcgtgaacaccaccgacaaggagatggaggtgctgcacctgagaaacgtgagcttcgaggacgccggcgagtacacctgcctggccggcaacagcatcggcctgagccaccacagcgcctggctgaccgtgctggaggccctggaggagagacccgccgtgatgaccagccccctgtacctggagatcatcatctactgcaccggcgccttcctgatcagctgcatggtgggcagcgtgatcgtgtacaagatgaagagcggcaccaagaagagcgacttccacagccagatggccgtgcacaagctggccaagagcatccccctgagaagacaggtgaccgtgagcgccgacagcagcgccagcatgaacagcggcgtgctgctggtgagacccagcagactgagcagcagcggcacccccatgctggccggcgtgagcgagtacgagctgcccgaggaccccagatgggagctgcccagagacagactggtgctgggcaagcccctgggcgagggctgcttcggccaggtggtgctggccgaggccatcggcctggacaaggacaagcccaacagagtgaccaaggtggccgtgaagatgctgaagagcgacgccaccgagaaggacctgagcgacctgatcagcgagatggagatgatgaagatgatcggcaagcacaagaacatcatcaacctgctgggcgcctgcacccaggacggccccctgtacgtgatcgtggagtacgccagcaagggcaacctgagagagtacctgcaggccagaagaccccccggcctggagtactgctacaaccccagccacaaccccgaggagcagctgagcagcaaggacctggtgagctgcgcctaccaggtggccagaggcatggagtacctggccagcaagaagtgcatccacagagacctggccgccagaaacgtgctggtgaccgaggacaacgtgatgaagatcgccgacttcggcctggccagagacatccaccacatcgactactacaagaagaccaccaacggcagactgcccgtgaagtggatggcccccgaggccctgttcgacagaatctacacccaccagagcgacgtgtggagcttcggcgtgctgctgtgggagatcttcaccctgggcggcagcccctaccccggcgtgcccgtggaggagctgttcaagctgctgaaggagggccacagaatggacaagcccagcaactgcaccaacgagctgtacatgatgatgagagactgctggcacgccgtgcccagccagagacccaccttcaagcagctggtggaggacctggacagaatcgtggccctgaccagcaaccaggagtacctggacctgagcatgcccctggaccagtacagccccagcttccccgacaccagaagcagcacctgcagcagcggcgaggacagcgtgttcagccacgagcccctgcccgaggagccctgcctgcccagacaccccgcccagctggccaacggcggcctgaagagaagatag

SEQ ID NO: 81630 - DNA, 2463 bp, synthetic construct
  misc_feature 1..2463: note = Description of Artificial Sequence: Synthetic coding sequence
  source 1..2463: mol_type = other DNA
atgtggagctggaagtgcctgctgttctgggccgtgctggtgaccgccaccctgtgcaccgccagacccagccccaccctgcccgagcaggcccagccctggggcgcccccgtggaggtggagagcttcctggtgcaccccggcgacctgctgcagctgagatgcagactgagagacgacgtgcagagcatcaactggctgagagacggcgtgcagctggccgagagcaacagaaccagaatcaccggcgaggaggtggaggtgcaggacagcgtgcccgccgacagcggcctgtacgcctgcgtgaccagcagccccagcggcagcgacaccacctacttcagcgtgaacgtgagcgacgccctgcccagcagcgaggacgacgacgacgacgacgacagcagcagcgaggagaaggagaccgacaacaccaagcccaaccccgtggccccctactggaccagccccgagaagatggagaagaagctgcacgccgtgcccgccgccaagaccgtgaagttcaagtgccccagcagcggcacccccaaccccaccctgagatggctgaagaacggcaaggagttcaagcccgaccacagaatcggcggctacaaggtgagatacgccacctggagcatcatcatggacagcgtggtgcccagcgacaagggcaactacacctgcatcgtggagaacgagtacggcagcatcaaccacacctaccagctggacgtggtggagagaagcccccacagacccatcctgcaggccggcctgcccgccaacaagaccgtggccctgggcagcaacgtggagttcatgtgcaaggtgtacagcgacccccagccccacatccagtggctgaagcacatcgaggtgaacggcagcaagatcggccccgacaacctgccctacgtgcagatcctgaagaccgccggcgtgaacaccaccgacaaggagatggaggtgctgcacctgagaaacgtgagcttcgaggacgccggcgagtacacctgcctggccggcaacagcatcggcctgagccaccacagcgcctggctgaccgtgctggaggccctggaggagagacccgccgtgatgaccagccccctgtacctggagatcatcatctactgcaccggcgccttcctgatcagctgcatggtgggcagcgtgatcgtgtacaagatgaagagcggcaccaagaagagcgacttccacagccagatggccgtgcacaagctggccaagagcatccccctgagaagacaggtgaccgtgagcgccgacagcagcgccagcatgaacagcggcgtgctgctggtgagacccagcagactgagcagcagcggcacccccatgctggccggcgtgagcgagtacgagctgcccgaggaccccagatgggagctgcccagagacagactggtgctgggcaagcccctgggcgagggctgcttcggccaggtggtgctggccgaggccatcggcctggacaaggacaagcccaacagagtgaccaaggtggccgtgaagatgctgaagagcgacgccaccgagaaggacctgagcgacctgatcagcgagatggagatgatgaagatgatcggcaagcacaagaacatcatcaacctgctgggcgcctgcacccaggacggccccctgtacgtgatcgtggagtacgccagcaagggcaacctgagagagtacctgcaggccagaagaccccccggcctggagtactgctacaaccccagccacaaccccgaggagcagctgagcagcaaggacctggtgagctgcgcctaccaggtggccagaggcatggagtacctggccagcaagaagtgcatccacagagacctggccgccagaaacgtgctggtgaccgaggacaacgtgatgaagatcgccgacttcggcctggccagagacatccaccacatcgactactacaagaagaccaccaacggcagactgcccgtgaagtggatggcccccgaggccctgttcgacagaatctacacccaccagagcgacgtgtggagcttcggcgtgctgctgtgggagatcttcaccctgggcggcagcccctaccccggcgtgcccgtggaggagctgttcaagctgctgaaggagggccacagaatggacaagcccagcaactgcaccaacgagctgtacatgatgatgagagactgctggcacgccgtgcccagccagagacccaccttcaagcagctggtggaggacctggacagaatcgtggccctgaccagcaaccaggagtacctggacctgagcatgcccctggaccagtacagccccagcttccccgacaccagaagcagcacctgcagcagcggcgaggacagcgtgttcagccacgagcccctgcccgaggagccctgcctgcccagacaccccgcccagctggccaacggcggcctgaagagaagatag

SEQ ID NO: 81631 - DNA, 2202 bp, synthetic construct
  misc_feature 1..2202: note = Description of Artificial Sequence: Synthetic coding sequence
  source 1..2202: mol_type = other DNA
atgtggagctggaagtgcctgctgttctgggccgtgctggtgaccgccaccctgtgcaccgccagacccagccccaccctgcccgagcaggacgccctgcccagcagcgaggacgacgacgacgacgacgacagcagcagcgaggagaaggagaccgacaacaccaagcccaaccccgtggccccctactggaccagccccgagaagatggagaagaagctgcacgccgtgcccgccgccaagaccgtgaagttcaagtgccccagcagcggcacccccaaccccaccctgagatggctgaagaacggcaaggagttcaagcccgaccacagaatcggcggctacaaggtgagatacgccacctggagcatcatcatggacagcgtggtgcccagcgacaagggcaactacacctgcatcgtggagaacgagtacggcagcatcaaccacacctaccagctggacgtggtggagagaagcccccacagacccatcctgcaggccggcctgcccgccaacaagaccgtggccctgggcagcaacgtggagttcatgtgcaaggtgtacagcgacccccagccccacatccagtggctgaagcacatcgaggtgaacggcagcaagatcggccccgacaacctgccctacgtgcagatcctgaagcacagcggcatcaacagcagcgacgccgaggtgctgaccctgttcaacgtgaccgaggcccagagcggcgagtacgtgtgcaaggtgagcaactacatcggcgaggccaaccagagcgcctggctgaccgtgaccagacccgtggccaaggccctggaggagagacccgccgtgatgaccagccccctgtacctggagatcatcatctactgcaccggcgccttcctgatcagctgcatggtgggcagcgtgatcgtgtacaagatgaagagcggcaccaagaagagcgacttccacagccagatggccgtgcacaagctggccaagagcatccccctgagaagacaggtgaccgtgagcgccgacagcagcgccagcatgaacagcggcgtgctgctggtgagacccagcagactgagcagcagcggcacccccatgctggccggcgtgagcgagtacgagctgcccgaggaccccagatgggagctgcccagagacagactggtgctgggcaagcccctgggcgagggctgcttcggccaggtggtgctggccgaggccatcggcctggacaaggacaagcccaacagagtgaccaaggtggccgtgaagatgctgaagagcgacgccaccgagaaggacctgagcgacctgatcagcgagatggagatgatgaagatgatcggcaagcacaagaacatcatcaacctgctgggcgcctgcacccaggacggccccctgtacgtgatcgtggagtacgccagcaagggcaacctgagagagtacctgcaggccagaagaccccccggcctggagtactgctacaaccccagccacaaccccgaggagcagctgagcagcaaggacctggtgagctgcgcctaccaggtggccagaggcatggagtacctggccagcaagaagtgcatccacagagacctggccgccagaaacgtgctggtgaccgaggacaacgtgatgaagatcgccgacttcggcctggccagagacatccaccacatcgactactacaagaagaccaccaacggcagactgcccgtgaagtggatggcccccgaggccctgttcgacagaatctacacccaccagagcgacgtgtggagcttcggcgtgctgctgtgggagatcttcaccctgggcggcagcccctaccccggcgtgcccgtggaggagctgttcaagctgctgaaggagggccacagaatggacaagcccagcaactgcaccaacgagctgtacatgatgatgagagactgctggcacgccgtgcccagccagagacccaccttcaagcagctggtggaggacctggacagaatcgtggccctgaccagcaaccaggagtacctggacctgagcatgcccctggaccagtacagccccagcttccccgacaccagaagcagcacctgcagcagcggcgaggacagcgtgttcagccacgagcccctgcccgaggagccctgcctgcccagacaccccgcccagctggccaacggcggcctgaagagaagatag

SEQ ID NO: 81632 - DNA, 2463 bp, synthetic construct; identical to SEQ ID NO: 81630
  misc_feature 1..2463: note = Description of Artificial Sequence: Synthetic coding sequence
  source 1..2463: mol_type = other DNA

SEQ ID NO: 81633 - DNA, 2463 bp, synthetic construct; identical to SEQ ID NO: 81630
  misc_feature 1..2463: note = Description of Artificial Sequence: Synthetic coding sequence
  source 1..2463: mol_type = other DNA

SEQ ID NO: 81634 - DNA, 324 bp, synthetic construct
  misc_feature 1..324: note = Description of Artificial Sequence: Synthetic coding sequence
  source 1..324: mol_type = other DNA
atgtggagctggaagtgcctgctgttctgggccgtgctggtgaccgccaccctgtgcaccgccagacccagccccaccctgcccgagcaggcccagccctggggcgcccccgtggaggtggagagcttcctggtgcaccccggcgacctgctgcagctgagatgcagactgagagacgacgtgcagagcatcaactggctgagagacggcgtgcagctggccgagagcaacagaaccagaatcaccggcgaggaggtggaggtgcaggacagcgtgcccgccgacagcggcctgtacgcctgcgtgaccagcagccccagctag

SEQ ID NO: 81635 - DNA, 2562 bp, synthetic construct
  misc_feature 1..2562: note = Description of Artificial Sequence: Synthetic coding sequence
  source 1..2562: mol_type = other DNA
atggaggccagagtgagcctgaagagaagaatcgagctgaccgtggagtacccctggagatgcggcgccctgagccccaccagcaactgcagaaccggcatgtggagctggaagtgcctgctgttctgggccgtgctggtgaccgccaccctgtgcaccgccagacccagccccaccctgcccgagcaggcccagccctggggcgcccccgtggaggtggagagcttcctggtgcaccccggcgacctgctgcagctgagatgcagactgagagacgacgtgcagagcatcaactggctgagagacggcgtgcagctggccgagagcaacagaaccagaatcaccggcgaggaggtggaggtgcaggacagcgtgcccgccgacagcggcctgtacgcctgcgtgaccagcagccccagcggcagcgacaccacctacttcagcgtgaacgtgagcgacgccctgcccagcagcgaggacgacgacgacgacgacgacagcagcagcgaggagaaggagaccgacaacaccaagcccaaccccgtggccccctactggaccagccccgagaagatggagaagaagctgcacgccgtgcccgccgccaagaccgtgaagttcaagtgccccagcagcggcacccccaaccccaccctgagatggctgaagaacggcaaggagttcaagcccgaccacagaatcggcggctacaaggtgagatacgccacctggagcatcatcatggacagcgtggtgcccagcgacaagggcaactacacctgcatcgtggagaacgagtacggcagcatcaaccacacctaccagctggacgtggtggagagaagcccccacagacccatcctgcaggccggcctgcccgccaacaagaccgtggccctgggcagcaacgtggagttcatgtgcaaggtgtacagcgacccccagccccacatccagtggctgaagcacatcgaggtgaacggcagcaagatcggccccgacaacctgccctacgtgcagatcctgaagaccgccggcgtgaacaccaccgacaaggagatggaggtgctgcacctgagaaacgtgagcttcgaggacgccggcgagtacacctgcctggccggcaacagcatcggcctgagccaccacagcgcctggctgaccgtgctggaggccctggaggagagacccgccgtgatgaccagccccctgtacctggagatcatcatctactgcaccggcgccttcctgatcagctgcatggtgggcagcgtgatcgtgtacaagatgaagagcggcaccaagaagagcgacttccacagccagatggccgtgcacaagctggccaagagcatccccctgagaagacaggtgaccgtgagcgccgacagcagcgccagcatgaacagcggcgtgctgctggtgagacccagcagactgagcagcagcggcacccccatgctggccggcgtgagcgagtacgagctgcccgaggaccccagatgggagctgcccagagacagactggtgctgggcaagcccctgggcgagggctgcttcggccaggtggtgctggccgaggccatcggcctggacaaggacaagcccaacagagtgaccaaggtggccgtgaagatgctgaagagcgacgccaccgagaaggacctgagcgacctgatcagcgagatggagatgatgaagatgatcggcaagcacaagaacatcatcaacctgctgggcgcctgcacccaggacggccccctgtacgtgatcgtggagtacgccagcaagggcaacctgagagagtacctgcaggccagaagaccccccggcctggagtactgctacaaccccagccacaaccccgaggagcagctgagcagcaaggacctggtgagctgcgcctaccaggtggccagaggcatggagtacctggccagcaagaagtgcatccacagagacctggccgccagaaacgtgctggtgaccgaggacaacgtgatgaagatcgccgacttcggcctggccagagacatccaccacatcgactactacaagaagaccaccaacggcagactgcccgtgaagtggatggcccccgaggccctgttcgacagaatctacacccaccagagcgacgtgtggagcttcggcgtgctgctgtgggagatcttcaccctgggcggcagcccctaccccggcgtgcccgtggaggagctgttcaagctgctgaaggagggccacagaatggacaagcccagcaactgcaccaacgagctgtacatgatgatgagagactgctggcacgccgtgcccagccagagacccaccttcaagcagctggtggaggacctggacagaatcgtggccctgaccagcaaccaggagtacctggacctgagcatgcccctggaccagtacagccccagcttccccgacaccagaagcagcacctgcagcagcggcgaggacagcgtgttcagccacgagcccctgcccgaggagccctgcctgcccagacaccccgcccagctggccaacggcggcctgaagagaagatag

SEQ ID NO: 81636 - DNA, 168 bp, synthetic construct
  misc_feature 1..168: note = Description of Artificial Sequence: Synthetic coding sequence
  source 1..168: mol_type = other DNA
atgtggagctggaagtgcctgctgttctgggccgtgctggtgaccgccaccctgtgcaccgccagacccagccccaccctgcccgagcaggacgccctgcccagcagcgaggacgacgacgacgacgacgacagcagcagcgaggagaaggagaccgacaacacctag

SEQ ID NO: 81637 - skipped

SEQ ID NO: 81638 - DNA, 2469 bp, synthetic construct
  misc_feature 1..2469: note = Description of Artificial Sequence: Synthetic coding sequence
  source 1..2469: mol_type = other DNA
atgtggagctggaagtgcctgctgttctgggccgtgctggtgaccgccaccctgtgcaccgccagacccagccccaccctgcccgagcaggcccagccctggggcgcccccgtggaggtggagagcttcctggtgcaccccggcgacctgctgcagctgagatgcagactgagagacgacgtgcagagcatcaactggctgagagacggcgtgcagctggccgagagcaacagaaccagaatcaccggcgaggaggtggaggtgcaggacagcgtgcccgccgacagcggcctgtacgcctgcgtgaccagcagccccagcggcagcgacaccacctacttcagcgtgaacgtgagcgacgccctgcccagcagcgaggacgacgacgacgacgacgacagcagcagcgaggagaaggagaccgacaacaccaagcccaacagaatgcccgtggccccctactggaccagccccgagaagatggagaagaagctgcacgccgtgcccgccgccaagaccgtgaagttcaagtgccccagcagcggcacccccaaccccaccctgagatggctgaagaacggcaaggagttcaagcccgaccacagaatcggcggctacaaggtgagatacgccacctggagcatcatcatggacagcgtggtgcccagcgacaagggcaactacacctgcatcgtggagaacgagtacggcagcatcaaccacacctaccagctggacgtggtggagagaagcccccacagacccatcctgcaggccggcctgcccgccaacaagaccgtggccctgggcagcaacgtggagttcatgtgcaaggtgtacagcgacccccagccccacatccagtggctgaagcacatcgaggtgaacggcagcaagatcggccccgacaacctgccctacgtgcagatcctgaagaccgccggcgtgaacaccaccgacaaggagatggaggtgctgcacctgagaaacgtgagcttcgaggacgccggcgagtacacctgcctggccggcaacagcatcggcctgagccaccacagcgcctggctgaccgtgctggaggccctggaggagagacccgccgtgatgaccagccccctgtacctggagatcatcatctactgcaccggcgccttcctgatcagctgcatggtgggcagcgtgatcgtgtacaagatgaagagcggcaccaagaagagcgacttccacagccagatggccgtgcacaagctggccaagagcatccccctgagaagacaggtgaccgtgagcgccgacagcagcgccagcatgaacagcggcgtgctgctggtgagacccagcagactgagcagcagcggcacccccatgctggccggcgtgagcgagtacgagctgcccgaggaccccagatgggagctgcccagagacagactggtgctgggcaagcccctgggcgagggctgcttcggccaggtggtgctggccgaggccatcggcctggacaaggacaagcccaacagagtgaccaaggtggccgtgaagatgctgaagagcgacgccaccgagaaggacctgagcgacctgatcagcgagatggagatgatgaagatgatcggcaagcacaagaacatcatcaacctgctgggcgcctgcacccaggacggccccctgtacgtgatcgtggagtacgccagcaagggcaacctgagagagtacctgcaggccagaagaccccccggcctggagtactgctacaaccccagccacaaccccgaggagcagctgagcagcaaggacctggtgagctgcgcctaccaggtggccagaggcatggagtacctggccagcaagaagtgcatccacagagacctggccgccagaaacgtgctggtgaccgaggacaacgtgatgaagatcgccgacttcggcctggccagagacatccaccacatcgactactacaagaagaccaccaacggcagactgcccgtgaagtggatggcccccgaggccctgttcgacagaatctacacccaccagagcgacgtgtggagcttcggcgtgctgctgtgggagatcttcaccctgggcggcagcccctaccccggcgtgcccgtggaggagctgttcaagctgctgaaggagggccacagaatggacaagcccagcaactgcaccaacgagctgtacatgatgatgagagactgctggcacgccgtgcccagccagagacccaccttcaagcagctggtggaggacctggacagaatcgtggccctgaccagcaaccaggagtacctggacctgagcatgcccctggaccagtacagccccagcttccccgacaccagaagcagcacctgcagcagcggcgaggacagcgtgttcagccacgagcccctgcccgaggagccctgcctgcccagacaccccgcccagctggccaacggcggcctgaagagaagatag

SEQ ID NO: 81639 - DNA, 897 bp, synthetic construct
  misc_feature 1..897: note = Description of Artificial Sequence: Synthetic coding sequence
  source 1..897: mol_type = other DNA
atgtggagctggaagtgcctgctgttctgggccgtgctggtgaccgccaccctgtgcaccgccagacccagccccaccctgcccgagcaggcccagccctggggcgcccccgtggaggtggagagcttcctggtgcaccccggcgacctgctgcagctgagatgcagactgagagacgacgtgcagagcatcaactggctgagagacggcgtgcagctggccgagagcaacagaaccagaatcaccggcgaggaggtggaggtgcaggacagcgtgcccgccgacagcggcctgtacgcctgcgtgaccagcagccccagcggcagcgacaccacctacttcagcgtgaacgtgagcgacgccctgcccagcagcgaggacgacgacgacgacgacgacagcagcagcgaggagaaggagaccgacaacaccaagcccaacagaatgcccgtggccccctactggaccagccccgagaagatggagaagaagctgcacgccgtgcccgccgccaagaccgtgaagttcaagtgccccagcagcggcacccccaaccccaccctgagatggctgaagaacggcaaggagttcaagcccgaccacagaatcggcggctacaaggtgagatacgccacctggagcatcatcatggacagcgtggtgcccagcgacaagggcaactacacctgcatcgtggagaacgagtacggcagcatcaaccacacctaccagctggacgtggtggagagaagcccccacagacccatcctgcaggccggcctgcccgccaacaagaccgtggccctgggcagcaacgtggagttcatgtgcaaggtgtacagcgacccccagccccacatccagtggctgaagcacatcgaggtgaacggcagctag

SEQ ID NO: 81640 - DNA, 438 bp, synthetic construct
  misc_feature 1..438: note = Description of Artificial Sequence: Synthetic coding sequence
  source 1..438: mol_type = other DNA
atgtggagctggaagtgcctgctgttctgggccgtgctggtgaccgccaccctgtgcaccgccagacccagccccaccctgcccgagcaggacgccctgcccagcagcgaggacgacgacgacgacgacgacagcagcagcgaggagaaggagaccgacaacaccaagcccaaccccgtggccccctactggaccagccccgagaagatggagaagaagctgcacgccgtgcccgccgccaagaccgtgaagttcaagtgccccagcagcggcacccccaaccccaccctgagatggctgaagaacggcaaggagttcaagcccgaccacagaatcggcggctacaaggtgagatacgccacctggagcatcatcatggacagcgtggtgcccagcgacaagggcaactacacctgcatcgtggagaacgagtactag

SEQ ID NO: 81641 - DNA, 429 bp, synthetic construct
  misc_feature 1..429: note = Description of Artificial Sequence: Synthetic coding sequence
  source 1..429: mol_type = other DNA
atgtggagctggaagtgcctgctgttctgggccgtgctggtgaccgccaccctgtgcaccgccagacccagccccaccctgcccgagcaggacgccctgcccagcagcgaggacgacgacgacgacgacgacagcagcagcgaggagaaggagaccgacaacaccaagcccaacagaatgcccgtggccccctactggaccagccccgagaagatggagaagaagctgcacgccgtgcccgccgccaagaccgtgaagttcaagtgccccagcagcggcacccccaaccccaccctgagatggctgaagaacggcaaggagttcaagcccgaccacagaatcggcggctacaaggtgagatacgccacctggagcatcatcatggacagcgtggtgcccagcgacaagggcaactacacctgcatctag

SEQ ID NO: 81642 - DNA, 258 bp, synthetic construct
  misc_feature 1..258: note = Description of Artificial Sequence: Synthetic coding sequence
  source 1..258: mol_type = other DNA
atgtggagctggaagtgcctgctgttctgggccgtgctggtgaccgccaccctgtgcaccgccagacccagccccaccctgcccgagcaggacgccctgcccagcagcgaggacgacgacgacgacgacgacagcagcagcgaggagaaggagaccgacaacaccaagcccaaccccgtggccccctactggaccagccccgagaagatggagaagaagctgcacgccgtgcccgccgccaagaccgtgaagttctag

SEQ ID NO: 81643 - DNA, 2463 bp, synthetic construct
  misc_feature 1..2463: note = Description of Artificial Sequence: Synthetic coding sequence
  source 1..2463: mol_type = other DNA
atgtggagctggaagtgcctgctgttctgggccgtgctggtgaccgccaccctgtgcaccgccagacccagccccaccctgcccgagcaggcccagccctggggcgcccccgtggaggtggagagcttcctggtgcaccccggcgacctgctgcagctgagatgcagactgagagacgacgtgcagagcatcaactggctgagagacggcgtgcagctggccgagagcaacagaaccagaatcaccggcgaggaggtggaggtgcaggacagcgtgcccgccgacagcggcctgtacgcctgcgtgaccagcagccccagcggcagcgacaccacctacttcagcgtgaacgtgagcgacgccctgcccagcagcgaggacgacgacgacgacgacgacagcagcagcgaggagaaggagaccgacaacaccaagcccaacagaatgcccgtggccccctactggaccagccccgagaagatggagaagaagctgcacgccgtgcccgccgccaagaccgtgaagttcaagtgccccagcagcggcacccccaaccccaccctgagatggctgaagaacggcaaggagttcaagcccgaccacagaatcggcggctacaaggtgagatacgccacctggagcatcatcatggacagcgtggtgcccagcgacaagggcaactacacctgcatcgtggagaacgagtacggcagcatcaaccacacctaccagctggacgtggtggagagaagcccccacagacccatcctgcaggccggcctgcccgccaacaagaccgtggccctgggcagcaacgtggagttcatgtgcaaggtgtacagcgacccccagccccacatccagtggctgaagcacatcgaggtgaacggcagcaagatcggccccgacaacctgccctacgtgcagatcctgaagaccgccggcgtgaacaccaccgacaaggagatggaggtgctgcacctgagaaacgtgagcttcgaggacgccggcgagtacacctgcctggccggcaacagcatcggcctgagccaccacagcgcctggctgaccgtgctggaggccctggaggagagacccgccgtgatgaccagccccctgtacctggagatcatcatctactgcaccggcgccttcctgatcagctgcatggtgggcagcgtgatcgtgtacaagatgaagagcggcaccaagaagagcgacttccacagccagatggccgtgcacaagctggccaagagcatccccctgagaagacaggtgagcgccgacagcagcgccagcatgaacagcggcgtgctgctggtgagacccagcagactgagcagcagcggcacccccatgctggccggcgtgagcgagtacgagctgcccgaggaccccagatgggagctgcccagagacagactggtgctgggcaagcccctgggcgagggctgcttcggccaggtggtgctggccgaggccatcggcctggacaaggacaagcccaacagagtgaccaaggtggccgtgaagatgctgaagagcgacgccaccgagaaggacctgagcgacctgatcagcgagatggagatgatgaagatgatcggcaagcacaagaacatcatcaacctgctgggcgcctgcacccaggacggccccctgtacgtgatcgtggagtacgccagcaagggcaacctgagagagtacctgcaggccagaagaccccccggcctggagtactgctacaaccccagccacaaccccgaggagcagctgagcagcaaggacctggtgagctgcgcctaccaggtggccagaggcatggagtacctggccagcaagaagtgcatccacagagacctggccgccagaaacgtgctggtgaccgaggacaacgtgatgaagatcgccgacttcggcctggccagagacatccaccacatcgactactacaagaagaccaccaacggcagactgcccgtgaagtggatggcccccgaggccctgttcgacagaatctacacccaccagagcgacgtgtggagcttcggcgtgctgctgtgggagatcttcaccctgggcggcagcccctaccccggcgtgcccgtggaggagctgttcaagctgctgaaggagggccacagaatggacaagcccagcaactgcaccaacgagctgtacatgatgatgagagactgctggcacgccgtgcccagccagagacccaccttcaagcagctggtggaggacctggacagaatcgtggccctgaccagcaaccaggagtacctggacctgagcatgcccctggaccagtacagccccagcttccccgacaccagaagcagcacctgcagcagcggcgaggacagcgtgttcagccacgagcccctgcccgaggagccctgcctgcccagacaccccgcccagctggccaacggcggcctgaagagaagatag

SEQ ID NO: 81644 - DNA, 2010 bp, synthetic construct
  misc_feature 1..2010: note = Description of Artificial Sequence: Synthetic coding sequence
  source 1..2010: mol_type = other DNA
atggtgagctggggcagattcatctgcctggtggtggtgaccatggccaccctgagcctggccagacccagcttcagcctggtggaggacaccaccctggagcccgaggacgccatcagcagcggcgacgacgaggacgacaccgacggcgccgaggacttcgtgagcgagaacagcaacaacaagagagccccctactggaccaacaccgagaagatggagaagagactgcacgccgtgcccgccgccaacaccgtgaagttcagatgccccgccggcggcaaccccatgcccaccatgagatggctgaagaacggcaaggagttcaagcaggagcacagaatcggcggctacaaggtgagaaaccagcactggagcctgatcatggagagcgtggtgcccagcgacaagggcaactacacctgcgtggtggagaacgagtacggcagcatcaaccacacctaccacctggacgtggtggagagaagcccccacagacccatcctgcaggccggcctgcccgccaacgccagcaccgtggtgggcggcgacgtggagttcgtgtgcaaggtgtacagcgacgcccagccccacatccagtggatcaagcacgtggagaagaacggcagcaagtacggccccgacggcctgccctacctgaaggtgctgaaggccgccggcgtgaacaccaccgacaaggagatcgaggtgctgtacatcagaaacgtgaccttcgaggacgccggcgagtacacctgcctggccggcaacagcatcggcatcagcttccacagcgcctggctgaccgtgctgcccgcccccggcagagagaaggagatcaccgccagccccgactacctggagatcgccatctactgcatcggcgtgttcctgatcgcctgcatggtggtgaccgtgatcctgtgcagaatgaagaacaccaccaagaagcccgacttcagcagccagcccgccgtgcacaagctgaccaagagaatccccctgagaagacaggtgagcgccgagagcagcagcagcatgaacagcaacacccccctggtgagaatcaccaccagactgagcagcaccgccgacacccccatgctggccggcgtgagcgagtacgagctgcccgaggaccccaagtgggagttccccagagacaagctgaccctgggcaagcccctgggcgagggctgcttcggccaggtggtgatggccgaggccgtgggcatcgacaaggacaagcccaaggaggccgtgaccgtggccgtgaagatgctgaaggacgacgccaccgagaaggacctgagcgacctggtgagcgagatggagatgatgaagatgatcggcaagcacaagaacatcatcaacctgctgggcgcctgcacccaggacggccccctgtacgtgatcgtggagtacgccagcaagggcaacctgagagagtacctgagagccagaagaccccccggcatggagtacagctacgacatcaacagagtgcccgaggagcagatgaccttcaaggacctggtgagctgcacctaccagctggccagaggcatggagtacctggccagccagaagtgcatccacagagacctggccgccagaaacgtgctggtgaccgagaacaacgtgatgaagatcgccgacttcggcctggccagagacatcaacaacatcgactactacaagaagaccaccaacggcagactgcccgtgaagtggatggcccccgaggccctgttcgacagagtgtacacccaccagagcgacgtgtggagcttcggcgtgctgatgtgggagatcttcaccctgggcggcagcccctaccccggcatccccgtggaggagctgttcaagctgctgaaggagggccacagaatggacaagcccgccaactgcaccaacgagctgtacatgatgatgagagactgctggcacgccgtgcccagccagagacccaccttcaagcagctggtggaggacctggacagaatctag

SEQ ID NO: 81645 - DNA, 2460 bp, synthetic construct
  misc_feature 1..2460: note = Description of Artificial Sequence: Synthetic coding sequence
  source 1..2460: mol_type = other DNA
atggtgagctggggcagattcatctgcctggtggtggtgaccatggccaccctgagcctggccagacccagcttcagcctggtggaggacaccaccctggagcccgaggagccccccaccaagtaccagatcagccagcccgaggtgtacgtggccgcccccggcgagagcctggaggtgagatgcctgctgaaggacgccgccgtgatcagctggaccaaggacggcgtgcacctgggccccaacaacagaaccgtgctgatcggcgagtacctgcagatcaagggcgccacccccagagacagcggcctgtacgcctgcaccgccagcagaaccgtggacagcgagacctggtacttcatggtgaacgtgaccgacgccatcagcagcggcgacgacgaggacgacaccgacggcgccgaggacttcgtgagcgagaacagcaacaacaagagagccccctactggaccaacaccgagaagatggagaagagactgcacgccgtgcccgccgccaacaccgtgaagttcagatgccccgccggcggcaaccccatgcccaccatgagatggctgaagaacggcaaggagttcaagcaggagcacagaatcggcggctacaaggtgagaaaccagcactggagcctgatcatggagagcgtggtgcccagcgacaagggcaactacacctgcgtggtggagaacgagtacggcagcatcaaccacacctaccacctggacgtggtggagagaagcccccacagacccatcctgcaggccggcctgcccgccaacgccagcaccgtggtgggcggcgacgtggagttcgtgtgcaaggtgtacagcgacgcccagccccacatccagtggatcaagcacgtggagaagaacggcagcaagtacggccccgacggcctgccctacctgaaggtgctgaaggccgccggcgtgaacaccaccgacaaggagatcgaggtgctgtacatcagaaacgtgaccttcgaggacgccggcgagtacacctgcctggccggcaacagcatcggcatcagcttccacagcgcctggctgaccgtgctgcccgcccccggcagagagaaggagatcaccgccagccccgactacctggagatcgccatctactgcatcggcgtgttcctgatcgcctgcatggtggtgaccgtgatcctgtgcagaatgaagaacaccaccaagaagcccgacttcagcagccagcccgccgtgcacaagctgaccaagagaatccccctgagaagacaggtgagcgccgagagcagcagcagcatgaacagcaacacccccctggtgagaatcaccaccagactgagcagcaccgccgacacccccatgctggccggcgtgagcgagtacgagctgcccgaggaccccaagtgggagttccccagagacaagctgaccctgggcaagcccctgggcgagggctgcttcggccaggtggtgatggccgaggccgtgggcatcgacaaggacaagcccaaggaggccgtgaccgtggccgtgaagatgctgaaggacgacgccaccgagaaggacctgagcgacctggtgagcgagatggagatgatgaagatgatcggcaagcacaagaacatcatcaacctgctgggcgcctgcacccaggacggccccctgtacgtgatcgtggagtacgccagcaagggcaacctgagagagtacctgagagccagaagaccccccggcatggagtacagctacgacatcaacagagtgcccgaggagcagatgaccttcaaggacctggtgagctgcacctaccagctggccagaggcatggagtacctggccagccagaagtgcatccacagagacctggccgccagaaacgtgctggtgaccgagaacaacgtgatgaagatcgccgacttcggcctggccagagacatcaacaacatcgactactacaagaagaccaccaacggcagactgcccgtgaagtggatggcccccgaggccctgttcgacagagtgtacacccaccagagcgacgtgtggagcttcggcgtgctgatgtgggagatcttcaccctgggcggcagcccctaccccggcatccccgtggaggagctgttcaagctgctgaaggagggccacagaatggacaagcccgccaactgcaccaacgagctgtacatgatgatgagagactgctggcacgccgtgcccagccagagacccaccttcaagcagctggtggaggacctggacagaatcctgaccctgaccaccaacgaggagtacctggacctgagccagcccctggagcagtacagccccagctaccccgacaccagaagcagctgcagcagcggcgacgacagcgtgttcagccccgaccccatgccctacgagccctgcctgccccagtacccccacatcaacggcagcgtgaagacctag

SEQ ID NO: 81646 - DNA, 2358 bp, synthetic construct
  misc_feature 1..2358: note = Description of Artificial Sequence: Synthetic coding sequence
  source 1..2358: mol_type = other DNA
atggtgagctggggcagattcatctgcctggtggtggtgaccatggccaccctgagcctggccagacccagcttcagcctggtggaggacaccaccctggagcccgaggagccccccaccaagtaccagatcagccagcccgaggtgtacgtggccgcccccggcgagagcctggaggtgagatgcctgctgaaggacgccgccgtgatcagctggaccaaggacggcgtgcacctgggccccaacaacagaaccgtgctgatcggcgagtacctgcagatcaagggcgccacccccagagacagcggcctgtacgcctgcaccgccagcagaaccgtggacagcgagacctggtacttcatggtgaacgtgaccgacgccatcagcagcggcgacgacgaggacgacaccgacggcgccgaggacttcgtgagcgagaacagcaacaacaagagagccccctactggaccaacaccgagaagatggagaagagactgcacgccgtgcccgccgccaacaccgtgaagttcagatgccccgccggcggcaaccccatgcccaccatgagatggctgaagaacggcaaggagttcaagcaggagcacagaatcggcggctacaaggtgagaaaccagcactggagcctgatcatggagagcgtggtgcccagcgacaagggcaactacacctgcgtggtggagaacgagtacggcagcatcaaccacacctaccacctggacgtggtggagagaagcccccacagacccatcctgcaggccggcctgcccgccaacgccagcaccgtggtgggcggcgacgtggagttcgtgtgcaaggtgtacagcgacgcccagccccacatccagtggatcaagcacgtggagaagaacggcagcaagtacggccccgacggcctgccctacctgaaggtgctgaaggccgccggcgtgaacaccaccgacaaggagatcgaggtgctgtacatcagaaacgtgaccttcgaggacgccggcgagtacacctgcctggccggcaacagcatcggcatcagcttccacagcgcctggctgaccgtgctgcccgcccccggcagagagaaggagatcaccgccagccccgactacctggagatcgccatctactgcatcggcgtgttcctgatcgcctgcatggtggtgaccgtgatcctgtgcagaatgaagaacaccaccaagaagcccgacttcagcagccagcccgccgtgcacaagctgaccaagagaatccccctgagaagacaggtgagcgccgagagcagcagcagcatgaacagcaacacccccctggtgagaatcaccaccagactgagcagcaccgccgacacccccatgctggccggcgtgagcgagtacgagctgcccgaggaccccaagtgggagttccccagagacaagctgaccctgggcaagcccctgggcgagggctgcttcggccaggtggtgatggccgaggccgtgggcatcgacaaggacaagcccaaggaggccgtgaccgtggccgtgaagatgctgaaggacgacgccaccgagaaggacctgagcgacctggtgagcgagatggagatgatgaagatgatcggcaagcacaagaacatcatcaacctgctgggcgcctgcacccaggacggccccctgtacgtgatcgtggagtacgccagcaagggcaacctgagagagtacctgagagccagaagaccccccggcatggagtacagctacgacatcaacagagtgcccgaggagcagatgaccttcaaggacctggtgagctgcacctaccagctggccagaggcatggagtacctggccagccagaagtgcatccacagagacctggccgccagaaacgtgctggtgaccgagaacaacgtgatgaagatcgccgacttcggcctggccagagacatcaacaacatcgactactacaagaagaccaccaacggcagactgcccgtgaagtggatggcccccgaggccctgttcgacagagtgtacacccaccagagcgacgtgtggagcttcggcgtgctgatgtgggagatcttcaccctgggcggcagcccctaccccggcatccccgtggaggagctgttcaagctgctgaaggagggccacagaatggacaagcccgccaactgcaccaacgagctgtacatgatgatgagagactgctggcacgccgtgcccagccagagacccaccttcaagcagctggtggaggacctggacagaatcctgaccctgaccaccaacgaggagtacctggacctgagccagcccctggagccctacagcccctgctaccccgaccccagatag

SEQ ID NO: 81647 - DNA, 2115 bp, synthetic construct
  misc_feature 1..2115: note = Description of Artificial Sequence: Synthetic coding sequence
  source 1..2115: mol_type = other DNA
atggtgagctggggcagattcatctgcctggtggtggtgaccatggccaccctgagcctggccagacccagcttcagcctggtggaggacaccaccctggagcccgagggcgccccctactggaccaacaccgagaagatggagaagagactgcacgccgtgcccgccgccaacaccgtgaagttcagatgccccgccggcggcaaccccatgcccaccatgagatggctgaagaacggcaaggagttcaagcaggagcacagaatcggcggctacaaggtgagaaaccagcactggagcctgatcatggagagcgtggtgcccagcgacaagggcaactacacctgcgtggtggagaacgagtacggcagcatcaaccacacctaccacctggacgtggtggagagaagcccccacagacccatcctgcaggccggcctgcccgccaacgccagcaccgtggtgggcggcgacgtggagttcgtgtgcaaggtgtacagcgacgcccagccccacatccagtggatcaagcacgtggagaagaacggcagcaagtacggccccgacggcctgccctacctgaaggtgctgaaggccgccggcgtgaacaccaccgacaaggagatcgaggtgctgtacatcagaaacgtgaccttcgaggacgccggcgagtacacctgcctggccggcaacagcatcggcatcagcttccacagcgcctggctgaccgtgctgcccgcccccggcagagagaaggagatcaccgccagccccgactacctggagatcgccatctactgcatcggcgtgttcctgatcgcctgcatggtggtgaccgtgatcctgtgcagaatgaagaacaccaccaagaagcccgacttcagcagccagcccgccgtgcacaagctgaccaagagaatccccctgagaagacaggtgagcgccgagagcagcagcagcatgaacagcaacacccccctggtgagaatcaccaccagactgagcagcaccgccgacacccccatgctggccggcgtgagcgagtacgagctgcccgaggaccccaagtgggagttccccagagacaagctgaccctgggcaagcccctgggcgagggctgcttcggccaggtggtgatggccgaggccgtgggcatcgacaaggacaagcccaaggaggccgtgaccgtggccgtgaagatgctgaaggacgacgccaccgagaaggacctgagcgacctggtgagcgagatggagatgatgaagatgatcggcaagcacaagaacatcatcaacctgctgggcgcctgcacccaggacggccccctgtacgtgatcgtggagtacgccagcaagggcaacctgagagagtacctgagagccagaagaccccccggcatggagtacagctacgacatcaacagagtgcccgaggagcagatgaccttcaaggacctggtgagctgcacctaccagctggccagaggcatggagtacctggccagccagaagtgcatccacagagacctggccgccagaaacgtgctggtgaccgagaacaacgtgatgaagatcgccgacttcggcctggccagagacatcaacaacatcgactactacaagaagaccaccaacggcagactgcccgtgaagtggatggcccccgaggccctgttcgacagagtgtacacccaccagagcgacgtgtggagcttcggcgtgctgatgtgggagatcttcaccctgggcggcagcccctaccccggcatccccgtggaggagctgttcaagctgctgaaggagggccacagaatggacaagcccgccaactgcaccaacgagctgtacatgatgatgagagactgctggcacgccgtgcccagccagagacccaccttcaagcagctggtggaggacctggacagaatcctgaccctgaccaccaacgaggagtacctggacctgagccagcccctggagcagtacagccccagctaccccgacaccagaagcagctgcagcagcggcgacgacagcgtgttcagccccgaccccatgccctacgagccctgcctgccccagtacccccacatcaacggcagcgtgaagacctag

SEQ ID NO: 81648 - DNA, 2124 bp, synthetic construct
  misc_feature 1..2124: note = Description of Artificial Sequence: Synthetic coding sequence
  source 1..2124: mol_type = other DNA
atggtgagctggggcagattcatctgcctggtggtggtgaccatggccaccctgagcctggccagacccagcttcagcctggtggaggacaccaccctggagcccgaggacgccatcagcagcggcgacgacgaggacgacaccgacggcgccgaggacttcgtgagcgagaacagcaacaacaagagagccccctactggaccaacaccgagaagatggagaagagactgcacgccgtgcccgccgccaacaccgtgaagttcagatgccccgccggcggcaaccccatgcccaccatgagatggctgaagaacggcaaggagttcaagcaggagcacagaatcggcggctacaaggtgagaaaccagcactggagcctgatcatggagagcgtggtgcccagcgacaagggcaactacacctgcgtggtggagaacgagtacggcagcatcaaccacacctaccacctggacgtggtggagagaagcccccacagacccatcctgcaggccggcctgcccgccaacgccagcaccgtggtgggcggcgacgtggagttcgtgtgcaaggtgtacagcgacgcccagccccacatccagtggatcaagcacgtggagaagaacggcagcaagtacggccccgacggcctgccctacctgaaggtgctgaaggccgccggcgtgaacaccaccgacaaggagatcgaggtgctgtacatcagaaacgtgaccttcgaggacgccggcgagtacacctgcctggccggcaacagcatcggcatcagcttccacagcgcctggctgaccgtgctgcccgcccccggcagagagaaggagatcaccgccagccccgactacctggagatcgccatctactgcatcggcgtgttcctgatcgcctgcatggtggtgaccgtgatcctgtgcagaatgaagaacaccaccaagaagcccgacttcagcagccagcccgccgtgcacaagctgaccaagagaatccccctgagaagacaggtgaccgtgagcgccgagagcagcagcagcatgaacagcaacacccccctggtgagaatcaccaccagactgagcagcaccgccgacacccccatgctggccggcgtgagcgagtacgagctgcccgaggaccccaagtgggagttccccagagacaagctgaccctgggcaagcccctgggcgagggctgcttcggccaggtggtgatggccgaggccgtgggcatcgacaaggacaagcccaaggaggccgtgaccgtggccgtgaagatgctgaaggacgacgccaccgagaaggacctgagcgacctggtgagcgagatggagatgatgaagatgatcggcaagcacaagaacatcatcaacctgctgggcgcctgcacccaggacggccccctgtacgtgatcgtggagtacgccagcaagggcaacctgagagagtacctgagagccagaagaccccccggcatggagtacagctacgacatcaacagagtgcccgaggagcagatgaccttcaaggacctggtgagctgcacctaccagctggccagaggcatggagtacctggccagccagaagtgcatccacagagacctggccgccagaaacgtgctggtgaccgagaacaacgtgatgaagatcgccgacttcggcctggccagagacatcaacaacatcgactactacaagaagaccaccaacggcagactgcccgtgaagtggatggcccccgaggccctgttcgacagagtgtacacccaccagagcgacgtgtggagcttcggcgtgctgatgtgggagatcttcaccctgggcggcagcccctaccccggcatccccgtggaggagctgttcaagctgctgaaggagggccacagaatggacaagcccgccaactgcaccaacgagctgtacatgatgatgagagactgctggcacgccgtgcccagccagagacccaccttcaagcagctggtggaggacctggacagaatcctgaccctgaccaccaacgaggaggagaagaaggtgagcggcgccgtggactgccacaagcccccctgcaaccccagccacctgccctgcgtgctggccgtggaccagtag

SEQ ID NO: 81649 - DNA, 2466 bp, synthetic construct
  misc_feature 1..2466: note = Description of Artificial Sequence: Synthetic coding sequence
  source 1..2466: mol_type = other DNA
atggtgagctggggcagattcatctgcctggtggtggtgaccatggccaccctgagcctggccagacccagcttcagcctggtggaggacaccaccctggagcccgaggagccccccaccaagtaccagatcagccagcccgaggtgtacgtggccgcccccggcgagagcctggaggtgagatgcctgctgaaggacgccgccgtgatcagctggaccaaggacggcgtgcacctgggccccaacaacagaaccgtgctgatcggcgagtacctgcagatcaagggcgccacccccagagacagcggcctgtacgcctgcaccgccagcagaaccgtggacagcgagacctggtacttcatggtgaacgtgaccgacgccatcagcagcggcgacgacgaggacgacaccgacggcgccgaggacttcgtgagcgagaacagcaacaacaagagagccccctactggaccaacaccgagaagatggagaagagactgcacgccgtgcccgccgccaacaccgtgaagttcagatgccccgccggcggcaaccccatgcccaccatgagatggctgaagaacggcaaggagttcaagcaggagcacagaatcggcggctacaaggtgagaaaccagcactggagcctgatcatggagagcgtggtgcccagcgacaagggcaactacacctgcgtggtggagaacgagtacggcagcatcaaccacacctaccacctggacgtggtggagagaagcccccacagacccatcctgcaggccggcctgcccgccaacgccagcaccgtggtgggcggcgacgtggagttcgtgtgcaaggtgtacagcgacgcccagccccacatccagtggatcaagcacgtggagaagaacggcagcaagtacggccccgacggcctgccctacctgaaggtgctgaaggccgccggcgtgaacaccaccgacaaggagatcgaggtgctgtacatcagaaacgtgaccttcgaggacgccggcgagtacacctgcctggccggcaacagcatcggcatcagcttccacagcgcctggctgaccgtgctgcccgcccccggcagagagaaggagatcaccgccagccccgactacctggagatcgccatctactgcatcggcgtgttcctgatcgcctgcatggtggtgaccgtgatcctgtgcagaatgaagaacaccaccaagaagcccgacttcagcagccagcccgccgtgcacaagctgaccaagagaatccccctgagaagacaggtgaccgtgagcgccgagagcagcagcagcatgaacagcaacacccccctggtgagaatcaccaccagactgagcagcaccgccgacacccccatgctggccggcgtgagcgagtacgagctgcccgaggaccccaagtgggagttccccagagacaagctgaccctgggcaagcccctgggcgagggctgcttcggccaggtggtgatggccgaggccgtgggcatcgacaaggacaagcccaaggaggccgtgaccgtggccgtgaagatgctgaaggacgacgccaccgagaaggacctgagcgacctggtgagcgagatggagatgatgaagatgatcggcaagcacaagaacatcatcaacctgctgggcgcctgcacccaggacggccccctgtacgtgatcgtggagtacgccagcaagggcaacctgagagagtacctgagagccagaagaccccccggcatggagtacagctacgacatcaacagagtgcccgaggagcagatgaccttcaaggacctggtgagctgcacctaccagctggccagaggcatggagtacctggccagccagaagtgcatccacagagacctggccgccagaaacgtgctggtgaccgagaacaacgtgatgaagatcgccgacttcggcctggccagagacatcaacaacatcgactactacaagaagaccaccaacggcagactgcccgtgaagtggatggcccccgaggccctgttcgacagagtgtacacccaccagagcgacgtgtggagcttcggcgtgctgatgtgggagatcttcaccctgggcggcagcccctaccccggcatccccgtggaggagctgttcaagctgctgaaggagggccacagaatggacaagcccgccaactgcaccaacgagctgtacatgatgatgagagactgctggcacgccgtgcccagccagagacccaccttcaagcagctggtggaggacctggacagaatcctgaccctgaccaccaacgaggagtacctggacctgagccagcccctggagcagtacagccccagctaccccgacaccagaagcagctgcagcagcggcgacgacagcgtgttcagccccgaccccatgccctacgagccctgcctgccccagtacccccacatcaacggcagcgtgaagacctag

SEQ ID NO: 81650 - DNA, 765 bp, synthetic construct
  misc_feature 1..765: note = Description of Artificial Sequence: Synthetic coding sequence
  source 1..765: mol_type = other DNA
atggtgagctggggcagattcatctgcctggtggtggtgaccatggccaccctgagcctggccagacccagcttcagcctggtggaggacaccaccctggagcccgaggagccccccaccaagtaccagatcagccagcccgaggtgtacgtggccgcccccggcgagagcctggaggtgagatgcctgctgaaggacgccgccgtgatcagctggaccaaggacggcgtgcacctgggccccaacaacagaaccgtgctgatcggcgagtacctgcagatcaagggcgccacccccagagacagcggcctgtacgcctgcaccgccagcagaaccgtggacagcgagacctggtacttcatggtgaacgtgaccgacgccatcagcagcggcgacgacgaggacgacaccgacggcgccgaggacttcgtgagcgagaacagcaacaacaagagagccccctactggaccaacaccgagaagatggagaagagactgcacgccgtgcccgccgccaacaccgtgaagttcagatgccccgccggcggcaaccccatgcccaccatgagatggctgaagaacggcaaggagttcaagcaggagcacagaatcggcggctacaaggtgagaaaccagcactggagcctgatcatggagagcgtggtgcccagcgacaagggcaactacacctgcgtggtggagaacgagtacggcagcatcaaccacacctaccacctggacgtggtgggcagccagggcctgtag

SEQ ID NO: 81651 - DNA, 2043 bp, synthetic construct
  misc_feature 1..2043: note = Description of Artificial Sequence: Synthetic coding sequence
  source 1..2043: mol_type = other DNA
atggtgagctggggcagattcatctgcctggtggtggtgaccatggccaccctgagcctggccagacccagcttcagcctggtggaggacaccaccctggagcccgaggacgccatcagcagcggcgacgacgaggacgacaccgacggcgccgaggacttcgtgagcgagaacagcaacaacaagagagccccctactggaccaacaccgagaagatggagaagagactgcacgccgtgcccgccgccaacaccgtgaagttcagatgccccgccggcggcaaccccatgcccaccatgagatggctgaagaacggcaaggagttcaagcaggagcacagaatcggcggctacaaggtgagaaaccagcactggagcctgatcatggagagcgtggtgcccagcgacaagggcaactacacctgcgtggtggagaacgagtacggcagcatcaaccacacctaccacctggacgtggtggagagaagcccccacagacccatcctgcaggccggcctgcccgccaacgccagcaccgtggtgggcggcgacgtggagttcgtgtgcaaggtgtacagcgacgcccagccccacatccagtggatcaagcacgtggagaagaacggcagcaagtacggccccgacggcctgccctacctgaaggtgctgaagcacagcggcatcaacagcagcaacgccgaggtgctggccctgttcaacgtgaccgaggccgacgccggcgagtacatctgcaaggtgagcaactacatcggccaggccaaccagagcgcctggctgaccgtgctgcccaagcagcaggcccccggcagagagaaggagatcaccgccagccccgactacctggagatcgccatctactgcatcggcgtgttcctgatcgcctgcatggtggtgaccgtgatcctgtgcagaatgaagaacaccaccaagaagcccgacttcagcagccagcccgccgtgcacaagctgaccaagagaatccccctgagaagacaggtgaccgtgagcgccgagagcagcagcagcatgaacagcaacacccccctggtgagaatcaccaccagactgagcagcaccgccgacacccccatgctggccggcgtgagcgagtacgagctgcccgaggaccccaagtgggagttccccagagacaagctgaccctgggcaagcccctgggcgagggctgcttcggccaggtggtgatggccgaggccgtgggcatcgacaaggacaagcccaaggaggccgtgaccgtggccgtgaagatgctgaaggacgacgccaccgagaaggacctgagcgacctggtgagcgagatggagatgatgaagatgatcggcaagcacaagaacatcatcaacctgctgggcgcctgcacccaggacggccccctgtacgtgatcgtggagtacgccagcaagggcaacctgagagagtacctgagagccagaagaccccccggcatggagtacagctacgacatcaacagagtgcccgaggagcagatgaccttcaaggacctggtgagctgcacctaccagctggccagaggcatggagtacctggccagccagaagtgcatccacagagacctggccgccagaaacgtgctggtgaccgagaacaacgtgatgaagatcgccgacttcggcctggccagagacatcaacaacatcgactactacaagaagaccaccaacggcagactgcccgtgaagtggatggcccccgaggccctgttcgacagagtgtacacccaccagagcgacgtgtggagcttcggcgtgctgatgtgggagatcttcaccctgggcggcagcccctaccccggcatccccgtggaggagctgttcaagctgctgaaggagggccacagaatggacaagcccgccaactgcaccaacgagctgtacatgatgatgagagactgctggcacgccgtgcccagccagagacccaccttcaagcagctggtggaggacctggacagaatcctgaccctgaccaccaacgagatctag

SEQ ID NO: 81652 - DNA, 2310 bp, synthetic construct
  misc_feature 1..2310: note = Description of Artificial Sequence: Synthetic coding sequence
  source 1..2310: mol_type = other DNA
atggtgagctggggcagattcatctgcctggtggtggtgaccatggccaccctgagcctggccagacccagcttcagcctggtggaggacaccaccctggagcccgaggagccccccaccaagtaccagatcagccagcccgaggtgtacgtggccgcccccggcgagagcctggaggtgagatgcctgctgaaggacgccgccgtgatcagctggaccaaggacggcgtgcacctgggccccaacaacagaaccgtgctgatcggcgagtacctgcagatcaagggcgccacccccagagacagcggcctgtacgcctgcaccgccagcagaaccgtggacagcgagacctggtacttcatggtgaacgtgaccgacgccatcagcagcggcgacgacgaggacgacaccgacggcgccgaggacttcgtgagcgagaacagcaacaacaagagagccccctactggaccaacaccgagaagatggagaagagactgcacgccgtgcccgccgccaacaccgtgaagttcagatgccccgccggcggcaaccccatgcccaccatgagatggctgaagaacggcaaggagttcaagcaggagcacagaatcggcggctacaaggtgagaaaccagcactggagcctgatcatggagagcgtggtgcccagcgacaagggcaactacacctgcgtggtggagaacgagtacggcagcatcaaccacacctaccacctggacgtggtggagagaagcccccacagacccatcctgcaggccggcctgcccgccaacgccagcaccgtggtgggcggcgacgtggagttcgtgtgcaaggtgtacagcgacgcccagccccacatccagtggatcaagcacgtggagaagaacggcagcaagtacggccccgacggcctgccctacctgaaggtgctgaagcacagcggcatcaacagcagcaacgccgaggtgctggccctgttcaacgtgaccgaggccgacgccggcgagtacatctgcaaggtgagcaactacatcggccaggccaaccagagcgcctggctgaccgtgctgcccaagcagcaggcccccggcagagagaaggagatcaccgccagccccgactacctggagatcgccatctactgcatcggcgtgttcctgatcgcctgcatggtggtgaccgtgatcctgtgcagaatgaagaacaccaccaagaagcccgacttcagcagccagcccgccgtgcacaagctgaccaagagaatccccctgagaagacaggtgaccgtgagcgccgagagcagcagcagcatgaacagcaacacccccctggtgagaatcaccaccagactgagcagcaccgccgacacccccatgctggccggcgtgagcgagtacgagctgcccgaggaccccaagtgggagttccccagagacaagctgaccctgggcaagcccctgggcgagggctgcttcggccaggtggtgatggccgaggccgtgggcatcgacaaggacaagcccaaggaggccgtgaccgtggccgtgaagatgctgaaggacgacgccaccgagaaggacctgagcgacctggtgagcgagatggagatgatgaagatgatcggcaagcacaagaacatcatcaacctgctgggcgcctgcacccaggacggccccctgtacgtgatcgtggagtacgccagcaagggcaacctgagagagtacctgagagccagaagaccccccggcatggagtacagctacgacatcaacagagtgcccgaggagcagatgaccttcaaggacctggtgagctgcacctaccagctggccagaggcatggagtacctggccagccagaagtgcatccacagagacctggccgccagaaacgtgctggtgaccgagaacaacgtgatgaagatcgccgacttcggcctggccagagacatcaacaacatcgactactacaagaagaccaccaacggcagactgcccgtgaagtggatggcccccgaggccctgttcgacagagtgtacacccaccagagcgacgtgtggagcttcggcgtgctgatgtgggagatcttcaccctgggcggcagcccctaccccggcatccccgtggaggagctgttcaagctgctgaaggagggccacagaatggacaagcccgccaactgcaccaacgagctgtacatgatgatgagagactgctggcacgccgtgcccagccagagacccaccttcaagcagctggtggaggacctggacagaatcctgaccctgaccaccaacgagatctag

SEQ ID NO: 81653 - DNA, 2307 bp, synthetic construct
  misc_feature 1..2307: note = Description of Artificial Sequence: Synthetic coding sequence
  source 1..2307: mol_type = other DNA
atggtgagctggggcagattcatctgcctggtggtggtgaccatggccaccctgagcctggccagacccagcttcagcctggtggaggacaccaccctggagcccgaggagccccccaccaagtaccagatcagccagcccgaggtgtacgtggccgcccccggcgagagcctggaggtgagatgcctgctgaaggacgccgccgtgatcagctggaccaaggacggcgtgcacctgggccccaacaacagaaccgtgctgatcggcgagtacctgcagatcaagggcgccacccccagagacagcggcctgtacgcctgcaccgccagcagaaccgtggacagcgagacctggtacttcatggtgaacgtgaccgacgccatcagcagcggcgacgacgaggacgacaccgacggcgccgaggacttcgtgagcgagaacagcaacaacaagagagccccctactggaccaacaccgagaagatggagaagagactgcacgccgtgcccgccgccaacaccgtgaagttcagatgccccgccggcggcaaccccatgcccaccatgagatggctgaagaacggcaaggagttcaagcaggagcacagaatcggcggctacaaggtgagaaaccagcactggagcctgatcatggagagcgtggtgcccagcgacaagggcaactacacctgcgtggtggagaacgagtacggcagcatcaaccacacctaccacctggacgtggtggagagaagcccccacagacccatcctgcaggccggcctgcccgccaacgccagcaccgtggtgggcggcgacgtggagttcgtgtgcaaggtgtacagcgacgcccagccccacatccagtggatcaagcacgtggagaagaacggcagcaagtacggccccgacggcctgccctacctgaaggtgctgaagcacagcggcatcaacagcagcaacgccgaggtgctggccctgttcaacgtgaccgaggccgacgccggcgagtacatctgcaaggtgagcaactacatcggccaggccaaccagagcgcctggctgaccgtgctgcccaagcagcaggcccccggcagagagaaggagatcaccgccagccccgactacctggagatcgccatctactgcatcggcgtgttcctgatcgcctgcatggtggtgaccgtgatcctgtgcagaatgaagaacaccaccaagaagcccgacttcagcagccagcccgccgtgcacaagctgaccaagagaatccccctgagaagacaggtgaccgtgagcgccgagagcagcagcagcatgaacagcaacacccccctggtgagaatcaccaccagactgagcagcaccgccgacacccccatgctggccggcgtgagcgagtacgagctgcccgaggaccccaagtgggagttccccagagacaagctgaccctgggcaagcccctgggcgagggctgcttcggccaggtggtgatggccgaggccgtgggcatcgacaaggacaagcccaaggaggccgtgaccgtggccgtgaagatgctgaaggacgacgccaccgagaaggacctgagcgacctggtgagcgagatggagatgatgaagatgatcggcaagcacaagaacatcatcaacctgctgggcgcctgcacccaggacggccccctgtacgtgatcgtggagtacgccagcaagggcaacctgagagagtacctgagagccagaagaccccccggcatggagtacagctacgacatcaacagagtgcccgaggagcagatgaccttcaaggacctggtgagctgcacctaccagctggccagaggcatggagtacctggccagccagaagtgcatccacagagacctggccgccagaaacgtgctggtgaccgagaacaacgtgatgaagatcgccgacttcggcctggccagagacatcaacaacatcgactactacaagaagaccaccaacggcagactgcccgtgaagtggatggcccccgaggccctgttcgacagagtgtacacccaccagagcgacgtgtggagcttcggcgtgctgatgtgggagatcttcaccctgggcggcagcccctaccccggcatccccgtggaggagctgttcaagctgctgaaggagggccacagaatggacaagcccgccaactgcaccaacgagctgtacatgatgatgagagactgctggcacgccgtgcccagccagagacccaccttcaagcagctggtggaggacctggacagaatcctgaccctgaccaccaacgagtag

SEQ ID NO: 81654 - DNA, 2124 bp, synthetic construct
  misc_feature 1..2124: note = Description of Artificial Sequence: Synthetic coding sequence
  source 1..2124: mol_type = other DNA
atggtgagctggggcagattcatctgcctggtggtggtgaccatggccaccctgagcctggccagacccagcttcagcctggtggaggacaccaccctggagcccgagggcgccccctactggaccaacaccgagaagatggagaagagactgcacgccgtgcccgccgccaacaccgtgaagttcagatgccccgccggcggcaaccccatgcccaccatgagatggctgaagaacggcaaggagttcaagcaggagcacagaatcggcggctacaaggtgagaaaccagcactggagcctgatcatggagagcgtggtgcccagcgacaagggcaactacacctgcgtggtggagaacgagtacggcagcatcaaccacacctaccacctggacgtggtggagagaagcccccacagacccatcctgcaggccggcctgcccgccaacgccagcaccgtggtgggcggcgacgtggagttcgtgtgcaaggtgtacagcgacgcccagccccacatccagtggatcaagcacgtggagaagaacggcagcaagtacggccccgacggcctgccctacctgaaggtgctgaagcacagcggcatcaacagcagcaacgccgaggtgctggccctgttcaacgtgaccgaggccgacgccggcgagtacatctgcaaggtgagcaactacatcggccaggccaaccagagcgcctggctgaccgtgctgcccaagcagcaggcccccggcagagagaaggagatcaccgccagccccgactacctggagatcgccatctactgcatcggcgtgttcctgatcgcctgcatggtggtgaccgtgatcctgtgcagaatgaagaacaccaccaagaagcccgacttcagcagccagcccgccgtgcacaagctgaccaagagaatccccctgagaagacaggtgaccgtgagcgccgagagcagcagcagcatgaacagcaacacccccctggtgagaatcaccaccagactgagcagcaccgccgacacccccatgctggccggcgtgagcgagtacgagctgcccgaggaccccaagtgggagttccccagagacaagctgaccctgggcaagcccctgggcgagggctgcttcggccaggtggtgatggccgaggccgtgggcatcgacaaggacaagcccaaggaggccgtgaccgtggccgtgaagatgctgaaggacgacgccaccgagaaggacctgagcgacctggtgagcgagatggagatgatgaagatgatcggcaagcacaagaacatcatcaacctgctgggcgcctgcacccaggacggccccctgtacgtgatcgtggagtacgccagcaagggcaacctgagagagtacctgagagccagaagaccccccggcatggagtacagctacgacatcaacagagtgcccgaggagcagatgaccttcaaggacctggtgagctgcacctaccagctggccagaggcatggagtacctggccagccagaagtgcatccacagagacctggccgccagaaacgtgctggtgaccgagaacaacgtgatgaagatcgccgacttcggcctggccagagacatcaacaacatcgactactacaagaagaccaccaacggcagactgcccgtgaagtggatggcccccgaggccctgttcgacagagtgtacacccaccagagcgacgtgtggagcttcggcgtgctgatgtgggagatcttcaccctgggcggcagcccctaccccggcatccccgtggaggagctgttcaagctgctgaaggagggccacagaatggacaagcccgccaactgcaccaacgagctgtacatgatgatgagagactgctggcacgccgtgcccagccagagacccaccttcaagcagctggtggaggacctggacagaatcctgaccctgaccaccaacgaggagtacctggacctgagccagcccctggagcagtacagccccagctaccccgacaccagaagcagctgcagcagcggcgacgacagcgtgttcagccccgaccccatgccctacgagccctgcctgccccagtacccccacatcaacggcagcgtgaagacctag

SEQ ID NO: 81655 - DNA, 2118 bp, synthetic construct
  misc_feature 1..2118: note = Description of Artificial Sequence: Synthetic coding sequence
  source 1..2118: mol_type = other DNA
atggtgagctggggcagattcatctgcctggtggtggtgaccatggccaccctgagcctggccagacccagcttcagcctggtggaggacaccaccctggagcccgaggagccccccaccaagtaccagatcagccagcccgaggtgtacgtggccgcccccggcgagagcctggaggtgagatgcctgctgaaggacgccgccgtgatcagctggaccaaggacggcgtgcacctgggccccaacaacagaaccgtgctgatcggcgagtacctgcagatcaagggcgccacccccagagacagcggcctgtacgcctgcaccgccagcagaaccgtggacagcgagacctggtacttcatggtgaacgtgaccgacgccatcagcagcggcgacgacgaggacgacaccgacggcgccgaggacttcgtgagcgagaacagcaacaacaagagagccccctactggaccaacaccgagaagatggagaagagactgcacgccgtgcccgccgccaacaccgtgaagttcagatgccccgccggcggcaaccccatgcccaccatgagatggctgaagaacggcaaggagttcaagcaggagcacagaatcggcggctacaaggtgagaaaccagcactggagcctgatcatggagagcgtggtgcccagcgacaagggcaactacacctgcgtggtggagaacgagtacggcagcatcaaccacacctaccacctggacgtggtggagagaagcccccacagacccatcctgcaggccggcctgcccgccaacgccagcaccgtggtgggcggcgacgtggagttcgtgtgcaaggtgtacagcgacgcccagccccacatccagtggatcaagcacgtggagaagaacggcagcaagtacggccccgacggcctgccctacctgaaggtgctgaaggtgagcgccgagagcagcagcagcatgaacagcaacacccccctggtgagaatcaccaccagactgagcagcaccgccgacacccccatgctggccggcgtgagcgagtacgagctgcccgaggaccccaagtgggagttccccagagacaagctgaccctgggcaagcccctgggcgagggctgcttcggccaggtggtgatggccgaggccgtgggcatcgacaaggacaagcccaaggaggccgtgaccgtggccgtgaagatgctgaaggacgacgccaccgagaaggacctgagcgacctggtgagcgagatggagatgatgaagatgatcggcaagcacaagaacatcatcaacctgctgggcgcctgcacccaggacggccccctgtacgtgatcgtggagtacgccagcaagggcaacctgagagagtacctgagagccagaagaccccccggcatggagtacagctacgacatcaacagagtgcccgaggagcagatgaccttcaaggacctggtgagctgcacctaccagctggccagaggcatggagtacctggccagccagaagtgcatccacagagacctggccgccagaaacgtgctggtgaccgagaacaacgtgatgaagatcgccgacttcggcctggccagagacatcaacaacatcgactactacaagaagaccaccaacggcagactgcccgtgaagtggatggcccccgaggccctgttcgacagagtgtacacccaccagagcgacgtgtggagcttcggcgtgctgatgtgggagatcttcaccctgggcggcagcccctaccccggcatccccgtggaggagctgttcaagctgctgaaggagggccacagaatggacaagcccgccaactgcaccaacgagctgtacatgatgatgagagactgctggcacgccgtgcccagccagagacccaccttcaagcagctggtggaggacctggacagaatcctgaccctgaccaccaacgaggagtacctggacctgagccagcccctggagcagtacagccccagctaccccgacaccagaagcagctgcagcagcggcgacgacagcgtgttcagccccgaccccatgccctacgagccctgcctgccccagtacccccacatcaacggcagcgtgaagacctag

SEQ ID NO: 81656 - DNA, 2130 bp, synthetic construct
  misc_feature 1..2130: note = Description of Artificial Sequence: Synthetic coding sequence
  source 1..2130: mol_type = other DNA
atggtgagctggggcagattcatctgcctggtggtggtgaccatggccaccctgagcctggccagacccagcttcagcctggtggaggacaccaccctggagcccgaggagccccccaccaagtaccagatcagccagcccgaggtgtacgtggccgcccccggcgagagcctggaggtgagatgcctgctgaaggacgccgccgtgatcagctggaccaaggacggcgtgcacctgggccccaacaacagaaccgtgctgatcggcgagtacctgcagatcaagggcgccacccccagagacagcggcctgtacgcctgcaccgccagcagaaccgtggacagcgagacctggtacttcatggtgaacgtgaccgacgccatcagcagcggcgacgacgaggacgacaccgacggcgccgaggacttcgtgagcgagaacagcaacaacaagagagccccctactggaccaacaccgagaagatggagaagagactgcacgccgtgcccgccgccaacaccgtgaagttcagatgccccgccggcggcaaccccatgcccaccatgagatggctgaagaacggcaaggagttcaagcaggagcacagaatcggcggctacaaggtgagaaaccagcactggagcctgatcatggagagcgtggtgcccagcgacaagggcaactacacctgcgtggtggagaacgagtacggcagcatcaaccacacctaccacctggacgtggtggcccccggcagagagaaggagatcaccgccagccccgactacctggagatcgccatctactgcatcggcgtgttcctgatcgcctgcatggtggtgaccgtgatcctgtgcagaatgaagaacaccaccaagaagcccgacttcagcagccagcccgccgtgcacaagctgaccaagagaatccccctgagaagacaggtgaccgtgagcgccgagagcagcagcagcatgaacagcaacacccccctggtgagaatcaccaccagactgagcagcaccgccgacacccccatgctggccggcgtgagcgagtacgagctgcccgaggaccccaagtgggagttccccagagacaagctgaccctgggcaagcccctgggcgagggctgcttcggccaggtggtgatggccgaggccgtgggcatcgacaaggacaagcccaaggaggccgtgaccgtggccgtgaagatgctgaaggacgacgccaccgagaaggacctgagcgacctggtgagcgagatggagatgatgaagatgatcggcaagcacaagaacatcatcaacctgctgggcgcctgcacccaggacggccccctgtacgtgatcgtggagtacgccagcaagggcaacctgagagagtacctgagagccagaagaccccccggcatggagtacagctacgacatcaacagagtgcccgaggagcagatgaccttcaaggacctggtgagctgcacctaccagctggccagaggcatggagtacctggccagccagaagtgcatccacagagacctggccgccagaaacgtgctggtgaccgagaacaacgtgatgaagatcgccgacttcggcctggccagagacatcaacaacatcgactactacaagaagaccaccaacggcagactgcccgtgaagtggatggcccccgaggccctgttcgacagagtgtacacccaccagagcgacgtgtggagcttcggcgtgctgatgtgggagatcttcaccctgggcggcagcccctaccccggcatccccgtggaggagctgttcaagctgctgaaggagggccacagaatggacaagcccgccaactgcaccaacgagctgtacatgatgatgagagactgctggcacgccgtgcccagccagagacccaccttcaagcagctggtggaggacctggacagaatcctgaccctgaccaccaacgaggagtacctggacctgagccagcccctggagcagtacagccccagctaccccgacaccagaagcagctgcagcagcggcgacgacagcgtgttcagccccgaccccatgccctacgagccctgcctgccccagtacccccacatcaacggcagcgtgaagacctag

SEQ ID NO: 81657 - DNA, 2469 bp, synthetic construct
  misc_feature 1..2469: note = Description of Artificial Sequence: Synthetic coding sequence
  source 1..2469: mol_type = other DNA
atggtgagctggggcagattcatctgcctggtggtggtgaccatggccaccctgagcctggccagacccagcttcagcctggtggaggacaccaccctggagcccgaggagccccccaccaagtaccagatcagccagcccgaggtgtacgtggccgcccccggcgagagcctggaggtgagatgcctgctgaaggacgccgccgtgatcagctggaccaaggacggcgtgcacctgggccccaacaacagaaccgtgctgatcggcgagtacctgcagatcaagggcgccacccccagagacagcggcctgtacgcctgcaccgccagcagaaccgtggacagcgagacctggtacttcatggtgaacgtgaccgacgccatcagcagcggcgacgacgaggacgacaccgacggcgccgaggacttcgtgagcgagaacagcaacaacaagagagccccctactggaccaacaccgagaagatggagaagagactgcacgccgtgcccgccgccaacaccgtgaagttcagatgccccgccggcggcaaccccatgcccaccatgagatggctgaagaacggcaaggagttcaagcaggagcacagaatcggcggctacaaggtgagaaaccagcactggagcctgatcatggagagcgtggtgcccagcgacaagggcaactacacctgcgtggtggagaacgagtacggcagcatcaaccacacctaccacctggacgtggtggagagaagcccccacagacccatcctgcaggccggcctgcccgccaacgccagcaccgtggtgggcggcgacgtggagttcgtgtgcaaggtgtacagcgacgcccagccccacatccagtggatcaagcacgtggagaagaacggcagcaagtacggccccgacggcctgccctacctgaaggtgctgaaggtgaccaaggccgccggcgtgaacaccaccgacaaggagatcgaggtgctgtacatcagaaacgtgaccttcgaggacgccggcgagtacacctgcctggccggcaacagcatcggcatcagcttccacagcgcctggctgaccgtgctgcccgcccccggcagagagaaggagatcaccgccagccccgactacctggagatcgccatctactgcatcggcgtgttcctgatcgcctgcatggtggtgaccgtgatcctgtgcagaatgaagaacaccaccaagaagcccgacttcagcagccagcccgccgtgcacaagctgaccaagagaatccccctgagaagacaggtgagcgccgagagcagcagcagcatgaacagcaacacccccctggtgagaatcaccaccagactgagcagcaccgccgacacccccatgctggccggcgtgagcgagtacgagctgcccgaggaccccaagtgggagttccccagagacaagctgaccctgggcaagcccctgggcgagggctgcttcggccaggtggtgatggccgaggccgtgggcatcgacaaggacaagcccaaggaggccgtgaccgtggccgtgaagatgctgaaggacgacgccaccgagaaggacctgagcgacctggtgagcgagatggagatgatgaagatgatcggcaagcacaagaacatcatcaacctgctgggcgcctgcacccaggacggccccctgtacgtgatcgtggagtacgccagcaagggcaacctgagagagtacctgagagccagaagaccccccggcatggagtacagctacgacatcaacagagtgcccgaggagcagatgaccttcaaggacctggtgagctgcacctaccagctggccagaggcatggagtacctggccagccagaagtgcatccacagagacctggccgccagaaacgtgctggtgaccgagaacaacgtgatgaagatcgccgacttcggcctggccagagacatcaacaacatcgactactacaagaagaccaccaacggcagactgcccgtgaagtggatggcccccgaggccctgttcgacagagtgtacacccaccagagcgacgtgtggagcttcggcgtgctgatgtgggagatcttcaccctgggcggcagcccctaccccggcatccccgtggaggagctgttcaagctgctgaaggagggccacagaatggacaagcccgccaactgcaccaacgagctgtacatgatgatgagagactgctggcacgccgtgcccagccagagacccaccttcaagcagctggtggaggacctggacagaatcctgaccctgaccaccaacgaggagtacctggacctgagccagcccctggagcagtacagccccagctaccccgacaccagaagcagctgcagcagcggcgacgacagcgtgttcagccccgaccccatgccctacgagccctgcctgccccagtacccccacatcaacggcagcgtgaagacctag

SEQ ID NO: 81658 - DNA, 2469 bp, synthetic construct
  misc_feature 1..2469: note = Description of Artificial Sequence: Synthetic coding sequence
  source 1..2469: mol_type = other DNA
atggtgagctggggcagattcatctgcctggtggtggtgaccatggccaccctgagcctggccagacccagcttcagcctggtggaggacaccaccctggagcccgaggagccccccaccaagtaccagatcagccagcccgaggtgtacgtggccgcccccggcgagagcctggaggtgagatgcctgctgaaggacgccgccgtgatcagctggaccaaggacggcgtgcacctgggccccaacaacagaaccgtgctgatcggcgagtacctgcagatcaagggcgccacccccagagacagcggcctgtacgcctgcaccgccagcagaaccgtggacagcgagacctggtacttcatggtgaacgtgaccgacgccatcagcagcggcgacgacgaggacgacaccgacggcgccgaggacttcgtgagcgagaacagcaacaacaagagagccccctactggaccaacaccgagaagatggagaagagactgcacgccgtgcccgccgccaacaccgtgaagttcagatgccccgccggcggcaaccccatgcccaccatgagatggctgaagaacggcaaggagttcaagcaggagcacagaatcggcggctacaaggtgagaaaccagcactggagcctgatcatggagagcgtggtgcccagcgacaagggcaactacacctgcgtggtggagaacgagtacggcagcatcaaccacacctaccacctggacgtggtggagagaagcccccacagacccatcctgcaggccggcctgcccgccaacgccagcaccgtggtgggcggcgacgtggagttcgtgtgcaaggtgtacagcgacgcccagccccacatccagtggatcaagcacgtggagaagaacggcagcaagtacggccccgacggcctgccctacctgaaggtgctgaagcacagcggcatcaacagcagcaacgccgaggtgctggccctgttcaacgtgaccgaggccgacgccggcgagtacatctgcaaggtgagcaactacatcggccaggccaaccagagcgcctggctgaccgtgctgcccaagcagcaggcccccggcagagagaaggagatcaccgccagccccgactacctggagatcgccatctactgcatcggcgtgttcctgatcgcctgcatggtggtgaccgtgatcctgtgcagaatgaagaacaccaccaagaagcccgacttcagcagccagcccgccgtgcacaagctgaccaagagaatccccctgagaagacaggtgaccgtgagcgccgagagcagcagcagcatgaacagcaacacccccctggtgagaatcaccaccagactgagcagcaccgccgacacccccatgctggccggcgtgagcgagtacgagctgcccgaggaccccaagtgggagttccccagagacaagctgaccctgggcaagcccctgggcgagggctgcttcggccaggtggtgatggccgaggccgtgggcatcgacaaggacaagcccaaggaggccgtgaccgtggccgtgaagatgctgaaggacgacgccaccgagaaggacctgagcgacctggtgagcgagatggagatgatgaagatgatcggcaagcacaagaacatcatcaacctgctgggcgcctgcacccaggacggccccctgtacgtgatcgtggagtacgccagcaagggcaacctgagagagtacctgagagccagaagaccccccggcatggagtacagctacgacatcaacagagtgcccgaggagcagatgaccttcaaggacctggtgagctgcacctaccagctggccagaggcatggagtacctggccagccagaagtgcatccacagagacctggccgccagaaacgtgctggtgaccgagaacaacgtgatgaagatcgccgacttcggcctggccagagacatcaacaacatcgactactacaagaagaccaccaacggcagactgcccgtgaagtggatggcccccgaggccctgttcgacagagtgtacacccaccagagcgacgtgtggagcttcggcgtgctgatgtgggagatcttcaccctgggcggcagcccctaccccggcatccccgtggaggagctgttcaagctgctgaaggagggccacagaatggacaagcccgccaactgcaccaacgagctgtacatgatgatgagagactgctggcacgccgtgcccagccagagacccaccttcaagcagctggtggaggacctggacagaatcctgaccctgaccaccaacgaggagtacctggacctgagccagcccctggagcagtacagccccagctaccccgacaccagaagcagctgcagcagcggcgacgacagcgtgttcagccccgaccccatgccctacgagccctgcctgccccagtacccccacatcaacggcagcgtgaagacctag

SEQ ID NO: 81659 - DNA, 1515 bp, synthetic construct
  misc_feature 1..1515: note = Description of Artificial Sequence: Synthetic coding sequence
  source 1..1515: mol_type = other DNA
atgacccccagccccctgctgctgctgctgctgccccccctgctgctgggcgccttcccccccgccgccgccgccagaggcccccccaagatggccgacaaggtggtgcccagacaggtggccagactgggcagaaccgtgagactgcagtgccccgtggagggcgaccccccccccctgaccatgtggaccaaggacggcagaaccatccacagcggctggagcagattcagagtgctgccccagggcctgaaggtgaagcaggtggagagagaggacgccggcgtgtacgtgtgcaaggccaccaacggcttcggcagcctgagcgtgaactacaccctggtggtgctggacgacatcagccccggcaaggagagcctgggccccgacagcagcagcggcggccaggaggaccccgccagccagcagtgggccagacccagattcacccagcccagcaagatgagaagaagagtgatcgccagacccgtgggcagcagcgtgagactgaagtgcgtggccagcggccaccccagacccgacatcacctggatgaaggacgaccaggccctgaccagacccgaggccgccgagcccagaaagaagaagtggaccctgagcctgaagaacctgagacccgaggacagcggcaagtacacctgcagagtgagcaacagagccggcgccatcaacgccacctacaaggtggacgtgatccagagaaccagaagcaagcccgtgctgaccggcacccaccccgtgaacaccaccgtggacttcggcggcaccaccagcttccagtgcaaggtgagaagcgacgtgaagcccgtgatccagtggctgaagagagtggagtacggcgccgagggcagacacaacagcaccatcgacgtgggcggccagaagttcgtggtgctgcccaccggcgacgtgtggagcagacccgacggcagctacctgaacaagctgctgatcaccagagccagacaggacgacgccggcatgtacatctgcctgggcgccaacaccatgggctacagcttcagaagcgccttcctgaccgtgctgcccgaccccaagccccccggcccccccgtggccagcagcagcagcgccaccagcctgccctggcccgtggtgatcggcatccccgccggcgccgtgttcatcctgggcaccctgctgctgtggctgtgccaggcccagaagaagccctgcacccccgcccccgccccccccctgcccggccacagaccccccggcaccgccagagacagaagcggcgacaaggacctgcccagcctggccgccctgagcgccggccccggcgtgggcctgtgcgaggagcacggcagccccgccgccccccagcacctgctgggccccggccccgtggccggccccaagctgtaccccaagctgtacaccgacatccacacccacacccacacccacagccacacccacagccacgtggagggcaaggtgcaccagcacatccactaccagtgctag

SEQ ID NO: 81660 - DNA, 1515 bp, synthetic construct; identical to SEQ ID NO: 81659
  misc_feature 1..1515: note = Description of Artificial Sequence: Synthetic coding sequence
  source 1..1515: mol_type = other DNA

SEQ ID NO: 81661 - DNA, 1515 bp, synthetic construct; identical to SEQ ID NO: 81659
  misc_feature 1..1515: note = Description of Artificial Sequence: Synthetic coding sequence
  source 1..1515: mol_type = other DNA

SEQ ID NO: 81662 - DNA, 459 bp, synthetic construct
  misc_feature 1..459: note = Description of Artificial Sequence: Synthetic coding sequence
  source 1..459: mol_type = other DNA
atgacccccagccccctgctgctgctgctgctgccccccctgctgctgggcgccttcccccccgccgccgccgccagaggcccccccaagatggccgacaaggtggtgcccagacaggtggccagactgggcagaaccgtgagactgcagtgccccgtggagggcgaccccccccccctgaccatgtggaccaaggacggcagaaccatccacagcggctggagcagattcagagtgctgccccagggcctgaaggtgaagcaggtggagagagaggacgccggcgtgtacgtgtgcaaggccaccaacggcttcggcagcctgagcgtgaactacaccctggtggtgctggacgacatcagccccggcaaggagagcctgggccccgacagcagcagcggcggccaggaggaccccgccagccagcagtgggccagacccagattcacccagccctag

SEQ ID NO: 81663 - DNA, 1515 bp, synthetic construct; identical to SEQ ID NO: 81659
  misc_feature 1..1515: note = Description of Artificial Sequence: Synthetic coding sequence
  source 1..1515: mol_type = other DNA

SEQ ID NO: 81664 - DNA, 243 bp, synthetic construct
  misc_feature 1..243: note = Description of Artificial Sequence: Synthetic coding sequence
  source 1..243: mol_type = other DNA
atgacccccagccccctgctgctgctgctgctgccccccctgctgctgggcgccttcccccccgccgccgccgccagaggcccccccaagatggccgacaaggtggtgcccagacaggtggccagactgggcagaaccgtgagactgcagtgccccgtggagggcgaccccccccccctgaccatgtggaccaaggacggcagaaccatccacagcggctggagcagattcagagtgctgtag

SEQ ID NO: 81665 - DNA, 1326 bp, synthetic construct
  misc_feature 1..1326: note = Description of Artificial Sequence: Synthetic coding sequence
  source 1..1326: mol_type = other DNA
atggccgacaaggtggtgcccagacaggtggccagactgggcagaaccgtgagactgcagtgccccgtggagggcgaccccccccccctgaccatgtggaccaaggacggcagaaccatccacagcggctggagcagattcagagtgctgccccagggcctgaaggtgaagcaggtggagagagaggacgccggcgtgtacgtgtgcaaggccaccaacggcttcggcagcctgagcgtgaactacaccctggtggtgctggacgacatcagccccggcaaggagagcctgggccccgacagcagcagcggcggccaggaggaccccgccagccagcagtgggccagacccagattcacccagcccagcaagatgagaagaagagtgatcgccagacccgtgggcagcagcgtgagactgaagtgcgtggccagcggccaccccagacccgacatcacctggatgaaggacgaccaggccctgaccagacccgaggccgccgagcccagaaagaagaagtggaccctgagcctgaagaacctgagacccgaggacagcggcaagtacacctgcagagtgagcaacagagccggcgccatcaacgccacctacaaggtggacgtgatccagagaaccagaagcaagcccgtgctgaccggcacccaccccgtgaacaccaccgtggacttcggcggcaccaccagcttccagtgcaaggtgagaagcgacgtgaagcccgtgatccagtggctgaagagagtggagtacggcgccgagggcagacacaacagcaccatcgacgtgggcggccagaagttcgtggtgctgcccaccggcgacgtgtggagcagacccgacggcagctacctgaacaagctgctgatcaccagagccagacaggacgacgccggcatgtacatctgcctgggcgccaacaccatgggctacagcttcagaagcgccttcctgaccgtgctgcccgaccccaagccccccggcccccccgtggccagcagcagcagcgccaccagcctgccctggcccgtggtgatcggcatccccgccggcgccgtgttcatcctgggcaccctgctgctgtggctgtgccaggcccagaagaagccctgcacccccgcccccgccccccccctgcccggccacagaccccccggcaccgccagagacagaagcggcgacaaggacctgcccagcctggccgccctgagcgccggccccggcgtgggcctgtgcgaggagcacggcagccccgccgccccccagcaccccaccgtggtggtggcccccgacctgtgcaacttcatgtag

SEQ ID NO: 81666 - DNA, 1131 bp, synthetic construct
  misc_feature 1..1131: note = Description of Artificial Sequence: Synthetic coding sequence
  source 1..1131: mol_type = other DNA
atgcagtggaccagcctgctgctgctggccggcctgttcagcctgagccaggcccagtacgaggacgacccccactggtggttccactacctgagaagccagcagagcacctactacgacccctacgacccctacccctacgagacctacgagccctacccctacggcgtggacgagggccccgcctacacctacggcagccccagcccccccgaccccagagactgcccccaggagtgcgactgcccccccaacttccccaccgccatgtactgcgacaacagaaacctgaagtacctgcccttcgtgcccagcagaatgaagtacgtgtacttccagaacaaccagatcaccagcatccaggagggcgtgttcgacaacgccaccggcctgctgtggatcgccctgcacggcaaccagatcaccagcgacaaggtgggcagaaaggtgttcagcaagctgagacacctggagagactgtacctggaccacaacaacctgaccagaatgcccggccccctgcccagaagcctgagagagctgcacctggaccacaaccagatcagcagagtgcccaacaacgccctggagggcctggagaacctgaccgccctgtacctgcagcacaacgagatccaggaggtgggcagcagcatgagaggcctgagaagcctgatcctgctggacctgagctacaaccacctgagaaaggtgcccgacggcctgcccagcgccctggagcagctgtacatggagcacaacaacgtgtacaccgtgcccgacagctacttcagaggcgcccccaagctgctgtacgtgagactgagccacaacagcctgaccaacaacggcctggccagcaacaccttcaacagcagcagcctgctggagctggacctgagctacaaccagctgcagaagatcccccccgtgaacaccaacctggagaacctgtacctgcagggcaacagaatcaacgagttcagcatcagcagcttctgcaccgtggtggacgtggtgaacttcagcaagctgcaggtgctgagactggacggcaacgagatcaagagaagcgccatgcccgccgacgcccccctgtgcctgagactggccagcctgatcgagatctag

SEQ ID NO: 81667 - DNA, 1092 bp, synthetic construct
  misc_feature 1..1092: note = Description of Artificial Sequence: Synthetic coding sequence
  source 1..1092: mol_type = other DNA
atgcagtggaccagcctgctgctgctggccggcctgttcagcctgagccaggcccagtacgaggacgacccccactggtggttccactacctgagaagccagcagagcacctactacgacccctacgacccctacccctacgagacctacgagccctacccctacggcgtggacgagggccccgcctacacctacggcagccccagcccccccgaccccagagactgcccccaggagtgcgactgcccccccaacttcccccccttcgtgcccagcagaatgaagtacgtgtacttccagaacaaccagatcaccagcatccaggagggcgtgttcgacaacgccaccggcctgctgtggatcgccctgcacggcaaccagatcaccagcgacaaggtgggcagaaaggtgttcagcaagctgagacacctggagagactgtacctggaccacaacaacctgaccagaatgcccggccccctgcccagaagcctgagagagctgcacctggaccacaaccagatcagcagagtgcccaacaacgccctggagggcctggagaacctgaccgccctgtacctgcagcacaacgagatccaggaggtgggcagcagcatgagaggcctgagaagcctgatcctgctggacctgagctacaaccacctgagaaaggtgcccgacggcctgcccagcgccctggagcagctgtacatggagcacaacaacgtgtacaccgtgcccgacagctacttcagaggcgcccccaagctgctgtacgtgagactgagccacaacagcctgaccaacaacggcctggccagcaacaccttcaacagcagcagcctgctggagctggacctgagctacaaccagctgcagaagatcccccccgtgaacaccaacctggagaacctgtacctgcagggcaacagaatcaacgagttcagcatcagcagcttctgcaccgtggtggacgtggtgaacttcagcaagctgcaggtgctgagactggacggcaacgagatcaagagaagcgccatgcccgccgacgcccccctgtgcctgagactggccagcctgatcgagatctag

SEQ ID NO: 81668 - DNA, 594 bp, synthetic construct
  misc_feature 1..594: note = Description of Artificial Sequence: Synthetic coding sequence
  source 1..594: mol_type = other DNA
atgaagatgaccctgatcggcggcagcaccaccagcgccgccagcagcccccccaccaccatccccatgaccctgaccagaatgagacccaccagcctgacccccatgggctggatgaagggccagcccacccccaccgccctgcaccccctgcagatccccgccaccgcccccagaagcgccaccgcccaccccaccagcaccgccatgtactgcgacaacagaaacctgaagtacctgcccttcgtgcccagcagaatgaagtacgtgtacttccagaacaaccagatcaccagcatccaggagggcgtgttcgacaacgccaccggcctgctgtggatcgccctgcacggcaaccagatcaccagcgacaaggtgggcagaaaggtgttcagcaagctgagacacctggagagactgtacctggaccacaacaacctgaccagaatgcccggccccctgcccagaagcctgagagagctgcacctggaccacaaccagatcagcagagtgcccaacaacgccctggagggcagaaccagcagaccctgcaccagcaacaccatgagaagcagaaagtgggccgtgccctag

SEQ ID NO: 81669 - DNA, 2025 bp, synthetic construct
  misc_feature 1..2025: note = Description of Artificial Sequence: Synthetic coding sequence
  source 1..2025: mol_type = other DNA
atggtggtggcccaccccaccgccaccgccaccaccacccccaccgccaccgtgaccgccaccgtggtgatgaccaccgccaccatggacctgagagactggctgttcctgtgctacggcctgatcgccttcctgaccgaggtgatcgacagcaccacctgccccagcgtgtgcagatgcgacaacggcttcatctactgcaacgacagaggcctgaccagcatccccgccgacatccccgacgacgccaccaccctgtacctgcagaacaaccagatcaacaacgccggcatcccccaggacctgaagaccaaggtgaacgtgcaggtgatctacctgtacgagaacgacctggacgagttccccatcaacctgcccagaagcctgagagagctgcacctgcaggacaacaacgtgagaaccatcgccagagacagcctggccagaatccccctgctggagaagctgcacctggacgacaacagcgtgagcaccgtgagcatcgaggaggacgccttcgccgacagcaagcagctgaagctgctgttcctgagcagaaaccacctgagcagcatccccagcggcctgccccacaccctggaggagctgagactggacgacaacagaatcagcaccatccccctgcacgccttcaagggcctgaacagcctgagaagactggtgctggacggcaacctgctggccaaccagagaatcgccgacgacaccttcagcagactgcagaacctgaccgagctgagcctggtgagaaacagcctggccgccccccccctgaacctgcccagcgcccacctgcagaagctgtacctgcaggacaacgccatcagccacatcccctacaacaccctggccaagatgagagagctggagagactggacctgagcaacaacaacctgaccaccctgcccagaggcctgttcgacgacctgggcaacctggcccagctgctgctgagaaacaacccctggttctgcggctgcaacctgatgtggctgagagactgggtgaaggccagagccgccgtggtgaacgtgagaggcctgatgtgccagggccccgagaaggtgagaggcatggccatcaaggacatcaccagcgagatggacgagtgcttcgagaccggcccccagggcggcgtggccaacgccgccgccaagaccaccgccagcaaccacgccagcgccaccaccccccagggcagcctgttcaccctgaaggccaagagacccggcctgagactgcccgacagcaacatcgactaccccatggccaccggcgacggcgccaagaccctggccatccacgtgaaggccctgaccgccgacagcatcagaatcacctggaaggccaccctgcccgccagcagcttcagactgagctggctgagactgggccacagccccgccgtgggcagcatcaccgagaccctggtgcagggcgacaagaccgagtacctgctgaccgccctggagcccaagagcacctacatcatctgcatggtgaccatggagaccagcaacgcctacgtggccgacgagacccccgtgtgcgccaaggccgagaccgccgacagctacggccccaccaccaccctgaaccaggagcagaacgccggccccatggccagcctgcccctggccggcatcatcggcggcgccgtggccctggtgttcctgttcctggtgctgggcgccatctgctggtacgtgcaccaggccggcgagctgctgaccagagagagagcctacaacagaggcagcagaaagaaggacgactacatggagagcggcaccaagaaggacaacagcatcctggagatcagaggccccggcctgcagatgctgcccatcaacccctacagagccaaggaggagtacgtggtgcacaccatcttccccagcaacggcagcagcctgtgcaaggccacccacaccatcggctacggcaccaccagaggctacagagacggcggcatccccgacatcgactacagctacacctag

SEQ ID NO: 81670 - DNA, 1983 bp, synthetic construct
  misc_feature 1..1983: note = Description of Artificial Sequence: Synthetic coding sequence
  source 1..1983: mol_type = other DNA
atgggcctgcagaccaccaagtggcccagccacggcgccttcttcctgaagagctggctgatcatcagcctgggcctgtacagccaggtgagcaagctgctggcctgccccagcgtgtgcagatgcgacagaaacttcgtgtactgcaacgagagaagcctgaccagcgtgcccctgggcatccccgagggcgtgaccgtgctgtacctgcacaacaaccagatcaacaacgccggcttccccgccgagctgcacaacgtgcagagcgtgcacaccgtgtacctgtacggcaaccagctggacgagttccccatgaacctgcccaagaacgtgagagtgctgcacctgcaggagaacaacatccagaccatcagcagagccgccctggcccagctgctgaagctggaggagctgcacctggacgacaacagcatcagcaccgtgggcgtggaggacggcgccttcagagaggccatcagcctgaagctgctgttcctgagcaagaaccacctgagcagcgtgcccgtgggcctgcccgtggacctgcaggagctgagagtggacgagaacagaatcgccgtgatcagcgacatggccttccagaacctgaccagcctggagagactgatcgtggacggcaacctgctgaccaacaagggcatcgccgagggcaccttcagccacctgaccaagctgaaggagttcagcatcgtgagaaacagcctgagccaccccccccccgacctgcccggcacccacctgatcagactgtacctgcaggacaaccagatcaaccacatccccctgaccgccttcagcaacctgagaaagctggagagactggacatcagcaacaaccagctgagaatgctgacccagggcgtgttcgacaacctgagcaacctgaagcagctgaccgccagaaacaacccctggttctgcgactgcagcatcaagtgggtgaccgagtggctgaagtacatccccagcagcctgaacgtgagaggcttcatgtgccagggccccgagcaggtgagaggcatggccgtgagagagctgaacatgaacctgctgagctgccccaccaccacccccggcctgcccctgttcacccccgcccccagcaccgccagccccaccacccagccccccaccctgagcatccccaaccccagcagaagctacaccccccccacccccaccaccagcaagctgcccaccatccccgactgggacggcagagagagagtgaccccccccatcagcgagagaatccagctgagcatccacttcgtgaacgacaccagcatccaggtgagctggctgagcctgttcaccgtgatggcctacaagctgacctgggtgaagatgggccacagcctggtgggcggcatcgtgcaggagagaatcgtgagcggcgagaagcagcacctgagcctggtgaacctggagcccagaagcacctacagaatctgcctggtgcccctggacgccttcaactacagagccgtggaggacaccatctgcagcgaggccaccacccacgccagctacctgaacaacggcagcaacaccgccagcagccacgagcagaccaccagccacagcatgggcagccccttcctgctggccggcctgatcggcggcgccgtgatcttcgtgctggtggtgctgctgagcgtgttctgctggcacatgcacaagaagggcagatacaccagccagaagtggaagtacaacagaggcagaagaaaggacgactactgcgaggccggcaccaagaaggacaacagcatcctggagatgaccgagaccagcttccagatcgtgagcctgaacaacgaccagctgctgaagggcgacttcagactgcagcccatctacacccccaacggcggcatcaactacaccgactgccacatccccaacaacatgagatactgcaacagcagcgtgcccgacctggagcactgccacacctag

SEQ ID NO: 81671 - DNA, 942 bp, synthetic construct
  misc_feature 1..942: note = Description of Artificial Sequence: Synthetic coding sequence
  source 1..942: mol_type = other DNA
atggccgtgagagagctgaacatgaacctgctgagctgccccaccaccacccccggcctgcccctgttcacccccgcccccagcaccgccagccccaccacccagccccccaccctgagcatccccaaccccagcagaagctacaccccccccacccccaccaccagcaagctgcccaccatccccgactgggacggcagagagagagtgaccccccccatcagcgagagaatccagctgagcatccacttcgtgaacgacaccagcatccaggtgagctggctgagcctgttcaccgtgatggcctacaagctgacctgggtgaagatgggccacagcctggtgggcggcatcgtgcaggagagaatcgtgagcggcgagaagcagcacctgagcctggtgaacctggagcccagaagcacctacagaatctgcctggtgcccctggacgccttcaactacagagccgtggaggacaccatctgcagcgaggccaccacccacgccagctacctgaacaacggcagcaacaccgccagcagccacgagcagaccaccagccacagcatgggcagccccttcctgctggccggcctgatcggcggcgccgtgatcttcgtgctggtggtgctgctgagcgtgttctgctggcacatgcacaagaagggcagatacaccagccagaagtggaagtacaacagaggcagaagaaaggacgactactgcgaggccggcaccaagaaggacaacagcatcctggagatgaccgagaccagcttccagatcgtgagcctgaacaacgaccagctgctgaagggcgacttcagactgcagcccatctacacccccaacggcggcatcaactacaccgactgccacatccccaacaacatgagatactgcaacagcagcgtgcccgacctggagcactgccacacctag

SEQ ID NO: 81672 - DNA, 1983 bp, synthetic construct; identical to SEQ ID NO: 81670
  misc_feature 1..1983: note = Description of Artificial Sequence: Synthetic coding sequence
  source 1..1983: mol_type = other DNA

SEQ ID NO: 81673 - DNA, 1950 bp, synthetic construct
  misc_feature 1..1950: note = Description of Artificial Sequence: Synthetic coding sequence
  source 1..1950: mol_type = other DNA
atgatcagcgccgcctggagcatcttcctgatcggcaccaagatcggcctgttcctgcaggtggcccccctgagcgtgatggccaagagctgccccagcgtgtgcagatgcgacgccggcttcatctactgcaacgacagattcctgaccagcatccccaccggcatccccgaggacgccaccaccctgtacctgcagaacaaccagatcaacaacgccggcatccccagcgacctgaagaacctgctgaaggtggagagaatctacctgtaccacaacagcctggacgagttccccaccaacctgcccaagtacgtgaaggagctgcacctgcaggagaacaacatcagaaccatcacctacgacagcctgagcaagatcccctacctggaggagctgcacctggacgacaacagcgtgagcgccgtgagcatcgaggagggcgccttcagagacagcaactacctgagactgctgttcctgagcagaaaccacctgagcaccatcccctggggcctgcccagaaccatcgaggagctgagactggacgacaacagaatcagcaccatcagcagccccagcctgcagggcctgaccagcctgaagagactggtgctggacggcaacctgctgaacaaccacggcctgggcgacaaggtgttcttcaacctggtgaacctgaccgagctgagcctggtgagaaacagcctgaccgccgcccccgtgaacctgcccggcaccaacctgagaaagctgtacctgcaggacaaccacatcaacagagtgccccccaacgccttcagctacctgagacagctgtacagactggacatgagcaacaacaacctgagcaacctgccccagggcatcttcgacgacctggacaacatcacccagctgatcctgagaaacaacccctggtactgcggctgcaagatgaagtgggtgagagactggctgcagagcctgcccgtgaaggtgaacgtgagaggcctgatgtgccaggcccccgagaaggtgagaggcatggccatcaaggacctgaacgccgagctgttcgactgcaaggacagcggcatcgtgagcaccatccagatcaccaccgccatccccaacaccgtgtaccccgcccagggccagtggcccgcccccgtgaccaagcagcccgacatcaagaaccccaagctgaccaaggaccaccagaccaccggcagccccagcagaaagaccatcaccatcaccgtgaagagcgtgaccagcgacaccatccacatcagctggaagctggccctgcccatgaccgccctgagactgagctggctgaagctgggccacagccccgccttcggcagcatcaccgagaccatcgtgaccggcgagagaagcgagtacctggtgaccgccctggagcccgacagcccctacaaggtgtgcatggtgcccatggagaccagcaacctgtacctgttcgacgagacccccgtgtgcatcgagaccgagaccgcccccctgagaatgtacaaccccaccaccaccctgaacagagagcaggagaaggagccctacaagaaccccaacctgcccctggccgccatcatcggcggcgccgtggccctggtgaccatcgccctgctggccctggtgtgctggtacgtgcacagaaacggcagcctgttcagcagaaactgcgcctacagcaagggcagaagaagaaaggacgactacgccgaggccggcaccaagaaggacaacagcatcctggagatcagagagaccagcttccagatgctgcccatcagcaacgagcccatcagcaaggaggagttcgtgatccacaccatcttcccccccaacggcatgaacctgtacaagaacaaccacagcgagagcagcagcaacagaagctacagagacagcggcatccccgacagcgaccacagccacagctag

SEQ ID NO: 81674 - DNA, 1950 bp, synthetic construct; identical to SEQ ID NO: 81673
  misc_feature 1..1950: note = Description of Artificial Sequence: Synthetic coding sequence
  source 1..1950: mol_type = other DNA

SEQ ID NO: 81675 - DNA, 1884 bp, synthetic construct
  misc_feature 1..1884: note = Description of Artificial Sequence: Synthetic coding sequence
  source 1..1884: mol_type = other DNA
atgatcagcgccgcctggagcatcttcctgatcggcaccaagatcggcctgttcctgcaggtggcccccctgagcgtgatggccaagagctgccccagcgtgtgcagatgcgacgccggcttcatctactgcaacgacagattcctgaccagcatccccaccggcatccccgaggacgccaccaccctgtacctgcagaacaaccagatcaacaacgccggcatccccagcgacctgaagaacctgctgaaggtggagagaatctacctgtaccacaacagcctggacgagttccccaccaacctgcccaagtacgtgaaggagctgcacctgcaggagaacaacatcagaaccatcacctacgacagcctgagcaagatcccctacctggaggagctgcacctggacgacaacagcgtgagcgccgtgagcatcgaggagggcgccttcagagacagcaactacctgagactgctgttcctgagcagaaaccacctgagcaccatcccctggggcctgcccagaaccatcgaggagctgagactggacgacaacagaatcagcaccatcagcagccccagcctgcagggcctgaccagcctgaagagactggtgctggacggcaacctgctgaacaaccacggcctgggcgacaaggtgttcttcaacctggtgaacctgaccgagctgagcctggtgagaaacagcctgaccgccgcccccgtgaacctgcccggcaccaacctgagaaagctgtacctgcaggacaaccacatcaacagagtgccccccaacgccttcagctacctgagacagctgtacagactggacatgagcaacaacaacctgagcaacctgccccagggcatcttcgacgacctggacaacatcacccagctgatcctgagaaacaacccctggtactgcggctgcaagatgaagtgggtgagagactggctgcagagcctgcccgtgaaggtgaacgtgagaggcctgatgtgccaggcccccgagaaggtgagaggcatggccatcaaggacctgaacgccgagctgttcgactgcaaggacagcggcatcgtgagcaccatccagatcaccaccgccatccccaacaccgtgtaccccgcccagggccagtggcccgcccccgtgaccaagcagcccgacatcaagaaccccaagctgaccaaggaccaccagaccaccggcagccccagcagaaagaccatcaccatcaccgtgaagagcgtgaccagcgacaccatccacatcagctggaagctggccctgcccatgaccgccctgagactgagctggctgaagctgggccacagccccgccttcggcagcatcaccgagaccatcgtgaccggcgagagaagcgagtacctggtgaccgccctggagcccgacagcccctacaaggtgtgcatggtgcccatggagaccagcaacctgtacctgttcgacgagacccccgtgtgcatcgagaccgagaccgcccccctgagaatgtacaaccccaccaccaccctgaacagagagcaggagaaggagccctacaagaaccccaacctgcccctggccgccatcatcggcggcgccgtggccctggtgaccatcgccctgctggccctggtgtgctggtacgtgcacagaaacggcagcctgttcagcagaaactgcgcctacagcaagggcagaagaagaaaggacgactacgccgaggccggcaccaagaaggacaacagcatcctggagatcagagagaccagcttccagatgctgcccatcagcaacgagcccatcagcaaggaggagttcgtgatccacaccatcttcccccccaacggcatgaacctgtacaagcagagccagtag

SEQ ID NO: 81676 - DNA, 402 bp, synthetic construct
  misc_feature 1..402: note = Description of Artificial Sequence: Synthetic coding sequence
  source 1..402: mol_type = other DNA
atgccccccagcaagccccacccccccgtggtgggcaaggtgacccaccacagcatcgagctgtactgggacctggagaagaaggccaagagacagggcccccaggagcagtggttcagattcagcatcgaggaggaggaccccaagatgcacacctacggcatcatctacaccggctacgccaccaagcacgtggtggagggcctggagcccagaaccctgtacagattcagactgaaggtgaccagccccagcggcgagtgcgagtacagccccctggtgagcgtgagcaccaccagcagcatctggctgggcggcgagcccatcagcagcgagcacctgcacagagccgtgagcgtgaacgacgaggacctgctggtgagaatcctgcagggcggctag

SEQ ID NO: 81677 - DNA, 849 bp, synthetic construct
  misc_feature 1..849: note = Description of Artificial Sequence: Synthetic coding sequence
  source 1..849: mol_type = other DNA
atgccccccagcaagccccacccccccgtggtgggcaaggtgacccaccacagcatcgagctgtactgggacctggagaagaaggccaagagacagggcccccaggagcagtggttcagattcagcatcgaggaggaggaccccaagatgcacacctacggcatcatctacaccggctacgccaccaagcacgtggtggagggcctggagcccagaaccctgtacagattcagactgaaggtgaccagccccagcggcgagtgcgagtacagccccctggtgagcgtgagcaccaccagcagcatctggctgggcggcgagcccatcagcagcgagcacctgcacagagccgtgagcgtgaacgacgaggacctgctggtgagaatcctgcagggcggcagagtgaaggtggacgtgcccaacaagttcggcttcaccgccctgatggtggccgcccagaagggctacaccagcctgatgctggcctgctacgccggccacctggacgtggtgaagtacctgagaagacacggcgccagctggcaggccagagacctgggcggctgcaccgccctgcactgggccgccgacggcggccactgcagcgtgatcgagtggatgatcaaggacggctgcgaggtggacgtggtggacaccggcagcggctggacccccctgatgagagtgagcgccgtgagcggcaaccagagagtggccagcctgctgatcgacgccggcgccaacgtgaacgtgaaggacagaaacggcaagacccccctgatgagcgtggtgagcctgctggaggagagaaagaagaagcagagacccaagaagagctgcgtgtgctag

SEQ ID NO: 81678 - DNA, 1116 bp, synthetic construct
  misc_feature 1..1116: note = Description of Artificial Sequence: Synthetic coding sequence
  source 1..1116: mol_type = other DNA
ctgcagaagcagaagatcatgccccccagcaagccccacccccccgtggtgggcaaggtgacccaccacagcatcgagctgtactgggacctggagaagaaggccaagagacagggcccccaggagcagtggttcagattcagcatcgaggaggaggaccccaagatgcacacctacggcatcatctacaccggctacgccaccaagcacgtggtggagggcctggagcccagaaccctgtacagattcagactgaaggtgaccagccccagcggcgagtgcgagtacagccccctggtgagcgtgagcaccaccagacccagcctgagcaagagcctggtgaagatcagaatggtgaccagcgtgctgcacggcccccccaccgagaacaccggcgagcccatcagcagcgagcacctgcacagagccgtgagcgtgaacgacgaggacctgctggtgagaatcctgcagggcggcagagtgaaggtggacgtgcccaacaagttcggcttcaccgccctgatggtggccgcccagaagggctacaccagactggtgaagatcctggtgagcaacggcaccgacgtgaacctgaagaacggcagcggcaaggacagcctgatgctggcctgctacgccggccacctggacgtggtgaagtacctgagaagacacggcgccagctggcaggccagagacctgggcggctgcaccgccctgcactgggccgccgacggcggccactgcagcgtgatcgagtggatgatcaaggacggctgcgaggtggacgtggtggacaccggcagcggctggacccccctgatgagagtgagcgccgtgagcggcaaccagagagtggccagcctgctgatcgacgccggcgccaacgtgaacgtgaaggacagaaacggcaagacccccctgatggtggccgtgctgaacaaccacgaggagctggtgcagctgctgctggacaagggcgccgacgccagcgtgaagaacgagttcggcaagggcgtgctggagatggccagagtgttcgacagacagagcgtggtgagcctgctggaggagagaaagaagaagcagagacccaagaagagctgcgtgtgctag

SEQ ID NO: 81679 - DNA, 1038 bp, synthetic construct
  misc_feature 1..1038: note = Description of Artificial Sequence: Synthetic coding sequence
  source 1..1038: mol_type = other DNA
atggagccccagaagatcatgccccccagcaagccccacccccccgtggtgggcaaggtgacccaccacagcatcgagctgtactgggacctggagaagaaggccaagagacagggcccccaggagcagtggttcagattcagcatcgaggaggaggaccccaagatgcacacctacggcatcatctacaccggctacgccaccaagcacgtggtggagggcctggagcccagaaccctgtacagattcagactgaaggtgaccagccccagcggcgagtgcgagtacagccccctggtgagcgtgagcaccaccagagagcccatcagcagcgagcacctgcacagagccgtgagcgtgaacgacgaggacctgctggtgagaatcctgcagggcggcagagtgaaggtggacgtgcccaacaagttcggcttcaccgccctgatggtggccgcccagaagggctacaccagactggtgaagatcctggtgagcaacggcaccgacgtgaacctgaagaacggcagcggcaaggacagcctgatgctggcctgctacgccggccacctggacgtggtgaagtacctgagaagacacggcgccagctggcaggccagagacctgggcggctgcaccgccctgcactgggccgccgacggcggccactgcagcgtgatcgagtggatgatcaaggacggctgcgaggtggacgtggtggacaccggcagcggctggacccccctgatgagagtgagcgccgtgagcggcaaccagagagtggccagcctgctgatcgacgccggcgccaacgtgaacgtgaaggacagaaacggcaagacccccctgatggtggccgtgctgaacaaccacgaggagctggtgcagctgctgctggacaagggcgccgacgccagcgtgaagaacgagttcggcaagggcgtgctggagatggccagagtgttcgacagacagagcgtggtgagcctgctggaggagagaaagaagaagcagagacccaagaagagctgcgtgtgctag

SEQ ID NO: 81680 - DNA, 1020 bp, synthetic construct
  misc_feature 1..1020: note = Description of Artificial Sequence: Synthetic coding sequence
  source 1..1020: mol_type = other DNA
atgccccccagcaagccccacccccccgtggtgggcaaggtgacccaccacagcatcgagctgtactgggacctggagaagaaggccaagagacagggcccccaggagcagtggttcagattcagcatcgaggaggaggaccccaagatgcacacctacggcatcatctacaccggctacgccaccaagcacgtggtggagggcctggagcccagaaccctgtacagattcagactgaaggtgaccagccccagcggcgagtgcgagtacagccccctggtgagcgtgagcaccaccagagagcccatcagcagcgagcacctgcacagagccgtgagcgtgaacgacgaggacctgctggtgagaatcctgcagggcggcagagtgaaggtggacgtgcccaacaagttcggcttcaccgccctgatggtggccgcccagaagggctacaccagactggtgaagatcctggtgagcaacggcaccgacgtgaacctgaagaacggcagcggcaaggacagcctgatgctggcctgctacgccggccacctggacgtggtgaagtacctgagaagacacggcgccagctggcaggccagagacctgggcggctgcaccgccctgcactgggccgccgacggcggccactgcagcgtgatcgagtggatgatcaaggacggctgcgaggtggacgtggtggacaccggcagcggctggacccccctgatgagagtgagcgccgtgagcggcaaccagagagtggccagcctgctgatcgacgccggcgccaacgtgaacgtgaaggacagaaacggcaagacccccctgatggtggccgtgctgaacaaccacgaggagctggtgcagctgctgctggacaagggcgccgacgccagcgtgaagaacgagttcggcaagggcgtgctggagatggccagagtgttcgacagacagagcgtggtgagcctgctggaggagagaaagaagaagcagagacccaagaagagctgcgtgtgctag

SEQ ID NO: 81681 - DNA, 375 bp, synthetic construct
  misc_feature 1..375: note = Description of Artificial Sequence: Synthetic coding sequence
  source 1..375: mol_type = other DNA
atgccccccagcaagccccacccccccgtggtgggcaaggtgacccaccacagcatcgagctgtactgggacctggagaagaaggccaagagacagggcccccaggagcagtggttcagattcagcatcgaggaggaggaccccaagatgcacacctacggcatcatctacaccggctacgccaccaagcacgtggtggagggcctggagcccagaaccctgtacagattcagactgaaggtgaccagccccagcggcgagtgcgagtacagccccctggtgagcgtgagcaccaccagagagcccatcagcagcgagcacctgcacagagccgtgagcgtgaacgacgaggacctgctggtgagaatcctgtag

SEQ ID NO: 81682 - DNA, 402 bp, synthetic construct; identical to SEQ ID NO: 81676
  misc_feature 1..402: note = Description of Artificial Sequence: Synthetic coding sequence
  source 1..402: mol_type = other DNA

SEQ ID NO: 81683 - DNA, 441 bp, synthetic construct
  misc_feature 1..441: note = Description of Artificial Sequence: Synthetic coding sequence
  source 1..441: mol_type = other DNA
atgccccccagcaagccccacccccccgtggtgggcaaggtgacccaccacagcatcgagctgtactgggacctggagaagaaggccaagagacagggcccccaggagcagtggttcagattcagcatcgaggaggaggaccccaagatgcacacctacggcatcatctacaccggctacgccaccaagcacgtggtggagggcctggagcccagaaccctgtacagattcagactgaaggtgaccagccccagcggcgagtgcgagtacagccccctggtgagcgtgagcaccaccagcgagtacagcgacagaccccacagccccctgagcagaagcatggagatgaccagcaacctggagaagatcttctgcctgagcttcggcctgaccagaagcagaaacgacaccatcttcaagcactgcaacaacatctgctag

SEQ ID NO: 81684 - DNA, 600 bp, synthetic construct
  misc_feature 1..600: note = Description of Artificial Sequence: Synthetic coding sequence
  source 1..600: mol_type = other DNA
tgagagcccatcagcagcgagcacctgcacagagccgtgagcgtgaacgacgaggacctgctggtgagaatcctgcagggcggcagagtgaaggtggacgtgcccaacaagttcggcttcaccgccctgatggtggccgcccagaagggctacaccagactggtgaagatcctggtgagcaacggcaccgacgtgaacctgaagaacggcagcggcaaggacagcctgatgctggcctgctacgccggccacctggacgtggtgaagtacctgagaagacacggcgccagctggcaggccagagacctgggcggctgcaccgccctgcactgggccgccgacggcggccactgcagcgtgatcgagtggatgatcaaggacggctgcgaggtggacgtggtggacaccggcagcggctggacccccctgatgagagtgagcgccgtgagcggcaaccagagagtggccagcctgctgatcgacgccggcgccaacgtgaacgtgaaggacagaaacggcaagacccccctgatgagcgtggtgagcctgctggaggagagaaagaagaagcagagacccaagaagagctgcgtgtgctag

SEQ ID NO: 81685 - DNA, 735 bp, synthetic construct
  misc_feature 1..735: note = Description of Artificial Sequence: Synthetic coding sequence
  source 1..735: mol_type = other DNA
atggaggtgaccggcgtgagcgcccccaccgtgaccgtgttcatcagcagcagcctgaacaccttcagaagcgagaagagatacagcagaagcctgaccatcgccgagttcaagtgcaagctggagctgctggtgggcagccccgccagctgcatggagctggagctgtacggcgtggacgacaagttctacagcaagctggaccaggaggacgccctgctgggcagctaccccgtggacgacggctgcagaatccacgtgatcgaccacagcggcgccagactgggcgagtacgaggacgtgagcagagtggagaagtacaccatcagccaggaggcctacgaccagagacaggacaccgtgagaagcttcctgaagagaagcaagctgggcagatacaacgaggaggagagagcccagcaggaggccgaggccgcccagagactggccgaggagaaggcccaggccagcagcatccccgtgggcagcagatgcgaggtgagagccgccggccagagccccagaagaggcaccgtgatgtacgtgggcctgaccgacttcaagcccggctactggatcggcgtgagatacgacgagcccctgggcaagaacgacggcagcgtgaacggcaagagatacttcgagtgccaggccaagtacggcgccttcgtgaagcccgccgtggtgaccgtgggcgacttccccgaggaggactacggcctggacgagatctag

SEQ ID NO: 81686 - DNA, 1497 bp, synthetic construct
  misc_feature 1..1497: note = Description of Artificial Sequence: Synthetic coding sequence
  source 1..1497: mol_type = other DNA
atggacagccagaaggaggccctgcagagaatcatcagcaccctggccaacaagaacgacgagatccagaacttcatcgacaccctgcaccacaccctgaagggcgtgcaggagaacagcagcaacatcctgagcgagctggacgaggagttcgacagcctgtacagcatcctggacgaggtgaaggagagcatgatcaactgcatcaagcaggagcaggccagaaagagccaggagctgcagagccagatcagccagtgcaacaacgccctggagaacagcgaggagctgctggagttcgccaccagaagcctggacatcaaggagcccgaggagttcagcaaggccgccagacagatcaaggacagagtgaccatggccagcgccttcagactgagcctgaagcccaaggtgagcgacaacatgacccacctgatggtggacttcagccaggagagacagatgctgcagaccctgaagttcctgcccgtgcccaaggcccccgagatcgaccccgtggagtgcctggtggccgacaacagcgtgaccgtggcctggagaatgcccgaggaggacaacaagatcgaccacttcatcctggagcacagaaagaccaacttcgacggcctgcccagagtgaaggacgagagatgctgggagatcatcgacaacatcaagggcaccgagtacaccctgagcggcctgaagttcgacagcaagtacatgaacttcagagtgagagcctgcaacaaggccgtggccggcgagtacagcgaccccgtgaccctggagaccaaggccctgaacttcaacctggacaacagcagcagccacctgaacctgaaggtggaggacacctgcgtggagtgggaccccaccggcggcaagggccaggagagcaagatcaagggcaaggagaacaagggcagaagcggcacccccagccccaagagaaccagcgtgggcagcagaccccccgccgtgagaggcagcagagacagattcaccggcgagagctacaccgtgctgggcgacaccgccatcgagagcggccagcactactgggaggtgaaggcccagaaggactgcaagagctacagcgtgggcgtggcctacaagaccctgggcaagttcgaccagctgggcaagaccaacaccagctggtgcatccacgtgaacaactggctgcagaacaccttcgccgccaagcacaacaacaaggtgaaggccctggacgtgaccgtgcccgagaagatcggcgtgttctgcgacttcgacggcggccagctgagcttctacgacgccaacagcaagcagctgctgtacagcttcaagaccaagttcacccagcccgtgctgcccggcttcatggtgtggtgcggcggcctgagcctgagcaccggcatgcaggtgcccagcgccgtgagaaccctgcagaagagcgagaacggcatgaccggcagcgccagcagcctgaacaacgtggtgacccagtag

SEQ ID NO: 81687 - DNA, 438 bp, synthetic construct
  misc_feature 1..438: note = Description of Artificial Sequence: Synthetic coding sequence
  source 1..438: mol_type = other DNA
atggacagccagaaggaggccctgcagagaatcatcagcaccctggccaacaagaacgacgagatccagaacttcatcgacaccctgcaccacaccctgaagggcgtgcaggagaacagcagcaacatcctgagcgagctggacgaggagttcgacagcctgtacagcatcctggacgaggtgaaggagagcatgatcaactgcatcaagcaggagcaggccagaaagagccaggagctgcagagccagatcagccagtgcaacaacgccctggagaacagcgaggagctgctggagttcgccaccagaagcctggacatcaaggagcccgaggagttcagcaaggtgcacaagaactgcatcaacaccctgaacaagggcagctgcatcttcaagaaggccttcctgttcttcttcagcttcggcttcctgtactag

SEQ ID NO: 81688 - DNA, 1593 bp, synthetic construct
  misc_feature 1..1593: note = Description of Artificial Sequence: Synthetic coding sequence
  source 1..1593: mol_type = other DNA
atggacagccagaagtactgcttcaaggagaacgagaacgtgaccgtggacaaggcctgcttcctgatcagcaacatcaccatcggccccgagagcatcaacctgcagcaggaggccctgcagagaatcatcagcaccctggccaacaagaacgacgagatccagaacttcatcgacaccctgcaccacaccctgaagggcgtgcaggagaacagcagcaacatcctgagcgagctggacgaggagttcgacagcctgtacagcatcctggacgaggtgaaggagagcatgatcaactgcatcaagcaggagcaggccagaaagagccaggagctgcagagccagatcagccagtgcaacaacgccctggagaacagcgaggagctgctggagttcgccaccagaagcctggacatcaaggagcccgaggagttcagcaaggccgccagacagatcaaggacagagtgaccatggccagcgccttcagactgagcctgaagcccaaggtgagcgacaacatgacccacctgatggtggacttcagccaggagagacagatgctgcagaccctgaagttcctgcccgtgcccaaggcccccgagatcgaccccgtggagtgcctggtggccgacaacagcgtgaccgtggcctggagaatgcccgaggaggacaacaagatcgaccacttcatcctggagcacagaaagaccaacttcgacggcctgcccagagtgaaggacgagagatgctgggagatcatcgacaacatcaagggcaccgagtacaccctgagcggcctgaagttcgacagcaagtacatgaacttcagagtgagagcctgcaacaaggccgtggccggcgagtacagcgaccccgtgaccctggagaccaaggccctgaacttcaacctggacaacagcagcagccacctgaacctgaaggtggaggacacctgcgtggagtgggaccccaccggcggcaagggccaggagagcaagatcaagggcaaggagaacaagggcagaagcggcacccccagccccaagagaaccagcgtgggcagcagaccccccgccgtgagaggcagcagagacagattcaccggcgagagctacaccgtgctgggcgacaccgccatcgagagcggccagcactactgggaggtgaaggcccagaaggactgcaagagctacagcgtgggcgtggcctacaagaccctgggcaagttcgaccagctgggcaagaccaacaccagctggtgcatccacgtgaacaactggctgcagaacaccttcgccgccaagcacaacaacaaggtgaaggccctggacgtgaccgtgcccgagaagatcggcgtgttctgcgacttcgacggcggccagctgagcttctacgacgccaacagcaagcagctgctgtacagcttcaagaccaagttcacccagcccgtgctgcccggcttcatggtgtggtgcggcggcctgagcctgagcaccggcatgcaggtgcccagcgccgtgagaaccctgcagaagagcgagaacggcatgaccggcagcgccagcagcctgaacaacgtggtgacccagtag

SEQ ID NO: 81689 - DNA, 1152 bp, synthetic construct
  misc_feature 1..1152: note = Description of Artificial Sequence: Synthetic coding sequence
  source 1..1152: mol_type = other DNA
atggccagcgccttcagactgagcctgaagcccaaggtgagcgacaacatgacccacctgatggtggacttcagccaggagagacagatgctgcagaccctgaagttcctgcccgtgcccaaggcccccgagatcgaccccgtggagtgcctggtggccgacaacagcgtgaccgtggcctggagaatgcccgaggaggacaacaagatcgaccacttcatcctggagcacagaaagaccaacttcgacggcctgcccagagtgaaggacgagagatgctgggagatcatcgacaacatcaagggcaccgagtacaccctgagcggcctgaagttcgacagcaagtacatgaacttcagagtgagagcctgcaacaaggccgtggccggcgagtacagcgaccccgtgaccctggagaccaaggccctgaacttcaacctggacaacagcagcagccacctgaacctgaaggtggaggacacctgcgtggagtgggaccccaccggcggcaagggccaggagagcaagatcaagggcaaggagaacaagggcagcgtgcacgtgaccagcctgaagaagcacaccagcggcacccccagccccaagagaaccagcgtgggcagcagaccccccgccgtgagaggcagcagagacagattcaccggcgagagctacaccgtgctgggcgacaccgccatcgagagcggccagcactactgggaggtgaaggcccagaaggactgcaagagctacagcgtgggcgtggcctacaagaccctgggcaagttcgaccagctgggcaagaccaacaccagctggtgcatccacgtgaacaactggctgcagaacaccttcgccgccaagcacaacaacaaggtgaaggccctggacgtgaccgtgcccgagaagatcggcgtgttctgcgacttcgacggcggccagctgagcttctacgacgccaacagcaagcagctgctgtacagcttcaagaccaagttcacccagcccgtgctgcccggcttcatggtgtggtgcggcggcctgagcctgagcaccggcatgcaggtgcccagcgccgtgagaaccctgcagaagagcgagaacggcatgaccggcagcgccagcagcctgaacaacgtggtgacccagtag

SEQ ID NO: 81690 - DNA, 5685 bp, synthetic construct
  misc_feature 1..5685: note = Description of Artificial Sequence: Synthetic coding sequence
  source 1..5685: mol_type = other DNA
atggcccccgaggccggcgccaccctgagagcccccagaagactgagctgggccgccctgctgctgctggccgccctgctgcccgtggccagcagcgccgccgccagcgtggaccaccccctgaagcccagacacgtgaagctgctgagcaccaagatgggcctgaaggtgacctgggacccccccaaggacgccaccagcagacccgtggagcactacaacatcgcctacggcaagagcctgaagagcctgaagtacatcaaggtgaacgccgagacctacagcttcctgatcgaggacgtggagcccggcgtggtgtacttcgtgctgctgaccgccgagaaccacagcggcgtgagcagacccgtgtacagagccgagagcccccccggcggcgagtggatcgagatcgacggcttccccatcaagggccccggccccttcaacgagaccgtgaccgagaaggaggtgcccaacaagcccctgagagtgagagtgagaagcagcgacgacagactgagcgtggcctggaaggcccccagactgagcggcgccaagagccccagaagaagcagaggcttcctgctgggctacggcgagagcggcagaaagatgaactacgtgcccctgaccagagacgagagaacccacgagatcaagaagctggccagcgagagcgtgtacgtggtgagcctgcagagcatgaacagccagggcagaagccagcccgtgtacagagccgccctgaccaagagaaagatcagcgaggaggacgagctggacgtgcccgacgacatcagcgtgagagtgatgagcagccagagcgtgctggtgagctgggtggaccccgtgctggagaagcagaagaaggtggtggccagcagacagtacaccgtgagatacagagagaagggcgagctggccagatgggactacaagcagatcgccaacagaagagtgctgatcgagaacctgatccccgacaccgtgtacgagttcgccgtgagaatcagccagggcgagagagacggcaagtggagcaccagcgtgttccagagaacccccgagagcgcccccaccaccgcccccgagaacctgaacgtgtggcccgtgaacggcaagcccaccgtggtggccgccagctgggacgccctgcccgagaccgagggcaaggtgaaggagtacatcctgagctacgcccccgccctgaagcccttcggcgccaagagcctgacctaccccggcgacaccaccagcgccctggtggacggcctgcagcccggcgagagatacctgttcaagatcagagccaccaacagaagaggcctgggcccccacagcaaggccttcatcgtggccatgcccaccaccagcaaggccgacgtggagcagaacaccgaggacaacggcaagcccgagaagcccgagcccagcagccccagccccagagcccccgccagcagccagcaccccagcgtgcccgccagcccccagggcagaaacgccaaggacctgctgctggacctgaagaacaagatcctggccaacggcggcgcccccagaaagccccagctgagagccaagaaggccgaggagctggacctgcagagcaccgagatcaccggcgaggaggagctgggcagcagagaggacagccccatgagccccagcgacacccaggaccagaagagaaccctgagaccccccagcagacacggccacagcgtggtggcccccggcagaaccgccgtgagagccagaatgcccgccctgcccagaagagagggcgtggacaagcccggcttcagcctggccacccagcccagacccggcgccccccccagcgccagcgccagccccgcccaccacgccagcacccagggcaccagccacagacccagcctgcccgccagcctgaacgacaacgacctggtggacagcgacgaggacgagagagccgtgggcagcctgcaccccaagggcgccttcgcccagcccagacccgccctgagccccagcagacagagccccagcagcgtgctgagagacagaagcagcgtgcaccccggcgccaagcccgccagccccgccagaagaaccccccacagcggcgccgccgaggaggacagcagcgccagcgccccccccagcagactgagccccccccacggcggcagcagcagactgctgcccacccagccccacctgagcagccccctgagcaagggcggcaaggacggcgaggacgcccccgccaccaacagcaacgcccccagcagaagcaccatgagcagcagcgtgagcagccacctgagcagcagaacccaggtgagcgagggcgccgaggccagcgacggcgagagccacggcgacggcgacagagaggacggcggcagacaggccgaggccaccgcccagaccctgagagccagacccgccagcggccacttccacctgctgagacacaagcccttcgccgccaacggcagaagccccagcagattcagcatcggcagaggccccagactgcagcccagcagcagcccccagagcaccgtgcccagcagagcccaccccagagtgcccagccacagcgacagccaccccaagctgagcagcggcatccacggcgacgaggaggacgagaagcccctgcccgccaccgtggtgaacgaccacgtgcccagcagcagcagacagcccatcagcagaggctgggaggacctgagaagaagcccccagagaggcgccagcctgcacagaaaggagcccatccccgagaaccccaagagcaccggcgccgacacccacccccagggcaagtacagcagcctggccagcaaggcccaggacgtgcagcagagcaccgacgccgacaccgagggccacagccccaaggcccagcccggcagcaccgacagacacgccagccccgccagaccccccgccgccagaagccagcagcaccccagcgtgcccagaagaatgacccccggcagagccccccagcagcagccccccccccccgtggccaccagccagcaccaccccggcccccagagcagagacgccggcagaagccccagccagcccagactgagcctgacccaggccggcagacccagacccaccagccagggcagaagccacagcagcagcgacccctacaccgccagcagcagaggcatgctgcccaccgccctgcagaaccaggacgaggacgcccagggcagctacgacgacgacagcaccgaggtggaggcccaggacgtgagagcccccgcccacgccgccagagccaaggaggccgccgccagcctgcccaagcaccagcaggtggagagccccaccggcgccggcgccggcggcgaccacagaagccagagaggccacgccgccagccccgccagacccagcagacccggcggcccccagagcagagccagagtgcccagcagagccgcccccggcaagagcgagccccccagcaagagacccctgagcagcaagagccagcagagcgtgagcgccgaggacgacgaggaggaggacgccggcttcttcaagggcggcaaggaggacctgctgagcagcagcgtgcccaagtggcccagcagcagcacccccagaggcggcaaggacgccgacggcagcctggccaaggaggagagagagcccgccatcgccctggcccccagaggcggcagcctggcccccgtgaagagacccctgccccccccccccggcagcagccccagagccagccacgtgcccagcagactgccccccagaagcgccgccaccgtgagccccgtggccggcacccacccctggccccagtacaccaccagagccccccccggccacttcagcaccacccccatgctgagcctgagacagagaatgatgcacgccagattcagaaaccccctgagcagacagcccgccagacccagctacagacagggctacaacggcagacccaacgtggagggcaaggtgctgcccggcagcaacggcaagcccaacggccagagaatcatcaacggcccccagggcaccaagtgggtggtggacctggacagaggcctggtgctgaacgccgagggcagatacctgcaggacagccacggcaaccccctgagaatcaagctgggcggcgacggcagaaccatcgtggacctggagggcacccccgtggtgagccccgacggcctgcccctgttcggccagggcagacacggcacccccctggccaacgcccaggacaagcccatcctgagcctgggcggcaagcccctggtgggcctggaggtgatcaagaagaccacccacccccccaccaccaccatgcagcccaccaccaccaccacccccctgcccaccaccaccacccccagacccaccaccgccaccaccagaagaaccaccaccaccagaagaaccaccaccagaagacccaccaccaccgtgagaaccaccaccagaaccaccaccaccaccacccccacccccaccacccccatccccacctgcccccccggcaccctggagagacacgacgacgacggcaacctgatcatgagcagcaacggcatccccgagtgctacgccgaggaggacgagttcagcggcctggagaccgacaccgccgtgcccaccgaggaggcctacgtgatctacgacgaggactacgagttcgagaccagcagaccccccaccaccaccgagcccagcaccaccgccaccacccccagagtgatccccgaggagggcgccatcagcagcttccccgaggaggagttcgacctggccggcagaaagagattcgtggccccctacgtgacctacctgaacaaggaccccagcgccccctgcagcctgaccgacgccctggaccacttccaggtggacagcctggacgagatcatccccaacgacctgaagaagagcgacctgcccccccagcacgcccccagaaacatcaccgtggtggccgtggagggctgccacagcttcgtgatcgtggactgggacaaggccacccccggcgacgtggtgaccggctacctggtgtacagcgccagctacgaggacttcatcagaaacaagtggagcacccaggccagcagcgtgacccacctgcccatcgagaacctgaagcccaacaccagatactacttcaaggtgcaggcccagaacccccacggctacggccccatcagccccagcgtgagcttcgtgaccgagagcgacaaccccctgctggtggtgagaccccccggcggcgagcccatctggatccccttcgccttcaagcacgaccccagctacaccgactgccacggcagacagtacgtgaagagaacctggtacagaaagttcgtgggcgtggtgctgtgcaacagcctgagatacaagatctacctgagcgacaacctgaaggacaccttctacagcatcggcgacagctggggcagaggcgaggaccactgccagttcgtggacagccacctggacggcagaaccggcccccagagctacgtggaggccctgcccaccatccagggctactacagacagtacagacaggagcccgtgagattcggcaacatcggcttcggcaccccctactactacgtgggctggtacgagtgcggcgtgagcatccccggcaagtggtag

SEQ ID NO: 81691 - DNA, 5496 bp, synthetic construct
  misc_feature 1..5496: note = Description of Artificial Sequence: Synthetic coding sequence
  source 1..5496: mol_type = other DNA
atggcccccgaggccggcgccaccctgagagcccccagaagactgagctgggccgccctgctgctgctggccgccctgctgcccgtggccagcagcgccgccgccagcgtggaccaccccctgaagcccagacacgtgaagctgctgagcaccaagatgggcctgaaggtgacctgggacccccccaaggacgccaccagcagacccgtggagcactacaacatcgcctacggcaagagcctgaagagcctgaagtacatcaaggtgaacgccgagacctacagcttcctgatcgaggacgtggagcccggcgtggtgtacttcgtgctgctgaccgccgagaaccacagcggcgtgagcagacccgtgtacagagccgagagcccccccggcggcgagtggatcgagatcgacggcttccccatcaagggccccggccccttcaacgagaccgtgaccgagaaggaggtgcccaacaagcccctgagagtgagagtgagaagcagcgacgacagactgagcgtggcctggaaggcccccagactgagcggcgccaagagccccagaagaagcagaggcttcctgctgggctacggcgagagcggcagaaagatgaactacgtgcccctgaccagagacgagagaacccacgagatcaagaagctggccagcgagagcgtgtacgtggtgagcctgcagagcatgaacagccagggcagaagccagcccgtgtacagagccgccctgaccaagagaaagatcagcgaggaggacgagctggacgtgcccgacgacatcagcgtgagagtgatgagcagccagagcgtgctggtgagctgggtggaccccgtgctggagaagcagaagaaggtggtggccagcagacagtacaccgtgagatacagagagaagggcgagctggccagatgggactacaagcagatcgccaacagaagagtgctgatcgagaacctgatccccgacaccgtgtacgagttcgccgtgagaatcagccagggcgagagagacggcaagtggagcaccagcgtgttccagagaacccccgagagcgcccccaccaccgcccccgagaacctgaacgtgtggcccgtgaacggcaagcccaccgtggtggccgccagctgggacgccctgcccgagaccgagggcaaggtgaaggccagcaaggccgacgtggagcagaacaccgaggacaacggcaagcccgagaagcccgagcccagcagccccagccccagagcccccgccagcagccagcaccccagcgtgcccgccagcccccagggcagaaacgccaaggacctgctgctggacctgaagaacaagatcctggccaacggcggcgcccccagaaagccccagctgagagccaagaaggccgaggagctggacctgcagagcaccgagatcaccggcgaggaggagctgggcagcagagaggacagccccatgagccccagcgacacccaggaccagaagagaaccctgagaccccccagcagacacggccacagcgtggtggcccccggcagaaccgccgtgagagccagaatgcccgccctgcccagaagagagggcgtggacaagcccggcttcagcctggccacccagcccagacccggcgccccccccagcgccagcgccagccccgcccaccacgccagcacccagggcaccagccacagacccagcctgcccgccagcctgaacgacaacgacctggtggacagcgacgaggacgagagagccgtgggcagcctgcaccccaagggcgccttcgcccagcccagacccgccctgagccccagcagacagagccccagcagcgtgctgagagacagaagcagcgtgcaccccggcgccaagcccgccagccccgccagaagaaccccccacagcggcgccgccgaggaggacagcagcgccagcgccccccccagcagactgagccccccccacggcggcagcagcagactgctgcccacccagccccacctgagcagccccctgagcaagggcggcaaggacggcgaggacgcccccgccaccaacagcaacgcccccagcagaagcaccatgagcagcagcgtgagcagccacctgagcagcagaacccaggtgagcgagggcgccgaggccagcgacggcgagagccacggcgacggcgacagagaggacggcggcagacaggccgaggccaccgcccagaccctgagagccagacccgccagcggccacttccacctgctgagacacaagcccttcgccgccaacggcagaagccccagcagattcagcatcggcagaggccccagactgcagcccagcagcagcccccagagcaccgtgcccagcagagcccaccccagagtgcccagccacagcgacagccaccccaagctgagcagcggcatccacggcgacgaggaggacgagaagcccctgcccgccaccgtggtgaacgaccacgtgcccagcagcagcagacagcccatcagcagaggctgggaggacctgagaagaagcccccagagaggcgccagcctgcacagaaaggagcccatccccgagaaccccaagagcaccggcgccgacacccacccccagggcaagtacagcagcctggccagcaaggcccaggacgtgcagcagagcaccgacgccgacaccgagggccacagccccaaggcccagcccggcagcaccgacagacacgccagccccgccagaccccccgccgccagaagccagcagcaccccagcgtgcccagaagaatgacccccggcagagccccccagcagcagccccccccccccgtggccaccagccagcaccaccccggcccccagagcagagacgccggcagaagccccagccagcccagactgagcctgacccaggccggcagacccagacccaccagccagggcagaagccacagcagcagcgacccctacaccgccagcagcagaggcatgctgcccaccgccctgcagaaccaggacgaggacgcccagggcagctacgacgacgacagcaccgaggtggaggcccaggacgtgagagcccccgcccacgccgccagagccaaggaggccgccgccagcctgcccaagcaccagcaggtggagagccccaccggcgccggcgccggcggcgaccacagaagccagagaggccacgccgccagccccgccagacccagcagacccggcggcccccagagcagagccagagtgcccagcagagccgcccccggcaagagcgagccccccagcaagagacccctgagcagcaagagccagcagagcgtgagcgccgaggacgacgaggaggaggacgccggcttcttcaagggcggcaaggaggacctgctgagcagcagcgtgcccaagtggcccagcagcagcacccccagaggcggcaaggacgccgacggcagcctggccaaggaggagagagagcccgccatcgccctggcccccagaggcggcagcctggcccccgtgaagagacccctgccccccccccccggcagcagccccagagccagccacgtgcccagcagactgccccccagaagcgccgccaccgtgagccccgtggccggcacccacccctggccccagtacaccaccagagccccccccggccacttcagcaccacccccatgctgagcctgagacagagaatgatgcacgccagattcagaaaccccctgagcagacagcccgccagacccagctacagacagggctacaacggcagacccaacgtggagggcaaggtgctgcccggcagcaacggcaagcccaacggccagagaatcatcaacggcccccagggcaccaagtgggtggtggacctggacagaggcctggtgctgaacgccgagggcagatacctgcaggacagccacggcaaccccctgagaatcaagctgggcggcgacggcagaaccatcgtggacctggagggcacccccgtggtgagccccgacggcctgcccctgttcggccagggcagacacggcacccccctggccaacgcccaggacaagcccatcctgagcctgggcggcaagcccctggtgggcctggaggtgatcaagaagaccacccacccccccaccaccaccatgcagcccaccaccaccaccacccccctgcccaccaccaccacccccagacccaccaccgccaccaccagaagaaccaccaccaccagaagaaccaccaccagaagacccaccaccaccgtgagaaccaccaccagaaccaccaccaccaccacccccacccccaccacccccatccccacctgcccccccggcaccctggagagacacgacgacgacggcaacctgatcatgagcagcaacggcatccccgagtgctacgccgaggaggacgagttcagcggcctggagaccgacaccgccgtgcccaccgaggaggcctacgtgatctacgacgaggactacgagttcgagaccagcagaccccccaccaccaccgagcccagcaccaccgccaccacccccagagtgatccccgaggagggcgccatcagcagcttccccgaggaggagttcgacctggccggcagaaagagattcgtggccccctacgtgacctacctgaacaaggaccccagcgccccctgcagcctgaccgacgccctggaccacttccaggtggacagcctggacgagatcatccccaacgacctgaagaagagcgacctgcccccccagcacgcccccagaaacatcaccgtggtggccgtggagggctgccacagcttcgtgatcgtggactgggacaaggccacccccggcgacgtggtgaccggctacctggtgtacagcgccagctacgaggacttcatcagaaacaagtggagcacccaggccagcagcgtgacccacctgcccatcgagaacctgaagcccaacaccagatactacttcaaggtgcaggcccagaacccccacggctacggccccatcagccccagcgtgagcttcgtgaccgagagcgacaaccccctgctggtggtgagaccccccggcggcgagcccatctggatccccttcgccttcaagcacgaccccagctacaccgactgccacggcagacagtacgtgaagagaacctggtacagaaagttcgtgggcgtggtgctgtgcaacagcctgagatacaagatctacctgagcgacaacctgaaggacaccttctacagcatcggcgacagctggggcagaggcgaggaccactgccagttcgtggacagccacctggacggcagaaccggcccccagagctacgtggaggccctgcccaccatccagggctactacagacagtacagacaggagcccgtgagattcggcaacatcggcttcggcaccccctactactacgtgggctggtacgagtgcggcgtgagcatccccggcaagtggtag

SEQ ID NO: 81692 - DNA, 3615 bp, synthetic construct
  misc_feature 1..3615: note = Description of Artificial Sequence: Synthetic coding sequence
  source 1..3615: mol_type = other DNA
atgtacgtgaccatgatgatgaccgaccagatccccctggagctgccccccctgctgaacggcgaggtggccatgatgccccacctggtgaacggcgacgccgcccagcaggtgatcctggtgcaggtgaaccccggcgagaccttcaccatcagagccgaggacggcaccctgcagtgcatccagggccccgccgaggtgcccatgatgagccccaacggcagcatcccccccatccacgtgccccccggctacatcagccaggtgatcgaggacagcaccggcgtgagaagagtggtggtgaccccccagagccccgagtgctacccccccagctaccccagcgccatgagccccacccaccacctgcccccctacctgacccaccacccccacttcatccacaacagccacaccgcctactacccccccgtgaccggccccggcgacatgcccccccagttcttcccccagcaccacctgccccacaccatctacggcgagcaggagatcatccccttctacggcatgagcacctacatcaccagagaggaccagtacagcaagcccccccacaagaagctgaaggacagacagatcgacagacagaacagactgaacagcccccccagcagcatctacaagagcagctgcaccaccgtgtacaacggctacggcaagggccacagcggcggcagcggcggcggcggcagcggcagcggccccggcatcaagaagaccgagagaagagccagaagcagccccaagagcaacgacagcgacctgcaggagtacgagctggaggtgaagagagtgcaggacatcctgagcggcatcgagaagccccaggtgagcaacatccaggccagagccgtggtgctgagctgggccccccccgtgggcctgagctgcggcccccacagcggcctgagcttcccctacagctacgaggtggccctgagcgacaagggcagagacggcaagtacaagatcatctacagcggcgaggagctggagtgcaacctgaaggacctgagacccgccaccgactaccacgtgagagtgtacgccatgtacaacagcgtgaagggcagctgcagcgagcccgtgagcttcaccacccacagctgcgcccccgagtgccccttcccccccaagctggcccacagaagcaagagcagcctgaccctgcagtggaaggcccccatcgacaacggcagcaagatcaccaactacctgctggagtgggacgagggcaagagaaacagcggcttcagacagtgcttcttcggcagccagaagcactgcaagctgaccaagctgtgccccgccatgggctacaccttcagactggccgccagaaacgacatcggcaccagcggctacagccaggaggtggtgtgctacaccctgggcaacatcccccagatgcccagcgcccccagactggtgagagccggcatcacctgggtgaccctgcagtggagcaagcccgagggctgcagccccgaggaggtgatcacctacaccctggagatccaggaggacgagaacgacaacctgttccaccccaagtacaccggcgaggacctgacctgcaccgtgaagaacctgaagagaagcacccagtacaagttcagactgaccgccagcaacaccgagggcaagagctgccccagcgaggtgctggtgtgcaccaccagccccgacagacccggcccccccaccagacccctggtgaagggccccgtgaccagccacggcttcagcgtgaagtgggacccccccaaggacaacggcggcagcgagatcctgaagtacctgctggagatcaccgacggcaacagcgaggccaaccagtgggaggtggcctacagcggcagcgccaccgagtacaccttcacccacctgaagcccggcaccctgtacaagctgagagcctgctgcatcagcaccggcggccacagccagtgcagcgagagcctgcccgtgagaaccctgagcatcgcccccggccagtgcagaccccccagagtgctgggcagacccaagcacaaggaggtgcacctggagtgggacgtgcccgccagcgagagcggctgcgaggtgagcgagtacagcgtggagatgaccgagcccgaggacgtggccagcgaggtgtaccacggccccgagctggagtgcaccgtgggcaacctgctgcccggcaccgtgtacagattcagagtgagagccctgaacgacggcggctacggcccctacagcgacgtgagcgagatcaccaccgccgccggcccccccggccagtgcaaggccccctgcatcagctgcacccccgacggctgcgtgctggtgggctgggagagccccgacagcagcggcgccgacatcagcgagtacagactggagtggggcgaggacgaggagagcctggagctgatctaccacggcaccgacaccagattcgagatcagagacctgctgcccgccgcccagtactgctgcagactgcaggccttcaaccaggccggcgccggcccctacagcgagctggtgctgtgccagacccccgccagcgcccccgaccccgtgagcaccctgtgcgtgctggaggaggagcccctggacgcctaccccgacagccccagcgcctgcctggtgctgaactgggaggagccctgcaacaacggcagcgagatcctggcctacaccatcgacctgggcgacaccagcatcaccgtgggcaacaccaccatgcacgtgatgaaggacctgctgcccgagaccacctacagaatcagaatccaggccatcaacgagatcggcgccggccccttcagccagttcatcaaggccaagaccagacccctgccccccctgccccccagactggagtgcgccgccgccggcccccagagcctgaagctgaagtggggcgacagcaacagcaagacccacgccgccgaggacatcgtgtacaccctgcagctggaggacagaaacaagagattcatcagcatctacagaggccccagccacacctacaaggtgcagagactgaccgagttcacctgctacagcttcagaatccaggccgccagcgaggccggcgagggccccttcagcgagacctacaccttcagcaccaccaagagcgtgccccccaccatcaaggcccccagagtgacccagctggagggcaacagctgcgagatcctgtgggagaccgtgcccagcatgaagggcgaccccgtgaactacatcctgcaggtgctggtgggcagagagagcgagtacaagcaggtgtacaagggcgaggaggccaccttccagatcagcggcctgcagaccaacaccgactacagattcagagtgtgcgcctgcagaagatgcctggacaccagccaggagctgagcggcgccttcagccccagcgccgccttcgtgctgcagagaagcgaggtgatgctgaccggcgacatgggcagcctggacgaccccaagatgaagagcatgatgcccaccgacgagcagttcgccgccatcatcgtgctgggcttcgccaccctgagcatcctgttcgccttcatcctgcagtacttcctgatgaagtag

SEQ ID NO: 81693 - DNA, 216 bp, synthetic construct
  misc_feature 1..216: note = Description of Artificial Sequence: Synthetic coding sequence
  source 1..216: mol_type = other DNA
atgtacgtgaccatgatgatgaccgaccagatccccctggagctgccccccctgctgaacggcgaggtggccatgatgccccacctggtgaacggcgacgccgcccagcaggtgatcctggtgcaggtgaaccccggcgagaccttcaccatcagagccgaggacggcaccctgcagtgcatccaggaggtgaacgtgaagagacactgcctgtag

SEQ ID NO: 81694 - DNA, 3615 bp, synthetic construct; identical to SEQ ID NO: 81692
  misc_feature 1..3615: note = Description of Artificial Sequence: Synthetic coding sequence
  source 1..3615: mol_type = other DNA

SEQ ID NO: 81695 - DNA, 3615 bp, synthetic construct; identical to SEQ ID NO: 81692
  misc_feature 1..3615: note = Description of Artificial Sequence: Synthetic coding sequence
  source 1..3615: mol_type = other DNA

SEQ ID NO: 81696 - DNA, 627 bp, synthetic construct
  misc_feature 1..627: note = Description of Artificial Sequence: Synthetic coding sequence
  source 1..627: mol_type = other DNA
atgttcaccaaggagaagatctggagcgaggtgatcctggtgcaggtgaaccccggcgagaccttcaccatcagagccgaggacggcaccctgcagtgcatccagggccccgccgaggtgcccatgatgagccccaacggcagcatcccccccatccacgtgccccccggctacatcagccaggtgatcgaggacagcaccggcgtgagaagagtggtggtgaccccccagagccccgagtgctacccccccagctaccccagcgccatgagccccacccaccacctgcccccctacctgacccaccacccccacttcatccacaacagccacaccgcctactacccccccgtgaccggccccggcgacatgcccccccagttcttcccccagcaccacctgccccacaccatctacggcgagcaggagatcatccccttctacggcatgagcacctacatcaccagagaggaccagtacagcaagcccccccacaagaagctgaaggacagacagatcgacagacagaacagactgaacagcccccccagcagcatctacaagagcagctgcaccaccgtgtacaacggctacggcaagggccacagcggcggcagcggcggctag

SEQ ID NO: 81697 - DNA, 705 bp, synthetic construct
  misc_feature 1..705: note = Description of Artificial Sequence: Synthetic coding sequence
  source 1..705: mol_type = other DNA
atgcccagcggctgccacagcagcccccccagcggcctgagaggcgacatggccagcctggtgcccctgagcccctacctgagccccaccgtgctgctgctggtgagctgcgacctgggcttcgtgagagccgacagaccccccagccccgtgaacgtgaccgtgacccacctgagagccaacagcgccaccgtgagctgggacgtgcccgagggcaacatcgtgatcggctacagcatcagccagcagagacagaacggccccggccagagagtgatcagagaggtgaacaccaccaccagagcctgcgccctgtggggcctggccgaggacagcgactacaccgtgcaggtgagaagcatcggcctgagaggcgagagcccccccggccccagagtgcacttcagaaccctgaagggcagcgacagactgcccagcaacagcagcagccccggcgacatcaccgtggagggcctggacggcgagagacccctgcagaccggcgaggtggtgatcatcgtggtggtgctgctgatgtgggccgccgtgatcggcctgttctgcagacagtacgacatcatcaaggacaacgacagcaacaacaaccccaaggagaagggcaagggccccgagcagagcccccagggcagacccgtgggcaccagacagaagaagagccccagcatcaacaccatcgacgtgtag

SEQ ID NO: 81698 - DNA, 2478 bp, synthetic construct
  misc_feature 1..2478: note = Description of Artificial Sequence: Synthetic coding sequence
  source 1..2478: mol_type = other DNA
atggtgggcaagagccagcagaccgacgtgatcgagaagaagaagcacatggccatccccaagagcagcagccccaaggccacccacagaatcggcaacaccagcggcagcaagggcagctacagcgccaaggcctacgagagcatcagagtgagcagcgagctgcagcagacctggaccaagagaaagcacggccaggagatgaccagcaagagcctgcagaccgacaccatcgtggaggagaagaaggaggtgaagctggtggaggagaccgtggtgcccgaggagaagagcgccgacgtgagagaggccgccatcgagctgcccgagagcgtgcaggacgtggagatcccccccaacatccccagcgtgcagctgaagatggacagaagccagcagaccagcagaaccggctactggaccatgatgaacatcccccccgtggagaaggtggacaaggagcagcagacctacttcagcgagagcgagatcgtggtgatcagcagacccgacagcagcagcaccaagagcaaggaggacgccctgaagcacaagagcagcggcaagatcttcgccagcgagcaccccgagttccagcccgccaccaacagcaacgaggagatcggccagaagaacatcagcagaaccagcttcacccaggagaccaagaagggcccccccgtgctgctggaggacgagctgagagaggaggtgaccgtgcccgtggtgcaggagggcagcgccgtgaagaaggtggccagcgccgagatcgagccccccagcaccgagaagttccccgccaagatccagccccccctggtggaggaggccaccgccaaggccgagcccagacccgccgaggagacccacgtgcaggtgcagcccagcaccgaggagacccccgacgccgaggccgccaccgccgtggccgagaacagcgtgaaggtgcagcccccccccgccgaggaggcccccctggtggagttccccgccgagatccagccccccagcgccgaggagagccccagcgtggagctgctggccgagatcctgccccccagcgccgaggagagccccagcgaggagccccccgccgagatcctgcccccccccgccgagaagagccccagcgtggagctgctgggcgagatcagaagccccagcgcccagaaggcccccatcgaggtgcagcccctgcccgccgagggcgccctggaggaggcccccgccaaggtggagccccccaccgtggaggagaccctggccgacgtgcagcccctgctgcccgaggaggcccccagagaggaggccagagagctgcagctgagcaccgccatggagacccccgccgaggaggcccccaccgagttccagagccccctgcccaaggagaccaccgccgaggaggccagcgccgagatccagctgctggccgccaccgagccccccgccgacgagacccccgccgaggccagaagccccctgagcgaggagaccagcgccgaggaggcccacgccgaggtgcagagccccctggccgaggagaccaccgccgaggaggccagcgccgagatccagctgctggccgccatcgaggcccccgccgacgagacccccgccgaggcccagagccccctgagcgaggagaccagcgccgaggaggcccccgccgaggtgcagagccccagcgccaagggcgtgagcatcgaggaggcccccctggagctgcagccccccagcggcgaggagaccaccgccgaggaggccagcgccgccatccagctgctggccgccaccgaggccagcgccgaggaggcccccgccgaggtgcagcccccccccgccgaggaggcccccgccgaggtgcagcccccccccgccgaggaggcccccgccgaggtgcagcccccccccgccgaggaggcccccgccgaggtgcagcccccccccgccgaggaggcccccgccgaggtgcagcccccccccgccgaggaggcccccgccgaggtgcagcccccccccgccgaggaggcccccgccgaggtgcagagcctgcccgccgaggagacccccatcgaggagaccctggccgccgtgcacagcccccccgccgacgacgtgcccgccgaggaggccagcgtggacaagcacagcccccccgccgacctgctgctgaccgaggagttccccatcggcgaggccagcgccgaggtgagccccccccccagcgagcagacccccgaggacgaggccctggtggagaacgtgagcaccgagttccagagcccccaggtggccggcatccccgccgtgaagctgggcagcgtggtgctggagggcgaggccaagttcgaggaggtgagcaagatcaacagcgtgctgaaggacctgagcaacaccaacgacggccaggcccccaccctggagatcgagagcgtgttccacatcgagctgaagcagagaccccccgagctgtag

SEQ ID NO: 81699 - DNA, 2157 bp, synthetic construct
  misc_feature 1..2157: note = Description of Artificial Sequence: Synthetic coding sequence
  source 1..2157: mol_type = other DNA
atggtgggcaagagccagcagaccgacgtgatcgagaagaagaagcacatggccatccccaagagcagcagccccaaggccacccacagaatcggcaacaccagcggcagcaagggcagctacagcgccaaggcctacgagagcatcagagtgagcagcgagctgcagcagacctggaccaagagaaagcacggccaggagatgaccagcaagagcctgcagaccgacaccatcgtggaggagaagaaggaggtgaagctggtggaggagaccgtggtgcccgaggagaagagcgccgacgtgagagaggccgccatcgagctgcccgagagcgtgcaggacgtggagatcccccccaacatccccagcgtgcagctgaagatggacagaagccagcagaccagcagaaccggctactggaccatgatgaacatcccccccgtggagaaggtggacaaggagcagcagacctacttcagcgagagcgagatcgtggtgatcagcagacccgacagcagcagcaccaagagcaaggaggacgccctgaagcacaagagcagcggcaagatcttcgccagcgagcaccccgagttccagcccgccaccaacagcaacgaggagatcggccagaagaacatcagcagaaccagcttcacccaggagaccaagaagggcccccccgtgctgctggaggacgagctgagagaggaggtgaccgtgcccgtggtgcaggagggcagcgccgtgaagaaggtggccagcgccgagatcgagccccccagcaccgagaagttccccgccaagatccagccccccctggtggaggaggccaccgccaaggccgagcccagacccgccgaggagacccacgtgcaggtgcagcccagcaccgaggagacccccgacgccgaggccgccaccgccgtggccgagaacagcgtgaaggtgcagcccccccccgccgaggaggcccccctggtggagttccccgccgagatccagccccccagcgccgaggagagccccagcgtggagctgctggccgagatcctgccccccagcgccgaggagagccccagcgaggagccccccgccgagatcctgcccccccccgccgagaagagccccagcgtggagctgctgggcgagatcagaagccccagcgcccagaaggcccccatcgaggtgcagcccctgcccgccgagggcgccctggaggaggcccccgccaaggtggagccccccaccgtggaggagaccctggccgacgtgcagcccctgctgcccgaggaggcccccagagaggaggccagagagctgcagctgagcaccgccatggagacccccgccgaggaggcccccaccgagttccagagccccctgcccaaggagaccaccgccgaggaggccagcgccgagatccagctgctggccgccaccgagaccagcgccgaggaggcccccgccgaggtgcagagccccagcgccgaggaggcccccgccgaggtgcagcccccccccgccgaggaggcccccgccgaggtgcagcccccccccgccgaggaggcccccgccgaggtgcagcccccccccgccgaggaggcccccgccgaggtgcagcccccccccgccgaggaggcccccgccgaggtgcagcccccccccgccgaggaggcccccgccgaggtgcagcccccccccgccgaggaggcccccgccgaggtgcagagcctgcccgccgaggagacccccatcgaggagaccctggccgccgtgcacagcccccccgccgacgacgtgcccgccgaggaggccagcgtggacaagcacagcccccccgccgacctgctgctgaccgaggagttccccatcggcgaggccagcgccgaggtgagccccccccccagcgagcagacccccgaggacgaggccctggtggagaacgtgagcaccgagttccagagcccccaggtggccggcatccccgccgtgaagctgggcagcgtggtgctggagggcgaggccaagttcgaggaggtgagcaagatcaacagcgtgctgaaggacctgagcaacaccaacgacggccaggcccccaccctggagatcgagagcgtgttccacatcgagctgaagcagagaccccccgagctgtag

SEQ ID NO: 81700 - DNA, 2052 bp, synthetic construct
  misc_feature 1..2052: note = Description of Artificial Sequence: Synthetic coding sequence
  source 1..2052: mol_type = other DNA
atggagagagccgcccccagcagaagagtgcccctgcccctgctgctgctgggcggcctggccctgctggccgccggcgtggacgccgacgtgctgctggaggcctgctgcgccgacggccacagaatggccacccaccagaaggactgcagcctgccctacgccaccgagagcaaggagtgcagaatggtgcaggagcagtgctgccacagccagctggaggagctgcactgcgccaccggcatcagcctggccaacgagcaggacagatgcgccaccccccacggcgacaacgccagcctggaggccaccttcgtgaagagatgctgccactgctgcctgctgggcagagccgcccaggcccagggccagagctgcgagtacagcctgatggtgggctaccagtgcggccaggtgttccaggcctgctgcgtgaagagccaggagaccggcgacctggacgtgggcggcctgcaggagaccgacaagatcatcgaggtggaggaggagcaggaggacccctacctgaacgacagatgcagaggcggcggcccctgcaagcagcagtgcagagacaccggcgacgaggtggtgtgcagctgcttcgtgggctaccagctgctgagcgacggcgtgagctgcgaggacgtgaacgagtgcatcaccggcagccacagctgcagactgggcgagagctgcatcaacaccgtgggcagcttcagatgccagagagacagcagctgcggcaccggctacgagctgaccgaggacaacagctgcaaggacatcgacgagtgcgagagcggcatccacaactgcctgcccgacttcatctgccagaacaccctgggcagcttcagatgcagacccaagctgcagtgcaagagcggcttcatccaggacgccctgggcaactgcatcgacatcaacgagtgcctgagcatcagcgccccctgccccatcggccacacctgcatcaacaccgagggcagctacacctgccagaagaacgtgcccaactgcggcagaggctaccacctgaacgaggagggcaccagatgcgtggacgtggacgagtgcgccccccccgccgagccctgcggcaagggccacagatgcgtgaacagccccggcagcttcagatgcgagtgcaagaccggctactacttcgacggcatcagcagaatgtgcgtggacgtgaacgagtgccagagataccccggcagactgtgcggccacaagtgcgagaacaccctgggcagctacctgtgcagctgcagcgtgggcttcagactgagcgtggacggcagaagctgcgaggacatcaacgagtgcagcagcagcccctgcagccaggagtgcgccaacgtgtacggcagctaccagtgctactgcagaagaggctaccagctgagcgacgtggacggcgtgacctgcgaggacatcgacgagtgcgccctgcccaccggcggccacatctgcagctacagatgcatcaacatccccggcagcttccagtgcagctgccccagcagcggctacagactggcccccaacggcagaaactgccaggacatcgacgagtgcgtgaccggcatccacaactgcagcatcaacgagacctgcttcaacatccagggcggcttcagatgcctggccttcgagtgccccgagaactacagaagaagcgccgccaccagatgcgagagactgccctgccacgagaacagagagtgcagcaagctgcccctgagaatcacctactaccacctgagcttccccaccaacatccaggcccccgccgtggtgttcagaatgggccccagcagcgccgtgcccggcgacagcatgcagctggccatcaccggcggcaacgaggagggcttcttcaccaccagaaaggtgagcccccacagcggcgtggtggccctgaccaagcccgtgcccgagcccagagacctgctgctgaccgtgaagatggacctgagcagacacggcaccgtgagcagcttcgtggccaagctgttcatcttcgtgagcgccgagctgtag

SEQ ID NO: 81701 - DNA, 2112 bp, synthetic construct
  misc_feature 1..2112: note = Description of Artificial Sequence: Synthetic coding sequence
  source 1..2112: mol_type = other DNA
atggagagagccgcccccagcagaagagtgcccctgcccctgctgctgctgggcggcctggccctgctggccgccggcgtggacgccgacgtgctgctggaggcctgctgcgccgacggccacagaatggccacccaccagaaggactgcagcctgccctacgccaccgagagcaaggagtgcagaatggtgcaggagcagtgctgccacagccagctggaggagctgcactgcgccaccggcatcagcctggccaacgagcaggacagatgcgccaccccccacggcgacaacgccagcctggaggccaccttcgtgaagagatgctgccactgctgcctgctgggcagagccgcccaggcccagggccagagctgcgagtacagcctgatggtgggctaccagtgcggccaggtgttccaggcctgctgcgtgaagagccaggagaccggcgacctggacgtgggcggcctgcaggagaccgacaagatcatcgaggtggaggaggagcaggaggacccctacctgaacgacagatgcagaggcggcggcccctgcaagcagcagtgcagagacaccggcgacgaggtggtgtgcagctgcttcgtgggctaccagctgctgagcgacggcgtgagctgcgaggacgtgaacgagtgcatcaccggcagccacagctgcagactgggcgagagctgcatcaacaccgtgggcagcttcagatgccagagagacagcagctgcggcaccggctacgagctgaccgaggacaacagctgcaaggacatcgacgagtgcgagagcggcatccacaactgcctgcccgacttcatctgccagaacaccctgggcagcttcagatgcagacccaagctgcagtgcaagagcggcttcatccaggacgccctgggcaactgcatcgacatcaacgagtgcctgagcatcagcgccccctgccccatcggccacacctgcatcaacaccgagggcagctacacctgccagaagaacgtgcccaactgcggcagaggctaccacctgaacgaggagggcaccagatgcgtggacgtggacgagtgcgccccccccgccgagccctgcggcaagggccacagatgcgtgaacagccccggcagcttcagatgcgagtgcaagaccggctactacttcgacggcatcagcagaatgtgcgtggacgtgaacgagtgccagagataccccggcagactgtgcggccacaagtgcgagaacaccctgggcagctacctgtgcagctgcagcgtgggcttcagactgagcgtggacggcagaagctgcgaggacatcaacgagtgcagcagcagcccctgcagccaggagtgcgccaacgtgtacggcagctaccagtgctactgcagaagaggctaccagctgagcgacgtggacggcgtgacctgcgaggacatcgacgagtgcgccctgcccaccggcggccacatctgcagctacagatgcatcaacatccccggcagcttccagtgcagctgccccagcagcggctacagactggcccccaacggcagaaactgccaggacatcgacgagtgcgtgaccggcatccacaactgcagcatcaacgagacctgcttcaacatccagggcggcttcagatgcctggccttcgagtgccccgagaactacagaagaagcgccgccaccctgcagcaggagaagaccgacaccgtgagatgcatcaagagctgcagacccaacgacgtgacctgcgtgttcgaccccgtgcacaccatcagccacaccgtgatcagcctgcccaccttcagagagttcaccagacccgaggagatcatcttcctgagagccatcacccccccccaccccgccagccaggccaacatcatcttcgacatcaccgagggcaacctgagagacagcttcgacatcatcaagagatacatggacggcatgaccgtgggcgtggtgagacaggtgagacccatcgtgggccccttccacgccgtgctgaagctggagatgaactacgtggtgggcggcgtggtgagccacagaaacgtggtgaacgtgcacatcttcgtgagcgagtactggttctag

SEQ ID NO: 81702 - DNA, 1701 bp, synthetic construct
  misc_feature 1..1701: note = Description of Artificial Sequence: Synthetic coding sequence
  source 1..1701: mol_type = other DNA
atggagagagccgcccccagcagaagagtgcccctgcccctgctgctgctgggcggcctggccctgctggccgccggcgtggacgccgacgtgctgctggaggcctgctgcgccgacggccacagaatggccacccaccagaaggactgcagcctgccctacgccaccgagagcaaggagtgcagaatggtgcaggagcagtgctgccacagccagctggaggagctgcactgcgccaccggcatcagcctggccaacgagcaggacagatgcgccaccccccacggcgacaacgccagcctggaggccaccttcgtgaagagatgctgccactgctgcctgctgggcagagccgcccaggcccagggccagagctgcgagtacagcctgatggtgggctaccagtgcggccaggtgttccaggcctgctgcgtgaagagccaggagaccggcgacctggacgtgggcggcctgcaggagaccgacaagatcatcgaggtggaggaggagcaggaggacccctacctgaacgacagatgcagaggcggcggcccctgcaagcagcagtgcagagacaccggcgacgaggtggtgtgcagctgcttcgtgggctaccagctgctgagcgacggcgtgagctgcgaggacgtgaacgagtgcatcaccggcagccacagctgcagactgggcgagagctgcatcaacaccgtgggcagcttcagatgccagagagacagcagctgcggcaccggctacgagctgaccgaggacaacagctgcaaggacatcgacgagtgcgagagcggcatccacaactgcctgcccgacttcatctgccagaacaccctgggcagcttcagatgcagacccaagctgcagtgcaagagcggcttcatccaggacgccctgggcaactgcatcgacatcaacgagtgcctgagcatcagcgccccctgccccatcggccacacctgcatcaacaccgagggcagctacacctgccagaagaacgtgcccaactgcggcagaggctaccacctgaacgaggagggcaccagatgcgtggacgtggacgagtgcgccccccccgccgagccctgcggcaagggccacagatgcgtgaacagccccggcagcttcagatgcgagtgcaagaccggctactacttcgacggcatcagcagaatgtgcgtggacgtgaacgagtgccagagataccccggcagactgtgcggccacaagtgcgagaacaccctgggcagctacctgtgcagctgcagcgtgggcttcagactgagcgtggacggcagaagctgcgaggacatcaacgagtgcagcagcagcccctgcagccaggagtgcgccaacgtgtacggcagctaccagtgctactgcagaagaggctaccagctgagcgacgtggacggcgtgacctgcgaggacatcgacgagtgcgccctgcccaccggcggccacatctgcagctacagatgcatcaacatccccggcagcttccagtgcagctgccccagcagcggctacagactggcccccaacggcagaaactgccaggacatcgacgagtgcgtgaccggcatccacaactgcagcatcaacgagacctgcttcaacatccagggcggcttcagatgcctggccttcgagtgccccgagaactacagaagaagcgccgccacctag

SEQ ID NO: 81703 - DNA, 2112 bp, synthetic construct
  misc_feature 1..2112: note = Description of Artificial Sequence: Synthetic coding sequence
  source 1..2112: mol_type = other DNA
atggagagagccgcccccagcagaagagtgcccctgcccctgctgctgctgggcggcctggccctgctggccgccggcgtggacgccgacgtgctgctggaggcctgctgcgccgacggccacagaatggccacccaccagaaggactgcagcctgccctacgccaccgagagcaaggagtgcagaatggtgcaggagcagtgctgccacagccagctggaggagctgcactgcgccaccggcatcagcctggccaacgagcaggacagatgcgccaccccccacggcgacaacgccagcctggaggccaccttcgtgaagagatgctgccactgctgcctgctgggcagagccgcccaggcccagggccagagctgcgagtacagcctgatggtgggctaccagtgcggccaggtgttccaggcctgctgcgtgaagagccaggagaccggcgacctggacgtgggcggcctgcaggagaccgacaagatcatcgaggtggaggaggagcaggaggacccctacctgaacgacagatgcagaggcggcggcccctgcaagcagcagtgcagagacaccggcgacgaggtggtgtgcagctgcttcgtgggctaccagctgctgagcgacggcgtgagctgcgaggacgtgaacgagtgcatcaccggcagccacagctgcagactgggcgagagctgcatcaacaccgtgggcagcttcagatgccagagagacagcagctgcggcaccggctacgagctgaccgaggacaacagctgcaaggacatcgacgagtgcgagagcggcatccacaactgcctgcccgacttcatctgccagaacaccctgggcagcttcagatgcagacccaagctgcagtgcaagagcggcttcatccaggacgccctgggcaactgcatcgacatcaacgagtgcctgagcatcagcgccccctgccccatcggccacacctgcatcaacaccgagggcagctacacctgccagaagaacgtgcccaactgcggcagaggctaccacctgaacgaggagggcaccagatgcgtggacgtggacgagtgcgccccccccgccgagccctgcggcaagggccacagatgcgtgaacagccccggcagcttcagatgcgagtgcaagaccggctactacttcgacggcatcagcagaatgtgcgtggacgtgaacgagtgccagagataccccggcagactgtgcggccacaagtgcgagaacaccctgggcagctacctgtgcagctgcagcgtgggcttcagactgagcgtggacggcagaagctgcgaggacatcaacgagtgcagcagcagcccctgcagccaggagtgcgccaacgtgtacggcagctaccagtgctactgcagaagaggctaccagctgagcgacgtggacggcgtgacctgcgaggacatcgacgagtgcgccctgcccaccggcggccacatctgcagctacagatgcatcaacatccccggcagcttccagtgcagctgccccagcagcggctacagactggcccccaacggcagaaactgccaggacatcgacgagtgcgtgaccggcatccacaactgcagcatcaacgagacctgcttcaacatccagggcggcttcagatgcctggccttcgagtgccccgagaactacagaagaagcgccgccacccagaagagcaagaagggcagacagaacacccccgccggcagcagcaaggaggactgcagagtgctgccctggaagcagggcctggaggacacccacctggacgcctacctgccctgctgcagaagattcaccagacccgaggagatcatcttcctgagagccatcacccccccccaccccgccagccaggccaacatcatcttcgacatcaccgagggcaacctgagagacagcttcgacatcatcaagagatacatggacggcatgaccgtgggcgtggtgagacaggtgagacccatcgtgggccccttccacgccgtgctgaagctggagatgaactacgtggtgggcggcgtggtgagccacagaaacgtggtgaacgtgcacatcttcgtgagcgagtactggttctag

SEQ ID NO: 81704 - DNA, 2166 bp, synthetic construct
  misc_feature 1..2166: note = Description of Artificial Sequence: Synthetic coding sequence
  source 1..2166: mol_type = other DNA
atggagagagccgcccccagcagaagagtgcccctgcccctgctgctgctgggcggcctggccctgctggccgccggcgtggacgccgacgtgctgctggaggcctgctgcgccgacggccacagaatggccacccaccagaaggactgcagcctgccctacgccaccgagagcaaggagtgcagagccgtgggcctggccagcctgtgccaggacctgaacggcgcctgggccgtgtggaaggtgggcagagccagccaggccgagggcaccgccagcgccagagcccagagaagaggcatggtgcaggagcagtgctgccacagccagctggaggagctgcactgcgccaccggcatcagcctggccaacgagcaggacagatgcgccaccccccacggcgacaacgccagcctggaggccaccttcgtgaagagatgctgccactgctgcctgctgggcagagccgcccaggcccagggccagagctgcgagtacagcctgatggtgggctaccagtgcggccaggtgttccaggcctgctgcgtgaagagccaggagaccggcgacctggacgtgggcggcctgcaggagaccgacaagatcatcgaggtggaggaggagcaggaggacccctacctgaacgacagatgcagaggcggcggcccctgcaagcagcagtgcagagacaccggcgacgaggtggtgtgcagctgcttcgtgggctaccagctgctgagcgacggcgtgagctgcgaggacgtgaacgagtgcatcaccggcagccacagctgcagactgggcgagagctgcatcaacaccgtgggcagcttcagatgccagagagacagcagctgcggcaccggctacgagctgaccgaggacaacagctgcaaggacatcgacgagtgcgagagcggcatccacaactgcctgcccgacttcatctgccagaacaccctgggcagcttcagatgcagacccaagctgcagtgcaagagcggcttcatccaggacgccctgggcaactgcatcgacatcaacgagtgcctgagcatcagcgccccctgccccatcggccacacctgcatcaacaccgagggcagctacacctgccagaagaacgtgcccaactgcggcagaggctaccacctgaacgaggagggcaccagatgcgtggacgtggacgagtgcgccccccccgccgagccctgcggcaagggccacagatgcgtgaacagccccggcagcttcagatgcgagtgcaagaccggctactacttcgacggcatcagcagaatgtgcgtggacgtgaacgagtgccagagataccccggcagactgtgcggccacaagtgcgagaacaccctgggcagctacctgtgcagctgcagcgtgggcttcagactgagcgtggacggcagaagctgcgaggacatcaacgagtgcagcagcagcccctgcagccaggagtgcgccaacgtgtacggcagctaccagtgctactgcagaagaggctaccagctgagcgacgtggacggcgtgacctgcgaggacatcgacgagtgcgccctgcccaccggcggccacatctgcagctacagatgcatcaacatccccggcagcttccagtgcagctgccccagcagcggctacagactggcccccaacggcagaaactgccaggacatcgacgagtgcgtgaccggcatccacaactgcagcatcaacgagacctgcttcaacatccagggcggcttcagatgcctggccttcgagtgccccgagaactacagaagaagcgccgccaccagatgcgagagactgccctgccacgagaacagagagtgcagcaagctgcccctgagaatcacctactaccacctgagcttccccaccaacatccaggcccccgccgtggtgttcagaatgggccccagcagcgccgtgcccggcgacagcatgcagctggccatcaccggcggcaacgaggagggcttcttcaccaccagaaaggtgagcccccacagcggcgtggtggccctgaccaagcccgtgcccgagcccagagacctgctgctgaccgtgaagatggacctgagcagacacggcaccgtgagcagcttcgtggccaagctgttcatcttcgtgagcgccgagctgtag

SEQ ID NO: 81705 - DNA, 570 bp, synthetic construct
  misc_feature 1..570: note = Description of Artificial Sequence: Synthetic coding sequence
  source 1..570: mol_type = other DNA
atgaacagctacaccagaggcagcagaagacccagcgccaaggccgccagccccgccgccagcgtgaccagcagagtgagccccagcggccccggcgtgcccgtggacgccgacgtgctgctggaggcctgctgcgccgacggccacagaatggccacccaccagaaggactgcagcctgccctacgccaccgagagcaaggagtgcagaatggtgcaggagcagtgctgccacagccagctggaggagctgcactgcgccaccggcatcagcctggccaacgagcaggacagatgcgccaccccccacggcgacaacgccagcctggaggccaccttcgtgaagagatgctgccactgctgcctgctgggcagagccgcccaggcccagggccagagctgcgagtacagcctgatggtgggctaccagtgcggccaggtgttccaggcctgctgcgtgaagagccaggagaccggcgacctggacgtgggcggcctgcaggagaccgacaagatcatcgaggtggaggaggagcaggaggacccctacctgaacgacagatgcagatag

SEQ ID NO: 81706 - DNA, 81 bp, synthetic construct
  misc_feature 1..81: note = Description of Artificial Sequence: Synthetic coding sequence
  source 1..81: mol_type = other DNA
atggccacccaccagaaggactgcagcctgccctacgccaccgagagcaaggagtgcagaatggtgcaggagcagtgctag

SEQ ID NO: 81707 - DNA, 1806 bp, synthetic construct
  misc_feature 1..1806: note = Description of Artificial Sequence: Synthetic coding sequence
  source 1..1806: mol_type = other DNA
atggagagagccgcccccagcagaagagtgcccctgcccctgctgctgctgggcggcctggccctgctggccgccggcgtggacgccgacgtgctgctggaggcctgctgcgccgacggccacagaatggccacccaccagaaggactgcagcctgccctacgccaccgagagcaaggagtgcagaatggtgcaggagcagtgctgccacagccagctggaggagctgcactgcgccaccggcatcagcctggccaacgagcaggacagatgcgccaccccccacggcgacaacgccagcctggaggccaccttcgtgaagagatgctgccactgctgcctgctgggcagagccgcccaggcccagggccagagctgcgagtacagcctgatggtgggctaccagtgcggccaggtgttccaggcctgctgcgtgaagagccaggagaccggcgacctggacgtgggcggcctgcaggagaccgacaagatcatcgaggtggaggaggagcaggaggacccctacctgaacgacagatgcagaggcggcggcccctgcaagcagcagtgcagagacaccggcgacgaggtggtgtgcagctgcttcgtgggctaccagctgctgagcgacggcgtgagctgcgaggacgtgaacgagtgcatcaccggcagccacagctgcagactgggcgagagctgcatcaacaccgtgggcagcttcagatgccagagagacagcagctgcggcaccggctacgagctgaccgaggacaacagctgcaaggacatcgacgagtgcgagagcggcatccacaactgcctgcccgacttcatctgccagaacaccctgggcagcttcagatgcagacccaagctgcagtgcaagagcggcttcatccaggacgccctgggcaactgcatcgacatcaacgagtgcctgagcatcagcgccccctgccccatcggccacacctgcatcaacaccgagggcagctacacctgccagaagaacgtgcccaactgcggcagaggctaccacctgaacgaggagggcaccagatgcgtggacgtggacgagtgcgccccccccgccgagccctgcggcaagggccacagatgcgtgaacagccccggcagcttcagatgcgagtgcaagaccggctactacttcgacggcatcagcagaatgtgcgtggacgtgaacgagtgccagagataccccggcagactgtgcggccacaagtgcgagaacaccctgggcagctacctgtgcagctgcagcgtgggcttcagactgagcgtggacggcagaagctgcgaggacatcaacgagtgcagcagcagcccctgcagccaggagtgcgccaacgtgtacggcagctaccagtgctactgcagaagaggctaccagctgagcgacgtggacggcgtgacctgcgaggacatcgacgagtgcgccctgcccaccggcggccacatctgcagctacagatgcatcaacatccccggcagcttccagtgcagctgccccagcagcggctacagactggcccccaacggcagaaactgccaggacatcgacgagtgcgtgaccggcatccacaactgcagcatcaacgagacctgcttcaacatccagggcggcttcagatgcctggccttcgagtgccccgagaactacagaagaagcgccgccacccagaagagcaagaagggcagacagaacacccccgccggcagcagcaaggaggactgcagagtgctgccctggaagcagggcctggaggacacccacctggacgcctag

SEQ ID NO: 81708 - DNA, 198 bp, synthetic construct
  misc_feature 1..198: note = Description of Artificial Sequence: Synthetic coding sequence
  source 1..198: mol_type = other DNA
atggccacccaccagaaggactgcagcctgccctacgccaccgagagcaaggagtgcagaatggtgcaggagcagtgctgccacagccagctggaggagctgcactgcgccaccggcatcagcctggccaacgagcaggacagatgcgccaccccccacggcgacaacgccagcctggaggccaccttcgtgaagtag

SEQ ID NO: 81709 - DNA, 546 bp, synthetic construct
  misc_feature 1..546: note = Description of Artificial Sequence: Synthetic coding sequence
  source 1..546: mol_type = other DNA
tgcagaatggtgcaggagcagtgctgccacagccagctggaggagctgcactgcgccaccggcatcagcctggccaacgagcaggacagatgcgccaccccccacggcgacaacgccagcctggaggccaccttcgtgaagagatgctgccactgctgcctgctgggcagagccgcccaggcccagggccagagctgcgagtacagcctgatggtgggctaccagtgcggccaggtgttccaggcctgctgcgtgaagagccaggagaccggcgacctggacgtgggcggcctgcaggagaccggcggcggcccctgcaagcagcagtgcagagacaccggcgacgaggtggtgtgcagctgcttcgtgggctaccagctgctgagcgacggcgtgagctgcgaggacgtgaacgagtgcatcaccggcagccacagctgcagactgggcgagagctgcatcaacaccgtgggcagcttcagatgccagagagacagcagctgcggcaccggctacgagctgaccgaggacaacagctgcaagtag

SEQ ID NO: 81710 - DNA, 420 bp, synthetic construct
  misc_feature 1..420: note = Description of Artificial Sequence: Synthetic coding sequence
  source 1..420: mol_type = other DNA
atggccacccaccagaaggactgcagcctgccctacgccaccgagagcaaggagtgcagaatggtgcaggagcagtgctgccacagccagctggaggagctgcactgcgccaccggcatcagcctggccaacgagcaggacagatgcgccaccccccacggcgacaacgccagcctggaggccaccttcgtgaagagatgctgccactgctgcctgctgggcagagccgcccaggcccagggccagagctgcgagtacagcctgatggtgggctaccagtgcggccaggtgttccaggcctgctgcgtgaagagccaggagaccggcgacctggacgtgggcggcctgcaggagaccgacaagatcatcgaggtggaggaggagcaggaggacccctacctgaacgacagatgcagatag

SEQ ID NO: 81711 - DNA, 519 bp, synthetic construct
  misc_feature 1..519: note = Description of Artificial Sequence: Synthetic coding sequence
  source 1..519: mol_type = other DNA
atggagagagccgcccccagcagaagagtgcccctgcccctgctgctgctgggcggcctggccctgctggccgccggcgtggacgccgacgtgctgctggaggcctgctgcgccgacggccacagaatggccacccaccagaaggactgcagcctgccctacgccaccgagagcaaggagtgcagaatggtgcaggagcagtgctgccacagccagctggaggagctgcactgcgccaccggcatcagcctggccaacgagcaggacagatgcgccaccccccacggcgacaacgccagcctggaggccaccttcgtgaagagatgctgccactgctgcctgctgggcagagccgcccaggcccagggccagagctgcgagtacagcctgatggtgggctaccagtgcggccaggtgttccaggcctgctgcgtgaagagccaggagaccggcgacctggacgtgggcggcctgcaggagaccggcggcggcccctgcaagcagcagtgcagagactag

SEQ ID NO: 81712 - DNA, 3555 bp, synthetic construct
  misc_feature 1..3555: note = Description of Artificial Sequence: Synthetic coding sequence
  source 1..3555: mol_type = other DNA
atggtgctgctgtgggagcccgccggcgcctggctggccctgggcctggccctggccctgggccccagcgtggccgccgccgcccccagacaggactgcaccggcgtggagtgcccccccctggagaactgcatcgaggaggccctggagcccggcgcctgctgcgccacctgcgtgcagcagggctgcgcctgcgagggctaccagtactacgactgcctgcagggcggcttcgtgagaggcagagtgcccgccggccagagctacttcgtggacttcggcagcaccgagtgcagctgcccccccggcggcggcaagatcagctgccagttcatgctgtgccccgagctgccccccaactgcatcgaggccgtggtggtggccgacagctgcccccagtgcggccaggtgggctgcgtgcacgccggccacaagtacgccgccggccacaccgtgcacctgcccccctgcagagcctgccactgccccgacgccggcggcgagctgatctgctaccagctgcccggctgccacggcaacttcagcgacgccgaggagggcgaccccgagagacactacgaggacccctacagctacgaccaggaggtggccgaggtggaggccgccaccgccctgggcggcgaggtgcaggccggcgccgtgcaggccggcgccggcggcccccccgccgccctgggcggcggcagccagcccctgagcaccatccaggcccccccctggcccgccgtgctgcccagacccaccgccgccgccgccctgggcccccccgcccccgtgcaggccaaggccagaagagtgaccgaggacagcgaggaggaggaggaggaggaggaggagagagaggagatggccgtgaccgagcagctggccgccggcggccacagaggcctggacggcctgcccaccaccgcccccgccggccccagcctgcccatccaggaggagagagccgaggccggcgccagagccgaggccggcgccagacccgaggagaacctgatcctggacgcccaggccaccagcagaagcaccggccccgagggcgtgacccacgcccccagcctgggcaaggccgccctggtgcccacccaggccgtgcccggcagccccagagaccccgtgaagcccagcccccacaacatcctgagcaccagcctgcccgacgccgcctggatcccccccaccagagaggtgcccagaaagccccaggtgctgccccacagccacgtggaggaggacaccgaccccaacagcgtgcacagcatccccagaagcagccccgagggcagcaccaaggacctgatcgagacctgctgcgccgccggccagcagtgggccatcgacaacgacgagtgcctggagatccccgagagcggcaccgaggacaacgtgtgcagaaccgcccagagacactgctgcgtgagctacctgcaggagaagagctgcatggccggcgtgctgggcgccaaggagggcgagacctgcggcgccgaggacaacgacagctgcggcatcagcctgtacaagcagtgctgcgactgctgcggcctgggcctgagagtgagagccgagggccagagctgcgagagcaaccccaacctgggctacccctgcaaccacgtgatgctgagctgctgcgagggcgaggagcccctgatcgtgcccgaggtgagaagaccccccgagcccgccgccgcccccagaagagtgagcgaggccgagatggccggcagagaggccctgagcctgggcaccgaggccgagctgcccaacagcctgcccggcgacgaccaggacgagtgcctgctgctgcccggcgagctgtgccagcacctgtgcatcaacaccgtgggcagctaccactgcgcctgcttccccggcttcagcctgcaggacgacggcagaacctgcagacccgagggccaccccccccagcccgaggccccccaggagcccgccctgaagagcgagttcagccaggtggccagcaacaccatccccctgcccctgccccagcccaacacctgcaaggacaacggcccctgcaagcaggtgtgcagcaccgtgggcggcagcgccatctgcagctgcttccccggctacgccatcatggccgacggcgtgagctgcgaggacatcaacgagtgcgtgaccgacctgcacacctgcagcagaggcgagcactgcgtgaacaccctgggcagcttccactgctacaaggccctgacctgcgagcccggctacgccctgaaggacggcgagtgcgaggacgtggacgagtgcgccatgggcacccacacctgccagcccggcttcctgtgccagaacaccaagggcagcttctactgccaggccagacagagatgcatggacggcttcctgcaggaccccgagggcaactgcgtggacatcaacgagtgcaccagcctgagcgagccctgcagacccggcttcagctgcatcaacaccgtgggcagctacacctgccagagaaaccccctgatctgcgccagaggctaccacgccagcgacgacggcaccaagtgcgtggacgtgaacgagtgcgagaccggcgtgcacagatgcggcgagggccaggtgtgccacaacctgcccggcagctacagatgcgactgcaaggccggcttccagagagacgccttcggcagaggctgcatcgacgtgaacgagtgctgggccagccccggcagactgtgccagcacacctgcgagaacaccctgggcagctacagatgcagctgcgccagcggcttcctgctggccgccgacggcaagagatgcgaggacgtgaacgagtgcgaggcccagagatgcagccaggagtgcgccaacatctacggcagctaccagtgctactgcagacagggctaccagctggccgaggacggccacacctgcaccgacatcgacgagtgcgcccagggcgccggcatcctgtgcaccttcagatgcctgaacgtgcccggcagctaccagtgcgcctgccccgagcagggctacaccatgaccgccaacggcagaagctgcaaggacgtggacgagtgcgccctgggcacccacaactgcagcgaggccgagacctgccacaacatccagggcagcttcagatgcctgagattcgagtgcccccccaactacgtgcaggtgagcaagaccaagtgcgagagaaccacctgccacgacttcctggagtgccagaacagccccgccagaatcacccactaccagctgaacttccagaccggcctgctggtgcccgcccacatcttcagaatcggccccgcccccgccttcaccggcgacaccatcgccctgaacatcatcaagggcaacgaggagggctacttcggcaccagaagactgaacgcctacaccggcgtggtgtacctgcagagagccgtgctggagcccagagacttcgccctggacgtggagatgaagctgtggagacagggcagcgtgaccaccttcctggccaagatgcacatcttcttcaccaccttcgccctgtag

SEQ ID NO: 81713 - DNA, 3696 bp, synthetic construct
  misc_feature 1..3696: note = Description of Artificial Sequence: Synthetic coding sequence
  source 1..3696: mol_type = other DNA
atggtgctgctgtgggagcccgccggcgcctggctggccctgggcctggccctggccctgggccccagcgtggccgccgccgcccccagacaggactgcaccggcgtggagtgcccccccctggagaactgcatcgaggaggccctggagcccggcgcctgctgcgccacctgcgtgcagcagggctgcgcctgcgagggctaccagtactacgactgcctgcagggcggcttcgtgagaggcagagtgcccgccggccagagctacttcgtggacttcggcagcaccgagtgcagctgcccccccggcggcggcaagatcagctgccagttcatgctgtgccccgagctgccccccaactgcatcgaggccgtggtggtggccgacagctgcccccagtgcggccaggtgggctgcgtgcacgccggccacaagtacgccgccggccacaccgtgcacctgcccccctgcagagcctgccactgccccgacgccggcggcgagctgatctgctaccagctgcccggctgccacggcaacttcagcgacgccgaggagggcgaccccgagagacactacgaggacccctacagctacgaccaggaggtggccgaggtggaggccgccaccgccctgggcggcgaggtgcaggccggcgccgtgcaggccggcgccggcggcccccccgccgccctgggcggcggcagccagcccctgagcaccatccaggcccccccctggcccgccgtgctgcccagacccaccgccgccgccgccctgggcccccccgcccccgtgcaggccaaggccagaagagtgaccgaggacagcgaggaggaggaggaggaggaggaggagagagaggagatggccgtgaccgagcagctggccgccggcggccacagaggcctggacggcctgcccaccaccgcccccgccggccccagcctgcccatccaggaggagagagccgaggccggcgccagagccgaggccggcgccagacccgaggagaacctgatcctggacgcccaggccaccagcagaagcaccggccccgagggcgtgacccacgcccccagcctgggcaaggccgccctggtgcccacccaggccgtgcccggcagccccagagaccccgtgaagcccagcccccacaacatcctgagcaccagcctgcccgacgccgcctggatcccccccaccagagaggtgcccagaaagccccaggtgctgccccacagccacgtggaggaggacaccgaccccaacagcgtgcacagcatccccagaagcagccccgagggcagcaccaaggacctgatcgagacctgctgcgccgccggccagcagtgggccatcgacaacgacgagtgcctggagatccccgagagcggcaccgaggacaacgtgtgcagaaccgcccagagacactgctgcgtgagctacctgcaggagaagagctgcatggccggcgtgctgggcgccaaggagggcgagacctgcggcgccgaggacaacgacagctgcggcatcagcctgtacaagcagtgctgcgactgctgcggcctgggcctgagagtgagagccgagggccagagctgcgagagcaaccccaacctgggctacccctgcaaccacgtgatgctgagctgctgcgagggcgaggagcccctgatcgtgcccgaggtgagaagaccccccgagcccgccgccgcccccagaagagtgagcgaggccgagatggccggcagagaggccctgagcctgggcaccgaggccgagctgcccaacagcctgcccggcgacgaccaggacgagtgcctgctgctgcccggcgagctgtgccagcacctgtgcatcaacaccgtgggcagctaccactgcgcctgcttccccggcttcagcctgcaggacgacggcagaacctgcagacccgagggccaccccccccagcccgaggccccccaggagcccgccctgaagagcgagttcagccaggtggccagcaacaccatccccctgcccctgccccagcccaacacctgcaaggacaacggcccctgcaagcaggtgtgcagcaccgtgggcggcagcgccatctgcagctgcttccccggctacgccatcatggccgacggcgtgagctgcgaggaccaggacgagtgcctgatgggcgcccacgactgcagcagaagacagttctgcgtgaacaccctgggcagcttctactgcgtgaaccacaccgtgctgtgcgccgacggctacatcctgaacgcccacagaaagtgcgtggacatcaacgagtgcgtgaccgacctgcacacctgcagcagaggcgagcactgcgtgaacaccctgggcagcttccactgctacaaggccctgacctgcgagcccggctacgccctgaaggacggcgagtgcgaggacgtggacgagtgcgccatgggcacccacacctgccagcccggcttcctgtgccagaacaccaagggcagcttctactgccaggccagacagagatgcatggacggcttcctgcaggaccccgagggcaactgcgtggacatcaacgagtgcaccagcctgagcgagccctgcagacccggcttcagctgcatcaacaccgtgggcagctacacctgccagagaaaccccctgatctgcgccagaggctaccacgccagcgacgacggcaccaagtgcgtggacgtgaacgagtgcgagaccggcgtgcacagatgcggcgagggccaggtgtgccacaacctgcccggcagctacagatgcgactgcaaggccggcttccagagagacgccttcggcagaggctgcatcgacgtgaacgagtgctgggccagccccggcagactgtgccagcacacctgcgagaacaccctgggcagctacagatgcagctgcgccagcggcttcctgctggccgccgacggcaagagatgcgaggacgtgaacgagtgcgaggcccagagatgcagccaggagtgcgccaacatctacggcagctaccagtgctactgcagacagggctaccagctggccgaggacggccacacctgcaccgacatcgacgagtgcgcccagggcgccggcatcctgtgcaccttcagatgcctgaacgtgcccggcagctaccagtgcgcctgccccgagcagggctacaccatgaccgccaacggcagaagctgcaaggacgtggacgagtgcgccctgggcacccacaactgcagcgaggccgagacctgccacaacatccagggcagcttcagatgcctgagattcgagtgcccccccaactacgtgcaggtgagcaagaccaagtgcgagagaaccacctgccacgacttcctggagtgccagaacagccccgccagaatcacccactaccagctgaacttccagaccggcctgctggtgcccgcccacatcttcagaatcggccccgcccccgccttcaccggcgacaccatcgccctgaacatcatcaagggcaacgaggagggctacttcggcaccagaagactgaacgcctacaccggcgtggtgtacctgcagagagccgtgctggagcccagagacttcgccctggacgtggagatgaagctgtggagacagggcagcgtgaccaccttcctggccaagatgcacatcttcttcaccaccttcgccctgtag

SEQ ID NO: 81714 - DNA, 480 bp, synthetic construct
  misc_feature 1..480: note = Description of Artificial Sequence: Synthetic coding sequence
  source 1..480: mol_type = other DNA
atggtgctgctgtgggagcccgccggcgcctggctggccctgggcctggccctggccctgggccccagcgtggccgccgccgcccccagacaggactgcaccggcgtggagtgcccccccctggagaactgcatcgaggaggccctggagcccggcgcctgctgcgccacctgcgtgcagcagggctgcgcctgcgagggctaccagtactacgactgcctgcagggcggcttcgtgagaggcagagtgcccgccggccagagctacttcgtggacttcggcagcaccgagtgcagctgcccccccggcggcggcaagatcagctgccagttcatgctgtgccccgagctgccccccaactgcatcgaggccgtggtggtggccgacagctgcccccagtgcggccaggtgggctgcgtgcacgccggccacaagtacgccgccggccacaccgtgcacctgcccccctgcagagcctag

SEQ ID NO: 81715 - DNA, 3696 bp, synthetic construct; identical to SEQ ID NO: 81713
  misc_feature 1..3696: note = Description of Artificial Sequence: Synthetic coding sequence
  source 1..3696: mol_type = other DNA

SEQ ID NO: 81716 - DNA, 3633 bp, synthetic construct
  misc_feature 1..3633: note = Description of Artificial Sequence: Synthetic coding sequence
  source 1..3633: mol_type = other DNA
atggagaccagcctgagcctggagagcggccaccacggcagctacagaagaggcgacagacccggcctggcctggaccatggtgctgctgtgggagcccgccggcgcctggctggccctgggcctggccctggccctgggccccagcgtggccgccgccgcccccagacaggactgcaccggcgtggagtgcccccccctggagaactgcatcgaggaggccctggagcccggcgcctgctgcgccacctgcgtgcagcagggctgcgcctgcgagggctaccagtactacgactgcctgcagggcggcttcgtgagaggcagagtgcccgccggccagagctacttcgtggacttcggcagcaccgagtgcagctgcccccccggcggcggcaagatcagctgccagttcatgctgtgccccgagctgccccccaactgcatcgaggccgtggtggtggccgacagctgcccccagtgcggccaggtgggctgcgtgcacgccggccacaagtacgccgccggccacaccgtgcacctgcccccctgcagagcctgccactgccccgacgccggcggcgagctgatctgctaccagctgcccggctgccacggcaacttcagcgacgccgaggagggcgaccccgagagacactacgaggacccctacagctacgaccaggaggtggccgaggtggaggccgccaccgccctgggcggcgaggtgcaggccggcgccgtgcaggccggcgccggcggcccccccgccgccctgggcggcggcagccagcccctgagcaccatccaggcccccccctggcccgccgtgctgcccagacccaccgccgccgccgccctgggcccccccgcccccgtgcaggccaaggccagaagagtgaccgaggacagcgaggaggaggaggaggaggaggaggagagagaggagatggccgtgaccgagcagctggccgccggcggccacagaggcctggacggcctgcccaccaccgcccccgccggccccagcctgcccatccaggaggagagagccgaggccggcgccagagccgaggccggcgccagacccgaggagaacctgatcctggacgcccaggccaccagcagaagcaccggccccgagggcgtgacccacgcccccagcctgggcaaggccgccctggtgcccacccaggccgtgcccggcagccccagagaccccgtgaagcccagcccccacaacatcctgagcaccagcctgcccgacgccgcctggatcccccccaccagagaggtgcccagaaagccccaggtgctgccccacagccacgtggaggaggacaccgaccccaacagcgtgcacagcatccccagaagcagccccgagggcagcaccaaggacctgatcgagacctgctgcgccgccggccagcagtgggccatcgacaacgacgagtgcctggagatccccgagagcggcaccgaggacaacgtgtgcagaaccgcccagagacactgctgcgtgagctacctgcaggagaagagctgcatggccggcgtgctgggcgccaaggagggcgagacctgcggcgccgaggacaacgacagctgcggcatcagcctgtacaagcagtgctgcgactgctgcggcctgggcctgagagtgagagccgagggccagagctgcgagagcaaccccaacctgggctacccctgcaaccacgtgatgctgagctgctgcgagggcgaggagcccctgatcgtgcccgaggtgagaagaccccccgagcccgccgccgcccccagaagagtgagcgaggccgagatggccggcagagaggccctgagcctgggcaccgaggccgagctgcccaacagcctgcccggcgacgaccaggacgagtgcctgctgctgcccggcgagctgtgccagcacctgtgcatcaacaccgtgggcagctaccactgcgcctgcttccccggcttcagcctgcaggacgacggcagaacctgcagacccgagggccaccccccccagcccgaggccccccaggagcccgccctgaagagcgagttcagccaggtggccagcaacaccatccccctgcccctgccccagcccaacacctgcaaggacaacggcccctgcaagcaggtgtgcagcaccgtgggcggcagcgccatctgcagctgcttccccggctacgccatcatggccgacggcgtgagctgcgaggacatcaacgagtgcgtgaccgacctgcacacctgcagcagaggcgagcactgcgtgaacaccctgggcagcttccactgctacaaggccctgacctgcgagcccggctacgccctgaaggacggcgagtgcgaggacgtggacgagtgcgccatgggcacccacacctgccagcccggcttcctgtgccagaacaccaagggcagcttctactgccaggccagacagagatgcatggacggcttcctgcaggaccccgagggcaactgcgtggacatcaacgagtgcaccagcctgagcgagccctgcagacccggcttcagctgcatcaacaccgtgggcagctacacctgccagagaaaccccctgatctgcgccagaggctaccacgccagcgacgacggcaccaagtgcgtggacgtgaacgagtgcgagaccggcgtgcacagatgcggcgagggccaggtgtgccacaacctgcccggcagctacagatgcgactgcaaggccggcttccagagagacgccttcggcagaggctgcatcgacgtgaacgagtgctgggccagccccggcagactgtgccagcacacctgcgagaacaccctgggcagctacagatgcagctgcgccagcggcttcctgctggccgccgacggcaagagatgcgaggacgtgaacgagtgcgaggcccagagatgcagccaggagtgcgccaacatctacggcagctaccagtgctactgcagacagggctaccagctggccgaggacggccacacctgcaccgacatcgacgagtgcgcccagggcgccggcatcctgtgcaccttcagatgcctgaacgtgcccggcagctaccagtgcgcctgccccgagcagggctacaccatgaccgccaacggcagaagctgcaaggacgtggacgagtgcgccctgggcacccacaactgcagcgaggccgagacctgccacaacatccagggcagcttcagatgcctgagattcgagtgcccccccaactacgtgcaggtgagcaagaccaagtgcgagagaaccacctgccacgacttcctggagtgccagaacagccccgccagaatcacccactaccagctgaacttccagaccggcctgctggtgcccgcccacatcttcagaatcggccccgcccccgccttcaccggcgacaccatcgccctgaacatcatcaagggcaacgaggagggctacttcggcaccagaagactgaacgcctacaccggcgtggtgtacctgcagagagccgtgctggagcccagagacttcgccctggacgtggagatgaagctgtggagacagggcagcgtgaccaccttcctggccaagatgcacatcttcttcaccaccttcgccctgtag

SEQ ID NO: 81717 - DNA, 1347 bp, synthetic construct
  misc_feature 1..1347: note = Description of Artificial Sequence: Synthetic coding sequence
  source 1..1347: mol_type = other DNA
atgcccggcatcaagagaatcctgaccgtgaccatcctggccctgtgcctgcccagccccggcaacgcccaggcccagtgcaccaacggcttcgacctggacagacagagcggccagtgcctggacatcgacgagtgcagaaccatccccgaggcctgcagaggcgacatgatgtgcgtgaaccagaacggcggctacctgtgcatccccagaaccaaccccgtgtacagaggcccctacagcaacccctacagcaccccctacagcggcccctaccccgccgccgccccccccctgagcgcccccaactaccccaccatcagcagacccctgatctgcagattcggctaccagatggacgagagcaaccagtgcgtggacgtggacgagtgcgccaccgacagccaccagtgcaaccccacccagatctgcatcaacaccgagggcggctacacctgcagctgcaccgacggctactggctgctggagggccagtgcctggacatcgacgagtgcagatacggctactgccagcagctgtgcgccaacgtgcccggcagctacagctgcacctgcaaccccggcttcaccctgaacgaggacggcagaagctgccaggacgtgaacgagtgcgccaccgagaacccctgcgtgcagacctgcgtgaacacctacggcagcttcatctgcagatgcgaccccggctacgagctggaggaggacggcgtgcactgcagcgacatggacgagtgcagcttcagcgagttcctgtgccagcacgagtgcgtgaaccagcccggcacctacttctgcagctgcccccccggctacatcctgctggacgacaacagaagctgccaggacatcaacgagtgcgagcacagaaaccacacctgcaacctgcagcagacctgctacaacctgcagggcggcttcaagtgcatcgaccccatcagatgcgaggagccctacctgagaatcagcgacaacagatgcatgtgccccgccgagaaccccggctgcagagaccagcccttcaccatcctgtacagagacatggacgtggtgagcggcagaagcgtgcccgccgacatcttccagatgcaggccaccaccagataccccggcgcctactacatcttccagatcaagagcggcaacgagggcagagagttctacatgagacagaccggccccatcagcgccaccctggtgatgaccagacccatcaagggccccagagagatccagctggacctggagatgatcaccgtgaacaccgtgatcaacttcagaggcagcagcgtgatcagactgagaatctacgtgagccagtaccccttctag

SEQ ID NO: 81718 - DNA, 276 bp, synthetic construct
  misc_feature 1..276: note = Description of Artificial Sequence: Synthetic coding sequence
  source 1..276: mol_type = other DNA
atgcccggcatcaagagaatcctgaccgtgaccatcctggccctgtgcctgcccagccccggcaacgcccaggcccagtgcaccaacggcttcgacctggacagacagagcggccagtgcctggacatcgacgagtgcagaaccatccccgaggcctgcagaggcgacatgatgtgcgtgaaccagaacggcggctacctgtgcatccccagaaccaaccccgtgtacagaggcccctacagcaacccctacagcaccccctacagcggcccctag

SEQ ID NO: 81719 - DNA, 1320 bp, synthetic construct
  misc_feature 1..1320: note = Description of Artificial Sequence: Synthetic coding sequence
  source 1..1320: mol_type = other DNA
atggtgcccagcagccccagagccctgttcctgctgctgctgatcctggcctgccccgagcccagagccagccagaactgcctgagcaagcagcagctgctgagcgccatcagacagctgcagcagctgctgaagggccaggagaccagattcgccgagggcatcagacacatgaagagcagactggccgccctgcagaacagcgtgggcagagtgggccccgacgccctgcccgtgagctgccccgccctgaacacccccgccgacggcagaaagttcggcagcaagtacctggtggaccacgaggtgcacttcacctgcaaccccggcttcagactggtgggccccagcagcgtggtgtgcctgcccaacggcacctggaccggcgagcagccccactgcagaggcatcagcgagtgcagcagccagccctgccagaacggcggcacctgcgtggagggcgtgaaccagtacagatgcatctgcccccccggcagaaccggcaacagatgccagcaccaggcccagaccgccgcccccgagggcagcgtggccggcgacagcgccttcagcagagcccccagatgcgcccaggtggagagagcccagcactgcagctgcgaggccggcttccacctgagcggcgccgccggcgacagcgtgtgccaggacgtgaacgagtgcgagctgtacggccaggagggcagacccagactgtgcatgcacgcctgcgtgaacacccccggcagctacagatgcacctgccccggcggctacagaaccctggccgacggcaagagctgcgaggacgtggacgagtgcgtgggcctgcagcccgtgtgcccccagggcaccacctgcatcaacaccggcggcagcttccagtgcgtgagccccgagtgccccgagggcagcggcaacgtgagctacgtgaagaccagccccttccagtgcgagagaaacccctgccccatggacagcagaccctgcagacacctgcccaagaccatcagcttccactacctgagcctgcccagcaacctgaagacccccatcaccctgttcagaatggccaccgccagcgcccccggcagagccggccccaacagcctgagattcggcatcgtgggcggcaacagcagaggccacttcgtgatgcagagaagcgacagacagaccggcgacctgatcctggtgcagaacctggagggcccccagaccctggaggtggacgtggacatgagcgagtacctggacagaagcttccaggccaaccacgtgagcaaggtgaccatcttcgtgagcccctacgacttctag

SEQ ID NO: 81720 - DNA, 1182 bp, synthetic construct
  misc_feature 1..1182: note = Description of Artificial Sequence: Synthetic coding sequence
  source 1..1182: mol_type = other DNA
atggtgcccagcagccccagagccctgttcctgctgctgctgatcctggcctgccccgagcccagagccagccagaactgcctgagcaagcagcagctgctgagcgccatcagacagctgcagcagctgctgaagggccaggagaccagattcgccgagggcatcagacacatgaagagcagactggccgccctgcagaacagcgtgggcagagtgggccccgacgccctgcccgtgagctgccccgccctgaacacccccgccgacggcagaaagttcggcagcaagtacctggtggaccacgaggtgcacttcacctgcaaccccggcttcagactggtgggccccagcagcgtggtgtgcctgcccaacggcacctggaccggcgagcagccccactgcagaggcatcagcgagtgcagcagccagccctgccagaacggcggcacctgcgtggagggcgtgaaccagtacagatgcatctgcccccccggcagaaccggcaacagatgccagcaccaggcccagaccgacgtgaacgagtgcgagctgtacggccaggagggcagacccagactgtgcatgcacgcctgcgtgaacacccccggcagctacagatgcacctgccccggcggctacagaaccctggccgacggcaagagctgcgaggacgtggacgagtgcgtgggcctgcagcccgtgtgcccccagggcaccacctgcatcaacaccggcggcagcttccagtgcgtgagccccgagtgccccgagggcagcggcaacgtgagctacgtgaagaccagccccttccagtgcgagagaaacccctgccccatggacagcagaccctgcagacacctgcccaagaccatcagcttccactacctgagcctgcccagcaacctgaagacccccatcaccctgttcagaatggccaccgccagcgcccccggcagagccggccccaacagcctgagattcggcatcgtgggcggcaacagcagaggccacttcgtgatgcagagaagcgacagacagaccggcgacctgatcctggtgcagaacctggagggcccccagaccctggaggtggacgtggacatgagcgagtacctggacagaagcttccaggccaaccacgtgagcaaggtgaccatcttcgtgagcccctacgacttctag

SEQ ID NO: 81721 - DNA, 942 bp, synthetic construct
  misc_feature 1..942: note = Description of Artificial Sequence: Synthetic coding sequence
  source 1..942: mol_type = other DNA
atggagctggacagagccgtgggcgtgctgggcgccgccaccctgctgctgagcttcctgggcatggcctgggccctgcaggccgccgacacctgccccgaggtgaagatggtgggcctggagggcagcgacaagctgaccatcctgagaggctgccccggcctgcccggcgcccccggccccaagggcgaggccggcaccaacggcaagagaggcgagagaggcccccccggcccccccggcaaggccggcccccccggccccaacggcgcccccggcgagccccagccctgcctgaccggccccagaacctgcaaggacctgctggacagaggccacttcctgagcggctggcacaccatctacctgcccgactgcagacccctgaccgtgctgtgcgacatggacaccgacggcggcggctggaccgtgttccagagaagagtggacggcagcgtggacttctacagagactgggccacctacaagcagggcttcggcagcagactgggcgagttctggctgggcaacgacaacatccacgccctgaccgcccagggcaccagcgagctgagagtggacctggtggacttcgaggacaactaccagttcgccaagtacagaagcttcaaggtggccgacgaggccgagaagtacaacctggtgctgggcgccttcgtggagggcagcgccggcgacagcctgaccttccacaacaaccagagcttcagcaccaaggaccaggacaacgacctgaacaccggcaactgcgccgtgatgttccagggcgcctggtggtacaagaactgccacgtgagcaacctgaacggcagatacctgagaggcacccacggcagcttcgccaacggcatcaactggaagagcggcaagggctacaactacagctacaaggtgagcgagatgaaggtgagacccgcctag

SEQ ID NO: 81722 - DNA, 828 bp, synthetic construct
  misc_feature 1..828: note = Description of Artificial Sequence: Synthetic coding sequence
  source 1..828: mol_type = other DNA
atggagctggacagagccgtgggcgtgctgggcgccgccaccctgctgctgagcttcctgggcatggcctgggccctgcaggccgccgacacctgccccggcgagagaggcccccccggcccccccggcaaggccggcccccccggccccaacggcgcccccggcgagccccagccctgcctgaccggccccagaacctgcaaggacctgctggacagaggccacttcctgagcggctggcacaccatctacctgcccgactgcagacccctgaccgtgctgtgcgacatggacaccgacggcggcggctggaccgtgttccagagaagagtggacggcagcgtggacttctacagagactgggccacctacaagcagggcttcggcagcagactgggcgagttctggctgggcaacgacaacatccacgccctgaccgcccagggcaccagcgagctgagagtggacctggtggacttcgaggacaactaccagttcgccaagtacagaagcttcaaggtggccgacgaggccgagaagtacaacctggtgctgggcgccttcgtggagggcagcgccggcgacagcctgaccttccacaacaaccagagcttcagcaccaaggaccaggacaacgacctgaacaccggcaactgcgccgtgatgttccagggcgcctggtggtacaagaactgccacgtgagcaacctgaacggcagatacctgagaggcacccacggcagcttcgccaacggcatcaactggaagagcggcaagggctacaactacagctacaaggtgagcgagatgaaggtgagacccgcctag

SEQ ID NO: 81723 - DNA, 564 bp, synthetic construct
  misc_feature 1..564: note = Description of Artificial Sequence: Synthetic coding sequence
  source 1..564: mol_type = other DNA
atggagctgagcggcgccaccatggccagaggcctggccgtgctgctggtgctgttcctgcacatcaagaacctgcccgcccaggccgccgacacctgccccgaggtgaaggtggtgggcctggagggcagcgacaagctgaccatcctgagaggctgccccggcctgcccggcgcccccggccccaagggcgaggccggcgtgatcggcgagagaggcgagagaggcctgcccggcgcccccggcaaggccggccccgtgggccccaagggcgacgccggccagagccagagctgcgccaccggccccagaaactgcaaggacctgctggacagaggctacttcctgagcggctggcacaccatctacctgcccgactgcagacccctgaccgtgctgtgcgacatggacaccgacggcggcggctggaccgtgttccagagaagaatggacggcagcgtggacttctacagagactgggccgcctacaagcagggcttcggcagccagctgggcgagttctggctgggcaacgacaacatccacgccctgaccgcccagtag

SEQ ID NO: 81724 - DNA, 981 bp, synthetic construct
  misc_feature 1..981: note = Description of Artificial Sequence: Synthetic coding sequence
  source 1..981: mol_type = other DNA
atggagctgagcggcgccaccatggccagaggcctggccgtgctgctggtgctgttcctgcacatcaagaacctgcccgcccaggccgccgacacctgccccgaggtgaaggtggtgggcctggagggcagcgacaagctgaccatcctgagaggctgccccggcctgcccggcgcccccggccccaagggcgaggccggcgtgatcggcgagagaggcgagagaggcctgcccggcgcccccggcaaggccggccccgtgggccccaagggcgacagaggcgagaagggcatgagaggcgagaagggcgacgccggccagagccagagctgcgccaccggccccagaaactgcaaggacctgctggacagaggctacttcctgagcggctggcacaccatctacctgcccgactgcagacccctgaccgtgctgtgcgacatggacaccgacggcggcggctggaccgtgttccagagaagaatggacggcagcgtggacttctacagagactgggccgcctacaagcagggcttcggcagccagctgggcgagttctggctgggcaacgacaacatccacgccctgaccgcccagggcagcagcgagctgagagtggacctggtggacttcgagggcaaccaccagttcgccaagtacaagagcttcaaggtggccgacgaggccgagaagtacaagctggtgctgggcgccttcgtgggcggcagcgccggcaacagcctgaccggccacaacaacaacttcttcagcaccaaggaccaggacaacgacgtgagcagcagcaactgcgccgagaagttccagggcgcctggtggtacgccgactgccacgccagcaacctgaacggcctgtacctgatgggcccccacgagagctacgccaacggcatcaactggagcgccgccaagggctacaagtacagctacaaggtgagcgagatgaaggtgagacccgcctag

SEQ ID NO: 81725 - DNA, 1083 bp, synthetic construct
  misc_feature 1..1083: note = Description of Artificial Sequence: Synthetic coding sequence
  source 1..1083: mol_type = other DNA
atggagctgagcggcgccaccatggccagaggcctggccgtgctgctggtgctgttcctgcacatcaagaacctgcccgcccaggccgccgacacctgccccgaggtgaaggtggtgggcctggagggcagcgacaagctgaccatcctgagaggctgccccggcctgcccggcgcccccggccccaagggcgaggccggcgtgatcggcgagagaggcgagagaggcctgcccggcgcccccggcaaggccggccccgtgggccccaagggcgacagaggcgagaagggcatgagaggcgagaagggcgacgccggccagagccagagctgcgccaccggccccagaaactgcaaggacctgctggacagaggctacttcctgagcggctggcacaccatctacctgcccgactgcagacccctgaccgtgctgtgcgacatggacaccgacggcggcggctggaccgtgttccagagaagaatggacggcagcgtggacttctacagagactgggccgcctacaagcagggcttcggcagccagacccacagccacgacgcccacagctgccccttcgcccccagcagcgtgaagcccccccacgcccacaacctgaccagaggcagaatcatgttcctgaacatgttcaccctgggccagaagagcttcaccagcttcaacgtgtgcttcctgaacaccagcggcttcgaccacttccccgtgagcgtggccagacaggtgttcccctggaacctggtgagcagagaggagagcggccccctgttcagcagatggcactacagatgcagcggcagactgagcgacttctgcgaggacttccccccccccgtgatcgacaccggcagaagcagcccccccccccccagcctgccccacccccccatgccccacagccagcacttcaccctgctggagaagggccacttcggcgtgcagaagaccctgaccaagaagggcgagagcctggtgggcaccttcctgctgcccaccaccgccgagttcatgctgtgggccggctggctgctgggcagagacaagcacctggccctgaccaagtag

SEQ ID NO: 81726 - DNA, 900 bp, synthetic construct
  misc_feature 1..900: note = Description of Artificial Sequence: Synthetic coding sequence
  source 1..900: mol_type = other DNA
atggacctgctgtggatcctgcccagcctgtggctgctgctgctgggcggccccgcctgcctgaagacccaggagcaccccagctgccccggccccagagagctggaggccagcaaggtggtgctgctgcccagctgccccggcgcccccggcagccccggcgagaagggcgcccccggcccccagggcccccccggcccccccggcaagatgggccccaagggcgagcccggcgaccccgtgaacctgctgagatgccaggagggccccagaaactgcagagagctgctgagccagggcgccaccctgagcggctggtaccacctgtgcctgcccgagggcagagccctgcccgtgttctgcgacatggacaccgagggcggcggctggctggtgttccagagaagacaggacggcagcgtggacttcttcagaagctggagcagctacagagccggcttcggcaaccaggagagcgagttctggctgggcaacgagaacctgcaccagctgaccctgcagggcaactgggagctgagagtggagctggaggacttcaacggcaacagaaccttcgcccactacgccaccttcagactgctgggcgaggtggaccactaccagctggccctgggcaagttcagcgagggcaccgccggcgacagcctgagcctgcacagcggcagacccttcaccacctacgacgccgaccacgacagcagcaacagcaactgcgccgtgatcgtgcacggcgcctggtggtacgccagctgctacagaagcaacctgaacggcagatacgccgtgagcgaggccgccgcccacaagtacggcatcgactgggccagcggcagaggcgtgggccacccctacagaagagtgagaatgatgctgagatag

SEQ ID NO: 81727 - DNA, 867 bp, synthetic construct
  misc_feature 1..867: note = Description of Artificial Sequence: Synthetic coding sequence
  source 1..867: mol_type = other DNA
atggacctgctgtggatcctgcccagcctgtggctgctgctgctgggcggccccgcctgcctgaagacccaggagcaccccagctgccccggccccagagagctggaggccagcaaggtggtgctgctgcccagctgccccggcgcccccggcagccccggcgagaagggcgcccccggcccccagggcccccccggcccccccggcaagatgggccccaagggcgagcccggccccagaaactgcagagagctgctgagccagggcgccaccctgagcggctggtaccacctgtgcctgcccgagggcagagccctgcccgtgttctgcgacatggacaccgagggcggcggctggctggtgttccagagaagacaggacggcagcgtggacttcttcagaagctggagcagctacagagccggcttcggcaaccaggagagcgagttctggctgggcaacgagaacctgcaccagctgaccctgcagggcaactgggagctgagagtggagctggaggacttcaacggcaacagaaccttcgcccactacgccaccttcagactgctgggcgaggtggaccactaccagctggccctgggcaagttcagcgagggcaccgccggcgacagcctgagcctgcacagcggcagacccttcaccacctacgacgccgaccacgacagcagcaacagcaactgcgccgtgatcgtgcacggcgcctggtggtacgccagctgctacagaagcaacctgaacggcagatacgccgtgagcgaggccgccgcccacaagtacggcatcgactgggccagcggcagaggcgtgggccacccctacagaagagtgagaatgatgctgagatag

SEQ ID NO: 81728 - DNA, 300 bp, synthetic construct
  misc_feature 1..300: note = Description of Artificial Sequence: Synthetic coding sequence
  source 1..300: mol_type = other DNA
atggacaccgagggcggcggctggctggtgttccagagaagacaggacggcagcgtggacttcttcagaagctggagcagctacagagccggcttcggcaaccaggagagcgagttctggctgggcaacgagaacctgcaccagctgaccctgcagggcaactgggagctgagagtggagctggaggacttcaacggcaacagaaccttcgcccactacgccaccttcagactgctgggcgaggtggaccactaccagctggccctgggcaagttcagcgagggcaccgccggcgagtag

SEQ ID NO: 81729 - DNA, 2094 bp, synthetic construct
  misc_feature 1..2094: note = Description of Artificial Sequence: Synthetic coding sequence
  source 1..2094: mol_type = other DNA
atggccgagaccagccccgagcccagcggccagctggtggtgcacagcgacgcccacagcgacaccgtgctggccagcttcgaggaccagagaaagaagggcttcctgtgcgacatcaccctgatcgtggagaacgtgcacttcagagcccacaaggccctgctggccgccagcagcgagtacttcagcatgatgttcgccgaggagggcgagatcggccagagcatctacatgctggagggcatggtggccgacaccttcggcatcctgctggagttcatctacaccggctacctgcacgccagcgagaagagcaccgagcagatcctggccaccgcccagttcctgaaggtgtacgacctggtgaaggcctacaccgacttccagaacaaccacagcagccccaagcccaccaccctgaacaccgccggcgcccccgtggtggtgatcagcaacaagaagaacgacccccccaagagaaagagaggcagacccaagaaggtgaacaccctgcaggaggagaagagcgagctggccgccgaggaggagatccagctgagagtgaacaacagcgtgcagaacagacagaacttcgtggtgaagggcgacagcggcgtgctgaacgagcagatcgccgccaaggagaaggaggagagcgagcccacctgcgagcccagcagagaggaggagatgcccgtggagaaggacgagaactacgaccccaagaccgaggacggccaggccagccagagcagatacagcaagagaagaatctggagaagcgtgaagctgaaggactacaagctggtgggcgaccaggaggaccacggcagcgccaagagaatctgcggcagaagaaagagacccggcggccccgaggccagatgcaaggactgcggcaaggtgttcaagtacaaccacttcctggccatccaccagagaagccacaccggcgagagacccttcaagtgcaacgagtgcggcaagggcttcgcccagaagcacagcctgcaggtgcacaccagaatgcacaccggcgagagaccctacacctgcaccgtgtgcagcaaggccctgaccaccaagcacagcctgctggagcacatgagcctgcacagcggccagaagagcttcacctgcgaccagtgcggcaagtacttcagccagaacagacagctgaagagccactacagagtgcacaccggccacagcctgcccgagtgcaaggactgccacagaaagttcatggacgtgagccagctgaagaagcacctgagaacccacaccggcgagaagcccttcacctgcgagatctgcggcaagagcttcaccgccaagagcagcctgcagacccacatcagaatccacagaggcgagaagccctacagctgcggcatctgcggcaagagcttcagcgacagcagcgccaagagaagacactgcatcctgcacaccggcaagaagcccttcagctgccccgagtgcaacctgcagttcgccagactggacaacctgaaggcccacctgaagatccacagcaaggagaagcacgccagcgacgccagcagcatcagcggcagcagcaacaccgaggaggtgagaaacatcctgcagctgcagccctaccagctgagcaccagcggcgagcaggagatccagctgctggtgaccgacagcgtgcacaacatcaacttcatgcccggccccagccagggcatcagcatcgtgaccgccgagagcagccagaacatgaccgccgaccaggccgccaacctgaccctgctgacccagcagcccgagcagctgcagaacctgatcctgagcgcccagcaggagcagaccgagcacatccagagcctgaacatgatcgagagccagatgggccccagccagaccgagcccgtgcacgtgatcaccctgagcaaggagaccctggagcacctgcacgcccaccaggagcagaccgaggagctgcacctggccaccagcaccagcgaccccgcccagcacctgcagctgacccaggagcccggcccccccccccccacccaccacgtgccccagcccacccccctgggccaggagcagagctag

SEQ ID NO: 81730 - DNA, 420 bp, synthetic construct
  misc_feature 1..420: note = Description of Artificial Sequence: Synthetic coding sequence
  source 1..420: mol_type = other DNA
atgggccagaagggcagcagcggcctgttcagagccgtgagcgccttcggcgtggtgggcttcgtgagattcctggagggctactacatcgtgctgatcaccaagagaagaaagatggccgacatcggcggccacgccatctacaaggtggaggacaccaacatgatctacatccccaacgacagcgtgagagtgacccaccccgacgaggccagatacctgagaatcttccagaacgtggacctgagcagcaacttctacttcagctacagctacgacctgagccacagcctgcagtacaacctgaccgtgctgagaatgcccctggagatgctgaagagcgagatgacccagaacagacaggagagcttcgacatcttcgaggacgagggcctgatcacccagggcggcagcggctag

SEQ ID NO: 81731 - DNA, 411 bp, synthetic construct
  misc_feature 1..411: note = Description of Artificial Sequence: Synthetic coding sequence
  source 1..411: mol_type = other DNA
tgactgttcgaggagctgtacgaggaccacggcgacaccctgagcctgcagtacggcggcagccagctggtgcacagagtgaagacctacagaaagatcgccccctggacccagcacagcaaggacatcatgcagaccctgagcagatactacagcaacgccttcagcgacgccgacagacaggacagcatcaacctgttcctgggcgtgttccaccccaccgagggcaagccccacctgtgggagctgcccaccgacttctacctgcaccacaagaacaccatgagactgctgcccaccagaagaagctacacctactggtggacccccgaggtgatcaagcacctgcccctgccctacgacgagggcttcctggccagaagccccgccaacctggagtgcagcaactag

SEQ ID NO: 81732 - DNA, 300 bp, synthetic construct
  misc_feature 1..300: note = Description of Artificial Sequence: Synthetic coding sequence
  source 1..300: mol_type = other DNA
atgaccagcagcgccagagacttcatgcccaagaccgtgggcatcgaccccagccccttcaccgtgagaaagcccgacgagaccggcaagagcgtgctgggcaacaagagcaacagagaggaggccgtgctgcagagaaagaccgccgccagcgccccccccccccccagcgaggaggccgtgagcagcagcagcgaggacgacagcggcaccgacagagaggaggagggcagcgtgagccagagaagcacccccgtgaagatgaccgacgccggcgacagcgccaaggtgaccgagtag

SEQ ID NO: 81733 - DNA, 1806 bp, synthetic construct
  misc_feature 1..1806: note = Description of Artificial Sequence: Synthetic coding sequence
  source 1..1806: mol_type = other DNA
atgaccggctacctgagaatcttccagaacgtggacctgagcagcaacttctacttcagctacagctacgacctgagccacagcctgcagtacaacctgaccgtgctgagaatgcccctggagatgctgaagagcgagatgacccagaacagacaggagagcttcgacatcttcgaggacgagggcctgatcacccagggcggcagcgtggaccaggccgaccccttcgcccacgtggccgccctgcacttcgaccagatgttccagagattcggcagccccatcatcatcctgaacctggtgaaggagagagagaagagaaagcacgagagaatcctgagcgaggagctggtggccgccgtgacctacctgaaccagttcctgccccccgagcacaccatcgtgtacatcccctgggacatggccaagtacaccaagagcaagctgtgcaacgtgctggacagactgaacgtgatcgccgagagcgtggtgaagaagaccggcttcttcgtgaacagacccgacagctactgcagcatcctgagacccgacgagaagtggaacgagctgggcggctgcgtgatccccaccggcagactgcagaccggcatcctgagaaccaactgcgtggactgcctggacagaaccaacaccgcccagttcatggtgggcaagtgcgccctggcctaccagctgtacagcctgggcctgatcgacaagcccaacctgcagttcgacaccgacgccgtgagactgttcgaggagctgtacgaggaccacggcgacaccctgagcctgcagtacggcggcagccagctggtgcacagagtgaagacctacagaaagatcgccccctggacccagcacagcaaggacatcatgcagaccctgagcagatactacagcaacgccttcagcgacgccgacagacaggacagcatcaacctgttcctgggcgtgttccaccccaccgagggcaagccccacctgtgggagctgcccaccgacttctacctgcaccacaagaacaccatgagactgctgcccaccagaagaagctacacctactggtggacccccgaggtgatcaagcacctgcccctgccctacgacgaggtgatctgcgccgtgaacctgaagaagctgatcgtgaagaagttccacaagtacgaggaggagatcgacatccacaacgagttcttcagaccctacgagctgagcagcttcgacgacaccttctgcctggccatgaccagcagcgccagagacttcatgcccaagaccgtgggcatcgaccccagccccttcaccgtgagaaagcccgacgagaccggcaagagcgtgctgggcaacaagagcaacagagaggaggccgtgctgcagagaaagaccgccgccagcgccccccccccccccagcgaggaggccgtgagcagcagcagcgaggacgacagcggcaccgacagagaggaggagggcagcgtgagccagagaagcacccccgtgaagatgaccgacgccggcgacagcgccaaggtgaccgagaacgtggtgcagcccatgaaggagctgtacggcatcaacctgagcgacggcctgagcgaggaggacttcagcatctacagcagaacccccatcagcgccttcagccaggacaacatctacgaggtgcagccccccagagtggacagaaagagcaccgagatcttccaggcccacatccaggccagccagggcatcatgcagcccctgggcaaggaggacagcagcatgtacagagagtacatcagaaacagatacctgtag

SEQ ID NO: 81734 - DNA, 714 bp, synthetic construct
  misc_feature 1..714: note = Description of Artificial Sequence: Synthetic coding sequence
  source 1..714: mol_type = other DNA
atgagatacttcctggtgggcagcaacaacgccgagaccaagtacagagtgctgaagatcgacagaaccgagcccaaggacctggtgatcatcgacgacagacacgtgtacacccagcaggaggtgagagagctgctgggcagactggacctgggcaacagaaccaagatgggccagaagggcagcagcggcctgttcagagccgtgagcgccttcggcgtggtgggcttcgtgagattcctggagggctactacatcgtgctgatcaccaagagaagaaagatggccgacatcggcggccacgccatctacaaggtggaggacaccaacatgatctacatccccaacgacagcgtgagagtgacccaccccgacgaggccagatacctgagaatcttccagaacgtggacctgagcagcaacttctacttcagctacagctacgacctgagccacagcctgcagtacaacctgaccgtgctgagaatgcccctggagatgctgaagagcgagatgacccagaacagacaggagagcttcgacatcttcgaggacgagggcctgatcacccagggcggcagcggcgtgttcggcatctgcagcgagccctacatgaagtacgtgtggaacggcgagctgctggacatcatcaagagcaccgtgcacagagactggctgctgtacatcatccacggcttctgcggccagagctag

SEQ ID NO: 81735 - DNA, 969 bp, synthetic construct
  misc_feature 1..969: note = Description of Artificial Sequence: Synthetic coding sequence
  source 1..969: mol_type = other DNA
ctgtaccaggtgagcacccacgagcagagcgagagcgcccacggcagaaccggccccagcaccggcggcagacagagaagcagacacgagcaggccagagacagcagcagacacagcgccagccaggagggccaggacaccatcagaggccaccccggcagcagcagaggcggcagacagggcagccactacgagcagagcgtggacagcagcggccacagcggcagccaccacagccacaccaccagccaggagagaagcgacgtgagcagaggccagagcggcagcagaagcgtgagcagacagaccagaaacgagaagcagagcggcgacggcagcagacacagcggcagcagacaccacgaggccagcagcagagccgacagcagcagacacagccaggtgggccagggccagagcagcggccccagaaccagcagaaaccagggcagcagcgtgagccaggacagcgacagccagggccacagcgaggacagcgagagaagaagcggcagcgccagcagaaaccaccacggcagcgcccaggagcagagcagagacggcagcagacaccccagaagccaccacgaggacagagccggccacggccacagcgccgagagcagcagacagagcggcacccaccacgccgagaacagcagcggcggccaggccgccagcagccacgagcaggccagaagcagcgccggcgagagacacggcagccaccaccagcagagcgccgacagcagcagacacagcggcatcggccacggccaggccagcagcgccgtgagagacagcggccacagaggcagcagcggcagccaggccagcgacagcgagggccacagcgaggacagcgacacccagagcgtgagcgcccacggccaggccggcccccaccagcagagccaccaggagagcaccagaggcagaagcgccggcagaagcggcagaagcggctag

SEQ ID NO: 81736 - DNA, 969 bp, synthetic construct
  misc_feature 1..969: note = Description of Artificial Sequence: Synthetic coding sequence
  source 1..969: mol_type = other DNA
ctgtaccaggtgagcacccacgagcagagcgagagcagccacggctggaccggccccagcaccagaggcagacagggcagcagacacgagcaggcccaggacagcagcagacacagcgccagccaggacggccaggacaccatcagaggccaccccggcagcagcagaggcggcagacagggctaccaccacgagcacagcgtggacagcagcggccacagcggcagccaccacagccacaccaccagccagggcagaagcgacgccagcagaggccagagcggcagcagaagcgccagcagaaccaccagaaacgaggagcagagcggcgacggcagcagacacagcggcagcagacaccacgaggccagcacccacgccgacatcagcagacacagccaggccgtgcagggccagagcgagggcagcagaagaagcagaagacagggcagcagcgtgagccaggacagcgacagcgagggccacagcgaggacagcgagagatggagcggcagcgccagcagaaaccacagaggcagcgtgcaggagcagagcagacacggcagcagacaccccagaagccaccacgaggacagagccggccacggccacagcgccgacagaagcagacagagcggcaccagacacgccgagaccagcagcggcggccaggccgccagcagccacgagcaggccagaagcagccccggcgagagacacggcagcagacaccagcagagcgccgacagcagcagacacagcggcatccccagaggccaggccagcagcgccgtgagagacagcagacactggggcagcagcggcagccaggccagcgacagcgagggccacagcgaggagagcgacacccagagcgtgagcggccacggccaggccggcccccaccagcagagccaccaggagagcgccagagacagaagcggcggcagaagcggcagaagcggctag

SEQ ID NO: 81737 - DNA, 12186 bp, synthetic construct
  misc_feature 1..12186: note = Description of Artificial Sequence: Synthetic coding sequence
  source 1..12186: mol_type = other DNA
atgagcaccctgctggagaacatcttcgccatcatcaacctgttcaagcagtacagcaagaaggacaagaacaccgacaccctgagcaagaaggagctgaaggagctgctggagaaggagttcagacagatcctgaagaaccccgacgaccccgacatggtggacgtgttcatggaccacctggacatcgaccacaacaagaagatcgacttcaccgagttcctgctgatggtgttcaagctggcccaggcctactacgagagcaccagaaaggagaacctgcccatcagcggccacaagcacagaaagcacagccaccacgacaagcacgaggacaacaagcaggaggagaacaaggagaacagaaagagacccagcagcctggagagaagaaacaacagaaagggcaacaagggcagaagcaagagccccagagagaccggcggcaagagacacgagagcagcagcgagaagaaggagagaaagggctacagccccacccacagagaggaggagtacggcaagaaccaccacaacagcagcaagaaggagaagaacaagaccgagaacaccagactgggcgacaacagaaagagactgagcgagagactggaggagaaggaggacaacgaggagggcgtgtacgactacgagaacaccggcagaatgacccagaagtggatccagagcggccacatcgccacctactacaccatccaggacgaggcctacgacaccaccgacagcctgctggaggagaacaagatctacgagagaagcagaagcagcgacggcaagagcagcagccaggtgaacagaagcagacacgagaacaccagccaggtgcccctgcaggagagcagaaccagaaagagaagaggcagcagagtgagccaggacagagacagcgagggccacagcgaggacagcgagagacacagcggcagcgccagcagaaaccaccacggcagcgcctgggagcagagcagagacggcagcagacaccccagaagccacgacgaggacagagccagccacggccacagcgccgacagcagcagacagagcggcaccagacacgccgagaccagcagcagaggccagaccgccagcagccacgagcaggccagaagcagccccggcgagagacacggcagcggccaccagcagagcgccgacagcagcagacacagcgccaccggcagaggccaggccagcagcgccgtgagcgacagaggccacagaggcagcagcggcagccaggccagcgacagcgagggccacagcgagaacagcgacacccagagcgtgagcggccacggcaaggccggcctgagacagcagagccaccaggagagcaccagaggcagaagcggcgagagaagcggcagaagcggcagcagcctgtaccaggtgagcacccacgagcagcccgacagcgcccacggcagaaccggcaccagcaccggcggcagacagggcagccaccacgagcaggccagagacagcagcagacacagcgccagccaggagggccaggacaccatcagaggccaccccggcagcagcagaggcggcagacagggcagccaccacgagcagagcgtgaacagaagcggccacagcggcagccaccacagccacaccaccagccagggcagaagcgacgccagccacggccagagcggcagcagaagcgccagcagacagaccagaaacgaggagcagagcggcgacggcaccagacacagcggcagcagacaccacgaggccagcagccaggccgacagcagcagacacagccaggtgggccagggccagagcagcggccccagaaccagcagaaaccagggcagcagcgtgagccaggacagcgacagccagggccacagcgaggacagcgagagatggagcggcagcgccagcagaaaccaccacggcagcgcccaggagcagagcagagacggcagcagacaccccagaagccaccacgaggacagagccggccacggccacagcgccgacagcagcagaaagagcggcaccagacacacccagaacagcagcagcggccaggccgccagcagccacgagcaggccagaagcagcgccggcgagagacacggcagcagacaccagctgcagagcgccgacagcagcagacacagcggcaccggccacggccaggccagcagcgccgtgagagacagcggccacagaggcagcagcggcagccaggccaccgacagcgagggccacagcgaggacagcgacacccagagcgtgagcggccacggccaggccggccaccaccagcagagccaccaggagagcgccagagacagaagcggcgagagaagcagaagaagcggcagcttcctgtaccaggtgagcacccacaagcagagcgagagcagccacggctggaccggccccagcaccggcgtgagacagggcagccaccacgagcaggccagagacaacagcagacacagcgccagccaggacggccaggacaccatcagaggccaccccggcagcagcagaagaggcagacagggcagccaccacgagcagagcgtggacagaagcggccacagcggcagccaccacagccacaccaccagccagggcagaagcgacgccagcagaggccagagcggcagcagaagcgccagcagaaccaccagaaacgaggagcagagcagagacggcagcagacacagcggcagcagacaccacgaggccagcagccacgccgacatcagcagacacagccaggccggccagggccagagcgagggcagcagaaccagcagaagacagggcagcagcgtgagccaggacagcgacagcgagggccacagcgaggacagcgagagatggagcggcagcgccagcagaaaccacagaggcagcgcccaggagcagagcagacacggcagcagacaccccagaagccaccacgaggacagagccggccacggccacagcgccgacagcagcagacagagcggcaccccccacgccgagaccagcagcggcggccaggccgccagcagccacgagcaggccagaagcagccccggcgagagacacggcagcagacaccagcagagcgccgacagcagcagacacagcggcatccccagaagacaggccagcagcgccgtgagagacagcggccactggggcagcagcggcagccaggccagcgacagcgagggccacagcgaggagagcgacacccagagcgtgagcggccacggccaggacggcccccaccagcagagccaccaggagagcgccagagactggagcggcggcagaagcggcagaagcggcagcttcatctaccaggtgagcacccacgagcagagcgagagcgcccacggcagaaccagaaccagcaccggcagaagacagggcagccaccacgagcaggccagagacagcagcagacacagcgccagccaggagggccaggacaccatcagagcccaccccggcagcagaagaggcggcagacagggcagccaccacgagcagagcgtggacagaagcggccacagcggcagccaccacagccacaccaccagccagggcagaagcgacgccagccacggccagagcggcagcagaagcgccagcagacagaccagaaaggacaagcagagcggcgacggcagcagacacagcggcagcagacaccacgaggccgccagctgggccgacagcagcagacacagccaggtgggccaggagcagagcagcggcagcagaaccagcagacaccagggcagcagcgtgagccaggacagcgacagcgagagacacagcgacgacagcgagagactgagcggcagcgccagcagaaaccaccacggcagcagcagagagcagagcagagacggcagcagacaccccggcttccaccaggaggacagagccagccacggccacagcgccgacagcagcagacagagcggcacccaccacaccgagagcagcagccacggccaggccgtgagcagccacgagcaggccagaagcagccccggcgagagacacggcagcagacaccagcagagcgccgacagcagcagacacagcggcatcggccacagacaggccagcagcgccgtgagagacagcggccacagaggcagcagcggcagccaggtgaccaacagcgagggccacagcgaggacagcgacacccagagcgtgagcgcccacggccaggccggcccccaccagcagagccacaaggagagcgccagaggccagagcggcgagagcagcggcagaagcagaagcttcctgtaccaggtgagcagccacgagcagagcgagagcacccacggccagaccgcccccagcaccggcggcagacagggcagcagacacgagcaggccagaaacagcagcagacacagcgccagccaggacggccaggacaccatcagaggccaccccggcagcagcagaggcggcagacagggcagctaccacgagcagagcgtggacagaagcggccacagcggctaccaccacagccacaccaccccccagggcagaagcgacgccagccacggccagagcggccccagaagcgccagcagacagaccagaaacgaggagcagagcggcgacggcagcagacacagcggcagcagacaccacgagcccagcaccagagccggcagcagcagacacagccaggtgggccagggcgagagcgccggcagcaagaccagcagaagacagggcagcagcgtgagccaggacagagacagcgagggccacagcgaggacagcgagagaagaagcgagagcgccagcagaaaccactacggcagcgccagagagcagagcagacacggcagcagaaaccccagaagccaccaggaggacagagccagccacggccacagcgccgagagcagcagacagagcggcaccagacacgccgagaccagcagcggcggccaggccgccagcagccaggagcaggccagaagcagccccggcgagagacacggcagcagacaccagcagagcgccgacagcagcaccgacagcggcaccggcagaagacaggacagcagcgtggtgggcgacagcggcaacagaggcagcagcggcagccaggccagcgacagcgagggccacagcgaggagagcgacacccagagcgtgagcgcccacggccaggccggcccccaccagcagagccaccaggagagcaccagaggccagagcggcgagagaagcggcagaagcggcagcttcctgtaccaggtgagcacccacgagcagagcgagagcgcccacggcagaaccggccccagcaccggcggcagacagagaagcagacacgagcaggccagagacagcagcagacacagcgccagccaggagggccaggacaccatcagaggccaccccggcagcagcagaggcggcagacagggcagccactacgagcagagcgtggacagcagcggccacagcggcagccaccacagccacaccaccagccaggagagaagcgacgtgagcagaggccagagcggcagcagaagcgtgagcagacagaccagaaacgagaagcagagcggcgacggcagcagacacagcggcagcagacaccacgaggccagcagcagagccgacagcagcagacacagccaggtgggccagggccagagcagcggccccagaaccagcagaaaccagggcagcagcgtgagccaggacagcgacagccagggccacagcgaggacagcgagagatggagcggcagcgccagcagaaaccacctgggcagcgcctgggagcagagcagagacggcagcagacaccccggcagccaccacgaggacagagccggccacggccacagcgccgacagcagcagacagagcggcaccagacacaccgagagcagcagcagaggccaggccgccagcagccacgagcaggccagaagcagcgccggcgagagacacggcagccaccaccagctgcagagcgccgacagcagcagacacagcggcatcggccacggccaggccagcagcgccgtgagagacagcggccacagaggctacagcggcagccaggccagcgacagcgagggccacagcgaggacagcgacacccagagcgtgagcgcccagggcaaggccggcccccaccagcagagccacaaggagagcgccagaggccagagcggcgagagcagcggcagaagcggcagcttcctgtaccaggtgagcacccacgagcagagcgagagcacccacggccagagcgcccccagcaccggcggcagacagggcagccactacgaccaggcccaggacagcagcagacacagcgccagccaggagggccaggacaccatcagaggccaccccggccccagcagaggcggcagacagggcagccaccaggagcagagcgtggacagaagcggccacagcggcagccaccacagccacaccaccagccagggcagaagcgacgccagcagaggccagagcggcagcagaagcgccagcagaaagacctacgacaaggagcagagcggcgacggcagcagacacagcggcagccaccaccacgaggccagcagctgggccgacagcagcagacacagcctggtgggccagggccagagcagcggccccagaaccagcagacccagaggcagcagcgtgagccaggacagcgacagcgagggccacagcgaggacagcgagagaagaagcggcagcgccagcagaaaccaccacggcagcgcccaggagcagagcagagacggcagcagacaccccagaagccaccacgaggacagagccggccacggccacagcgccgagagcagcagacagagcggcacccaccacgccgagaacagcagcggcggccaggccgccagcagccacgagcaggccagaagcagcgccggcgagagacacggcagccaccaccagcagagcgccgacagcagcagacacagcggcatcggccacggccaggccagcagcgccgtgagagacagcggccacagaggcagcagcggcagccaggccagcgacagcgagggccacagcgaggacagcgacacccagagcgtgagcgcccacggccaggccggcccccaccagcagagccaccaggagagcaccagaggcagaagcgccggcagaagcggcagaagcggcagcttcctgtaccaggtgagcacccacgagcagagcgagagcgcccacggcagaaccggcaccagcaccggcggcagacagggcagccaccacaagcaggccagagacagcagcagacacagcaccagccaggagggccaggacaccatccacggccaccccggcagcagcagcggcggcagacagggcagccactacgagcagctggtggacagaagcggccacagcggcagccaccacagccacaccaccagccagggcagaagcgacgccagccacggccacagcggcagcagaagcgccagcagacagaccagaaacgacgagcagagcggcgacggcagcagacacagcggcagcagacaccacgaggccagcagcagagccgacagcagcggccacagccaggtgggccagggccagagcgagggccccagaaccagcagaaactggggcagcagcttcagccaggacagcgacagccagggccacagcgaggacagcgagagatggagcggcagcgccagcagaaaccaccacggcagcgcccaggagcagctgagagacggcagcagacaccccagaagccaccaggaggacagagccggccacggccacagcgccgacagcagcagacagagcggcaccagacacacccagaccagcagcggcggccaggccgccagcagccacgagcaggccagaagcagcgccggcgagagacacggcagccaccaccagcagagcgccgacagcagcagacacagcggcatcggccacggccaggccagcagcgccgtgagagacagcggccacagaggctacagcggcagccaggccagcgacaacgagggccacagcgaggacagcgacacccagagcgtgagcgcccacggccaggccggcagccaccagcagagccaccaggagagcgccagaggcagaagcggcgagaccagcggccacagcggcagcttcctgtaccaggtgagcacccacgagcagagcgagagcagccacggctggaccggccccagcaccagaggcagacagggcagcagacacgagcaggcccaggacagcagcagacacagcgccagccaggacggccaggacaccatcagaggccaccccggcagcagcagaggcggcagacagggctaccaccacgagcacagcgtggacagcagcggccacagcggcagccaccacagccacaccaccagccagggcagaagcgacgccagcagaggccagagcggcagcagaagcgccagcagaaccaccagaaacgaggagcagagcggcgacggcagcagacacagcggcagcagacaccacgaggccagcacccacgccgacatcagcagacacagccaggccgtgcagggccagagcgagggcagcagaagaagcagaagacagggcagcagcgtgagccaggacagcgacagcgagggccacagcgaggacagcgagagatggagcggcagcgccagcagaaaccaccacggcagcgcccaggagcagctgagagacggcagcagacaccccagaagccaccaggaggacagagccggccacggccacagcgccgacagcagcagacagagcggcaccagacacacccagaccagcagcggcggccaggccgccagcagccacgagcaggccagaagcagcgccggcgagagacacggcagccaccaccagcagagcgccgacagcagcagacacagcggcatcggccacggccaggccagcagcgccgtgagagacagcggccacagaggctacagcggcagccaggccagcgacaacgagggccacagcgaggacagcgacacccagagcgtgagcgcccacggccaggccggcagccaccagcagagccaccaggagagcgccagaggcagaagcggcgagaccagcggccacagcggcagcttcctgtaccaggtgagcacccacgagcagagcgagagcagccacggctggaccggccccagcaccagaggcagacagggcagcagacacgagcaggcccaggacagcagcagacacagcgccagccagtacggccaggacaccatcagaggccaccccggcagcagcagaggcggcagacagggctaccaccacgagcacagcgtggacagcagcggccacagcggcagccaccacagccacaccaccagccagggcagaagcgacgccagcagaggccagagcggcagcagaagcgccagcagaaccaccagaaacgaggagcagagcggcgacagcagcagacacagcgtgagcagacaccacgaggccagcacccacgccgacatcagcagacacagccaggccgtgcagggccagagcgagggcagcagaagaagcagaagacagggcagcagcgtgagccaggacagcgacagcgagggccacagcgaggacagcgagagatggagcggcagcgccagcagaaaccacagaggcagcgtgcaggagcagagcagacacggcagcagacaccccagaagccaccacgaggacagagccggccacggccacagcgccgacagaagcagacagagcggcaccagacacgccgagaccagcagcggcggccaggccgccagcagccacgagcaggccagaagcagccccggcgagagacacggcagcagacaccagcagagcgccgacagcagcagacacagcggcatccccagaggccaggccagcagcgccgtgagagacagcagacactggggcagcagcggcagccaggccagcgacagcgagggccacagcgaggagagcgacacccagagcgtgagcggccacggccaggccggcccccaccagcagagccaccaggagagcgccagagacagaagcggcggcagaagcggcagaagcggcagcttcctgtaccaggtgagcacccacgagcagagcgagagcgcccacggcagaaccagaaccagcaccggcagaagacagggcagccaccacgagcaggccagagacagcagcagacacagcgccagccaggagggccaggacaccatcagaggccaccccggcagcagcagaagaggcagacagggcagccactacgagcagagcgtggacagaagcggccacagcggcagccaccacagccacaccaccagccagggcagaagcgacgccagcagaggccagagcggcagcagaagcgccagcagacagaccagaaacgacgagcagagcggcgacggcagcagacacagctggagccaccaccacgaggccagcacccaggccgacagcagcagacacagccagagcggccagggccagagcgccggccccagaaccagcagaaaccagggcagcagcgtgagccaggacagcgacagccagggccacagcgaggacagcgagagatggagcggcagcgccagcagaaaccacagaggcagcgcccaggagcagagcagagacggcagcagacaccccaccagccaccacgaggacagagccggccacggccacagcgccgagagcagcagacagagcggcacccaccacgccgagaacagcagcggcggccaggccgccagcagccacgagcaggccagaagcagcgccggcgagagacacggcagccaccaccagcagagcgccgacagcagcagacacagcggcatcggccacggccaggccagcagcgccgtgagagacagcggccacagaggcagcagcggcagccaggccagcgacagcgagggccacagcgaggacagcgacacccagagcgtgagcgcccacggccaggccggcccccaccagcagagccaccaggagagcaccagaggcagaagcgccggcagaagcggcagaagcggcagcttcctgtaccaggtgagcacccacgagcagagcgagagcgcccacggcagagccggccccagcaccggcggcagacagggcagcagacacgagcaggccagagacagcagcagacacagcgccagccaggagggccaggacaccatcagaggccaccccggcagcagaagaggcggcagacagggcagctaccacgagcagagcgtggacagaagcggccacagcggcagccaccacagccacaccaccagccagggcagaagcgacgccagccacggccagagcggcagcagaagcgccagcagagagaccagaaacgaggagcagagcggcgacggcagcagacacagcggcagcagacaccacgaggccagcacccaggccgacagcagcagacacagccagagcggccagggcgagagcgccggcagcagaagaagcagaagacagggcagcagcgtgagccaggacagcgacagcgaggcctaccccgaggacagcgagagaagaagcgagagcgccagcagaaaccaccacggcagcagcagagagcagagcagagacggcagcagacaccccggcagcagccacagagacaccgccagccacgtgcagagcagccccgtgcagagcgacagcagcaccgccaaggagcacggccacttcagcagcctgagccaggacagcgcctaccacagcggcatccagagcagaggcagcccccacagcagcagcagctaccactaccagagcgagggcaccgagagacagaagggccagagcggcctggtgtggagacacggcagctacggcagcgccgactacgactacggcgagagcggcttcagacacagccagcacggcagcgtgagctacaacagcaaccccgtggtgttcaaggagagaagcgacatctgcaaggccagcgccttcggcaaggaccaccccagatactacgccacctacatcaacaaggaccccggcctgtgcggccacagcagcgacatcagcaagcagctgggcttcagccagagccagagatactactactacgagtag

SEQ ID NO: 81738 - DNA, 969 bp, synthetic construct
  misc_feature 1..969: note = Description of Artificial Sequence: Synthetic coding sequence
  source 1..969: mol_type = other DNA
ctgtaccaggtgagcacccacgagcagcccgacagcgcccacggcagaaccggcaccagcaccggcggcagacagggcagccaccacgagcaggccagagacagcagcagacacagcgccagccaggagggccaggacaccatcagaggccaccccggcagcagcagaggcggcagacagggcagccaccacgagcagagcgtgaacagaagcggccacagcggcagccaccacagccacaccaccagccagggcagaagcgacgccagccacggccagagcggcagcagaagcgccagcagacagaccagaaacgaggagcagagcggcgacggcaccagacacagcggcagcagacaccacgaggccagcagccaggccgacagcagcagacacagccaggccggccagggccagagcgagggcagcagaaccagcagaagacagggcagcagcgtgagccaggacagcgacagcgagggccacagcgaggacagcgagagatggagcggcagcgccagcagaaaccacagaggcagcgcccaggagcagagcagacacggcagcagacaccccagaagccaccacgaggacagagccggccacggccacagcgccgacagcagcagacagagcggcaccccccacgccgagaccagcagcggcggccaggccgccagcagccacgagcaggccagaagcagccccggcgagagacacggcagcagacaccagcagagcgccgacagcagcagacacagcggcatccccagaagacaggccagcagcgccgtgagagacagcggccactggggcagcagcggcagccaggccagcgacagcgagggccacagcgaggagagcgacacccagagcgtgagcggccacggccaggacggcccccaccagcagagccaccaggagagcgccagagactggagcggcggcagaagcggcagaagcggctag

SEQ ID NO: 81739 - DNA, 3402 bp, synthetic construct
  misc_feature 1..3402: note = Description of Artificial Sequence: Synthetic coding sequence
  source 1..3402: mol_type = other DNA
atgagaagcagaggcagcgacaccgagggcagcgcccagaagaagttccccagacacaccaagggccacagcttccagggccccaagaacatgaagcacagacagcaggacaaggacagccccagcgagagcgacgtgatcctgccctgccccaaggccgagaagccccacagcggcaacggccaccaggccgaggacctgagcagagacgacctgctgttcctgctgagcatcctggagggcgagctgcaggccagagacgaggtgatcggcatcctgaaggccgagaagatggacctggccctgctggaggcccagtacggcttcgtgacccccaagaaggtgctggaggccctgcagagagacgccttccaggccaagagcaccccctggcaggaggacatctacgagaagcccatgaacgagctggacaaggtggtggagaagcacaaggagagctacagaagaatcctgggccagctgctggtggccgagaagagcagaagacagaccatcctggagctggaggaggagaagagaaagcacaaggagtacatggagaagagcgacgagttcatctgcctgctggagcaggagtgcgagagactgaagaagctgatcgaccaggagatcaagagccaggaggagaaggagcaggagaaggagaagagagtgaccaccctgaaggaggagctgaccaagctgaagagcttcgccctgatggtggtggacgagcagcagagactgaccgcccagctgaccctgcagagacagaagatccaggagctgaccaccaacgccaaggagacccacaccaagctggccctggccgaggccagagtgcaggaggaggagcagaaggccaccagactggagaaggagctgcagacccagaccaccaagttccaccaggaccaggacaccatcatggccaagctgaccaacgaggacagccagaacagacagctgcagcagaagctggccgccctgagcagacagatcgacgagctggaggagaccaacagaagcctgagaaaggccgaggaggagctgcaggacatcaaggagaagatcagcaagggcgagtacggcaacgccggcatcatggccgaggtggaggagctgagaaagagagtgctggacatggagggcaaggacgaggagctgatcaagatggaggagcagtgcagagacctgaacaagagactggagagagagaccctgcagagcaaggacttcaagctggaggtggagaagctgagcaagagaatcatggccctggagaagctggaggacgccttcaacaagagcaagcaggagtgctacagcctgaagtgcaacctggagaaggagagaatgaccaccaagcagctgagccaggagctggagagcctgaaggtgagaatcaaggagctggaggccatcgagagcagactggagaagaccgagttcaccctgaaggaggacctgaccaagctgaagaccctgaccgtgatgttcgtggacgagagaaagaccatgagcgagaagctgaagaagaccgaggacaagctgcaggccgccagcagccagctgcaggtggagcagaacaaggtgaccaccgtgaccgagaagctgatcgaggagaccaagagagccctgaagagcaagaccgacgtggaggagaagatgtacagcgtgaccaaggagagagacgacctgaagaacaagctgaaggccgaggaggagaagggcaacgacctgctgagcagagtgaacatgctgaagaacagactgcagagcctggaggccatcgagaaggacttcctgaagaacaagctgaaccaggacagcggcaagagcaccaccgccctgcaccaggagaacaacaagatcaaggagctgagccaggaggtggagagactgaagctgaagctgaaggacatgaaggccatcgaggacgacctgatgaagaccgaggacgagtacgagaccctggagagaagatacgccaacgagagagacaaggcccagttcctgagcaaggagctggagcacgtgaagatggagctggccaagtacaagctggccgagaagaccgagaccagccacgagcagtggctgttcaagagactgcaggaggaggaggccaagagcggccacctgagcagagaggtggacgccctgaaggagaagatccacgagtacatggccaccgaggacctgatctgccacctgcagggcgaccacagcgtgctgcagaagaagctgaaccagcaggagaacagaaacagagacctgggcagagagatcgagaacctgaccaaggagctggagagatacagacacttcagcaagagcctgagacccagcctgaacggcagaagaatcagcgacccccaggtgttcagcaaggaggtgcagaccgaggccgtggacaacgagccccccgactacaagagcctgatccccctggagagagccgtgatcaacggccagctgtacgaggagagcgagaaccaggacgaggaccccaacgacgagggcagcgtgctgagcttcaagtgcagccagagcaccccctgccccgtgaacagaaagctgtggatcccctggatgaagagcaaggagggccacctgcagaacggcaagatgcagaccaagcccaacgccaacttcgtgcagcccggcgacctggtgctgagccacacccccggccagcccctgcacatcaaggtgacccccgaccacgtgcagaacaccgccaccctggagatcaccagccccaccaccgagagcccccacagctacaccagcaccgccgtgatccccaactgcggcacccccaagcagagaatcaccatcctgcagaacgccagcatcacccccgtgaagagcaagaccagcaccgaggacctgatgaacctggagcagggcatgagccccatcaccatggccaccttcgccagagcccagacccccgagagctgcggcagcctgacccccgagagaaccatgagccccatccaggtgctggccgtgaccggcagcgccagcagccccgagcagggcagaagccccgagcccaccgagatcagcgccaagcacgccatcttcagagtgagccccgacagacagagcagctggcagttccagagaagcaacagcaacagcagcagcgtgatcaccaccgaggacaacaagatccacatccacctgggcagcccctacatgcaggccgtggccagccccgtgagacccgccagccccagcgcccccctgcaggacaacagaacccagggcctgatcaacggcgccctgaacaagaccaccaacaaggtgaccagcagcatcaccatcacccccaccgccacccccctgcccagacagagccagatcaccgtgagcaacatctacaactag

SEQ ID NO: 81740 - DNA, 3408 bp, synthetic construct
  misc_feature 1..3408: note = Description of Artificial Sequence: Synthetic coding sequence
  source 1..3408: mol_type = other DNA
atgagaagcagaggcagcgacaccgagggcagcgcccagaagaagttccccagacacaccaagggccacagcttccagggccccaagaacatgaagcacagacagcaggacaaggacagccccagcgagagcgacgtgatcctgccctgccccaaggccgagaagccccacagcggcaacggccaccaggccgaggacctgagcagagacgacctgctgttcctgctgagcatcctggagggcgagctgcaggccagagacgaggtgatcggcatcctgaaggccgagaagatggacctggccctgctggaggcccagtacggcttcgtgacccccaagaaggtgctggaggccctgcagagagacgccttccaggccaagagcaccccctggcaggaggacatctacgagaagcccatgaacgagctggacaaggtggtggagaagcacaaggagagctacagaagaatcctgggccagctgctggtggccgagaagagcagaagacagaccatcctggagctggaggaggagaagagaaagcacaaggagtacatggagaagagcgacgagttcatctgcctgctggagcaggagtgcgagagactgaagaagctgatcgaccaggagatcaagagccaggaggagaaggagcaggagaaggagaagagagtgaccaccctgaaggaggagctgaccaagctgaagagcttcgccctgatggtggtggacgagcagcagagactgaccgcccagctgaccctgcagagacagaagatccaggagctgaccaccaacgccaaggagacccacaccaagctggccctggccgaggccagagtgcaggaggaggagcagaaggccaccagactggagaaggagctgcagacccagaccaccaagttccaccaggaccaggacaccatcatggccaagctgaccaacgaggacagccagaacagacagctgcagcagaagctggccgccctgagcagacagatcgacgagctggaggagaccaacagaagcctgagaaaggccgaggaggagctgcaggacatcaaggagaagatcagcaagggcgagtacggcaacgccggcatcatggccgaggtggaggagctgagaaagagagtgctggacatggagggcaaggacgaggagctgatcaagatggaggagcagtgcagagacctgaacaagagactggagagagagaccctgcagagcaaggacttcaagctggaggtggagaagctgagcaagagaatcatggccctggagaagctggaggacgccttcaacaagagcaagcaggagtgctacagcctgaagtgcaacctggagaaggagagaatgaccaccaagcagctgagccaggagctggagagcctgaaggtgagaatcaaggagctggaggccatcgagagcagactggagaagaccgagttcaccctgaaggaggacctgaccaagctgaagaccctgaccgtgatgttcgtggacgagagaaagaccatgagcgagaagctgaagaagaccgaggacaagctgcaggccgccagcagccagctgcaggtggagcagaacaaggtgaccaccgtgaccgagaagctgatcgaggagaccaagagagccctgaagagcaagaccgacgtggaggagaagatgtacagcgtgaccaaggagagagacgacctgaagaacaagctgaaggccgaggaggagaagggcaacgacctgctgagcagagtgaacatgctgaagaacagactgcagagcctggaggccatcgagaaggacttcctgaagaacaagctgaaccaggacagcggcaagagcaccaccgccctgcaccaggagaacaacaagatcaaggagctgagccaggaggtggagagactgaagctgaagctgaaggacatgaaggccatcgaggacgacctgatgaagaccgaggacgagtacgagaccctggagagaagatacgccaacgagagagacaaggcccagttcctgagcaaggagctggagcacgtgaagatggagctggccaagtacaagctggccgagaagaccgagaccagccacgagcagtggctgttcaagagactgcaggaggaggaggccaagagcggccacctgagcagagaggtggacgccctgaaggagaagatccacgagtacatggccaccgaggacctgatctgccacctgcagggcgaccacagcgtgctgcagaagaagctgaaccagcaggagaacagaaacagagacctgggcagagagatcgagaacctgaccaaggagctggagagatacagacacttcagcaagagcctgagacccagcctgaacggcagaagaatcagcgacccccaggtgttcagcaaggaggtgcagaccgaggccgtggacaacgagccccccgactacaagagcctgatccccctggagagagccgtgatcaacggccagctgtacgaggagagcgagaaccaggacgaggaccccaacgacgagggcagcgtgctgagcttcaagtgcagccagagcaccccctgccccgtgaacagaaagctgtggatcccctggatgaagagcaaggagggccacctgcagaacggcaagatgcagaccaagcccaacgccaacttcgtgcagcccggcgacctggtgctgagccacacccccggccagcccctgcacatcaaggtgacccccgaccacgtgcagaacaccgccaccctggagatcaccagccccaccaccgagagcccccacagctacaccagcaccgccgtgatccccaactgcggcacccccaagcagagaatcaccatcctgcagaacgccagcatcacccccgtgaagagcaagaccagcaccgaggacctgatgaacctggagcagggcatgagccccatcaccatggccaccttcgccagagcccagacccccgagagctgcggcagcctgacccccgagagaaccatgagccccatccaggtgctggccgtgaccggcagcgccagcagccccgagcagggcagaagccccgagcccaccgagatcagcgccaagcacgccatcttcagagtgagccccgacagacagagcagctggcagttccagagaagcaacagcaacagcagcagcgtgatcaccaccgaggacaacaagatccacatccacctgggcagcccctacatgcaggccgtggccagccccgtgagacccgccagccccagcgcccccctgcaggacaacagaacccagggcctgatcaacggcgccctgaacaagaccaccaacaaggtgaccagcagcatcaccatcacccccaccgccacccccctgcccagacagagccagatcaccgtggagcccctgctgctgccccactag

SEQ ID NO: 81741 - DNA, 2682 bp, synthetic construct
  misc_feature 1..2682: note = Description of Artificial Sequence: Synthetic coding sequence
  source 1..2682: mol_type = other DNA
atggtggtggacgagcagcagagactgaccgcccagctgaccctgcagagacagaagatccaggagctgaccaccaacgccaaggagacccacaccaagctggccctggccgaggccagagtgcaggaggaggagcagaaggccaccagactggagaaggagctgcagacccagaccaccaagttccaccaggaccaggacaccatcatggccaagctgaccaacgaggacagccagaacagacagctgcagcagaagctggccgccctgagcagacagatcgacgagctggaggagaccaacagaagcctgagaaaggccgaggaggagctgcaggacatcaaggagaagatcagcaagggcgagtacggcaacgccggcatcatggccgaggtggaggagctgagaaagagagtgctggacatggagggcaaggacgaggagctgatcaagatggaggagcagtgcagagacctgaacaagagactggagagagagaccctgcagagcaaggacttcaagctggaggtggagaagctgagcaagagaatcatggccctggagaagctggaggacgccttcaacaagagcaagcaggagtgctacagcctgaagtgcaacctggagaaggagagaatgaccaccaagcagctgagccaggagctggagagcctgaaggtgagaatcaaggagctggaggccatcgagagcagactggagaagaccgagttcaccctgaaggaggacctgaccaagctgaagaccctgaccgtgatgttcgtggacgagagaaagaccatgagcgagaagctgaagaagaccgaggacaagctgcaggccgccagcagccagctgcaggtggagcagaacaaggtgaccaccgtgaccgagaagctgatcgaggagaccaagagagccctgaagagcaagaccgacgtggaggagaagatgtacagcgtgaccaaggagagagacgacctgaagaacaagctgaaggccgaggaggagaagggcaacgacctgctgagcagagtgaacatgctgaagaacagactgcagagcctggaggccatcgagaaggacttcctgaagaacaagctgaaccaggacagcggcaagagcaccaccgccctgcaccaggagaacaacaagatcaaggagctgagccaggaggtggagagactgaagctgaagctgaaggacatgaaggccatcgaggacgacctgatgaagaccgaggacgagtacgagaccctggagagaagatacgccaacgagagagacaaggcccagttcctgagcaaggagctggagcacgtgaagatggagctggccaagtacaagctggccgagaagaccgagaccagccacgagcagtggctgttcaagagactgcaggaggaggaggccaagagcggccacctgagcagagaggtggacgccctgaaggagaagatccacgagtacatggccaccgaggacctgatctgccacctgcagggcgaccacagcgtgctgcagaagaagctgaaccagcaggagaacagaaacagagacctgggcagagagatcgagaacctgaccaaggagctggagagatacagacacttcagcaagagcctgagacccagcctgaacggcagaagaatcagcgacccccaggtgttcagcaaggaggtgcagaccgaggccgtggacaacgagccccccgactacaagagcctgatccccctggagagagccgtgatcaacggccagctgtacgaggagagcgagaaccaggacgaggaccccaacgacgagggcagcgtgctgagcttcaagtgcagccagagcaccccctgccccgtgaacagaaagctgtggatcccctggatgaagagcaaggagggccacctgcagaacggcaagatgcagaccaagcccaacgccaacttcgtgcagcccggcgacctggtgctgagccacacccccggccagcccctgcacatcaaggtgacccccgaccacgtgcagaacaccgccaccctggagatcaccagccccaccaccgagagcccccacagctacaccagcaccgccgtgatccccaactgcggcacccccaagcagagaatcaccatcctgcagaacgccagcatcacccccgtgaagagcaagaccagcaccgaggacctgatgaacctggagcagggcatgagccccatcaccatggccaccttcgccagagcccagacccccgagagctgcggcagcctgacccccgagagaaccatgagccccatccaggtgctggccgtgaccggcagcgccagcagccccgagcagggcagaagccccgagcccaccgagatcagcgccaagcacgccatcttcagagtgagccccgacagacagagcagctggcagttccagagaagcaacagcaacagcagcagcgtgatcaccaccgaggacaacaagatccacatccacctgggcagcccctacatgcaggccgtggccagccccgtgagacccgccagccccagcgcccccctgcaggacaacagaacccagggcctgatcaacggcgccctgaacaagaccaccaacaaggtgaccagcagcatcaccatcacccccaccgccacccccctgcccagacagagccagatcaccgtgagcaacatctacaactag

SEQ ID NO: 81742 - DNA, 768 bp, synthetic construct
  misc_feature 1..768: note = Description of Artificial Sequence: Synthetic coding sequence
  source 1..768: mol_type = other DNA
atgagaagcagaggcagcgacaccgagggcagcgcccagaagaagttccccagacacaccaagggccacagcttccagggccccaagaacatgaagcacagacagcaggacaaggacagccccagcgagagcgacgtgatcctgccctgccccaaggccgagaagccccacagcggcaacggccaccaggccgaggacctgagcagagacgacctgctgttcctgctgagcatcctggagggcgagctgcaggccagagacgaggtgatcggcatcctgaaggccgagaagatggacctggccctgctggaggcccagtacggcttcgtgacccccaagaaggtgctggaggccctgcagagagacgccttccaggccaagagcaccccctggcaggaggacatctacgagaagcccatgaacgagctggacaaggtggtggagaagcacaaggagagctacagaagaatcctgggccagctgctggtggccgagaagagcagaagacagaccatcctggagctggaggaggagaagagaaagcacaaggagtacatggagaagagcgacgagttcatctgcctgctggagcaggagtgcgagagatggagcctggccctgctgcccagactggagtgcaacggcatgatcctggcccactgcaacctgtgcctgctgggcagcagcgacagccccgccagcgccttccaggtggccggcatcaccggcaccagacaccacgcccagctggtgttcgtgttcctgtag

SEQ ID NO: 81743 - DNA, 2640 bp, synthetic construct
  misc_feature 1..2640: note = Description of Artificial Sequence: Synthetic coding sequence
  source 1..2640: mol_type = other DNA
atggtggtggacgagcagcagagactgaccgcccagctgaccctgcagagacagaagatccaggagctgaccaccaacgccaaggagacccacaccaagctggccctggccgaggccagagtgcaggaggaggagcagaaggccaccagactggagaaggagctgcagacccagaccaccaagttccaccaggaccaggacaccatcatggccaagctgaccaacgaggacagccagaacagacagctgcagcagaagctggccgccctgagcagacagatcgacgagctggaggagaccaacagaagcctgagaaaggccgaggaggagctgcaggacatcaaggagaagatcagcaagggcgagtacggcaacgccggcatcatggccgaggtggaggagctgatcaagatggaggagcagtgcagagacctgaacaagagactggagagagagaccctgcagagcaaggacttcaagctggaggtggagaagctgagcaagagaatcatggccctggagaagctggaggacgccttcaacaagagcaagcaggagtgctacagcctgaagtgcaacctggagaaggagagaatgaccaccaagcagctgagccaggagctggagagcctgaaggtgagaatcaaggagctggaggccatcgagagcagactggagaagaccgagttcaccctgaaggaggacctgaccaagctgaagaccctgaccgtgatgttcgtggacgagagaaagaccatgagcgagaagctgaagaagaccgaggacaagctgcaggccgccagcagccagctgcaggtggagcagaacaaggtgaccaccgtgaccgagaagctgatcgaggagaccaagagagccctgaagagcaagaccgacgtggaggagaagatgtacagcgtgaccaaggagagagacgacctgaagaacaagctgaaggccgaggaggagaagggcaacgacctgctgagcagagtgaacatgctgaagaacagactgcagagcctggaggccatcgagaaggacttcctgaagaacaagctgaaccaggacagcggcaagagcaccaccgccctgcaccaggagaacaacaagatcaaggagctgagccaggaggtggagagactgaagctgaagctgaaggacatgaaggccatcgaggacgacctgatgaagaccgaggacgagtacgagaccctggagagaagatacgccaacgagagagacaaggcccagttcctgagcaaggagctggagcacgtgaagatggagctggccaagtacaagctggccgagaagaccgagaccagccacgagcagtggctgttcaagagactgcaggaggaggaggccaagagcggccacctgagcagagaggtggacgccctgaaggagaagatccacgagtacatggccaccgaggacctgatctgccacctgcagggcgaccacagcgtgctgcagaagaagctgaaccagcaggagaacagaaacagagacctgggcagagagatcgagaacctgaccaaggagctggagagatacagacacttcagcaagagcctgagacccagcctgaacggcagaagaatcagcgacccccaggtgttcagcaaggaggtgcagaccgaggccgtggacaacgagccccccgactacaagagcctgatccccctggagagagccgtgatcaacggccagctgtacgaggagagcgagaaccaggacgaggaccccaacgacgagggcagcgtgctgagcttcaagtgcagccagagcaccccctgccccgtgaacagaaagctgtggatcccctggatgaagagcaaggagggccacctgcagaacggcaagatgcagaccaagcccaacgccaacttcgtgcagcccggcgacctggtgctgagccacacccccggccagcccctgcacatcaaggtgacccccgaccacgtgcagaacaccgccaccctggagatcaccagccccaccaccgagagcccccacagctacaccagcaccgccgtgatccccaactgcggcacccccaagcagagaatcaccatcctgcagaacgccagcatcacccccgtgaagagcaagaccagcaccgaggacctgatgaacctggagcagggcatgagccccatcaccatggccaccttcgccagagcccagacccccgagagctgcggcagcctgacccccgagagaaccatgagccccatccaggtgctggccgtgaccggcagcgccagcagccccgagcagggcagaagccccgagcccaccgagatcagcgccaagcacgccatcttcagagtgagccccgacagacagagcagctggcagttccagagaagcaacagcaacagcagcagcgtgatcaccaccgaggacaacaagatccacatccacctgggcagcccctacatgcaggccgtggccagccccgtgagacccgccagccccagcgcccccctgcaggacaacagaacccagggcctgatcaacggcgccctgaacaagaccaccaacaaggtgaccagcagcatcaccatcacccccaccgccacccccctgcccagacagagccagatcaccgtgagcaacatctacaactag

SEQ ID NO: 81744 - DNA, 2688 bp, synthetic construct
  misc_feature 1..2688: note = Description of Artificial Sequence: Synthetic coding sequence
  source 1..2688: mol_type = other DNA
atggtggtggacgagcagcagagactgaccgcccagctgaccctgcagagacagaagatccaggagctgaccaccaacgccaaggagacccacaccaagctggccctggccgaggccagagtgcaggaggaggagcagaaggccaccagactggagaaggagctgcagacccagaccaccaagttccaccaggaccaggacaccatcatggccaagctgaccaacgaggacagccagaacagacagctgcagcagaagctggccgccctgagcagacagatcgacgagctggaggagaccaacagaagcctgagaaaggccgaggaggagctgcaggacatcaaggagaagatcagcaagggcgagtacggcaacgccggcatcatggccgaggtggaggagctgagaaagagagtgctggacatggagggcaaggacgaggagctgatcaagatggaggagcagtgcagagacctgaacaagagactggagagagagaccctgcagagcaaggacttcaagctggaggtggagaagctgagcaagagaatcatggccctggagaagctggaggacgccttcaacaagagcaagcaggagtgctacagcctgaagtgcaacctggagaaggagagaatgaccaccaagcagctgagccaggagctggagagcctgaaggtgagaatcaaggagctggaggccatcgagagcagactggagaagaccgagttcaccctgaaggaggacctgaccaagctgaagaccctgaccgtgatgttcgtggacgagagaaagaccatgagcgagaagctgaagaagaccgaggacaagctgcaggccgccagcagccagctgcaggtggagcagaacaaggtgaccaccgtgaccgagaagctgatcgaggagaccaagagagccctgaagagcaagaccgacgtggaggagaagatgtacagcgtgaccaaggagagagacgacctgaagaacaagctgaaggccgaggaggagaagggcaacgacctgctgagcagagtgaacatgctgaagaacagactgcagagcctggaggccatcgagaaggacttcctgaagaacaagctgaaccaggacagcggcaagagcaccaccgccctgcaccaggagaacaacaagatcaaggagctgagccaggaggtggagagactgaagctgaagctgaaggacatgaaggccatcgaggacgacctgatgaagaccgaggacgagtacgagaccctggagagaagatacgccaacgagagagacaaggcccagttcctgagcaaggagctggagcacgtgaagatggagctggccaagtacaagctggccgagaagaccgagaccagccacgagcagtggctgttcaagagactgcaggaggaggaggccaagagcggccacctgagcagagaggtggacgccctgaaggagaagatccacgagtacatggccaccgaggacctgatctgccacctgcagggcgaccacagcgtgctgcagaagaagctgaaccagcaggagaacagaaacagagacctgggcagagagatcgagaacctgaccaaggagctggagagatacagacacttcagcaagagcctgagacccagcctgaacggcagaagaatcagcgacccccaggtgttcagcaaggaggtgcagaccgaggccgtggacaacgagccccccgactacaagagcctgatccccctggagagagccgtgatcaacggccagctgtacgaggagagcgagaaccaggacgaggaccccaacgacgagggcagcgtgctgagcttcaagtgcagccagagcaccccctgccccgtgaacagaaagctgtggatcccctggatgaagagcaaggagggccacctgcagaacggcaagatgcagaccaagcccaacgccaacttcgtgcagcccggcgacctggtgctgagccacacccccggccagcccctgcacatcaaggtgacccccgaccacgtgcagaacaccgccaccctggagatcaccagccccaccaccgagagcccccacagctacaccagcaccgccgtgatccccaactgcggcacccccaagcagagaatcaccatcctgcagaacgccagcatcacccccgtgaagagcaagaccagcaccgaggacctgatgaacctggagcagggcatgagccccatcaccatggccaccttcgccagagcccagacccccgagagctgcggcagcctgacccccgagagaaccatgagccccatccaggtgctggccgtgaccggcagcgccagcagccccgagcagggcagaagccccgagcccaccgagatcagcgccaagcacgccatcttcagagtgagccccgacagacagagcagctggcagttccagagaagcaacagcaacagcagcagcgtgatcaccaccgaggacaacaagatccacatccacctgggcagcccctacatgcaggccgtggccagccccgtgagacccgccagccccagcgcccccctgcaggacaacagaacccagggcctgatcaacggcgccctgaacaagaccaccaacaaggtgaccagcagcatcaccatcacccccaccgccacccccctgcccagacagagccagatcaccgtggagcccctgctgctgccccactag

SEQ ID NO: 81745 - DNA, 2136 bp, synthetic construct
  misc_feature 1..2136: note = Description of Artificial Sequence: Synthetic coding sequence
  source 1..2136: mol_type = other DNA
atggccctggagaagctggaggacgccttcaacaagagcaagcaggagtgctacagcctgaagtgcaacctggagaaggagagaatgaccaccaagcagctgagccaggagctggagagcctgaaggtgagaatcaaggagctggaggccatcgagagcagactggagaagaccgagttcaccctgaaggaggacctgaccaagctgaagaccctgaccgtgatgttcgtggacgagagaaagaccatgagcgagaagctgaagaagaccgaggacaagctgcaggccgccagcagccagctgcaggtggagcagaacaaggtgaccaccgtgaccgagaagctgatcgaggagaccaagagagccctgaagagcaagaccgacgtggaggagaagatgtacagcgtgaccaaggagagagacgacctgaagaacaagctgaaggccgaggaggagaagggcaacgacctgctgagcagagtgaacatgctgaagaacagactgcagagcctggaggccatcgagaaggacttcctgaagaacaagctgaaccaggacagcggcaagagcaccaccgccctgcaccaggagaacaacaagatcaaggagctgagccaggaggtggagagactgaagctgaagctgaaggacatgaaggccatcgaggacgacctgatgaagaccgaggacgagtacgagaccctggagagaagatacgccaacgagagagacaaggcccagttcctgagcaaggagctggagcacgtgaagatggagctggccaagtacaagctggccgagaagaccgagaccagccacgagcagtggctgttcaagagactgcaggaggaggaggccaagagcggccacctgagcagagaggtggacgccctgaaggagaagatccacgagtacatggccaccgaggacctgatctgccacctgcagggcgaccacagcgtgctgcagaagaagctgaaccagcaggagaacagaaacagagacctgggcagagagatcgagaacctgaccaaggagctggagagatacagacacttcagcaagagcctgagacccagcctgaacggcagaagaatcagcgacccccaggtgttcagcaaggaggtgcagaccgaggccgtggacaacgagccccccgactacaagagcctgatccccctggagagagccgtgatcaacggccagctgtacgaggagagcgagaaccaggacgaggaccccaacgacgagggcagcgtgctgagcttcaagtgcagccagagcaccccctgccccgtgaacagaaagctgtggatcccctggatgaagagcaaggagggccacctgcagaacggcaagatgcagaccaagcccaacgccaacttcgtgcagcccggcgacctggtgctgagccacacccccggccagcccctgcacatcaaggtgacccccgaccacgtgcagaacaccgccaccctggagatcaccagccccaccaccgagagcccccacagctacaccagcaccgccgtgatccccaactgcggcacccccaagcagagaatcaccatcctgcagaacgccagcatcacccccgtgaagagcaagaccagcaccgaggacctgatgaacctggagcagggcatgagccccatcaccatggccaccttcgccagagcccagacccccgagagctgcggcagcctgacccccgagagaaccatgagccccatccaggtgctggccgtgaccggcagcgccagcagccccgagcagggcagaagccccgagcccaccgagatcagcgccaagcacgccatcttcagagtgagccccgacagacagagcagctggcagttccagagaagcaacagcaacagcagcagcgtgatcaccaccgaggacaacaagatccacatccacctgggcagcccctacatgcaggccgtggccagccccgtgagacccgccagccccagcgcccccctgcaggacaacagaacccagggcctgatcaacggcgccctgaacaagaccaccaacaaggtgaccagcagcatcaccatcacccccaccgccacccccctgcccagacagagccagatcaccgtggagcccctgctgctgccccactag

SEQ ID NO: 81746 - DNA, 2514 bp, synthetic construct
  misc_feature 1..2514: note = Description of Artificial Sequence: Synthetic coding sequence
  source 1..2514: mol_type = other DNA
atggtggtggacgagcagcagagactgaccgcccagctgaccctgcagagacagaagatccaggagctgaccaccaacgccaaggagacccacaccaagctggccctggccgaggccagagtgcaggaggaggagcagaaggccaccagactggagaaggagctgcagacccagaccaccaagttccaccaggaccaggacaccatcatggccaagctgaccaacgaggacagccagaacagacagctgcagcagaagctggccgccctgagcagacagatcgacgagctggaggagaccaacagaagcctgagaaaggccgaggaggagctgcaggacatcaaggagaagatcagcaagggcgagtacggcaacgccggcatcatggccgaggtggaggagctgagaaagagagtgctggacatggagggcaaggacgaggagctgatcaagatggaggagcagtgcagagacctgaacaagagactggagagagagaccctgcagagcaaggacttcaagctggaggtggagaagctgagcaagagaatcatggccctggagaagctggaggacgccttcaacaagagcaagcaggagtgctacagcctgaagtgcaacctggagaaggagagaatgaccaccaagcagctgagccaggagctggagagcctgaaggtgagaatcaaggagctggaggccatcgagagcagactggagaagaccgagttcaccctgaaggaggacctgaccaagctgaagaccctgaccgtgatgttcgtggacgagagaaagaccatgagcgagaagctgaagaagaccgaggacaagctgcaggccgccagcagccagctgcaggtggagcagaacaaggtgaccaccgtgaccgagaagctgatcgaggagaccaagagagccctgaagagcaagaccgacgtggaggagaagatgtacagcgtgaccaaggagagagacgacctgaagaacaagctgaaggccgaggaggagaagggcaacgacctgctgagcagagtgaacatgctgaagaacagactgcagagcctggaggccatcgagaaggacttcctgaagaacaagctgaaccaggacagcggcaagagcaccaccgccctgcaccaggagaacaacaagatcaaggagctgagccaggaggtggagagactgaagctgaagctgaaggacatgaaggccatcgaggacgacctgatgaagaccgaggacgagtacgagaccctggagagaagatacgccaacgagagagacaaggcccagttcctgagcaaggagctggagcacgtgaagatggagctggccaagtacaagctggccgagaagaccgagaccagccacgagcagtggctgttcaagagactgcaggaggaggaggccaagagcggccacctgagcagagaggtggacgccctgaaggagaagatccacgagtacatggccaccgaggacctgatctgccacctgcagggcgaccacagcgtgctgcagaagaagctgaaccagcaggagaacagaaacagagacctgggcagagagatcgagaacctgaccaaggagctggagagatacagacacttcagcaagagcctgagacccagcctgaacggcagaagaatcagcgacccccaggtgttcagcaaggaggtgcagaccgaggccgtggacaacgagccccccgactacaagagcctgatccccctggagagagccgtgatcaacggccagctgtacgaggagagcgagaaccaggacgaggaccccaacgacgagggcagcgtgctgagcttcaagtgcagccagagcaccccctgccccgtgaacagaaagctgtggatcccctggatgaagagcaaggagggccacctgcagaacggcaagatgcagaccaagcccaacgccaacttcgtgcagcccggcgacctggtgctgagccacacccccggccagcccctgcacatcaaggtgacccccgaccacgtgcagaacaccgccaccctggagatcaccagccccaccaccgagagcccccacagctacaccagcaccgccgtgatccccaactgcggcacccccaagcagagaatcaccatcctgcagaacgccagcatcacccccgtgaagagcaagaccagcaccgaggacctgatgaacctggagcagggcatgagccccatcaccatggccaccttcgccagagcccagacccccgagagctgcggcagcctgacccccgagagaaccatgagccccatccaggtgctggccgtgaccggcagcgccagcagccccgagcagggcagaagccccgagcccaccgagatcagcgccaagcacgccatcttcagagtgagccccgacagacagagcagctggcagttccagagaagcaacagcaacagcagcagcgtgatcaccaccgaggacaacaagatccacatccacctgggcagcccctacatgcaggccgtggccagcccctag

SEQ ID NO: 81747 - DNA, 7944 bp, synthetic construct
  misc_feature 1..7944: note = Description of Artificial Sequence: Synthetic coding sequence
  source 1..7944: mol_type = other DNA
atgagcagcagccacagcagagccggccagagcgccgccggcgccgcccccggcggcggcgtggacaccagagacgccgagatgcccgccaccgagaaggacctggccgaggacgccccctggaagaagatccagcagaacaccttcaccagatggtgcaacgagcacctgaagtgcgtgagcaagagaatcgccaacctgcagaccgacctgagcgacggcctgagactgatcgccctgctggaggtgctgagccagaagaagatgcacagaaagcacaaccagagacccaccttcagacagatgcagctggagaacgtgagcgtggccctggagttcctggacagagagagcatcaagctggtgagcatcgacagcaaggccatcgtggacggcaacctgaagctgatcctgggcctgatctggaccctgatcctgcactacagcatcagcatgcccatgtgggacgaggaggaggacgaggaggccaagaagcagacccccaagcagagactgctgggctggatccagaacaagctgccccagctgcccatcaccaacttcagcagagactggcagagcggcagagccctgggcgccctggtggacagctgcgcccccggcctgtgccccgactgggacagctgggacgccagcaagcccgtgaccaacgccagagaggccatgcagcaggccgacgactggctgggcatcccccaggtgatcacccccgaggagatcgtggaccccaacgtggacgagcacagcgtgatgacctacctgagccagttccccaaggccaagctgaagcccggcgcccccctgagacccaagctgaaccccaagaaggccagagcctacggccccggcatcgagcccaccggcaacatggtgaagaagagagccgagttcaccgtggagaccagaagcgccggccagggcgaggtgctggtgtacgtggaggaccccgccggccaccaggaggaggccaaggtgaccgccaacaacgacaagaacagaaccttcagcgtgtggtacgtgcccgaggtgaccggcacccacaaggtgaccgtgctgttcgccggccagcacatcgccaagagccccttcgaggtgtacgtggacaagagccagggcgacgccagcaaggtgaccgcccagggccccggcctggagcccagcggcaacatcgccaacaagaccacctacttcgagatcttcaccgccggcgccggcaccggcgaggtggaggtggtgatccaggaccccatgggccagaagggcaccgtggagccccagctggaggccagaggcgacagcacctacagatgcagctaccagcccaccatggagggcgtgcacaccgtgcacgtgaccttcgccggcgtgcccatccccagaagcccctacaccgtgaccgtgggccaggcctgcaaccccagcgcctgcagagccgtgggcagaggcctgcagcccaagggcgtgagagtgaaggagaccgccgacttcaaggtgtacaccaagggcgccggcagcggcgagctgaaggtgaccgtgaagggccccaagggcgaggagagagtgaagcagaaggacctgggcgacggcgtgtacggcttcgagtactaccccatggtgcccggcacctacatcgtgaccatcacctggggcggccagaacatcggcagaagccccttcgaggtgaaggtgggcaccgagtgcggcaaccagaaggtgagagcctggggccccggcctggagggcggcgtggtgggcaagagcgccgacttcgtggtggaggccatcggcgacgacgtgggcaccctgggcttcagcgtggagggccccagccaggccaagatcgagtgcgacgacaagggcgacggcagctgcgacgtgagatactggccccaggaggccggcgagtacgccgtgcacgtgctgtgcaacagcgaggacatcagactgagccccttcatggccgacatcagagacgccccccaggacttccaccccgacagagtgaaggccagaggccccggcctggagaagaccggcgtggccgtgaacaagcccgccgagttcaccgtggacgccaagcacggcggcaaggcccccctgagagtgcaggtgcaggacaacgagggctgccccgtggaggccctggtgaaggacaacggcaacggcacctacagctgcagctacgtgcccagaaagcccgtgaagcacaccgccatggtgagctggggcggcgtgagcatccccaacagccccttcagagtgaacgtgggcgccggcagccaccccaacaaggtgaaggtgtacggccccggcgtggccaagaccggcctgaaggcccacgagcccacctacttcaccgtggactgcgccgaggccggccagggcgacgtgagcatcggcatcaagtgcgcccccggcgtggtgggccccgccgaggccgacatcgacttcgacatcatcagaaacgacaacgacaccttcaccgtgaagtacacccccagaggcgccggcagctacaccatcatggtgctgttcgccgaccaggccacccccaccagccccatcagagtgaaggtggagcccagccacgacgccagcaaggtgaaggccgagggccccggcctgagcagaaccggcgtggagctgggcaagcccacccacttcaccgtgaacgccaaggccgccggcaagggcaagctggacgtgcagttcagcggcctgaccaagggcgacgccgtgagagacgtggacatcatcgaccaccacgacaacacctacaccgtgaagtacacccccgtgcagcagggccccgtgggcgtgaacgtgacctacggcggcgaccccatccccaagagccccttcagcgtggccgtgagccccagcctggacctgagcaagatcaaggtgagcggcctgggcgagaaggtggacgtgggcaaggaccaggagttcaccgtgaagagcaagggcgccggcggccagggcaaggtggccagcaagatcgtgggccccagcggcgccgccgtgccctgcaaggtggagcccggcctgggcgccgacaacagcgtggtgagattcctgcccagagaggagggcccctacgaggtggaggtgacctacgacggcgtgcccgtgcccggcagccccttccccctggaggccgtggcccccaccaagcccagcaaggtgaaggccttcggccccggcctgcagggcggcagcgccggcagccccgccagattcaccatcgacaccaagggcgccggcaccggcggcctgggcctgaccgtggagggcccctgcgaggcccagctggagtgcctggacaacggcgacggcacctgcagcgtgagctacgtgcccaccgagcccggcgactacaacatcaacatcctgttcgccgacacccacatccccggcagccccttcaaggcccacgtggtgccctgcttcgacgccagcaaggtgaagtgcagcggccccggcctggagagagccaccgccggcgaggtgggccagttccaggtggactgcagcagcgccggcagcgccgagctgaccatcgagatctgcagcgaggccggcctgcccgccgaggtgtacatccaggaccacggcgacggcacccacaccatcacctacatccccctgtgccccggcgcctacaccgtgaccatcaagtacggcggccagcccgtgcccaacttccccagcaagctgcaggtggagcccgccgtggacaccagcggcgtgcagtgctacggccccggcatcgagggccagggcgtgttcagagaggccaccaccgagttcagcgtggacgccagagccctgacccagaccggcggcccccacgtgaaggccagagtggccaaccccagcggcaacctgaccgagacctacgtgcaggacagaggcgacggcatgtacaaggtggagtacaccccctacgaggagggcctgcacagcgtggacgtgacctacgacggcagccccgtgcccagcagccccttccaggtgcccgtgaccgagggctgcgaccccagcagagtgagagtgcacggccccggcatccagagcggcaccaccaacaagcccaacaagttcaccgtggagaccagaggcgccggcaccggcggcctgggcctggccgtggagggccccagcgaggccaagatgagctgcatggacaacaaggacggcagctgcagcgtggagtacatcccctacgaggccggcacctacagcctgaacgtgacctacggcggccaccaggtgcccggcagccccttcaaggtgcccgtgcacgacgtgaccgacgccagcaaggtgaagtgcagcggccccggcctgagccccggcatggtgagagccaacctgccccagagcttccaggtggacaccagcaaggccggcgtggcccccctgcaggtgaaggtgcagggccccaagggcctggtggagcccgtggacgtggtggacaacgccgacggcacccagaccgtgaactacgtgcccagcagagagggcccctacagcatcagcgtgctgtacggcgacgaggaggtgcccagaagccccttcaaggtgaaggtgctgcccacccacgacgccagcaaggtgaaggccagcggccccggcctgaacaccaccggcgtgcccgccagcctgcccgtggagttcaccatcgacgccaaggacgccggcgagggcctgctggccgtgcagatcaccgaccccgagggcaagcccaagaagacccacatccaggacaaccacgacggcacctacaccgtggcctacgtgcccgacgtgaccggcagatacaccatcctgatcaagtacggcggcgacgagatccccttcagcccctacagagtgagagccgtgcccaccggcgacgccagcaagtgcaccgtgaccgtgagcatcggcggccacggcctgggcgccggcatcggccccaccatccagatcggcgaggagaccgtgatcaccgtggacaccaaggccgccggcaagggcaaggtgacctgcaccgtgtgcacccccgacggcagcgaggtggacgtggacgtggtggagaacgaggacggcaccttcgacatcttctacaccgccccccagcccggcaagtacgtgatctgcgtgagattcggcggcgagcacgtgcccaacagccccttccaggtgaccgccctggccggcgaccagcccagcgtgcagccccccctgagaagccagcagctggccccccagtacacctacgcccagggcggccagcagacctgggcccccgagagacccctggtgggcgtgaacggcctggacgtgaccagcctgagacccttcgacctggtgatccccttcaccatcaagaagggcgagatcaccggcgaggtgagaatgcccagcggcaaggtggcccagcccaccatcaccgacaacaaggacggcaccgtgaccgtgagatacgcccccagcgaggccggcctgcacgagatggacatcagatacgacaacatgcacatccccggcagccccctgcagttctacgtggactacgtgaactgcggccacgtgaccgcctacggccccggcctgacccacggcgtggtgaacaagcccgccaccttcaccgtgaacaccaaggacgccggcgagggcggcctgagcctggccatcgagggccccagcaaggccgagatcagctgcaccgacaaccaggacggcacctgcagcgtgagctacctgcccgtgctgcccggcgactacagcatcctggtgaagtacaacgagcagcacgtgcccggcagccccttcaccgccagagtgaccggcgacgacagcatgagaatgagccacctgaaggtgggcagcgccgccgacatccccatcaacatcagcgagaccgacctgagcctgctgaccgccaccgtggtgccccccagcggcagagaggagccctgcctgctgaagagactgagaaacggccacgtgggcatcagcttcgtgcccaaggagaccggcgagcacctggtgcacgtgaagaagaacggccagcacgtggccagcagccccatccccgtggtgatcagccagagcgagatcggcgacgccagcagagtgagagtgagcggccagggcctgcacgagggccacaccttcgagcccgccgagttcatcatcgacaccagagacgccggctacggcggcctgagcctgagcatcgagggccccagcaaggtggacatcaacaccgaggacctggaggacggcacctgcagagtgacctactgccccaccgagcccggcaactacatcatcaacatcaagttcgccgaccagcacgtgcccggcagccccttcagcgtgaaggtgaccggcgagggcagagtgaaggagagcatcaccagaagaagaagagcccccagcgtggccaacgtgggcagccactgcgacctgagcctgaagatccccgagatcagcatccaggacatgaccgcccaggtgaccagccccagcggcaagacccacgaggccgagatcgtggagggcgagaaccacacctactgcatcagattcgtgcccgccgagatgggcacccacaccgtgagcgtgaagtacaagggccagcacgtgcccggcagccccttccagttcaccgtgggccccctgggcgagggcggcgcccacaaggtgagagccggcggccccggcctggagagagccgaggccggcgtgcccgccgagttcagcatctggaccagagaggccggcgccggcggcctggccatcgccgtggagggccccagcaaggccgagatcagcttcgaggacagaaaggacggcagctgcggcgtggcctacgtggtgcaggagcccggcgactacgaggtgagcgtgaagttcaacgaggagcacatccccgacagccccttcgtggtgcccgtggccagccccagcggcgacgccagaagactgaccgtgagcagcctgcaggagagcggcctgaaggtgaaccagcccgccagcttcgccgtgagcctgaacggcgccaagggcgccatcgacgccaaggtgcacagccccagcggcgccctggaggagtgctacgtgaccgagatcgaccaggacaagtacgccgtgagattcatccccagagagaacggcgtgtacctgatcgacgtgaagttcaacggcacccacatccccggcagccccttcaagatcagagtgggcgagcccggccacggcggcgaccccggcctggtgagcgcctacggcgccggcctggagggcggcgtgaccggcaaccccgccgagttcgtggtgaacaccagcaacgccggcgccggcgccctgagcgtgaccatcgacggccccagcaaggtgaagatggactgccaggagtgccccgagggctacagagtgacctacacccccatggcccccggcagctacctgatcagcatcaagtacggcggcccctaccacatcggcggcagccccttcaaggccaaggtgaccggccccagactggtgagcaaccacagcctgcacgagaccagcagcgtgttcgtggacagcctgaccaaggccacctgcgccccccagcacggcgcccccggccccggccccgccgacgccagcaaggtggtggccaagggcctgggcctgagcaaggcctacgtgggccagaagagcagcttcaccgtggactgcagcaaggccggcaacaacatgctgctggtgggcgtgcacggccccagaaccccctgcgaggagatcctggtgaagcacgtgggcagcagactgtacagcgtgagctacctgctgaaggacaagggcgagtacaccctggtggtgaagtggggcgacgagcacatccccggcagcccctacagagtggtggtgccctag

SEQ ID NO: 81748 - DNA, 6948 bp, synthetic construct
  misc_feature 1..6948: note = Description of Artificial Sequence: Synthetic coding sequence
  source 1..6948: mol_type = other DNA
atgcccgccaccgagaaggacctggccgaggacgccccctggaagaagatccagcagaacaccttcaccagatggtgcaacgagcacctgaagtgcgtgagcaagagaatcgccaacctgcagaccgacctgagcgacggcctgagactgatcgccctgctggaggtgctgagccagaagaagatgcacagaaagcacaaccagagacccaccttcagacagatgcagctggagaacgtgagcgtggccctggagttcctggacagagagagcatcaagctggtgagcatcgacagcaaggccatcgtggacggcaacctgaagctgatcctgggcctgatctggaccctgatcctgcactacagcatcagcatgcccatgtgggacgaggaggaggacgaggaggccaagaagcagacccccaagcagagactgctgggctggatccagaacaagctgccccagctgcccatcaccaacttcagcagagactggcagagcggcagagccctgggcgccctggtggacagctgcgcccccggcctgtgccccgactgggacagctgggacgccagcaagcccgtgaccaacgccagagaggccatgcagcaggccgacgactggctgggcatcccccaggtgatcacccccgaggagatcgtggaccccaacgtggacgagcacagcgtgatgacctacctgagccagttccccaaggccaagctgaagcccggcgcccccctgagacccaagctgaaccccaagaaggccagagcctacggccccggcatcgagcccaccggcaacatggtgaagaagagagccgagttcaccgtggagaccagaagcgccggccagggcgaggtgctggtgtacgtggaggaccccgccggccaccaggaggaggccaaggtgaccgccaacaacgacaagaacagaaccttcagcgtgtggtacgtgcccgaggtgaccggcacccacaaggtgaccgtgctgttcgccggccagcacatcgccaagagccccttcgaggtgtacgtggacaagagccagggcgacgccagcaaggtgaccgcccagggccccggcctggagcccagcggcaacatcgccaacaagaccacctacttcgagatcttcaccgccggcgccggcaccggcgaggtggaggtggtgatccaggaccccatgggccagaagggcaccgtggagccccagctggaggccagaggcgacagcacctacagatgcagctaccagcccaccatggagggcgtgcacaccgtgcacgtgaccttcgccggcgtgcccatccccagaagcccctacaccgtgaccgtgggccaggcctgcaaccccagcgcctgcagagccgtgggcagaggcctgcagcccaagggcgtgagagtgaaggagaccgccgacttcaaggtgtacaccaagggcgccggcagcggcgagctgaaggtgaccgtgaagggccccaagggcgaggagagagtgaagcagaaggacctgggcgacggcgtgtacggcttcgagtactaccccatggtgcccggcacctacatcgtgaccatcacctggggcggccagaacatcggcagaagccccttcgaggtgaaggtgggcaccgagtgcggcaaccagaaggtgagagcctggggccccggcctggagggcggcgtggtgggcaagagcgccgacttcgtggtggaggccatcggcgacgacgtgggcaccctgggcttcagcgtggagggccccagccaggccaagatcgagtgcgacgacaagggcgacggcagctgcgacgtgagatactggccccaggaggccggcgagtacgccgtgcacgtgctgtgcaacagcgaggacatcagactgagccccttcatggccgacatcagagacgccccccaggacttccaccccgacagagtgaaggccagaggccccggcctggagaagaccggcgtggccgtgaacaagcccgccgagttcaccgtggacgccaagcacggcggcaaggcccccctgagagtgcaggtgcaggacaacgagggctgccccgtggaggccctggtgaaggacaacggcaacggcacctacagctgcagctacgtgcccagaaagcccgtgaagcacaccgccatggtgagctggggcggcgtgagcatccccaacagccccttcagagtgaacgtgggcgccggcagccaccccaacaaggtgaaggtgtacggccccggcgtggccaagaccggcctgaaggcccacgagcccacctacttcaccgtggactgcgccgaggccggccagggcgacgtgagcatcggcatcaagtgcgcccccggcgtggtgggccccgccgaggccgacatcgacttcgacatcatcagaaacgacaacgacaccttcaccgtgaagtacacccccagaggcgccggcagctacaccatcatggtgctgttcgccgaccaggccacccccaccagccccatcagagtgaaggtggagcccagccacgacgccagcaaggtgaaggccgagggccccggcctgagcagaaccggcgtggagctgggcaagcccacccacttcaccgtgaacgccaaggccgccggcaagggcaagctggacgtgcagttcagcggcctgaccaagggcgacgccgtgagagacgtggacatcatcgaccaccacgacaacacctacaccgtgaagtacacccccgtgcagcagggccccgtgggcgtgaacgtgacctacggcggcgaccccatccccaagagccccttcagcgtggccgtgagccccagcctggacctgagcaagatcaaggtgagcggcctgggcgagaaggtggacgtgggcaaggaccaggagttcaccgtgaagagcaagggcgccggcggccagggcaaggtggccagcaagatcgtgggccccagcggcgccgccgtgccctgcaaggtggagcccggcctgggcgccgacaacagcgtggtgagattcctgcccagagaggagggcccctacgaggtggaggtgacctacgacggcgtgcccgtgcccggcagccccttccccctggaggccgtggcccccaccaagcccagcaaggtgaaggccttcggccccggcctgcagggcggcagcgccggcagccccgccagattcaccatcgacaccaagggcgccggcaccggcggcctgggcctgaccgtggagggcccctgcgaggcccagctggagtgcctggacaacggcgacggcacctgcagcgtgagctacgtgcccaccgagcccggcgactacaacatcaacatcctgttcgccgacacccacatccccggcagccccttcaaggcccacgtggtgccctgcttcgacgccagcaaggtgaagtgcagcggccccggcctggagagagccaccgccggcgaggtgggccagttccaggtggactgcagcagcgccggcagcgccgagctgaccatcgagatctgcagcgaggccggcctgcccgccgaggtgtacatccaggaccacggcgacggcacccacaccatcacctacatccccctgtgccccggcgcctacaccgtgaccatcaagtacggcggccagcccgtgcccaacttccccagcaagctgcaggtggagcccgccgtggacaccagcggcgtgcagtgctacggccccggcatcgagggccagggcgtgttcagagaggccaccaccgagttcagcgtggacgccagagccctgacccagaccggcggcccccacgtgaaggccagagtggccaaccccagcggcaacctgaccgagacctacgtgcaggacagaggcgacggcatgtacaaggtggagtacaccccctacgaggagggcctgcacagcgtggacgtgacctacgacggcagccccgtgcccagcagccccttccaggtgcccgtgaccgagggctgcgaccccagcagagtgagagtgcacggccccggcatccagagcggcaccaccaacaagcccaacaagttcaccgtggagaccagaggcgccggcaccggcggcctgggcctggccgtggagggccccagcgaggccaagatgagctgcatggacaacaaggacggcagctgcagcgtggagtacatcccctacgaggccggcacctacagcctgaacgtgacctacggcggccaccaggtgcccggcagccccttcaaggtgcccgtgcacgacgtgaccgacgccagcaaggtgaagtgcagcggccccggcctgagccccggcatggtgagagccaacctgccccagagcttccaggtggacaccagcaaggccggcgtggcccccctgcaggtgaaggtgcagggccccaagggcctggtggagcccgtggacgtggtggacaacgccgacggcacccagaccgtgaactacgtgcccagcagagagggcccctacagcatcagcgtgctgtacggcgacgaggaggtgcccagaagccccttcaaggtgaaggtgctgcccacccacgacgccagcaaggtgaaggccagcggccccggcctgaacaccaccggcgtgcccgccagcctgcccgtggagttcaccatcgacgccaaggacgccggcgagggcctgctggccgtgcagatcaccgaccccgagggcaagcccaagaagacccacatccaggacaaccacgacggcacctacaccgtggcctacgtgcccgacgtgaccggcagatacaccatcctgatcaagtacggcggcgacgagatccccttcagcccctacagagtgagagccgtgcccaccggcgacgccagcaagtgcaccgtgaccgtgagcatcggcggccacggcctgggcgccggcatcggccccaccatccagatcggcgaggagaccgtgatcaccgtggacaccaaggccgccggcaagggcaaggtgacctgcaccgtgtgcacccccgacggcagcgaggtggacgtggacgtggtggagaacgaggacggcaccttcgacatcttctacaccgccccccagcccggcaagtacgtgatctgcgtgagattcggcggcgagcacgtgcccaacagccccttccaggtgaccgccctggccggcgaccagcccagcgtgcagccccccctgagaagccagcagctggccccccagtacacctacgcccagggcggccagcagacctgggcccccgagagacccctggtgggcgtgaacggcctggacgtgaccagcctgagacccttcgacctggtgatccccttcaccatcaagaagggcgagatcaccggcgaggtgagaatgcccagcggcaaggtggcccagcccaccatcaccgacaacaaggacggcaccgtgaccgtgagatacgcccccagcgaggccggcctgcacgagatggacatcagatacgacaacatgcacatccccggcagccccctgcagttctacgtggactacgtgaactgcggccacgtgaccgcctacggccccggcctgacccacggcgtggtgaacaagcccgccaccttcaccgtgaacaccaaggacgccggcgagggcggcctgagcctggccatcgagggccccagcaaggccgagatcagctgcaccgacaaccaggacggcacctgcagcgtgagctacctgcccgtgctgcccggcgactacagcatcctggtgaagtacaacgagcagcacgtgcccggcagccccttcaccgccagagtgaccggcgacgacagcatgagaatgagccacctgaaggtgggcagcgccgccgacatccccatcaacatcagcgagatcagcttcgaggacagaaaggacggcagctgcggcgtggcctacgtggtgcaggagcccggcgactacgaggtgagcgtgaagttcaacgaggagcacatccccgacagccccttcgtggtgcccgtggccagccccagcggcgacgccagaagactgaccgtgagcagcctgcaggagagcggcctgaaggtgaaccagcccgccagcttcgccgtgagcctgaacggcgccaagggcgccatcgacgccaaggtgcacagccccagcggcgccctggaggagtgctacgtgaccgagatcgaccaggacaagtacgccgtgagattcatccccagagagaacggcgtgtacctgatcgacgtgaagttcaacggcacccacatccccggcagccccttcaagatcagagtgggcgagcccggccacggcggcgaccccggcctggtgagcgcctacggcgccggcctggagggcggcgtgaccggcaaccccgccgagttcgtggtgaacaccagcaacgccggcgccggcgccctgagcgtgaccatcgacggccccagcaaggtgaagatggactgccaggagtgccccgagggctacagagtgacctacacccccatggcccccggcagctacctgatcagcatcaagtacggcggcccctaccacatcggcggcagccccttcaaggccaaggtgaccggccccagactggtgagcaaccacagcctgcacgagaccagcagcgtgttcgtggacagcctgaccaaggccacctgcgccccccagcacggcgcccccggccccggccccgccgacgccagcaaggtggtggccaagggcctgggcctgagcaaggcctacgtgggccagaagagcagcttcaccgtggactgcagcaaggccggcaacaacatgctgctggtgggcgtgcacggccccagaaccccctgcgaggagatcctggtgaagcacgtgggcagcagactgtacagcgtgagctacctgctgaaggacaagggcgagtacaccctggtggtgaagtggggcgacgagcacatccccggcagcccctacagagtggtggtgccctag

SEQ ID NO: 81749 - DNA, 2343 bp, synthetic construct
  misc_feature 1..2343: note = Description of Artificial Sequence: Synthetic coding sequence
  source 1..2343: mol_type = other DNA
atgcccagcggcaaggtggcccagcccaccatcaccgacaacaaggacggcaccgtgaccgtgagatacgcccccagcgaggccggcctgcacgagatggacatcagatacgacaacatgcacatccccggcagccccctgcagttctacgtggactacgtgaactgcggccacgtgaccgcctacggccccggcctgacccacggcgtggtgaacaagcccgccaccttcaccgtgaacaccaaggacgccggcgagggcgacgacagcatgagaatgagccacctgaaggtgggcagcgccgccgacatccccatcaacatcagcgagaccgacctgagcctgctgaccgccaccgtggtgccccccagcggcagagaggagccctgcctgctgaagagactgagaaacggccacgtgggcatcagcttcgtgcccaaggagaccggcgagcacctggtgcacgtgaagaagaacggccagcacgtggccagcagccccatccccgtggtgatcagccagagcgagatcggcgacgccagcagagtgagagtgagcggccagggcctgcacgagggccacaccttcgagcccgccgagttcatcatcgacaccagagacgccggctacggcggcctgagcctgagcatcgagggccccagcaaggtggacatcaacaccgaggacctggaggacggcacctgcagagtgacctactgccccaccgagcccggcaactacatcatcaacatcaagttcgccgaccagcacgtgcccggcagccccttcagcgtgaaggtgaccggcgagggcagagtgaaggagagcatcaccagaagaagaagagcccccagcgtggccaacgtgggcagccactgcgacctgagcctgaagatccccgagatcagcatccaggacatgaccgcccaggtgaccagccccagcggcaagacccacgaggccgagatcgtggagggcgagaaccacacctactgcatcagattcgtgcccgccgagatgggcacccacaccgtgagcgtgaagtacaagggccagcacgtgcccggcagccccttccagttcaccgtgggccccctgggcgagggcggcgcccacaaggtgagagccggcggccccggcctggagagagccgaggccggcgtgcccgccgagttcagcatctggaccagagaggccggcgccggcggcctggccatcgccgtggagggccccagcaaggccgagatcagcttcgaggacagaaaggacggcagctgcggcgtggcctacgtggtgcaggagcccggcgactacgaggtgagcgtgaagttcaacgaggagcacatccccgacagccccttcgtggtgcccgtggccagccccagcggcgacgccagaagactgaccgtgagcagcctgcaggagagcggcctgaaggtgaaccagcccgccagcttcgccgtgagcctgaacggcgccaagggcgccatcgacgccaaggtgcacagccccagcggcgccctggaggagtgctacgtgaccgagatcgaccaggacaagtacgccgtgagattcatccccagagagaacggcgtgtacctgatcgacgtgaagttcaacggcacccacatccccggcagccccttcaagatcagagtgggcgagcccggccacggcggcgaccccggcctggtgagcgcctacggcgccggcctggagggcggcgtgaccggcaaccccgccgagttcgtggtgaacaccagcaacgccggcgccggcgccctgagcgtgaccatcgacggccccagcaaggtgaagatggactgccaggagtgccccgagggctacagagtgacctacacccccatggcccccggcagctacctgatcagcatcaagtacggcggcccctaccacatcggcggcagccccttcaaggccaaggtgaccggccccagactggtgagcaaccacagcctgcacgagaccagcagcgtgttcgtggacagcctgaccaaggccacctgcgccccccagcacggcgcccccggccccggccccgccgacgccagcaaggtggtggccaagggcctgggcctgagcaaggcctacgtgggccagaagagcagcttcaccgtggactgcagcaaggccggcaacaacatgctgctggtgggcgtgcacggccccagaaccccctgcgaggagatcctggtgaagcacgtgggcagcagactgtacagcgtgagctacctgctgaaggacaagggcgagtacaccctggtggtgaagtggggcgacgagcacatccccggcagcccctacagagtggtggtgccctag

SEQ ID NO: 81750 - DNA, 7920 bp, synthetic construct
  misc_feature 1..7920: note = Description of Artificial Sequence: Synthetic coding sequence
  source 1..7920: mol_type = other DNA
atgagcagcagccacagcagagccggccagagcgccgccggcgccgcccccggcggcggcgtggacaccagagacgccgagatgcccgccaccgagaaggacctggccgaggacgccccctggaagaagatccagcagaacaccttcaccagatggtgcaacgagcacctgaagtgcgtgagcaagagaatcgccaacctgcagaccgacctgagcgacggcctgagactgatcgccctgctggaggtgctgagccagaagaagatgcacagaaagcacaaccagagacccaccttcagacagatgcagctggagaacgtgagcgtggccctggagttcctggacagagagagcatcaagctggtgagcatcgacagcaaggccatcgtggacggcaacctgaagctgatcctgggcctgatctggaccctgatcctgcactacagcatcagcatgcccatgtgggacgaggaggaggacgaggaggccaagaagcagacccccaagcagagactgctgggctggatccagaacaagctgccccagctgcccatcaccaacttcagcagagactggcagagcggcagagccctgggcgccctggtggacagctgcgcccccggcctgtgccccgactgggacagctgggacgccagcaagcccgtgaccaacgccagagaggccatgcagcaggccgacgactggctgggcatcccccaggtgatcacccccgaggagatcgtggaccccaacgtggacgagcacagcgtgatgacctacctgagccagttccccaaggccaagctgaagcccggcgcccccctgagacccaagctgaaccccaagaaggccagagcctacggccccggcatcgagcccaccggcaacatggtgaagaagagagccgagttcaccgtggagaccagaagcgccggccagggcgaggtgctggtgtacgtggaggaccccgccggccaccaggaggaggccaaggtgaccgccaacaacgacaagaacagaaccttcagcgtgtggtacgtgcccgaggtgaccggcacccacaaggtgaccgtgctgttcgccggccagcacatcgccaagagccccttcgaggtgtacgtggacaagagccagggcgacgccagcaaggtgaccgcccagggccccggcctggagcccagcggcaacatcgccaacaagaccacctacttcgagatcttcaccgccggcgccggcaccggcgaggtggaggtggtgatccaggaccccatgggccagaagggcaccgtggagccccagctggaggccagaggcgacagcacctacagatgcagctaccagcccaccatggagggcgtgcacaccgtgcacgtgaccttcgccggcgtgcccatccccagaagcccctacaccgtgaccgtgggccaggcctgcaaccccagcgcctgcagagccgtgggcagaggcctgcagcccaagggcgtgagagtgaaggagaccgccgacttcaaggtgtacaccaagggcgccggcagcggcgagctgaaggtgaccgtgaagggccccaagggcgaggagagagtgaagcagaaggacctgggcgacggcgtgtacggcttcgagtactaccccatggtgcccggcacctacatcgtgaccatcacctggggcggccagaacatcggcagaagccccttcgaggtgaaggtgggcaccgagtgcggcaaccagaaggtgagagcctggggccccggcctggagggcggcgtggtgggcaagagcgccgacttcgtggtggaggccatcggcgacgacgtgggcaccctgggcttcagcgtggagggccccagccaggccaagatcgagtgcgacgacaagggcgacggcagctgcgacgtgagatactggccccaggaggccggcgagtacgccgtgcacgtgctgtgcaacagcgaggacatcagactgagccccttcatggccgacatcagagacgccccccaggacttccaccccgacagagtgaaggccagaggccccggcctggagaagaccggcgtggccgtgaacaagcccgccgagttcaccgtggacgccaagcacggcggcaaggcccccctgagagtgcaggtgcaggacaacgagggctgccccgtggaggccctggtgaaggacaacggcaacggcacctacagctgcagctacgtgcccagaaagcccgtgaagcacaccgccatggtgagctggggcggcgtgagcatccccaacagccccttcagagtgaacgtgggcgccggcagccaccccaacaaggtgaaggtgtacggccccggcgtggccaagaccggcctgaaggcccacgagcccacctacttcaccgtggactgcgccgaggccggccagggcgacgtgagcatcggcatcaagtgcgcccccggcgtggtgggccccgccgaggccgacatcgacttcgacatcatcagaaacgacaacgacaccttcaccgtgaagtacacccccagaggcgccggcagctacaccatcatggtgctgttcgccgaccaggccacccccaccagccccatcagagtgaaggtggagcccagccacgacgccagcaaggtgaaggccgagggccccggcctgagcagaaccggcgtggagctgggcaagcccacccacttcaccgtgaacgccaaggccgccggcaagggcaagctggacgtgcagttcagcggcctgaccaagggcgacgccgtgagagacgtggacatcatcgaccaccacgacaacacctacaccgtgaagtacacccccgtgcagcagggccccgtgggcgtgaacgtgacctacggcggcgaccccatccccaagagccccttcagcgtggccgtgagccccagcctggacctgagcaagatcaaggtgagcggcctgggcgagaaggtggacgtgggcaaggaccaggagttcaccgtgaagagcaagggcgccggcggccagggcaaggtggccagcaagatcgtgggccccagcggcgccgccgtgccctgcaaggtggagcccggcctgggcgccgacaacagcgtggtgagattcctgcccagagaggagggcccctacgaggtggaggtgacctacgacggcgtgcccgtgcccggcagccccttccccctggaggccgtggcccccaccaagcccagcaaggtgaaggccttcggccccggcctgcagggcggcagcgccggcagccccgccagattcaccatcgacaccaagggcgccggcaccggcggcctgggcctgaccgtggagggcccctgcgaggcccagctggagtgcctggacaacggcgacggcacctgcagcgtgagctacgtgcccaccgagcccggcgactacaacatcaacatcctgttcgccgacacccacatccccggcagccccttcaaggcccacgtggtgccctgcttcgacgccagcaaggtgaagtgcagcggccccggcctggagagagccaccgccggcgaggtgggccagttccaggtggactgcagcagcgccggcagcgccgagctgaccatcgagatctgcagcgaggccggcctgcccgccgaggtgtacatccaggaccacggcgacggcacccacaccatcacctacatccccctgtgccccggcgcctacaccgtgaccatcaagtacggcggccagcccgtgcccaacttccccagcaagctgcaggtggagcccgccgtggacaccagcggcgtgcagtgctacggccccggcatcgagggccagggcgtgttcagagaggccaccaccgagttcagcgtggacgccagagccctgacccagaccggcggcccccacgtgaaggccagagtggccaaccccagcggcaacctgaccgagacctacgtgcaggacagaggcgacggcatgtacaaggtggagtacaccccctacgaggagggcctgcacagcgtggacgtgacctacgacggcagccccgtgcccagcagccccttccaggtgcccgtgaccgagggctgcgaccccagcagagtgagagtgcacggccccggcatccagagcggcaccaccaacaagcccaacaagttcaccgtggagaccagaggcgccggcaccggcggcctgggcctggccgtggagggccccagcgaggccaagatgagctgcatggacaacaaggacggcagctgcagcgtggagtacatcccctacgaggccggcacctacagcctgaacgtgacctacggcggccaccaggtgcccggcagccccttcaaggtgcccgtgcacgacgtgaccgacgccagcaaggtgaagtgcagcggccccggcctgagccccggcatggtgagagccaacctgccccagagcttccaggtggacaccagcaaggccggcgtggcccccctgcaggtgaaggtgcagggccccaagggcctggtggagcccgtggacgtggtggacaacgccgacggcacccagaccgtgaactacgtgcccagcagagagggcccctacagcatcagcgtgctgtacggcgacgaggaggtgcccagaagccccttcaaggtgaaggtgctgcccacccacgacgccagcaaggtgaaggccagcggccccggcctgaacaccaccggcgtgcccgccagcctgcccgtggagttcaccatcgacgccaaggacgccggcgagggcctgctggccgtgcagatcaccgaccccgagggcaagcccaagaagacccacatccaggacaaccacgacggcacctacaccgtggcctacgtgcccgacgtgaccggcagatacaccatcctgatcaagtacggcggcgacgagatccccttcagcccctacagagtgagagccgtgcccaccggcgacgccagcaagtgcaccgtgaccggcgccggcatcggccccaccatccagatcggcgaggagaccgtgatcaccgtggacaccaaggccgccggcaagggcaaggtgacctgcaccgtgtgcacccccgacggcagcgaggtggacgtggacgtggtggagaacgaggacggcaccttcgacatcttctacaccgccccccagcccggcaagtacgtgatctgcgtgagattcggcggcgagcacgtgcccaacagccccttccaggtgaccgccctggccggcgaccagcccagcgtgcagccccccctgagaagccagcagctggccccccagtacacctacgcccagggcggccagcagacctgggcccccgagagacccctggtgggcgtgaacggcctggacgtgaccagcctgagacccttcgacctggtgatccccttcaccatcaagaagggcgagatcaccggcgaggtgagaatgcccagcggcaaggtggcccagcccaccatcaccgacaacaaggacggcaccgtgaccgtgagatacgcccccagcgaggccggcctgcacgagatggacatcagatacgacaacatgcacatccccggcagccccctgcagttctacgtggactacgtgaactgcggccacgtgaccgcctacggccccggcctgacccacggcgtggtgaacaagcccgccaccttcaccgtgaacaccaaggacgccggcgagggcggcctgagcctggccatcgagggccccagcaaggccgagatcagctgcaccgacaaccaggacggcacctgcagcgtgagctacctgcccgtgctgcccggcgactacagcatcctggtgaagtacaacgagcagcacgtgcccggcagccccttcaccgccagagtgaccggcgacgacagcatgagaatgagccacctgaaggtgggcagcgccgccgacatccccatcaacatcagcgagaccgacctgagcctgctgaccgccaccgtggtgccccccagcggcagagaggagccctgcctgctgaagagactgagaaacggccacgtgggcatcagcttcgtgcccaaggagaccggcgagcacctggtgcacgtgaagaagaacggccagcacgtggccagcagccccatccccgtggtgatcagccagagcgagatcggcgacgccagcagagtgagagtgagcggccagggcctgcacgagggccacaccttcgagcccgccgagttcatcatcgacaccagagacgccggctacggcggcctgagcctgagcatcgagggccccagcaaggtggacatcaacaccgaggacctggaggacggcacctgcagagtgacctactgccccaccgagcccggcaactacatcatcaacatcaagttcgccgaccagcacgtgcccggcagccccttcagcgtgaaggtgaccggcgagggcagagtgaaggagagcatcaccagaagaagaagagcccccagcgtggccaacgtgggcagccactgcgacctgagcctgaagatccccgagatcagcatccaggacatgaccgcccaggtgaccagccccagcggcaagacccacgaggccgagatcgtggagggcgagaaccacacctactgcatcagattcgtgcccgccgagatgggcacccacaccgtgagcgtgaagtacaagggccagcacgtgcccggcagccccttccagttcaccgtgggccccctgggcgagggcggcgcccacaaggtgagagccggcggccccggcctggagagagccgaggccggcgtgcccgccgagttcagcatctggaccagagaggccggcgccggcggcctggccatcgccgtggagggccccagcaaggccgagatcagcttcgaggacagaaaggacggcagctgcggcgtggcctacgtggtgcaggagcccggcgactacgaggtgagcgtgaagttcaacgaggagcacatccccgacagccccttcgtggtgcccgtggccagccccagcggcgacgccagaagactgaccgtgagcagcctgcaggagagcggcctgaaggtgaaccagcccgccagcttcgccgtgagcctgaacggcgccaagggcgccatcgacgccaaggtgcacagccccagcggcgccctggaggagtgctacgtgaccgagatcgaccaggacaagtacgccgtgagattcatccccagagagaacggcgtgtacctgatcgacgtgaagttcaacggcacccacatccccggcagccccttcaagatcagagtgggcgagcccggccacggcggcgaccccggcctggtgagcgcctacggcgccggcctggagggcggcgtgaccggcaaccccgccgagttcgtggtgaacaccagcaacgccggcgccggcgccctgagcgtgaccatcgacggccccagcaaggtgaagatggactgccaggagtgccccgagggctacagagtgacctacacccccatggcccccggcagctacctgatcagcatcaagtacggcggcccctaccacatcggcggcagccccttcaaggccaaggtgaccggccccagactggtgagcaaccacagcctgcacgagaccagcagcgtgttcgtggacagcctgaccaaggccacctgcgccccccagcacggcgcccccggccccggccccgccgacgccagcaaggtggtggccaagggcctgggcctgagcaaggcctacgtgggccagaagagcagcttcaccgtggactgcagcaaggccggcaacaacatgctgctggtgggcgtgcacggccccagaaccccctgcgaggagatcctggtgaagcacgtgggcagcagactgtacagcgtgagctacctgctgaaggacaagggcgagtacaccctggtggtgaagtggggcgacgagcacatccccggcagcccctacagagtggtggtgccctag

SEQ ID NO: 81751 - DNA, 7809 bp, synthetic construct
  misc_feature 1..7809: note = Description of Artificial Sequence: Synthetic coding sequence
  source 1..7809: mol_type = other DNA
atgcccgtgaccgagaaggacctggccgaggacgccccctggaagaagatccagcagaacaccttcaccagatggtgcaacgagcacctgaagtgcgtgaacaagagaatcggcaacctgcagaccgacctgagcgacggcctgagactgatcgccctgctggaggtgctgagccagaagagaatgtacagaaagtaccaccagagacccaccttcagacagatgcagctggagaacgtgagcgtggccctggagttcctggacagagagagcatcaagctggtgagcatcgacagcaaggccatcgtggacggcaacctgaagctgatcctgggcctggtgtggaccctgatcctgcactacagcatcagcatgcccgtgtgggaggacgagggcgacgacgacgccaagaagcagacccccaagcagagactgctgggctggatccagaacaagatcccctacctgcccatcaccaacttcaaccagaactggcaggacggcaaggccctgggcgccctggtggacagctgcgcccccggcctgtgccccgactgggagagctgggacccccagaagcccgtggacaacgccagagaggccatgcagcaggccgacgactggctgggcgtgccccaggtgatcacccccgaggagatcatccaccccgacgtggacgagcacagcgtgatgacctacctgagccagttccccaaggccaagctgaagcccggcgcccccctgaagcccaagctgaaccccaagaaggccagagcctacggcagaggcatcgagcccaccggcaacatggtgaagcagcccgccaagttcaccgtggacaccatcagcgccggccagggcgacgtgatggtgttcgtggaggaccccgagggcaacaaggaggaggcccaggtgacccccgacagcgacaagaacaagacctacagcgtggagtacctgcccaaggtgaccggcctgcacaaggtgaccgtgctgttcgccggccagcacatcagcaagagccccttcgaggtgagcgtggacaaggcccagggcgacgccagcaaggtgaccgccaagggccccggcctggaggccgtgggcaacatcgccaacaagcccacctacttcgacatctacaccgccggcgccggcgtgggcgacatcggcgtggaggtggaggacccccagggcaagaacaccgtggagctgctggtggaggacaagggcaaccaggtgtacagatgcgtgtacaagcccatgcagcccggcccccacgtggtgaagatcttcttcgccggcgacaccatccccaagagccccttcgtggtgcaggtgggcgaggcctgcaaccccaacgcctgcagagccagcggcagaggcctgcagcccaagggcgtgagaatcagagagaccaccgacttcaaggtggacaccaaggccgccggcagcggcgagctgggcgtgaccatgaagggccccaagggcctggaggagctggtgaagcagaaggacttcctggacggcgtgtacgccttcgagtactaccccagcacccccggcagatacagcatcgccatcacctggggcggccaccacatccccaagagccccttcgaggtgcaggtgggccccgaggccggcatgcagaaggtgagagcctggggccccggcctgcacggcggcatcgtgggcagaagcgccgacttcgtggtggagagcatcggcagcgaggtgggcagcctgggcttcgccatcgagggccccagccaggccaagatcgagtacaacgaccagaacgacggcagctgcgacgtgaagtactggcccaaggagcccggcgagtacgccgtgcacatcatgtgcgacgacgaggacatcaaggacagcccctacatggccttcatccaccccgccaccggcggctacaaccccgacctggtgagagcctacggccccggcctggagaagagcggctgcatcgtgaacaacctggccgagttcaccgtggaccccaaggacgccggcaaggcccccctgaagatcttcgcccaggacggcgagggccagagaatcgacatccagatgaagaacagaatggacggcacctacgcctgcagctacacccccgtgaaggccatcaagcacaccatcgccgtggtgtggggcggcgtgaacatcccccacagcccctacagagtgaacatcggccagggcagccacccccagaaggtgaaggtgttcggccccggcgtggagagaagcggcctgaaggccaacgagcccacccacttcaccgtggactgcaccgaggccggcgagggcgacgtgagcgtgggcatcaagtgcgacgccagagtgctgagcgaggacgaggaggacgtggacttcgacatcatccacaacgccaacgacaccttcaccgtgaagtacgtgccccccgccgccggcagatacaccatcaaggtgctgttcgccagccaggagatccccgccagccccttcagagtgaaggtggaccccagccacgacgccagcaaggtgaaggccgagggccccggcctgagcaaggccggcgtggagaacggcaagcccacccacttcaccgtgtacaccaagggcgccggcaaggcccccctgaacgtgcagttcaacagccccctgcccggcgacgccgtgaaggacctggacatcatcgacaactacgactacagccacaccgtgaagtacacccccacccagcagggcaacatgcaggtgctggtgacctacggcggcgaccccatccccaagagccccttcaccgtgggcgtggccgcccccctggacctgagcaagatcaagctgaacggcctggagaacagagtggaggtgggcaaggaccaggagttcaccgtggacaccagaggcgccggcggccagggcaagctggacgtgaccatcctgagccccagcagaaaggtggtgccctgcctggtgacccccgtgaccggcagagagaacagcaccgccaagttcatccccagagaggagggcctgtacgccgtggacgtgacctacgacggccaccccgtgcccggcagcccctacaccgtggaggccagcctgccccccgaccccagcaaggtgaaggcccacggccccggcctggagggcggcctggtgggcaagcccgccgagttcaccatcgacaccaagggcgccggcaccggcggcctgggcctgaccgtggagggcccctgcgaggccaagatcgagtgcagcgacaacggcgacggcacctgcagcgtgagctacctgcccaccaagcccggcgagtacttcgtgaacatcctgttcgaggaggtgcacatccccggcagccccttcaaggccgacatcgagatgcccttcgaccccagcaaggtggtggccagcggccccggcctggagcacggcaaggtgggcgaggccggcctgctgagcgtggactgcagcgaggccggccccggcgccctgggcctggaggccgtgagcgacagcggcaccaaggccgaggtgagcatccagaacaacaaggacggcacctacgccgtgacctacgtgcccctgaccgccggcatgtacaccctgaccatgaagtacggcggcgagctggtgccccacttccccgccagagtgaaggtggagcccgccgtggacaccagcagaatcaaggtgttcggccccggcatcgagggcaaggacgtgttcagagaggccaccaccgacttcaccgtggacagcagacccctgacccaggtgggcggcgaccacatcaaggcccacatcgccaaccccagcggcgccagcaccgagtgcttcgtgaccgacaacgccgacggcacctaccaggtggagtacacccccttcgagaagggcctgcacgtggtggaggtgacctacgacgacgtgcccatccccaacagccccttcaaggtggccgtgaccgagggctgccagcccagcagagtgcaggcccagggccccggcctgaaggaggccttcaccaacaagcccaacgtgttcaccgtggtgaccagaggcgccggcatcggcggcctgggcatcaccgtggagggccccagcgagagcaagatcaactgcagagacaacaaggacggcagctgcagcgccgagtacatccccttcgcccccggcgactacgacgtgaacatcacctacggcggcgcccacatccccggcagccccttcagagtgcccgtgaaggacgtggtggaccccagcaaggtgaagatcgccggccccggcctgggcagcggcgtgagagccagagtgctgcagagcttcaccgtggacagcagcaaggccggcctggcccccctggaggtgagagtgctgggccccagaggcctggtggagcccgtgaacgtggtggacaacggcgacggcacccacaccgtgacctacacccccagccaggagggcccctacatggtgagcgtgaagtacgccgacgaggagatccccagaagccccttcaaggtgaaggtgctgcccacctacgacgccagcaaggtgaccgccagcggccccggcctgagcagctacggcgtgcccgccagcctgcccgtggacttcgccatcgacgccagagacgccggcgagggcctgctggccgtgcagatcaccgaccaggagggcaagcccaagagagccatcgtgcacgacaacaaggacggcacctacgccgtgacctacatccccgacaagaccggcagatacatgatcggcgtgacctacggcggcgacgacatccccctgagcccctacagaatcagagccacccagaccggcgacgccagcaagtgcctggccaccggccccggcatcgccagcaccgtgaagaccggcgaggaggtgggcttcgtggtggacgccaagaccgccggcaagggcaaggtgacctgcaccgtgctgacccccgacggcaccgaggccgaggccgacgtgatcgagaacgaggacggcacctacgacatcttctacaccgccgccaagcccggcacctacgtgatctacgtgagattcggcggcgtggacatccccaacagccccttcaccgtgatggccaccgacggcgaggtgaccgccgtggaggaggcccccgtgaacgcctgcccccccggcttcagaccctgggtgaccgaggaggcctacgtgcccgtgagcgacatgaacggcctgggcttcaagcccttcgacctggtgatccccttcgccgtgagaaagggcgagatcaccggcgaggtgcacatgcccagcggcaagaccgccacccccgagatcgtggacaacaaggacggcaccgtgaccgtgagatacgcccccaccgaggtgggcctgcacgagatgcacatcaagtacatgggcagccacatccccgagagccccctgcagttctacgtgaactaccccaacagcggcagcgtgagcgcctacggccccggcctggtgtacggcgtggccaacaagaccgccaccttcaccatcgtgaccgaggacgccggcgagggcggcctggacctggccatcgagggccccagcaaggccgagatcagctgcatcgacaacaaggacggcacctgcaccgtgacctacctgcccaccctgcccggcgactacagcatcctggtgaagtacaacgacaagcacatccccggcagccccttcaccgccaagatcaccgacgacagcagaagatgcagccaggtgaagctgggcagcgccgccgacttcctgctggacatcagcgagaccgacctgagcagcctgaccgccagcatcaaggcccccagcggcagagacgagccctgcctgctgaagagactgcccaacaaccacatcggcatcagcttcatccccagagaggtgggcgagcacctggtgagcatcaagaagaacggcaaccacgtggccaacagccccgtgagcatcatggtggtgcagagcgagatcggcgacgccagaagagccaaggtgtacggcagaggcctgagcgagggcagaaccttcgagatgagcgacttcatcgtggacaccagagacgccggctacggcggcatcagcctggccgtggagggccccagcaaggtggacatccagaccgaggacctggaggacggcacctgcaaggtgagctacttccccaccgtgcccggcgtgtacatcgtgagcaccaagttcgccgacgagcacgtgcccggcagccccttcaccgtgaagatcagcggcgagggcagagtgaaggagagcatcaccagaaccagcagagcccccagcgtggccaccgtgggcagcatctgcgacctgaacctgaagatccccgagatcaacagcagcgacatgagcgcccacgtgaccagccccagcggcagagtgaccgaggccgagatcgtgcccatgggcaagaacagccactgcgtgagattcgtgccccaggagatgggcgtgcacaccgtgagcgtgaagtacagaggccagcacgtgaccggcagccccttccagttcaccgtgggccccctgggcgagggcggcgcccacaaggtgagagccggcggccccggcctggagagaggcgaggccggcgtgcccgccgagttcagcatctggaccagagaggccggcgccggcggcctgagcatcgccgtggagggccccagcaaggccgagatcaccttcgacgaccacaagaacggcagctgcggcgtgagctacatcgcccaggagcccggcaactacgaggtgagcatcaagttcaacgacgagcacatccccgagagcccctacctggtgcccgtgatcgcccccagcgacgacgccagaagactgaccgtgatgagcctgcaggagagcggcctgaaggtgaaccagcccgccagcttcgccatcagactgaacggcgccaagggcaagatcgacgccaaggtgcacagccccagcggcgccgtggaggagtgccacgtgagcgagctggagcccgacaagtacgccgtgagattcatcccccacgagaacggcgtgcacaccatcgacgtgaagttcaacggcagccacgtggtgggcagccccttcaaggtgagagtgggcgagcccggccaggccggcaaccccgccctggtgagcgcctacggcaccggcctggagggcggcaccaccggcatccagagcgagttcttcatcaacaccaccagagccggccccggcaccctgagcgtgaccatcgagggccccagcaaggtgaagatggactgccaggagacccccgagggctacaaggtgatgtacacccccatggcccccggcaactacctgatcagcgtgaagtacggcggccccaaccacatcgtgggcagccccttcaaggccaaggtgaccggccagagactggtgagccccggcagcgccaacgagaccagcagcatcctggtggagagcgtgaccagaagcagcaccgagacctgctacagcgccatccccaaggccagcagcgacgccagcaaggtgaccagcaagggcgccggcctgagcaaggccttcgtgggccagaagagcagcttcctggtggactgcagcaaggccggcagcaacatgctgctgatcggcgtgcacggccccaccaccccctgcgaggaggtgagcatgaagcacgtgggcaaccagcagtacaacgtgacctacgtggtgaaggagagaggcgactacgtgctggccgtgaagtggggcgaggagcacatccccggcagccccttccacgtgaccgtgccctag

SEQ ID NO: 81752 - DNA, 7686 bp, synthetic construct
  misc_feature 1..7686: note = Description of Artificial Sequence: Synthetic coding sequence
  source 1..7686: mol_type = other DNA
atgcccgtgaccgagaaggacctggccgaggacgccccctggaagaagatccagcagaacaccttcaccagatggtgcaacgagcacctgaagtgcgtgaacaagagaatcggcaacctgcagaccgacctgagcgacggcctgagactgatcgccctgctggaggtgctgagccagaagagaatgtacagaaagtaccaccagagacccaccttcagacagatgcagctggagaacgtgagcgtggccctggagttcctggacagagagagcatcaagctggtgagcatcgacagcaaggccatcgtggacggcaacctgaagctgatcctgggcctggtgtggaccctgatcctgcactacagcatcagcatgcccgtgtgggaggacgagggcgacgacgacgccaagaagcagacccccaagcagagactgctgggctggatccagaacaagatcccctacctgcccatcaccaacttcaaccagaactggcaggacggcaaggccctgggcgccctggtggacagctgcgcccccggcctgtgccccgactgggagagctgggacccccagaagcccgtggacaacgccagagaggccatgcagcaggccgacgactggctgggcgtgccccaggtgatcacccccgaggagatcatccaccccgacgtggacgagcacagcgtgatgacctacctgagccagttccccaaggccaagctgaagcccggcgcccccctgaagcccaagctgaaccccaagaaggccagagcctacggcagaggcatcgagcccaccggcaacatggtgaagcagcccgccaagttcaccgtggacaccatcagcgccggccagggcgacgtgatggtgttcgtggaggaccccgagggcaacaaggaggaggcccaggtgacccccgacagcgacaagaacaagacctacagcgtggagtacctgcccaaggtgaccggcctgcacaaggtgaccgtgctgttcgccggccagcacatcagcaagagccccttcgaggtgagcgtggacaaggcccagggcgacgccagcaaggtgaccgccaagggccccggcctggaggccgtgggcaacatcgccaacaagcccacctacttcgacatctacaccgccggcgccggcgtgggcgacatcggcgtggaggtggaggacccccagggcaagaacaccgtggagctgctggtggaggacaagggcaaccaggtgtacagatgcgtgtacaagcccatgcagcccggcccccacgtggtgaagatcttcttcgccggcgacaccatccccaagagccccttcgtggtgcaggtgggcgaggcctgcaaccccaacgcctgcagagccagcggcagaggcctgcagcccaagggcgtgagaatcagagagaccaccgacttcaaggtggacaccaaggccgccggcagcggcgagctgggcgtgaccatgaagggccccaagggcctggaggagctggtgaagcagaaggacttcctggacggcgtgtacgccttcgagtactaccccagcacccccggcagatacagcatcgccatcacctggggcggccaccacatccccaagagccccttcgaggtgcaggtgggccccgaggccggcatgcagaaggtgagagcctggggccccggcctgcacggcggcatcgtgggcagaagcgccgacttcgtggtggagagcatcggcagcgaggtgggcagcctgggcttcgccatcgagggccccagccaggccaagatcgagtacaacgaccagaacgacggcagctgcgacgtgaagtactggcccaaggagcccggcgagtacgccgtgcacatcatgtgcgacgacgaggacatcaaggacagcccctacatggccttcatccaccccgccaccggcggctacaaccccgacctggtgagagcctacggccccggcctggagaagagcggctgcatcgtgaacaacctggccgagttcaccgtggaccccaaggacgccggcaaggcccccctgaagatcttcgcccaggacggcgagggccagagaatcgacatccagatgaagaacagaatggacggcacctacgcctgcagctacacccccgtgaaggccatcaagcacaccatcgccgtggtgtggggcggcgtgaacatcccccacagcccctacagagtgaacatcggccagggcagccacccccagaaggtgaaggtgttcggccccggcgtggagagaagcggcctgaaggccaacgagcccacccacttcaccgtggactgcaccgaggccggcgagggcgacgtgagcgtgggcatcaagtgcgacgccagagtgctgagcgaggacgaggaggacgtggacttcgacatcatccacaacgccaacgacaccttcaccgtgaagtacgtgccccccgccgccggcagatacaccatcaaggtgctgttcgccagccaggagatccccgccagccccttcagagtgaaggtggaccccagccacgacgccagcaaggtgaaggccgagggccccggcctgagcaaggccggcgtggagaacggcaagcccacccacttcaccgtgtacaccaagggcgccggcaaggcccccctgaacgtgcagttcaacagccccctgcccggcgacgccgtgaaggacctggacatcatcgacaactacgactacagccacaccgtgaagtacacccccacccagcagggcaacatgcaggtgctggtgacctacggcggcgaccccatccccaagagccccttcaccgtgggcgtggccgcccccctggacctgagcaagatcaagctgaacggcctggagaacagagtggaggtgggcaaggaccaggagttcaccgtggacaccagaggcgccggcggccagggcaagctggacgtgaccatcctgagccccagcagaaaggtggtgccctgcctggtgacccccgtgaccggcagagagaacagcaccgccaagttcatccccagagaggagggcctgtacgccgtggacgtgacctacgacggccaccccgtgcccggcagcccctacaccgtggaggccagcctgccccccgaccccagcaaggtgaaggcccacggccccggcctggagggcggcctggtgggcaagcccgccgagttcaccatcgacaccaagggcgccggcaccggcggcctgggcctgaccgtggagggcccctgcgaggccaagatcgagtgcagcgacaacggcgacggcacctgcagcgtgagctacctgcccaccaagcccggcgagtacttcgtgaacatcctgttcgaggaggtgcacatccccggcagccccttcaaggccgacatcgagatgcccttcgaccccagcaaggtggtggccagcggccccggcctggagcacggcaaggtgggcgaggccggcctgctgagcgtggactgcagcgaggccggccccggcgccctgggcctggaggccgtgagcgacagcggcaccaaggccgaggtgagcatccagaacaacaaggacggcacctacgccgtgacctacgtgcccctgaccgccggcatgtacaccctgaccatgaagtacggcggcgagctggtgccccacttccccgccagagtgaaggtggagcccgccgtggacaccagcagaatcaaggtgttcggccccggcatcgagggcaaggacgtgttcagagaggccaccaccgacttcaccgtggacagcagacccctgacccaggtgggcggcgaccacatcaaggcccacatcgccaaccccagcggcgccagcaccgagtgcttcgtgaccgacaacgccgacggcacctaccaggtggagtacacccccttcgagaagggcctgcacgtggtggaggtgacctacgacgacgtgcccatccccaacagccccttcaaggtggccgtgaccgagggctgccagcccagcagagtgcaggcccagggccccggcctgaaggaggccttcaccaacaagcccaacgtgttcaccgtggtgaccagaggcgccggcatcggcggcctgggcatcaccgtggagggccccagcgagagcaagatcaactgcagagacaacaaggacggcagctgcagcgccgagtacatccccttcgcccccggcgactacgacgtgaacatcacctacggcggcgcccacatccccggcagccccttcagagtgcccgtgaaggacgtggtggaccccagcaaggtgaagatcgccggccccggcctgggcagcggcgtgagagccagagtgctgcagagcttcaccgtggacagcagcaaggccggcctggcccccctggaggtgagagtgctgggccccagaggcctggtggagcccgtgaacgtggtggacaacggcgacggcacccacaccgtgacctacacccccagccaggagggcccctacatggtgagcgtgaagtacgccgacgaggagatccccagaagccccttcaaggtgaaggtgctgcccacctacgacgccagcaaggtgaccgccagcggccccggcctgagcagctacggcgtgcccgccagcctgcccgtggacttcgccatcgacgccagagacgccggcgagggcctgctggccgtgcagatcaccgaccaggagggcaagcccaagagagccatcgtgcacgacaacaaggacggcacctacgccgtgacctacatccccgacaagaccggcagatacatgatcggcgtgacctacggcggcgacgacatccccctgagcccctacagaatcagagccacccagaccggcgacgccagcaagtgcctggccaccggccccggcatcgccagcaccgtgaagaccggcgaggaggtgggcttcgtggtggacgccaagaccgccggcaagggcaaggtgacctgcaccgtgctgacccccgacggcaccgaggccgaggccgacgtgatcgagaacgaggacggcacctacgacatcttctacaccgccgccaagcccggcacctacgtgatctacgtgagattcggcggcgtggacatccccaacagccccttcaccgtgatggccaccgacggcgaggtgaccgccgtggaggaggcccccgtgaacgcctgcccccccggcttcagaccctgggtgaccgaggaggcctacgtgcccgtgagcgacatgaacggcctgggcttcaagcccttcgacctggtgatccccttcgccgtgagaaagggcgagatcaccggcgaggtgcacatgcccagcggcaagaccgccacccccgagatcgtggacaacaaggacggcaccgtgaccgtgagatacgcccccaccgaggtgggcctgcacgagatgcacatcaagtacatgggcagccacatccccgagagccccctgcagttctacgtgaactaccccaacagcggcagcgtgagcgcctacggccccggcctggtgtacggcgtggccaacaagaccgccaccttcaccatcgtgaccgaggacgccggcgagggcggcctggacctggccatcgagggccccagcaaggccgagatcagctgcatcgacaacaaggacggcacctgcaccgtgacctacctgcccaccctgcccggcgactacagcatcctggtgaagtacaacgacaagcacatccccggcagccccttcaccgccaagatcaccgacgacagcagaagatgcagccaggtgaagctgggcagcgccgccgacttcctgctggacatcagcgagaccgacctgagcagcctgaccgccagcatcaaggcccccagcggcagagacgagccctgcctgctgaagagactgcccaacaaccacatcggcatcagcttcatccccagagaggtgggcgagcacctggtgagcatcaagaagaacggcaaccacgtggccaacagccccgtgagcatcatggtggtgcagagcgagatcggcgacgccagaagagccaaggtgtacggcagaggcctgagcgagggcagaaccttcgagatgagcgacttcatcgtggacaccagagacgccggctacggcggcatcagcctggccgtggagggccccagcaaggtggacatccagaccgaggacctggaggacggcacctgcaaggtgagctacttccccaccgtgcccggcgtgtacatcgtgagcaccaagttcgccgacgagcacgtgcccgagatcaacagcagcgacatgagcgcccacgtgaccagccccagcggcagagtgaccgaggccgagatcgtgcccatgggcaagaacagccactgcgtgagattcgtgccccaggagatgggcgtgcacaccgtgagcgtgaagtacagaggccagcacgtgaccggcagccccttccagttcaccgtgggccccctgggcgagggcggcgcccacaaggtgagagccggcggccccggcctggagagaggcgaggccggcgtgcccgccgagttcagcatctggaccagagaggccggcgccggcggcctgagcatcgccgtggagggccccagcaaggccgagatcaccttcgacgaccacaagaacggcagctgcggcgtgagctacatcgcccaggagcccggcaactacgaggtgagcatcaagttcaacgacgagcacatccccgagagcccctacctggtgcccgtgatcgcccccagcgacgacgccagaagactgaccgtgatgagcctgcaggagagcggcctgaaggtgaaccagcccgccagcttcgccatcagactgaacggcgccaagggcaagatcgacgccaaggtgcacagccccagcggcgccgtggaggagtgccacgtgagcgagctggagcccgacaagtacgccgtgagattcatcccccacgagaacggcgtgcacaccatcgacgtgaagttcaacggcagccacgtggtgggcagccccttcaaggtgagagtgggcgagcccggccaggccggcaaccccgccctggtgagcgcctacggcaccggcctggagggcggcaccaccggcatccagagcgagttcttcatcaacaccaccagagccggccccggcaccctgagcgtgaccatcgagggccccagcaaggtgaagatggactgccaggagacccccgagggctacaaggtgatgtacacccccatggcccccggcaactacctgatcagcgtgaagtacggcggccccaaccacatcgtgggcagccccttcaaggccaaggtgaccggccagagactggtgagccccggcagcgccaacgagaccagcagcatcctggtggagagcgtgaccagaagcagcaccgagacctgctacagcgccatccccaaggccagcagcgacgccagcaaggtgaccagcaagggcgccggcctgagcaaggccttcgtgggccagaagagcagcttcctggtggactgcagcaaggccggcagcaacatgctgctgatcggcgtgcacggccccaccaccccctgcgaggaggtgagcatgaagcacgtgggcaaccagcagtacaacgtgacctacgtggtgaaggagagaggcgactacgtgctggccgtgaagtggggcgaggagcacatccccggcagccccttccacgtgaccgtgccctag

SEQ ID NO: 81753 - DNA, 6453 bp, synthetic construct
  misc_feature 1..6453: note = Description of Artificial Sequence: Synthetic coding sequence
  source 1..6453: mol_type = other DNA
atgcccgtgaccgagaaggacctggccgaggacgccccctggaagaagatccagcagaacaccttcaccagatggtgcaacgagcacctgaagtgcgtgaacaagagaatcggcaacctgcagaccgacctgagcgacggcctgagactgatcgccctgctggaggtgctgagccagaagagaatgtacagaaagtaccaccagagacccaccttcagacagatgcagctggagaacgtgagcgtggccctggagttcctggacagagagagcatcaagctggtgagcatcgacagcaaggccatcgtggacggcaacctgaagctgatcctgggcctggtgtggaccctgatcctgcactacagcatcagcatgcccgtgtgggaggacgagggcgacgacgacgccaagaagcagacccccaagcagagactgctgggctggatccagaacaagatcccctacctgcccatcaccaacttcaaccagaactggcaggacggcaaggccctgggcgccctggtggacagctgcgcccccggcctgtgccccgactgggagagctgggacccccagaagcccgtggacaacgccagagaggccatgcagcaggccgacgactggctgggcgtgccccaggtgatcacccccgaggagatcatccaccccgacgtggacgagcacagcgtgatgacctacctgagccagttccccaaggccaagctgaagcccggcgcccccctgaagcccaagctgaaccccaagaaggccagagcctacggcagaggcatcgagcccaccggcaacatggtgaagcagcccgccaagttcaccgtggacaccatcagcgccggccagggcgacgtgatggtgttcgtggaggaccccgagggcaacaaggaggaggcccaggtgacccccgacagcgacaagaacaagacctacagcgtggagtacctgcccaaggtgaccggcctgcacaaggtgaccgtgctgttcgccggccagcacatcagcaagagccccttcgaggtgagcgtggacaaggcccagggcgacgccagcaaggtgaccgccaagggccccggcctggaggccgtgggcaacatcgccaacaagcccacctacttcgacatctacaccgccggcgccggcgtgggcgacatcggcgtggaggtggaggacccccagggcaagaacaccgtggagctgctggtggaggacaagggcaaccaggtgtacagatgcgtgtacaagcccatgcagcccggcccccacgtggtgaagatcttcttcgccggcgacaccatccccaagagccccttcgtggtgcaggtgggcgaggcctgcaaccccaacgcctgcagagccagcggcagaggcctgcagcccaagggcgtgagaatcagagagaccaccgacttcaaggtggacaccaaggccgccggcagcggcgagctgggcgtgaccatgaagggccccaagggcctggaggagctggtgaagcagaaggacttcctggacggcgtgtacgccttcgagtactaccccagcacccccggcagatacagcatcgccatcacctggggcggccaccacatccccaagagccccttcgaggtgcaggtgggccccgaggccggcatgcagaaggtgagagcctggggccccggcctgcacggcggcatcgtgggcagaagcgccgacttcgtggtggagagcatcggcagcgaggtgggcagcctgggcttcgccatcgagggccccagccaggccaagatcgagtacaacgaccagaacgacggcagctgcgacgtgaagtactggcccaaggagcccggcgagtacgccgtgcacatcatgtgcgacgacgaggacatcaaggacagcccctacatggccttcatccaccccgccaccggcggctacaaccccgacctggtgagagcctacggccccggcctggagaagagcggctgcatcgtgaacaacctggccgagttcaccgtggaccccaaggacgccggcaaggcccccctgaagatcttcgcccaggacggcgagggccagagaatcgacatccagatgaagaacagaatggacggcacctacgcctgcagctacacccccgtgaaggccatcaagcacaccatcgccgtggtgtggggcggcgtgaacatcccccacagcccctacagagtgaacatcggccagggcagccacccccagaaggtgaaggtgttcggccccggcgtggagagaagcggcctgaaggccaacgagcccacccacttcaccgtggactgcaccgaggccggcgagggcgacgtgagcgtgggcatcaagtgcgacgccagagtgctgagcgaggacgaggaggacgtggacttcgacatcatccacaacgccaacgacaccttcaccgtgaagtacgtgccccccgccgccggcagatacaccatcaaggtgctgttcgccagccaggagatccccgccagccccttcagagtgaaggtggaccccagccacgacgccagcaaggtgaaggccgagggccccggcctgagcaaggccggcgtggagaacggcaagcccacccacttcaccgtgtacaccaagggcgccggcaaggcccccctgaacgtgcagttcaacagccccctgcccggcgacgccgtgaaggacctggacatcatcgacaactacgactacagccacaccgtgaagtacacccccacccagcagggcaacatgcaggtgctggtgacctacggcggcgaccccatccccaagagccccttcaccgtgggcgtggccgcccccctggacctgagcaagatcaagctgaacggcctggagaacagagtggaggtgggcaaggaccaggagttcaccgtggacaccagaggcgccggcggccagggcaagctggacgtgaccatcctgagccccagcagaaaggtggtgccctgcctggtgacccccgtgaccggcagagagaacagcaccgccaagttcatccccagagaggagggcctgtacgccgtggacgtgacctacgacggccaccccgtgcccggcagcccctacaccgtggaggccagcctgccccccgaccccagcaaggtgaaggcccacggccccggcctggagggcggcctggtgggcaagcccgccgagttcaccatcgacaccaagggcgccggcaccggcggcctgggcctgaccgtggagggcccctgcgaggccaagatcgagtgcagcgacaacggcgacggcacctgcagcgtgagctacctgcccaccaagcccggcgagtacttcgtgaacatcctgttcgaggaggtgcacatccccggcagccccttcaaggccgacatcgagatgcccttcgaccccagcaaggtggtggccagcggccccggcctggagcacggcaaggtgggcgaggccggcctgctgagcgtggactgcagcgaggccggccccggcgccctgggcctggaggccgtgagcgacagcggcaccaaggccgaggtgagcatccagaacaacaaggacggcacctacgccgtgacctacgtgcccctgaccgccggcatgtacaccctgaccatgaagtacggcggcgagctggtgccccacttccccgccagagtgaaggtggagcccgccgtggacaccagcagaatcaaggtgttcggccccggcatcgagggcaaggacgtgttcagagaggccaccaccgacttcaccgtggacagcagacccctgacccaggtgggcggcgaccacatcaaggcccacatcgccaaccccagcggcgccagcaccgagtgcttcgtgaccgacaacgccgacggcacctaccaggtggagtacacccccttcgagaagggcctgcacgtggtggaggtgacctacgacgacgtgcccatccccaacagccccttcaaggtggccgtgaccgagggctgccagcccagcagagtgcaggcccagggccccggcctgaaggaggccttcaccaacaagcccaacgtgttcaccgtggtgaccagaggcgccggcatcggcggcctgggcatcaccgtggagggccccagcgagagcaagatcaactgcagagacaacaaggacggcagctgcagcgccgagtacatccccttcgcccccggcgactacgacgtgaacatcacctacggcggcgcccacatccccggcagccccttcagagtgcccgtgaaggacgtggtggaccccagcaaggtgaagatcgccggccccggcctgggcagcggcgtgagagccagagtgctgcagagcttcaccgtggacagcagcaaggccggcctggcccccctggaggtgagagtgctgggccccagaggcctggtggagcccgtgaacgtggtggacaacggcgacggcacccacaccgtgacctacacccccagccaggagggcccctacatggtgagcgtgaagtacgccgacgaggagatccccagaagccccttcaaggtgaaggtgctgcccacctacgacgccagcaaggtgaccgccagcggccccggcctgagcagctacggcgtgcccgccagcctgcccgtggacttcgccatcgacgccagagacgccggcgagggcctgctggccgtgcagatcaccgaccaggagggcaagcccaagagagccatcgtgcacgacaacaaggacggcacctacgccgtgacctacatccccgacaagaccggcagatacatgatcggcgtgacctacggcggcgacgacatccccctgagcccctacagaatcagagccacccagaccggcgacgccagcaagtgcctggccaccggccccggcatcgccagcaccgtgaagaccggcgaggaggtgggcttcgtggtggacgccaagaccgccggcaagggcaaggtgacctgcaccgtgctgacccccgacggcaccgaggccgaggccgacgtgatcgagaacgaggacggcacctacgacatcttctacaccgccgccaagcccggcacctacgtgatctacgtgagattcggcggcgtggacatccccaacagccccttcaccgtgatggccaccgacggcgaggtgaccgccgtggaggaggcccccgtgaacgcctgcccccccggcttcagaccctgggtgaccgaggaggcctacgtgcccgtgagcgacatgaacggcctgggcttcaagcccttcgacctggtgatccccttcgccgtgagaaagggcgagatcaccggcgaggtgcacatgcccagcggcaagaccgccacccccgagatcgtggacaacaaggacggcaccgtgaccgtgagatacgcccccaccgaggtgggcctgcacgagatgcacatcaagtacatgggcagccacatccccgagagccccctgcagttctacgtgaactaccccaacagcggcagcgtgagcgcctacggccccggcctggtgtacggcgtggccaacaagaccgccaccttcaccatcgtgaccgaggacgccggcgagggcggcctggacctggccatcgagggccccagcaaggccgagatcagctgcatcgacaacaaggacggcacctgcaccgtgacctacctgcccaccctgcccggcgactacagcatcctggtgaagtacaacgacaagcacatccccggcagccccttcaccgccaagatcaccgacgacagcagaagatgcagccaggtgaagctgggcagcgccgccgacttcctgctggacatcagcgagaccgacctgagcagcctgaccgccagcatcaaggcccccagcggcagagacgagccctgcctgctgaagagactgcccaacaaccacatcggcatcagcttcatccccagagaggtgggcgagcacctggtgagcatcaagaagaacggcaaccacgtggccaacagccccgtgagcatcatggtggtgcagagcgagatcggcgacgccagaagagccaaggtgtacggcagaggcctgagcgagggcagaaccttcgagatgagcgacttcatcgtggacaccagagacgccggctacggcggcatcagcctggccgtggagggccccagcaaggtggacatccagaccgaggacctggaggacggcacctgcaaggtgagctacttccccaccgtgcccggcgtgtacatcgtgagcaccaagttcgccgacgagcacgtgcccggcagccccttcaccgtgaagatcagcggcgagggcagagtgaaggagagcatcaccagaaccagcagagcccccagcgtggccaccgtgggcagcatctgcgacctgaacctgaagatccccggcgtgagagtgatgaactgcagcgcccagatcctgtggggctggagagtgcagttccacaccggcagcagaaaccagcagcagtag

SEQ ID NO: 81754 - DNA, 7737 bp, synthetic construct
  misc_feature 1..7737: note = Description of Artificial Sequence: Synthetic coding sequence
  source 1..7737: mol_type = other DNA
atgcccgtgaccgagaaggacctggccgaggacgccccctggaagaagatccagcagaacaccttcaccagatggtgcaacgagcacctgaagtgcgtgaacaagagaatcggcaacctgcagaccgacctgagcgacggcctgagactgatcgccctgctggaggtgctgagccagaagagaatgtacagaaagtaccaccagagacccaccttcagacagatgcagctggagaacgtgagcgtggccctggagttcctggacagagagagcatcaagctggtgagcatcgacagcaaggccatcgtggacggcaacctgaagctgatcctgggcctggtgtggaccctgatcctgcactacagcatcagcatgcccgtgtgggaggacgagggcgacgacgacgccaagaagcagacccccaagcagagactgctgggctggatccagaacaagatcccctacctgcccatcaccaacttcaaccagaactggcaggacggcaaggccctgggcgccctggtggacagctgcgcccccggcctgtgccccgactgggagagctgggacccccagaagcccgtggacaacgccagagaggccatgcagcaggccgacgactggctgggcgtgccccaggtgatcacccccgaggagatcatccaccccgacgtggacgagcacagcgtgatgacctacctgagccagttccccaaggccaagctgaagcccggcgcccccctgaagcccaagctgaaccccaagaaggccagagcctacggcagaggcatcgagcccaccggcaacatggtgaagcagcccgccaagttcaccgtggacaccatcagcgccggccagggcgacgtgatggtgttcgtggaggaccccgagggcaacaaggaggaggcccaggtgacccccgacagcgacaagaacaagacctacagcgtggagtacctgcccaaggtgaccggcctgcacaaggtgaccgtgctgttcgccggccagcacatcagcaagagccccttcgaggtgagcgtggacaaggcccagggcgacgccagcaaggtgaccgccaagggccccggcctggaggccgtgggcaacatcgccaacaagcccacctacttcgacatctacaccgccggcgccggcgtgggcgacatcggcgtggaggtggaggacccccagggcaagaacaccgtggagctgctggtggaggacaagggcaaccaggtgtacagatgcgtgtacaagcccatgcagcccggcccccacgtggtgaagatcttcttcgccggcgacaccatccccaagagccccttcgtggtgcaggtgggcgaggcctgcaaccccaacgcctgcagagccagcggcagaggcctgcagcccaagggcgtgagaatcagagagaccaccgacttcaaggtggacaccaaggccgccggcagcggcgagctgggcgtgaccatgaagggccccaagggcctggaggagctggtgaagcagaaggacttcctggacggcgtgtacgccttcgagtactaccccagcacccccggcagatacagcatcgccatcacctggggcggccaccacatccccaagagccccttcgaggtgcaggtgggccccgaggccggcatgcagaaggtgagagcctggggccccggcctgcacggcggcatcgtgggcagaagcgccgacttcgtggtggagagcatcggcagcgaggtgggcagcctgggcttcgccatcgagggccccagccaggccaagatcgagtacaacgaccagaacgacggcagctgcgacgtgaagtactggcccaaggagcccggcgagtacgccgtgcacatcatgtgcgacgacgaggacatcaaggacagcccctacatggccttcatccaccccgccaccggcggctacaaccccgacctggtgagagcctacggccccggcctggagaagagcggctgcatcgtgaacaacctggccgagttcaccgtggaccccaaggacgccggcaaggcccccctgaagatcttcgcccaggacggcgagggccagagaatcgacatccagatgaagaacagaatggacggcacctacgcctgcagctacacccccgtgaaggccatcaagcacaccatcgccgtggtgtggggcggcgtgaacatcccccacagcccctacagagtgaacatcggccagggcagccacccccagaaggtgaaggtgttcggccccggcgtggagagaagcggcctgaaggccaacgagcccacccacttcaccgtggactgcaccgaggccggcgagggcgacgtgagcgtgggcatcaagtgcgacgccagagtgctgagcgaggacgaggaggacgtggacttcgacatcatccacaacgccaacgacaccttcaccgtgaagtacgtgccccccgccgccggcagatacaccatcaaggtgctgttcgccagccaggagatccccgccagccccttcagagtgaaggtggaccccagccacgacgccagcaaggtgaaggccgagggccccggcctgagcaaggccggcgtggagaacggcaagcccacccacttcaccgtgtacaccaagggcgccggcaaggcccccctgaacgtgcagttcaacagccccctgcccggcgacgccgtgaaggacctggacatcatcgacaactacgactacagccacaccgtgaagtacacccccacccagcagggcaacatgcaggtgctggtgacctacggcggcgaccccatccccaagagccccttcaccgtgggcgtggccgcccccctggacctgagcaagatcaagctgaacggcctggagaacagagtggaggtgggcaaggaccaggagttcaccgtggacaccagaggcgccggcggccagggcaagctggacgtgaccatcctgagccccagcagaaaggtggtgccctgcctggtgacccccgtgaccggcagagagaacagcaccgccaagttcatccccagagaggagggcctgtacgccgtggacgtgacctacgacggccaccccgtgcccggcagcccctacaccgtggaggccagcctgccccccgaccccagcaaggtgaaggcccacggccccggcctggagggcggcctggtgggcaagcccgccgagttcaccatcgacaccaagggcgccggcaccggcggcctgggcctgaccgtggagggcccctgcgaggccaagatcgagtgcagcgacaacggcgacggcacctgcagcgtgagctacctgcccaccaagcccggcgagtacttcgtgaacatcctgttcgaggaggtgcacatccccggcagccccttcaaggccgacatcgagatgcccttcgaccccagcaaggtggtggccagcggccccggcctggagcacggcaaggtgggcgaggccggcctgctgagcgtggactgcagcgaggccggccccggcgccctgggcctggaggccgtgagcgacagcggcaccaaggccgaggtgagcatccagaacaacaaggacggcacctacgccgtgacctacgtgcccctgaccgccggcatgtacaccctgaccatgaagtacggcggcgagctggtgccccacttccccgccagagtgaaggtggagcccgccgtggacaccagcagaatcaaggtgttcggccccggcatcgagggcaaggacgtgttcagagaggccaccaccgacttcaccgtggacagcagacccctgacccaggtgggcggcgaccacatcaaggcccacatcgccaaccccagcggcgccagcaccgagtgcttcgtgaccgacaacgccgacggcacctaccaggtggagtacacccccttcgagaagggcctgcacgtggtggaggtgacctacgacgacgtgcccatccccaacagccccttcaaggtggccgtgaccgagggctgccagcccagcagagtgcaggcccagggccccggcctgaaggaggccttcaccaacaagcccaacgtgttcaccgtggtgaccagaggcgccggcatcggcggcctgggcatcaccgtggagggccccagcgagagcaagatcaactgcagagacaacaaggacggcagctgcagcgccgagtacatccccttcgcccccggcgactacgacgtgaacatcacctacggcggcgcccacatccccggcagccccttcagagtgcccgtgaaggacgtggtggaccccagcaaggtgaagatcgccggccccggcctgggcagcggcgtgagagccagagtgctgcagagcttcaccgtggacagcagcaaggccggcctggcccccctggaggtgagagtgctgggccccagaggcctggtggagcccgtgaacgtggtggacaacggcgacggcacccacaccgtgacctacacccccagccaggagggcccctacatggtgagcgtgaagtacgccgacgaggagatccccagaagccccttcaaggtgaaggtgctgcccacctacgacgccagcaaggtgaccgccagcggccccggcctgagcagctacggcgtgcccgccagcctgcccgtggacttcgccatcgacgccagagacgccggcgagggcctgctggccgtgcagatcaccgaccaggagggcaagcccaagagagccatcgtgcacgacaacaaggacggcacctacgccgtgacctacatccccgacaagaccggcagatacatgatcggcgtgacctacggcggcgacgacatccccctgagcccctacagaatcagagccacccagaccggcgacgccagcaagtgcctggccaccggccccggcatcgccagcaccgtgaagaccggcgaggaggtgggcttcgtggtggacgccaagaccgccggcaagggcaaggtgacctgcaccgtgctgacccccgacggcaccgaggccgaggccgacgtgatcgagaacgaggacggcacctacgacatcttctacaccgccgccaagcccggcacctacgtgatctacgtgagattcggcggcgtggacatccccaacagccccttcaccgtgatggtgaccgaggaggcctacgtgcccgtgagcgacatgaacggcctgggcttcaagcccttcgacctggtgatccccttcgccgtgagaaagggcgagatcaccggcgaggtgcacatgcccagcggcaagaccgccacccccgagatcgtggacaacaaggacggcaccgtgaccgtgagatacgcccccaccgaggtgggcctgcacgagatgcacatcaagtacatgggcagccacatccccgagagccccctgcagttctacgtgaactaccccaacagcggcagcgtgagcgcctacggccccggcctggtgtacggcgtggccaacaagaccgccaccttcaccatcgtgaccgaggacgccggcgagggcggcctggacctggccatcgagggccccagcaaggccgagatcagctgcatcgacaacaaggacggcacctgcaccgtgacctacctgcccaccctgcccggcgactacagcatcctggtgaagtacaacgacaagcacatccccggcagccccttcaccgccaagatcaccgacgacagcagaagatgcagccaggtgaagctgggcagcgccgccgacttcctgctggacatcagcgagaccgacctgagcagcctgaccgccagcatcaaggcccccagcggcagagacgagccctgcctgctgaagagactgcccaacaaccacatcggcatcagcttcatccccagagaggtgggcgagcacctggtgagcatcaagaagaacggcaaccacgtggccaacagccccgtgagcatcatggtggtgcagagcgagatcggcgacgccagaagagccaaggtgtacggcagaggcctgagcgagggcagaaccttcgagatgagcgacttcatcgtggacaccagagacgccggctacggcggcatcagcctggccgtggagggccccagcaaggtggacatccagaccgaggacctggaggacggcacctgcaaggtgagctacttccccaccgtgcccggcgtgtacatcgtgagcaccaagttcgccgacgagcacgtgcccggcagccccttcaccgtgaagatcagcggcgagggcagagtgaaggagagcatcaccagaaccagcagagcccccagcgtggccaccgtgggcagcatctgcgacctgaacctgaagatccccgagatcaacagcagcgacatgagcgcccacgtgaccagccccagcggcagagtgaccgaggccgagatcgtgcccatgggcaagaacagccactgcgtgagattcgtgccccaggagatgggcgtgcacaccgtgagcgtgaagtacagaggccagcacgtgaccggcagccccttccagttcaccgtgggccccctgggcgagggcggcgcccacaaggtgagagccggcggccccggcctggagagaggcgaggccggcgtgcccgccgagttcagcatctggaccagagaggccggcgccggcggcctgagcatcgccgtggagggccccagcaaggccgagatcaccttcgacgaccacaagaacggcagctgcggcgtgagctacatcgcccaggagcccggcaactacgaggtgagcatcaagttcaacgacgagcacatccccgagagcccctacctggtgcccgtgatcgcccccagcgacgacgccagaagactgaccgtgatgagcctgcaggagagcggcctgaaggtgaaccagcccgccagcttcgccatcagactgaacggcgccaagggcaagatcgacgccaaggtgcacagccccagcggcgccgtggaggagtgccacgtgagcgagctggagcccgacaagtacgccgtgagattcatcccccacgagaacggcgtgcacaccatcgacgtgaagttcaacggcagccacgtggtgggcagccccttcaaggtgagagtgggcgagcccggccaggccggcaaccccgccctggtgagcgcctacggcaccggcctggagggcggcaccaccggcatccagagcgagttcttcatcaacaccaccagagccggccccggcaccctgagcgtgaccatcgagggccccagcaaggtgaagatggactgccaggagacccccgagggctacaaggtgatgtacacccccatggcccccggcaactacctgatcagcgtgaagtacggcggccccaaccacatcgtgggcagccccttcaaggccaaggtgaccggccagagactggtgagccccggcagcgccaacgagaccagcagcatcctggtggagagcgtgaccagaagcagcaccgagacctgctacagcgccatccccaaggccagcagcgacgccagcaaggtgaccagcaagggcgccggcctgagcaaggccttcgtgggccagaagagcagcttcctggtggactgcagcaaggccggcagcaacatgctgctgatcggcgtgcacggccccaccaccccctgcgaggaggtgagcatgaagcacgtgggcaaccagcagtacaacgtgacctacgtggtgaaggagagaggcgactacgtgctggccgtgaagtggggcgaggagcacatccccggcagccccttccacgtgaccgtgccctag

SEQ ID NO: 81755 - DNA, 7269 bp, synthetic construct
  misc_feature 1..7269: note = Description of Artificial Sequence: Synthetic coding sequence
  source 1..7269: mol_type = other DNA
atgcaggagcacagcaccagaagaagaagcctgagcctgtgccccgactgggagagctgggacccccagaagcccgtggacaacgccagagaggccatgcagcaggccgacgactggctgggcgtgccccaggtgatcacccccgaggagatcatccaccccgacgtggacgagcacagcgtgatgacctacctgagccagttccccaaggccaagctgaagcccggcgcccccctgaagcccaagctgaaccccaagaaggccagagcctacggcagaggcatcgagcccaccggcaacatggtgaagcagcccgccaagttcaccgtggacaccatcagcgccggccagggcgacgtgatggtgttcgtggaggaccccgagggcaacaaggaggaggcccaggtgacccccgacagcgacaagaacaagacctacagcgtggagtacctgcccaaggtgaccggcctgcacaaggtgaccgtgctgttcgccggccagcacatcagcaagagccccttcgaggtgagcgtggacaaggcccagggcgacgccagcaaggtgaccgccaagggccccggcctggaggccgtgggcaacatcgccaacaagcccacctacttcgacatctacaccgccggcgccggcgtgggcgacatcggcgtggaggtggaggacccccagggcaagaacaccgtggagctgctggtggaggacaagggcaaccaggtgtacagatgcgtgtacaagcccatgcagcccggcccccacgtggtgaagatcttcttcgccggcgacaccatccccaagagccccttcgtggtgcaggtgggcgaggcctgcaaccccaacgcctgcagagccagcggcagaggcctgcagcccaagggcgtgagaatcagagagaccaccgacttcaaggtggacaccaaggccgccggcagcggcgagctgggcgtgaccatgaagggccccaagggcctggaggagctggtgaagcagaaggacttcctggacggcgtgtacgccttcgagtactaccccagcacccccggcagatacagcatcgccatcacctggggcggccaccacatccccaagagccccttcgaggtgcaggtgggccccgaggccggcatgcagaaggtgagagcctggggccccggcctgcacggcggcatcgtgggcagaagcgccgacttcgtggtggagagcatcggcagcgaggtgggcagcctgggcttcgccatcgagggccccagccaggccaagatcgagtacaacgaccagaacgacggcagctgcgacgtgaagtactggcccaaggagcccggcgagtacgccgtgcacatcatgtgcgacgacgaggacatcaaggacagcccctacatggccttcatccaccccgccaccggcggctacaaccccgacctggtgagagcctacggccccggcctggagaagagcggctgcatcgtgaacaacctggccgagttcaccgtggaccccaaggacgccggcaaggcccccctgaagatcttcgcccaggacggcgagggccagagaatcgacatccagatgaagaacagaatggacggcacctacgcctgcagctacacccccgtgaaggccatcaagcacaccatcgccgtggtgtggggcggcgtgaacatcccccacagcccctacagagtgaacatcggccagggcagccacccccagaaggtgaaggtgttcggccccggcgtggagagaagcggcctgaaggccaacgagcccacccacttcaccgtggactgcaccgaggccggcgagggcgacgtgagcgtgggcatcaagtgcgacgccagagtgctgagcgaggacgaggaggacgtggacttcgacatcatccacaacgccaacgacaccttcaccgtgaagtacgtgccccccgccgccggcagatacaccatcaaggtgctgttcgccagccaggagatccccgccagccccttcagagtgaaggtggaccccagccacgacgccagcaaggtgaaggccgagggccccggcctgagcaaggccggcgtggagaacggcaagcccacccacttcaccgtgtacaccaagggcgccggcaaggcccccctgaacgtgcagttcaacagccccctgcccggcgacgccgtgaaggacctggacatcatcgacaactacgactacagccacaccgtgaagtacacccccacccagcagggcaacatgcaggtgctggtgacctacggcggcgaccccatccccaagagccccttcaccgtgggcgtggccgcccccctggacctgagcaagatcaagctgaacggcctggagaacagagtggaggtgggcaaggaccaggagttcaccgtggacaccagaggcgccggcggccagggcaagctggacgtgaccatcctgagccccagcagaaaggtggtgccctgcctggtgacccccgtgaccggcagagagaacagcaccgccaagttcatccccagagaggagggcctgtacgccgtggacgtgacctacgacggccaccccgtgcccggcagcccctacaccgtggaggccagcctgccccccgaccccagcaaggtgaaggcccacggccccggcctggagggcggcctggtgggcaagcccgccgagttcaccatcgacaccaagggcgccggcaccggcggcctgggcctgaccgtggagggcccctgcgaggccaagatcgagtgcagcgacaacggcgacggcacctgcagcgtgagctacctgcccaccaagcccggcgagtacttcgtgaacatcctgttcgaggaggtgcacatccccggcagccccttcaaggccgacatcgagatgcccttcgaccccagcaaggtggtggccagcggccccggcctggagcacggcaaggtgggcgaggccggcctgctgagcgtggactgcagcgaggccggccccggcgccctgggcctggaggccgtgagcgacagcggcaccaaggccgaggtgagcatccagaacaacaaggacggcacctacgccgtgacctacgtgcccctgaccgccggcatgtacaccctgaccatgaagtacggcggcgagctggtgccccacttccccgccagagtgaaggtggagcccgccgtggacaccagcagaatcaaggtgttcggccccggcatcgagggcaaggacgtgttcagagaggccaccaccgacttcaccgtggacagcagacccctgacccaggtgggcggcgaccacatcaaggcccacatcgccaaccccagcggcgccagcaccgagtgcttcgtgaccgacaacgccgacggcacctaccaggtggagtacacccccttcgagaagggcctgcacgtggtggaggtgacctacgacgacgtgcccatccccaacagccccttcaaggtggccgtgaccgagggctgccagcccagcagagtgcaggcccagggccccggcctgaaggaggccttcaccaacaagcccaacgtgttcaccgtggtgaccagaggcgccggcatcggcggcctgggcatcaccgtggagggccccagcgagagcaagatcaactgcagagacaacaaggacggcagctgcagcgccgagtacatccccttcgcccccggcgactacgacgtgaacatcacctacggcggcgcccacatccccggcagccccttcagagtgcccgtgaaggacgtggtggaccccagcaaggtgaagatcgccggccccggcctgggcagcggcgtgagagccagagtgctgcagagcttcaccgtggacagcagcaaggccggcctggcccccctggaggtgagagtgctgggccccagaggcctggtggagcccgtgaacgtggtggacaacggcgacggcacccacaccgtgacctacacccccagccaggagggcccctacatggtgagcgtgaagtacgccgacgaggagatccccagaagccccttcaaggtgaaggtgctgcccacctacgacgccagcaaggtgaccgccagcggccccggcctgagcagctacggcgtgcccgccagcctgcccgtggacttcgccatcgacgccagagacgccggcgagggcctgctggccgtgcagatcaccgaccaggagggcaagcccaagagagccatcgtgcacgacaacaaggacggcacctacgccgtgacctacatccccgacaagaccggcagatacatgatcggcgtgacctacggcggcgacgacatccccctgagcccctacagaatcagagccacccagaccggcgacgccagcaagtgcctggccaccggccccggcatcgccagcaccgtgaagaccggcgaggaggtgggcttcgtggtggacgccaagaccgccggcaagggcaaggtgacctgcaccgtgctgacccccgacggcaccgaggccgaggccgacgtgatcgagaacgaggacggcacctacgacatcttctacaccgccgccaagcccggcacctacgtgatctacgtgagattcggcggcgtggacatccccaacagccccttcaccgtgatggccaccgacggcgaggtgaccgccgtggaggaggcccccgtgaccgaggaggcctacgtgcccgtgagcgacatgaacggcctgggcttcaagcccttcgacctggtgatccccttcgccgtgagaaagggcgagatcaccggcgaggtgcacatgcccagcggcaagaccgccacccccgagatcgtggacaacaaggacggcaccgtgaccgtgagatacgcccccaccgaggtgggcctgcacgagatgcacatcaagtacatgggcagccacatccccgagagccccctgcagttctacgtgaactaccccaacagcggcagcgtgagcgcctacggccccggcctggtgtacggcgtggccaacaagaccgccaccttcaccatcgtgaccgaggacgccggcgagggcggcctggacctggccatcgagggccccagcaaggccgagatcagctgcatcgacaacaaggacggcacctgcaccgtgacctacctgcccaccctgcccggcgactacagcatcctggtgaagtacaacgacaagcacatccccggcagccccttcaccgccaagatcaccgacgacagcagaagatgcagccaggtgaagctgggcagcgccgccgacttcctgctggacatcagcgagaccgacctgagcagcctgaccgccagcatcaaggcccccagcggcagagacgagccctgcctgctgaagagactgcccaacaaccacatcggcatcagcttcatccccagagaggtgggcgagcacctggtgagcatcaagaagaacggcaaccacgtggccaacagccccgtgagcatcatggtggtgcagagcgagatcggcgacgccagaagagccaaggtgtacggcagaggcctgagcgagggcagaaccttcgagatgagcgacttcatcgtggacaccagagacgccggctacggcggcatcagcctggccgtggagggccccagcaaggtggacatccagaccgaggacctggaggacggcacctgcaaggtgagctacttccccaccgtgcccggcgtgtacatcgtgagcaccaagttcgccgacgagcacgtgcccggcagccccttcaccgtgaagatcagcggcgagggcagagtgaaggagagcatcaccagaaccagcagagcccccagcgtggccaccgtgggcagcatctgcgacctgaacctgaagatccccgagatcaacagcagcgacatgagcgcccacgtgaccagccccagcggcagagtgaccgaggccgagatcgtgcccatgggcaagaacagccactgcgtgagattcgtgccccaggagatgggcgtgcacaccgtgagcgtgaagtacagaggccagcacgtgaccggcagccccttccagttcaccgtgggccccctgggcgagggcggcgcccacaaggtgagagccggcggccccggcctggagagaggcgaggccggcgtgcccgccgagttcagcatctggaccagagaggccggcgccggcggcctgagcatcgccgtggagggccccagcaaggccgagatcaccttcgacgaccacaagaacggcagctgcggcgtgagctacatcgcccaggagcccggcaactacgaggtgagcatcaagttcaacgacgagcacatccccgagagcccctacctggtgcccgtgatcgcccccagcgacgacgccagaagactgaccgtgatgagcctgcaggagagcggcctgaaggtgaaccagcccgccagcttcgccatcagactgaacggcgccaagggcaagatcgacgccaaggtgcacagccccagcggcgccgtggaggagtgccacgtgagcgagctggagcccgacaagtacgccgtgagattcatcccccacgagaacggcgtgcacaccatcgacgtgaagttcaacggcagccacgtggtgggcagccccttcaaggtgagagtgggcgagcccggccaggccggcaaccccgccctggtgagcgcctacggcaccggcctggagggcggcaccaccggcatccagagcgagttcttcatcaacaccaccagagccggccccggcaccctgagcgtgaccatcgagggccccagcaaggtgaagatggactgccaggagacccccgagggctacaaggtgatgtacacccccatggcccccggcaactacctgatcagcgtgaagtacggcggccccaaccacatcgtgggcagccccttcaaggccaaggtgaccggccagagactggtgagccccggcagcgccaacgagaccagcagcatcctggtggagagcgtgaccagaagcagcaccgagacctgctacagcgccatccccaaggccagcagcgacgccagcaaggtgaccagcaagggcgccggcctgagcaaggccttcgtgggccagaagagcagcttcctggtggactgcagcaaggccggcagcaacatgctgctgatcggcgtgcacggccccaccaccccctgcgaggaggtgagcatgaagcacgtgggcaaccagcagtacaacgtgacctacgtggtgaaggagagaggcgactacgtgctggccgtgaagtggggcgaggagcacatccccggcagccccttccacgtgaccgtgccctag

SEQ ID NO: 81756 - DNA, 7776 bp, synthetic construct
  misc_feature 1..7776: note = Description of Artificial Sequence: Synthetic coding sequence
  source 1..7776: mol_type = other DNA
atgcccgtgaccgagaaggacctggccgaggacgccccctggaagaagatccagcagaacaccttcaccagatggtgcaacgagcacctgaagtgcgtgaacaagagaatcggcaacctgcagaccgacctgagcgacggcctgagactgatcgccctgctggaggtgctgagccagaagagaatgtacagaaagtaccaccagagacccaccttcagacagatgcagctggagaacgtgagcgtggccctggagttcctggacagagagagcatcaagctggtgagcatcgacagcaaggccatcgtggacggcaacctgaagctgatcctgggcctggtgtggaccctgatcctgcactacagcatcagcatgcccgtgtgggaggacgagggcgacgacgacgccaagaagcagacccccaagcagagactgctgggctggatccagaacaagatcccctacctgcccatcaccaacttcaaccagaactggcaggacggcaaggccctgggcgccctggtggacagctgcgcccccggcctgtgccccgactgggagagctgggacccccagaagcccgtggacaacgccagagaggccatgcagcaggccgacgactggctgggcgtgccccaggtgatcacccccgaggagatcatccaccccgacgtggacgagcacagcgtgatgacctacctgagccagttccccaaggccaagctgaagcccggcgcccccctgaagcccaagctgaaccccaagaaggccagagcctacggcagaggcatcgagcccaccggcaacatggtgaagcagcccgccaagttcaccgtggacaccatcagcgccggccagggcgacgtgatggtgttcgtggaggaccccgagggcaacaaggaggaggcccaggtgacccccgacagcgacaagaacaagacctacagcgtggagtacctgcccaaggtgaccggcctgcacaaggtgaccgtgctgttcgccggccagcacatcagcaagagccccttcgaggtgagcgtggacaaggcccagggcgacgccagcaaggtgaccgccaagggccccggcctggaggccgtgggcaacatcgccaacaagcccacctacttcgacatctacaccgccggcgccggcgtgggcgacatcggcgtggaggtggaggacccccagggcaagaacaccgtggagctgctggtggaggacaagggcaaccaggtgtacagatgcgtgtacaagcccatgcagcccggcccccacgtggtgaagatcttcttcgccggcgacaccatccccaagagccccttcgtggtgcaggtgggcgaggcctgcaaccccaacgcctgcagagccagcggcagaggcctgcagcccaagggcgtgagaatcagagagaccaccgacttcaaggtggacaccaaggccgccggcagcggcgagctgggcgtgaccatgaagggccccaagggcctggaggagctggtgaagcagaaggacttcctggacggcgtgtacgccttcgagtactaccccagcacccccggcagatacagcatcgccatcacctggggcggccaccacatccccaagagccccttcgaggtgcaggtgggccccgaggccggcatgcagaaggtgagagcctggggccccggcctgcacggcggcatcgtgggcagaagcgccgacttcgtggtggagagcatcggcagcgaggtgggcagcctgggcttcgccatcgagggccccagccaggccaagatcgagtacaacgaccagaacgacggcagctgcgacgtgaagtactggcccaaggagcccggcgagtacgccgtgcacatcatgtgcgacgacgaggacatcaaggacagcccctacatggccttcatccaccccgccaccggcggctacaaccccgacctggtgagagcctacggccccggcctggagaagagcggctgcatcgtgaacaacctggccgagttcaccgtggaccccaaggacgccggcaaggcccccctgaagatcttcgcccaggacggcgagggccagagaatcgacatccagatgaagaacagaatggacggcacctacgcctgcagctacacccccgtgaaggccatcaagcacaccatcgccgtggtgtggggcggcgtgaacatcccccacagcccctacagagtgaacatcggccagggcagccacccccagaaggtgaaggtgttcggccccggcgtggagagaagcggcctgaaggccaacgagcccacccacttcaccgtggactgcaccgaggccggcgagggcgacgtgagcgtgggcatcaagtgcgacgccagagtgctgagcgaggacgaggaggacgtggacttcgacatcatccacaacgccaacgacaccttcaccgtgaagtacgtgccccccgccgccggcagatacaccatcaaggtgctgttcgccagccaggagatccccgccagccccttcagagtgaaggtggaccccagccacgacgccagcaaggtgaaggccgagggccccggcctgagcaaggccggcgtggagaacggcaagcccacccacttcaccgtgtacaccaagggcgccggcaaggcccccctgaacgtgcagttcaacagccccctgcccggcgacgccgtgaaggacctggacatcatcgacaactacgactacagccacaccgtgaagtacacccccacccagcagggcaacatgcaggtgctggtgacctacggcggcgaccccatccccaagagccccttcaccgtgggcgtggccgcccccctggacctgagcaagatcaagctgaacggcctggagaacagagtggaggtgggcaaggaccaggagttcaccgtggacaccagaggcgccggcggccagggcaagctggacgtgaccatcctgagccccagcagaaaggtggtgccctgcctggtgacccccgtgaccggcagagagaacagcaccgccaagttcatccccagagaggagggcctgtacgccgtggacgtgacctacgacggccaccccgtgcccggcagcccctacaccgtggaggccagcctgccccccgaccccagcaaggtgaaggcccacggccccggcctggagggcggcctggtgggcaagcccgccgagttcaccatcgacaccaagggcgccggcaccggcggcctgggcctgaccgtggagggcccctgcgaggccaagatcgagtgcagcgacaacggcgacggcacctgcagcgtgagctacctgcccaccaagcccggcgagtacttcgtgaacatcctgttcgaggaggtgcacatccccggcagccccttcaaggccgacatcgagatgcccttcgaccccagcaaggtggtggccagcggccccggcctggagcacggcaaggtgggcgaggccggcctgctgagcgtggactgcagcgaggccggccccggcgccctgggcctggaggccgtgagcgacagcggcaccaaggccgaggtgagcatccagaacaacaaggacggcacctacgccgtgacctacgtgcccctgaccgccggcatgtacaccctgaccatgaagtacggcggcgagctggtgccccacttccccgccagagtgaaggtggagcccgccgtggacaccagcagaatcaaggtgttcggccccggcatcgagggcaaggacgtgttcagagaggccaccaccgacttcaccgtggacagcagacccctgacccaggtgggcggcgaccacatcaaggcccacatcgccaaccccagcggcgccagcaccgagtgcttcgtgaccgacaacgccgacggcacctaccaggtggagtacacccccttcgagaagggcctgcacgtggtggaggtgacctacgacgacgtgcccatccccaacagccccttcaaggtggccgtgaccgagggctgccagcccagcagagtgcaggcccagggccccggcctgaaggaggccttcaccaacaagcccaacgtgttcaccgtggtgaccagaggcgccggcatcggcggcctgggcatcaccgtggagggccccagcgagagcaagatcaactgcagagacaacaaggacggcagctgcagcgccgagtacatccccttcgcccccggcgactacgacgtgaacatcacctacggcggcgcccacatccccggcagccccttcagagtgcccgtgaaggacgtggtggaccccagcaaggtgaagatcgccggccccggcctgggcagcggcgtgagagccagagtgctgcagagcttcaccgtggacagcagcaaggccggcctggcccccctggaggtgagagtgctgggccccagaggcctggtggagcccgtgaacgtggtggacaacggcgacggcacccacaccgtgacctacacccccagccaggagggcccctacatggtgagcgtgaagtacgccgacgaggagatccccagaagccccttcaaggtgaaggtgctgcccacctacgacgccagcaaggtgaccgccagcggccccggcctgagcagctacggcgtgcccgccagcctgcccgtggacttcgccatcgacgccagagacgccggcgagggcctgctggccgtgcagatcaccgaccaggagggcaagcccaagagagccatcgtgcacgacaacaaggacggcacctacgccgtgacctacatccccgacaagaccggcagatacatgatcggcgtgacctacggcggcgacgacatccccctgagcccctacagaatcagagccacccagaccggcgacgccagcaagtgcctggccaccggccccggcatcgccagcaccgtgaagaccggcgaggaggtgggcttcgtggtggacgccaagaccgccggcaagggcaaggtgacctgcaccgtgctgacccccgacggcaccgaggccgaggccgacgtgatcgagaacgaggacggcacctacgacatcttctacaccgccgccaagcccggcacctacgtgatctacgtgagattcggcggcgtggacatccccaacagccccttcaccgtgatggccaccgacggcgaggtgaccgccgtggaggaggcccccgtgaccgaggaggcctacgtgcccgtgagcgacatgaacggcctgggcttcaagcccttcgacctggtgatccccttcgccgtgagaaagggcgagatcaccggcgaggtgcacatgcccagcggcaagaccgccacccccgagatcgtggacaacaaggacggcaccgtgaccgtgagatacgcccccaccgaggtgggcctgcacgagatgcacatcaagtacatgggcagccacatccccgagagccccctgcagttctacgtgaactaccccaacagcggcagcgtgagcgcctacggccccggcctggtgtacggcgtggccaacaagaccgccaccttcaccatcgtgaccgaggacgccggcgagggcggcctggacctggccatcgagggccccagcaaggccgagatcagctgcatcgacaacaaggacggcacctgcaccgtgacctacctgcccaccctgcccggcgactacagcatcctggtgaagtacaacgacaagcacatccccggcagccccttcaccgccaagatcaccgacgacagcagaagatgcagccaggtgaagctgggcagcgccgccgacttcctgctggacatcagcgagaccgacctgagcagcctgaccgccagcatcaaggcccccagcggcagagacgagccctgcctgctgaagagactgcccaacaaccacatcggcatcagcttcatccccagagaggtgggcgagcacctggtgagcatcaagaagaacggcaaccacgtggccaacagccccgtgagcatcatggtggtgcagagcgagatcggcgacgccagaagagccaaggtgtacggcagaggcctgagcgagggcagaaccttcgagatgagcgacttcatcgtggacaccagagacgccggctacggcggcatcagcctggccgtggagggccccagcaaggtggacatccagaccgaggacctggaggacggcacctgcaaggtgagctacttccccaccgtgcccggcgtgtacatcgtgagcaccaagttcgccgacgagcacgtgcccggcagccccttcaccgtgaagatcagcggcgagggcagagtgaaggagagcatcaccagaaccagcagagcccccagcgtggccaccgtgggcagcatctgcgacctgaacctgaagatccccgagatcaacagcagcgacatgagcgcccacgtgaccagccccagcggcagagtgaccgaggccgagatcgtgcccatgggcaagaacagccactgcgtgagattcgtgccccaggagatgggcgtgcacaccgtgagcgtgaagtacagaggccagcacgtgaccggcagccccttccagttcaccgtgggccccctgggcgagggcggcgcccacaaggtgagagccggcggccccggcctggagagaggcgaggccggcgtgcccgccgagttcagcatctggaccagagaggccggcgccggcggcctgagcatcgccgtggagggccccagcaaggccgagatcaccttcgacgaccacaagaacggcagctgcggcgtgagctacatcgcccaggagcccggcaactacgaggtgagcatcaagttcaacgacgagcacatccccgagagcccctacctggtgcccgtgatcgcccccagcgacgacgccagaagactgaccgtgatgagcctgcaggagagcggcctgaaggtgaaccagcccgccagcttcgccatcagactgaacggcgccaagggcaagatcgacgccaaggtgcacagccccagcggcgccgtggaggagtgccacgtgagcgagctggagcccgacaagtacgccgtgagattcatcccccacgagaacggcgtgcacaccatcgacgtgaagttcaacggcagccacgtggtgggcagccccttcaaggtgagagtgggcgagcccggccaggccggcaaccccgccctggtgagcgcctacggcaccggcctggagggcggcaccaccggcatccagagcgagttcttcatcaacaccaccagagccggccccggcaccctgagcgtgaccatcgagggccccagcaaggtgaagatggactgccaggagacccccgagggctacaaggtgatgtacacccccatggcccccggcaactacctgatcagcgtgaagtacggcggccccaaccacatcgtgggcagccccttcaaggccaaggtgaccggccagagactggtgagccccggcagcgccaacgagaccagcagcatcctggtggagagcgtgaccagaagcagcaccgagacctgctacagcgccatccccaaggccagcagcgacgccagcaaggtgaccagcaagggcgccggcctgagcaaggccttcgtgggccagaagagcagcttcctggtggactgcagcaaggccggcagcaacatgctgctgatcggcgtgcacggccccaccaccccctgcgaggaggtgagcatgaagcacgtgggcaaccagcagtacaacgtgacctacgtggtgaaggagagaggcgactacgtgctggccgtgaagtggggcgaggagcacatccccggcagccccttccacgtgaccgtgccctag

SEQ ID NO: 81757 - DNA, 408 bp, synthetic construct
  misc_feature 1..408: note = Description of Artificial Sequence: Synthetic coding sequence
  source 1..408: mol_type = other DNA
tgactggccgtggagggccccagcaaggtggacatccagaccgaggacctggaggacggcacctgcaaggtgagctacttccccaccgtgcccggcgtgtacatcgtgagcaccaagttcgccgacgagcacgtgcccgagatcaacagcagcgacatgagcgcccacgtgaccagccccagcggcagagtgaccgaggccgagatcgtgcccatgggcaagaacagccactgcgtgagattcgtgccccaggagatgggcgtgcacaccgtgagcgtgaagtacagaggccagcacgtgaccggcagccccttccagttcaccgtgggccccctgggcgagggcggcgcccacaaggtgagagccggcggccccggcctggagagaggcgaggccggcgtgccctag

SEQ ID NO: 81758 - DNA, 7902 bp, synthetic construct
  misc_feature 1..7902: note = Description of Artificial Sequence: Synthetic coding sequence
  source 1..7902: mol_type = other DNA
atgcccgtgaccgagaaggacctggccgaggacgccccctggaagaagatccagcagaacaccttcaccagatggtgcaacgagcacctgaagtgcgtgaacaagagaatcggcaacctgcagaccgacctgagcgacggcctgagactgatcgccctgctggaggtgctgagccagaagagaatgtacagaaagtaccaccagagacccaccttcagacagatgcagctggagaacgtgagcgtggccctggagttcctggacagagagagcatcaagctggtgagcatcgacagcaaggccatcgtggacggcaacctgaagctgatcctgggcctggtgtggaccctgatcctgcactacagcatcagcatgcccgtgtgggaggacgagggcgacgacgacgccaagaagcagacccccaagcagagactgctgggctggatccagaacaagatcccctacctgcccatcaccaacttcaaccagaactggcaggacggcaaggccctgggcgccctggtggacagctgcgcccccggcctgtgccccgactgggagagctgggacccccagaagcccgtggacaacgccagagaggccatgcagcaggccgacgactggctgggcgtgccccaggtgatcacccccgaggagatcatccaccccgacgtggacgagcacagcgtgatgacctacctgagccagttccccaaggccaagctgaagcccggcgcccccctgaagcccaagctgaaccccaagaaggccagagcctacggcagaggcatcgagcccaccggcaacatggtgaagcagcccgccaagttcaccgtggacaccatcagcgccggccagggcgacgtgatggtgttcgtggaggaccccgagggcaacaaggaggaggcccaggtgacccccgacagcgacaagaacaagacctacagcgtggagtacctgcccaaggtgaccggcctgcacaaggtgaccgtgctgttcgccggccagcacatcagcaagagccccttcgaggtgagcgtggacaaggcccagggcgacgccagcaaggtgaccgccaagggccccggcctggaggccgtgggcaacatcgccaacaagcccacctacttcgacatctacaccgccggcgccggcgtgggcgacatcggcgtggaggtggaggacccccagggcaagaacaccgtggagctgctggtggaggacaagggcaaccaggtgtacagatgcgtgtacaagcccatgcagcccggcccccacgtggtgaagatcttcttcgccggcgacaccatccccaagagccccttcgtggtgcaggtgggcgaggcctgcaaccccaacgcctgcagagccagcggcagaggcctgcagcccaagggcgtgagaatcagagagaccaccgacttcaaggtggacaccaaggccgccggcagcggcgagctgggcgtgaccatgaagggccccaagggcctggaggagctggtgaagcagaaggacttcctggacggcgtgtacgccttcgagtactaccccagcacccccggcagatacagcatcgccatcacctggggcggccaccacatccccaagagccccttcgaggtgcaggtgggccccgaggccggcatgcagaaggtgagagcctggggccccggcctgcacggcggcatcgtgggcagaagcgccgacttcgtggtggagagcatcggcagcgaggtgggcagcctgggcttcgccatcgagggccccagccaggccaagatcgagtacaacgaccagaacgacggcagctgcgacgtgaagtactggcccaaggagcccggcgagtacgccgtgcacatcatgtgcgacgacgaggacatcaaggacagcccctacatggccttcatccaccccgccaccggcggctacaaccccgacctggtgagagcctacggccccggcctggagaagagcggctgcatcgtgaacaacctggccgagttcaccgtggaccccaaggacgccggcaaggcccccctgaagatcttcgcccaggacggcgagggccagagaatcgacatccagatgaagaacagaatggacggcacctacgcctgcagctacacccccgtgaaggccatcaagcacaccatcgccgtggtgtggggcggcgtgaacatcccccacagcccctacagagtgaacatcggccagggcagccacccccagaaggtgaaggtgttcggccccggcgtggagagaagcggcctgaaggccaacgagcccacccacttcaccgtggactgcaccgaggccggcgagggcgacgtgagcgtgggcatcaagtgcgacgccagagtgctgagcgaggacgaggaggacgtggacttcgacatcatccacaacgccaacgacaccttcaccgtgaagtacgtgccccccgccgccggcagatacaccatcaaggtgctgttcgccagccaggagatccccgccagccccttcagagtgaaggtggaccccagccacgacgccagcaaggtgaaggccgagggccccggcctgagcaaggccggcgtggagaacggcaagcccacccacttcaccgtgtacaccaagggcgccggcaaggcccccctgaacgtgcagttcaacagccccctgcccggcgacgccgtgaaggacctggacatcatcgacaactacgactacagccacaccgtgaagtacacccccacccagcagggcaacatgcaggtgctggtgacctacggcggcgaccccatccccaagagccccttcaccgtgggcgtggccgcccccctggacctgagcaagatcaagctgaacggcctggagaacagagtggaggtgggcaaggaccaggagttcaccgtggacaccagaggcgccggcggccagggcaagctggacgtgaccatcctgagccccagcagaaaggtggtgccctgcctggtgacccccgtgaccggcagagagaacagcaccgccaagttcatccccagagaggagggcctgtacgccgtggacgtgacctacgacggccaccccgtgcccggcagcccctacaccgtggaggccagcctgccccccgaccccagcaaggtgaaggcccacggccccggcctggagggcggcctggtgggcaagcccgccgagttcaccatcgacaccaagggcgccggcaccggcggcctgggcctgaccgtggagggcccctgcgaggccaagatcgagtgcagcgacaacggcgacggcacctgcagcgtgagctacctgcccaccaagcccggcgagtacttcgtgaacatcctgttcgaggaggtgcacatccccggcagccccttcaaggccgacatcgagatgcccttcgaccccagcaaggtggtggccagcggccccggcctggagcacggcaaggtgggcgaggccggcctgctgagcgtggactgcagcgaggccggccccggcgccctgggcctggaggccgtgagcgacagcggcaccaaggccgaggtgagcatccagaacaacaaggacggcacctacgccgtgacctacgtgcccctgaccgccggcatgtacaccctgaccatgaagtacggcggcgagctggtgccccacttccccgccagagtgaaggtggagcccgccgtggacaccagcagaatcaaggtgttcggccccggcatcgagggcaaggacgtgttcagagaggccaccaccgacttcaccgtggacagcagacccctgacccaggtgggcggcgaccacatcaaggcccacatcgccaaccccagcggcgccagcaccgagtgcttcgtgaccgacaacgccgacggcacctaccaggtggagtacacccccttcgagaagggcctgcacgtggtggaggtgacctacgacgacgtgcccatccccaacagccccttcaaggtggccgtgaccgagggctgccagcccagcagagtgcaggcccagggccccggcctgaaggaggccttcaccaacaagcccaacgtgttcaccgtggtgaccagaggcgccggcatcggcggcctgggcatcaccgtggagggccccagcgagagcaagatcaactgcagagacaacaaggacggcagctgcagcgccgagtacatccccttcgcccccggcgactacgacgtgaacatcacctacggcggcgcccacatccccggcagccccttcagagtgcccgtgaaggacgtggtggaccccagcaaggtgaagatcgccggccccggcctgggcagcggcgtgagagccagagtgctgcagagcttcaccgtggacagcagcaaggccggcctggcccccctggaggtgagagtgctgggccccagagccgacgacaccgacagccagagctggagaagccccctgaaggccctgagcgagttcttcaagggcgaccccaagggcgacttcaacaagaccggcctggtggagcccgtgaacgtggtggacaacggcgacggcacccacaccgtgacctacacccccagccaggagggcccctacatggtgagcgtgaagtacgccgacgaggagatccccagaagccccttcaaggtgaaggtgctgcccacctacgacgccagcaaggtgaccgccagcggccccggcctgagcagctacggcgtgcccgccagcctgcccgtggacttcgccatcgacgccagagacgccggcgagggcctgctggccgtgcagatcaccgaccaggagggcaagcccaagagagccatcgtgcacgacaacaaggacggcacctacgccgtgacctacatccccgacaagaccggcagatacatgatcggcgtgacctacggcggcgacgacatccccctgagcccctacagaatcagagccacccagaccggcgacgccagcaagtgcctggccaccggccccggcatcgccagcaccgtgaagaccggcgaggaggtgggcttcgtggtggacgccaagaccgccggcaagggcaaggtgacctgcaccgtgctgacccccgacggcaccgaggccgaggccgacgtgatcgagaacgaggacggcacctacgacatcttctacaccgccgccaagcccggcacctacgtgatctacgtgagattcggcggcgtggacatccccaacagccccttcaccgtgatggccaccgacggcgaggtgaccgccgtggaggaggcccccgtgaacgcctgcccccccggcttcagaccctgggtgaccgaggaggcctacgtgcccgtgagcgacatgaacggcctgggcttcaagcccttcgacctggtgatccccttcgccgtgagaaagggcgagatcaccggcgaggtgcacatgcccagcggcaagaccgccacccccgagatcgtggacaacaaggacggcaccgtgaccgtgagatacgcccccaccgaggtgggcctgcacgagatgcacatcaagtacatgggcagccacatccccgagagccccctgcagttctacgtgaactaccccaacagcggcagcgtgagcgcctacggccccggcctggtgtacggcgtggccaacaagaccgccaccttcaccatcgtgaccgaggacgccggcgagggcggcctggacctggccatcgagggccccagcaaggccgagatcagctgcatcgacaacaaggacggcacctgcaccgtgacctacctgcccaccctgcccggcgactacagcatcctggtgaagtacaacgacaagcacatccccggcagccccttcaccgccaagatcaccgacgacagcagaagatgcagccaggtgaagctgggcagcgccgccgacttcctgctggacatcagcgagaccgacctgagcagcctgaccgccagcatcaaggcccccagcggcagagacgagccctgcctgctgaagagactgcccaacaaccacatcggcatcagcttcatccccagagaggtgggcgagcacctggtgagcatcaagaagaacggcaaccacgtggccaacagccccgtgagcatcatggtggtgcagagcgagatcggcgacgccagaagagccaaggtgtacggcagaggcctgagcgagggcagaaccttcgagatgagcgacttcatcgtggacaccagagacgccggctacggcggcatcagcctggccgtggagggccccagcaaggtggacatccagaccgaggacctggaggacggcacctgcaaggtgagctacttccccaccgtgcccggcgtgtacatcgtgagcaccaagttcgccgacgagcacgtgcccggcagccccttcaccgtgaagatcagcggcgagggcagagtgaaggagagcatcaccagaaccagcagagcccccagcgtggccaccgtgggcagcatctgcgacctgaacctgaagatccccgagatcaacagcagcgacatgagcgcccacgtgaccagccccagcggcagagtgaccgaggccgagatcgtgcccatgggcaagaacagccactgcgtgagattcgtgccccaggagatgggcgtgcacaccgtgagcgtgaagtacagaggccagcacgtgaccggcagccccttccagttcaccgtgggccccctgggcgagggcggcgcccacaaggtgagagccggcggccccggcctggagagaggcgaggccggcgtgcccgccgagttcagcatctggaccagagaggccggcgccggcggcctgagcatcgccgtggagggccccagcaaggccgagatcaccttcgacgaccacaagaacggcagctgcggcgtgagctacatcgcccaggagcccggcaactacgaggtgagcatcaagttcaacgacgagcacatccccgagagcccctacctggtgcccgtgatcgcccccagcgacgacgccagaagactgaccgtgatgagcctgcaggagagcggcctgaaggtgaaccagcccgccagcttcgccatcagactgaacggcgccaagggcaagatcgacgccaaggtgcacagccccagcggcgccgtggaggagtgccacgtgagcgagctggagcccgacaagtacgccgtgagattcatcccccacgagaacggcgtgcacaccatcgacgtgaagttcaacggcagccacgtggtgggcagccccttcaaggtgagagtgggcgagcccggccaggccggcaaccccgccctggtgagcgcctacggcaccggcctggagggcggcaccaccggcatccagagcgagttcttcatcaacaccaccagagccggccccggcaccctgagcgtgaccatcgagggccccagcaaggtgaagatggactgccaggagacccccgagggctacaaggtgatgtacacccccatggcccccggcaactacctgatcagcgtgaagtacggcggccccaaccacatcgtgggcagccccttcaaggccaaggtgaccggccagagactggtgagccccggcagcgccaacgagaccagcagcatcctggtggagagcgtgaccagaagcagcaccgagacctgctacagcgccatccccaaggccagcagcgacgccagcaaggtgaccagcaagggcgccggcctgagcaaggccttcgtgggccagaagagcagcttcctggtggactgcagcaaggccggcagcaacatgctgctgatcggcgtgcacggccccaccaccccctgcgaggaggtgagcatgaagcacgtgggcaaccagcagtacaacgtgacctacgtggtgaaggagagaggcgactacgtgctggccgtgaagtggggcgaggagcacatccccggcagccccttccacgtgaccgtgccctag

SEQ ID NO: 81759 - DNA, 8178 bp, synthetic construct
  misc_feature 1..8178: note = Description of Artificial Sequence: Synthetic coding sequence
  source 1..8178: mol_type = other DNA
atgatgaacaacagcggctacagcgacgccggcctgggcctgggcgacgagaccgacgagatgcccagcaccgagaaggacctggccgaggacgccccctggaagaagatccagcagaacaccttcaccagatggtgcaacgagcacctgaagtgcgtgggcaagagactgaccgacctgcagagagacctgagcgacggcctgagactgatcgccctgctggaggtgctgagccagaagagaatgtacagaaagttccaccccagacccaacttcagacagatgaagctggagaacgtgagcgtggccctggagttcctggagagagagcacatcaagctggtgagcatcgacagcaaggccatcgtggacggcaacctgaagctgatcctgggcctgatctggaccctgatcctgcactacagcatcagcatgcccatgtgggaggacgaggacgacgaggacgccagaaagcagacccccaagcagagactgctgggctggatccagaacaaggtgccccagctgcccatcaccaacttcaacagagactggcaggacggcaaggccctgggcgccctggtggacaactgcgcccccggcctgtgccccgactgggaggcctgggaccccaaccagcccgtggagaacgccagagaggccatgcagcaggccgacgactggctgggcgtgccccaggtgatcgcccccgaggagatcgtggaccccaacgtggacgagcacagcgtgatgacctacctgagccagttccccaaggccaagctgaagcccggcgcccccgtgagaagcaagcagctgaaccccaagaaggccatcgcctacggccccggcatcgagccccagggcaacaccgtgctgcagcccgcccacttcaccgtgcagaccgtggacgccggcgtgggcgaggtgctggtgtacatcgaggaccccgagggccacaccgaggaggccaaggtggtgcccaacaacgacaaggacagaacctacgccgtgagctacgtgcccaaggtggccggcctgcacaaggtgaccgtgctgttcgccggccagaacatcgagagaagccccttcgaggtgaacgtgggcatggccctgggcgacgccaacaaggtgagcgccagaggccccggcctggagcccgtgggcaacgtggccaacaagcccacctacttcgacatctacaccgccggcgccggcaccggcgacgtggccgtggtgatcgtggacccccagggcagaagagacaccgtggaggtggccctggaggacaagggcgacagcaccttcagatgcacctacagacccgccatggagggcccccacaccgtgcacgtggccttcgccggcgcccccatcaccagaagccccttccccgtgcacgtgagcgaggcctgcaaccccaacgcctgcagagccagcggcagaggcctgcagcccaagggcgtgagagtgaaggaggtggccgacttcaaggtgttcaccaagggcgccggcagcggcgagctgaaggtgaccgtgaagggccccaagggcaccgaggagcccgtgaaggtgagagaggccggcgacggcgtgttcgagtgcgagtactaccccgtggtgcccggcaagtacgtggtgaccatcacctggggcggctacgccatccccagaagccccttcgaggtgcaggtgagccccgaggccggcgtgcagaaggtgagagcctggggccccggcctggagaccggccaggtgggcaagagcgccgacttcgtggtggaggccatcggcaccgaggtgggcaccctgggcttcagcatcgagggccccagccaggccaagatcgagtgcgacgacaagggcgacggcagctgcgacgtgagatactggcccaccgagcccggcgagtacgccgtgcacgtgatctgcgacgacgaggacatcagagacagccccttcatcgcccacatcctgcccgccccccccgactgcttccccgacaaggtgaaggccttcggccccggcctggagcccaccggctgcatcgtggacaagcccgccgagttcaccatcgacgccagagccgccggcaagggcgacctgaagctgtacgcccaggacgccgacggctgccccatcgacatcaaggtgatccccaacggcgacggcaccttcagatgcagctacgtgcccaccaagcccatcaagcacaccatcatcatcagctggggcggcgtgaacgtgcccaagagccccttcagagtgaacgtgggcgagggcagccaccccgagagagtgaaggtgtacggccccggcgtggagaagaccggcctgaaggccaacgagcccacctacttcaccgtggactgcagcgaggccggccagggcgacgtgagcatcggcatcaagtgcgcccccggcgtggtgggccccgccgaggccgacatcgacttcgacatcatcaagaacgacaacgacaccttcaccgtgaagtacaccccccccggcgccggcagatacaccatcatggtgctgttcgccaaccaggagatccccgccagccccttccacatcaaggtggaccccagccacgacgccagcaaggtgaaggccgagggccccggcctgaacagaaccggcgtggaggtgggcaagcccacccacttcaccgtgctgaccaagggcgccggcaaggccaagctggacgtgcagttcgccggcaccgccaagggcgaggtggtgagagacttcgagatcatcgacaaccacgactacagctacaccgtgaagtacaccgccgtgcagcagggcaacatggccgtgaccgtgacctacggcggcgaccccgtgcccaagagccccttcgtggtgaacgtggccccccccctggacctgagcaagatcaaggtgcagggcctgaacagcaaggtggccgtgggccaggagcaggccttcagcgtgaacaccagaggcgccggcggccagggccagctggacgtgagaatgaccagccccagcagaagacccatcccctgcaagctggagcccggcggcggcgccgaggcccaggccgtgagatacatgccccccgaggagggcccctacaaggtggacatcacctacgacggccaccccgtgcccggcagccccttcgccgtggagggcgtgctgccccccgaccccagcaaggtgtgcgcctacggccccggcctgaagggcggcctggtgggcacccccgcccccttcagcatcgacaccaagggcgccggcaccggcggcctgggcctgaccgtggagggcccctgcgaggccaagatcgagtgccaggacaacggcgacggcagctgcgccgtgagctacctgcccaccgagcccggcgagtacaccatcaacatcctgttcgccgaggcccacatccccggcagccccttcaaggccaccatcagacccgtgttcgaccccagcaaggtgagagccagcggccccggcctggagagaggcaaggtgggcgaggccgccaccttcaccgtggactgcagcgaggccggcgaggccgagctgaccatcgagatcctgagcgacgccggcgtgaaggccgaggtgctgatccacaacaacgccgacggcacctaccacatcacctacagccccgccttccccggcacctacaccatcaccatcaagtacggcggccaccccgtgcccaagttccccaccagagtgcacgtgcagcccgccgtggacaccagcggcgtgaaggtgagcggccccggcgtggagccccacggcgtgctgagagaggtgaccaccgagttcaccgtggacgccagaagcctgaccgccaccggcggcaaccacgtgaccgccagagtgctgaaccccagcggcgccaagaccgacacctacgtgaccgacaacggcgacggcacctacagagtgcagtacaccgcctacgaggagggcgtgcacctggtggaggtgctgtacgacgaggtggccgtgcccaagagccccttcagagtgggcgtgaccgagggctgcgaccccaccagagtgagagccttcggccccggcctggagggcggcctggtgaacaaggccaacagattcaccgtggagaccagaggcgccggcaccggcggcctgggcctggccatcgagggccccagcgaggccaagatgagctgcaaggacaacaaggacggcagctgcaccgtggagtacatccccttcacccccggcgactacgacgtgaacatcaccttcggcggcagacccatccccggcagccccttcagagtgcccgtgaaggacgtggtggaccccggcaaggtgaagtgcagcggccccggcctgggcgccggcgtgagagccagagtgccccagaccttcaccgtggactgcagccaggccggcagagcccccctgcaggtggccgtgctgggccccaccggcgtggccgagcccgtggaggtgagagacaacggcgacggcacccacaccgtgcactacacccccgccaccgacggcccctacaccgtggccgtgaagtacgccgaccaggaggtgcccagaagccccttcaagatcaaggtgctgcccgcccacgacgccagcaaggtgagagccagcggccccggcctgaacgccagcggcatccccgccagcctgcccgtggagttcaccatcgacgccagagacgccggcgagggcctgctgaccgtgcagatcctggaccccgagggcaagcccaagaaggccaacatcagagacaacggcgacggcacctacaccgtgagctacctgcccgacatgagcggcagatacaccatcaccatcaagtacggcggcgacgagatcccctacagccccttcagaatccacgccctgcccaccggcgacgccagcaagtgcctggtgaccgtgagcatcggcggccacggcctgggcgcctgcctgggccccagaatccagatcggccaggagaccgtgatcaccgtggacgccaaggccgccggcgagggcaaggtgacctgcaccgtgagcacccccgacggcgccgagctggacgtggacgtggtggagaaccacgacggcaccttcgacatctactacaccgcccccgagcccggcaagtacgtgatcaccatcagattcggcggcgagcacatccccaacagccccttccacgtgctggcctgcgaccccctgccccacgaggaggagcccagcgaggtgccccagctgagacagccctacgccccccccagacccggcgccagacccacccactgggccaccgaggagcccgtggtgcccgtggagcccatggagagcatgctgagacccttcaacctggtgatccccttcgccgtgcagaagggcgagctgaccggcgaggtgagaatgcccagcggcaagaccgccagacccaacatcaccgacaacaaggacggcaccatcaccgtgagatacgcccccaccgagaagggcctgcaccagatgggcatcaagtacgacggcaaccacatccccggcagccccctgcagttctacgtggacgccatcaacagcagacacgtgagcgcctacggccccggcctgagccacggcatggtgaacaagcccgccaccttcaccatcgtgaccaaggacgccggcgagggcggcctgagcctggccgtggagggccccagcaaggccgagatcacctgcaaggacaacaaggacggcacctgcaccgtgagctacctgcccaccgcccccggcgactacagcatcatcgtgagattcgacgacaagcacatccccggcagccccttcaccgccaagatcaccggcgacgacagcatgagaaccagccagctgaacgtgggcaccagcaccgacgtgagcctgaagatcaccgagagcgacctgagccagctgaccgccagcatcagagcccccagcggcaacgaggagccctgcctgctgaagagactgcccaacagacacatcggcatcagcttcacccccaaggaggtgggcgagcacgtggtgagcgtgagaaagagcggcaagcacgtgaccaacagccccttcaagatcctggtgggccccagcgagatcggcgacgccagcaaggtgagagtgtggggcaagggcctgagcgagggccacaccttccaggtggccgagttcatcgtggacaccagaaacgccggctacggcggcctgggcctgagcatcgagggccccagcaaggtggacatcaactgcgaggacatggaggacggcacctgcaaggtgacctactgccccaccgagcccggcacctacatcatcaacatcaagttcgccgacaagcacgtgcccggcagccccttcaccgtgaaggtgaccggcgagggcagaatgaaggagagcatcaccagaagaagacaggcccccagcatcgccaccatcggcagcacctgcgacctgaacctgaagatccccggcaactggttccagatggtgagcgcccaggagagactgaccagaaccttcaccagaagcagccacacctacaccagaaccgagagaaccgagatcagcaagaccagaggcggcgagaccaagagagaggtgagagtggaggagagcacccaggtgggcggcgaccccttccccgccgtgttcggcgacttcctgggcagagagagactgggcagcttcggcagcatcaccagacagcaggagggcgaggccagcagccaggacatgaccgcccaggtgaccagccccagcggcaaggtggaggccgccgagatcgtggagggcgaggacagcgcctacagcgtgagattcgtgccccaggagatgggcccccacaccgtggccgtgaagtacagaggccagcacgtgcccggcagccccttccagttcaccgtgggccccctgggcgagggcggcgcccacaaggtgagagccggcggcaccggcctggagagaggcgtggccggcgtgcccgccgagttcagcatctggaccagagaggccggcgccggcggcctgagcatcgccgtggagggccccagcaaggccgagatcgccttcgaggacagaaaggacggcagctgcggcgtgagctacgtggtgcaggagcccggcgactacgaggtgagcatcaagttcaacgacgagcacatccccgacagccccttcgtggtgcccgtggccagcctgagcgacgacgccagaagactgaccgtgaccagcctgcaggagaccggcctgaaggtgaaccagcccgccagcttcgccgtgcagctgaacggcgccagaggcgtgatcgacgccagagtgcacacccccagcggcgccgtggaggagtgctacgtgagcgagctggacagcgacaagcacaccatcagattcatcccccacgagaacggcgtgcacagcatcgacgtgaagttcaacggcgcccacatccccggcagccccttcaagatcagagtgggcgagcagagccaggccggcgaccccggcctggtgagcgcctacggccccggcctggagggcggcaccaccggcgtgagcagcgagttcatcgtgaacaccctgaacgccggcagcggcgccctgagcgtgaccatcgacggccccagcaaggtgcagctggactgcagagagtgccccgagggccacgtggtgacctacacccccatggcccccggcaactacctgatcgccatcaagtacggcggcccccagcacatcgtgggcagccccttcaaggccaaggtgaccggccccagactgagcggcggccacagcctgcacgagaccagcaccgtgctggtggagaccgtgaccaagagcagcagcagcagaggcagcagctacagcagcatccccaagttcagcagcgacgccagcaaggtggtgaccagaggccccggcctgagccaggccttcgtgggccagaagaacagcttcaccgtggactgcagcaaggccggcaccaacatgatgatggtgggcgtgcacggccccaagaccccctgcgaggaggtgtacgtgaagcacatgggcaacagagtgtacaacgtgacctacaccgtgaaggagaagggcgactacatcctgatcgtgaagtggggcgacgagagcgtgcccggcagccccttcaaggtgaaggtgccctag

SEQ ID NO: 81760 - DNA, 8079 bp, synthetic construct
  misc_feature 1..8079: note = Description of Artificial Sequence: Synthetic coding sequence
  source 1..8079: mol_type = other DNA
atgatgaacaacagcggctacagcgacgccggcctgggcctgggcgacgagaccgacgagatgcccagcaccgagaaggacctggccgaggacgccccctggaagaagatccagcagaacaccttcaccagatggtgcaacgagcacctgaagtgcgtgggcaagagactgaccgacctgcagagagacctgagcgacggcctgagactgatcgccctgctggaggtgctgagccagaagagaatgtacagaaagttccaccccagacccaacttcagacagatgaagctggagaacgtgagcgtggccctggagttcctggagagagagcacatcaagctggtgagcatcgacagcaaggccatcgtggacggcaacctgaagctgatcctgggcctgatctggaccctgatcctgcactacagcatcagcatgcccatgtgggaggacgaggacgacgaggacgccagaaagcagacccccaagcagagactgctgggctggatccagaacaaggtgccccagctgcccatcaccaacttcaacagagactggcaggacggcaaggccctgggcgccctggtggacaactgcgcccccggcctgtgccccgactgggaggcctgggaccccaaccagcccgtggagaacgccagagaggccatgcagcaggccgacgactggctgggcgtgccccaggtgatcgcccccgaggagatcgtggaccccaacgtggacgagcacagcgtgatgacctacctgagccagttccccaaggccaagctgaagcccggcgcccccgtgagaagcaagcagctgaaccccaagaaggccatcgcctacggccccggcatcgagccccagggcaacaccgtgctgcagcccgcccacttcaccgtgcagaccgtggacgccggcgtgggcgaggtgctggtgtacatcgaggaccccgagggccacaccgaggaggccaaggtggtgcccaacaacgacaaggacagaacctacgccgtgagctacgtgcccaaggtggccggcctgcacaaggtgaccgtgctgttcgccggccagaacatcgagagaagccccttcgaggtgaacgtgggcatggccctgggcgacgccaacaaggtgagcgccagaggccccggcctggagcccgtgggcaacgtggccaacaagcccacctacttcgacatctacaccgccggcgccggcaccggcgacgtggccgtggtgatcgtggacccccagggcagaagagacaccgtggaggtggccctggaggacaagggcgacagcaccttcagatgcacctacagacccgccatggagggcccccacaccgtgcacgtggccttcgccggcgcccccatcaccagaagccccttccccgtgcacgtgagcgaggcctgcaaccccaacgcctgcagagccagcggcagaggcctgcagcccaagggcgtgagagtgaaggaggtggccgacttcaaggtgttcaccaagggcgccggcagcggcgagctgaaggtgaccgtgaagggccccaagggcaccgaggagcccgtgaaggtgagagaggccggcgacggcgtgttcgagtgcgagtactaccccgtggtgcccggcaagtacgtggtgaccatcacctggggcggctacgccatccccagaagccccttcgaggtgcaggtgagccccgaggccggcgtgcagaaggtgagagcctggggccccggcctggagaccggccaggtgggcaagagcgccgacttcgtggtggaggccatcggcaccgaggtgggcaccctgggcttcagcatcgagggccccagccaggccaagatcgagtgcgacgacaagggcgacggcagctgcgacgtgagatactggcccaccgagcccggcgagtacgccgtgcacgtgatctgcgacgacgaggacatcagagacagccccttcatcgcccacatcctgcccgccccccccgactgcttccccgacaaggtgaaggccttcggccccggcctggagcccaccggctgcatcgtggacaagcccgccgagttcaccatcgacgccagagccgccggcaagggcgacctgaagctgtacgcccaggacgccgacggctgccccatcgacatcaaggtgatccccaacggcgacggcaccttcagatgcagctacgtgcccaccaagcccatcaagcacaccatcatcatcagctggggcggcgtgaacgtgcccaagagccccttcagagtgaacgtgggcgagggcagccaccccgagagagtgaaggtgtacggccccggcgtggagaagaccggcctgaaggccaacgagcccacctacttcaccgtggactgcagcgaggccggccagggcgacgtgagcatcggcatcaagtgcgcccccggcgtggtgggccccgccgaggccgacatcgacttcgacatcatcaagaacgacaacgacaccttcaccgtgaagtacaccccccccggcgccggcagatacaccatcatggtgctgttcgccaaccaggagatccccgccagccccttccacatcaaggtggaccccagccacgacgccagcaaggtgaaggccgagggccccggcctgaacagaaccggcgtggaggtgggcaagcccacccacttcaccgtgctgaccaagggcgccggcaaggccaagctggacgtgcagttcgccggcaccgccaagggcgaggtggtgagagacttcgagatcatcgacaaccacgactacagctacaccgtgaagtacaccgccgtgcagcagggcaacatggccgtgaccgtgacctacggcggcgaccccgtgcccaagagccccttcgtggtgaacgtggccccccccctggacctgagcaagatcaaggtgcagggcctgaacagcaaggtggccgtgggccaggagcaggccttcagcgtgaacaccagaggcgccggcggccagggccagctggacgtgagaatgaccagccccagcagaagacccatcccctgcaagctggagcccggcggcggcgccgaggcccaggccgtgagatacatgccccccgaggagggcccctacaaggtggacatcacctacgacggccaccccgtgcccggcagccccttcgccgtggagggcgtgctgccccccgaccccagcaaggtgtgcgcctacggccccggcctgaagggcggcctggtgggcacccccgcccccttcagcatcgacaccaagggcgccggcaccggcggcctgggcctgaccgtggagggcccctgcgaggccaagatcgagtgccaggacaacggcgacggcagctgcgccgtgagctacctgcccaccgagcccggcgagtacaccatcaacatcctgttcgccgaggcccacatccccggcagccccttcaaggccaccatcagacccgtgttcgaccccagcaaggtgagagccagcggccccggcctggagagaggcaaggtgggcgaggccgccaccttcaccgtggactgcagcgaggccggcgaggccgagctgaccatcgagatcctgagcgacgccggcgtgaaggccgaggtgctgatccacaacaacgccgacggcacctaccacatcacctacagccccgccttccccggcacctacaccatcaccatcaagtacggcggccaccccgtgcccaagttccccaccagagtgcacgtgcagcccgccgtggacaccagcggcgtgaaggtgagcggccccggcgtggagccccacggcgtgctgagagaggtgaccaccgagttcaccgtggacgccagaagcctgaccgccaccggcggcaaccacgtgaccgccagagtgctgaaccccagcggcgccaagaccgacacctacgtgaccgacaacggcgacggcacctacagagtgcagtacaccgcctacgaggagggcgtgcacctggtggaggtgctgtacgacgaggtggccgtgcccaagagccccttcagagtgggcgtgaccgagggctgcgaccccaccagagtgagagccttcggccccggcctggagggcggcctggtgaacaaggccaacagattcaccgtggagaccagaggcgccggcaccggcggcctgggcctggccatcgagggccccagcgaggccaagatgagctgcaaggacaacaaggacggcagctgcaccgtggagtacatccccttcacccccggcgactacgacgtgaacatcaccttcggcggcagacccatccccggcagccccttcagagtgcccgtgaaggacgtggtggaccccggcaaggtgaagtgcagcggccccggcctgggcgccggcgtgagagccagagtgccccagaccttcaccgtggactgcagccaggccggcagagcccccctgcaggtggccgtgctgggccccaccggcgtggccgagcccgtggaggtgagagacaacggcgacggcacccacaccgtgcactacacccccgccaccgacggcccctacaccgtggccgtgaagtacgccgaccaggaggtgcccagaagccccttcaagatcaaggtgctgcccgcccacgacgccagcaaggtgagagccagcggccccggcctgaacgccagcggcatccccgccagcctgcccgtggagttcaccatcgacgccagagacgccggcgagggcctgctgaccgtgcagatcctggaccccgagggcaagcccaagaaggccaacatcagagacaacggcgacggcacctacaccgtgagctacctgcccgacatgagcggcagatacaccatcaccatcaagtacggcggcgacgagatcccctacagccccttcagaatccacgccctgcccaccggcgacgccagcaagtgcctggtgaccgtgagcatcggcggccacggcctgggcgcctgcctgggccccagaatccagatcggccaggagaccgtgatcaccgtggacgccaaggccgccggcgagggcaaggtgacctgcaccgtgagcacccccgacggcgccgagctggacgtggacgtggtggagaaccacgacggcaccttcgacatctactacaccgcccccgagcccggcaagtacgtgatcaccatcagattcggcggcgagcacatccccaacagccccttccacgtgctggccaccgaggagcccgtggtgcccgtggagcccatggagagcatgctgagacccttcaacctggtgatccccttcgccgtgcagaagggcgagctgaccggcgaggtgagaatgcccagcggcaagaccgccagacccaacatcaccgacaacaaggacggcaccatcaccgtgagatacgcccccaccgagaagggcctgcaccagatgggcatcaagtacgacggcaaccacatccccggcagccccctgcagttctacgtggacgccatcaacagcagacacgtgagcgcctacggccccggcctgagccacggcatggtgaacaagcccgccaccttcaccatcgtgaccaaggacgccggcgagggcggcctgagcctggccgtggagggccccagcaaggccgagatcacctgcaaggacaacaaggacggcacctgcaccgtgagctacctgcccaccgcccccggcgactacagcatcatcgtgagattcgacgacaagcacatccccggcagccccttcaccgccaagatcaccggcgacgacagcatgagaaccagccagctgaacgtgggcaccagcaccgacgtgagcctgaagatcaccgagagcgacctgagccagctgaccgccagcatcagagcccccagcggcaacgaggagccctgcctgctgaagagactgcccaacagacacatcggcatcagcttcacccccaaggaggtgggcgagcacgtggtgagcgtgagaaagagcggcaagcacgtgaccaacagccccttcaagatcctggtgggccccagcgagatcggcgacgccagcaaggtgagagtgtggggcaagggcctgagcgagggccacaccttccaggtggccgagttcatcgtggacaccagaaacgccggctacggcggcctgggcctgagcatcgagggccccagcaaggtggacatcaactgcgaggacatggaggacggcacctgcaaggtgacctactgccccaccgagcccggcacctacatcatcaacatcaagttcgccgacaagcacgtgcccggcagccccttcaccgtgaaggtgaccggcgagggcagaatgaaggagagcatcaccagaagaagacaggcccccagcatcgccaccatcggcagcacctgcgacctgaacctgaagatccccggcaactggttccagatggtgagcgcccaggagagactgaccagaaccttcaccagaagcagccacacctacaccagaaccgagagaaccgagatcagcaagaccagaggcggcgagaccaagagagaggtgagagtggaggagagcacccaggtgggcggcgaccccttccccgccgtgttcggcgacttcctgggcagagagagactgggcagcttcggcagcatcaccagacagcaggagggcgaggccagcagccaggacatgaccgcccaggtgaccagccccagcggcaaggtggaggccgccgagatcgtggagggcgaggacagcgcctacagcgtgagattcgtgccccaggagatgggcccccacaccgtggccgtgaagtacagaggccagcacgtgcccggcagccccttccagttcaccgtgggccccctgggcgagggcggcgcccacaaggtgagagccggcggcaccggcctggagagaggcgtggccggcgtgcccgccgagttcagcatctggaccagagaggccggcgccggcggcctgagcatcgccgtggagggccccagcaaggccgagatcgccttcgaggacagaaaggacggcagctgcggcgtgagctacgtggtgcaggagcccggcgactacgaggtgagcatcaagttcaacgacgagcacatccccgacagccccttcgtggtgcccgtggccagcctgagcgacgacgccagaagactgaccgtgaccagcctgcaggagaccggcctgaaggtgaaccagcccgccagcttcgccgtgcagctgaacggcgccagaggcgtgatcgacgccagagtgcacacccccagcggcgccgtggaggagtgctacgtgagcgagctggacagcgacaagcacaccatcagattcatcccccacgagaacggcgtgcacagcatcgacgtgaagttcaacggcgcccacatccccggcagccccttcaagatcagagtgggcgagcagagccaggccggcgaccccggcctggtgagcgcctacggccccggcctggagggcggcaccaccggcgtgagcagcgagttcatcgtgaacaccctgaacgccggcagcggcgccctgagcgtgaccatcgacggccccagcaaggtgcagctggactgcagagagtgccccgagggccacgtggtgacctacacccccatggcccccggcaactacctgatcgccatcaagtacggcggcccccagcacatcgtgggcagccccttcaaggccaaggtgaccggccccagactgagcggcggccacagcctgcacgagaccagcaccgtgctggtggagaccgtgaccaagagcagcagcagcagaggcagcagctacagcagcatccccaagttcagcagcgacgccagcaaggtggtgaccagaggccccggcctgagccaggccttcgtgggccagaagaacagcttcaccgtggactgcagcaaggccggcaccaacatgatgatggtgggcgtgcacggccccaagaccccctgcgaggaggtgtacgtgaagcacatgggcaacagagtgtacaacgtgacctacaccgtgaaggagaagggcgactacatcctgatcgtgaagtggggcgacgagagcgtgcccggcagccccttcaaggtgaaggtgccctag

SEQ ID NO: 81761 - DNA, 264 bp, synthetic construct
  misc_feature 1..264: note = Description of Artificial Sequence: Synthetic coding sequence
  source 1..264: mol_type = other DNA
atgcagctgttcgtgagagcccaggagctgcacaccttcgaggtgaccggccaggagaccgtggcccagatcaaggcccacgtggccagcctggagggcatcgcccccgaggaccaggtggtgctgctggccggcgcccccctggaggacgaggccaccctgggccagtgcggcgtggaggccctgaccaccctggaggtggccggcagaatgctgggcggcggccagaccggcgaggaggaggaggaggacagaagcggctag

SEQ ID NO: 81762 - DNA, 228 bp, synthetic construct
  misc_feature 1..228: note = Description of Artificial Sequence: Synthetic coding sequence
  source 1..228: mol_type = other DNA
atgcagctgttcgtgagagcccaggagctgcacaccttcgaggtgaccggccaggagaccgtggcccagatcaaggcccacgtggccagcctggagggcatcgcccccgaggaccaggtggtgctgctggccggcgcccccctggaggacgaggccaccctgggccagtgcggcgtggaggccctgaccaccctggaggtggccggcagaatgctgggcggcgagtag

SEQ ID NO: 81763 - DNA, 297 bp, synthetic construct
  misc_feature 1..297: note = Description of Artificial Sequence: Synthetic coding sequence
  source 1..297: mol_type = other DNA
atgcagctgttcgtgagagcccaggagctgcacaccttcgaggtgaccggccaggagaccgtggcccagatcaaggccctgaccaccctggaggtggccggcagaatgctgggcggcaaggtgcacggcagcctggccagagccggcaaggtgagaggccagacccccaaggtggccaagcaggagaagaagaagaagaagaccggcagagccaagagaagaatgcagtacaacagaagattcgtgaacgtggtgcccaccttcggcaagaagaagggccccaacgccaacagctag

SEQ ID NO: 81764 - DNA, 330 bp, synthetic construct
  misc_feature 1..330: note = Description of Artificial Sequence: Synthetic coding sequence
  source 1..330: mol_type = other DNA
atgcagctgttcgtgagagcccaggagctgcacaccttcgaggtgaccggccaggagaccgtggcccagatcaaggcccacgtggccagcctggagggcatcgcccccgaggaccaggtggtgctgctggccggcgcccccctggaggacgaggccaccctgggccagtgcggcgtggaggccctgaccaccctggaggtggccggcagaatgctgggcggcaaggtgcacggcagcctggccagagccggcaaggtgagaggccagacccccaaggtggccaagcaggagaagaagaagaagaagaccggcagagccaagagaagatag

SEQ ID NO: 81765 - DNA, 402 bp, synthetic construct
  misc_feature 1..402: note = Description of Artificial Sequence: Synthetic coding sequence
  source 1..402: mol_type = other DNA
atgcagctgttcgtgagagcccaggagctgcacaccttcgaggtgaccggccaggagaccgtggcccagatcaaggcccacgtggccagcctggagggcatcgcccccgaggaccaggtggtgctgctggccggcgcccccctggaggacgaggccaccctgggccagtgcggcgtggaggccctgaccaccctggaggtggccggcagaatgctgggcggcaaggtgcacggcagcctggccagagccggcaaggtgagaggccagacccccaaggtggccaagcaggagaagaagaagaagaagaccggcagagccaagagaagaatgcagtacaacagaagattcgtgaacgtggtgcccaccttcggcaagaagaagggccccaacgccaacagctag

SEQ ID NO: 81766 - DNA, 228 bp, synthetic construct; identical to SEQ ID NO: 81762
  misc_feature 1..228: note = Description of Artificial Sequence: Synthetic coding sequence
  source 1..228: mol_type = other DNA

SEQ ID NO: 81767 - DNA, 402 bp, synthetic construct; identical to SEQ ID NO: 81765
  misc_feature 1..402: note = Description of Artificial Sequence: Synthetic coding sequence
  source 1..402: mol_type = other DNA

SEQ ID NO: 81768 - DNA, 402 bp, synthetic construct; identical to SEQ ID NO: 81765
  misc_feature 1..402: note = Description of Artificial Sequence: Synthetic coding sequence
  source 1..402: mol_type = other DNA

SEQ ID NO: 81769 - DNA, 1563 bp, synthetic construct
  misc_feature 1..1563: note = Description of Artificial Sequence: Synthetic coding sequence
  source 1..1563: mol_type = other DNA
atgagcgccggcgaggtggagagactggtgagcgagctgagcggcggcaccggcggcgacgaggaggaggagtggctgtacggcgacgagaacgaggtggagagacccgaggaggagaacgccagcgccaacccccccagcggcatcgaggacgagaccgccgagaacggcgtgcccaagcccaaggtgaccgagaccgaggacgacagcgacagcgacagcgacgacgacgaggacgacgtgcacgtgaccatcggcgacatcaagaccggcgccccccagtacggcagctacggcaccgcccccgtgaacctgaacatcaagaccggcggcagagtgtacggcaccaccggcaccaaggtgaagggcgtggacctggacgcccccggcagcatcaacggcgtgcccctgctggaggtggacctggacagcttcgaggacaagccctggagaaagcccggcgccgacctgagcgactacttcaactacggcttcaacgaggacacctggaaggcctactgcgagaagcagaagagaatcagaatgggcctggaggtgatccccgtgaccagcaccaccaacaagatcaccgtgcagcagggcagaaccggcaacagcgagaaggagaccgccctgcccagcaccaaggccgagttcaccagcccccccagcctgttcaagaccggcctgccccccagcagaagactgcccggcgccatcgacgtgatcggccagaccatcaccatcagcagagtggagggcagaagaagagccaacgagaacagcaacatccaggtgctgagcgagagaagcgccaccgaggtggacaacaacttcagcaagcccccccccttcttcccccccggcgccccccccacccacctgccccccccccccttcctgccccccccccccaccgtgagcaccgccccccccctgatccccccccccggcttcccccccccccccggcgcccccccccccagcctgatccccaccatcgagagcggccacagcagcggctacgacagcagaagcgccagagccttcccctacggcaacgtggccttcccccacctgcccggcagcgcccccagctggcccagcctggtggacaccagcaagcagtgggactactacgccagaagagagaaggacagagacagagagagagacagagacagagagagagacagagacagagacagagagagagagagaaccagagagagagagagagagagagaccacagccccacccccagcgtgttcaacagcgacgaggagagatacagatacagagagtacgccgagagaggctacgagagacacagagccagcagagagaaggaggagagacacagagagagaagacacagagagaaggaggagaccagacacaagagcagcagaagcaacagcagaagaagacacgagagcgaggagggcgacagccacagaagacacaagcacaagaagagcaagagaagcaaggagggcaaggaggccggcagcgagcccgcccccgagcaggagagcaccgaggccacccccgccgagtag

SEQ ID NO: 81770 - DNA, 1785 bp, synthetic construct
  misc_feature 1..1785: note = Description of Artificial Sequence: Synthetic coding sequence
  source 1..1785: mol_type = other DNA
atgagcgccggcgaggtggagagactggtgagcgagctgagcggcggcaccggcggcgacgaggaggaggagtggctgtacggcggcccctgggacgtgcacgtgcacagcgacctggccaaggacctggacgagaacgaggtggagagacccgaggaggagaacgccagcgccaacccccccagcggcatcgaggacgagaccgccgagaacggcgtgcccaagcccaaggtgaccgagaccgaggacgacagcgacagcgacagcgacgacgacgaggacgacgtgcacgtgaccatcggcgacatcaagaccggcgccccccagtacggcagctacggcaccgcccccgtgaacctgaacatcaagaccggcggcagagtgtacggcaccaccggcaccaaggtgaagggcgtggacctggacgcccccggcagcatcaacggcgtgcccctgctggaggtggacctggacagcttcgaggacaagccctggagaaagcccggcgccgacctgagcgactacttcaactacggcttcaacgaggacacctggaaggcctactgcgagaagcagaagagaatcagaatgggcctggaggtgatccccgtgaccagcaccaccaacaagatcaccgccgaggactgcaccatggaggtgacccccggcgccgagatccaggacggcagattcaacctgttcaaggtgcagcagggcagaaccggcaacagcgagaaggagaccgccctgcccagcaccaaggccgagttcaccagcccccccagcctgttcaagaccggcctgccccccagcagaaacagcaccagcagccagagccagaccagcaccgccagcagaaaggccaacagcagcgtgggcaagtggcaggacagatacggcagagccgagagccccgacctgagaagactgcccggcgccatcgacgtgatcggccagaccatcaccatcagcagagtggagggcagaagaagagccaacgagaacagcaacatccaggtgctgagcgagagaagcgccaccgaggtggacaacaacttcagcaagcccccccccttcttcccccccggcgccccccccacccacctgccccccccccccttcctgccccccccccccaccgtgagcaccgccccccccctgatccccccccccggcttcccccccccccccggcgcccccccccccagcctgatccccaccatcgagagcggccacagcagcggctacgacagcagaagcgccagagccttcccctacggcaacgtggccttcccccacctgcccggcagcgcccccagctggcccagcctggtggacaccagcaagcagtgggactactacgccagaagagagaaggacagagacagagagagagacagagacagagagagagacagagacagagacagagagagagagagaaccagagagagagagagagagagagaccacagccccacccccagcgtgttcaacagcgacgaggagagatacagatacagagagtacgccgagagaggctacgagagacacagagccagcagagagaaggaggagagacacagagagagaagacacagagagaaggaggagaccagacacaagagcagcagaagcaacagcagaagaagacacgagagcgaggagggcgacagccacagaagacacaagcacaagaagagcaagagaagcaaggagggcaaggaggccggcagcgagcccgcccccgagcaggagagcaccgaggccacccccgccgagtag

SEQ ID NO: 81771 - DNA, 1767 bp, synthetic construct
  misc_feature 1..1767: note = Description of Artificial Sequence: Synthetic coding sequence
  source 1..1767: mol_type = other DNA
atgagcgccggcgaggtggagagactggtgagcgagctgagcggcggcaccggcggcgacgaggaggaggagtggctgtacggcgacgagaacgaggtggagagacccgaggaggagaacgccagcgccaacccccccagcggcatcgaggacgagaccgccgagaacggcgtgcccaagcccaaggtgaccgagaccgaggacgacagcgacagcgacagcgacgacgacgaggacgacgtgcacgtgaccatcggcgacatcaagaccggcgccccccagtacggcagctacggcaccgcccccgtgaacctgaacatcaagaccggcggcagagtgtacggcaccaccggcaccaaggtgaagggcgtggacctggacgcccccggcagcatcaacggcgtgcccctgctggaggtggacctggacagcttcgaggacaagccctggagaaagcccggcgccgacctgagcgactacttcaactacggcttcaacgaggacacctggaaggcctactgcgagaagcagaagagaatcagaatgggcctggaggtgatccccgtgaccagcaccaccaacaagatcaccgccgaggactgcaccatggaggtgacccccggcgccgagatccaggacggcagattcaacctgttcaaggtgcagcagggcagaaccggcaacagcgagaaggagaccgccctgcccagcaccaaggccgagttcaccagcccccccagcctgttcaagaccggcctgccccccagcagaaacagcaccagcagccagagccagaccagcaccgccagcagaaaggccaacagcagcgtgggcaagtggcaggacagatacggcagagccgagagccccgacctgagaagactgcccggcgccatcgacgtgatcggccagaccatcaccatcagcagagtggagggcagaagaagagccaacgagaacagcaacatccaggtgctgagcgagagaagcgccaccgaggtggacaacaacttcagcaagcccccccccttcttcccccccggcgccccccccacccacctgccccccccccccttcctgccccccccccccaccgtgagcaccgccccccccctgatccccccccccggcatccccatcaccgtgcccccccccggcttcccccccccccccggcgcccccccccccagcctgatccccaccatcgagagcggccacagcagcggctacgacagcagaagcgccagagccttcccctacggcaacgtggccttcccccacctgcccggcagcgcccccagctggcccagcctggtggacaccagcaagcagtgggactactacgccagaagagagaaggacagagacagagagagagacagagacagagagagagacagagacagagacagagagagagagagaaccagagagagagagagagagagagaccacagccccacccccagcgtgttcaacagcgacgaggagagatacagatacagagagtacgccgagagaggctacgagagacacagagccagcagagagaaggaggagagacacagagagagaagacacagagagaaggaggagaccagacacaagagcagcagaagcaacagcagaagaagacacgagagcgaggagggcgacagccacagaagacacaagcacaagaagagcaagagaagcaaggagggcaaggaggccggcagcgagcccgcccccgagcaggagagcaccgaggccacccccgccgagtag

SEQ ID NO: 81772 - DNA, 366 bp, synthetic construct
  misc_feature 1..366: note = Description of Artificial Sequence: Synthetic coding sequence
  source 1..366: mol_type = other DNA
atggtggacatgatggacctgcccagaagcagaatcaacgccggcatgctggcccagttcatcgacaagcccgtgtgcttcgtgggcagactggagaagatccaccccaccggcaagatgttcatcctgagcgacggcgagggcaagaacggcaccatcgagctgatggagcccctggacgaggagatcagcggcatcgtggaggtggtgggcagagtgaccgccaaggccaccatcctgtgcaccagctacgtgcagttcaaggaggacagccaccccttcgacctgggcctgtacaacgaggccgtgaagatcatccacgacttcccccagttctaccccctgggcatcgtgcagcacgactag

SEQ ID NO: 81773 - DNA, 1413 bp, synthetic construct
  misc_feature 1..1413: note = Description of Artificial Sequence: Synthetic coding sequence
  source 1..1413: mol_type = other DNA
atgttccccgccggcccccccagccacagcctgctgagactgcccctgctgcagctgctgctgctggtggtgcaggccgtgggcagaggcctgggcagagccagccccgccggcggccccctggaggacgtggtgatcgagagataccacatccccagagcctgccccagagaggtgcagatgggcgacttcgtgagataccactacaacggcaccttcgaggacggcaagaagttcgacagcagctacgacagaaacaccctggtggccatcgtggtgggcgtgggcagactgatcaccggcatggacagaggcctgatgggcatgtgcgtgaacgagagaagaagactgatcgtgcccccccacctgggctacggcagcatcggcctggccggcctgatcccccccgacgccaccctgtacttcgacgtggtgctgctggacgtgtggaacaaggaggacaccgtgcaggtgagcaccctgctgagacccccccactgccccagaatggtgcaggacggcgacttcgtgagataccactacaacggcaccctgctggacggcaccagcttcgacaccagctacagcagaaaccacacctacaacacctacatcggccagggctacatcatccccggcatggaccagggcctgcagggcgcctgcatgggcgagagaagaagaatcaccatccccccccacctggcctacggcgagaacggcaccggcgacaagatccccggcagcgccgtgctgatcttcaacgtgcacgtgatcgacttccacaaccccgccgacgtggtggagatcagaaccctgagcagacccagcgagacctgcaacgagaccaccaagctgggcgacttcgtgagataccactacaactgcagcctgctggacggcacccagctgttcaccagccacgactacggcgccccccaggaggccaccctgggcgccaacaaggtgatcgagggcctggacaccggcctgcagggcatgtgcgtgggcgagagaagacagctgatcgtgcccccccacctggcccacggcgagagcggcgccagaggcgtgcccggcagcgccgtgctgctgttcgaggtggagctggtgagcagagaggacggcctgcccaccggctacctgttcgtgtggcacaaggacccccccgccaacctgttcgaggacatggacctgaacaaggacggcgaggtgccccccgaggagttcagcaccttcatcaaggcccaggtgagcgagggcaagggcagactgatgcccggccaggaccccgagaagaccatcggcgacatgttccagaaccaggacagaaaccaggacggcaagatcaccgtggacgagctgaagctgaagagcgacgaggacgaggagagagtgcacgaggagctgtag

SEQ ID NO: 81774 - DNA, 1749 bp, synthetic construct
  misc_feature 1..1749: note = Description of Artificial Sequence: Synthetic coding sequence
  source 1..1749: mol_type = other DNA
atgttccccgccggcccccccagccacagcctgctgagactgcccctgctgcagctgctgctgctggtggtgcaggccgtgggcagaggcctgggcagagccagccccgccggcggccccctggaggacgtggtgatcgagagataccacatccccagagcctgccccagagaggtgcagatgggcgacttcgtgagataccactacaacggcaccttcgaggacggcaagaagttcgacagcagctacgacagaaacaccctggtggccatcgtggtgggcgtgggcagactgatcaccggcatggacagaggcctgatgggcatgtgcgtgaacgagagaagaagactgatcgtgcccccccacctgggctacggcagcatcggcctggccggcctgatcccccccgacgccaccctgtacttcgacgtggtgctgctggacgtgtggaacaaggaggacaccgtgcaggtgagcaccctgctgagacccccccactgccccagaatggtgcaggacggcgacttcgtgagataccactacaacggcaccctgctggacggcaccagcttcgacaccagctacagcaagggcggcacctacgacacctacgtgggcagcggctggctgatcaagggcatggaccagggcctgctgggcatgtgccccggcgagagaagaaagatcatcatcccccccttcctggcctacggcgagaagggctacggcaccgtgatccccccccaggccagcctggtgttccacgtgctgctgatcgacgtgcacaaccccaaggacgccgtgcagctggagaccctggagctgccccccggctgcgtgagaagagccggcgccggcgacttcatgagataccactacaacggcagcctgatggacggcaccctgttcgacagcagctacagcagaaaccacacctacaacacctacatcggccagggctacatcatccccggcatggaccagggcctgcagggcgcctgcatgggcgagagaagaagaatcaccatccccccccacctggcctacggcgagaacggcaccggcgacaagatccccggcagcgccgtgctgatcttcaacgtgcacgtgatcgacttccacaaccccgccgacgtggtggagatcagaaccctgagcagacccagcgagacctgcaacgagaccaccaagctgggcgacttcgtgagataccactacaactgcagcctgctggacggcacccagctgttcaccagccacgactacggcgccccccaggaggccaccctgggcgccaacaaggtgatcgagggcctggacaccggcctgcagggcatgtgcgtgggcgagagaagacagctgatcgtgcccccccacctggcccacggcgagagcggcgccagaggcgtgcccggcagcgccgtgctgctgttcgaggtggagctggtgagcagagaggacggcctgcccaccggctacctgttcgtgtggcacaaggacccccccgccaacctgttcgaggacatggacctgaacaaggacggcgaggtgccccccgaggagttcagcaccttcatcaaggcccaggtgagcgagggcaagggcagactgatgcccggccaggaccccgagaagaccatcggcgacatgttccagaaccaggacagaaaccaggacggcaagatcaccgtggacgagctgaagctgaagagcgacgaggacgaggagagagtgcacgaggagctgtag

SEQ ID NO: 81775 - DNA, 1629 bp, synthetic construct
  misc_feature 1..1629: note = Description of Artificial Sequence: Synthetic coding sequence
  source 1..1629: mol_type = other DNA
atgttccccgccggcccccccagccacagcctgctgagactgcccctgctgcagctgctgctgctggtggtgcaggccgtgggcagaggcctgggcagagccagccccgccggcggccccctggaggacgtggtgatcgagagataccacatccccagagcctgccccagagaggtgcagatgggcgacttcgtgagataccactacaacggcaccttcgaggacggcaagaagttcgacagcagctacgacagaaacaccctggtggccatcgtggtgggcgtgggcagactgatcaccggcatggacagaggcctgatgggcatgtgcgtgaacgagagaagaagactgatcgtgcccccccacctgggctacggcagcatcggcctggccggcctgatcccccccgacgccaccctgtacttcgacgtggtgctgctggacgtgtggaacaaggaggacaccgtgcaggtgagcaccctgctgagacccccccactgccccagaatggtgcaggacggcgacttcgtgagataccactacaacggcaccctgctggacggcaccagcttcgacaccagctacagcaagggcggcacctacgacacctacgtgggcagcggctggctgatcaagggcatggaccagggcctgctgggcatgtgccccggcgagagaagaaagatcatcatcccccccttcctggcctacggcgagaagggctacggcaccgtgatccccccccaggccagcctggtgttccacgtgctgctgatcgacgtgcacaaccccaaggacgccgtgcagctggagaccctggagctgccccccggctgcgtgagaagagccggcgccggcgacttcatgagataccactacaacggcagcctgatggacggcaccctgttcgacagcagctacagcagaaaccacacctacaacacctacatcggccagggctacatcatccccggcatggaccagggcctgcagggcgcctgcatgggcgagagaagaagaatcaccatccccccccacctggcctacggcgagaacggcaccggcgacaagatccccggcagcgccgtgctgatcttcaacgtgcacgtgatcgacttccacaaccccgccgacgtggtggagatcagaaccctgagcagacccagcgagacctgcaacgagaccaccaagctgggcgacttcgtgagataccactacaactgcagcctgctggacggcacccagctgttcaccagccacgactacggcgccccccaggaggccaccctgggcgccaacaaggtgatcgagggcctggacaccggcctgcagggcatgtgcgtgggcgagagaagacagctgatcgtgcccccccacctggcccacggcgagagcggcgccagaggcgtgcccggcagcgccgtgctgctgttcgaggtggagctggtgagcagagaggacggcctgcccaccggctacctgttcgtgtggcacaaggacccccccgccaacctgttcgaggacatggacctgaacaaggacggcgaggtgccccccgaggagttcagcaccttcatcaaggcccaggtgagcgagggcaagggcccccacgcctgggccggcccctag

SEQ ID NO: 81776 - DNA, 246 bp, synthetic construct
  misc_feature 1..246: note = Description of Artificial Sequence: Synthetic coding sequence
  source 1..246: mol_type = other DNA
atgggcgacttcgtgagataccactacaacggcaccttcgaggacggcaagaagttcgacagcagctacgacagaaacaccctggtggccatcgtggtgggcgtgggcagactgatcaccggcatggacagaggcctgatgggcatgtgcgtgaacgagagaagaagactgatcgtgcccccccacctgggctacggcagcatcggcctggccggcctgatcccccccgacgccaccctgtactag

SEQ ID NO: 81777 - DNA, 1161 bp, synthetic construct
  misc_feature 1..1161: note = Description of Artificial Sequence: Synthetic coding sequence
  source 1..1161: mol_type = other DNA
tgaatcgacgtgcacaaccccaaggacgccgtgcagctggagaccctggagctgccccccggctgcgtgagaagagccggcgccggcgacttcatgagataccactacaacggcagcctgatggacggcaccctgttcgacagcagctacagcagaaaccacacctacaacacctacatcggccagggctacatcatccccggcatggaccagggcctgcagggcgcctgcatgggcgagagaagaagaatcaccatccccccccacctggcctacggcgagaacggcaccgacagcatcggcttcctgcagggcagcgcccccctgagacccttcagaagcggcgagggccagcccagcctgggcagagagggcggctacggcaagaccgagcccgcctacccccaggaccccgccgtgctgggcgccagcgtgagcagccccgtgaagtgggccagccacgccgacccccagggcgacaagatccccggcagcgccgtgctgatcttcaacgtgcacgtgatcgacttccacaaccccgccgacgtggtggagatcagaaccctgagcagacccagcgagacctgcaacgagaccaccaagctgggcgacttcgtgagataccactacaactgcagcctgctggacggcacccagctgttcaccagccacgactacggcgccccccaggaggccaccctgggcgccaacaaggtgatcgagggcctggacaccggcctgcagggcatgtgcgtgggcgagagaagacagctgatcgtgcccccccacctggcccacggcgagagcggcgccagaggcgtgcccggcagcgccgtgctgctgttcgaggtggagctggtgagcagagaggacggcctgcccaccggctacctgttcgtgtggcacaaggacccccccgccaacctgttcgaggacatggacctgaacaaggacggcgaggtgccccccgaggagttcagcaccttcatcaaggcccaggtgagcgagggcaagggcagactgatgcccggccaggaccccgagaagaccatcggcgacatgttccagaaccaggacagaaaccaggacggcaagatcaccgtggacgagctgaagctgaagagcgacgaggacgaggagagagtgcacgaggagctgtag

SEQ ID NO: 81778 - DNA, 1068 bp, synthetic construct
  misc_feature 1..1068: note = Description of Artificial Sequence: Synthetic coding sequence
  source 1..1068: mol_type = other DNA
atgagataccactacaacggcagcctgatggacggcaccctgttcgacagcagctacagcagaaaccacacctacaacacctacatcggccagggctacatcatccccggcatggaccagggcctgcagggcgcctgcatgggcgagagaagaagaatcaccatccccccccacctggcctacggcgagaacggcaccgacagcatcggcttcctgcagggcagcgcccccctgagacccttcagaagcggcgagggccagcccagcctgggcagagagggcggctacggcaagaccgagcccgcctacccccaggaccccgccgtgctgggcgccagcgtgagcagccccgtgaagtgggccagccacgccgacccccagggcgacaagatccccggcagcgccgtgctgatcttcaacgtgcacgtgatcgacttccacaaccccgccgacgtggtggagatcagaaccctgagcagacccagcgagacctgcaacgagaccaccaagctgggcgacttcgtgagataccactacaactgcagcctgctggacggcacccagctgttcaccagccacgactacggcgccccccaggaggccaccctgggcgccaacaaggtgatcgagggcctggacaccggcctgcagggcatgtgcgtgggcgagagaagacagctgatcgtgcccccccacctggcccacggcgagagcggcgccagaggcgtgcccggcagcgccgtgctgctgttcgaggtggagctggtgagcagagaggacggcctgcccaccggctacctgttcgtgtggcacaaggacccccccgccaacctgttcgaggacatggacctgaacaaggacggcgaggtgccccccgaggagttcagcaccttcatcaaggcccaggtgagcgagggcaagggcagactgatgcccggccaggaccccgagaagaccatcggcgacatgttccagaaccaggacagaaaccaggacggcaagatcaccgtggacgagctgaagctgaagagcgacgaggacgaggagagagtgcacgaggagctgtag

SEQ ID NO: 81779 - DNA, 327 bp, synthetic construct
  misc_feature 1..327: note = Description of Artificial Sequence: Synthetic coding sequence
  source 1..327: mol_type = other DNA
atgggcgtggagatcgagaccatcagccccggcgacggcagaaccttccccaagaagggccagacctgcgtggtgcactacaccggcatgctgcagaacggcaagaagttcgacagcagcagagacagaaacaagcccttcaagttcagaatcggcaagcaggaggtgatcaagggcttcgaggagggcgccgcccagatgagcctgggccagagagccaagctgacctgcacccccgacgtggcctacggcgccaccggccaccccggcgtgatcccccccaacgccaccctgatcttcgacgtggagctgctgaacctggagtag

SEQ ID NO: 81780 - DNA, 243 bp, synthetic construct
  misc_feature 1..243: note = Description of Artificial Sequence: Synthetic coding sequence
  source 1..243: mol_type = other DNA
atgggcgtggagatcgagaccatcagccccggcgacggcagaaccttccccaagaagggccagacctgcgtggtgcactacaccggcatgctgcagaacggcaagaagttcgacagcagcagagacagaaacaagcccttcaagttcagaatcggcaagcaggaggtgatcaagggcttcgaggagggcgccgcccagctgggccccctgagccccctgcccatctgcccccacccctgctag

SEQ ID NO: 81781 - DNA, 429 bp, synthetic construct
  misc_feature 1..429: note = Description of Artificial Sequence: Synthetic coding sequence
  source 1..429: mol_type = other DNA
atgagactgagctggttcagagtgctgaccgtgctgagcatctgcctgagcgccgtggccaccgccaccggcgccgagggcaagagaaagctgcagatcggcgtgaagaagagagtggaccactgccccatcaagagcagaaagggcgacgtgctgcacatgcactacaccggcaagctggaggacggcaccgagttcgacagcagcctgccccagaaccagcccttcgtgttcagcctgggcaccggccaggtgatcaagggctgggaccagggcctgctgggcatgtgcgagggcgagaagagaaagctggtgatccccagcgagctgggctacggcgagagaggcgccccccccaagatccccggcggcgccaccctggtgttcgaggtggagctgctgaagatcgagagaagaaccgagctgtag

SEQ ID NO: 81782 - DNA, 429 bp, synthetic construct; identical to SEQ ID NO: 81781
  misc_feature 1..429: note = Description of Artificial Sequence: Synthetic coding sequence
  source 1..429: mol_type = other DNA

SEQ ID NO: 81783 - DNA, 429 bp, synthetic construct; identical to SEQ ID NO: 81781
  misc_feature 1..429: note = Description of Artificial Sequence: Synthetic coding sequence
  source 1..429: mol_type = other DNA

SEQ ID NO: 81784 - DNA, 309 bp, synthetic construct
  misc_feature 1..309: note = Description of Artificial Sequence: Synthetic coding sequence
  source 1..309: mol_type = other DNA
atgagactgagctggttcagagtgctgaccgtgctgagcatctgcctgagcgccgtggccaccgccaccggcgccgagggcaagagaaagctgcagatcggcgtgaagaagagagtggaccactgccccatcaagagcagaaagggcgacgtgctgcacatgcactacaccggcaagctggaggacggcaccgagttcgacagcagcctgccccagaaccagcccttcgtgttcagcctgggcaccggccaggtgatcaagggctgggaccagggcctgctgggcatgtgcgagggcgagaagagatag

SEQ ID NO: 81785 - DNA, 3144 bp, synthetic construct
  misc_feature 1..3144: note = Description of Artificial Sequence: Synthetic coding sequence
  source 1..3144: mol_type = other DNA
atggccgtgaccctggacaaggacgcctactacagaagagtgaagagactgtacagcaactggagaaagggcgaggacgagtacgccaacgtggacgccatcgtggtgagcgtgggcgtggacgaggagatcgtgtacgccaagagcaccgccctgcagacctggctgttcggctacgagctgaccgacaccatcatggtgttctgcgacgacaagatcatcttcatggccagcaagaagaaggtggagttcctgaagcagatcgccaacaccaagggcaacgagaacgccaacggcgcccccgccatcaccctgctgatcagagagaagaacgagagcaacaagagcagcttcgacaagatgatcgaggccatcaaggagagcaagaacggcaagaagatcggcgtgttcagcaaggacaagttccccggcgagttcatgaagagctggaacgactgcctgaacaaggagggcttcgacaagatcgacatcagcgccgtggtggcctacaccatcgccgtgaaggaggacggcgagctgaacctgatgaagaaggccgccagcatcaccagcgaggtgttcaacaagttcttcaaggagagagtgatggagatcgtggacgccgacgagaaggtgagacacagcaagctggccgagagcgtggagaaggccatcgaggagaagaagtacctggccggcgccgaccccagcaccgtggagatgtgctacccccccatcatccagagcggcggcaactacaacctgaagttcagcgtggtgagcgacaagaaccacatgcacttcggcgccatcacctgcgccatgggcatcagattcaagagctactgcagcaacctggtgagaaccctgatggtggaccccagccaggaggtgcaggagaactacaacttcctgctgcagctgcaggaggagctgctgaaggagctgagacacggcgtgaagatctgcgacgtgtacaacgccgtgatggacgtggtgaagaagcagaagcccgagctgctgaacaagatcaccaagaacctgggcttcggcatgggcatcgagttcagagagggcagcctggtgatcaacagcaagaaccagtacaagctgaagaagggcatggtgttcagcatcaacctgggcttcagcgacctgaccaacaaggagggcaagaagcccgaggagaagacctacgccctgttcatcggcgacaccgtgctggtggacgaggacggccccgccaccgtgctgaccagcgtgaagaagaaggtgaagaacgtgggcatcttcctgaagaacgaggacgaggaggaggaggaggaggagaaggacgaggccgaggacctgctgggcagaggcagcagagccgccctgctgaccgagagaaccagaaacgagatgaccgccgaggagaagagaagagcccaccagaaggagctggccgcccagctgaacgaggaggccaagagaagactgaccgagcagaagggcgagcagcagatccagaaggccagaaagagcaacgtgagctacaagaaccccagcctgatgcccaaggagccccacatcagagagatgaagatctacatcgacaagaagtacgagaccgtgatcatgcccgtgttcggcatcgccacccccttccacatcgccaccatcaagaacatcagcatgagcgtggagggcgactacacctacctgagaatcaacttctactgccccggcagcgccctgggcagaaacgagggcaacatcttccccaaccccgaggccaccttcgtgaaggagatcacctacagagccagcaacatcaaggcccccggcgagcagaccgtgcccgccctgaacctgcagaacgccttcagaatcatcaaggaggtgcagaagagatacaagaccagagaggccgaggagaaggagaaggagggcatcgtgaagcaggacagcctggtgatcaacctgaacagaagcaaccccaagctgaaggacctgtacatcagacccaacatcgcccagaagagaatgcagggcagcctggaggcccacgtgaacggcttcagattcaccagcgtgagaggcgacaaggtggacatcctgtacaacaacatcaagcacgccctgttccagccctgcgacggcgagatgatcatcgtgctgcacttccacctgaagaacgccatcatgttcggcaagaagagacacaccgacgtgcagttctacaccgaggtgggcgagatcaccaccgacctgggcaagcaccagcacatgcacgacagagacgacctgtacgccgagcagatggagagagagatgagacacaagctgaagaccgccttcaagaacttcatcgagaaggtggaggccctgaccaaggaggagctggagttcgaggtgcccttcagagacctgggcttcaacggcgccccctacagaagcacctgcctgctgcagcccaccagcagcgccctggtgaacgccaccgagtggccccccttcgtggtgaccctggacgaggtggagctgatccacttcgagagagtgcagttccacctgaagaacttcgacatggtgatcgtgtacaaggactacagcaagaaggtgaccatgatcaacgccatccccgtggccagcctggaccccatcaaggagtggctgaacagctgcgacctgaagtacaccgagggcgtgcagagcctgaactggaccaagatcatgaagaccatcgtggacgaccccgagggcttcttcgagcagggcggctggagcttcctggagcccgagggcgagggcagcgacgccgaggagggcgacagcgagagcgagatcgaggacgagaccttcaaccccagcgaggacgactacgaggaggaggaggaggacagcgacgaggactacagcagcgaggccgaggagagcgactacagcaaggagagcctgggcagcgaggaggagagcggcaaggactgggacgagctggaggaggaggccagaaaggccgacagagagagcagatacgaggaggaggaggagcagagcagaagcatgagcagaaagagaaaggccagcgtgcacagcagcggcagaggcagcaacagaggcagcagacacagcagcgccccccccaagaagaagagaaagtag

SEQ ID NO: 81786 - DNA, 675 bp, synthetic construct; identical to SEQ ID NO: 75728
  misc_feature 1..675: note = Description of Artificial Sequence: Synthetic coding sequence
  source 1..675: mol_type = other DNA

SEQ ID NO: 81787 - DNA, 1374 bp, synthetic construct
  misc_feature 1..1374: note = Description of Artificial Sequence: Synthetic coding sequence
  source 1..1374: mol_type = other DNA
atgaccaccgacgagggcgccaagaacaacgaggagagccccaccgccaccgtggccgagcagggcgaggacatcaccagcaagaaggacagaggcgtgctgaagatcgtgaagagagtgggcaacggcgaggagacccccatgatcggcgacaaggtgtacgtgcactacaagggcaagctgagcaacggcaagaagttcgacagcagccacgacagaaacgagcccttcgtgttcagcctgggcaagggccaggtgatcaaggcctgggacatcggcgtggccaccatgaagaagggcgagatctgccacctgctgtgcaagcccgagtacgcctacggcagcgccggcagcctgcccaagatccccagcaacgccaccctgttcttcgagatcgagctgctggacttcaagggcgaggacctgttcgaggacggcggcatcatcagaagaaccaagagaaagggcgagggctacagcaaccccaacgagggcgccaccgtggagatccacctggagggcagatgcggcggcagaatgttcgactgcagagacgtggccttcaccgtgggcgagggcgaggaccacgacatccccatcggcatcgacaaggccctggagaagatgcagagagaggagcagtgcatcctgtacctgggccccagatacggcttcggcgaggccggcaagcccaagttcggcatcgagcccaacgccgagctgatctacgaggtgaccctgaagagcttcgagaaggccaaggagagctgggagatggacaccaaggagaagctggagcaggccgccatcgtgaaggagaagggcaccgtgtacttcaagggcggcaagtacatgcaggccgtgatccagtacggcaagatcgtgagctggctggagatggagtacggcctgagcgagaaggagagcaaggccagcgagagcttcctgctggccgccttcctgaacctggccatgtgctacctgaagctgagagagtacaccaaggccgtggagtgctgcgacaaggccctgggcctggacagcgccaacgagaagggcctgtacagaagaggcgaggcccagctgctgatgaacgagttcgagagcgccaagggcgacttcgagaaggtgctggaggtgaacccccagaacaaggccgccagactgcagatcagcatgtgccagaagaaggccaaggagcacaacgagagagacagaagaatctacgccaacatgttcaagaagttcgccgagcaggacgccaaggaggaggccaacaaggccatgggcaagaagaccagcgagggcgtgaccaacgagaagggcaccgacagccaggccatggaggaggagaagcccgagggccacgtgtag

SEQ ID NO: 81788 - DNA, 1374 bp, synthetic construct; identical to SEQ ID NO: 81787
  misc_feature 1..1374: note = Description of Artificial Sequence: Synthetic coding sequence
  source 1..1374: mol_type = other DNA

SEQ ID NO: 81789 - DNA, 801 bp, synthetic construct
  misc_feature 1..801: note = Description of Artificial Sequence: Synthetic coding sequence
  source 1..801: mol_type = other DNA
ctgctgatgaaggtgcccagaaccatgaagaaggccccccagcccctgctgctgagcagagagagaatcctgccccccaaggacagaggcgtgctgaagatcgtgaagagagtgggcaacggcgaggagacccccatgatcggcgacaaggtgtacgtgcactacaagggcaagctgagcaacggcaagaagttcgacagcagccacgacagaaacgagcccttcgtgttcagcctgggcaagggccaggtgatcaaggcctgggacatcggcgtggccaccatgaagaagggcgagatctgccacctgctgtgcaagcccgagtacgcctacggcagcgccggcagcctgcccaagatccccagcaacgccaccctgttcttcgagatcgagctgctggacttcaagggcgaggacctgttcgaggacggcggcatcatcagaagaaccaagagaaagggcgagggctacagcaaccccaacgagggcgccaccgtggagatccacctggagggcagatgcggcggcagaatgttcgactgcagagacgtggccttcaccgtgggcgagggcgaggaccacgacatccccatcggcatcgacaaggccctggagaagatgcagagagaggagcagtgcatcctgtacctgggccccagacccaagaaccccggcagatggatccccaagaagaactggagcagactgcccctgagcaagagaagagagccctacaccagcagatgcgtgagcccctacgccatcctgagcatcagcaagaacctgttcaagtgctggtag

SEQ ID NO: 81790 - DNA, 1374 bp, synthetic construct; identical to SEQ ID NO: 81787
  misc_feature 1..1374: note = Description of Artificial Sequence: Synthetic coding sequence
  source 1..1374: mol_type = other DNA

SEQ ID NO: 81791 - DNA, 1374 bp, synthetic construct; identical to SEQ ID NO: 81787
  misc_feature 1..1374: note = Description of Artificial Sequence: Synthetic coding sequence
  source 1..1374: mol_type = other DNA

SEQ ID NO: 81792 - DNA, 837 bp, synthetic construct
  misc_feature 1..837: note = Description of Artificial Sequence: Synthetic coding sequence
  source 1..837: mol_type = other DNA
atgttcgactgcagagacgtggccttcaccgtgggcgagggcgaggaccacgacatccccatcggcatcgacaaggccctggagaagatgcagagagaggagcagtgcatcctgtacctgggccccagatacggcttcggcgaggccggcaagcccaagttcggcatcgagcccaacgccgagctgatctacgaggtgaccctgaagagcttcgagaaggccaaggagagctgggagatggacaccaaggagaagctggagcaggccgccatcgtgaaggagaagggcaccgtgtacttcaagggcggcaagtacatgcaggccgtgatccagtacggcaagatcgtgagctggctggagatggagtacggcctgagcgagaaggagagcaaggccagcgagagcttcctgctggccgccttcctgaacctggccatgtgctacctgaagctgagagagtacaccaaggccgtggagtgctgcgacaaggccctgggcctggacagcgccaacgagaagggcctgtacagaagaggcgaggcccagctgctgatgaacgagttcgagagcgccaagggcgacttcgagaaggtgctggaggtgaacccccagaacaaggccgccagactgcagatcagcatgtgccagaagaaggccaaggagcacaacgagagagacagaagaatctacgccaacatgttcaagaagttcgccgagcaggacgccaaggaggaggccaacaaggccatgggcaagaagaccagcgagggcgtgaccaacgagaagggcaccgacagccaggccatggaggaggagaagcccgagggccacgtgtag

SEQ ID NO: 81793 - DNA, 807 bp, synthetic construct
  misc_feature 1..807: note = Description of Artificial Sequence: Synthetic coding sequence
  source 1..807: mol_type = other DNA
atgaccaccgacgagggcgccaagaacaacgaggagagccccaccgccaccgtggccgagcagggcgaggacatcaccagcaagaaggacagaggcgtgctgaagatcgtgaagagagtgggcaacggcgaggagacccccatgatcggcgacaaggtgtacgtgcactacaagggcaagctgagcaacggcaagaagttcgacagcagccacgacagaaacgagcccttcgtgttcagcctgggcaagggccaggtgatcaaggcctgggacatcggcgtggccaccatgaagaagggcgagatctgccacctgctgtgcaagcccgagtacgcctacggcagcgccggcagcctgcccaagatccccagcaacgccaccctgttcttcgagatcgagctgctggacttcaagggcgaggacctgttcgaggacggcggcatcatcagaagaaccaagagaaagggcgagggctacagcaaccccaacgagggcgccaccgtggagatccacctggagggcagatgcggcggcagaatgttcgactgcagagacgtggccttcaccgtgggcgagggcgaggaccacgacatccccatcggcatcgacaaggccctggagaagatgcagagagaggagcagtgcatcctgtacctgggccccagacccaagaaccccggcagatggatccccaagaagaactggagcagactgcccctgagcaagagaagagagccctacaccagcagatgcgtgagcccctacgccatcctgagcatcagcaagaacctgttcaagtgctggtag

SEQ ID NO: 81794 - DNA, 1263 bp, synthetic construct
  misc_feature 1..1263: note = Description of Artificial Sequence: Synthetic coding sequence
  source 1..1263: mol_type = other DNA
atgaccaccgagcagggcgaggagacccccatgatcggcgacaaggtgtacgtgcactacaagggcaagctgagcaacggcaagaagttcgacagcagccacgacagaaacgagcccttcgtgttcagcctgggcaagggccaggtgatcaaggcctgggacatcggcgtggccaccatgaagaagggcgagatctgccacctgctgtgcaagcccgagtacgcctacggcagcgccggcagcctgcccaagatccccagcaacgccaccctgttcttcgagatcgagctgctggacttcaagggcgaggacctgttcgaggacggcggcatcatcagaagaaccaagagaaagggcgagggctacagcaaccccaacgagggcgccaccgtggagatccacctggagggcagatgcggcggcagaatgttcgactgcagagacgtggccttcaccgtgggcgagggcgaggaccacgacatccccatcggcatcgacaaggccctggagaagatgcagagagaggagcagtgcatcctgtacctgggccccagatacggcttcggcgaggccggcaagcccaagttcggcatcgagcccaacgccgagctgatctacgaggtgaccctgaagagcttcgagaaggccaaggagagctgggagatggacaccaaggagaagctggagcaggccgccatcgtgaaggagaagggcaccgtgtacttcaagggcggcaagtacatgcaggccgtgatccagtacggcaagatcgtgagctggctggagatggagtacggcctgagcgagaaggagagcaaggccagcgagagcttcctgctggccgccttcctgaacctggccatgtgctacctgaagctgagagagtacaccaaggccgtggagtgctgcgacaaggccctgggcctggacagcgccaacgagaagggcctgtacagaagaggcgaggcccagctgctgatgaacgagttcgagagcgccaagggcgacttcgagaaggtgctggaggtgaacccccagaacaaggccgccagactgcagatcagcatgtgccagaagaaggccaaggagcacaacgagagagacagaagaatctacgccaacatgttcaagaagttcgccgagcaggacgccaaggaggaggccaacaaggccatgggcaagaagaccagcgagggcgtgaccaacgagaagggcaccgacagccaggccatggaggaggagaagcccgagggccacgtgtag

SEQ ID NO: 81795 - DNA, 984 bp, synthetic construct
  misc_feature 1..984: note = Description of Artificial Sequence: Synthetic coding sequence
  source 1..984: mol_type = other DNA
atgggcggcagcgccctgaaccagggcgtgctggagggcgacgacgcccccggccagagcctgtacgagagactgagccagagaatgctggacatcagcggcgacagaggcgtgctgaaggacgtgatcagagagggcgccggcgacctggtggcccccgacgccagcgtgctggtgaagtacagcggctacctggagcacatggacagacccttcgacagcaactacttcagaaagacccccagactgatgaagctgggcgaggacatcaccctgtggggcatggagctgggcctgctgagcatgagaagaggcgagctggccagattcctgttcaagcccaactacgcctacggcaccctgggctgcccccccctgatcccccccaacaccaccgtgctgttcgagatcgagctgctggacttcctggactgcgccgagagcgacaagttctgcgccctgagcgccgagcagcaggaccagttccccctgcagaaggtgctgaaggtggccgccaccgagagagagttcggcaactacctgttcagacagaacagattctacgacgccaaggtgagatacaagagagccctgctgctgctgagaagaagaagcgccccccccgaggagcagcacctggtggaggccgccaagctgcccgtgctgctgaacctgagcttcacctacctgaagctggacagacccaccatcgccctgtgctacggcgagcaggccctgatcatcgaccagaagaacgccaaggccctgttcagatgcggccaggcctgcctgctgctgaccgagtaccagaaggccagagacttcctggtgagagcccagaaggagcagcccttcaaccacgacatcaacaacgagctgaagaagctggccagctgctacagagactacgtggacaaggagaaggagatgtggcacagaatgttcgccccctgcggcgacggcagcaccgccggcgagagctag

SEQ ID NO: 81796 - DNA, 969 bp, synthetic construct
  misc_feature 1..969: note = Description of Artificial Sequence: Synthetic coding sequence
  source 1..969: mol_type = other DNA
atgagcgccagcagctggccccagaacggcatgccccccagcagcctgtacgagagactgagccagagaatgctggacatcagcggcgacagaggcgtgctgaaggacgtgatcagagagggcgccggcgacctggtggcccccgacgccagcgtgctggtgaagtacagcggctacctggagcacatggacagacccttcgacagcaactacttcagaaagacccccagactgatgaagctgggcgaggacatcaccctgtggggcatggagctgggcctgctgagcatgagaagaggcgagctggccagattcctgttcaagcccaactacgcctacggcaccctgggctgcccccccctgatcccccccaacaccaccgtgctgttcgagatcgagctgctggacttcctggactgcgccgagagcgacaagttctgcgccctgagcgccgagcagcaggaccagttccccctgcagaaggtgctgaaggtggccgccaccgagagagagttcggcaactacctgttcagacagaacagattctacgacgccaaggtgagatacaagagagccctgctgctgctgagaagaagaagcgccccccccgaggagcagcacctggtggaggccgccaagctgcccgtgctgctgaacctgagcttcacctacctgaagctggacagacccaccatcgccctgtgctacggcgagcaggccctgatcatcgaccagaagaacgccaaggccctgttcagatgcggccaggcctgcctgctgctgaccgagtaccagaaggccagagacttcctggtgagagcccagaaggagcagcccttcaaccacgacatcaacaacgagctgaagaagctggccagctgctacagagactacgtggacaaggagaaggagatgtggcacagaatgttcgccccctgcggcgacggcagcaccgccggcgagagctag

SEQ ID NO: 81797 - DNA, 531 bp, synthetic construct
  misc_feature 1..531: note = Description of Artificial Sequence: Synthetic coding sequence
  source 1..531: mol_type = other DNA
atggacctgcccgacagcgccagcagagtgttctgcggcagaatcctgagcatggtgaacaccgacgacgtgaacgccatcatcctggcccagaagaacatgctggacagattcgagaagaccaacgagatgctgctgaacttcaacaacctgagcagcgccagactgcagcagatgagcgagagattcctgcaccacaccagaaccctggtggagatgaagagagacctggacagcatcttcagaagaatcagaaccctgaagggcaagctggccagacagcaccccgaggccttcagccacatccccgaggccagcttcctggaggaggaggacgaggaccccatcccccccagcaccaccaccaccatcgccaccagcgagcagagcaccggcagctgcgacaccagccccgacaccgtgagccccagcctgagccccggcttcgaggacctgagccacgtgcagcccggcagccccgccatcaacggcagaagccagaccgacgacgaggagatgaccggcgagtag

SEQ ID NO: 81798 - DNA, 1326 bp, synthetic construct
  misc_feature 1..1326: note = Description of Artificial Sequence: Synthetic coding sequence
  source 1..1326: mol_type = other DNA
atgggcgtgggcgccggcagagtgagccagagcggcgcccccagccccggcggcgccggcagagccaacagctgcccccccagcagcatggccagctgcgccgagcccagcgagcccagcgcccccctgcccgccggcgtgccccccctggaggacttcgaggtgctggacggcgtggaggacgccgagggcgaggaggaggaggaggaggaggaggaggaggaggacgacctgagcgagctgccccccctggaggacatgggccagccccccgccgaggaggccgagcagcccggcgccctggccagagagttcctggccgccatggagcccgagcccgcccccgcccccgcccccgaggagtggctggacatcctgggcaacggcctgctgagaaagaagaccctggtgcccggcccccccggcagcagcagacccgtgaagggccaggtggtgaccgtgcacctgcagaccagcctggagaacggcaccagagtgcaggaggagcccgagctggtgttcaccctgggcgactgcgacgtgatccaggccctggacctgagcgtgcccctgatggacgtgggcgagaccgccatggtgaccgccgacagcaagtactgctacggcccccagggcagaagcccctacatccccccccacgccgccctgtgcctggaggtgaccctgaagaccgccgtggacggccccgacctggagatgctgaccggccaggagagagtggccctggccaacagaaagagagagtgcggcaacgcccactaccagagagccgacttcgtgctggccgccaacagctacgacctggccatcaaggccatcaccagcagcgccaaggtggacatgaccttcgaggaggaggcccagctgctgcagctgaaggtgaagtgcctgaacaacctggccgccagccagctgaagctggaccactacagagccgccctgagaagctgcagcctggtgctggagcaccagcccgacaacatcaaggccctgttcagaaagggcaaggtgctggcccagcagggcgagtacagcgaggccatccccatcctgagagccgccctgaagctggagcccagcaacaagaccatccacgccgagctgagcaagctggtgaagaagcacgccgcccagagaagcaccgagaccgccctgtacagaaagatgctgggcaaccccagcagactgcccgccaagtgccccggcaagggcgcctggagcatcccctggaagtggctgttcggcgccaccgccgtggccctgggcggcgtggccctgagcgtggtgatcgccgccagaaactag

SEQ ID NO: 81799 - DNA, 762 bp, synthetic construct
  misc_feature 1..762: note = Description of Artificial Sequence: Synthetic coding sequence
  source 1..762: mol_type = other DNA
atggccagctgcgccgagcccagcgagcccagcgcccccctgcccgccggcgtgccccccctggaggacttcgaggtgctggacggcgtggaggacgccgagggcgaggaggaggaggaggaggaggaggaggaggaggacgacctgagcgagctgccccccctggaggacatgggccagccccccgccgaggaggccgagcagcccggcgccctggccagagagttcctggccgccatggagcccgagcccgcccccgcccccgcccccgaggagtggctggacatcctggtggacatgaccttcgaggaggaggcccagctgctgcagctgaaggtgaagtgcctgaacaacctggccgccagccagctgaagctggaccactacagagccgccctgagaagctgcagcctggtgctggagcaccagcccgacaacatcaaggccctgttcagaaagggcaaggtgctggcccagcagggcgagtacagcgaggccatccccatcctgagagccgccctgaagctggagcccagcaacaagaccatccacgccgagctgagcaagctggtgaagaagcacgccgcccagagaagcaccgagaccgccctgtacagaaagatgctgggcaaccccagcagactgcccgccaagtgccccggcaagggcgcctggagcatcccctggaagtggctgttcggcgccaccgccgtggccctgggcggcgtggccctgagcgtggtgatcgccgccagaaactag

SEQ ID NO: 81800 - DNA, 1599 bp, synthetic construct
  misc_feature 1..1599: note = Description of Artificial Sequence: Synthetic coding sequence
  source 1..1599: mol_type = other DNA
atggccaagagagtggccatcgtgggcgccggcgtgagcggcctggccagcatcaagtgctgcctggaggagggcctggagcccacctgcttcgagagaagcgacgacctgggcggcctgtggagattcaccgagcacgtggaggagggcagagccagcctgtacaagagcgtggtgagcaacagctgcaaggagatgagctgctacagcgacttccccttccccgaggactaccccaactacgtgcccaacagccagttcctggagtacctgaagatgtacgccaaccacttcgacctgctgaagcacatccagttcaagaccaaggtgtgcagcgtgaccaagtgcagcgacagcgccgtgagcggccagtgggaggtggtgaccatgcacgaggagaagcaggagagcgccatcttcgacgccgtgatggtgtgcaccggcttcctgaccaacccctacctgcccctggacagcttccccggcatcaacgccttcaagggccagtacttccacagcagacagtacaagcaccccgacatcttcaaggacaagagagtgctggtgatcggcatgggcaacagcggcaccgacatcgccgtggaggccagccacctggccgagaaggtgttcctgagcaccaccggcggcggctgggtgatcagcagaatcttcgacagcggctacccctgggacatggtgttcatgaccagattccagaacatgctgagaaacagcctgcccacccccatcgtgacctggctgatggagagaaagatcaacaactggctgaaccacgccaactacggcctgatccccgaggacagaacccagctgaaggagttcgtgctgaacgacgagctgcccggcagaatcatcaccggcaaggtgttcatcagacccagcatcaaggaggtgaaggagaacagcgtgatcttcaacaacaccagcaaggaggagcccatcgacatcatcgtgttcgccaccggctacaccttcgccttccccttcctggacgagagcgtggtgaaggtggaggacggccaggccagcctgtacaagtacatcttccccgcccacctgcagaagcccaccctggccatcatcggcctgatcaagcccctgggcagcatgatccccaccggcgagacccaggccagatgggccgtgagagtgctgaagggcgtgaacaagctgcccccccccagcgtgatgatcgaggagatcaacgccagaaaggagaacaagcccagctggttcggcctgtgctactgcaaggccctgcagagcgactacatcacctacatcgacgagctgctgacctacatcaacgccaagcccaacctgttcagcatgctgctgaccgacccccacctggccctgaccgtgttcttcggcccctgcagcccctaccagttcagactgaccggccccggcaagtgggagggcgccagaaacgccatcatgacccagtgggacagaaccttcaaggtgatcaaggccagagtggtgcaggagagccccagccccttcgagagcttcctgaaggtgttcagcttcctggccctgctggtggccatcttcctgatcttcctgtag

SEQ ID NO: 81801 - DNA, 1599 bp, synthetic construct; identical to SEQ ID NO: 81800
  misc_feature 1..1599: note = Description of Artificial Sequence: Synthetic coding sequence
  source 1..1599: mol_type = other DNA

SEQ ID NO: 81802 - DNA, 1410 bp, synthetic construct
  misc_feature 1..1410: note = Description of Artificial Sequence: Synthetic coding sequence
  source 1..1410: mol_type = other DNA
atggccaagagagtggccatcgtgggcgccggcgtgagcggcctggccagcatcaagtgctgcctggaggagggcctggagcccacctgcttcgagagaagcgacgacctgggcggcctgtggagattcaccaccaaggtgtgcagcgtgaccaagtgcagcgacagcgccgtgagcggccagtgggaggtggtgaccatgcacgaggagaagcaggagagcgccatcttcgacgccgtgatggtgtgcaccggcttcctgaccaacccctacctgcccctggacagcttccccggcatcaacgccttcaagggccagtacttccacagcagacagtacaagcaccccgacatcttcaaggacaagagagtgctggtgatcggcatgggcaacagcggcaccgacatcgccgtggaggccagccacctggccgagaaggtgttcctgagcaccaccggcggcggctgggtgatcagcagaatcttcgacagcggctacccctgggacatggtgttcatgaccagattccagaacatgctgagaaacagcctgcccacccccatcgtgacctggctgatggagagaaagatcaacaactggctgaaccacgccaactacggcctgatccccgaggacagaacccagctgaaggagttcgtgctgaacgacgagctgcccggcagaatcatcaccggcaaggtgttcatcagacccagcatcaaggaggtgaaggagaacagcgtgatcttcaacaacaccagcaaggaggagcccatcgacatcatcgtgttcgccaccggctacaccttcgccttccccttcctggacgagagcgtggtgaaggtggaggacggccaggccagcctgtacaagtacatcttccccgcccacctgcagaagcccaccctggccatcatcggcctgatcaagcccctgggcagcatgatccccaccggcgagacccaggccagatgggccgtgagagtgctgaagggcgtgaacaagctgcccccccccagcgtgatgatcgaggagatcaacgccagaaaggagaacaagcccagctggttcggcctgtgctactgcaaggccctgcagagcgactacatcacctacatcgacgagctgctgacctacatcaacgccaagcccaacctgttcagcatgctgctgaccgacccccacctggccctgaccgtgttcttcggcccctgcagcccctaccagttcagactgaccggccccggcaagtgggagggcgccagaaacgccatcatgacccagtgggacagaaccttcaaggtgatcaaggccagagtggtgcaggagagccccagccccttcgagagcttcctgaaggtgttcagcttcctggccctgctggtggccatcttcctgatcttcctgtag

SEQ ID NO: 81803 - DNA, 627 bp, synthetic construct
  misc_feature 1..627: note = Description of Artificial Sequence: Synthetic coding sequence
  source 1..627: mol_type = other DNA
atggccaagagagtggccatcgtgggcgccggcgtgagcggcctggccagcatcaagtgctgcctggaggagggcctggagcccacctgcttcgagagaagcgacgacctgggcggcctgtggagattcaccgagcacgtggaggagggcagagccagcctgtacaagagcgtggtgagcaacagctgcaaggagatgagctgctacagcgacttccccttccccgaggactaccccaactacgtgcccaacagccagttcctggagtacctgaagatgtacgccaaccacttcgacctgctgaagcacatccagttcaagaccaaggtgtgcagcgtgaccaagtgcagcgacagcgccgtgagcggccagtgggaggtggtgaccatgcacgaggagaagcaggagagcgccatcttcgacgccgtgatggtgtgcaccggcttcctgaccaacccctacctgcccctggacagcttccccggcatcaacgccttcaagggccagtacttccacagcagacagtacaagcaccccgacatcttcaaggacaagagagtgctggtgatcggcatgggcaacagcggcaccgacatcgccgtggaggccagccacctggccgagtag

SEQ ID NO: 81804 - DNA, 1830 bp, synthetic construct
  misc_feature 1..1830: note = Description of Artificial Sequence: Synthetic coding sequence
  source 1..1830: mol_type = other DNA
atggagggcaagcccatgagaagatgcaccaacatcagacccggcgagaccggcatggacgtgaccagcagatgcaccctgggcgaccccaacaagctgcccgagggcgtgccccagcccgccagaatgccctacatcagcgacaagcaccccagacagaccctggaggtgatcaacctgctgagaaagcacagagagctgtgcgacgtggtgctggtggtgggcgccaagaagatctacgcccacagagtgatcctgagcgcctgcagcccctacttcagagccatgttcaccggcgagctggccgagagcagacagaccgaggtggtgatcagagacatcgacgagagagccatggagctgctgatcgacttcgcctacaccagccagatcaccgtggaggagggcaacgtgcagaccctgctgcccgccgcctgcctgctgcagctggccgagatccaggaggcctgctgcgagttcctgaagagacagctggaccccagcaactgcctgggcatcagagccttcgccgacacccacagctgcagagagctgctgagaatcgccgacaagttcacccagcacaacttccaggaggtgatggagagcgaggagttcatgctgctgcccgccaaccagctgatcgacatcatcagcagcgacgagctgaacgtgagaagcgaggagcaggtgttcaacgccgtgatggcctgggtgaagtacagcatccaggagagaagaccccagctgccccaggtgctgcagcacgtgagactgcccctgctgagccccaagttcctggtgggcaccgtgggcagcgaccccctgatcaagagcgacgaggagtgcagagacctggtggacgaggccaagaactacctgctgctgccccaggagagacccctgatgcagggccccagaaccagacccagaaagcccatcagatgcggcgaggtgctgttcgccgtgggcggctggtgcagcggcgacgccatcagcagcgtggagagatacgacccccagaccaacgagtggagaatggtggccagcatgagcaagagaagatgcggcgtgggcgtgagcgtgctggacgacctgctgtacgccgtgggcggccacgacggcagcagctacctgaacagcgtggagagatacgaccccaagaccaaccagtggagcagcgacgtggcccccaccagcacctgcagaaccagcgtgggcgtggccgtgctgggcggcttcctgtacgccgtgggcggccaggacggcgtgagctgcctgaacatcgtggagagatacgaccccaaggagaacaagtggaccagagtggccagcatgagcaccagaagactgggcgtggccgtggccgtgctgggcggcttcctgtacgccgtgggcggcagcgacggcaccagccccctgaacaccgtggagagatacaacccccaggagaacagatggcacaccatcgcccccatgggcaccagaagaaagcacctgggctgcgccgtgtaccaggacatgatctacgccgtgggcggcagagacgacaccaccgagctgagcagcgccgagagatacaaccccagaaccaaccagtggagccccgtggtggccatgaccagcagaagaagcggcgtgggcctggccgtggtgaacggccagctgatggccgtgggcggcttcgacggcaccacctacctgaagaccatcgaggtgttcgaccccgacgccaacacctggagactgtacggcggcatgaactacagaagactgggcggcggcgtgggcgtgatcaagatgacccactgcgagagccacatctggtag

SEQ ID NO: 81805 - DNA, 1416 bp, synthetic construct; identical to SEQ ID NO: 79002
  misc_feature 1..1416: note = Description of Artificial Sequence: Synthetic coding sequence
  source 1..1416: mol_type = other DNA

SEQ ID NO: 81806 - DNA, 1599 bp, synthetic construct
  misc_feature 1..1599: note = Description of Artificial Sequence: Synthetic coding sequence
  source 1..1599: mol_type = other DNA
atgggcaagaaggtggccatcatcggcgccggcgtgagcggcctggccagcatcagaagctgcctggaggagggcctggagcccacctgcttcgagaagagcaacgacatcggcggcctgtggaagttcagcgaccacgccgaggagggcagagccagcatctacaagagcgtgttcagcaacagcagcaaggagatgatgtgcttccccgacttccccttccccgacgacttccccaacttcatgcacaacagcaagatccaggagtacatcatcgccttcgccaaggagaagaacctgctgaagtacatccagttcaagaccttcgtgagcagcgtgaacaagcaccccgacttcgccaccaccggccagtgggacgtgaccaccgagagagacggcaagaaggagagcgccgtgttcgacgccgtgatggtgtgcagcggccaccacgtgtaccccaacctgcccaaggagagcttccccggcctgaaccacttcaagggcaagtgcttccacagcagagactacaaggagcccggcgtgttcaacggcaagagagtgctggtggtgggcctgggcaacagcggctgcgacatcgccaccgagctgagcagaaccgccgagcaggtgatgatcagcagcagaagcggcagctgggtgatgagcagagtgtgggacaacggctacccctgggacatgctgctggtgaccagattcggcaccttcctgaagaacaacctgcccaccgccatcagcgactggctgtacgtgaagcagatgaacgccagattcaagcacgagaactacggcctgatgcccctgaacggcgtgctgagaaaggagcccgtgttcaacgacgagctgcccgccagcatcctgtgcggcatcgtgagcgtgaagcccaacgtgaaggagttcaccgagaccagcgccatcttcgaggacggcaccatcttcgagggcatcgactgcgtgatcttcgccaccggctacagcttcgcctaccccttcctggacgagagcatcatcaagagcagaaacaacgagatcatcctgttcaagggcgtgttcccccccctgctggagaagagcaccatcgccgtgatcggcttcgtgcagagcctgggcgccgccatccccaccgtggacctgcagagcagatgggccgcccaggtgatcaagggcacctgcaccctgcccagcatggaggacatgatgaacgacatcaacgagaagatggagaagaagagaaagtggttcggcaagagcgagaccatccagaccgactacatcgtgtacatggacgagctgagcagcttcatcggcgccaagcccaacatcccctggctgttcctgaccgaccccaagctggccatggaggtgtacttcggcccctgcagcccctaccagttcagactggtgggccccggccagtggcccggcgccagaaacgccatcctgacccagtgggacagaagcctgaagcccatgcagaccagagtggtgggcagactgcagaagccctgcttcttcttccactggctgaagctgttcgccatccccatcctgctgatcgccgtgttcctggtgctgacctag

SEQ ID NO: 81807 - DNA, 1599 bp, synthetic construct; identical to SEQ ID NO: 81806
  misc_feature 1..1599: note = Description of Artificial Sequence: Synthetic coding sequence
  source 1..1599: mol_type = other DNA

SEQ ID NO: 81808 - DNA, 1410 bp, synthetic construct
  misc_feature 1..1410: note = Description of Artificial Sequence: Synthetic coding sequence
  source 1..1410: mol_type = other DNA
atgggcaagaaggtggccatcatcggcgccggcgtgagcggcctggccagcatcagaagctgcctggaggagggcctggagcccacctgcttcgagaagagcaacgacatcggcggcctgtggaagttcagcaccttcgtgagcagcgtgaacaagcaccccgacttcgccaccaccggccagtgggacgtgaccaccgagagagacggcaagaaggagagcgccgtgttcgacgccgtgatggtgtgcagcggccaccacgtgtaccccaacctgcccaaggagagcttccccggcctgaaccacttcaagggcaagtgcttccacagcagagactacaaggagcccggcgtgttcaacggcaagagagtgctggtggtgggcctgggcaacagcggctgcgacatcgccaccgagctgagcagaaccgccgagcaggtgatgatcagcagcagaagcggcagctgggtgatgagcagagtgtgggacaacggctacccctgggacatgctgctggtgaccagattcggcaccttcctgaagaacaacctgcccaccgccatcagcgactggctgtacgtgaagcagatgaacgccagattcaagcacgagaactacggcctgatgcccctgaacggcgtgctgagaaaggagcccgtgttcaacgacgagctgcccgccagcatcctgtgcggcatcgtgagcgtgaagcccaacgtgaaggagttcaccgagaccagcgccatcttcgaggacggcaccatcttcgagggcatcgactgcgtgatcttcgccaccggctacagcttcgcctaccccttcctggacgagagcatcatcaagagcagaaacaacgagatcatcctgttcaagggcgtgttcccccccctgctggagaagagcaccatcgccgtgatcggcttcgtgcagagcctgggcgccgccatccccaccgtggacctgcagagcagatgggccgcccaggtgatcaagggcacctgcaccctgcccagcatggaggacatgatgaacgacatcaacgagaagatggagaagaagagaaagtggttcggcaagagcgagaccatccagaccgactacatcgtgtacatggacgagctgagcagcttcatcggcgccaagcccaacatcccctggctgttcctgaccgaccccaagctggccatggaggtgtacttcggcccctgcagcccctaccagttcagactggtgggccccggccagtggcccggcgccagaaacgccatcctgacccagtgggacagaagcctgaagcccatgcagaccagagtggtgggcagactgcagaagccctgcttcttcttccactggctgaagctgttcgccatccccatcctgctgatcgccgtgttcctggtgctgacctag

SEQ ID NO: 81809 - DNA, 1539 bp, synthetic construct
  misc_feature 1..1539: note = Description of Artificial Sequence: Synthetic coding sequence
  source 1..1539: mol_type = other DNA
atgcccgccagcaccagaagccagaagagacagggcatggacagcctgctggagcccctgaagatgaacatggaccacgccgaggagggcagagccagcatctacaagagcgtgttcagcaacagcagcaaggagatgatgtgcttccccgacttccccttccccgacgacttccccaacttcatgcacaacagcaagatccaggagtacatcatcgccttcgccaaggagaagaacctgctgaagtacatccagttcaagaccttcgtgagcagcgtgaacaagcaccccgacttcgccaccaccggccagtgggacgtgaccaccgagagagacggcaagaaggagagcgccgtgttcgacgccgtgatggtgtgcagcggccaccacgtgtaccccaacctgcccaaggagagcttccccggcctgaaccacttcaagggcaagtgcttccacagcagagactacaaggagcccggcgtgttcaacggcaagagagtgctggtggtgggcctgggcaacagcggctgcgacatcgccaccgagctgagcagaaccgccgagcaggtgatgatcagcagcagaagcggcagctgggtgatgagcagagtgtgggacaacggctacccctgggacatgctgctggtgaccagattcggcaccttcctgaagaacaacctgcccaccgccatcagcgactggctgtacgtgaagcagatgaacgccagattcaagcacgagaactacggcctgatgcccctgaacggcgtgctgagaaaggagcccgtgttcaacgacgagctgcccgccagcatcctgtgcggcatcgtgagcgtgaagcccaacgtgaaggagttcaccgagaccagcgccatcttcgaggacggcaccatcttcgagggcatcgactgcgtgatcttcgccaccggctacagcttcgcctaccccttcctggacgagagcatcatcaagagcagaaacaacgagatcatcctgttcaagggcgtgttcccccccctgctggagaagagcaccatcgccgtgatcggcttcgtgcagagcctgggcgccgccatccccaccgtggacctgcagagcagatgggccgcccaggtgatcaagggcacctgcaccctgcccagcatggaggacatgatgaacgacatcaacgagaagatggagaagaagagaaagtggttcggcaagagcgagaccatccagaccgactacatcgtgtacatggacgagctgagcagcttcatcggcgccaagcccaacatcccctggctgttcctgaccgaccccaagctggccatggaggtgtacttcggcccctgcagcccctaccagttcagactggtgggccccggccagtggcccggcgccagaaacgccatcctgacccagtgggacagaagcctgaagcccatgcagaccagagtggtgggcagactgcagaagccctgcttcttcttccactggctgaagctgttcgccatccccatcctgctgatcgccgtgttcctggtgctgacctag

SEQ ID NO: 81810 - DNA, 1677 bp, synthetic construct
  misc_feature 1..1677: note = Description of Artificial Sequence: Synthetic coding sequence
  source 1..1677: mol_type = other DNA
atggccaagaaggtggccgtgatcggcgccggcgtgagcggcctgagcagcatcaagtgctgcgtggacgaggacctggagcccacctgcttcgagagaagcgacgacatcggcggcctgtggaagttcaccgagagcagcaaggacggcatgaccagagtgtacaagagcctggtgaccaacgtgtgcaaggagatgagctgctacagcgacttccccttccacgaggactaccccaacttcatgaaccacgagaagttctgggactacctgcaggagttcgccgagcacttcgacctgctgaagtacatccagttcaagaccaccgtgtgcagcatcaccaagagacccgacttcagcgagaccggccagtgggacgtggtgaccgagaccgagggcaagcagaacagagccgtgttcgacgccgtgatggtgtgcaccggccacttcctgaacccccacctgcccctggaggccttccccggcatccacaagttcaagggccagatcctgcacagccaggagtacaagatccccgagggcttccagggcaagagagtgctggtgatcggcctgggcaacaccggcggcgacatcgccgtggagctgagcagaaccgccgcccaggtgctgctgagcaccagaaccggcacctgggtgctgggcagaagcagcgactggggctacccctacaacatgatggtgaccagaagatgctgcagcttcatcgcccaggtgctgcccagcagattcctgaactggatccaggagagaaagctgaacaagagattcaaccacgaggactacggcctgagcatcaccaagggcaagaaggccaagttcatcgtgaacgacgagctgcccaactgcatcctgtgcggcgccatcaccatgaagaccagcgtgatcgagttcaccgagaccagcgccgtgttcgaggacggcaccgtggaggagaacatcgacgtggtgatcttcaccaccggctacaccttcagcttccccttcttcgaggagcccctgaagagcctgtgcaccaagaagatcttcctgtacaagcaggtgttccccctgaacctggagagagccaccctggccatcatcggcctgatcggcctgaagggcagcatcctgagcggcaccgagctgcaggccagatgggtgaccagagtgttcaagggcctgtgcaagatcccccccagccagaagctgatgatggaggccaccgagaaggagcagctgatcaagagaggcgtgttcaaggacaccagcaaggacaagttcgactacatcgcctacatggacgacatcgccgcctgcatcggcaccaagcccagcatccccctgctgttcctgaaggaccccagactggcctgggaggtgttcttcggcccctgcaccccctaccagtacagactgatgggccccggcaagtgggacggcgccagaaacgccatcctgacccagtgggacagaaccctgaagcccctgaagaccagaatcgtgcccgacagcagcaagcccgccagcatgagccactacctgaaggcctggggcgcccccgtgctgctggccagcctgctgctgatctgcaagagcagcctgttcctgaagctggtgagagacaagctgcaggacagaatgagcccctacctggtgagcctgtggagaggctag

SEQ ID NO: 81811 - DNA, 1602 bp, synthetic construct
  misc_feature 1..1602: note = Description of Artificial Sequence: Synthetic coding sequence
  source 1..1602: mol_type = other DNA
atgaccaagaagagaatcgccgtgatcggcggcggcgtgagcggcctgagcagcatcaagtgctgcgtggaggagggcctggagcccgtgtgcttcgagagaaccgacgacatcggcggcctgtggagattccaggagaaccccgaggagggcagagccagcatctacaagagcgtgatcatcaacaccagcaaggagatgatgtgcttcagcgactaccccatccccgaccactaccccaacttcatgcacaacgcccaggtgctggagtacttcagaatgtacgccaaggagttcgacctgctgaagtacatcagattcaagaccaccgtgtgcagcgtgaagaagcagcccgacttcgccaccagcggccagtgggaggtggtgaccgagagcgagggcaagaaggagatgaacgtgttcgacggcgtgatggtgtgcaccggccaccacaccaacgcccacctgcccctggagagcttccccggcatcgagaagttcaagggccagtacttccacagcagagactacaagaaccccgagggcttcaccggcaagagagtgatcatcatcggcatcggcaacagcggcggcgacctggccgtggagatcagccagaccgccaagcaggtgttcctgagcaccagaagaggcgcctggatcctgaacagagtgggcgactacggctaccccgccgacgtgctgttcagcagcagactgacccacttcatctggaagatctgcggccagagcctggccaacaagtacctggagaagaagatcaaccagagattcgaccacgagatgttcggcctgaagcccaagcacagagccctgagccagcaccccaccctgaacgacgacctgcccaacagaatcatcagcggcctggtgaaggtgaagggcaacgtgaaggagttcaccgagaccgccgccatcttcgaggacggcagcagagaggacgacatcgacgccgtgatcttcgccaccggctacagcttcgacttccccttcctggaggacagcgtgaaggtggtgaagaacaagatcagcctgtacaagaaggtgttcccccccaacctggagagacccaccctggccatcatcggcctgatccagcccctgggcgccatcatgcccatcagcgagctgcagggcagatgggccacccaggtgttcaagggcctgaagaccctgcccagccagagcgagatgatggccgagatcagcaaggcccaggaggagatcgacaagagatacgtggagagccagagacacaccatccagggcgactacatcgacaccatggaggagctggccgacctggtgggcgtgagacccaacctgctgagcctggccttcaccgaccccaagctggccctgcacctgctgctgggcccctgcacccccatccactacagagtgcagggccccggcaagtgggacggcgccagaaaggccatcctgaccaccgacgacagaatcagaaagcccctgatgaccagagtggtggagagaagcagcagcatgaccagcaccatgaccatcggcaagttcatgctggccctggccttcttcgccatcatcatcgcctacttctag

SEQ ID NO: 81812 - DNA, 858 bp, synthetic construct
  misc_feature 1..858: note = Description of Artificial Sequence: Synthetic coding sequence
  source 1..858: mol_type = other DNA
atgaccaagaagagaatcgccgtgatcggcggcggcgtgagcggcctgagcagcatcaagtgctgcgtggaggagggcctggagcccgtgtgcttcgagagaaccgacgacatcggcggcctgtggagattccaggagaaccccgaggagggcagagccagcatctacaagagcgtgatcatcaacaccagcaaggagatgatgtgcttcagcgactaccccatccccgaccactaccccaacttcatgcacaacgcccaggtgctggagtacttcagaatgtacgccaaggagttcgacctgctgaagtacatcagattcaagaccaccgtgtgcagcgtgaagaagcagcccgacttcgccaccagcggccagtgggaggtggtgaccgagagcgagggcaagaaggagatgaacgtgttcgacggcgtgatggtgtgcaccggccaccacaccaacgcccacctgcccctggagagcttccccggcatcgagaagttcaagggccagtacttccacagcagagactacaagaaccccgagggcttcaccggcaagagagtgatcatcatcggcatcggcaacagcggcggcgacctggccgtggagatcagccagaccgccaagcaggtgttcctgagcaccagaagaggcgcctggatcctgaacagagtgggcgactacggctaccccgccgacgtgctgttcagcagcagactgacccacttcatctggaagatctgcggccagagcctggccaacaagtacctggagaagaagatcaaccagagattcgaccacgagatgttcggcctgaagcccaagcacagaagcaaggacatcgccctgaccgagtag

SEQ ID NO: 81813 - DNA, 1395 bp, synthetic construct
  misc_feature 1..1395: note = Description of Artificial Sequence: Synthetic coding sequence
  source 1..1395: mol_type = other DNA
atgaccaagaagagaatcgccgtgatcggcggcggcgtgagcggcctgagcagcatcaagtgctgcgtggaggagggcctggagcccgtgtgcttcgagagaaccgacgacatcggcggcctgtggagattccaggagaaccccgaggagggcagagccagcatctacaagagcgtgatcatcaacaccagcaaggagatgatgtgcttcagcgactaccccatccccgaccactaccccaacttcatgcacaacgcccaggtgctggagtacttcagaatgtacgccaaggagttcgacctgctgaagtacatcagattcaagaccaccgtgtgcagcgtgaagaagcagcccgacttcgccaccagcggccagtgggaggtggtgaccgagagcgagggcaagaaggagatgaacgtgttcgacggcgtgatggtgtgcaccggccaccacaccaacgcccacctgcccctggagagcttccccggcatcgagaagttcaagggccagtacttccacagcagagactacaagaaccccgagggcttcaccggcaagagagtgatcatcatcggcatcggcaacagcggcggcgacctggccgtggagatcagccagaccgccaagcaggtgttcctgagcaccagaagaggcgcctggatcctgaacagagtgggcgactacggctaccccgccgacgtgctgttcagcagcagactgacccacttcatctggaagatctgcggccagagcctggccaacaagtacctggagaagaagatcaaccagagattcgaccacgagatgttcggcctgaagcccaagcacagagccctgagccagcaccccaccctgaacgacgacctgcccaacagaatcatcagcggcctggtgaaggtgaagggcaacgtgaaggagttcaccgagaccgccgccatcttcgaggacggcagcagagaggacgacatcgacgccgtgatcttcgccaccggctacagcttcgacttccccttcctggaggacagcgtgaaggtggtgaagaacaagatcagcctgtacaagaaggtgttcccccccaacctggagagacccaccctggccatcatcggcctgatccagcccctgggcgccatcatgcccatcagcgagctgcagggcagatgggccacccaggtgttcaagggcctgaagaccctgcccagccagagcgagatgatggccgagatcagcaaggcccaggaggagatcgacaagagcctgaccatgagaaagaccagcgacaagcccaagctgaagaacatcctgcagatccccgactacctgaagaccgtgaagatcatcaacaaggagagcctgagaaactgccccggcatcaagggccccaaggagacctag

SEQ ID NO: 81814 - DNA, 579 bp, synthetic construct
  misc_feature 1..579: note = Description of Artificial Sequence: Synthetic coding sequence
  source 1..579: mol_type = other DNA
atgaccaagaagagaatcgccgtgatcggcggcggcgtgagcggcctgagcagcatcaagtgctgcgtggaggagggcctggagcccgtgtgcttcgagagaaccgacgacatcggcggcctgtggagattccaggagaaccccgaggagggcagagccagcatctacaagagcgtgatcatcaacaccagcaaggagatgatgtgcttcagcgactaccccatccccgaccactaccccaacttcatgcacaacgcccaggtgctggagtacttcagaatgtacgccaaggagttcgacctgctgaagtacatcagattcaagaccaccgtgtgcagcgtgaagaagcagcccgacttcgccaccagcggccagtgggaggtggtgaccgagagcgagggcaagaaggagatgaacgtgttcgacggcgtgatggtgtgcaccggccaccacaccaacgcccacctgcccctggagagcttccccggcatcgagaagttcaagggccagtacttccacagcagagactacaagaaccccgagggcttcaccggcaagagagtgatcatcatcggctag

SEQ ID NO: 81815 - DNA, 438 bp, synthetic construct
  misc_feature 1..438: note = Description of Artificial Sequence: Synthetic coding sequence
  source 1..438: mol_type = other DNA
atgaccaagaagagaatcgccgtgatcggcggcggcgtgagcggcctgagcagcatcaagtgctgcgtggaggagggcctggagcccgtgtgcttcgagagaaccgacgacatcggcggcctgtggagattccaggagaaccccgaggagggcagagccagcatctacaagagcgtgatcatcaacaccagcaaggagatgatgtgcttcagcgactaccccatccccgaccactaccccaacttcatgcacaacgcccaggtgctggagtacttcagaatgtacgccaaggagttcgacctgctgaagtacatcagattcaagaccaccgtgtgcagcgtgaagaagcagcccgacttcgccaccagcggccagtgggaggtggtgaccgagagcgagggcaagaaggagatgaacgtgttcgacggcgtgatgtag

SEQ ID NO: 81816 - DNA, 3810 bp, synthetic construct
  misc_feature 1..3810: note = Description of Artificial Sequence: Synthetic coding sequence
  source 1..3810: mol_type = other DNA
atggaggccaccggcgtgctgcccttcgtgagaggcgtggacctgagcggcaacgacttcaagggcggctacttccccgagaacgtgaaggccatgaccagcctgagatggctgaagctgaacagaaccggcctgtgctacctgcccgaggagctggccgccctgcagaagctggagcacctgagcgtgagccacaacaacctgaccaccctgcacggcgagctgagcagcctgcccagcctgagagccatcgtggccagagccaacagcctgaagaacagcggcgtgcccgacgacatcttcaagctggacgacctgagcgtgctggacctgagccacaaccagctgaccgagtgccccagagagctggagaacgccaagaacatgctggtgctgaacctgagccacaacagcatcgacaccatccccaaccagctgttcatcaacctgaccgacctgctgtacctggacctgagcgagaacagactggagagcctgcccccccagatgagaagactggtgcacctgcagaccctggtgctgaacggcaaccccctgctgcacgcccagctgagacagctgcccgccatgaccgccctgcagaccctgcacctgagaagcacccagagaacccagagcaacctgcccaccagcctggagggcctgagcaacctggccgacgtggacctgagctgcaacgacctgaccagagtgcccgagtgcctgtacaccctgcccagcctgagaagactgaacctgagcagcaaccagatcaccgagctgagcctgtgcatcgaccagtgggtgcacgtggagaccctgaacctgagcagaaaccagctgaccagcctgcccagcgccatctgcaagctgagcaagctgaagaagctgtacctgaacagcaacaagctggacttcgacggcctgcccagcggcatcggcaagctgaccaacctggaggagttcatggccgccaacaacaacctggagctggtgcccgagagcctgtgcagatgccccaagctgagaaagctggtgctgaacaagaaccacctggtgaccctgcccgaggccatccacttcctgaccgagatcgaggtgctggacgtgagagagaaccccaacctggtgatgccccccaagcccgccgacagagccgccgagtggtacaacatcgacttcagcctgcagaaccagctgagactggccggcgccagccccgccaccgtggccgccgccgccgccgccggcagcggccccaaggaccccatggccagaaagatgagactgagaagaagaaaggacagcgcccaggacgaccaggccaagcaggtgctgaagggcatgagcgacgtggcccaggagaagaacaagaagcaggaggagagcgccgacgccagagcccccagcggcaaggtgagaagatgggaccagggcctggagaagcccagactggactacagcgagttcttcaccgaggacgtgggccagctgcccggcctgaccatctggcagatcgagaacttcgtgcccgtgctggtggaggaggccttccacggcaagttctacgaggccgactgctacatcgtgctgaagaccttcctggacgacagcggcagcctgaactgggagatctactactggatcggcggcgaggccaccctggacaagaaggcctgcagcgccatccacgccgtgaacctgagaaactacctgggcgccgagtgcagaaccgtgagagaggagatgggcgacgagagcgaggagttcctgcaggtgttcgacaacgacatcagctacatcgagggcggcaccgccagcggcttctacaccgtggaggacacccactacgtgaccagaatgtacagagtgtacggcaagaagaacatcaagctggagcccgtgcccctgaagggcaccagcctggaccccagattcgtgttcctgctggacagaggcctggacatctacgtgtggagaggcgcccaggccaccctgagcagcaccaccaaggccagactgttcgccgagaagatcaacaagaacgagagaaagggcaaggccgagatcaccctgctggtgcagggccaggagctgcccgagttctgggaggccctgggcggcgagcccagcgagatcaagaagcacgtgcccgaggacttctggcccccccagcccaagctgtacaaggtgggcctgggcctgggctacctggagctgccccagatcaactacaagctgagcgtggagcacaagcagagacccaaggtggagctgatgcccagaatgagactgctgcagagcctgctggacaccagatgcgtgtacatcctggactgctggagcgacgtgttcatctggctgggcagaaagagccccagactggtgagagccgccgccctgaagctgggccaggagctgtgcggcatgctgcacagacccagacacgccaccgtgagcagaagcctggagggcaccgaggcccaggtgttcaaggccaagttcaagaactgggacgacgtgctgaccgtggactacaccagaaacgccgaggccgtgctgcagagccccggcctgagcggcaaggtgaagagagacgccgagaagaaggaccagatgaaggccgacctgaccgccctgttcctgcccagacagccccccatgagcctggccgaggccgagcagctgatggaggagtggaacgaggacctggacggcatggagggcttcgtgctggagggcaagaagttcgccagactgcccgaggaggagttcggccacttctacacccaggactgctacgtgttcctgtgcagatactgggtgcccgtggagtacgaggaggaggagaagaaggaggacaaggaggagaaggccgagggcaaggagggcgaggaggccaccgccgaggccgaggagaagcagcccgaggaggacttccagtgcatcgtgtacttctggcagggcagagaggccagcaacatgggctggctgaccttcaccttcagcctgcagaagaagttcgagagcctgttccccggcaagctggaggtggtgagaatgacccagcagcaggagaaccccaagttcctgagccacttcaagagaaagttcatcatccacagaggcaagagaaaggccgtgcagggcgcccagcagcccagcctgtaccagatcagaaccaacggcagcgccctgtgcaccagatgcatccagatcaacaccgacagcagcctgctgaacagcgagttctgcttcatcctgaaggtgcccttcgagagcgaggacaaccagggcatcgtgtacgcctgggtgggcagagccagcgaccccgacgaggccaagctggccgaggacatcctgaacaccatgttcgacaccagctacagcaagcaggtgatcaacgagggcgaggagcccgagaacttcttctgggtgggcatcggcgcccagaagccctacgacgacgacgccgagtacatgaagcacaccagactgttcagatgcagcaacgagaagggctacttcgccgtgaccgagaagtgcagcgacttctgccaggacgacctggccgacgacgacatcatgctgctggacaacggccaggaggtgtacatgtgggtgggcacccagaccagccaggtggagatcaagctgagcctgaaggcctgccaggtgtacatccagcacatgagaagcaaggagcacgagagacccagaagactgagactggtgagaaagggcaacgagcagcacgccttcaccagatgcttccacgcctggagcgccttctgcaaggccctggcctag

SEQ ID NO: 81817 - DNA, 3552 bp, synthetic construct
  misc_feature 1..3552: note = Description of Artificial Sequence: Synthetic coding sequence
  source 1..3552: mol_type = other DNA
atgaccagcctgagatggctgaagctgaacagaaccggcctgtgctacctgcccgaggagctggccgccctgcagaagctggagcacctgagcgtgagccacaacaacctgaccaccctgcacggcgagctgagcagcctgcccagcctgagagccatcgtggccagagccaacagcctgaagaacagcggcgtgcccgacgacatcttcaagctggacgacctgagcgtgctggacctgagccacaaccagctgaccgagtgccccagagagctggagaacgccaagaacatgctggtgctgaacctgagccacaacagacagctgcccgccatgaccgccctgcagaccctgcacctgagaagcacccagagaacccagagcaacctgcccaccagcctggagggcctgagcaacctggccgacgtggacctgagctgcaacgacctgaccagagtgcccgagtgcctgtacaccctgcccagcctgagaagactgaacctgagcagcaaccagatcaccgagctgagcctgtgcatcgaccagtgggtgcacgtggagaccctgaacctgagcagaaaccagctgaccagcctgcccagcgccatctgcaagctgagcaagctgaagaagctgtacctgaacagcaacaagctggacttcgacggcctgcccagcggcatcggcaagctgaccaacctggaggagttcatggccgccaacaacaacctggagctggtgcccgagagcctgtgcagatgccccaagctgagaaagctggtgctgaacaagaaccacctggtgaccctgcccgaggccatccacttcctgaccgagatcgaggtgctggacgtgagagagaaccccaacctggtgatgccccccaagcccgccgacagagccgccgagtggtacaacatcgacttcagcctgcagaaccagctgagactggccggcgccagccccgccaccgtggccgccgccgccgccggcagcggccccaaggaccccatggccagaaagatgagactgagaagaagaaaggacagcgcccaggacgaccaggccaagcaggtgctgaagggcatgagcgacgtggcccaggagaagaacaagaagcaggaggagagcgccgacgccagagcccccagcggcaaggtgagaagatgggaccagggcctggagaagcccagactggactacagcgagttcttcaccgaggacgtgggccagctgcccggcctgaccatctggcagatcgagaacttcgtgcccgtgctggtggaggaggccttccacggcaagttctacgaggccgactgctacatcgtgctgaagaccttcctggacgacagcggcagcctgaactgggagatctactactggatcggcggcgaggccaccctggacaagaaggcctgcagcgccatccacgccgtgaacctgagaaactacctgggcgccgagtgcagaaccgtgagagaggagatgggcgacgagagcgaggagttcctgcaggtgttcgacaacgacatcagctacatcgagggcggcaccgccagcggcttctacaccgtggaggacacccactacgtgaccagaatgtacagagtgtacggcaagaagaacatcaagctggagcccgtgcccctgaagggcaccagcctggaccccagattcgtgttcctgctggacagaggcctggacatctacgtgtggagaggcgcccaggccaccctgagcagcaccaccaaggccagactgttcgccgagaagatcaacaagaacgagagaaagggcaaggccgagatcaccctgctggtgcagggccaggagctgcccgagttctgggaggccctgggcggcgagcccagcgagatcaagaagcacgtgcccgaggacttctggcccccccagcccaagctgtacaaggtgggcctgggcctgggctacctggagctgccccagatcaactacaagctgagcgtggagcacaagcagagacccaaggtggagctgatgcccagaatgagactgctgcagagcctgctggacaccagatgcgtgtacatcctggactgctggagcgacgtgttcatctggctgggcagaaagagccccagactggtgagagccgccgccctgaagctgggccaggagctgtgcggcatgctgcacagacccagacacgccaccgtgagcagaagcctggagggcaccgaggcccaggtgttcaaggccaagttcaagaactgggacgacgtgctgaccgtggactacaccagaaacgccgaggccgtgctgcagagccccggcctgagcggcaaggtgaagagagacgccgagaagaaggaccagatgaaggccgacctgaccgccctgttcctgcccagacagccccccatgagcctggccgaggccgagcagctgatggaggagtggaacgaggacctggacggcatggagggcttcgtgctggagggcaagaagttcgccagactgcccgaggaggagttcggccacttctacacccaggactgctacgtgttcctgtgcagatactgggtgcccgtggagtacgaggaggaggagaagaaggaggacaaggaggagaaggccgagggcaaggagggcgaggaggccaccgccgaggccgaggagaagcagcccgaggaggacttccagtgcatcgtgtacttctggcagggcagagaggccagcaacatgggctggctgaccttcaccttcagcctgcagaagaagttcgagagcctgttccccggcaagctggaggtggtgagaatgacccagcagcaggagaaccccaagttcctgagccacttcaagagaaagttcatcatccacagaggcaagagaaaggccgtgcagggcgcccagcagcccagcctgtaccagatcagaaccaacggcagcgccctgtgcaccagatgcatccagatcaacaccgacagcagcctgctgaacagcgagttctgcttcatcctgaaggtgcccttcgagagcgaggacaaccagggcatcgtgtacgcctgggtgggcagagccagcgaccccgacgaggccaagctggccgaggacatcctgaacaccatgttcgacaccagctacagcaagcaggtgatcaacgagggcgaggagcccgagaacttcttctgggtgggcatcggcgcccagaagccctacgacgacgacgccgagtacatgaagcacaccagactgttcagatgcagcaacgagaagggctacttcgccgtgaccgagaagtgcagcgacttctgccaggacgacctggccgacgacgacatcatgctgctggacaacggccaggaggtgtacatgtgggtgggcacccagaccagccaggtggagatcaagctgagcctgaaggcctgccaggtgtacatccagcacatgagaagcaaggagcacgagagacccagaagactgagactggtgagaaagggcaacgagcagcacgccttcaccagatgcttccacgcctggagcgccttctgcaaggccctggcctag

SEQ ID NO: 81818 - DNA, 3447 bp, synthetic construct
  misc_feature 1..3447: note = Description of Artificial Sequence: Synthetic coding sequence
  source 1..3447: mol_type = other DNA
atggaggccaccggcgtgctgcccttcgtgagaggcgtggacctgagcggcaacgacttcaagggcggctacttccccgagaacgtgaaggccatgaccagcctgagatggctgaagctgaacagaaccggcctgtgctacctgcccgaggagctggccgccctgcagaagctggagcacctgagcgtgagccacaacaacctgaccaccctgcacggcgagctgagcagcctgcccagcctgagagccatcgtggccagagccaacagcctgaagaacagcggcgtgcccgacgacatcttcaagctggacgacctgagcgtgctggacctgagccacaaccagctgaccgagtgccccagagagctggagaacgccaagaacatgctggtgctgaacctgagccacaacagcatcgacaccatccccaaccagctgttcatcaacctgaccgacctgctgtacctggacctgagcgagaacagactggagagcctgcccccccagatgagaagactggtgcacctgcagaccctggtgctgaacggcaaccccctgctgcacgcccagctgagacagctgcccgccatgaccgccctgcagaccctgcacctgagaagcacccagagaacccagagcaacctgcccaccagcctggagggcctgagcaacctggccgacgtggacctgagctgcaacgacctgaccagagtgcccgagtgcctgtacaccctgcccagcctgagaagactgaacctgagcagcaaccagatcaccgagctgagcctgtgcatcgaccagtgggtgcacgtggagaccctgaacctgagcagaaaccagctgaccagcctgcccagcgccatctgcaagctgagcaagctgaagaagctgtacctgaacagcaacaagctggacttcgacggcctgcccagcggcatcggcaagctgaccaacctggaggagttcatggccgccaacaacaacctggagctggtgcccgagagcctgtgcagatgccccaagctgagaaagctggtgctgaacaagaaccacctggtgaccctgcccgaggccatccacttcctgaccgagatcgaggtgctggacgtgagagagaaccccaacctggtgatgccccccaagcccgccgacagagccgccgagtggtacaacatcgacttcagcctgcagaaccagctgagactggccggcgccagccccgccaccgtggccgccgccgccgccgccggcagcggccccaaggaccccatggccagaaagatgagactgagaagaagaaaggacagcgcccaggacgaccaggccaagcaggtgctgaagggcatgagcgacgtggcccaggagaagaacaagaagcaggaggagagcgccgacgccagagcccccagcggcaaggtgagaagatgggaccagggcctggagaagcccagactggactacagcgagttcttcaccgaggacgtgggccagctgcccggcctgaccatctggcagatcgagaacttcgtgcccgtgctggtggaggaggccttccacggcaagttctacgaggccgactgctacatcgtgctgaagaccttcctggacgacagcggcagcctgaactgggagatctactactggatcggcggcgaggccaccctggacaagaaggcctgcagcgccatccacgccgtgaacctgagaaactacctgggcgccgagtgcagaaccgtgagagaggagatgggcgacgagagcgaggagttcctgcaggtgttcgacaacgacatcagctacatcgagggcggcaccgccagcggcttctacaccgtggaggacacccactacgtgaccagaatgtacagagtgtacggcaagaagaacatcaagctggagcccgtgcccctgaagggcaccagcctggaccccagattcgtgttcctgctggacagaggcctggacatctacgtgtggagaggcgcccaggccaccctgagcagcaccaccaaggccagactgttcgccgagaagatcaacaagaacgagagaaagggcaaggccgagatcaccctgctggtgcagggccaggagctgcccgagttctgggaggccctgggcggcgagcccagcgagatcaagaagaactgggacgacgtgctgaccgtggactacaccagaaacgccgaggccgtgctgcagagccccggcctgagcggcaaggtgaagagagacgccgagaagaaggaccagatgaaggccgacctgaccgccctgttcctgcccagacagccccccatgagcctggccgaggccgagcagctgatggaggagtggaacgaggacctggacggcatggagggcttcgtgctggagggcaagaagttcgccagactgcccgaggaggagttcggccacttctacacccaggactgctacgtgttcctgtgcagatactgggtgcccgtggagtacgaggaggaggagaagaaggaggacaaggaggagaaggccgagggcaaggagggcgaggaggccaccgccgaggccgaggagaagcagcccgaggaggacttccagtgcatcgtgtacttctggcagggcagagaggccagcaacatgggctggctgaccttcaccttcagcctgcagaagaagttcgagagcctgttccccggcaagctggaggtggtgagaatgacccagcagcaggagaaccccaagttcctgagccacttcaagagaaagttcatcatccacagaggcaagagaaaggccgtgcagggcgcccagcagcccagcctgtaccagatcagaaccaacggcagcgccctgtgcaccagatgcatccagatcaacaccgacagcagcctgctgaacagcgagttctgcttcatcctgaaggtgcccttcgagagcgaggacaaccagggcatcgtgtacgcctgggtgggcagagccagcgaccccgacgaggccaagctggccgaggacatcctgaacaccatgttcgacaccagctacagcaagcaggtgatcaacgagggcgaggagcccgagaacttcttctgggtgggcatcggcgcccagaagccctacgacgacgacgccgagtacatgaagcacaccagactgttcagatgcagcaacgagaagggctacttcgccgtgaccgagaagtgcagcgacttctgccaggacgacctggccgacgacgacatcatgctgctggacaacggccaggaggtgtacatgtgggtgggcacccagaccagccaggtggagatcaagctgagcctgaaggcctgccaggtgtacatccagcacatgagaagcaaggagcacgagagacccagaagactgagactggtgagaaagggcaacgagcagcacgccttcaccagatgcttccacgcctggagcgccttctgcaaggccctggcctag

SEQ ID NO: 81819 - DNA, 1284 bp, synthetic construct
  misc_feature 1..1284: note = Description of Artificial Sequence: Synthetic coding sequence
  source 1..1284: mol_type = other DNA
atgttcttcacctgcggccccaacgaggccatggtggtgagcggcttctgcagaagcccccccgtgatggtggccggcggcagagtgttcgtgctgccctgcatccagcagatccagagaatcagcctgaacaccctgaccctgaacgtgaagagcgagaaggtgtacaccagacacggcgtgcccatcagcgtgaccggcatcgcccaggtgaagatccagggccagaacaaggagatgctggccgccgcctgccagatgttcctgggcaagaccgaggccgagatcgcccacatcgccctggagaccctggagggccaccagagagccatcatggcccacatgaccgtggaggagatctacaaggacagacagaagttcagcgagcaggtgttcaaggtggccagcagcgacctggtgaacatgggcatcagcgtggtgagctacaccctgaaggacatccacgacgaccaggactacctgcacagcctgggcaaggccagaaccgcccaggtgcagaaggacgccagaatcggcgaggccgaggccaagagagacgccggcatcagagaggccaaggccaagcaggagaaggtgagcgcccagtacctgagcgagatcgagatggccaaggcccagagagactacgagctgaagaaggccgcctacgacatcgaggtgaacaccagaagagcccaggccgacctggcctaccagctgcaggtggccaagaccaagcagcagatcgaggagcagagagtgcaggtgcaggtggtggagagagcccagcaggtggccgtgcaggagcaggagatcgccagaagagagaaggagctggaggccagagtgagaaagcccgccgaggccgagagatacaagctggagagactggccgaggccgagaagagccagctgatcatgcaggccgaggccgaggccgccagcgtgagaatgagaggcgaggccgaggccttcgccatcggcgccagagccagagccgaggccgagcagatggccaagaaggccgaggccttccagctgtaccaggaggccgcccagctggacatgctgctggagaagctgccccaggtggccgaggagatcagcggccccctgaccagcgccaacaagatcaccctggtgagcagcggcagcggcaccatgggcgccgccaaggtgaccggcgaggtgctggacatcctgaccagactgcccgagagcgtggagagactgaccggcgtgagcatcagccaggtgaaccacaagcccctgagaaccgcctag

SEQ ID NO: 81820 - DNA, 1284 bp, synthetic construct; identical to SEQ ID NO: 81819
  misc_feature 1..1284: note = Description of Artificial Sequence: Synthetic coding sequence
  source 1..1284: mol_type = other DNA

SEQ ID NO: 81821 - DNA, 1284 bp, synthetic construct; identical to SEQ ID NO: 81819
  misc_feature 1..1284: note = Description of Artificial Sequence: Synthetic coding sequence
  source 1..1284: mol_type = other DNA

SEQ ID NO: 81822 - DNA, 438 bp, synthetic construct
  misc_feature 1..438: note = Description of Artificial Sequence: Synthetic coding sequence
  source 1..438: mol_type = other DNA
atgggcgtggagggcaccggcagaggcggctgcagactgggcggccccgacggcaagggcaagggctgggcccccgtggacgccaccgccagactgccccacccccagagactgagcctgcccctgctgcagctgcagcccgagccctgcttcagcctggtggcccagatgagaccctggtggagccccgactacctgcacagcctgggcaaggccagaaccgcccaggtgcagaaggacgccagaatcggcgaggccgaggccaagagagacgccggcatcagagaggccaaggccaagcaggagaaggtgagcgcccagtacctgagcgagatcgagatggccaaggcccagagagactacgagctgaagaaggccgcctacgacatcgaggtgaacaccagaagagcccaggccgacctggcctaccagctgtag

SEQ ID NO: 81823 - DNA, 579 bp, synthetic construct
  misc_feature 1..579: note = Description of Artificial Sequence: Synthetic coding sequence
  source 1..579: mol_type = other DNA
atgttcttcacctgcggccccaacgaggccatggtggtgagcggcttctgcagaagcccccccgtgatggtggccggcggcagagtgttcgtgctgccctgcatccagcagatccagagaatcagcctgaacaccctgaccctgaacgtgaagagcgagaaggtgaagatccagggccagaacaaggagatgctggccgccgcctgccagatgttcctgggcaagaccgaggccgagatcgcccacatcgccctggagaccctggagggccaccagagagccatcatggcccacatgaccgtggaggagatctacaaggacagacagaagttcagcgagcaggtgttcaaggtggccagcagcgacctggtgaacatgggcatcagcgtggtgagctacaccctgaaggacatccacgacgaccaggactacctgcacagcctgggcaaggccagaaccgcccaggtgcagaaggacgccagaatcggcgaggccgaggccaagagagacgccggcatcagagaggccaaggccaagcaggagaaggtgagcgcccagtacctgagcgagatcgagtag

SEQ ID NO: 81824 - DNA, 579 bp, synthetic construct; identical to SEQ ID NO: 81823
  misc_feature 1..579: note = Description of Artificial Sequence: Synthetic coding sequence
  source 1..579: mol_type = other DNA

SEQ ID NO: 81825 - DNA, 717 bp, synthetic construct
  misc_feature 1..717: note = Description of Artificial Sequence: Synthetic coding sequence
  source 1..717: mol_type = other DNA
atgagaccctggtggagccccgtgaagatccagggccagaacaaggagatgctggccgccgcctgccagatgttcctgggcaagaccgaggccgagatcgcccacatcgccctggagaccctggagggccaccagagagccatcatggcccacatgaccgtggaggagatctacaaggacagacagaagttcagcgagcaggtgttcaaggtggccagcagcgacctggtgaacatgggcatcagcgtggtgagctacaccctgaaggacatccacgacgaccaggactacctgcacagcctgggcaaggccagaaccgcccaggtgcagaaggacgccagaatcggcgaggccgaggccaagagagacgccggcatcagagaggccaaggccaagcaggagaaggtgagcgcccagtacctgagcgagatcgagatggccaaggcccagagagactacgagctgaagaaggccgcctacgacatcgaggtgaacaccagaagagcccaggccgacctggcctaccagctgcaggtggccaagaccaagcagcagatcgaggagcagagagtgcaggtgcaggtggtggagagagcccagcaggtggccgtgcaggagcaggagatcgccagaagagagaaggagctggaggccagagtgagaaagcccgccgaggccgagagatacaagctggagagactggccgaggccgagtag

SEQ ID NO: 81826 - DNA, 579 bp, synthetic construct; identical to SEQ ID NO: 81823
  misc_feature 1..579: note = Description of Artificial Sequence: Synthetic coding sequence
  source 1..579: mol_type = other DNA

SEQ ID NO: 81827 - DNA, 579 bp, synthetic construct; identical to SEQ ID NO: 81823
  misc_feature 1..579: note = Description of Artificial Sequence: Synthetic coding sequence
  source 1..579: mol_type = other DNA

SEQ ID NO: 81828 - DNA, 438 bp, synthetic construct; identical to SEQ ID NO: 81822
  misc_feature 1..438: note = Description of Artificial Sequence: Synthetic coding sequence
  source 1..438: mol_type = other DNA

SEQ ID NO: 81829 - DNA, 273 bp, synthetic construct
  misc_feature 1..273: note = Description of Artificial Sequence: Synthetic coding sequence
  source 1..273: mol_type = other DNA
tgagccaagaaggccgaggccttccagctgtaccaggaggccgcccagctggacatgctgctggagaagctgccccaggtggccgaggagatcagcggccccctgaccagcgccaacaagatcaccctggtgagcagcggcagcggcaccatgggcgccgccaaggtgaccggcgaggtgctggacatcctgaccagactgcccgagagcgtggagagactgaccggcgtgagcatcagccaggtgaaccacaagcccctgagaaccgcctag

SEQ ID NO: 81830 - DNA, 708 bp, synthetic construct
  misc_feature 1..708: note = Description of Artificial Sequence: Synthetic coding sequence
  source 1..708: mol_type = other DNA
atgttcttcacctgcggccccaacgaggccatggtggtgagcggcttctgcagaagcccccccgtgatggtggccggcggcagagtgttcgtgctgccctgcatccagcagatccagagaatcagcctgaacaccctgaccctgaacgtgaagagcgagaaggtgtacaccagacacggcgtgcccatcagcgtgaccggcatcgcccaggtgaagatccagggccagaacaaggagatgctggccgccgcctgccagatgttcctgggcaagaccgaggccgagatcgcccacatcgccctggagaccctggagggccaccagagagccatcatggcccacatgaccgtggaggagatctacaaggacagacagaagttcagcgagcaggtgttcaaggtggccagcagcgacctggtgaacatgggcatcagcgtggtgagctacaccctgaaggacatccacgacgaccaggactacctgcacagcctgggcaaggccagaaccgcccaggtgcagaaggacgccagaatcggcgaggccgaggccaagagagacgccggcatcagagaggccaaggccaagcaggagaaggtgagcgcccagtacctgagcgagatcgagatggccaaggcccagagagactacgagctgaagaaggccgcctacgacatcgaggtgaacaccagaagagcccaggccgactag

SEQ ID NO: 81831 - DNA, 717 bp, synthetic construct; identical to SEQ ID NO: 81825
  misc_feature 1..717: note = Description of Artificial Sequence: Synthetic coding sequence
  source 1..717: mol_type = other DNA

SEQ ID NO: 81832 - DNA, 417 bp, synthetic construct
  misc_feature 1..417: note = Description of Artificial Sequence: Synthetic coding sequence
  source 1..417: mol_type = other DNA
gtgaagatccagggccagaacaaggagatgctggccgccgcctgccagatgttcctgggcaagaccgaggccgagatcgcccacatcgccctggagaccctggagggccaccagagagccatcatggcccacatgaccgtggaggagatctacaaggacagacagaagttcagcgagcaggtgttcaaggtggccagcagcgacctggtgaacatgggcatcagcgtggtgagctacaccctgaaggacatccacgacgaccaggactacctgcacagcctgggcaaggccagaaccgcccaggtgcagaaggacgccagaatcggcgaggccgaggccaagagagacgccggcatcagagaggccaaggccaagcaggagaaggtgagcgcccagtacctgagcgagatcgagtag

SEQ ID NO: 81833 - DNA, 558 bp, synthetic construct
  misc_feature 1..558: note = Description of Artificial Sequence: Synthetic coding sequence
  source 1..558: mol_type = other DNA
atgttcttcacctgcggccccaacgaggccatggtggtgagcggcttctgcagaagcccccccgtgatggtggccggcggcagagtgttcgtgctgccctgcatccagcagatccagagaatcagcctgaacaccctgaccctgaacgtgaagagcgagaaggtgtacaccagacacggcgtgcccatcagcgtgaccggcatcgcccaggtgaagatccagggccagaacaaggagatgctggccgccgcctgccagatgttcctgggcaagaccgaggccgagatcgcccacatcgccctggagaccctggagggccaccagagagccatcatggcccacatgaccgtggaggagatctacaaggacagacagaagttcagcgagcaggtgttcaaggtggccagcagcgacctggtgaacatgggcatcagcgtggtgagctacaccctgaaggacatccacgacgaccaggactacctgcacagcctgggcaaggccagaaccgcccaggtgcagaaggacgccagaatcggcgaggccgaggccaagagatag

SEQ ID NO: 81834 - DNA, 348 bp, synthetic construct
  misc_feature 1..348: note = Description of Artificial Sequence: Synthetic coding sequence
  source 1..348: mol_type = other DNA
atgggcgtggagggcaccggcagaggcggctgcagactgggcggccccgacggcaagggcaagggctgggcccccgtggacgccaccgccagactgccccacccccagagactgagcctgcccctgctgcagctgcagcccgagccctgcttcagcctggtggcccagatgagaccctggtggagccccgactacctgcacagcctgggcaaggccagaaccgcccaggtgcagaaggacgccagaatcggcgaggccgaggccaagagagacgccggcatcagagaggccaaggccaagcaggagaaggtgagcgcccagtacctgagcgagatcgagatggcctag

SEQ ID NO: 81835 - DNA, 561 bp, synthetic construct
  misc_feature 1..561: note = Description of Artificial Sequence: Synthetic coding sequence
  source 1..561: mol_type = other DNA
gtggccaagaccaagcagcagatcgaggagcagagagtgcaggtgcaggtggtggagagagcccagcaggtggccgtgcaggagcaggagatcgccagaagagagaaggagctggaggccagagtgagaaagcccgccgaggccgagagatacaagctggagagactggccgaggccgagaagagccagctgatcatgcaggccgaggccgaggccgccagcgtgagaatgagaggcgaggccgaggccttcgccatcggcgccagagccagagccgaggccgagcagatggccaagaaggccgaggccttccagctgtaccaggaggccgcccagctggacatgctgctggagaagctgccccaggtggccgaggagatcagcggccccctgaccagcgccaacaagatcaccctggtgagcagcggcagcggcaccatgggcgccgccaaggtgaccggcgaggtgctggacatcctgaccagactgcccgagagcgtggagagactgaccggcgtgagcatcagccaggtgaaccacaagcccctgagaaccgcctag

SEQ ID NO: 81836 - DNA, 438 bp, synthetic construct; identical to SEQ ID NO: 81822
  misc_feature 1..438: note = Description of Artificial Sequence: Synthetic coding sequence
  source 1..438: mol_type = other DNA

SEQ ID NO: 81837 - DNA, 558 bp, synthetic construct; identical to SEQ ID NO: 81833
  misc_feature 1..558: note = Description of Artificial Sequence: Synthetic coding sequence
  source 1..558: mol_type = other DNA

SEQ ID NO: 81838 - DNA, 633 bp, synthetic construct
  misc_feature 1..633: note = Description of Artificial Sequence: Synthetic coding sequence
  source 1..633: mol_type = other DNA
atgttcttcacctgcggccccaacgaggccatggtggtgagcggcttctgcagaagcccccccgtgatggtggccggcggcagagtgttcgtgctgccctgcatccagcagatccagagaatcagcctgaacaccctgaccctgaacgtgaagagcgagaaggtgtacaccagacacggcgtgcccatcagcgtgaccggcatcgcccaggtgaagatccagggccagaacaaggagatgctggccgccgcctgccagatgttcctgggcaagaccgaggccgagatcgcccacatcgccctggagaccctggagggccaccagagagccatcatggcccacatgaccgtggaggagatctacaaggacagacagaagttcagcgagcaggtgttcaaggtggccagcagcgacctggtgaacatgggcatcagcgtggtgagctacaccctgaaggacatccacgacgaccaggactacctgcacagcctgggcaaggccagaaccgcccaggtgcagaaggacgccagaatcggcgaggccgaggccaagagagacgccggcatcagagaggccaaggccaagcaggagaaggtgagcgcccagtacctgagcgagatcgagatggcctag

SEQ ID NO: 81839 - DNA, 633 bp, synthetic construct; identical to SEQ ID NO: 81838
  misc_feature 1..633: note = Description of Artificial Sequence: Synthetic coding sequence
  source 1..633: mol_type = other DNA

SEQ ID NO: 81840 - DNA, 759 bp, synthetic construct
  misc_feature 1..759: note = Description of Artificial Sequence: Synthetic coding sequence
  source 1..759: mol_type = other DNA
atgttcttcacctgcggccccaacgaggccatggtggtgagcggcttctgcagaagcccccccgtgatggtggccggcggcagagtgttcgtgctgccctgcatccagcagatccagagaatcagcctgaacaccctgaccctgaacgtgaagagcgagaaggtgtacaccagacacggcgtgcccatcagcgtgaccggcatcgcccaggtgaagatccagggccagaacaaggagatgctggccgccgcctgccagatgttcctgggcaagaccgaggccgagatcgcccacatcgccctggagaccctggagggccaccagagagccatcatggcccacatgaccgtggaggagatctacaaggacagacagaagttcagcgagcaggtgttcaaggtggccagcagcgacctggtgaacatgggcatcagcgtggtgagctacaccctgaaggacatccacgacgaccaggactacctgcacagcctgggcaaggccagaaccgcccaggtgcagaaggacgccagaatcggcgaggccgaggccaagagagacgccggcatcagagaggccaaggccaagcaggagaaggtgagcgcccagtacctgagcgagatcgagatggccaaggcccagagagactacgagctgaagaaggccgcctacgacatcgaggtgaacaccagaagagcccaggccgacctggcctaccagctgcaggtggccaagaccaagcagcagatcgaggagcagtag

SEQ ID NO: 81841 - DNA, 444 bp, synthetic construct
  misc_feature 1..444: note = Description of Artificial Sequence: Synthetic coding sequence
  source 1..444: mol_type = other DNA
atgagaccctggtggagccccgtgaagatccagggccagaacaaggagatgctggccgccgcctgccagatgttcctgggcaagaccgaggccgagatcgcccacatcgccctggagaccctggagggccaccagagagccatcatggcccacatgaccgtggaggagatctacaaggacagacagaagttcagcgagcaggtgttcaaggtggccagcagcgacctggtgaacatgggcatcagcgtggtgagctacaccctgaaggacatccacgacgaccaggactacctgcacagcctgggcaaggccagaaccgcccaggtgcagaaggacgccagaatcggcgaggccgaggccaagagagacgccggcatcagagaggccaaggccaagcaggagaaggtgagcgcccagtacctgagcgagatcgagatggcctag

SEQ ID NO: 81842 - DNA, 549 bp, synthetic construct
  misc_feature 1..549: note = Description of Artificial Sequence: Synthetic coding sequence
  source 1..549: mol_type = other DNA
gtgaagatccagggccagaacaaggagatgctggccgccgcctgccagatgttcctgggcaagaccgaggccgagatcgcccacatcgccctggagaccctggagggccaccagagagccatcatggcccacatgaccgtggaggagatctacaaggacagacagaagttcagcgagcaggtgttcaaggtggccagcagcgacctggtgaacatgggcatcagcgtggtgagctacaccctgaaggacatccacgacgaccaggactacctgcacagcctgggcaaggccagaaccgcccaggtgcagaaggacgccagaatcggcgaggccgaggccaagagagacgccggcatcagagaggccaaggccaagcaggagaaggtgagcgcccagtacctgagcgagatcgagatggccaaggcccagagagactacgagctgaagaaggccgcctacgacatcgaggtgaacaccagaagagcccaggccgacctggcctaccagctgcaggtggccaagaccaagcagcagatcgaggagcagtag

SEQ ID NO: 81843 - DNA, 348 bp, synthetic construct
  misc_feature 1..348: note = Description of Artificial Sequence: Synthetic coding sequence
  source 1..348: mol_type = other DNA
gtgaagatccagggccagaacaaggagatgctggccgccgcctgccagatgttcctgggcaagaccgaggccgagatcgcccacatcgccctggagaccctggagggccaccagagagccatcatggcccacatgaccgtggaggagatctacaaggacagacagaagttcagcgagcaggtgttcaaggtggccagcagcgacctggtgaacatgggcatcagcgtggtgagctacaccctgaaggacatccacgacgaccaggactacctgcacagcctgggcaaggccagaaccgcccaggtgcagaaggacgccagaatcggcgaggccgaggccaagagatag

SEQ ID NO: 81844 - DNA, 708 bp, synthetic construct; identical to SEQ ID NO: 81830
  misc_feature 1..708: note = Description of Artificial Sequence: Synthetic coding sequence
  source 1..708: mol_type = other DNA

SEQ ID NO: 81845 - DNA, 1284 bp, synthetic construct; identical to SEQ ID NO: 81819
  misc_feature 1..1284: note = Description of Artificial Sequence: Synthetic coding sequence
  source 1..1284: mol_type = other DNA

SEQ ID NO: 81846 - DNA, 498 bp, synthetic construct
  misc_feature 1..498: note = Description of Artificial Sequence: Synthetic coding sequence
  source 1..498: mol_type = other DNA
gtgaagatccagggccagaacaaggagatgctggccgccgcctgccagatgttcctgggcaagaccgaggccgagatcgcccacatcgccctggagaccctggagggccaccagagagccatcatggcccacatgaccgtggaggagatctacaaggacagacagaagttcagcgagcaggtgttcaaggtggccagcagcgacctggtgaacatgggcatcagcgtggtgagctacaccctgaaggacatccacgacgaccaggactacctgcacagcctgggcaaggccagaaccgcccaggtgcagaaggacgccagaatcggcgaggccgaggccaagagagacgccggcatcagagaggccaaggccaagcaggagaaggtgagcgcccagtacctgagcgagatcgagatggccaaggcccagagagactacgagctgaagaaggccgcctacgacatcgaggtgaacaccagaagagcccaggccgactag

SEQ ID NO: 81847 - DNA, 438 bp, synthetic construct; identical to SEQ ID NO: 81822
  misc_feature 1..438: note = Description of Artificial Sequence: Synthetic coding sequence
  source 1..438: mol_type = other DNA

SEQ ID NO: 81848 - DNA, 759 bp, synthetic construct; identical to SEQ ID NO: 81840
  misc_feature 1..759: note = Description of Artificial Sequence: Synthetic coding sequence
  source 1..759: mol_type = other DNA

SEQ ID NO: 81849 - DNA, 759 bp, synthetic construct; identical to SEQ ID NO: 81840
  misc_feature 1..759: note = Description of Artificial Sequence: Synthetic coding sequence
  source 1..759: mol_type = other DNA

SEQ ID NO: 81850 - DNA, 249 bp, synthetic construct
  misc_feature 1..249: note = Description of Artificial Sequence: Synthetic coding sequence
  source 1..249: mol_type = other DNA
gactacctgcacagcctgggcaaggccagaaccgcccaggtgcagaaggacgccagaatcggcgaggccgaggccaagagagacgccggcatcagagaggccaaggccaagcaggagaaggtgagcgcccagtacctgagcgagatcgagatggccaaggcccagagagactacgagctgaagaaggccgcctacgacatcgaggtgaacaccagaagagcccaggccgacctggcctaccagctgtag

SEQ ID NO: 81851 - DNA, 558 bp, synthetic construct; identical to SEQ ID NO: 81833
  misc_feature 1..558: note = Description of Artificial Sequence: Synthetic coding sequence
  source 1..558: mol_type = other DNA

SEQ ID NO: 81852 - DNA, 759 bp, synthetic construct; identical to SEQ ID NO: 81840
  misc_feature 1..759: note = Description of Artificial Sequence: Synthetic coding sequence
  source 1..759: mol_type = other DNA

SEQ ID NO: 81853 - DNA, 558 bp, synthetic construct; identical to SEQ ID NO: 81833
  misc_feature 1..558: note = Description of Artificial Sequence: Synthetic coding sequence
  source 1..558: mol_type = other DNA

SEQ ID NO: 81854 - DNA, 717 bp, synthetic construct; identical to SEQ ID NO: 81825
  misc_feature 1..717: note = Description of Artificial Sequence: Synthetic coding sequence
  source 1..717: mol_type = other DNA

SEQ ID NO: 81855 - DNA, 1284 bp, synthetic construct; identical to SEQ ID NO: 81819
  misc_feature 1..1284: note = Description of Artificial Sequence: Synthetic coding sequence
  source 1..1284: mol_type = other DNA

SEQ ID NO: 81856 - DNA, 579 bp, synthetic construct; identical to SEQ ID NO: 81823
  misc_feature 1..579: note = Description of Artificial Sequence: Synthetic coding sequence
  source 1..579: mol_type = other DNA

SEQ ID NO: 81857 - DNA, 708 bp, synthetic construct; identical to SEQ ID NO: 81830
  misc_feature 1..708: note = Description of Artificial Sequence: Synthetic coding sequence
  source 1..708: mol_type = other DNA

SEQ ID NO: 81858 - DNA, 183 bp, synthetic construct
  misc_feature 1..183: note = Description of Artificial Sequence: Synthetic coding sequence
  source 1..183: mol_type = other DNA
gtggccaagaccaagcagcagatcgaggagcagagagtgcaggtgcaggtggtggagagagcccagcaggtggccgtgcaggagcaggagatcgccagaagagagaaggagctggaggccagagtgagaaagcccgccgaggccgagagatacaagctggagagactggccgaggccgagtag

SEQ ID NO: 81859 - DNA, 717 bp, synthetic construct; identical to SEQ ID NO: 81825
  misc_feature 1..717: note = Description of Artificial Sequence: Synthetic coding sequence
  source 1..717: mol_type = other DNA

SEQ ID NO: 81860 - DNA, 708 bp, synthetic construct; identical to SEQ ID NO: 81830
  misc_feature 1..708: note = Description of Artificial Sequence: Synthetic coding sequence
  source 1..708: mol_type = other DNA

SEQ ID NO: 81861 - DNA, 1074 bp, synthetic construct
  misc_feature 1..1074: note = Description of Artificial Sequence: Synthetic coding sequence
  source 1..1074: mol_type = other DNA
gtgaagatccagggccagaacaaggagatgctggccgccgcctgccagatgttcctgggcaagaccgaggccgagatcgcccacatcgccctggagaccctggagggccaccagagagccatcatggcccacatgaccgtggaggagatctacaaggacagacagaagttcagcgagcaggtgttcaaggtggccagcagcgacctggtgaacatgggcatcagcgtggtgagctacaccctgaaggacatccacgacgaccaggactacctgcacagcctgggcaaggccagaaccgcccaggtgcagaaggacgccagaatcggcgaggccgaggccaagagagacgccggcatcagagaggccaaggccaagcaggagaaggtgagcgcccagtacctgagcgagatcgagatggccaaggcccagagagactacgagctgaagaaggccgcctacgacatcgaggtgaacaccagaagagcccaggccgacctggcctaccagctgcaggtggccaagaccaagcagcagatcgaggagcagagagtgcaggtgcaggtggtggagagagcccagcaggtggccgtgcaggagcaggagatcgccagaagagagaaggagctggaggccagagtgagaaagcccgccgaggccgagagatacaagctggagagactggccgaggccgagaagagccagctgatcatgcaggccgaggccgaggccgccagcgtgagaatgagaggcgaggccgaggccttcgccatcggcgccagagccagagccgaggccgagcagatggccaagaaggccgaggccttccagctgtaccaggaggccgcccagctggacatgctgctggagaagctgccccaggtggccgaggagatcagcggccccctgaccagcgccaacaagatcaccctggtgagcagcggcagcggcaccatgggcgccgccaaggtgaccggcgaggtgctggacatcctgaccagactgcccgagagcgtggagagactgaccggcgtgagcatcagccaggtgaaccacaagcccctgagaaccgcctag

SEQ ID NO: 81862 - DNA, 36 bp, synthetic construct
  misc_feature 1..36: note = Description of Artificial Sequence: Synthetic coding sequence
  source 1..36: mol_type = other DNA
gtggccaagaccaagcagcagatcgaggagcagtag

SEQ ID NO: 81863 - DNA, 759 bp, synthetic construct; identical to SEQ ID NO: 81840
  misc_feature 1..759: note = Description of Artificial Sequence: Synthetic coding sequence
  source 1..759: mol_type = other DNA

SEQ ID NO: 81864 - DNA, 708 bp, synthetic construct; identical to SEQ ID NO: 81830
  misc_feature 1..708: note = Description of Artificial Sequence: Synthetic coding sequence
  source 1..708: mol_type = other DNA

SEQ ID NO: 81865 - DNA, 558 bp, synthetic construct; identical to SEQ ID NO: 81833
  misc_feature 1..558: note = Description of Artificial Sequence: Synthetic coding sequence
  source 1..558: mol_type = other DNA

SEQ ID NO: 81866 - DNA, 438 bp, synthetic construct; identical to SEQ ID NO: 81822
  misc_feature 1..438: note = Description of Artificial Sequence: Synthetic coding sequence
  source 1..438: mol_type = other DNA

SEQ ID NO: 81867 - DNA, 717 bp, synthetic construct; identical to SEQ ID NO: 81825
  misc_feature 1..717: note = Description of Artificial Sequence: Synthetic coding sequence
  source 1..717: mol_type = other DNA

SEQ ID NO: 81868 - DNA, 1140 bp, synthetic construct
  misc_feature 1..1140: note = Description of Artificial Sequence: Synthetic coding sequence
  source 1..1140: mol_type = other DNA
atgttcttcacctgcggccccaacgaggccatggtggtgagcggcttctgcagaagcccccccgtgatggtggccggcggcagagtgttcgtgctgccctgcatccagcagatccagagaatcagcctgaacaccctgaccctgaacgtgaagagcgagaaggtgtacaccagacacggcgtgcccatcagcgtgaccggcatcgcccaggagatctacaaggacagacagaagttcagcgagcaggtgttcaaggtggccagcagcgacctggtgaacatgggcatcagcgtggtgagctacaccctgaaggacatccacgacgaccaggactacctgcacagcctgggcaaggccagaaccgcccaggtgcagaaggacgccagaatcggcgaggccgaggccaagagagacgccggcatcagagaggccaaggccaagcaggagaaggtgagcgcccagtacctgagcgagatcgagatggccaaggcccagagagactacgagctgaagaaggccgcctacgacatcgaggtgaacaccagaagagcccaggccgacctggcctaccagctgcaggtggccaagaccaagcagcagatcgaggagcagagagtgcaggtgcaggtggtggagagagcccagcaggtggccgtgcaggagcaggagatcgccagaagagagaaggagctggaggccagagtgagaaagcccgccgaggccgagagatacaagctggagagactggccgaggccgagaagagccagctgatcatgcaggccgaggccgaggccgccagcgtgagaatgagaggcgaggccgaggccttcgccatcggcgccagagccagagccgaggccgagcagatggccaagaaggccgaggccttccagctgtaccaggaggccgcccagctggacatgctgctggagaagctgccccaggtggccgaggagatcagcggccccctgaccagcgccaacaagatcaccctggtgagcagcggcagcggcaccatgggcgccgccaaggtgaccggcgaggtgctggacatcctgaccagactgcccgagagcgtggagagactgaccggcgtgagcatcagccaggtgaaccacaagcccctgagaaccgcctag

SEQ ID NO: 81869 - DNA, 558 bp, synthetic construct; identical to SEQ ID NO: 81833
  misc_feature 1..558: note = Description of Artificial Sequence: Synthetic coding sequence
  source 1..558: mol_type = other DNA

SEQ ID NO: 81870 - DNA, 696 bp, synthetic construct
  misc_feature 1..696: note = Description of Artificial Sequence: Synthetic coding sequence
  source 1..696: mol_type = other DNA
gtgaagatccagggccagaacaaggagatgctggccgccgcctgccagatgttcctgggcaagaccgaggccgagatcgcccacatcgccctggagaccctggagggccaccagagagccatcatggcccacatgaccgtggaggagatctacaaggacagacagaagttcagcgagcaggtgttcaaggtggccagcagcgacctggtgaacatgggcatcagcgtggtgagctacaccctgaaggacatccacgacgaccaggactacctgcacagcctgggcaaggccagaaccgcccaggtgcagaaggacgccagaatcggcgaggccgaggccaagagagacgccggcatcagagaggccaaggccaagcaggagaaggtgagcgcccagtacctgagcgagatcgagatggccaaggcccagagagactacgagctgaagaaggccgcctacgacatcgaggtgaacaccagaagagcccaggccgacctggcctaccagctgcaggtggccaagaccaagcagcagatcgaggagcagagagtgcaggtgcaggtggtggagagagcccagcaggtggccgtgcaggagcaggagatcgccagaagagagaaggagctggaggccagagtgagaaagcccgccgaggccgagagatacaagctggagagactggccgaggccgagtag

SEQ ID NO: 81871 - DNA, 633 bp, synthetic construct; identical to SEQ ID NO: 81838
  misc_feature 1..633: note = Description of Artificial Sequence: Synthetic coding sequence
  source 1..633: mol_type = other DNA

SEQ ID NO: 81872 - DNA, 579 bp, synthetic construct; identical to SEQ ID NO: 81823
  misc_feature 1..579: note = Description of Artificial Sequence: Synthetic coding sequence
  source 1..579: mol_type = other DNA

SEQ ID NO: 81873 - DNA, 1140 bp, synthetic construct; identical to SEQ ID NO: 81868
  misc_feature 1..1140: note = Description of Artificial Sequence: Synthetic coding sequence
  source 1..1140: mol_type = other DNA

SEQ ID NO: 81874 - DNA, 1140 bp, synthetic construct; identical to SEQ ID NO: 81868
  misc_feature 1..1140: note = Description of Artificial Sequence: Synthetic coding sequence
  source 1..1140: mol_type = other DNA

SEQ ID NO: 81875 - DNA, 1140 bp, synthetic construct; identical to SEQ ID NO: 81868
  misc_feature 1..1140: note = Description of Artificial Sequence: Synthetic coding sequence
  source 1..1140: mol_type = other DNA

SEQ ID NO: 81876 - DNA, 1140 bp, synthetic construct; identical to SEQ ID NO: 81868
  misc_feature 1..1140: note = Description of Artificial Sequence: Synthetic coding sequence
  source 1..1140: mol_type = other DNA

SEQ ID NO: 81877 - DNA, 861 bp, synthetic construct
  misc_feature 1..861: note = Description of Artificial Sequence: Synthetic coding sequence
  source 1..861: mol_type = other DNA
atgggcatcagcgtggtgagctacaccctgaaggacatccacgacgaccaggactacctgcacagcctgggcaaggccagaaccgcccaggtgcagaaggacgccagaatcggcgaggccgaggccaagagagacgccggcatcagagaggccaaggccaagcaggagaaggtgagcgcccagtacctgagcgagatcgagatggccaaggcccagagagactacgagctgaagaaggccgcctacgacatcgaggtgaacaccagaagagcccaggccgacctggcctaccagctgcaggtggccaagaccaagcagcagatcgaggagcagagagtgcaggtgcaggtggtggagagagcccagcaggtggccgtgcaggagcaggagatcgccagaagagagaaggagctggaggccagagtgagaaagcccgccgaggccgagagatacaagctggagagactggccgaggccgagaagagccagctgatcatgcaggccgaggccgaggccgccagcgtgagaatgagaggcgaggccgaggccttcgccatcggcgccagagccagagccgaggccgagcagatggccaagaaggccgaggccttccagctgtaccaggaggccgcccagctggacatgctgctggagaagctgccccaggtggccgaggagatcagcggccccctgaccagcgccaacaagatcaccctggtgagcagcggcagcggcaccatgggcgccgccaaggtgaccggcgaggtgctggacatcctgaccagactgcccgagagcgtggagagactgaccggcgtgagcatcagccaggtgaaccacaagcccctgagaaccgcctag

SEQ ID NO: 81878 - DNA, 1452 bp, synthetic construct
  misc_feature 1..1452: note = Description of Artificial Sequence: Synthetic coding sequence
  source 1..1452: mol_type = other DNA
atgggcaactgccacaccgtgggccccaacgaggccctggtggtgagcggcggctgctgcggcagcgactacaagcagtacgtgttcggcggctgggcctgggcctggtggtgcatcagcgacacccagagactgagcctggaggtgatgaccatcctgtgcagatgcgagaacatcgagaccagcgagggcgtgcccctgttcgtgaccggcgtggcccaggtgccctgcccctgcctgctggactgcaagtggggcaacagcaagggcttctggaagctgtgccaggtgtgccagatcagcctggagatcatgaccctgcagcccagatgcgaggacgtggagaccgccgagggcgtggccctgaccgtgaccggcgtggcccaggtgaagatcatgaccgagaaggagctgctggccgtggcctgcgagcagttcctgggcaagaacgtgcaggacatcaagaacgtggtgctgcagaccctggagggccacctgagaagcatcctgggcaccctgaccgtggagcagatctaccaggacagagaccagttcgccaagctggtgagagaggtggccgcccccgacgtgggcagaatgggcatcgagatcctgagcttcaccatcaaggacgtgtacgacaaggtggactacctgagcagcctgggcaagacccagaccgccgtggtgcagagagacgccgacatcggcgtggccgaggccgagagagacgccggcatcagagaggccgagtgcaagaaggagatgctggacgtgaagttcatggccgacaccaagatcgccgacagcaagagagccttcgagctgcagaagagcgccttcagcgaggaggtgaacatcaagaccgccgaggcccagctggcctacgagctgcagggcgccagagagcagcagaagatcagacaggaggagatcgagatcgaggtggtgcagagaaagaagcagatcgccgtggaggcccaggagatcctgagaaccgacaaggagctgatcgccaccgtgagaagacccgccgaggccgaggcccacagaatccagcagatcgccgagggcgagaaggtgaagcaggtgctgctggcccaggccgaggccgagaagatcagaaagatcggcgaggccgaggccgccgtgatcgaggccatgggcaaggccgaggccgagagaatgaagctgaaggccgaggcctaccagaagtacggcgacgccgccaagatggccctggtgctggaggccctgccccagatcgccgccaagatcgccgcccccctgaccaaggtggacgagatcgtggtgctgagcggcgacaacagcaaggtgaccagcgaggtgaacagactgctggccgagctgcccgccagcgtgcacgccctgaccggcgtggacctgagcaagatccccctgatcaagaaggccaccggcgtgcaggtgtag

SEQ ID NO: 81879 - DNA, 1287 bp, synthetic construct
  misc_feature 1..1287: note = Description of Artificial Sequence: Synthetic coding sequence
  source 1..1287: mol_type = other DNA
atgggcaactgccacaccgtgggccccaacgaggccctggtggtgagcggcggctgctgcggcagcgactacaagcagtacgtgttcggcggctgggcctgggcctggtggtgcatcagcgacacccagagaatcagcctggagatcatgaccctgcagcccagatgcgaggacgtggagaccgccgagggcgtggccctgaccgtgaccggcgtggcccaggtgaagatcatgaccgagaaggagctgctggccgtggcctgcgagcagttcctgggcaagaacgtgcaggacatcaagaacgtggtgctgcagaccctggagggccacctgagaagcatcctgggcaccctgaccgtggagcagatctaccaggacagagaccagttcgccaagctggtgagagaggtggccgcccccgacgtgggcagaatgggcatcgagatcctgagcttcaccatcaaggacgtgtacgacaaggtggactacctgagcagcctgggcaagacccagaccgccgtggtgcagagagacgccgacatcggcgtggccgaggccgagagagacgccggcatcagagaggccgagtgcaagaaggagatgctggacgtgaagttcatggccgacaccaagatcgccgacagcaagagagccttcgagctgcagaagagcgccttcagcgaggaggtgaacatcaagaccgccgaggcccagctggcctacgagctgcagggcgccagagagcagcagaagatcagacaggaggagatcgagatcgaggtggtgcagagaaagaagcagatcgccgtggaggcccaggagatcctgagaaccgacaaggagctgatcgccaccgtgagaagacccgccgaggccgaggcccacagaatccagcagatcgccgagggcgagaaggtgaagcaggtgctgctggcccaggccgaggccgagaagatcagaaagatcggcgaggccgaggccgccgtgatcgaggccatgggcaaggccgaggccgagagaatgaagctgaaggccgaggcctaccagaagtacggcgacgccgccaagatggccctggtgctggaggccctgccccagatcgccgccaagatcgccgcccccctgaccaaggtggacgagatcgtggtgctgagcggcgacaacagcaaggtgaccagcgaggtgaacagactgctggccgagctgcccgccagcgtgcacgccctgaccggcgtggacctgagcaagatccccctgatcaagaaggccaccggcgtgcaggtgtag

SEQ ID NO: 81880 - DNA, 2982 bp, synthetic construct
  misc_feature 1..2982: note = Description of Artificial Sequence: Synthetic coding sequence
  source 1..2982: mol_type = other DNA
atgcccgccctggccagagacggcggccagctgcccctgctggtggtgttcagcgccatgatcttcggcaccatcaccaaccaggacctgcccgtgatcaagtgcgtgctgatcaaccacaagaacaacgacagcagcgtgggcaagagcagcagctaccccatggtgagcgagagccccgaggacctgggctgcgccctgagaccccagagcagcggcaccgtgtacgaggccgccgccgtggaggtggacgtgagcgccagcatcaccctgcaggtgctggtggacgcccccggcaacatcagctgcctgtgggtgttcaagcacagcagcctgaactgccagccccacttcgacctgcagaacagaggcgtggtgagcatggtgatcctgaagatgaccgagacccaggccggcgagtacctgctgttcatccagagcgaggccaccaactacaccatcctgttcaccgtgagcatcagaaacaccctgctgtacaccctgagaagaccctacttcagaaagatggagaaccaggacgccctggtgtgcatcagcgagagcgtgcccgagcccatcgtggagtgggtgctgtgcgacagccagggcgagagctgcaaggaggagagccccgccgtggtgaagaaggaggagaaggtgctgcacgagctgttcggcaccgacatcagatgctgcgccagaaacgagctgggcagagagtgcaccagactgttcaccatcgacctgaaccagaccccccagaccaccctgccccagctgttcctgaaggtgggcgagcccctgtggatcagatgcaaggccgtgcacgtgaaccacggcttcggcctgacctgggagctggagaacaaggccctggaggagggcaactacttcgagatgagcacctacagcaccaacagaaccatgatcagaatcctgttcgccttcgtgagcagcgtggccagaaacgacaccggctactacacctgcagcagcagcaagcaccccagccagagcgccctggtgaccatcgtggagaagggcttcatcaacgccaccaacagcagcgaggactacgagatcgaccagtacgaggagttctgcttcagcgtgagattcaaggcctacccccagatcagatgcacctggaccttcagcagaaagagcttcccctgcgagcagaagggcctggacaacggctacagcatcagcaagttctgcaaccacaagcaccagcccggcgagtacatcttccacgccgagaacgacgacgcccagttcaccaagatgttcaccctgaacatcagaagaaagccccaggtgctggccgaggccagcgccagccaggccagctgcttcagcgacggctaccccctgcccagctggacctggaagaagtgcagcgacaagagccccaactgcaccgaggagatcaccgagggcgtgtggaacagaaaggccaacagaaaggtgttcggccagtgggtgagcagcagcaccctgaacatgagcgaggccatcaagggcttcctggtgaagtgctgcgcctacaacagcctgggcaccagctgcgagaccatcctgctgaacagccccggccccttccccttcatccaggacaacatcagcttctacgccaccatcggcgtgtgcctgctgttcatcgtggtgctgaccctgctgatctgccacaagtacaagaagcagttcagatacgagagccagctgcagatggtgcaggtgaccggcagcagcgacaacgagtacttctacgtggacttcagagagtacgagtacgacctgaagtgggagttccccagagagaacctggagttcggcaaggtgctgggcagcggcgccttcggcaaggtgatgaacgccaccgcctacggcatcagcaagaccggcgtgagcatccaggtggccgtgaagatgctgaaggagaaggccgacagcagcgagagagaggccctgatgagcgagctgaagatgatgacccagctgggcagccacgagaacatcgtgaacctgctgggcgcctgcaccctgagcggccccatctacctgatcttcgagtactgctgctacggcgacctgctgaactacctgagaagcaagagagagaagttccacagaacctggaccgagatcttcaaggagcacaacttcagcttctaccccaccttccagagccaccccaacagcagcatgcccggcagcagagaggtgcagatccaccccgacagcgaccagatcagcggcctgcacggcaacagcttccacagcgaggacgagatcgagtacgagaaccagaagagactggaggaggaggaggacctgaacgtgctgaccttcgaggacctgctgtgcttcgcctaccaggtggccaagggcatggagttcctggagttcaagagctgcgtgcacagagacctggccgccagaaacgtgctggtgacccacggcaaggtggtgaagatctgcgacttcggcctggccagagacatcatgagcgacagcaactacgtggtgagaggcaacgccagactgcccgtgaagtggatggcccccgagagcctgttcgagggcatctacaccatcaagagcgacgtgtggagctacggcatcctgctgtgggagatcttcagcctgggcgtgaacccctaccccggcatccccgtggacgccaacttctacaagctgatccagaacggcttcaagatggaccagcccttctacgccaccgaggagatctacatcatcatgcagagctgctgggccttcgacagcagaaagagacccagcttccccaacctgaccagcttcctgggctgccagctggccgacgccgaggaggccatgtaccagaacgtggacggcagagtgagcgagtgcccccacacctaccagaacagaagacccttcagcagagagatggacctgggcctgctgagcccccaggcccaggtggaggacagctag

SEQ ID NO: 81881 - DNA, 2991 bp, synthetic construct
  misc_feature 1..2991: note = Description of Artificial Sequence: Synthetic coding sequence
  source 1..2991: mol_type = other DNA
atgcccgccctggccagagacggcggccagctgcccctgctggtggtgttcagcgccatgatcttcggcaccatcaccaaccaggacctgcccgtgatcaagtgcgtgctgatcaaccacaagaacaacgacagcagcgtgggcaagagcagcagctaccccatggtgagcgagagccccgaggacctgggctgcgccctgagaccccagagcagcggcaccgtgtacgaggccgccgccgtggaggtggacgtgagcgccagcatcaccctgcaggtgctggtggacgcccccggcaacatcagctgcctgtgggtgttcaagcacagcagcctgaactgccagccccacttcgacctgcagaacagaggcgtggtgagcatggtgatcctgaagatgaccgagacccaggccggcgagtacctgctgttcatccagagcgaggccaccaactacaccatcctgttcaccgtgagcatcagaaacaccctgctgtacaccctgagaagaccctacttcagaaagatggagaaccaggacgccctggtgtgcatcagcgagagcgtgcccgagcccatcgtggagtgggtgctgtgcgacagccagggcgagagctgcaaggaggagagccccgccgtggtgaagaaggaggagaaggtgctgcacgagctgttcggcaccgacatcagatgctgcgccagaaacgagctgggcagagagtgcaccagactgttcaccatcgacctgaaccagaccccccagaccaccctgccccagctgttcctgaaggtgggcgagcccctgtggatcagatgcaaggccgtgcacgtgaaccacggcttcggcctgacctgggagctggagaacaaggccctggaggagggcaactacttcgagatgagcacctacagcaccaacagaaccatgatcagaatcctgttcgccttcgtgagcagcgtggccagaaacgacaccggctactacacctgcagcagcagcaagcaccccagccagagcgccctggtgaccatcgtggagaagggcttcatcaacgccaccaacagcagcgaggactacgagatcgaccagtacgaggagttctgcttcagcgtgagattcaaggcctacccccagatcagatgcacctggaccttcagcagaaagagcttcccctgcgagcagaagggcctggacaacggctacagcatcagcaagttctgcaaccacaagcaccagcccggcgagtacatcttccacgccgagaacgacgacgcccagttcaccaagatgttcaccctgaacatcagaagaaagccccaggtgctggccgaggccagcgccagccaggccagctgcttcagcgacggctaccccctgcccagctggacctggaagaagtgcagcgacaagagccccaactgcaccgaggagatcaccgagggcgtgtggaacagaaaggccaacagaaaggtgttcggccagtgggtgagcagcagcaccctgaacatgagcgaggccatcaagggcttcctggtgaagtgctgcgcctacaacagcctgggcaccagctgcgagaccatcctgctgaacagccccggccccttccccttcatccaggacaacatcagcttctacgccaccatcggcgtgtgcctgctgttcatcgtggtgctgaccctgctgatctgccacaagtacaagaagcagttcagatacgagagccagctgcagatggtgcaggtgaccggcagcagcgacaacgagtacttctacgtggacttcagagagtacgagtacgacctgaagtgggagttccccagagagaacctggagttcggcaaggtgctgggcagcggcgccttcggcaaggtgatgaacgccaccgcctacggcatcagcaagaccggcgtgagcatccaggtggccgtgaagatgctgaaggagaaggccgacagcagcgagagagaggccctgatgagcgagctgaagatgatgacccagctgggcagccacgagaacatcgtgaacctgctgggcgcctgcaccctgagcggccccatctacctgatcttcgagtactgctgctacggcgacctgctgaactacctgagaagcaagagagagaagttccacagaacctggaccgagatcttcaaggagcacaacttcagcttctaccccaccttccagagccaccccaacagcagcatgcccggcagcagagaggtgcagatccaccccgacagcgaccagatcagcggcctgcacggcaacagcttccacagcgaggacgagatcgagtacgagaaccagaagagactggaggaggaggaggacctgaacgtgctgaccttcgaggacctgctgtgcttcgcctaccaggtggccaagggcatggagttcctggagttcaagagctgcgtgcacagagacctggccgccagaaacgtgctggtgacccacggcaaggtggtgaagatctgcgacttcggcctggccagagacatcatgagcgacagcaactacgtggtgagaggcaacgtgagactggccagactgcccgtgaagtggatggcccccgagagcctgttcgagggcatctacaccatcaagagcgacgtgtggagctacggcatcctgctgtgggagatcttcagcctgggcgtgaacccctaccccggcatccccgtggacgccaacttctacaagctgatccagaacggcttcaagatggaccagcccttctacgccaccgaggagatctacatcatcatgcagagctgctgggccttcgacagcagaaagagacccagcttccccaacctgaccagcttcctgggctgccagctggccgacgccgaggaggccatgtaccagaacgtggacggcagagtgagcgagtgcccccacacctaccagaacagaagacccttcagcagagagatggacctgggcctgctgagcccccaggcccaggtggaggacagctag

SEQ ID NO: 81882 - DNA, 2859 bp, synthetic construct
  misc_feature 1..2859: note = Description of Artificial Sequence: Synthetic coding sequence
  source 1..2859: mol_type = other DNA
atgcccgccctggccagagacggcggccagctgcccctgctggtggtgttcagcgccatgatcttcggcaccatcaccaaccaggacctgcccgtgatcaagtgcgtgctgatcaaccacaagaacaacgacagcagcgtgggcaagagcagcagctaccccatggtgagcgagagccccgaggacctgggctgcgccctgagaccccagagcagcggcaccgtgtacgaggccgccgccgtggaggtggacgtgagcgccagcatcaccctgcaggtgctggtggacgcccccggcaacatcagctgcctgtgggtgttcaagcacagcagcctgaactgccagccccacttcgacctgcagaacagaggcgtggtgagcatggtgatcctgaagatgaccgagacccaggccggcgagtacctgctgttcatccagagcgaggccaccaactacaccatcctgttcaccgtgagcatcagaaacaccctgctgtacaccctgagaagaccctacttcagaaagatggagaaccaggacgccctggtgtgcatcagcgagagcgtgcccgagcccatcgtggagtgggtgctgtgcgacagccagggcgagagctgcaaggaggagagccccgccgtggtgaagaaggaggagaaggtgctgcacgagctgttcggcaccgacatcagatgctgcgccagaaacgagctgggcagagagtgcaccagactgttcaccatcgacctgaaccagaccccccagaccaccctgccccagctgttcctgaaggtgggcgagcccctgtggatcagatgcaaggccgtgcacgtgaaccacggcttcggcctgacctgggagctggagaacaaggccctggaggagggcaactacttcgagatgagcacctacagcaccaacagaaccatgatcagaatcctgttcgccttcgtgagcagcgtggccagaaacgacaccggctactacacctgcagcagcagcaagcaccccagccagagcgccctggtgaccatcgtggagaagggcttcatcaacgccaccaacagcagcgaggactacgagatcgaccagtacgaggagttctgcttcagcgtgagattcaaggcctacccccagatcagatgcacctggaccttcagcagaaagagcttcccctgcgagcagaagggcctggacaacggctacagcatcagcaagttctgcaaccacaagcaccagcccggcgagtacatcttccacgccgagaacgacgacgcccagttcaccaagatgttcaccctgaacatcagaagaaagccccaggtgctggccgaggccagcgccagccaggccagctgcttcagcgacggctaccccctgcccagctggacctggaagaagtgcagcgacaagagccccaactgcaccgaggagatcaccgagggcgtgtggaacagaaaggccaacagaaaggtgttcggccagtgggtgagcagcagcaccctgaacatgagcgaggccatcaagggcttcctggtgaagtgctgcgcctacaacagcctgggcaccagctgcgagaccatcctgctgaacagccccggccccttccccttcatccaggacaacatcagcttctacgccaccatcggcgtgtgcctgctgttcatcgtggtgctgaccctgctgatctgccacaagtacaagaagcagttcagatacgagagccagctgcagatggtgcaggtgaccggcagcagcgacaacgagtacttctacgtggacttcagagagtacgagtacgacctgaagtgggagttccccagagagaacctggagttcggcaaggtgctgggcagcggcgccttcggcaaggtgatgaacgccaccgcctacggcatcagcaagaccggcgtgagcatccaggtggccgtgaagatgctgaaggagaaggccgacagcagcgagagagaggccctgatgagcgagctgaagatgatgacccagctgggcagccacgagaacatcgtgaacctgctgggcgcctgcaccctgagcggccccatctacctgatcttcgagtactgctgctacggcgacctgctgaactacctgagaagcaagagagagaagttccacagaacctggaccgagatcttcaaggagcacaacttcagcttctaccccaccttccagagccaccccaacagcagcatgcccggcagcagagaggtgcagatccaccccgacagcgaccagatcagcggcctgcacggcaacagcttccacagcgaggacgagatcgagtacgagaaccagaagagactggaggaggaggaggacctgaacgtgctgaccttcgaggacctgctgtgcttcgcctaccaggtggccaagggcatggagttcctggagttcaagagcgccagactgcccgtgaagtggatggcccccgagagcctgttcgagggcatctacaccatcaagagcgacgtgtggagctacggcatcctgctgtgggagatcttcagcctgggcgtgaacccctaccccggcatccccgtggacgccaacttctacaagctgatccagaacggcttcaagatggaccagcccttctacgccaccgaggagatctacatcatcatgcagagctgctgggccttcgacagcagaaagagacccagcttccccaacctgaccagcttcctgggctgccagctggccgacgccgaggaggccatgtaccagaacgtggacggcagagtgagcgagtgcccccacacctaccagaacagaagacccttcagcagagagatggacctgggcctgctgagcccccaggcccaggtggaggacagctag

SEQ ID NO: 81883 - DNA, 2253 bp, synthetic construct
  misc_feature 1..2253: note = Description of Artificial Sequence: Synthetic coding sequence
  source 1..2253: mol_type = other DNA
atgtggaacctgctgcacgagaccgacagcgccgtggccaccgccagaagacccagatggctgtgcgccggcgccctggtgctggccggcggcttcttcctgctgggcttcctgttcggctggttcatcaagagcagcaacgaggccaccaacatcacccccaagcacaacatgaaggccttcctggacgagctgaaggccgagaacatcaagaagttcctgtacaacttcacccagatcccccacctggccggcaccgagcagaacttccagctggccaagcagatccagagccagtggaaggagttcggcctggacagcgtggagctggcccactacgacgtgctgctgagctaccccaacaagacccaccccaactacatcagcatcatcaacgaggacggcaacgagatcttcaacaccagcctgttcgagccccccccccccggctacgagaacgtgagcgacatcgtgccccccttcagcgccttcagcccccagggcatgcccgagggcgacctggtgtacgtgaactacgccagaaccgaggacttcttcaagctggagagagacatgaagatcaactgcagcggcaagatcgtgatcgccagatacggcaaggtgttcagaggcaacaaggtgaagaacgcccagctggccggcgccaagggcgtgatcctgtacagcgaccccgccgactacttcgcccccggcgtgaagagctaccccgacggctggaacctgcccggcggcggcgtgcagagaggcaacatcctgaacctgaacggcgccggcgaccccctgacccccggctaccccgccaacgagtacgcctacagaagaggcatcgccgaggccgtgggcctgcccagcatccccgtgcaccccatcggctactacgacgcccagaagctgctggagaagatgggcggcagcgccccccccgacagcagctggagaggcagcctgaaggtgccctacaacgtgggccccggcttcaccggcaacttcagcacccagaaggtgaagatgcacatccacagcaccaacgaggtgaccagaatctacaacgtgatcggcaccctgagaggcgccgtggagcccgacagatacgtgatcctgggcggccacagagacagctgggtgttcggcggcatcgacccccagagcggcgccgccgtggtgcacgagatcgtgagaagcttcggcaccctgaagaaggagggctggagacccagaagaaccatcctgttcgccagctgggacgccgaggagttcggcctgctgggcagcaccgagtgggccgaggagaacagcagactgctgcaggagagaggcgtggcctacatcaacgccgacagcagcatcgagggcaactacaccctgagagtggactgcacccccctgatgtacagcctggtgcacaacctgaccaaggagctgaagagccccgacgagggcttcgagggcaagagcctgtacgagagctggaccaagaagagccccagccccgagttcagcggcatgcccagaatcagcaagctgggcagcggcaacgacttcgaggtgttcttccagagactgggcatcgccagcggcagagccagatacaccaagaactgggagaccaacaagttcagcggctaccccctgtaccacagcgtgtacgagacctacgagctggtggagaagttctacgaccccatgttcaagtaccacctgaccgtggcccaggtgagaggcggcatggtgttcgagctggccaacagcatcgtgctgcccttcgactgcagagactacgccgtggtgctgagaaagtacgccgacaagatctacagcatcagcatgaagcacccccaggagatgaagacctacagcgtgagcttcgacagcctgttcagcgccgtgaagaacttcaccgagatcgccagcaagttcagcgagagactgcaggacttcgacaagagcaaccccatcgtgctgagaatgatgaacgaccagctgatgttcctggagagagccttcatcgaccccctgggcctgcccgacagacccttctacagacacgtgatctacgcccccagcagccacaacaagtacgccggcgagagcttccccggcatctacgacgccctgttcgacatcgagagcaaggtggaccccagcaaggcctggggcgaggtgaagagacagatctacgtggccgccttcaccgtgcaggccgccgccgagaccctgagcgaggtggcctag

SEQ ID NO: 81884 - DNA, 2208 bp, synthetic construct
  misc_feature 1..2208: note = Description of Artificial Sequence: Synthetic coding sequence
  source 1..2208: mol_type = other DNA
atgaccgccggcagcagctaccccctgttcctggccgcctacgcctgcaccggctgcctggccgagagactgggctggttcatcaagagcagcaacgaggccaccaacatcacccccaagcacaacatgaaggccttcctggacgagctgaaggccgagaacatcaagaagttcctgtacaacttcacccagatcccccacctggccggcaccgagcagaacttccagctggccaagcagatccagagccagtggaaggagttcggcctggacagcgtggagctggcccactacgacgtgctgctgagctaccccaacaagacccaccccaactacatcagcatcatcaacgaggacggcaacgagatcttcaacaccagcctgttcgagccccccccccccggctacgagaacgtgagcgacatcgtgccccccttcagcgccttcagcccccagggcatgcccgagggcgacctggtgtacgtgaactacgccagaaccgaggacttcttcaagctggagagagacatgaagatcaactgcagcggcaagatcgtgatcgccagatacggcaaggtgttcagaggcaacaaggtgaagaacgcccagctggccggcgccaagggcgtgatcctgtacagcgaccccgccgactacttcgcccccggcgtgaagagctaccccgacggctggaacctgcccggcggcggcgtgcagagaggcaacatcctgaacctgaacggcgccggcgaccccctgacccccggctaccccgccaacgagtacgcctacagaagaggcatcgccgaggccgtgggcctgcccagcatccccgtgcaccccatcggctactacgacgcccagaagctgctggagaagatgggcggcagcgccccccccgacagcagctggagaggcagcctgaaggtgccctacaacgtgggccccggcttcaccggcaacttcagcacccagaaggtgaagatgcacatccacagcaccaacgaggtgaccagaatctacaacgtgatcggcaccctgagaggcgccgtggagcccgacagatacgtgatcctgggcggccacagagacagctgggtgttcggcggcatcgacccccagagcggcgccgccgtggtgcacgagatcgtgagaagcttcggcaccctgaagaaggagggctggagacccagaagaaccatcctgttcgccagctgggacgccgaggagttcggcctgctgggcagcaccgagtgggccgaggagaacagcagactgctgcaggagagaggcgtggcctacatcaacgccgacagcagcatcgagggcaactacaccctgagagtggactgcacccccctgatgtacagcctggtgcacaacctgaccaaggagctgaagagccccgacgagggcttcgagggcaagagcctgtacgagagctggaccaagaagagccccagccccgagttcagcggcatgcccagaatcagcaagctgggcagcggcaacgacttcgaggtgttcttccagagactgggcatcgccagcggcagagccagatacaccaagaactgggagaccaacaagttcagcggctaccccctgtaccacagcgtgtacgagacctacgagctggtggagaagttctacgaccccatgttcaagtaccacctgaccgtggcccaggtgagaggcggcatggtgttcgagctggccaacagcatcgtgctgcccttcgactgcagagactacgccgtggtgctgagaaagtacgccgacaagatctacagcatcagcatgaagcacccccaggagatgaagacctacagcgtgagcttcgacagcctgttcagcgccgtgaagaacttcaccgagatcgccagcaagttcagcgagagactgcaggacttcgacaagagcaaccccatcgtgctgagaatgatgaacgaccagctgatgttcctggagagagccttcatcgaccccctgggcctgcccgacagacccttctacagacacgtgatctacgcccccagcagccacaacaagtacgccggcgagagcttccccggcatctacgacgccctgttcgacatcgagagcaaggtggaccccagcaaggcctggggcgaggtgaagagacagatctacgtggccgccttcaccgtgcaggccgccgccgagaccctgagcgaggtggcctag

SEQ ID NO: 81885 - DNA, 1329 bp, synthetic construct
  misc_feature 1..1329: note = Description of Artificial Sequence: Synthetic coding sequence
  source 1..1329: mol_type = other DNA
atgggcggcagcgccccccccgacagcagctggagaggcagcctgaaggtgccctacaacgtgggccccggcttcaccggcaacttcagcacccagaaggtgaagatgcacatccacagcaccaacgaggtgaccagaatctacaacgtgatcggcaccctgagaggcgccgtggagcccgacagatacgtgatcctgggcggccacagagacagctgggtgttcggcggcatcgacccccagagcggcgccgccgtggtgcacgagatcgtgagaagcttcggcaccctgaagaaggagggctggagacccagaagaaccatcctgttcgccagctgggacgccgaggagttcggcctgctgggcagcaccgagtgggccgaggagaacagcagactgctgcaggagagaggcgtggcctacatcaacgccgacagcagcatcgagggcaactacaccctgagagtggactgcacccccctgatgtacagcctggtgcacaacctgaccaaggagctgaagagccccgacgagggcttcgagggcaagagcctgtacgagagctggaccaagaagagccccagccccgagttcagcggcatgcccagaatcagcaagctgggcagcggcaacgacttcgaggtgttcttccagagactgggcatcgccagcggcagagccagatacaccaagaactgggagaccaacaagttcagcggctaccccctgtaccacagcgtgtacgagacctacgagctggtggagaagttctacgaccccatgttcaagtaccacctgaccgtggcccaggtgagaggcggcatggtgttcgagctggccaacagcatcgtgctgcccttcgactgcagagactacgccgtggtgctgagaaagtacgccgacaagatctacagcatcagcatgaagcacccccaggagatgaagacctacagcgtgagcttcgacagcctgttcagcgccgtgaagaacttcaccgagatcgccagcaagttcagcgagagactgcaggacttcgacaagagcaaccccatcgtgctgagaatgatgaacgaccagctgatgttcctggagagagccttcatcgaccccctgggcctgcccgacagacccttctacagacacgtgatctacgcccccagcagccacaacaagtacgccggcgagagcttccccggcatctacgacgccctgttcgacatcgagagcaaggtggaccccagcaaggcctggggcgaggtgaagagacagatctacgtggccgccttcaccgtgcaggccgccgccgagaccctgagcgaggtggcctag

SEQ ID NO: 81886 - DNA, 2160 bp, synthetic construct
  misc_feature 1..2160: note = Description of Artificial Sequence: Synthetic coding sequence
  source 1..2160: mol_type = other DNA
atgtggaacctgctgcacgagaccgacagcgccgtggccaccgccagaagacccagatggctgtgcgccggcgccctggtgctggccggcggcttcttcctgctgggcttcctgttcggctggttcatcaagagcagcaacgaggccaccaacatcacccccaagcacaacatgaaggccttcctggacgagctgaaggccgagaacatcaagaagttcctgtacaacttcacccagatcccccacctggccggcaccgagcagaacttccagctggccaagcagatccagagccagtggaaggagttcggcctggacagcgtggagctggcccactacgacgtgctgctgagctaccccaacaagacccaccccaactacatcagcatcatcaacgaggacggcaacgagatcttcaacaccagcctgttcgagccccccccccccggctacgagaacgtgagcgacatcgtgccccccttcagcgccttcagcccccagggcatgcccgagggcgacctggtgtacgtgaactacgccagaaccgaggacttcttcaagctggagagagacatgaagatcaactgcagcggcaagatcgtgatcgccagatacggcaaggtgttcagaggcaacaaggtgaagaacgcccagctggccggcgccaagggcgtgatcctgtacagcgaccccgccgactacttcgcccccggcgtgaagagctaccccgacggctggaacctgcccggcggcggcgtgcagagaggcaacatcctgaacctgaacggcgccggcgaccccctgacccccggctaccccgccaacgagtacgcctacagaagaggcatcgccgaggccgtgggcctgcccagcatccccgtgcaccccatcggctactacgacgcccagaagctgctggagaagatgggcggcagcgccccccccgacagcagctggagaggcagcctgaaggtgccctacaacgtgggccccggcttcaccggcaacttcagcacccagaaggtgaagatgcacatccacagcaccaacgaggtgaccagaatctacaacgtgatcggcaccctgagaggcgccgtggagcccgacagatacgtgatcctgggcggccacagagacagctgggtgttcggcggcatcgacccccagagcggcgccgccgtggtgcacgagatcgtgagaagcttcggcaccctgaagaaggagggctggagacccagaagaaccatcctgttcgccagctgggacgccgaggagttcggcctgctgggcagcaccgagtgggccgaggagaacagcagactgctgcaggagagaggcgtggcctacatcaacgccgacagcagcatcgagggcaactacaccctgagagtggactgcacccccctgatgtacagcctggtgcacaacctgaccaaggagctgaagagccccgacgagggcttcgagggcaagagcctgtacgagagctggaccaagaagagccccagccccgagttcagcggcatgcccagaatcagcaagctgggcagcggcaacgacttcgaggtgttcttccagagactgggcatcgccagcggcagagccagatacaccaagaactgggagaccaacaagttcagcggctaccccctgtaccacagcgtgtacgagacctacgagctggtggagaagttctacgaccccatgttcaagtaccacctgaccgtggcccaggtgagaggcggcatggtgttcgagctggccaacagcatcgtgctgcccttcgactgcagagactacgccgtggtgctgagaaagtacgccgacaagatctacagcatcagcatgaagcacccccaggagatgaagacctacagcgtgagcttcgacagcctgttcagcgccgtgaagaacttcaccgagatcgccagcaagttcagcgagagactgcaggacttcgacaagagcaagcacgtgatctacgcccccagcagccacaacaagtacgccggcgagagcttccccggcatctacgacgccctgttcgacatcgagagcaaggtggaccccagcaaggcctggggcgaggtgaagagacagatctacgtggccgccttcaccgtgcaggccgccgccgagaccctgagcgaggtggcctag

SEQ ID NO: 81887 - DNA, 1638 bp, synthetic construct
  misc_feature 1..1638: note = Description of Artificial Sequence: Synthetic coding sequence
  source 1..1638: mol_type = other DNA
atgtggaacctgctgcacgagaccgacagcgccgtggccaccgccagaagacccagatggctgtgcgccggcgccctggtgctggccggcggcttcttcctgctgggcttcctgttcggctggttcatcaagagcagcaacgaggccaccaacatcacccccaagcacaacatgaaggccttcctggacgagctgaaggccgagaacatcaagaagttcctgtacaacttcacccagatcccccacctggccggcaccgagcagaacttccagctggccaagcagatccagagccagtggaaggagttcggcctggacagcgtggagctggcccactacgacgtgctgctgagctaccccaacaagacccaccccaactacatcagcatcatcaacgaggacggcaacgagatcttcaacaccagcctgttcgagccccccccccccggctacgagaacgtgagcgacatcgtgccccccttcagcgccttcagcccccagggcatgcccgagggcgacctggtgtacgtgaactacgccagaaccgaggacttcttcaagctggagagagacatgaagatcaactgcagcggcaagatcgtgatcgccagatacggcaaggtgttcagaggcaacaaggtgaagaacgcccagctggccggcgccaagggcgtgatcctgtacagcgaccccgccgactacttcgcccccggcgtgaagagctaccccgacggctggaacctgcccggcggcggcgtgcagagaggcaacatcctgaacctgaacggcgccggcgaccccctgacccccggctaccccgccaacgagtacgcctacagaagaggcatcgccgaggccgtgggcctgcccagcatccccgtgcaccccatcggctactacgacgcccagaagctgctggagaagatgggcggcagcgccccccccgacagcagctggagaggcagcctgaaggtgccctacaacgtgggccccggcttcaccggcaacttcagcacccagaaggtgaagatgcacatccacagcaccaacgaggtgaccagaatctacaacgtgatcggcaccctgagaggcgccgtggagcccgacagatacgtgatcctgggcggccacagagacagctgggtgttcggcggcatcgacccccagagcggcgccgccgtggtgcacgagatcgtgagaagcttcggcaccctgaagaaggaggacatcctgggctggagacccagaagaaccatcctgttcgccagctgggacgccgaggagttcggcctgctgggcagcaccgagtgggccgaggagaacagcagactgctgcaggagagaggcgtggcctacatcaacgccgacagcagcatcgagggcaactacaccctgagagtggactgcacccccctgatgtacagcctggtgcacaacctgaccaaggagctgaagagccccgacgagggcttcgagggcaagagcctgtacgagagctggaccaagaagagccccagccccgagttcagcggcatgcccagaatcagcaagctgggcagcggcaacgacttcgaggtgttcttccagagactgggcatcgccagcggcagagccagatacaccaagaagaagaagtag

SEQ ID NO: 81888 - DNA, 2115 bp, synthetic construct
  misc_feature 1..2115: note = Description of Artificial Sequence: Synthetic coding sequence
  source 1..2115: mol_type = other DNA
atgaccgccggcagcagctaccccctgttcctggccgcctacgcctgcaccggctgcctggccgagagactgggctggttcatcaagagcagcaacgaggccaccaacatcacccccaagcacaacatgaaggccttcctggacgagctgaaggccgagaacatcaagaagttcctgtacaacttcacccagatcccccacctggccggcaccgagcagaacttccagctggccaagcagatccagagccagtggaaggagttcggcctggacagcgtggagctggcccactacgacgtgctgctgagctaccccaacaagacccaccccaactacatcagcatcatcaacgaggacggcaacgagatcttcaacaccagcctgttcgagccccccccccccggctacgagaacgtgagcgacatcgtgccccccttcagcgccttcagcccccagggcatgcccgagggcgacctggtgtacgtgaactacgccagaaccgaggacttcttcaagctggagagagacatgaagatcaactgcagcggcaagatcgtgatcgccagatacggcaaggtgttcagaggcaacaaggtgaagaacgcccagctggccggcgccaagggcgtgatcctgtacagcgaccccgccgactacttcgcccccggcgtgaagagctaccccgacggctggaacctgcccggcggcggcgtgcagagaggcaacatcctgaacctgaacggcgccggcgaccccctgacccccggctaccccgccaacgagtacgcctacagaagaggcatcgccgaggccgtgggcctgcccagcatccccgtgcaccccatcggctactacgacgcccagaagctgctggagaagatgggcggcagcgccccccccgacagcagctggagaggcagcctgaaggtgccctacaacgtgggccccggcttcaccggcaacttcagcacccagaaggtgaagatgcacatccacagcaccaacgaggtgaccagaatctacaacgtgatcggcaccctgagaggcgccgtggagcccgacagatacgtgatcctgggcggccacagagacagctgggtgttcggcggcatcgacccccagagcggcgccgccgtggtgcacgagatcgtgagaagcttcggcaccctgaagaaggagggctggagacccagaagaaccatcctgttcgccagctgggacgccgaggagttcggcctgctgggcagcaccgagtgggccgaggagaacagcagactgctgcaggagagaggcgtggcctacatcaacgccgacagcagcatcgagggcaactacaccctgagagtggactgcacccccctgatgtacagcctggtgcacaacctgaccaaggagctgaagagccccgacgagggcttcgagggcaagagcctgtacgagagctggaccaagaagagccccagccccgagttcagcggcatgcccagaatcagcaagctgggcagcggcaacgacttcgaggtgttcttccagagactgggcatcgccagcggcagagccagatacaccaagaactgggagaccaacaagttcagcggctaccccctgtaccacagcgtgtacgagacctacgagctggtggagaagttctacgaccccatgttcaagtaccacctgaccgtggcccaggtgagaggcggcatggtgttcgagctggccaacagcatcgtgctgcccttcgactgcagagactacgccgtggtgctgagaaagtacgccgacaagatctacagcatcagcatgaagcacccccaggagatgaagacctacagcgtgagcttcgacagcctgttcagcgccgtgaagaacttcaccgagatcgccagcaagttcagcgagagactgcaggacttcgacaagagcaagcacgtgatctacgcccccagcagccacaacaagtacgccggcgagagcttccccggcatctacgacgccctgttcgacatcgagagcaaggtggaccccagcaaggcctggggcgaggtgaagagacagatctacgtggccgccttcaccgtgcaggccgccgccgagaccctgagcgaggtggcctag

SEQ ID NO: 81889 - DNA, 774 bp, synthetic construct
  misc_feature 1..774: note = Description of Artificial Sequence: Synthetic coding sequence
  source 1..774: mol_type = other DNA
atggcccagagaatgaccacccagctgctgctgctgctggtgtgggtggccgtggtgggcgaggcccagaccagaatcgcctgggccagaaccgagctgctgaacgtgtgcatgaacgccaagcaccacaaggagaagcccggccccgaggacaagctgcacgagcagtgcagaccctggagaaagaacgcctgctgcagcaccaacaccagccaggaggcccacaaggacgtgagctacctgtacagattcaactggaaccactgcggcgagatggcccccgcctgcaagagacacttcatccaggacacctgcctgtacgagtgcagccccaacctgggcccctggatccagcaggtggaccagagctggagaaaggagagagtgctgaacgtgcccctgtgcaaggaggactgcgagcagtggtgggaggactgcagaaccagctacacctgcaagagcaactggcacaagggctggaactggaccagcggcttcaacaagtgcgccgtgggcgccgcctgccagcccttccacttctacttccccacccccaccgtgctgtgcaacgagatctggacccacagctacaaggtgagcaactacagcagaggcagcggcagatgcatccagatgtggttcgaccccgcccagggcaaccccaacgaggaggtggccagattctacgccgccgccatgagcggcgccggcccctgggccgcctggcccttcctgctgagcctggccctgatgctgctgtggctgctgagctag

SEQ ID NO: 81890 - DNA, 774 bp, synthetic construct; identical to SEQ ID NO: 81889
  misc_feature 1..774: note = Description of Artificial Sequence: Synthetic coding sequence
  source 1..774: mol_type = other DNA

SEQ ID NO: 81891 - DNA, 774 bp, synthetic construct; identical to SEQ ID NO: 81889
  misc_feature 1..774: note = Description of Artificial Sequence: Synthetic coding sequence
  source 1..774: mol_type = other DNA

SEQ ID NO: 81892 - DNA, 774 bp, synthetic construct; identical to SEQ ID NO: 81889
  misc_feature 1..774: note = Description of Artificial Sequence: Synthetic coding sequence
  source 1..774: mol_type = other DNA

SEQ ID NO: 81893 - DNA, 768 bp, synthetic construct
  misc_feature 1..768: note = Description of Artificial Sequence: Synthetic coding sequence
  source 1..768: mol_type = other DNA
atggtgtggaagtggatgcccctgctgctgctgctggtgtgcgtggccaccatgtgcagcgcccaggacagaaccgacctgctgaacgtgtgcatggacgccaagcaccacaagaccaagcccggccccgaggacaagctgcacgaccagtgcagcccctggaagaagaacgcctgctgcaccgccagcaccagccaggagctgcacaaggacaccagcagactgtacaacttcaactgggaccactgcggcaagatggagcccgcctgcaagagacacttcatccaggacacctgcctgtacgagtgcagccccaacctgggcccctggatccagcaggtgaaccagagctggagaaaggagagattcctggacgtgcccctgtgcaaggaggactgccagagatggtgggaggactgccacaccagccacacctgcaagagcaactggcacagaggctgggactggaccagcggcgtgaacaagtgccccgccggcgccctgtgcagaaccttcgagagctacttccccacccccgccgccctgtgcgagggcctgtggagccacagctacaaggtgagcaactacagcagaggcagcggcagatgcatccagatgtggttcgacagcgcccagggcaaccccaacgaggaggtggccagattctacgccgccgccatgcacgtgaacgccggcgagatgctgcacggcaccggcggcctgctgctgagcctggccctgatgctgcagctgtggctgctgggctag

SEQ ID NO: 81894 - DNA, 729 bp, synthetic construct
  misc_feature 1..729: note = Description of Artificial Sequence: Synthetic coding sequence
  source 1..729: mol_type = other DNA
atgctgcccgccgccaccgaggtgcagctgagactgcagggccagaaggacatggtgtggaagtggatgcccctgctgctgctgctggtgtgcgtggccaccatgtgcagcgcccaggacagaaccgacctgctgaacgtgtgcatggacgccaagcaccacaagaccaagcccggccccgaggacaagctgcacgaccagtgcagcccctggaagaagaacgcctgctgcaccgccagcaccagccaggagctgcacaaggacaccagcagactgtacaacttcaactgggaccactgcggcaagatggagcccgcctgcgccaccagcagcagaacccccgtgagcatgagcgcccaccccggcgccctggaccccgccggcgagagcgagctggccaagaacgccagctggatgtgcccctacgccaagagaaccgtgagcgccggcggcagaatcgtgaccccccccaccagagccagagccaccggcaccgaggacggcaccggcccccaggagctgaccagcgcccagctgggcctgagcgccgcccccctgagccccaccagccccctgcagctgcccttcgtgaaggccagcggcgtgacccacaccagaagcgccaccaccgccgagggcgccgccgccgccagcagatgcggcctgatccagcccagagccacccccaccagaaagtggagaggcagcatgctgcagccctgcatgtag

SEQ ID NO: 81895 - DNA, 516 bp, synthetic construct
  misc_feature 1..516: note = Description of Artificial Sequence: Synthetic coding sequence
  source 1..516: mol_type = other DNA
atggtgtggaagtggatgcccctgctgctgctgctggtgtgcgtggccaccatgtgcagcgcccaggacagaaccgacctgctgaacgtgtgcatggacgccaagcaccacaagaccaagcccggccccgaggacaagctgcacgaccagtgcagcccctggaagaagaacgcctgctgcaccgccagcaccagccaggagctgcacaaggacaccagcagactgtacaacttcaactgggaccactgcggcaagatggagcccgcctgcaagagacacttcatccaggacacctgcctgtacgagtgcagccccaacctgggcccctggatccagcaggtgaaccagagctggagaaaggagagattcctggacgtgcccctgtgcaaggaggactgccagagatggtgggaggactgccacaccagccacacctgcaagagcaactggcacagaggctgggactggaccagcggcgtgaacaagtgccccgccggcgccctgtgcagaacctag

SEQ ID NO: 81896 - DNA, 2010 bp, synthetic construct
  misc_feature 1..2010: note = Description of Artificial Sequence: Synthetic coding sequence
  source 1..2010: mol_type = other DNA
atggccctgctgctggtgagcctgctggccttcctgagcctgggcagcggctgccaccacagaatctgccactgcagcaacagagtgttcctgtgccaggagagcaaggtgaccgagatccccagcgacctgcccagaaacgccatcgagctgagattcgtgctgaccaagctgagagtgatccagaagggcgccttcagcggcttcggcgacctggagaagatcgagatcagccagaacgacgtgctggaggtgatcgaggccgacgtgttcagcaacctgcccaagctgcacgagatcagaatcgagaaggccaacaacctgctgtacatcaaccccgaggccttccagaacctgcccaacctgcagtacctgctgatcagcaacaccggcatcaagcacctgcccgacgtgcacaagatccacagcctgcagaaggtgctgctgtggctgaacaagaacggcatccaggagatccacaactgcgccttcaacggcacccagctggacgagctgaacctgagcgacaacaacaacctggaggagctgcccaacgacgtgttccacggcgccagcggccccgtgatcctggacatcagcagaaccagaatccacagcctgcccagctacggcctggagaacctgaagaagctgagagccagaagcacctacaacctgaagaagctgcccaccctggagaagctggtggccctgatggaggccagcctgacctaccccagccactgctgcgccttcgccaactggagaagacagatcagcgagctgcaccccatctgcaacaagagcatcctgagacaggaggtggactacatgacccaggccagaggccagagaagcagcctggccgaggacaacgagagcagctacagcagaggcttcgacatgacctacaccgagttcgactacgacctgtgcaacgaggtggtggacgtgacctgcagccccaagcccgacgccttcaacccctgcgaggacatcatgggctacaacatcctgagagtgctgatctggttcatcagcatcctggccatcaccggcaacatcatcgtgctggtgatcctgaccaccagccagtacaagctgaccgtgcccagattcctgatgtgcaacctggccttcgccgacctgtgcatcggcatctacctgctgctgatcgccagcgtggacatccacaccaagagccagtaccacaactacgccatcgactggcagaccggcgccggctgcgacgccgccggcttcttcaccgtgttcgccagcgagctgagcgtgtacaccctgaccgccatcaccctggagagatggcacaccatcacccacgccatgcagctggactgcaaggtgcagctgagacacgccgccagcgtgatggtgatgggctggatcttcgccttcgccgccgccctgttccccatcttcggcatcagcagctacatgaaggtgagcatctgcctgcccatggacatcgacagccccctgagccagctgtacgtgatgagcctgctggtgctgaacgtgctggccttcgtggtgatctgcggctgctacatccacatctacctgaccgtgagaaaccccaacatcgtgagcagcagcagcgacaccagaatcgccaagagaatggccatgctgatcttcaccgacttcctgtgcatggcccccatcagcttcttcgccatcagcgccagcctgaaggtgcccctgatcaccgtgagcaaggccaagatcctgctggtgctgttccaccccatcaacagctgcgccaaccccttcctgtacgccatcttcaccaagaacttcagaagagacttcttcatcctgctgagcaagtgcggctgctacgagatgcaggcccagatctacagaaccgagaccagcagcaccgtgcacaacacccaccccagaaacggccactgcagcagcgcccccagagtgaccagcggcagcacctacatcctggtgcccctgagccacctggcccagaactag

SEQ ID NO: 81897 - DNA, 1902 bp, synthetic construct
  misc_feature 1..1902: note = Description of Artificial Sequence: Synthetic coding sequence
  source 1..1902: mol_type = other DNA
atggccctgctgctggtgagcctgctggccttcctgagcctgggcagcggctgccaccacagaatctgccactgcagcaacagagtgttcctgtgccaggagagcaaggtgaccgagatccccagcgacctgcccagaaacgccatcgagctgagattcgtgctgaccaagctgagagtgatccagaagggcgccttcagcggcttcggcgacctggagaagatcgagatcagccagaacgacgtgctggaggtgatcgaggccgacgtgttcagcaacctgcccaagctgcacgagatcagaatcgagaaggccaacaacctgctgtacatcaaccccgaggccttccagaacctgcccaacctgcagtacctgctgatcagcaacaccggcatcaagcacctgcccgacgtgcacaagatccacagcctgcagaaggtgctgctggacatccaggacaacatcaacatccacaccatcgagagaaacagcttcgtgggcctgagcttcgagagcgtgatcctgtggctgaacaagaacggcatccaggagatccacaactgcgccttcaacggcacccagctggacgagctgaacctgagcgacaacaacaacctggaggagctgcccaacgacgtgttccacggcgccagcggccccgtgatcctgagcgagctgcaccccatctgcaacaagagcatcctgagacaggaggtggactacatgacccaggccagaggccagagaagcagcctggccgaggacaacgagagcagctacagcagaggcttcgacatgacctacaccgagttcgactacgacctgtgcaacgaggtggtggacgtgacctgcagccccaagcccgacgccttcaacccctgcgaggacatcatgggctacaacatcctgagagtgctgatctggttcatcagcatcctggccatcaccggcaacatcatcgtgctggtgatcctgaccaccagccagtacaagctgaccgtgcccagattcctgatgtgcaacctggccttcgccgacctgtgcatcggcatctacctgctgctgatcgccagcgtggacatccacaccaagagccagtaccacaactacgccatcgactggcagaccggcgccggctgcgacgccgccggcttcttcaccgtgttcgccagcgagctgagcgtgtacaccctgaccgccatcaccctggagagatggcacaccatcacccacgccatgcagctggactgcaaggtgcagctgagacacgccgccagcgtgatggtgatgggctggatcttcgccttcgccgccgccctgttccccatcttcggcatcagcagctacatgaaggtgagcatctgcctgcccatggacatcgacagccccctgagccagctgtacgtgatgagcctgctggtgctgaacgtgctggccttcgtggtgatctgcggctgctacatccacatctacctgaccgtgagaaaccccaacatcgtgagcagcagcagcgacaccagaatcgccaagagaatggccatgctgatcttcaccgacttcctgtgcatggcccccatcagcttcttcgccatcagcgccagcctgaaggtgcccctgatcaccgtgagcaaggccaagatcctgctggtgctgttccaccccatcaacagctgcgccaaccccttcctgtacgccatcttcaccaagaacttcagaagagacttcttcatcctgctgagcaagtgcggctgctacgagatgcaggcccagatctacagaaccgagaccagcagcaccgtgcacaacacccaccccagaaacggccactgcagcagcgcccccagagtgaccagcggcagcacctacatcctggtgcccctgagccacctggcccagaactag

SEQ ID NO: 81898 - DNA, 2088 bp, synthetic construct
  misc_feature 1..2088: note = Description of Artificial Sequence: Synthetic coding sequence
  source 1..2088: mol_type = other DNA
atggccctgctgctggtgagcctgctggccttcctgagcctgggcagcggctgccaccacagaatctgccactgcagcaacagagtgttcctgtgccaggagagcaaggtgaccgagatccccagcgacctgcccagaaacgccatcgagctgagattcgtgctgaccaagctgagagtgatccagaagggcgccttcagcggcttcggcgacctggagaagatcgagatcagccagaacgacgtgctggaggtgatcgaggccgacgtgttcagcaacctgcccaagctgcacgagatcagaatcgagaaggccaacaacctgctgtacatcaaccccgaggccttccagaacctgcccaacctgcagtacctgctgatcagcaacaccggcatcaagcacctgcccgacgtgcacaagatccacagcctgcagaaggtgctgctggacatccaggacaacatcaacatccacaccatcgagagaaacagcttcgtgggcctgagcttcgagagcgtgatcctgtggctgaacaagaacggcatccaggagatccacaactgcgccttcaacggcacccagctggacgagctgaacctgagcgacaacaacaacctggaggagctgcccaacgacgtgttccacggcgccagcggccccgtgatcctggacatcagcagaaccagaatccacagcctgcccagctacggcctggagaacctgaagaagctgagagccagaagcacctacaacctgaagaagctgcccaccctggagaagctggtggccctgatggaggccagcctgacctaccccagccactgctgcgccttcgccaactggagaagacagatcagcgagctgcaccccatctgcaacaagagcatcctgagacaggaggtggactacatgacccaggccagaggccagagaagcagcctggccgaggacaacgagagcagctacagcagaggcttcgacatgacctacaccgagttcgactacgacctgtgcaacgaggtggtggacgtgacctgcagccccaagcccgacgccttcaacccctgcgaggacatcatgggctacaacatcctgagagtgctgatctggttcatcagcatcctggccatcaccggcaacatcatcgtgctggtgatcctgaccaccagccagtacaagctgaccgtgcccagattcctgatgtgcaacctggccttcgccgacctgtgcatcggcatctacctgctgctgatcgccagcgtggacatccacaccaagagccagtaccacaactacgccatcgactggcagaccggcgccggctgcgacgccgccggcttcttcaccgtgttcgccagcgagctgagcgtgtacaccctgaccgccatcaccctggagagatggcacaccatcacccacgccatgcagctggactgcaaggtgcagctgagacacgccgccagcgtgatggtgatgggctggatcttcgccttcgccgccgccctgttccccatcttcggcatcagcagctacatgaaggtgagcatctgcctgcccatggacatcgacagccccctgagccagctgtacgtgatgagcctgctggtgctgaacgtgctggccttcgtggtgatctgcggctgctacatccacatctacctgaccgtgagaaaccccaacatcgtgagcagcagcagcgacaccagaatcgccaagagaatggccatgctgatcttcaccgacttcctgtgcatggcccccatcagcttcttcgccatcagcgccagcctgaaggtgcccctgatcaccgtgagcaaggccaagatcctgctggtgctgttccaccccatcaacagctgcgccaaccccttcctgtacgccatcttcaccaagaacttcagaagagacttcttcatcctgctgagcaagtgcggctgctacgagatgcaggcccagatctacagaaccgagaccagcagcaccgtgcacaacacccaccccagaaacggccactgcagcagcgcccccagagtgaccagcggcagcacctacatcctggtgcccctgagccacctggcccagaactag

SEQ ID NO: 81899 - DNA, 1296 bp, synthetic construct
  misc_feature 1..1296: note = Description of Artificial Sequence: Synthetic coding sequence
  source 1..1296: mol_type = other DNA
atggaggccagcctgacctaccccagccactgctgcgccttcgccaactggagaagacagatcagcgagctgcaccccatctgcaacaagagcatcctgagacaggaggtggactacatgacccaggccagaggccagagaagcagcctggccgaggacaacgagagcagctacagcagaggcttcgacatgacctacaccgagttcgactacgacctgtgcaacgaggtggtggacgtgacctgcagccccaagcccgacgccttcaacccctgcgaggacatcatgggctacaacatcctgagagtgctgatctggttcatcagcatcctggccatcaccggcaacatcatcgtgctggtgatcctgaccaccagccagtacaagctgaccgtgcccagattcctgatgtgcaacctggccttcgccgacctgtgcatcggcatctacctgctgctgatcgccagcgtggacatccacaccaagagccagtaccacaactacgccatcgactggcagaccggcgccggctgcgacgccgccggcttcttcaccgtgttcgccagcgagctgagcgtgtacaccctgaccgccatcaccctggagagatggcacaccatcacccacgccatgcagctggactgcaaggtgcagctgagacacgccgccagcgtgatggtgatgggctggatcttcgccttcgccgccgccctgttccccatcttcggcatcagcagctacatgaaggtgagcatctgcctgcccatggacatcgacagccccctgagccagctgtacgtgatgagcctgctggtgctgaacgtgctggccttcgtggtgatctgcggctgctacatccacatctacctgaccgtgagaaaccccaacatcgtgagcagcagcagcgacaccagaatcgccaagagaatggccatgctgatcttcaccgacttcctgtgcatggcccccatcagcttcttcgccatcagcgccagcctgaaggtgcccctgatcaccgtgagcaaggccaagatcctgctggtgctgttccaccccatcaacagctgcgccaaccccttcctgtacgccatcttcaccaagaacttcagaagagacttcttcatcctgctgagcaagtgcggctgctacgagatgcaggcccagatctacagaaccgagaccagcagcaccgtgcacaacacccaccccagaaacggccactgcagcagcgcccccagagtgaccagcggcagcacctacatcctggtgcccctgagccacctggcccagaactag

SEQ ID NO: 81900 - DNA, 3417 bp, synthetic construct
  misc_feature 1..3417: note = Description of Artificial Sequence: Synthetic coding sequence
  source 1..3417: mol_type = other DNA
atggcccccaccctgttccagaagctgttcagcaagagaaccggcctgggcgcccccggcagagacgccagagaccccgactgcggcttcagctggcccctgcccgagttcgaccccagccagatcagactgatcgtgtaccaggactgcgagagaagaggcagaaacgtgctgttcgacagcagcgtgaagagaagaaacgaggacatcagcgtgagcaagctgggcagcgacgcccaggtgaaggtgttcggcaagtgctgccagctgaagcccggcggcgacagcagcagcagcctggacagcagcgtgaccagcagcagcgacatcaaggaccagtgcctgaagtaccagggcagcagatgcagcagcgacgccaacatgctgggcgagatgatgttcggcagcgtggccatgagctacaagggcagcaccctgaagatccaccagatcagaagccccccccagctgatgctgagcaaggtgttcaccgccagaaccggcagcagcatctgcggcagcctgaacaccctgcaggacagcctggagttcatcaaccaggacaacaacaccctgaaggccgacaacaacaccgtgatcaacggcctgctgggcaacatcgtgcacagcaaccccatggacatgcccggcagagagctgaacgaggacagagacagcggcatcgccagaagcgccagcctgagcagcctgctgatcacccccttccccagccccaacagcagcctgaccagaagctgcgccagcagctaccagagaagatggagaagaagccagaccaccagcctggagaacggcgtgttccccagatggagcatcgaggagagcttcaacctgagcgacgagagctgcggccccaaccccggcatcgtgagaaagaagaagatcgccatcggcgtgatcttcagcctgagcaaggacgaggacgagaacaacaagttcaacgagttcttcttcagccacttccccctgttcgagagccacatgaacaagctgaagagcgccatcgagcaggccatgaagatgagcagaagaagcgccgacgccagccagagaagcctggcctacaacagaatcgtggacgccctgaacgagttcagaaccaccatctgcaacctgtacaccatgcccagaatcggcgagcccgtgtggctgaccatgatgagcggcacccccgagaagaaccacctgtgctacagattcatgaaggagttcaccttcctgatggagaacgccagcaagaaccagttcctgcccgccctgatcaccgccgtgctgaccaaccacctggcctgggtgcccaccgtgatgcccaacggccagccccccatcaagatcttcctggagaagcacagcagccagagcgtggacatgctggccaagacccacccctacaaccccctgtgggcccagctgggcgacctgtacggcgccatcggcagccccgtgagactggccagaaccgtggtggtgggcaagagacaggacatggtgcagagactgctgtacttcctgacctacttcatcagatgcagcgagctgcaggagacccacctgctggagaacggcgaggacgaggccatcgtgatgcccggcaccgtgatcaccaccaccctggagaagggcgagatcgaggagagcgagtacgtgctggtgaccatgcacagaaacaagagcagcctgctgttcaaggagagcgaggagatcagaacccccaactgcaactgcaagtactgcagccaccccctgctgggccagaacgtggagaacatcagccagcaggagagagaggacatccagaacagcagcaaggagctgctgggcatcagcgacgagtgccagatgatcagccccagcgactgccaggaggagaacgccgtggacgtgaagcagtacagagacaagctgagaacctgcttcgacgccaagctggagaccgtggtgtgcaccggcagcgtgcccgtggacaagtgcgccctgagcgagagcggcctggagagcaccgaggagacctggcagagcgagaagctgctggacagcgacagccacaccggcaaggccatgagaagcaccggcatggtggtggagaagaagccccccgacaagatcgtgcccgccagcttcagctgcgaggccgcccagaccaaggtgaccttcctgatcggcgacagcatgagccccgacagcgacaccgagctgagaagccaggccgtggtggaccagatcaccagacaccacaccaagcccctgaaggaggagagaggcgccatcgaccagcaccaggagaccaagcagaccaccaaggaccagagcggcgagagcgacacccagaacatggtgagcgaggagccctgcgagctgccctgctggaaccacagcgaccccgagagcatgagcctgttcgacgagtacttcaacgacgacagcatcgagaccagaaccatcgacgacgtgcccttcaagaccagcaccgacagcaaggaccactgctgcatgctggagttcagcaagatcctgtgcaccaagaacaacaagcagaacaacgagttctgcaagtgcatcgagaccgtgccccaggacagctgcaagacctgcttcccccagcaggaccagagagacaccctgagcatcctggtgccccacggcgacaaggagagcagcgacaagaagatcgccgtgggcaccgagtgggacatccccagaaacgagagcagcgacagcgccctgggcgacagcgagagcgaggacaccggccacgacatgaccagacaggtgagcagctactacggcggcgagcaggaggactgggccgaggaggacgagatccccttccccggcagcaagctgatcgaggtgagcgccgtgcagcccaacatcgccaacttcggcagaagcctgctgggcggctactgcagcagctacgtgcccgacttcgtgctgcagggcatcggcagcgacgagagattcagacagtgcctgatgagcgacctgagccacgccgtgcagcaccccgtgctggacgagcccatcgccgaggccgtgtgcatcatcgccgacatggacaagtggaccgtgcaggtggccagcagccagagaagagtgaccgacaacaagctgggcaaggaggtgctggtgagcagcctggtgagcaacctgctgcacagcaccctgcagctgtacaagcacaacctgagccccaacttctgcgtgatgcacctggaggacagactgcaggagctgtacttcaagagcaagatgctgagcgagtacctgagaggccagatgagagtgcacgtgaaggagctgggcgtggtgctgggcatcgagagcagcgacctgcccctgctggccgccgtggccagcacccacagcccctacgtggcccagatcctgctgtag

SEQ ID NO: 81901 - DNA, 3501 bp, synthetic construct
  misc_feature 1..3501: note = Description of Artificial Sequence: Synthetic coding sequence
  source 1..3501: mol_type = other DNA
atggcccccaccctgttccagaagctgttcagcaagagaaccggcctgggcgcccccggcagagacgccagagaccccgactgcggcttcagctggcccctgcccgagttcgaccccagccagatcagactgatcgtgtaccaggactgcgagagaagaggcagaaacgtgctgttcgacagcagcgtgaagagaagaaacgaggacatcagcgtgagcaagctgggcagcgacgcccaggtgaaggtgttcggcaagtgctgccagctgaagcccggcggcgacagcagcagcagcctggacagcagcgtgaccagcagcagcgacatcaaggaccagtgcctgaagtaccagggcagcagatgcagcagcgacgccaacatgctgggcgagatgatgttcggcagcgtggccatgagctacaagggcagcaccctgaagatccaccagatcagaagccccccccagctgatgctgagcaaggtgttcaccgccagaaccggcagcagcatctgcggcagcctgaacaccctgcaggacagcctggagttcatcaaccaggacaacaacaccctgaaggccgacaacaacaccgtgatcaacggcctgctgggcaacatcggcctgagccagttctgcagccccagaagagccttcagcgagcagggccccctgagactgatcagaagcgccagcttcttcgccgtgcacagcaaccccatggacatgcccggcagagagctgaacgaggacagagacagcggcatcgccagaagcgccagcctgagcagcctgctgatcacccccttccccagccccaacagcagcctgaccagaagctgcgccagcagctaccagagaagatggagaagaagccagaccaccagcctggagaacggcgtgttccccagatggagcatcgaggagagcttcaacctgagcgacgagagctgcggccccaaccccggcatcgtgagaaagaagaagatcgccatcggcgtgatcttcagcctgagcaaggacgaggacgagaacaacaagttcaacgagttcttcttcagccacttccccctgttcgagagccacatgaacaagctgaagagcgccatcgagcaggccatgaagatgagcagaagaagcgccgacgccagccagagaagcctggcctacaacagaatcgtggacgccctgaacgagttcagaaccaccatctgcaacctgtacaccatgcccagaatcggcgagcccgtgtggctgaccatgatgagcggcacccccgagaagaaccacctgtgctacagattcatgaaggagttcaccttcctgatggagaacgccagcaagaaccagttcctgcccgccctgatcaccgccgtgctgaccaaccacctggcctgggtgcccaccgtgatgcccaacggccagccccccatcaagatcttcctggagaagcacagcagccagagcgtggacatgctggccaagacccacccctacaaccccctgtgggcccagctgggcgacctgtacggcgccatcggcagccccgtgagactggccagaaccgtggtggtgggcaagagacaggacatggtgcagagactgctgtacttcctgacctacttcatcagatgcagcgagctgcaggagacccacctgctggagaacggcgaggacgaggccatcgtgatgcccggcaccgtgatcaccaccaccctggagaagggcgagatcgaggagagcgagtacgtgctggtgaccatgcacagaaacaagagcagcctgctgttcaaggagagcgaggagatcagaacccccaactgcaactgcaagtactgcagccaccccctgctgggccagaacgtggagaacatcagccagcaggagagagaggacatccagaacagcagcaaggagctgctgggcatcagcgacgagtgccagatgatcagccccagcgactgccaggaggagaacgccgtggacgtgaagcagtacagagacaagctgagaacctgcttcgacgccaagctggagaccgtggtgtgcaccggcagcgtgcccgtggacaagtgcgccctgagcgagagcggcctggagagcaccgaggagacctggcagagcgagaagctgctggacagcgacagccacaccggcaaggccatgagaagcaccggcatggtggtggagaagaagccccccgacaagatcgtgcccgccagcttcagctgcgaggccgcccagaccaaggtgaccttcctgatcggcgacagcatgagccccgacagcgacaccgagctgagaagccaggccgtggtggaccagatcaccagacaccacaccaagcccctgaaggaggagagaggcgccatcgaccagcaccaggagaccaagcagaccaccaaggaccagagcggcgagagcgacacccagaacatggtgagcgaggagccctgcgagctgccctgctggaaccacagcgaccccgagagcatgagcctgttcgacgagtacttcaacgacgacagcatcgagaccagaaccatcgacgacgtgcccttcaagaccagcaccgacagcaaggaccactgctgcatgctggagttcagcaagatcctgtgcaccaagaacaacaagcagaacaacgagttctgcaagtgcatcgagaccgtgccccaggacagctgcaagacctgcttcccccagcaggaccagagagacaccctgagcatcctggtgccccacggcgacaaggagagcagcgacaagaagatcgccgtgggcaccgagtgggacatccccagaaacgagagcagcgacagcgccctgggcgacagcgagagcgaggacaccggccacgacatgaccagacaggtgagcagctactacggcggcgagcaggaggactgggccgaggaggacgagatccccttccccggcagcaagctgatcgaggtgagcgccgtgcagcccaacatcgccaacttcggcagaagcctgctgggcggctactgcagcagctacgtgcccgacttcgtgctgcagggcatcggcagcgacgagagattcagacagtgcctgatgagcgacctgagccacgccgtgcagcaccccgtgctggacgagcccatcgccgaggccgtgtgcatcatcgccgacatggacaagtggaccgtgcaggtggccagcagccagagaagagtgaccgacaacaagctgggcaaggaggtgctggtgagcagcctggtgagcaacctgctgcacagcaccctgcagctgtacaagcacaacctgagccccaacttctgcgtgatgcacctggaggacagactgcaggagctgtacttcaagagcaagatgctgagcgagtacctgagaggccagatgagagtgcacgtgaaggagctgggcgtggtgctgggcatcgagagcagcgacctgcccctgctggccgccgtggccagcacccacagcccctacgtggcccagatcctgctgtag

SEQ ID NO: 81902 - DNA, 1527 bp, synthetic construct
  misc_feature 1..1527: note = Description of Artificial Sequence: Synthetic coding sequence
  source 1..1527: mol_type = other DNA
atggcccccaccctgttccagaagctgttcagcaagagaaccggcctgggcgcccccggcagagacgccagagaccccgactgcggcttcagctggcccctgcccgagttcgaccccagccagatcagactgatcgtgtaccaggactgcgagagaagaggcagaaacgtgctgttcgacagcagcgtgaagagaagaaacgaggacatcagcgtgagcaagctgggcagcgacgcccaggtgaaggtgttcggcaagtgctgccagctgaagcccggcggcgacagcagcagcagcctggacagcagcgtgaccagcagcagcgacatcaaggaccagtgcctgaagtaccagggcagcagatgcagcagcgacgccaacatgctgggcgagatgatgttcggcagcgtggccatgagctacaagggcagcaccctgaagatccaccagatcagaagccccccccagctgatgctgagcaaggtgttcaccgccagaaccggcagcagcatctgcggcagcctgaacaccctgcaggacagcctggagttcatcaaccaggacaacaacaccctgaaggccgacaacaacaccgtgatcaacggcctgctgggcaacatcggcctgagccagttctgcagccccagaagagccttcagcgagcagggccccctgagactgatcagaagcgccagcttcttcgccgtgcacagcaaccccatggacatgcccggcagagagctgaacgaggacagagacagcggcatcgccagaagcgccagcctgagcagcctgctgatcacccccttccccagccccaacagcagcctgaccagaagctgcgccagcagctaccagagaagatggagaagaagccagaccaccagcctggagaacggcgtgttccccagatggagcatcgaggagagcttcaacctgagcgacgagagctgcggccccaaccccggcatcgtgagaaagaagaagatcgccatcggcgtgatcttcagcctgagcaaggacgaggacgagaacaacaagttcaacgagttcttcttcagccacttccccctgttcgagagccacatgaacaagctgaagagcgccatcgagcaggccatgaagatgagcagaagaagcgccgacgccagccagagaagcctggcctacaacagaatcgtggacgccctgaacgagttcagaaccaccatctgcaacctgtacaccatgcccagaatcggcgagcccgtgtggctgaccatgatgagcggcacccccgagaagaaccacctgtgctacagattcatgaaggagttcaccttcctgatggagaacgccagcaagaaccagttcctgcccgccctgatcaccgccgtgctgaccaaccacctggcctgggtgcccaccgtgatgcccaacggccagccccccatcaagatcttcctggagaagcacagcagccagagcgtggacatgctggccaagacccacccctacaaccccctgtgggcccagctgggcatgtag

SEQ ID NO: 81903 - DNA, 2757 bp, synthetic construct
  misc_feature 1..2757: note = Description of Artificial Sequence: Synthetic coding sequence
  source 1..2757: mol_type = other DNA
atggacatgcccggcagagagctgaacgaggacagagacagcggcatcgccagaagcgccagcctgagcagcctgctgatcacccccttccccagccccaacagcagcctgaccagaagctgcgccagcagctaccagagaagatggagaagaagccagaccaccagcctggagaacggcgtgttccccagatggagcatcgaggagagcttcaacctgagcgacgagagctgcggccccaaccccggcatcgtgagaaagaagaagatcgccatcggcgtgatcttcagcctgagcaaggacgaggacgagaacaacaagttcaacgagttcttcttcagccacttccccctgttcgagagccacatgaacaagctgaagagcgccatcgagcaggccatgaagatgagcagaagaagcgccgacgccagccagagaagcctggcctacaacagaatcgtggacgccctgaacgagttcagaaccaccatctgcaacctgtacaccatgcccagaatcggcgagcccgtgtggctgaccatgatgagcggcacccccgagaagaaccacctgtgctacagattcatgaaggagttcaccttcctgatggagaacgccagcaagaaccagttcctgcccgccctgatcaccgccgtgctgaccaaccacctggcctgggtgcccaccgtgatgcccaacggccagccccccatcaagatcttcctggagaagcacagcagccagagcgtggacatgctggccaagacccacccctacaaccccctgtgggcccagctgggcgacctgtacggcgccatcggcagccccgtgagactggccagaaccgtggtggtgggcaagagacaggacatggtgcagagactgctgtacttcctgacctacttcatcagatgcagcgagctgcaggagacccacctgctggagaacggcgaggacgaggccatcgtgatgcccggcaccgtgatcaccaccaccctggagaagggcgagatcgaggagagcgagtacgtgctggtgctgctgttcaaggagagcgaggagatcagaacccccaactgcaactgcaagtactgcagccaccccctgctgggccagaacgtggagaacatcagccagcaggagagagaggacatccagaacagcagcaaggagctgctgggcatcagcgacgagtgccagatgatcagccccagcgactgccaggaggagaacgccgtggacgtgaagcagtacagagacaagctgagaacctgcttcgacgccaagctggagaccgtggtgtgcaccggcagcgtgcccgtggacaagtgcgccctgagcgagagcggcctggagagcaccgaggagacctggcagagcgagaagctgctggacagcgacagccacaccggcaaggccatgagaagcaccggcatggtggtggagaagaagccccccgacaagatcgtgcccgccagcttcagctgcgaggccgcccagaccaaggtgaccttcctgatcggcgacagcatgagccccgacagcgacaccgagctgagaagccaggccgtggtggaccagatcaccagacaccacaccaagcccctgaaggaggagagaggcgccatcgaccagcaccaggagaccaagcagaccaccaaggaccagagcggcgagagcgacacccagaacatggtgagcgaggagccctgcgagctgccctgctggaaccacagcgaccccgagagcatgagcctgttcgacgagtacttcaacgacgacagcatcgagaccagaaccatcgacgacgtgcccttcaagaccagcaccgacagcaaggaccactgctgcatgctggagttcagcaagatcctgtgcaccaagaacaacaagcagaacaacgagttctgcaagtgcatcgagaccgtgccccaggacagctgcaagacctgcttcccccagcaggaccagagagacaccctgagcatcctggtgccccacggcgacaaggagagcagcgacaagaagatcgccgtgggcaccgagtgggacatccccagaaacgagagcagcgacagcgccctgggcgacagcgagagcgaggacaccggccacgacatgaccagacaggtgagcagctactacggcggcgagcaggaggactgggccgaggaggacgagatccccttccccggcagcaagctgatcgaggtgagcgccgtgcagcccaacatcgccaacttcggcagaagcctgctgggcggctactgcagcagctacgtgcccgacttcgtgctgcagggcatcggcagcgacgagagattcagacagtgcctgatgagcgacctgagccacgccgtgcagcaccccgtgctggacgagcccatcgccgaggccgtgtgcatcatcgccgacatggacaagtggaccgtgcaggtggccagcagccagagaagagtgaccgacaacaagctgggcaaggaggtgctggtgagcagcctggtgagcaacctgctgcacagcaccctgcagctgtacaagcacaacctgagccccaacttctgcgtgatgcacctggaggacagactgcaggagctgtacttcaagagcaagatgctgagcgagtacctgagaggccagatgagagtgcacgtgaaggagctgggcgtggtgctgggcatcgagagcagcgacctgcccctgctggccgccgtggccagcacccacagcccctacgtggcccagatcctgctgtag

SEQ ID NO: 81904 - DNA, 3345 bp, synthetic construct
  misc_feature 1..3345: note = Description of Artificial Sequence: Synthetic coding sequence
  source 1..3345: mol_type = other DNA
atggcccccaccctgctgcagaagctgttcaacaagagaggcagcagcggcagcagcgccgccgccagcgcccagggcagagcccccaaggagggccccgccttcagctggagctgcagcgagttcgacctgaacgagatcagactgatcgtgtaccaggactgcgacagaagaggcagacaggtgctgttcgacagcaaggccgtgcagaagatcgaggaggtgaccgcccagaagaccgaggacgtgcccatcaagatcagcgccaagtgctgccagggcagcagcagcgtgagcagcagcagcagcagcagcatcagcagccacagcagcagcggcggcagcagccaccacgccaaggagcagctgcccaagtaccagtacaccagacccgccagcgacgtgaacatgctgggcgagatgatgttcggcagcgtggccatgagctacaagggcagcaccctgaagatccactacatcagaagccccccccagctgatgatcagcaaggtgttcagcgccagaatgggcagcttctgcggcagcaccaacaacctgcaggacagcttcgagtacatcaaccaggaccccaacctgggcaagctgaacaccaaccagaacagcctgggcccctgcagaaccggcagcaacctggcccacagcacccccgtggacatgcccagcagaggccagaacgaggacagagacagcggcatcgccagaagcgccagcctgagcagcctgctgatcacccccttccccagccccagcagcagcaccagcagcagcagcagctaccagagaagatggctgagaagccagaccaccagcctggagaacggcatcatccccagaagaagcaccgacgagaccttcagcctggccgaggagacctgcagcagcaaccccgccatggtgagaagaaagaagatcgccatcagcatcatcttcagcctgtgcgagaaggaggaggcccagagaaacttccaggacttcttcttcagccacttccccctgttcgagagccacatgaacagactgaagagcgccatcgagaaggccatgatcagctgcagaaagatcgccgagagcagcctgagagtgcagttctacgtgagcagactgatggaggccctgggcgagttcagaggcaccatctggaacctgtacagcgtgcccagaatcgccgagcccgtgtggctgaccatgatgagcggcaccctggagaagaaccagctgtgccagagattcctgaaggagttcaccctgctgatcgagcagatcaacaagaaccagttcttcgccgccctgctgaccgccgtgctgacctaccacctggcctgggtgcccaccgtgatgcccgtggaccacccccccatcaaggccttcagcgagaagagaaccagccagagcgtgaacatgctggccaagacccacccctacaaccccctgtgggcccagctgggcgacctgtacggcgccatcggcagccccgtgagactgaccagaaccgtggtggtgggcaagcagaaggacctggtgcagagaatcctgtacgtgctgacctacttcctgagatgcagcgagctgcaggagaaccagctgacctggagcggcaaccacggcgagggcgaccaggtgctgaacggcagcaagatcatcaccgccctggagaagggcgaggtggaggagagcgagtacgtggtgatcaccgtgagaaacgagcccgccctggtgccccccatcctgccccccaccgccgccgagagacacaacccctggcccaccggcttccccgagtgccccgagggcaccgacagcagagacctgggcctgaagcccgacaaggaggccaacagaagacccgagcagggcagcgaggcctgcagcgccggctgcctgggccccgccagcgacgccagctggaagccccagaacgccttctgcggcgacgagaagaacaaggaggccccccaggacggcagcagcagactgcccagctgcgaggtgctgggcgccggcatgaagatggaccagcaggccgtgtgcgagctgctgaaggtggagatgcccaccagactgcccgacagaagcgtggcctggccctgccccgacagacacctgagagagaagcccagcctggagaaggtgaccttccagatcggcagcttcgccagccccgagagcgacttcgagagcagaatgaagaagatggaggagagagtgaaggcctgcggccccagcctggaggccagcgaggccgccgacgtggcccaggacccccaggtgagcagaagccccttcaagcccggcttccaggagaacgtgtgctgcccccagaacagactgagcgagggcgacgagggcgagagcgacaagggcttcgccgaggacagaggcagcagaaacgacatggccgccgacatcgccggccagctgagccacgccgccgacctgggcaccgccagccacggcgccggcggcaccggcggcagaagactggaggccaccagaggcctgtacgtgaaggccgccgagggccccgtgctggagcccgtggcccccagatgcgtgcagagaggccccggcctggtggccggcgccaacatcccctgcggcgacgacaacaagaaggccaacttcagaaccgagggcgacatccccagaaacgagagcagcgacagcgccctgggcgacagcgacgacgaggcctgcgccagcgccatgctggacctgggccacggcggcgacagaaccggcggcagcctggaggtggagctgcccctgcccagaagccagagcatcagcacccagaacgtgagaaacttcggcagaagcctgctggccggctactgccccacctacatgcccgacctggtgctgcacggcaccggcagcgacgagaagctgaagcagtgcctggtggccgacctggtgcacaccgtgcaccaccccgtgctggacgagcccatcgccgaggccgtgtgcatcatcgccgacaccgacaagtggagcgtgcaggtggccaccagccagagaaaggtgaccgacaacatgaagctgggccaggacgtgctggtgagcagccaggtgagcagcctgctgcagagcatcctgcagctgtacaagctgcacctgcccgccgacttctgcatcatgcacctggaggacagactgcaggagatgtacctgaagagcaagatgctgagcgagtacctgagaggccacaccagagtgcacgtgaaggagctgggcgtggtgctgggcatcgagagcaacgacctgcccctgctgaccgccatcgccagcacccacagcccctacgtggcccagatcctgctgtag

SEQ ID NO: 81905 - DNA, 3414 bp, synthetic construct
  misc_feature 1..3414: note = Description of Artificial Sequence: Synthetic coding sequence
  source 1..3414: mol_type = other DNA
atgtgcggcggcaccgccaacaccaccaaccagcccgagagctggcaggacagcgccagatgcgtgagcgacgccgtgcccggcgccggcagaatctacagagccctgctgtgcaccaagatcaagaagcacaccggcgtggacagaagcaccgaccacaccgagctggacaacagctggagctgcagcgagttcgacctgaacgagatcagactgatcgtgtaccaggactgcgacagaagaggcagacaggtgctgttcgacagcaaggccgtgcagaagatcgaggaggtgaccgcccagaagaccgaggacgtgcccatcaagatcagcgccaagtgctgccagggcagcagcagcgtgagcagcagcagcagcagcagcatcagcagccacagcagcagcggcggcagcagccaccacgccaaggagcagctgcccaagtaccagtacaccagacccgccagcgacgtgaacatgctgggcgagatgatgttcggcagcgtggccatgagctacaagggcagcaccctgaagatccactacatcagaagccccccccagctgatgatcagcaaggtgttcagcgccagaatgggcagcttctgcggcagcaccaacaacctgcaggacagcttcgagtacatcaaccaggaccccaacctgggcaagctgaacaccaaccagaacagcctgggcccctgcagaaccggcagcaacctggcccacagcacccccgtggacatgcccagcagaggccagaacgaggacagagacagcggcatcgccagaagcgccagcctgagcagcctgctgatcacccccttccccagccccagcagcagcaccagcagcagcagcagctaccagagaagatggctgagaagccagaccaccagcctggagaacggcatcatccccagaagaagcaccgacgagaccttcagcctggccgaggagacctgcagcagcaaccccgccatggtgagaagaaagaagatcgccatcagcatcatcttcagcctgtgcgagaaggaggaggcccagagaaacttccaggacttcttcttcagccacttccccctgttcgagagccacatgaacagactgaagagcgccatcgagaaggccatgatcagctgcagaaagatcgccgagagcagcctgagagtgcagttctacgtgagcagactgatggaggccctgggcgagttcagaggcaccatctggaacctgtacagcgtgcccagaatcgccgagcccgtgtggctgaccatgatgagcggcaccctggagaagaaccagctgtgccagagattcctgaaggagttcaccctgctgatcgagcagatcaacaagaaccagttcttcgccgccctgctgaccgccgtgctgacctaccacctggcctgggtgcccaccgtgatgcccgtggaccacccccccatcaaggccttcagcgagaagagaaccagccagagcgtgaacatgctggccaagacccacccctacaaccccctgtgggcccagctgggcgacctgtacggcgccatcggcagccccgtgagactgaccagaaccgtggtggtgggcaagcagaaggacctggtgcagagaatcctgtacgtgctgacctacttcctgagatgcagcgagctgcaggagaaccagctgacctggagcggcaaccacggcgagggcgaccaggtgctgaacggcagcaagatcatcaccgccctggagaagggcgaggtggaggagagcgagtacgtggtgatcaccgtgagaaacgagcccgccctggtgccccccatcctgccccccaccgccgccgagagacacaacccctggcccaccggcttccccgagtgccccgagggcaccgacagcagagacctgggcctgaagcccgacaaggaggccaacagaagacccgagcagggcagcgaggcctgcagcgccggctgcctgggccccgccagcgacgccagctggaagccccagaacgccttctgcggcgacgagaagaacaaggaggccccccaggacggcagcagcagactgcccagctgcgaggtgctgggcgccggcatgaagatggaccagcaggccgtgtgcgagctgctgaaggtggagatgcccaccagactgcccgacagaagcgtggcctggccctgccccgacagacacctgagagagaagcccagcctggagaaggtgaccttccagatcggcagcttcgccagccccgagagcgacttcgagagcagaatgaagaagatggaggagagagtgaaggcctgcggccccagcctggaggccagcgaggccgccgacgtggcccaggacccccaggtgagcagaagccccttcaagcccggcttccaggagaacgtgtgctgcccccagaacagactgagcgagggcgacgagggcgagagcgacaagggcttcgccgaggacagaggcagcagaaacgacatggccgccgacatcgccggccagctgagccacgccgccgacctgggcaccgccagccacggcgccggcggcaccggcggcagaagactggaggccaccagaggcctgtacgtgaaggccgccgagggccccgtgctggagcccgtggcccccagatgcgtgcagagaggccccggcctggtggccggcgccaacatcccctgcggcgacgacaacaagaaggccaacttcagaaccgagggcgacatccccagaaacgagagcagcgacagcgccctgggcgacagcgacgacgaggcctgcgccagcgccatgctggacctgggccacggcggcgacagaaccggcggcagcctggaggtggagctgcccctgcccagaagccagagcatcagcacccagaacgtgagaaacttcggcagaagcctgctggccggctactgccccacctacatgcccgacctggtgctgcacggcaccggcagcgacgagaagctgaagcagtgcctggtggccgacctggtgcacaccgtgcaccaccccgtgctggacgagcccatcgccgaggccgtgtgcatcatcgccgacaccgacaagtggagcgtgcaggtggccaccagccagagaaaggtgaccgacaacatgaagctgggccaggacgtgctggtgagcagccaggtgagcagcctgctgcagagcatcctgcagctgtacaagctgcacctgcccgccgacttctgcatcatgcacctggaggacagactgcaggagatgtacctgaagagcaagatgctgagcgagtacctgagaggccacaccagagtgcacgtgaaggagctgggcgtggtgctgggcatcgagagcaacgacctgcccctgctgaccgccatcgccagcacccacagcccctacgtggcccagatcctgctgtag

SEQ ID NO: 81906 - DNA, 2022 bp, synthetic construct
  misc_feature 1..2022: note = Description of Artificial Sequence: Synthetic coding sequence
  source 1..2022: mol_type = other DNA
atgtgcggcggcaccgccaacaccaccaaccagcccgagagctggcaggacagcgccagatgcgtgagcgacgccgtgcccggcgccggcagaatctacagagccctgctgtgcaccaagatcaagaagcacaccggcgtggacagaagcaccgaccacaccgagctggacaacagctggagctgcagcgagttcgacctgaacgagatcagactgatcgtgtaccaggactgcgacagaagaggcagacaggtgctgttcgacagcaaggccgtgcagaagatcgaggaggtgaccgcccagaagaccgaggacgtgcccatcaagatcagcgccaagtgctgccagggcagcagcagcgtgagcagcagcagcagcagcagcatcagcagccacagcagcagcggcggcagcagccaccacgccaaggagcagctgcccaagtaccagtacaccagacccgccagcgacgtgaacatgctgggcgagatgatgttcggcagcgtggccatgagctacaagggcagcaccctgaagatccactacatcagaagccccccccagctgatgatcagcaaggtgttcagcgccagaatgggcagcttctgcggcagcaccaacaacctgcaggacagcttcgagtacatcaaccaggaccccaacctgggcaagctgaacaccaaccagaacagcctgggcccctgcagaaccggcagcaacctggcccacagcacccccgtggacatgcccagcagaggccagaacgaggacagagacagcggcatcgccagaagcgccagcctgagcagcctgctgatcacccccttccccagccccagcagcagcaccagcagcagcagcagctaccagagaagatggctgagaagccagaccaccagcctggagaacggcatcatccccagaagaagcaccgacgagaccttcagcctggccgaggagacctgcagcagcaaccccgccatggtgagaagaaagaagatcgccatcagcatcatcttcagcctgtgcgagaaggaggaggcccagagaaacttccaggacttcttcttcagccacttccccctgttcgagagccacatgaacagactgaagagcgccatcgagaaggccatgatcagctgcagaaagatcgccgagagcagcctgagagtgcagttctacgtgagcagactgatggaggccctgggcgagttcagaggcaccatctggaacctgtacagcgtgcccagaatcgccgagcccgtgtggctgaccatgatgagcggcaccctggagaagaaccagctgtgccagagattcctgaaggagttcaccctgctgatcgagcagatcaacaagaaccagttcttcgccgccctgctgaccgccgtgctgacctaccacctggcctgggtgcccaccgtgatgcccgtggaccacccccccatcaaggccttcagcgagaagagaaccagccagagcgtgaacatgctggccaagacccacccctacaaccccctgtgggcccagctgggcgacctgtacggcgccatcggcagccccgtgagactgaccagaaccgtggtggtgggcaagcagaaggacctggtgcagagaatcctgtacgtgctgacctacttcctgagatgcagcgagctgcaggagaaccagctgacctggagcggcaaccacggcgagggcgaccaggtgctgaacggcagcaagatcatcaccgccctggagaagggcgaggtggaggagagcgagtacgtggtgatcaccgtgagaaacgagcccgccctggtgccccccatcctgccccccaccgccgccgagagacacaacccctggcccaccggcttccccgagtgccccgagggcaccgacagcagagacctgggcctgaagcccgacaaggaggccaacagaagacccgagcagggcagcgaggcctgcagcgccggctgcctgggccccgccagcgacgccagctggaagccccagaacgccttctgcggctag

SEQ ID NO: 81907 - DNA, 660 bp, synthetic construct
  misc_feature 1..660: note = Description of Artificial Sequence: Synthetic coding sequence
  source 1..660: mol_type = other DNA
atggaccccgcccccggcgtgctggaccccagagccgccccccccgccctgctgggcaccccccaggccgaggtgctggaggacgtgctgagagagcagttcggccccctgccccagctggccgccgtgtgcagactgaagagactgcccagcggcggctacagcagcaccgagaacctgcagctggtgctggagagaagaagagtggccaacgccaaggagagagagagaatcaagaacctgaacagaggcttcgccagactgaaggccctggtgcccttcctgccccagagcagaaagcccagcaaggtggacatcctgaagggcgccaccgagtacatccaggtgctgagcgacctgctggagggcgccaaggacagcaagaagcaggaccccgacgagcagagctacagcaacaacagcagcgagagccacaccagcagcgccagacagctgagcagaaacatcacccagcacatcagctgcgccttcggcctgaagaacgaggaggagggcccctgggccgacggcggcagcggcgagcccgcccacgcctgcagacacagcgtgatgagcaccaccgagatcatcagccccaccagaagcctggacagattccccgaggtggagctgctgagccacagactgccccaggtgtag

SEQ ID NO: 81908 - DNA, 1035 bp, synthetic construct
  misc_feature 1..1035: note = Description of Artificial Sequence: Synthetic coding sequence
  source 1..1035: mol_type = other DNA
atggtgagagccagacaccagcccggcggcctgtgcctgctgctgctgctgctgtgccagttcatggaggacagaagcgcccaggccggcaactgctggctgagacaggccaagaacggcagatgccaggtgctgtacaagaccgagctgagcaaggaggagtgctgcagcaccggcagactgagcaccagctggaccgaggaggacgtgaacgacaacaccctgttcaagtggatgatcttcaacggcggcgcccccaactgcatcccctgcaaggagacctgcgagaacgtggactgcggccccggcaagaagtgcagaatgaacaagaagaacaagcccagatgcgtgtgcgcccccgactgcagcaacatcacctggaagggccccgtgtgcggcctggacggcaagacctacagaaacgagtgcgccctgctgaaggccagatgcaaggagcagcccgagctggaggtgcagtaccagggcagatgcaagaagacctgcagagacgtgttctgccccggcagcagcacctgcgtggtggaccagaccaacaacgcctactgcgtgacctgcaacagaatctgccccgagcccgccagcagcgagcagtacctgtgcggcaacgacggcgtgacctacagcagcgcctgccacctgagaaaggccacctgcctgctgggcagaagcatcggcctggcctacgagggcaagtgcatcaaggccaagagctgcgaggacatccagtgcaccggcggcaagaagtgcctgtgggacttcaaggtgggcagaggcagatgcagcctgtgcgacgagctgtgccccgacagcaagagcgacgagcccgtgtgcgccagcgacaacgccacctacgccagcgagtgcgccatgaaggaggccgcctgcagcagcggcgtgctgctggaggtgaagcacagcggcagctgcaacagcatcagcgaggacaccgaggaggaggaggaggacgaggaccaggactacagcttccccatcagcagcatcctggagtggtag

SEQ ID NO: 81909 - DNA, 954 bp, synthetic construct
  misc_feature 1..954: note = Description of Artificial Sequence: Synthetic coding sequence
  source 1..954: mol_type = other DNA
atggtgagagccagacaccagcccggcggcctgtgcctgctgctgctgctgctgtgccagttcatggaggacagaagcgcccaggccggcaactgctggctgagacaggccaagaacggcagatgccaggtgctgtacaagaccgagctgagcaaggaggagtgctgcagcaccggcagactgagcaccagctggaccgaggaggacgtgaacgacaacaccctgttcaagtggatgatcttcaacggcggcgcccccaactgcatcccctgcaaggagacctgcgagaacgtggactgcggccccggcaagaagtgcagaatgaacaagaagaacaagcccagatgcgtgtgcgcccccgactgcagcaacatcacctggaagggccccgtgtgcggcctggacggcaagacctacagaaacgagtgcgccctgctgaaggccagatgcaaggagcagcccgagctggaggtgcagtaccagggcagatgcaagaagacctgcagagacgtgttctgccccggcagcagcacctgcgtggtggaccagaccaacaacgcctactgcgtgacctgcaacagaatctgccccgagcccgccagcagcgagcagtacctgtgcggcaacgacggcgtgacctacagcagcgcctgccacctgagaaaggccacctgcctgctgggcagaagcatcggcctggcctacgagggcaagtgcatcaaggccaagagctgcgaggacatccagtgcaccggcggcaagaagtgcctgtgggacttcaaggtgggcagaggcagatgcagcctgtgcgacgagctgtgccccgacagcaagagcgacgagcccgtgtgcgccagcgacaacgccacctacgccagcgagtgcgccatgaaggaggccgcctgcagcagcggcgtgctgctggaggtgaagcacagcggcagctgcaactag

SEQ ID NO: 81910 - DNA, 1023 bp, synthetic construct
  misc_feature 1..1023: note = Description of Artificial Sequence: Synthetic coding sequence
  source 1..1023: mol_type = other DNA
atggtgagagccagacaccagcccggcggcctgtgcctgctgctgctgctgctgtgccagttcatggaggacagaagcgcccaggccggcaactgctggctgagacaggccaagaacggcagatgccaggtgctgtacaagaccgagctgagcaaggaggagtgctgcagcaccggcagactgagcaccagctggaccgaggaggacgtgaacgacaacaccctgttcaagtggatgatcttcaacggcggcgcccccaactgcatcccctgcaaggagacctgcgagaacgtggactgcggccccggcaagaagtgcagaatgaacaagaagaacaagcccagatgcgtgtgcgcccccgactgcagcaacatcacctggaagggccccgtgtgcggcctggacggcaagacctacagaaacgagtgcgccctgctgaaggccagatgcaaggagcagcccgagctggaggtgcagtaccagggcagatgcaagaagacctgcagagacgtgttctgccccggcagcagcacctgcgtggtggaccagaccaacaacgcctactgcgtgacctgcaacagaatctgccccgagcccgccagcagcgagcagtacctgtgcggcaacgacggcgtgacctacagcagcgcctgccacctgagaaaggccacctgcctgctgggcagaagcatcggcctggcctacgagggcaagtgcatcaaggccaagagctgcgaggacatccagtgcaccggcggcaagaagtgcctgtgggacttcaaggtgggcagaggcagatgcagcctgtgcgacgagctgtgccccgacagcaagagcgacgagcccgtgtgcgccagcgacaacgccacctacgccagcgagtgcgccatgaaggaggccgcctgcagcagcggcgtgctgctggaggtgaagcacagcggcagctgcaactacaccgaggaggaggaggaggacgaggaccaggactacagcttccccatcagcagcatcctggagtggtag

SEQ ID NO: 81911 - DNA, 927 bp, synthetic construct
  misc_feature 1..927: note = Description of Artificial Sequence: Synthetic coding sequence
  source 1..927: mol_type = other DNA
atgtggaagagatggctggccctggccctggccctggtggccgtggcctgggtgagagccgaggaggagctgagaagcaagagcaagatctgcgccaacgtgttctgcggcgccggcagagagtgcgccgtgaccgagaagggcgagcccacctgcctgtgcatcgagcagtgcaagccccacaagagacccgtgtgcggcagcaacggcaagacctacctgaaccactgcgagctgcacagagacgcctgcctgaccggcagcaagatccaggtggactacgacggccactgcaaggagaagaagagcgtgagccccagcgccagccccgtggtgtgctaccagagcaacagagacgagctgagaagaagaatcatccagtggctggaggccgagatcatccccgacggctggttcagcaagggcagcaactacagcgagatcctggacaagtacttcaagaacttcgacaacggcgacagcagactggacagcagcgagttcctgaagttcgtggagcagaacgagaccgccatcaacatcaccacctaccccgaccaggagaacaacaagctgctgagaggcctgtgcgtggacgccctgatcgagctgagcgacgagaacgccgactggaagctgagcttccaggagttcctgaagtgcctgaaccccagcttcaacccccccgagaagaagtgcgccctggaggacgagacctacgccgacggcgccgagaccgaggtggactgcaacagatgcgtgtgcgcctgcggcaactgggtgtgcaccgccatgacctgcgacggcaagaaccagaagggcgcccagacccagaccgaggaggagatgaccagatacgtgcaggagctgcagaagcaccaggagaccgccgagaagaccaagagagtgagcaccaaggagatctag

SEQ ID NO: 81912 - DNA, 423 bp, synthetic construct
  misc_feature 1..423: note = Description of Artificial Sequence: Synthetic coding sequence
  source 1..423: mol_type = other DNA
atgtggaagagatggctggccctggccctggccctggtggccgtggcctgggtgagagccgaggaggagctgagaagcaagagcaagatctgcgccaacgtgttctgcggcgccggcagagagtgcgccgtgaccgagaagggcgagcccacctgcctgtgcatcgagcagtgcaagccccacaagagacccgtgtgcggcagcaacggcaagacctacctgaaccactgcgagctgcacagagacgcctgcctgaccggcagcaagatccaggtggactacgacggccactgcaaggagaagaagagcgtgagccccagcgccagccccgtggtgtgctaccagagcaacagagacgagctgagaagaagaatcatccagtggctggaggccgagatcatccccgacggctggttcagctag

SEQ ID NO: 81913 - DNA, 756 bp, synthetic construct
  misc_feature 1..756: note = Description of Artificial Sequence: Synthetic coding sequence
  source 1..756: mol_type = other DNA
atgtgcttcgtggagcccgccggcaacgtgcagagccagagaaagggcaacccccccgtgagcgccctgagcaacgccaacctgaccggcagcaagatccaggtggactacgacggccactgcaaggagaagaagagcgtgagccccagcgccagccccgtggtgtgctaccagagcaacagagacgagctgagaagaagaatcatccagtggctggaggccgagatcatccccgacggctggttcagcaagggcagcaactacagcgagatcctggacaagtacttcaagaacttcgacaacggcgacagcagactggacagcagcgagttcctgaagttcgtggagcagaacgagaccgccatcaacatcaccacctaccccgaccaggagaacaacaagctgctgagaggcctgtgcgtggacgccctgatcgagctgagcgacgagaacgccgactggaagctgagcttccaggagttcctgaagtgcctgaaccccagcttcaacccccccgagaagaagtgcgccctggaggacgagacctacgccgacggcgccgagaccgaggtggactgcaacagatgcgtgtgcgcctgcggcaactgggtgtgcaccgccatgacctgcgacggcaagaaccagaagggcgcccagacccagaccgaggaggagatgaccagatacgtgcaggagctgcagaagcaccaggagaccgccgagaagaccaagagagtgagcaccaaggagatctag

SEQ ID NO: 81914 - DNA, 792 bp, synthetic construct
  misc_feature 1..792: note = Description of Artificial Sequence: Synthetic coding sequence
  source 1..792: mol_type = other DNA
atgagacccggcgcccccggccccctgtggcccctgccctggggcgccctggcctgggccgtgggcttcgtgagcagcatgggcagcggcaaccccgcccccggcggcgtgtgctggctgcagcagggccaggaggccacctgcagcctggtgctgcagaccgacgtgaccagagccgagtgctgcgccagcggcaacatcgacaccgcctggagcaacctgacccaccccggcaacaagatcaacctgctgggcttcctgggcctggtgcactgcctgccctgcaaggacagctgcgacggcgtggagtgcggccccggcaaggcctgcagaatgctgggcggcagacccagatgcgagtgcgcccccgactgcagcggcctgcccgccagactgcaggtgtgcggcagcgacggcgccacctacagagacgagtgcgagctgagagccgccagatgcagaggccaccccgacctgagcgtgatgtacagaggcagatgcagaaagagctgcgagcacgtggtgtgccccagaccccagagctgcgtggtggaccagaccggcagcgcccactgcgtggtgtgcagagccgccccctgccccgtgcccagcagccccggccaggagctgtgcggcaacaacaacgtgacctacatcagcagctgccacatgagacaggccacctgcttcctgggcagaagcatcggcgtgagacacgccggcagctgcgccggcacccccgaggagccccccggcggcgagagcgccgaggaggaggagaacttcgtgtag

SEQ ID NO: 81915 - DNA, 1614 bp, synthetic construct
  misc_feature 1..1614: note = Description of Artificial Sequence: Synthetic coding sequence
  source 1..1614: mol_type = other DNA
atgctgaacaccctgcagaccaacgccggctacctggagcaggtgaagagacagagaggcgacccccagacccagctggaggccatggagctgtacctggccagaagcggcctgcaggtggaggacctggacagactgaacatcatccacgtgaccggcaccaagggcaagggcagcacctgcgccttcaccgagtgcatcctgagaagctacggcctgaagaccggcttcttcagcagcccccacctggtgcaggtgagagagagaatcagaatcaacggccagcccatcagccccgagctgttcaccaagtacttctggagactgtaccacagactggaggagaccaaggacggcagctgcgtgagcatgcccccctacttcagattcctgaccctgatggccttccacgtgttcctgcaggagaaggtggacctggccgtggtggaggtgggcatcggcggcgcctacgactgcaccaacatcatcagaaagcccgtggtgtgcggcgtgagcagcctgggcatcgaccacaccagcctgctgggcgacaccgtggagaagatcgcctggcagaagggcggcatcttcaagcagggcgtgcccgccttcaccgtgctgcagcccgagggccccctggccgtgctgagagacagagcccagcagatcagctgccccctgtacctgtgccccatgctggaggccctggaggagggcggcccccccctgaccctgggcctggagggcgagcaccagagaagcaacgccgccctggccctgcagctggcccactgctggctgcagagacaggacagacacggcgccggcgagcccaaggccagcagacccggcctgctgtggcagctgcccctggcccccgtgttccagcccaccagccacatgagactgggcctgagaaacaccgagtggcccggcagaacccaggtgctgagaagaggccccctgacctggtacctggacggcgcccacaccgccagcagcgcccaggcctgcgtgagatggttcagacaggccctgcagggcagagagagacccagcggcggccccgaggtgagagtgctgctgttcaacgccaccggcgacagagaccccgccgccctgctgaagctgctgcagccctgccagttcgactacgccgtgttctgccccaacctgaccgaggtgagcagcaccggcaacgccgaccagcagaacttcaccgtgaccctggaccaggtgctgctgagatgcctggagcaccagcagcactggaaccacctggacgaggagcaggccagccccgacctgtggagcgcccccagccccgagcccggcggcagcgccagcctgctgctggccccccaccccccccacacctgcagcgccagcagcctggtgttcagctgcatcagccacgccctgcagtggatcagccagggcagagaccccatcttccagccccccagcccccccaagggcctgctgacccaccccgtggcccacagcggcgccagcatcctgagagaggccgccgccatccacgtgctggtgaccggcagcctgcacctggtgggcggcgtgctgaagctgctggagcccgccctgagccagtag

SEQ ID NO: 81916 - DNA, 1128 bp, synthetic construct
  misc_feature 1..1128: note = Description of Artificial Sequence: Synthetic coding sequence
  source 1..1128: mol_type = other DNA
atgagcagagccagaagccacctgagagccgccctgttcctggccgccgccagcgccagaggcatcaccacccaggtggccgccagaagaggcctgagcgcctggcccgtgccccaggagcccagcatggagtaccaggacgccgtgagaatgctgaacaccctgcagaccaacgccggctacctggagcaggtgaagagacagagaggcgacccccagacccagctggaggccatggagctgtacctggccagaagcggcctgcaggtggaggacctggacagactgaacatcatccacgtgaccggcaccaagggcaagggcagcacctgcgccttcaccgagtgcatcctgagaagctacggcctgaagaccggcttcttcagcagcccccacctggtgcaggtgagagagagaatcagaatcaacggccagcccatcagccccgagctgttcaccaagtacttctggagactgtaccacagactggaggagaccaaggacggcagctgcgtgagcatgcccccctacttcagattcctgaccctgatggccttccacgtgttcctgcaggagaaggtggacctggccgtggtggaggtgggcatcggcggcgcctacgactgcaccaacatcatcagaaagcccgtggtgtgcggcgtgagcagcctgggcatcgaccacaccagcctgctgggcgacaccgtggagaagatcgcctggcagaagggcggcatcttcaagcagggcgtgcccgccttcaccgtgctgcagcccgagggccccctggccgtgctgagagacagagcccagcagatcagcgtgctgggcagccagagacaccccggccagggcagctgcggcagctgcccctggcacctgtgcagcagcccccaccccacctgcggcagcggcttcggcaccagaagcggcagagccggcagaagatgctgcggcgccggccccagccccggcacctggaccgtgagaaccccccccgccgccagaagacccgcctgcgccggcagcgccagaagatgcagagccgccagaggcagagccgtggcccccagattcgagagctgcagcagcatgctgcccggcaccggcaccagaagaccctgctag

SEQ ID NO: 81917 - DNA, 1128 bp, synthetic construct; identical to SEQ ID NO: 81916
  misc_feature 1..1128: note = Description of Artificial Sequence: Synthetic coding sequence
  source 1..1128: mol_type = other DNA

SEQ ID NO: 81918 - DNA, 1764 bp, synthetic construct
  misc_feature 1..1764: note = Description of Artificial Sequence: Synthetic coding sequence
  source 1..1764: mol_type = other DNA
atgagcagagccagaagccacctgagagccgccctgttcctggccgccgccagcgccagaggcatcaccacccaggtggccgccagaagaggcctgagcgcctggcccgtgccccaggagcccagcatggagtaccaggacgccgtgagaatgctgaacaccctgcagaccaacgccggctacctggagcaggtgaagagacagagaggcgacccccagacccagctggaggccatggagctgtacctggccagaagcggcctgcaggtggaggacctggacagactgaacatcatccacgtgaccggcaccaagggcaagggcagcacctgcgccttcaccgagtgcatcctgagaagctacggcctgaagaccggcttcttcagcagcccccacctggtgcaggtgagagagagaatcagaatcaacggccagcccatcagccccgagctgttcaccaagtacttctggagactgtaccacagactggaggagaccaaggacggcagctgcgtgagcatgcccccctacttcagattcctgaccctgatggccttccacgtgttcctgcaggagaaggtggacctggccgtggtggaggtgggcatcggcggcgcctacgactgcaccaacatcatcagaaagcccgtggtgtgcggcgtgagcagcctgggcatcgaccacaccagcctgctgggcgacaccgtggagaagatcgcctggcagaagggcggcatcttcaagcagggcgtgcccgccttcaccgtgctgcagcccgagggccccctggccgtgctgagagacagagcccagcagatcagctgccccctgtacctgtgccccatgctggaggccctggaggagggcggcccccccctgaccctgggcctggagggcgagcaccagagaagcaacgccgccctggccctgcagctggcccactgctggctgcagagacaggacagacacggcgccggcgagcccaaggccagcagacccggcctgctgtggcagctgcccctggcccccgtgttccagcccaccagccacatgagactgggcctgagaaacaccgagtggcccggcagaacccaggtgctgagaagaggccccctgacctggtacctggacggcgcccacaccgccagcagcgcccaggcctgcgtgagatggttcagacaggccctgcagggcagagagagacccagcggcggccccgaggtgagagtgctgctgttcaacgccaccggcgacagagaccccgccgccctgctgaagctgctgcagccctgccagttcgactacgccgtgttctgccccaacctgaccgaggtgagcagcaccggcaacgccgaccagcagaacttcaccgtgaccctggaccaggtgctgctgagatgcctggagcaccagcagcactggaaccacctggacgaggagcaggccagccccgacctgtggagcgcccccagccccgagcccggcggcagcgccagcctgctgctggccccccaccccccccacacctgcagcgccagcagcctggtgttcagctgcatcagccacgccctgcagtggatcagccagggcagagaccccatcttccagccccccagcccccccaagggcctgctgacccaccccgtggcccacagcggcgccagcatcctgagagaggccgccgccatccacgtgctggtgaccggcagcctgcacctggtgggcggcgtgctgaagctgctggagcccgccctgagccagtag

SEQ ID NO: 81919 - DNA, 1686 bp, synthetic construct
  misc_feature 1..1686: note = Description of Artificial Sequence: Synthetic coding sequence
  source 1..1686: mol_type = other DNA
atgagcagagccagaagccacctgagagccgccctgttcctggccgccgccagcgccagaggcatcaccacccaggtggccgccagaagaggcctgagcgcctggcccgtgccccaggagcccagcatggagtaccaggacgccgtgagaatgctgaacaccctgcagaccaacgccggctacctggagcaggtgaagagacagagaggcgacccccagacccagctggaggccatggagctgtacctggccagaagcggcctgcaggtggaggacctggacagactgaacatcatccacgtgaccggcaccaagggcaagggcagcacctgcgccttcaccgagtgcatcctgagaagctacggcctgaagaccggcttcttcagcagcccccacctggtgcaggtgagagagagaatcagaatcaacggccagcccatcagccccgagctgttcaccaagtacttctggagactgtaccacagactggaggagaccaaggtggacctggccgtggtggaggtgggcatcggcggcgcctacgactgcaccaacatcatcagaaagcccgtggtgtgcggcgtgagcagcctgggcatcgaccacaccagcctgctgggcgacaccgtggagaagatcgcctggcagaagggcggcatcttcaagcagggcgtgcccgccttcaccgtgctgcagcccgagggccccctggccgtgctgagagacagagcccagcagatcagctgccccctgtacctgtgccccatgctggaggccctggaggagggcggcccccccctgaccctgggcctggagggcgagcaccagagaagcaacgccgccctggccctgcagctggcccactgctggctgcagagacaggacagacacggcgccggcgagcccaaggccagcagacccggcctgctgtggcagctgcccctggcccccgtgttccagcccaccagccacatgagactgggcctgagaaacaccgagtggcccggcagaacccaggtgctgagaagaggccccctgacctggtacctggacggcgcccacaccgccagcagcgcccaggcctgcgtgagatggttcagacaggccctgcagggcagagagagacccagcggcggccccgaggtgagagtgctgctgttcaacgccaccggcgacagagaccccgccgccctgctgaagctgctgcagccctgccagttcgactacgccgtgttctgccccaacctgaccgaggtgagcagcaccggcaacgccgaccagcagaacttcaccgtgaccctggaccaggtgctgctgagatgcctggagcaccagcagcactggaaccacctggacgaggagcaggccagccccgacctgtggagcgcccccagccccgagcccggcggcagcgccagcctgctgctggccccccaccccccccacacctgcagcgccagcagcctggtgttcagctgcatcagccacgccctgcagtggatcagccagggcagagaccccatcttccagccccccagcccccccaagggcctgctgacccaccccgtggcccacagcggcgccagcatcctgagagaggccgccgccatccacgtgctggtgaccggcagcctgcacctggtgggcggcgtgctgaagctgctggagcccgccctgagccagtag

SEQ ID NO: 81920 - DNA, 585 bp, synthetic construct
  misc_feature 1..585: note = Description of Artificial Sequence: Synthetic coding sequence
  source 1..585: mol_type = other DNA
atgctgaacaccctgcagaccaacgccggctacctggagcaggtgaagagacagagaggcgacccccagacccagctggaggccatggagctgtacctggccagaagcggcctgcaggtggaggacctggacagactgaacatcatccacgtgaccggcaccaagggcaagggcagcacctgcgccttcaccgagtgcatcctgagaagctacggcctgaagaccggcttcttcagcagcccccacctggtgcaggtgagagagagaatcagaatcaacggccagcccatcagccccgagctgttcaccaagtacttctggagactgtaccacagactggaggagaccaaggtggacctggccgtggtggaggtgggcatcggcggcgcctacgactgcaccaacatcatcagaaagcccgtggtgtgcggcgtgagcagcctgggcatcgaccacaccagcctgctgggcgacaccgtggagaagatcgcctggcagaagggcggcatcttcaagcagggcgtgcccgccttcaccgtgctgcagcccgagggccccctggccgtgctgagagacagagcctag

SEQ ID NO: 81921 - DNA, 798 bp, synthetic construct
  misc_feature 1..798: note = Description of Artificial Sequence: Synthetic coding sequence
  source 1..798: mol_type = other DNA
atgctgaacaccctgcagaccaacgccggctacctggagcaggtgaagagacagagaggcgacccccagacccagctggaggccatggagctgtacctggccagaagcggcctgcaggtggaggacctggacagactgaacatcatccacgtgaccggcaccaagggcaagggcagcacctgcgccttcaccgagtgcatcctgagaagctacggcctgaagaccggcttcttcagcagcccccacctggtgcaggtgagagagagaatcagaatcaacggccagcccatcagccccgagctgttcaccaagtacttctggagactgtaccacagactggaggagaccaaggacggcagctgcgtgagcatgcccccctacttcagattcctgaccctgatggccttccacgtgttcctgcaggagaaggtggacctggccgtggtggaggtgggcatcggcggcgcctacgactgcaccaacatcatcagaaagcccgtggtgtgcggcgtgagcagcctgggcatcgaccacaccagcctgctgggcgacaccgtggagaagatcgcctggcagaagggcggcatcttcaagcagggcgtgcccgccttcaccgtgctgcagcccgagggccccctggccgtgctgagagacagagcccagcagatcagcgtgctgggcagccagagacaccccggccagggcagctgcggcagctgcccctggcacctgtgcagcagcccccaccccacctgcggcagcggcttcggcaccagaagcggcagagccggcagatag

SEQ ID NO: 81922 - DNA, 1392 bp, synthetic construct
  misc_feature 1..1392: note = Description of Artificial Sequence: Synthetic coding sequence
  source 1..1392: mol_type = other DNA
atgcacagcgccagcagcatgctgggcgccgtgaagatggagggccacgagcccagcgactggagcagctactacgccgagcccgagggctacagcagcgtgagcaacatgaacgccggcctgggcatgaacggcatgaacacctacatgagcatgagcgccgccgccatgggcagcggcagcggcaacatgagcgccggcagcatgaacatgagcagctacgtgggcgccggcatgagccccagcctggccggcatgagccccggcgccggcgccatggccggcatgggcggcagcgccggcgccgccggcgtggccggcatgggcccccacctgagccccagcctgagccccctgggcggccaggccgccggcgccatgggcggcctggccccctacgccaacatgaacagcatgagccccatgtacggccaggccggcctgagcagagccagagaccccaagacctacagaagaagctacacccacgccaagcccccctacagctacatcagcctgatcaccatggccatccagcagagccccaacaagatgctgaccctgagcgagatctaccagtggatcatggacctgttccccttctacagacagaaccagcagagatggcagaacagcatcagacacagcctgagcttcaacgactgcttcctgaaggtgcccagaagccccgacaagcccggcaagggcagcttctggaccctgcaccccgacagcggcaacatgttcgagaacggctgctacctgagaagacagaagagattcaagtgcgagaagcagctggccctgaaggaggccgccggcgccgccggcagcggcaagaaggccgccgccggcgcccaggccagccaggcccagctgggcgaggccgccggccccgccagcgagacccccgccggcaccgagagcccccacagcagcgccagcccctgccaggagcacaagagaggcggcctgggcgagctgaagggcacccccgccgccgccctgagcccccccgagcccgcccccagccccggccagcagcagcaggccgccgcccacctgctgggccccccccaccaccccggcctgccccccgaggcccacctgaagcccgagcaccactacgccttcaaccaccccttcagcatcaacaacctgatgagcagcgagcagcagcaccaccacagccaccaccaccaccagccccacaagatggacctgaaggcctacgagcaggtgatgcactaccccggctacggcagccccatgcccggcagcctggccatgggccccgtgaccaacaagaccggcctggacgccagccccctggccgccgacaccagctactaccagggcgtgtacagcagacccatcatgaacagcagctag

SEQ ID NO: 81923 - DNA, 1374 bp, synthetic construct
  misc_feature 1..1374: note = Description of Artificial Sequence: Synthetic coding sequence
  source 1..1374: mol_type = other DNA
atgctgggcgccgtgaagatggagggccacgagcccagcgactggagcagctactacgccgagcccgagggctacagcagcgtgagcaacatgaacgccggcctgggcatgaacggcatgaacacctacatgagcatgagcgccgccgccatgggcagcggcagcggcaacatgagcgccggcagcatgaacatgagcagctacgtgggcgccggcatgagccccagcctggccggcatgagccccggcgccggcgccatggccggcatgggcggcagcgccggcgccgccggcgtggccggcatgggcccccacctgagccccagcctgagccccctgggcggccaggccgccggcgccatgggcggcctggccccctacgccaacatgaacagcatgagccccatgtacggccaggccggcctgagcagagccagagaccccaagacctacagaagaagctacacccacgccaagcccccctacagctacatcagcctgatcaccatggccatccagcagagccccaacaagatgctgaccctgagcgagatctaccagtggatcatggacctgttccccttctacagacagaaccagcagagatggcagaacagcatcagacacagcctgagcttcaacgactgcttcctgaaggtgcccagaagccccgacaagcccggcaagggcagcttctggaccctgcaccccgacagcggcaacatgttcgagaacggctgctacctgagaagacagaagagattcaagtgcgagaagcagctggccctgaaggaggccgccggcgccgccggcagcggcaagaaggccgccgccggcgcccaggccagccaggcccagctgggcgaggccgccggccccgccagcgagacccccgccggcaccgagagcccccacagcagcgccagcccctgccaggagcacaagagaggcggcctgggcgagctgaagggcacccccgccgccgccctgagcccccccgagcccgcccccagccccggccagcagcagcaggccgccgcccacctgctgggccccccccaccaccccggcctgccccccgaggcccacctgaagcccgagcaccactacgccttcaaccaccccttcagcatcaacaacctgatgagcagcgagcagcagcaccaccacagccaccaccaccaccagccccacaagatggacctgaaggcctacgagcaggtgatgcactaccccggctacggcagccccatgcccggcagcctggccatgggccccgtgaccaacaagaccggcctggacgccagccccctggccgccgacaccagctactaccagggcgtgtacagcagacccatcatgaacagcagctag

SEQ ID NO: 81924 - DNA, 1374 bp, synthetic construct; identical to SEQ ID NO: 81923
  misc_feature 1..1374: note = Description of Artificial Sequence: Synthetic coding sequence
  source 1..1374: mol_type = other DNA

SEQ ID NO: 81925 - DNA, 1032 bp, synthetic construct
  misc_feature 1..1032: note = Description of Artificial Sequence: Synthetic coding sequence
  source 1..1032: mol_type = other DNA
atgctgggcgccgtgaagatggagggccacgagcccagcgactggagcagctactacgccgagcccgagggctacagcagcgtgagcagagccagagaccccaagacctacagaagaagctacacccacgccaagcccccctacagctacatcagcctgatcaccatggccatccagcagagccccaacaagatgctgaccctgagcgagatctaccagtggatcatggacctgttccccttctacagacagaaccagcagagatggcagaacagcatcagacacagcctgagcttcaacgactgcttcctgaaggtgcccagaagccccgacaagcccggcaagggcagcttctggaccctgcaccccgacagcggcaacatgttcgagaacggctgctacctgagaagacagaagagattcaagtgcgagaagcagctggccctgaaggaggccgccggcgccgccggcagcggcaagaaggccgccgccggcgcccaggccagccaggcccagctgggcgaggccgccggccccgccagcgagacccccgccggcaccgagagcccccacagcagcgccagcccctgccaggagcacaagagaggcggcctgggcgagctgaagggcacccccgccgccgccctgagcccccccgagcccgcccccagccccggccagcagcagcaggccgccgcccacctgctgggccccccccaccaccccggcctgccccccgaggcccacctgaagcccgagcaccactacgccttcaaccaccccttcagcatcaacaacctgatgagcagcgagcagcagcaccaccacagccaccaccaccaccagccccacaagatggacctgaaggcctacgagcaggtgatgcactaccccggctacggcagccccatgcccggcagcctggccatgggccccgtgaccaacaagaccggcctggacgccagccccctggccgccgacaccagctactaccagggcgtgtacagcagacccatcatgaacagcagctag

SEQ ID NO: 81926 - DNA, 1053 bp, synthetic construct
  misc_feature 1..1053: note = Description of Artificial Sequence: Synthetic coding sequence
  source 1..1053: mol_type = other DNA
atgctgggcagcgtgaagatggaggcccacgacctggccgagtggagctactaccccgaggccggcgaggtgtacagccccgtgacccccgtgcccaccatggcccccctgaacagctacatgaccctgaaccccctgagcagcccctacccccccggcggcctgcccgccagccccctgcccagcggccccctggccccccccgcccccgccgcccccctgggccccaccttccccggcctgggcgtgagcggcggcagcagcagcagcggctacggcgcccccggccccggcctggtgcacggcaaggagatgcccaagggctacagaagacccctggcccacgccaagcccccctacagctacatcagcctgatcaccatggccatccagcaggcccccggcaagatgctgaccctgagcgagatctaccagtggatcatggacctgttcccctactacagagagaaccagcagagatggcagaacagcatcagacacagcctgagcttcaacgactgcttcgtgaaggtggccagaagccccgacaagcccggcaagggcagctactgggccctgcaccccagcagcggcaacatgttcgagaacggctgctacctgagaagacagaagagattcaagctggaggagaaggtgaagaagggcggcagcggcgccgccaccaccaccagaaacggcaccggcagcgccgccagcaccaccacccccgccgccaccgtgaccagccccccccagccccccccccccgcccccgagcccgaggcccagggcggcgaggacgtgggcgccctggactgcggcagccccgccagcagcaccccctacttcaccggcctggagctgcccggcgagctgaagctggacgccccctacaacttcaaccaccccttcagcatcaacaacctgatgagcgagcagacccccgccccccccaagctggacgtgggcttcggcggctacggcgccgagggcggcgagcccggcgtgtactaccagggcctgtacagcagaagcctgctgaacgccagctag

SEQ ID NO: 81927 - DNA, 1662 bp, synthetic construct
  misc_feature 1..1662: note = Description of Artificial Sequence: Synthetic coding sequence
  source 1..1662: mol_type = other DNA
atgcaggccagatacagcgtgagcagccccaacagcctgggcgtggtgccctacctgggcggcgagcagagctactacagagccgccgccgccgccgccggcggcggctacaccgccatgcccgcccccatgagcgtgtacagccaccccgcccacgccgagcagtaccccggcggcatggccagagcctacggcccctacaccccccagccccagcccaaggacatggtgaagcccccctacagctacatcgccctgatcaccatggccatccagaacgcccccgacaagaagatcaccctgaacggcatctaccagttcatcatggacagattccccttctacagagacaacaagcagggctggcagaacagcatcagacacaacctgagcctgaacgagtgcttcgtgaaggtgcccagagacgacaagaagcccggcaagggcagctactggaccctggaccccgacagctacaacatgttcgagaacggcagcttcctgagaagaagaagaagattcaagaagaaggacgccgtgaaggacaaggaggagaaggacagactgcacctgaaggagccccccccccccggcagacagcccccccccgccccccccgagcaggccgacggcaacgcccccggcccccagcccccccccgtgagaatccaggacatcaagaccgagaacggcacctgccccagccccccccagcccctgagccccgccgccgccctgggcagcggcagcgccgccgccgtgcccaagatcgagagccccgacagcagcagcagcagcctgagcagcggcagcagcccccccggcagcctgcccagcgccagacccctgagcctggacggcgccgacagcgccccccccccccccgcccccagcgccccccccccccaccacagccagggcttcagcgtggacaacatcatgaccagcctgagaggcagcccccagagcgccgccgccgagctgagcagcggcctgctggccagcgccgccgccagcagcagagccggcatcgccccccccctggccctgggcgcctacagccccggccagagcagcctgtacagcagcccctgcagccagaccagcagcgccggcagcagcggcggcggcggcggcggcgccggcgccgccggcggcgccggcggcgccggcacctaccactgcaacctgcaggccatgagcctgtacgccgccggcgagagaggcggccacctgcagggcgcccccggcggcgccggcggcagcgccgtggacgaccccctgcccgactacagcctgccccccgtgaccagcagcagcagcagcagcctgagccacggcggcggcggcggcggcggcggcggcggccaggaggccggccaccaccccgccgcccaccagggcagactgaccagctggtacctgaaccaggccggcggcgacctgggccacctggccagcgccgccgccgccgccgccgccgccggctaccccggccagcagcagaacttccacagcgtgagagagatgttcgagagccagagaatcggcctgaacaacagccccgtgaacggcaacagcagctgccagatggccttccccagcagccagagcctgtacagaaccagcggcgccttcgtgtacgactgcagcaagttctag

SEQ ID NO: 81928 - DNA, 639 bp, synthetic construct
  misc_feature 1..639: note = Description of Artificial Sequence: Synthetic coding sequence
  source 1..639: mol_type = other DNA
atgcaggccagatacagcgtgagcagccccaacagcctgggcgtggtgccctacctgggcggcgagcagagctactacagagccgccgccgccgccgccggcggcggctacaccgccatgcccgcccccatgagcgtgtacagccaccccgcccacgccgagcagtaccccggcggcatggccagagcctacggcccctacaccccccagccccagcccaaggacatggtgaagcccccctacagctacatcgccctgatcaccatggccatccagaacgcccccgacaagaagatcaccctgaacggcatctaccagttcatcatggacagattccccttctacagagacaacaagcagggctggcagaacagcatcagacacaacctgagcctgaacgagtgcttcgtgaaggtgcccagagacgacaagaagcccggcaagggcagctactggaccctggaccccgacagctacaacatgttcgagaacggcagcttcctgagaagaagaagaagattcaagaagaaggacgccgtgaaggacaaggaggagaaggacagaccccaggccaccagagccagcagcagaaccagcaccagatgcggcagatgcagcagccacagaggcagcgcctag

SEQ ID NO: 81929 - DNA, 1488 bp, synthetic construct
  misc_feature 1..1488: note = Description of Artificial Sequence: Synthetic coding sequence
  source 1..1488: mol_type = other DNA
atgaccctgggcagctgctgctgcgagatcatgagcagcgagagcagccccgccgccctgagcgaggccgacgccgacatcgacgtggtgggcggcggcagcggcggcggcgagctgcccgccagaagcggccccagagcccccagagacgtgctgccccacggccacgagccccccgccgaggaggccgaggccgacctggccgaggacgaggaggagagcggcggctgcagcgacggcgagcccagagccctggccagcagaggcgccgccgccgccgccggcagccccggccccggcgccgccgccgccagaggcgccgccggccccggccccggcccccccagcggcggcgccgccaccagaagccccctggtgaagcccccctacagctacatcgccctgatcaccatggccatcctgcagagccccaagaagagactgaccctgagcgagatctgcgagttcatcagcggcagattcccctactacagagagaagttccccgcctggcagaacagcatcagacacaacctgagcctgaacgactgcttcgtgaagatccccagagagcccggcaaccccggcaagggcaactactggaccctggaccccgagagcgccgacatgttcgacaacggcagcttcctgagaagaagaaagagattcaagagacagcccctgccccccccccacccccacccccacccccaccccgagctgctgctgagaggcggcgccgccgccgccggcgaccccggcgccttcctgcccggcttcgccgcctacggcgcctacggctacggctacggcctggccctgcccgcctacggcgcccccccccccggccccgccccccacccccacccccacccccacgccttcgccttcgccgccgccgccgccgccgccccctgccagctgagcgtgccccccggcagagccgccgcccccccccccggcccccccaccgccagcgtgttcgccggcgccggcagcgcccccgcccccgcccccgccagcggcagcggccccggccccggccccgccggcctgcccgccttcctgggcgccgagctgggctgcgccaaggccttctacgccgccagcctgagcccccccgccgccggcaccgccgccggcctgcccaccgccctgctgagacagggcctgaagaccgacgccggcggcggcgccggcggcggcggcgccggcgccggccagagacccagcttcagcatcgaccacatcatgggccacggcggcggcggcgccgccccccccggcgccggcgagggcagccccggcccccccttcgccgccgccgccggccccggcggccaggcccaggtgctggccatgctgaccgcccccgccctggcccccgtggccggccacatcagactgagccaccccggcgacgccctgctgagcagcggcagcagattcgccagcaaggtggccggcctgagcggctgccacttctag

SEQ ID NO: 81930 - DNA, 1437 bp, synthetic construct
  misc_feature 1..1437: note = Description of Artificial Sequence: Synthetic coding sequence
  source 1..1437: mol_type = other DNA
atgaccctgagcggcggcggcagcgccagcgacatgagcggccagaccgtgctgaccgccgaggacgtggacatcgacgtggtgggcgagggcgacgacggcctggaggagaaggacagcgacgccggctgcgacagccccgccggcccccccgagctgagactggacgaggccgacgaggtgccccccgccgccccccaccacggccagccccagcccccccaccagcagcccctgaccctgcccaaggaggccgccggcgccggcgccggccccggcggcgacgtgggcgcccccgaggccgacggctgcaagggcggcgtgggcggcgaggagggcggcgccagcggcggcggccccggcgccggcagcggcagcgccggcggcctggcccccagcaagcccaagaacagcctggtgaagcccccctacagctacatcgccctgatcaccatggccatcctgcagagcccccagaagaagctgaccctgagcggcatctgcgagttcatcagcaacagattcccctactacagagagaagttccccgcctggcagaacagcatcagacacaacctgagcctgaacgactgcttcgtgaagatccccagagagcccggcaaccccggcaagggcaactactggaccctggacccccagagcgaggacatgttcgacaacggcagcttcctgagaagaagaaagagattcaagagacaccagcaggagcacctgagagagcagaccgccctgatgatgcagagcttcggcgcctacagcctggccgccgccgccggcgccgccggcccctacggcagaccctacggcctgcaccccgccgccgccgccggcgcctacagccaccccgccgccgccgccgccgccgccgccgccgccgccctgcagtacccctacgccctgccccccgtggcccccgtgctgccccccgccgtgcccctgctgcccagcggcgagctgggcagaaaggccgccgccttcggcagccagctgggccccggcctgcagctgcagctgaacagcctgggcgccgccgccgccgccgccggcaccgccggcgccgccggcaccaccgccagcctgatcaagagcgagcccagcgccagacccagcttcagcatcgagaacatcatcggcggcggccccgccgcccccggcggcagcgccgtgggcgccggcgtggccggcggcaccggcggcagcggcggcggcagcaccgcccagagcttcctgagaccccccggcaccgtgcagagcgccgccctgatggccacccaccagcccctgagcctgagcagaaccaccgccaccatcgcccccatcctgagcgtgcccctgagcggccagttcctgcagcccgccgccagcgccgccgccgccgccgccgccgccgcccaggccaagtggcccgcccagtag

SEQ ID NO: 81931 - DNA, 1320 bp, synthetic construct
  misc_feature 1..1320: note = Description of Artificial Sequence: Synthetic coding sequence
  source 1..1320: mol_type = other DNA
atgaacctgcccagagccgagagactgagaagcaccccccagagaagcctgagagacagcgacggcgaggacggcaagatcgacgtgctgggcgaggaggaggacgaggacgaggaggaggccgccagccagcagttcctggagcagagcctgcagcccggcctgcaggtggccagatggggcggcgtggccctgcccagagagcacatcgagggcggcggcggccccagcgaccccagcgagttcggcaccgagttcagagccccccccagaagcgccgccgccagcgaggacgccagacagcccgccaagccccccagcagctacatcgccctgatcaccatggccatcctgcagagcccccacaagagactgaccctgagcggcatctgcgccttcatcagcgacagattcccctactacagaagaaagttccccgcctggcagaacagcatcagacacaacctgagcctgaacgactgcttcgtgaagatccccagagagcccggcagacccggcaagggcaactactggagcctggaccccgccagccaggacatgttcgacaacggcagcttcctgagaagaagaaagagattccagagacaccagcccacccccggcgcccacctgccccaccccttccccctgcccgccgcccacgccgccctgcacaaccccagacccggccccctgctgggcgcccccgcccccccccagcccgtgcccggcgcctaccccaacaccggccccggcagaagaccctacgccctgctgcacccccacccccccagatacctgctgctgagcgcccccgcctacgccggcgcccccaagaaggccgagggcgccgacctggccacccccgcccccttcccctgctgcagcccccacctggtgctgagcctgggcagaagagccagagtgtggagaagacacagagaggccgacgccagcctgagcgccctgagagtgagctgcaagggcagcggcgagagagtgcagggcctgagaagagtgtgccccagacccagaggcgccaccgccccctgcagcagcgacagacaggcctgcagaaccatcctgcagcagcagcagagacaccaggaggaggactgcgccaacggctgcgcccccaccaagggcgccgtgctgggcggccacctgagcgccgccagcgccctgctgagataccaggccgtggccgagggcagcggcctgaccagcctggccgcccccctgggcggcgagggcaccagccccgtgttcctggtgagccccacccccagcagcctggccgagagcgccggccccagctag

SEQ ID NO: 81932 - DNA, 1227 bp, synthetic construct
  misc_feature 1..1227: note = Description of Artificial Sequence: Synthetic coding sequence
  source 1..1227: mol_type = other DNA
atgaacctgcccagagccgagagacccagaagcaccccccagagaagcctgagagacagcgacggcgaggacggcaagatcgacgtgctgggcgaggaggaggacgaggacgaggtggaggacgaggaggaggaggccagccagaagttcctggagcagagcctgcagcccggcctgcaggtggccagatggggcggcgtggccctgcccagagagcacatcgagggcggcggccccagcgaccccagcgagttcggcaccgagttcagagccccccccagaagcgccgccgccagcgaggacgccagacagcccgccaagcccccctacagctacatcgccctgatcaccatggccatcctgcagagcccccacaagagactgaccctgagcggcatctgcgccttcatcagcggcagattcccctactacagaagaaagttccccgcctggcagaacagcatcagacacaacctgagcctgaacgactgcttcgtgaagatccccagagagcccggccaccccggcaagggcacctactggagcctggaccccgccagccaggacatgttcgacaacggcagcttcctgagaagaagaaagagattcaagagacaccagctgacccccggcgcccacctgccccaccccttccccctgcccgccgcccacgccgccctgcacaaccccagacccggccccctgctgggcgcccccgccctgccccagcccgtgcccggcgcctaccccaacaccgcccccggcagaagaccctacgccctgctgcacccccacccccccagatacctgctgctgagcgcccccgcctacgccggcgcccccaagaaggccgagggcgccgacctggccacccccggcaccctgcccgtgctgcagcccagcctgggcccccagccctgggaggagggcaagggcctggccagcccccccggcggcggctgcatcagcttcagcatcgagagcatcatgcagggcgtgagaggcgccggcaccggcgccgcccagagcctgagccccaccgcctggagctactgccccctgctgcagagacccagcagcctgagcgacaacttcgccgccaccgccgccgccagcggcggcggcctgagacagagactgagaagccaccagggcagaggcgccggcagagcccccgtgggcagagtgggcgccgccgccgtgagcggcggcggcagaggcctgtag

SEQ ID NO: 81933 - DNA, 1251 bp, synthetic construct
  misc_feature 1..1251: note = Description of Artificial Sequence: Synthetic coding sequence
  source 1..1251: mol_type = other DNA
atgaacctgcccagagccgagagacccagaagcaccccccagagaagcctgagagacagcgacggcgaggacggcaagatcgacgtgctgggcgaggaggaggacgaggacgaggtggaggacgaggaggaggaggccagacagcagttcctggagcagagcctgcagcccggcctgcaggtggccagatggggcggcgtggccctgcccagagagcacatcgagggcggcggcggccccagcgaccccagcgagttcggcaccaagttcagagccccccccagaagcgccgccgccagcgaggacgccagacagcccgccaagcccccctacagctacatcgccctgatcaccatggccatcctgcagaacccccacaagagactgaccctgagcggcatctgcgccttcatcagcggcagattcccctactacagaagaaagttccccgcctggcagaacagcatcagacacaacctgagcctgaacgactgcttcgtgaagatccccagagagcccggccaccccggcaagggcaactactggagcctggaccccgccagccaggacatgttcgacaacggcagcttcctgagaagaagaaagagattcaagagacaccagctgacccccggcgcccacctgccccaccccttccccctgcccgccgcccacgccgccctgcacaacccccaccccggccccctgctgggcgcccccgcccccccccagcccgtgcccggcgcctaccccaacaccgcccccggcagaagaccctacgccctgctgcacccccaccccctgagatacctgctgctgagcgccagagtgtacgccggcgcccccaagaaggccgagggcgccgacctggccacccccgcccccttcccctgctgcagcccccacctggtgctgagcctgggcagaagagccagagtgtggagaagacacagagaggccgacgccagcctgagcgccctgagagtgctgtgcaagggcagcggcgagagagtgcagggcctgagaagagtgtgccccagacccagaggcgccaccgccacctgcagcagcgaccaccaggcctgctgcatccccaagcccctgcccctgtgctgcaagtgccccccccccctgctgctgggccagttctgcagcaacagcagcagcatcagaagaaccgcccccaccgccgccctgccccccagagccagatgctgggccggcacctgcagacccagaagaagatgctag

SEQ ID NO: 81934 - DNA, 1254 bp, synthetic construct
  misc_feature 1..1254: note = Description of Artificial Sequence: Synthetic coding sequence
  source 1..1254: mol_type = other DNA
atgaacctgcccagagccgagagactgagaagcaccccccagagaagcctgagagacagcgacggcgaggacggcaagatcgacgtgctgggcgaggaggaggacgaggacgaggtggaggacgaggaggaggccgccagccagcagttcctggagcagagcctgcagcccggcctgcaggtggccagatggggcggcgtggccctgcccagagagcacatcgagggcggcggcggccccagcgaccccagcgagttcggcaccaagttcagagccccccccagaagcgccgccgccagcgaggacgccagacagcccgccaagcccccctacagctacatcgccctgatcaccatggccatcctgcagaacccccacaagagactgaccctgagcggcatctgcgccttcatcagcggcagattcccctactacagaagaaagttccccgcctggcagaacagcatcagacacaacctgagcctgaacgactgcttcgtgaagatccccagagagcccggccaccccggcaagggcaactactggagcctggaccccgccagccaggacatgttcgacaacggcagcttcctgagaagaagaaagagattcaagagacaccagctgacccccggcgcccacctgccccaccccttccccctgcccgccgcccacgccgccctgcacaaccccagacccggccccctgctgggcgcccccgcccccccccagcccgtgcccggcgcctaccccaacaccgcccccggcagaagaccctacgccctgctgcacccccaccccctgagatacctgctgctgagcgcccccgtgtacgccggcgcccccaagaaggccgagggcgccgccctggccacccccgcccccttcccctgctgcagcccccacctggtgctgagcctgggcagaagagccagagtgtggagaagacacagagaggccgacgccagcctgagcgccctgagagtgctgtgcaagggcagcggcgagagagtgcagggcctgagaagaatctgccccagacccagaggcgccaccgccacctgcagcagcgaccaccaggcctgctgcatccccagacccctgcccctgtgctgcaagtgcccccccccccccctgctgggccagttctgcagcaacagcagcagcatcagaagaagaaccgcccccaccgccgccctgccccccagagccagatgctgggccggcacctgcagacccagaagaccctgctag

SEQ ID NO: 81935 - DNA, 1122 bp, synthetic construct
  misc_feature 1..1122: note = Description of Artificial Sequence: Synthetic coding sequence
  source 1..1122: mol_type = other DNA
atgaccgccgagagcggccccccccccccccagcccgaggtgctggccaccgtgaaggaggagagaggcgagaccgccgccggcgccggcgtgcccggcgaggccaccggcagaggcgccggcggcagaagaagaaagagacccctgcagagaggcaagcccccctacagctacatcgccctgatcgccatggccatcgcccacgcccccgagagaagactgaccctgggcggcatctacaagttcatcaccgagagattccccttctacagagacaaccccaagaagtggcagaacagcatcagacacaacctgaccctgaacgactgcttcctgaagatccccagagaggccggcagacccggcaagggcaactactgggccctggaccccaacgccgaggacatgttcgagagcggcagcttcctgagaagaagaaagagattcaagagaagcgacctgagcacctaccccgcctacatgcacgacgccgccgccgccgccgccgccgccgccgccgccgccgccgccgccgccatcttccccggcgccgtgcccgccgccagacccccctaccccggcgccgtgtacgccggctacgccccccccagcctggccgcccccccccccgtgtactaccccgccgccagccccggcccctgcagagtgttcggcctggtgcccgagagacccctgagccccgagctgggccccgcccccagcggccccggcggcagctgcgccttcgccagcgccggcgcccccgccaccaccaccggctaccagcccgccggctgcaccggcgccagacccgccaaccccagcgcctacgccgccgcctacgccggccccgacggcgcctacccccagggcgccggcagcgccatcttcgccgccgccggcagactggccggccccgccagcccccccgccggcggcagcagcggcggcgtggagaccaccgtggacttctacggcagaaccagccccggccagttcggcgccctgggcgcctgctacaaccccggcggccagctgggcggcgccagcgccggcgcctaccacgccagacacgccgccgcctaccccggcggcatcgacagattcgtgagcgccatgtag

SEQ ID NO: 81936 - DNA, 960 bp, synthetic construct
  misc_feature 1..960: note = Description of Artificial Sequence: Synthetic coding sequence
  source 1..960: mol_type = other DNA
atggccggcagaagcgacatggacccccccgccgccttcagcggcttccccgccctgcccgccgtggcccccagcggccccccccccagccccctggccggcgccgagcccggcagagagcccgaggaggccgccgccggcagaggcgaggccgcccccacccccgcccccggccccggcagaagaagaagaagacccctgcagagaggcaagcccccctacagctacatcgccctgatcgccatggccctggcccacgcccccggcagaagactgaccctggccgccatctacagattcatcaccgagagattcgccttctacagagacagccccagaaagtggcagaacagcatcagacacaacctgaccctgaacgactgcttcgtgaaggtgcccagagagcccggcaaccccggcaagggcaactactggaccctggaccccgccgccgccgacatgttcgacaacggcagcttcctgagaagaagaaagagattcaagagagccgagctgcccgcccacgccgccgccgcccccggcccccccctgcccttcccctacgccccctacgcccccgcccccggccccgccctgctggtgcccccccccagcgccggccccggccccagcccccccgccagactgttcagcgtggacagcctggtgaacctgcagcccgagctggccggcctgggcgcccccgagcccccctgctgcgccgcccccgacgccgccgccgccgccttccccccctgcgccgccgccgccagcccccccctgtacagccaggtgcccgacagactggtgctgcccgccaccagacccggccccggccccctgcccgccgagcccctgctggccctggccggccccgccgccgccctgggccccctgagccccggcgaggcctacctgagacagcccggcttcgccagcggcctggagagatacctgtag

SEQ ID NO: 81937 - DNA, 1335 bp, synthetic construct
  misc_feature 1..1335: note = Description of Artificial Sequence: Synthetic coding sequence
  source 1..1335: mol_type = other DNA
atgaccaccgagggcggccccccccccgcccccctgagaagagcctgcagccccgtgcccggcgccctgcaggccgccctgatgagccccccccccgccgccgccgccgccgccgccgccgcccccgagaccaccagcagcagcagcagcagcagcagcgccagctgcgccagcagcagcagcagcagcaacagcgccagcgcccccagcgccgcctgcaagagcgccggcggcggcggcgccggcgccggcagcggcggcgccaagaaggccagcagcggcctgagaagacccgagaagcccccctacagctacatcgccctgatcgtgatggccatccagagcagccccagcaagagactgaccctgagcgagatctaccagttcctgcaggccagattccccttcttcagaggcgcctaccagggctggaagaacagcgtgagacacaacctgagcctgaacgagtgcttcatcaagctgcccaagggcctgggcagacccggcaagggccactactggaccatcgaccccgccagcgagttcatgttcgaggagggcagcttcagaagaagacccagaggcttcagaagaaagtgccaggccctgaagcccatgtaccacagagtggtgagcggcctgggcttcggcgccagcctgctgccccagggcttcgacttccaggccccccccagcgcccccctgggctgccacagccagggcggctacggcggcctggacatgatgcccgccggctacgacgccggcgccggcgcccccagccacgcccacccccaccaccaccaccaccaccacgtgccccacatgagccccaaccccggcagcacctacatggccagctgccccgtgcccgccggccccggcggcgtgggcgccgccggcggcggcggcggcggcgactacggccccgacagcagcagcagccccgtgcccagcagccccgccatggccagcgccatcgagtgccacagcccctacaccagccccgccgcccactggagcagccccggcgccagcccctacctgaagcagccccccgccctgacccccagcagcaaccccgccgccagcgccggcctgcacagcagcatgagcagctacagcctggagcagagctacctgcaccagaacgccagagaggacctgagcgtgggcctgcccagataccagcaccacagcacccccgtgtgcgacagaaaggacttcgtgctgaacttcaacggcatcagcagcttccaccccagcgccagcggcagctactaccaccaccaccaccagagcgtgtgccaggacatcaagccctgcgtgatgtag

SEQ ID NO: 81938 - DNA, 1470 bp, synthetic construct
  misc_feature 1..1470: note = Description of Artificial Sequence: Synthetic coding sequence
  source 1..1470: mol_type = other DNA
atgctggacatgggcgacagaaaggaggtgaagatgatccccaagagcagcttcagcatcaacagcctggtgcccgaggccgtgcagaacgacaaccaccacgccagccacggccaccacaacagccaccacccccagcaccaccaccaccaccaccaccaccaccaccacccccccccccccgccccccagccccccccccccccccagcagcagcagcccccccccccccccccccccgccccccagcccccccagaccagaggcgcccccgccgccgacgacgacaagggcccccagcagctgctgctgccccccccccccccccccccccccgccgccgccctggacggcgccaaggccgacggcctgggcggcaagggcgagcccggcggcggccccggcgagctggcccccgtgggccccgacgagaaggagaagggcgccggcgccggcggcgaggagaagaagggcgccggcgagggcggcaaggacggcgagggcggcaaggagggcgagaagaagaacggcaagtacgagaagccccccttcagctacaacgccctgatcatgatggccatcagacagagccccgagaagagactgaccctgaacggcatctacgagttcatcatgaagaacttcccctactacagagagaacaagcagggctggcagaacagcatcagacacaacctgagcctgaacaagtgcttcgtgaaggtgcccagacactacgacgaccccggcaagggcaactactggatgctggaccccagcagcgacgacgtgttcatcggcggcaccaccggcaagctgagaagaagaagcaccaccagcagagccaagctggccttcaagagaggcgccagactgaccagcaccggcctgaccttcatggacagagccggcagcctgtactggcccatgagccccttcctgagcctgcaccaccccagagccagcagcaccctgagctacaacggcaccaccagcgcctaccccagccaccccatgccctacagcagcgtgctgacccagaacagcctgggcaacaaccacagcttcagcaccgccaacggcctgagcgtggacagactggtgaacggcgagatcccctacgccacccaccacctgaccgccgccgccctggccgccagcgtgccctgcggcctgagcgtgccctgcagcggcacctacagcctgaacccctgcagcgtgaacctgctggccggccagaccagctacttcttcccccacgtgccccaccccagcatgaccagccagagcagcaccagcatgagcgccagagccgccagcagcagcaccagcccccaggcccccagcaccctgccctgcgagagcctgagacccagcctgcccagcttcaccaccggcctgagcggcggcctgagcgactacttcacccaccagaaccagggcagcagcagcaaccccctgatccactag

SEQ ID NO: 81939 - DNA, 1470 bp, synthetic construct; identical to SEQ ID NO: 81938
  misc_feature 1..1470: note = Description of Artificial Sequence: Synthetic coding sequence
  source 1..1470: mol_type = other DNA

SEQ ID NO: 81940 - DNA, 1137 bp, synthetic construct
  misc_feature 1..1137: note = Description of Artificial Sequence: Synthetic coding sequence
  source 1..1137: mol_type = other DNA
atgagcagcttcgacctgcccgcccccagcccccccagatgcagcccccagttccccagcatcggccaggagccccccgagatgaacctgtactacgagaacttcttccacccccagggcgtgcccagcccccagagacccagcttcgagggcggcggcgagtacggcgccacccccaacccctacctgtggttcaacggccccaccatgaccccccccccctacctgcccggccccaacgccagccccttcctgccccaggcctacggcgtgcagagacccctgctgcccagcgtgagcggcctgggcggcagcgacctgggctggctgcccatccccagccaggaggagctgatgaagctggtgagacccccctacagctacagcgccctgatcgccatggccatccacggcgcccccgacaagagactgaccctgagccagatctaccagtacgtggccgacaacttccccttctacaacaagagcaaggccggctggcagaacagcatcagacacaacctgagcctgaacgactgcttcaagaaggtgcccagagacgaggacgaccccggcaagggcaactactggaccctggaccccaactgcgagaagatgttcgacaacggcaacttcagaagaaagagaaagagaaagagcgacgtgagcagcagcaccgccagcctggccctggagaagaccgagagcagcctgcccgtggacagccccaagaccaccgagccccaggacatcctggacggcgccagccccggcggcaccaccagcagccccgagaagagacccagccccccccccagcggcgccccctgcctgaacagcttcctgagcagcatgaccgcctacgtgagcggcggcagccccaccagccaccccctggtgacccccggcctgagccccgagcccagcgacaagaccggccagaacagcctgaccttcaacagcttcagccccctgaccaacctgagcaaccacagcggcggcggcgactgggccaaccccatgcccaccaacatgctgagctacggcggcagcgtgctgagccagttcagcccccacttctacaacagcgtgaacaccagcggcgtgctgtaccccagagagggcaccgaggtgtag

SEQ ID NO: 81941 - DNA, 852 bp, synthetic construct
  misc_feature 1..852: note = Description of Artificial Sequence: Synthetic coding sequence
  source 1..852: mol_type = other DNA
atgagcagcttcgacctgcccgcccccagcccccccagatgcagcccccagttccccagcatcggccaggagccccccgagatgaacctgtactacgagaacttcttccacccccagggcgtgcccagcccccagagacccagcttcgagggcggcggcgagtacggcgccacccccaacccctacctgtggttcaacggccccaccatgaccccccccccctacctgcccggccccaacgccagccccttcctgccccaggcctacggcgtgcagagacccctgctgcccagcgtgagcggcctgggcggcagcgacctgggctggctgcccatccccagccaggaggagctgatgaagctggtgagacccccctacagctacagcgccctgatcgccatggccatccacggcgcccccgacaagagactgaccctgagccagatctaccagtacgtggccgacaacttccccttctacaacaagagcaaggccggctggcagaacagcatcagacacaacctgagcctgaacgactgcttcaagaaggtgcccagagacgaggacgaccccgcctacgtgagcggcggcagccccaccagccaccccctggtgacccccggcctgagccccgagcccagcgacaagaccggccagaacagcctgaccttcaacagcttcagccccctgaccaacctgagcaaccacagcggcggcggcgactgggccaaccccatgcccaccaacatgctgagctacggcggcagcgtgctgagccagttcagcccccacttctacaacagcgtgaacaccagcggcgtgctgtaccccagagagggcaccgaggtgtag

SEQ ID NO: 81942 - DNA, 1266 bp, synthetic construct
  misc_feature 1..1266: note = Description of Artificial Sequence: Synthetic coding sequence
  source 1..1266: mol_type = other DNA
atggccgagagctggctgagactgagcggcgccggccccgccgaggaggccggccccgagggcggcctggaggagcccgacgccctggacgacagcctgaccagcctgcagtggctgcaggagttcagcatcctgaacgccaaggcccccgccctgccccccggcggcaccgacccccacggctaccaccaggtgcccggcagcgccgcccccggcagccccctggccgccgaccccgcctgcctgggccagccccacacccccggcaagcccaccagcagctgcaccagcagaagcgccccccccggcctgcaggcccccccccccgacgacgtggactacgccaccaacccccacgtgaagcccccctacagctacgccaccctgatctgcatggccatgcaggccagcaaggccaccaagatcaccctgagcgccatctacaagtggatcaccgacaacttctgctacttcagacacgccgaccccacctggcagaacagcatcagacacaacctgagcctgaacaagtgcttcatcaaggtgcccagagagaaggacgagcccggcaagggcggcttctggagaatcgacccccagtacgccgagagactgctgagcggcgccttcaagaagagaagactgccccccgtgcacatccaccccgccttcgccagacaggccgcccaggagcccagcgccgtgcccagagccggccccctgaccgtgaacaccgaggcccagcagctgctgagagagttcgaggaggccaccggcgaggccggctggggcgccggcgagggcagactgggccacaagagaaagcagcccctgcccaagagagtggccaaggtgcccagaccccccagcaccctgctgcccacccccgaggagcagggcgagctggagcccctgaagggcaacttcgactgggaggccatcttcgacgccggcaccctgggcggcgagctgggcgccctggaggccctggagctgagcccccccctgagccccgccagccacgtggacgtggacctgaccatccacggcagacacatcgactgccccgccacctggggccccagcgtggagcaggccgccgacagcctggacttcgacgagaccttcctggccaccagcttcctgcagcacccctgggacgagagcggcagcggctgcctgccccccgagcccctgttcgaggccggcgacgccaccctggccagcgacctgcaggactgggccagcgtgggcgccttcctgtag

SEQ ID NO: 81943 - DNA, 987 bp, synthetic construct
  misc_feature 1..987: note = Description of Artificial Sequence: Synthetic coding sequence
  source 1..987: mol_type = other DNA
atggccgccgccgccgccgccctgagcggcgccggcaccccccccgccggcggcggcgccggcggcggcggcgccggcggcggcggcagcccccccggcggctgggccgtggccagactggagggcagagagttcgagtacctgatgaagaagagaagcgtgaccatcggcagaaacagcagccagggcagcgtggacgtgagcatgggccacagcagcttcatcagcagaagacacctggagatcttcaccccccccggcggcggcggccacggcggcgccgcccccgagctgccccccgcccagcccagacccgacgccggcggcgacttctacctgagatgcctgggcaagaacggcgtgttcgtggacggcgtgttccagagaagaggcgccccccccctgcagctgcccagagtgtgcaccttcagattccccagcaccaacatcaagatcaccttcaccgccctgagcagcgagaagagagagaagcaggaggccagcgagagccccgtgaaggccgtgcagccccacatcagccccctgaccatcaacatccccgacaccatggcccacctgatcagccccctgcccagccccaccggcaccatcagcgccgccaacagctgccccagcagccccagaggcgccggcagcagcggctacaaggtgggcagagtgatgcccagcgacctgaacctgatggccgacaacagccagcccgagaacgagaaggaggccagcggcggcgacagccccaaggacgacagcaagcccccctacagctacgcccagctgatcgtgcaggccatcaccatggcccccgacaagcagctgaccctgaacggcatctacacccacatcaccaagaactacccctactacagaaccgccgacaagggctggcagagaggcgagagcttcgcccacgtgggcaacaccagaatcagaatcggcctgcccgcccacaaggccccccagagatag

SEQ ID NO: 81944 - DNA, 1983 bp, synthetic construct
  misc_feature 1..1983: note = Description of Artificial Sequence: Synthetic coding sequence
  source 1..1983: mol_type = other DNA
atggccgccgccgccgccgccctgagcggcgccggcaccccccccgccggcggcggcgccggcggcggcggcgccggcggcggcggcagcccccccggcggctgggccgtggccagactggagggcagagagttcgagtacctgatgaagaagagaagcgtgaccatcggcagaaacagcagccagggcagcgtggacgtgagcatgggccacagcagcttcatcagcagaagacacctggagatcttcaccccccccggcggcggcggccacggcggcgccgcccccgagctgccccccgcccagcccagacccgacgccggcggcgacttctacctgagatgcctgggcaagaacggcgtgttcgtggacggcgtgttccagagaagaggcgccccccccctgcagctgcccagagtgtgcaccttcagattccccagcaccaacatcaagatcaccttcaccgccctgagcagcgagaagagagagaagcaggaggccagcgagagccccgtgaaggccgtgcagccccacatcagccccctgaccatcaacatccccgacaccatggcccacctgatcagccccctgcccagccccaccggcaccatcagcgccgccaacagctgccccagcagccccagaggcgccggcagcagcggctacaaggtgggcagagtgatgcccagcgacctgaacctgatggccgacaacagccagcccgagaacgagaaggaggccagcggcggcgacagccccaaggacgacagcaagcccccctacagctacgcccagctgatcgtgcaggccatcaccatggcccccgacaagcagctgaccctgaacggcatctacacccacatcaccaagaactacccctactacagaaccgccgacaagggctggcagaacagcatcagacacaacctgagcctgaacagatacttcatcaaggtgcccagaagccaggaggagcccggcaagggcagcttctggagaatcgaccccgccagcgagagcaagctgatcgagcaggccttcagaaagagaagacccagaggcgtgccctgcttcagaacccccctgggccccctgagcagcagaagcgcccccgccagccccaaccacgccggcgtgctgagcgcccacagcagcggcgcccagacccccgagagcctgagcagagagggcagccccgcccccctggagcccgagcccggcgccgcccagcccaagctggccgtgatccaggaggccagattcgcccagagcgcccccggcagccccctgagcagccagcccgtgctgatcaccgtgcagagacagctgccccaggccatcaagcccgtgacctacaccgtggccacccccgtgaccaccagcaccagccagccccccgtggtgcagaccgtgcacgtggtgcaccagatccccgccgtgagcgtgaccagcgtggccggcctggcccccgccaacacctacaccgtgagcggccaggccgtggtgacccccgccgccgtgctggccccccccaaggccgaggcccaggagaacggcgaccacagagaggtgaaggtgaaggtggagcccatccccgccatcggccacgccaccctgggcaccgccagcagaatcatccagaccgcccagaccacccccgtgcagaccgtgaccatcgtgcagcaggcccccctgggccagcaccagctgcccatcaagaccgtgacccagaacggcacccacgtggccagcgtgcccaccgccgtgcacggccaggtgaacaacgccgccgccagccccctgcacatgctggccacccacgccagcgccagcgccagcctgcccaccaagagacacaacggcgaccagcccgagcagcccgagctgaagagaatcaagaccgaggacggcgagggcatcgtgatcgccctgagcgtggacaccccccccgccgccgtgagagagaagggcgtgcagaactag

SEQ ID NO: 81945 - DNA, 1833 bp, synthetic construct
  misc_feature 1..1833: note = Description of Artificial Sequence: Synthetic coding sequence
  source 1..1833: mol_type = other DNA
atggccgccgccagaagagccctgggcgccggcacccccagagccagaggcagaggcagaggcgccggcggcggcggcagcagaagagccctgggcagaggcgcccccggcggccccagagtgagagtgagcgacgaggaggccctgggcgaccacagaccccagctggtggccggcctgggcggcagagagcacggccccctggagctgcacctgcccgccccccccagagacctgcacgcccccggcagaagaggccacggcggcgccgcccccgagctgccccccgcccagcccagacccgacgccggcggcgacttctacctgagatgcctgggcaagaacggcgtgttcgtggacggcgtgttccagagaagaggcgccccccccctgcagctgcccagagtgtgcaccttcagattccccagcaccaacatcaagatcaccttcaccgccctgagcagcgagaagagagagaagcaggaggccagcgagagccccgtgaaggccgtgcagccccacatcagccccctgaccatcaacatccccgacaccatggcccacctgatcagccccctgcccagccccaccggcaccatcagcgccgccaacagctgccccagcagccccagaggcgccggcagcagcggctacaaggtgggcagagtgatgcccagcgacctgaacctgatggccgacaacagccagcccgagaacgagaaggaggccagcggcggcgacagccccaaggacgacagcaagcccccctacagctacgcccagctgatcgtgcaggccatcaccatggcccccgacaagcagctgaccctgaacggcatctacacccacatcaccaagaactacccctactacagaaccgccgacaagggctggcagaacagcatcagacacaacctgagcctgaacagatacttcatcaaggtgcccagaagccaggaggagcccggcaagggcagcttctggagaatcgaccccgccagcgagagcaagctgatcgagcaggccttcagaaagagaagacccagaggcgtgccctgcttcagaacccccctgggccccctgagcagcagaagcgcccccgccagccccaaccacgccggcgtgctgagcgcccacagcagcggcgcccagacccccgagagcctgagcagagagggcagccccgcccccctggagcccgagcccggcgccgcccagcccaagctggccgtgatccaggaggccagattcgcccagagcgcccccggcagccccctgagcagccagcccgtgctgatcaccgtgcagagacagctgccccaggccatcaagcccgtgacctacaccgtggccacccccgtgaccaccagcaccagccagccccccgtggtgcagaccgtgcacgtggtgcaccagatccccgccgtgagcgtgaccagcgtggccggcctggcccccgccaacacctacaccgtgagcggccaggccgtggtgacccccgccgccgtgctggccccccccaaggccgaggcccaggagaacggcgaccacagagaggtgaaggtgaaggtggagcccatccccgccatcggccacgccaccctgggcaccgccagcagaatcatccagaccgcccagaccacccccgtgcagaccgtgaccatcgtgcagcaggcccccctgggccagcaccagctgcccatcaagaccgtgacccagaacggcacccacgtggccagcgtgcccaccgccgtgcacggccaggtgaacaacggccccctgggcctgagaagacccccctgcgccagcagcgactggagctgcctgagctag

SEQ ID NO: 81946 - DNA, 1038 bp, synthetic construct
  misc_feature 1..1038: note = Description of Artificial Sequence: Synthetic coding sequence
  source 1..1038: mol_type = other DNA
atgagccacctgttcgaccccagactgcccgccctggccgccagccccatgctgtacctgtacggccccgagagacccggcctgcccctggccttcgcccccgccgccgccctggccgccagcggcagagccgagaccccccagaagcccccctacagctacatcgccctgatcgccatggccatccaggacgcccccgagcagagagtgaccctgaacggcatctaccagttcatcatggacagattccccttctaccacgacaacagacagggctggcagaacagcatcagacacaacctgagcctgaacgactgcttcgtgaaggtgcccagagagaagggcagacccggcaagggcagctactggaccctggaccccagatgcctggacatgttcgagaacggcaactacagaagaagaaagagaaagcccaagcccggccccggcgcccccgaggccaagagacccagagccgagacccaccagagaagcgccgaggcccagcccgaggccggcagcggcgccggcggcagcggccccgccatcagcagactgcaggccgcccccgccggccccagccccctgctggacggccccagcccccccgcccccctgcactggcccggcaccgccagccccaacgaggacgccggcgacgccgcccagggcgccgccgccgtggccgtgggccaggccgccagaaccggcgacggccccggcagccccctgagacccgccagcagaagcagccccaagagcagcgacaagagcaagagcttcagcatcgacagcatcctggccggcaagcagggccagaagccccccagcggcgacgagctgctgggcggcgccaagcccggccccggcggcagactgggcgccagcctgctggccgccagcagcagcctgagaccccccttcaacgccagcctgatgctggacccccacgtgcagggcggcttctaccagctgggcatccccttcctgagctacttccccctgcaggtgcccgacaccgtgctgcacttccagtag

SEQ ID NO: 81947 - DNA, 1131 bp, synthetic construct
  misc_feature 1..1131: note = Description of Artificial Sequence: Synthetic coding sequence
  source 1..1131: mol_type = other DNA
atgatggccagctaccccgagcccgaggacgccgccggcgccctgctggcccccgagaccggcagaaccgtgaaggagcccgagggccccccccccagccccggcaagggcggcggcggcggcggcggcaccgcccccgagaagcccgaccccgcccagaagcccccctacagctacgtggccctgatcgccatggccatcagagagagcgccgagaagagactgaccctgagcggcatctaccagtacatcatcgccaagttccccttctacgagaagaacaagaagggctggcagaacagcatcagacacaacctgagcctgaacgagtgcttcatcaaggtgcccagagagggcggcggcgagagaaagggcaactactggaccctggaccccgcctgcgaggacatgttcgagaagggcaactacagaagaagaagaagaatgaagagacccttcagacccccccccgcccacttccagcccggcaagggcctgttcggcgccggcggcgccgccggcggctgcggcgtggccggcgccggcgccgacggctacggctacctggccccccccaagtacctgcagagcggcttcctgaacaacagctggcccctgccccagccccccagccccatgccctacgccagctgccagatggccgccgccgccgccgccgccgccgccgccgccgccgccgccggccccggcagccccggcgccgccgccgtggtgaagggcctggccggccccgccgccagctacggcccctacaccagagtgcagagcatggccctgccccccggcgtggtgaacagctacaacggcctgggcggcccccccgccgccccccccccccccccccacccccacccccacccccacgcccaccacctgcacgccgccgccgcccccccccccgcccccccccaccacggcgccgccgcccccccccccggccagctgagccccgccagccccgccaccgccgccccccccgcccccgcccccaccagcgcccccggcctgcagttcgcctgcgccagacagcccgagctggccatgatgcactgcagctactgggaccacgacagcaagaccggcgccctgcacagcagactggacctgtag

SEQ ID NO: 81948 - DNA, 810 bp, synthetic construct
  misc_feature 1..810: note = Description of Artificial Sequence: Synthetic coding sequence
  source 1..810: mol_type = other DNA
atgatggccagctaccccgagcccgaggacgccgccggcgccctgctggcccccgagaccggcagaaccgtgaaggagcccgagggccccccccccagccccggcaagggcggcggcggcggcggcggcaccgcccccgagaagcccgaccccgcccagaagcccccctacagctacgtggccctgatcgccatggccatcagagagagcgccgagaagagactgaccctgagcggcatctaccagtacatcatcgccaagttccccttctacgagaagaacaagaagggctggcagaacagcatcagacacaacctgagcctgaacgagtgcttcatcaaggtgcccagagagggcggcggcgagagaaagggcaactactggaccctggaccccgcctgcgaggacatgttcgagaagggcaactacagaagaagaagaagaatgaagagacccttcagacccccccccgcccacttccagcccggcaagggcctgttcggcgccggcggcgccgccggcggctgcggcgtggccggcgccggcgccgacggctacggctacctggccccccccaagtacctgcagagcggcttcctgaacaacagctggcccctgccccagccccccagccccatgccctacgccagctgccagatggccgccgccgccgccgccgccgccgccgccgccgccgccgccggccccggcagcctggccagacccctgtggagcagaggctggagagccagaccccccagaaccggcagaacccacgcctgcagagcctggagatgcccccccgcctag

SEQ ID NO: 81949 - DNA, 2406 bp, synthetic construct
  misc_feature 1..2406: note = Description of Artificial Sequence: Synthetic coding sequence
  source 1..2406: mol_type = other DNA
atgaagaccagccccagaagacccctgatcctgaagagaagaagactgcccctgcccgtgcagaacgcccccagcgagaccagcgaggaggagcccaagagaagccccgcccagcaggagagcaaccaggccgaggccagcaaggaggtggccgagagcaacagctgcaagttccccgccggcatcaagatcatcaaccaccccaccatgcccaacacccaggtggtggccatccccaacaacgccaacatccacagcatcatcaccgccctgaccgccaagggcaaggagagcggcagcagcggccccaacaagttcatcctgatcagctgcggcggcgcccccacccagccccccggcctgagaccccagacccagaccagctacgacgccaagagaaccgaggtgaccctggagaccctgggccccaagcccgccgccagagacgtgaacctgcccagaccccccggcgccctgtgcgagcagaagagagagacctgcgccgacggcgaggccgccggctgcaccatcaacaacagcctgagcaacatccagtggctgagaaagatgagcagcgacggcctgggcagcagaagcatcaagcaggagatggaggagaaggagaactgccacctggagcagagacaggtgaaggtggaggagcccagcagacccagcgccagctggcagaacagcgtgagcgagagacccccctacagctacatggccatgatccagttcgccatcaacagcaccgagagaaagagaatgaccctgaaggacatctacacctggatcgaggaccacttcccctacttcaagcacatcgccaagcccggctggaagaacagcatcagacacaacctgagcctgcacgacatgttcgtgagagagaccagcgccaacggcaaggtgagcttctggaccatccaccccagcgccaacagatacctgaccctggaccaggtgttcaagcccctggaccccggcagcccccagctgcccgagcacctggagagccagcagaagagacccaaccccgagctgagaagaaacatgaccatcaagaccgagctgcccctgggcgccagaagaaagatgaagcccctgctgcccagagtgagcagctacctggtgcccatccagttccccgtgaaccagagcctggtgctgcagcccagcgtgaaggtgcccctgcccctggccgccagcctgatgagcagcgagctggccagacacagcaagagagtgagaatcgcccccaaggtgttcggcgagcaggtggtgttcggctacatgagcaagttcttcagcggcgacctgagagacttcggcacccccatcaccagcctgttcaacttcatcttcctgtgcctgagcgtgctgctggccgaggagggcatcgcccccctgagcagcgccggccccggcaaggaggagaagctgctgttcggcgagggcttcagccccctgctgcccgtgcagaccatcaaggaggaggagatccagcccggcgaggagatgccccacctggccagacccatcaaggtggagagcccccccctggaggagtggcccagccccgcccccagcttcaaggaggagagcagccacagctgggaggacagcagccagagccccacccccagacccaagaagagctacagcggcctgagaagccccaccagatgcgtgagcgagatgctggtgatccagcacagagagagaagagagagaagcagaagcagaagaaagcagcacctgctgcccccctgcgtggacgagcccgagctgctgttcagcgagggccccagcaccagcagatgggccgccgagctgcccttccccgccgacagcagcgaccccgccagccagctgagctacagccaggaggtgggcggccccttcaagacccccatcaaggagaccctgcccatcagcagcacccccagcaagagcgtgctgcccagaacccccgagagctggagactgaccccccccgccaaggtgggcggcctggacttcagccccgtgcagaccagccagggcgccagcgaccccctgcccgaccccctgggcctgatggacctgagcaccacccccctgcagagcgccccccccctggagagcccccagagactgctgagcagcgagcccctggacctgatcagcgtgcccttcggcaacagcagccccagcgacatcgacgtgcccaagcccggcagccccgagccccaggtgagcggcctggccgccaacagaagcctgaccgagggcctggtgctggacaccatgaacgacagcctgagcaagatcctgctggacatcagcttccccggcctggacgaggaccccctgggccccgacaacatcaactggagccagttcatccccgagctgcagtag

SEQ ID NO: 81950 - DNA, 2292 bp, synthetic construct
  misc_feature 1..2292: note = Description of Artificial Sequence: Synthetic coding sequence
  source 1..2292: mol_type = other DNA
atgaagaccagccccagaagacccctgatcctgaagagaagaagactgcccctgcccgtgcagaacgcccccagcgagaccagcgaggaggagcccaagagaagccccgcccagcaggagagcaaccaggccgaggccagcaaggaggtggccgagagcaacagctgcaagttccccgccggcatcaagatcatcaaccaccccaccatgcccaacacccaggtggtggccatccccaacaacgccaacatccacagcatcatcaccgccctgaccgccaagggcaaggagagcggcagcagcggccccaacaagttcatcctgatcagctgcggcggcgcccccacccagccccccggcctgagaccccagacccagaccagctacgacgccaagagaaccgaggtgaccctggagaccctgggccccaagcccgccgccagagacgtgaacctgcccagaccccccggcgccctgtgcgagcagaagagagagacctgcgccgacggcgaggccgccggctgcaccatcaacaacagcctgagcaacatccagtggctgagaaagatgagcagcgacggcctgggcagcagaagcatcaagcaggagatggaggagaaggagaactgccacctggagcagagacaggtgaaggtggaggagcccagcagacccagcgccagctggcagaacagcgtgagcgagagacccccctacagctacatggccatgatccagttcgccatcaacagcaccgagagaaagagaatgaccctgaaggacatctacacctggatcgaggaccacttcccctacttcaagcacatcgccaagcccggctggaagaacagcatcagacacaacctgagcctgcacgacatgttcgtgagagagaccagcgccaacggcaaggtgagcttctggaccatccaccccagcgccaacagatacctgaccctggaccaggtgttcaagcccctggaccccggcagcccccagctgcccgagcacctggagagccagcagaagagacccaaccccgagctgagaagaaacatgaccatcaagaccgagctgcccctgggcgccagaagaaagatgaagcccctgctgcccagagtgagcagctacctggtgcccatccagttccccgtgaaccagagcctggtgctgcagcccagcgtgaaggtgcccctgcccctggccgccagcctgatgagcagcgagctggccagacacagcaagagagtgagaatcgcccccaaggtgctgctggccgaggagggcatcgcccccctgagcagcgccggccccggcaaggaggagaagctgctgttcggcgagggcttcagccccctgctgcccgtgcagaccatcaaggaggaggagatccagcccggcgaggagatgccccacctggccagacccatcaaggtggagagcccccccctggaggagtggcccagccccgcccccagcttcaaggaggagagcagccacagctgggaggacagcagccagagccccacccccagacccaagaagagctacagcggcctgagaagccccaccagatgcgtgagcgagatgctggtgatccagcacagagagagaagagagagaagcagaagcagaagaaagcagcacctgctgcccccctgcgtggacgagcccgagctgctgttcagcgagggccccagcaccagcagatgggccgccgagctgcccttccccgccgacagcagcgaccccgccagccagctgagctacagccaggaggtgggcggccccttcaagacccccatcaaggagaccctgcccatcagcagcacccccagcaagagcgtgctgcccagaacccccgagagctggagactgaccccccccgccaaggtgggcggcctggacttcagccccgtgcagaccagccagggcgccagcgaccccctgcccgaccccctgggcctgatggacctgagcaccacccccctgcagagcgccccccccctggagagcccccagagactgctgagcagcgagcccctggacctgatcagcgtgcccttcggcaacagcagccccagcgacatcgacgtgcccaagcccggcagccccgagccccaggtgagcggcctggccgccaacagaagcctgaccgagggcctggtgctggacaccatgaacgacagcctgagcaagatcctgctggacatcagcttccccggcctggacgaggaccccctgggccccgacaacatcaactggagccagttcatccccgagctgcagtag

SEQ ID NO: 81951 - DNA, 2247 bp, synthetic construct
  misc_feature 1..2247: note = Description of Artificial Sequence: Synthetic coding sequence
  source 1..2247: mol_type = other DNA
atgaagaccagccccagaagacccctgatcctgaagagaagaagactgcccctgcccgtgcagaacgcccccagcgagaccagcgaggaggagcccaagagaagccccgcccagcaggagagcaaccaggccgaggccagcaaggaggtggccgagagcaacagctgcaagttccccgccggcatcaagatcatcaaccaccccaccatgcccaacacccaggtggtggccatccccaacaacgccaacatccacagcatcatcaccgccctgaccgccaagggcaaggagagcggcagcagcggccccaacaagttcatcctgatcagctgcggcggcgcccccacccagccccccggcctgagaccccagacccagaccagctacgacgccaagagaaccgaggtgaccctggagaccctgggccccaagcccgccgccagagacgtgaacctgcccagaccccccggcgccctgtgcgagcagaagagagagacctgcgccgacggcgaggccgccggctgcaccatcaacaacagcctgagcaacatccagtggctgagaaagatgagcagcgacggcctgggcagcagaagcatcaagcaggagatggaggagaaggagaactgccacctggagcagagacaggtgaaggtggaggagcccagcagacccagcgccagctggcagaacagcgtgagcgagagacccccctacagctacatggccatgatccagttcgccatcaacagcaccgagagaaagagaatgaccctgaaggacatctacacctggatcgaggaccacttcccctacttcaagcacatcgccaagcccggctggaagaacagcatcagacacaacctgagcctgcacgacatgttcgtgagagagaccagcgccaacggcaaggtgagcttctggaccatccaccccagcgccaacagatacctgaccctggaccaggtgttcaagcagcagaagagacccaaccccgagctgagaagaaacatgaccatcaagaccgagctgcccctgggcgccagaagaaagatgaagcccctgctgcccagagtgagcagctacctggtgcccatccagttccccgtgaaccagagcctggtgctgcagcccagcgtgaaggtgcccctgcccctggccgccagcctgatgagcagcgagctggccagacacagcaagagagtgagaatcgcccccaaggtgctgctggccgaggagggcatcgcccccctgagcagcgccggccccggcaaggaggagaagctgctgttcggcgagggcttcagccccctgctgcccgtgcagaccatcaaggaggaggagatccagcccggcgaggagatgccccacctggccagacccatcaaggtggagagcccccccctggaggagtggcccagccccgcccccagcttcaaggaggagagcagccacagctgggaggacagcagccagagccccacccccagacccaagaagagctacagcggcctgagaagccccaccagatgcgtgagcgagatgctggtgatccagcacagagagagaagagagagaagcagaagcagaagaaagcagcacctgctgcccccctgcgtggacgagcccgagctgctgttcagcgagggccccagcaccagcagatgggccgccgagctgcccttccccgccgacagcagcgaccccgccagccagctgagctacagccaggaggtgggcggccccttcaagacccccatcaaggagaccctgcccatcagcagcacccccagcaagagcgtgctgcccagaacccccgagagctggagactgaccccccccgccaaggtgggcggcctggacttcagccccgtgcagaccagccagggcgccagcgaccccctgcccgaccccctgggcctgatggacctgagcaccacccccctgcagagcgccccccccctggagagcccccagagactgctgagcagcgagcccctggacctgatcagcgtgcccttcggcaacagcagccccagcgacatcgacgtgcccaagcccggcagccccgagccccaggtgagcggcctggccgccaacagaagcctgaccgagggcctggtgctggacaccatgaacgacagcctgagcaagatcctgctggacatcagcttccccggcctggacgaggaccccctgggccccgacaacatcaactggagccagttcatccccgagctgcagtag

SEQ ID NO: 81952 - DNA, 531 bp, synthetic construct
  misc_feature 1..531: note = Description of Artificial Sequence: Synthetic coding sequence
  source 1..531: mol_type = other DNA
atgggcgcccccgccaccagaagatgcgtggagtggctgctgggcctgtacttcctgagccacatccccatcaccctgttcatggacctgcaggccgtgctgcccagagagctgtaccccgtggagttcagaaacctgctgaagtggtacgccaaggagttcaaggaccccctgctgcaggagccccccgcctggttcaagagcttcctgttctgcgagctggtgttccagctgcccttcttccccatcgccacctacgccttcctgaagggcagctgcaagtggatcagaacccccgccatcatctacagcgtgcacaccatgaccaccctgatccccatcctgagcaccttcctgttcgaggacttcagcaaggccagcggcttcaagggccagagacccgagaccctgcacgagagactgaccctggtgagcgtgtacgccccctacctgctgatccccttcatcctgctgatcttcatgctgagaagcccctactacaagtacgaggagaagagaaagaagaagtag

SEQ ID NO: 81953 - DNA, 1473 bp, synthetic construct
  misc_feature 1..1473: note = Description of Artificial Sequence: Synthetic coding sequence
  source 1..1473: mol_type = other DNA
atgggccccgtgatgccccccagcaagaagcccgagagcagcggcatcagcgtgagcagcggcctgagccagtgctacggcggcagcggcttcagcaaggccctgcaggaggacgacgacctggacttcagcctgcccgacatcagactggaggagggcgccatggaggacgaggagctgaccaacctgaactggctgcacgagagcaagaacctgctgaagagcttcggcgagagcgtgctgagaagcgtgagccccgtgcaggacctggacgacgacaccccccccagccccgcccacagcgacatgccctacgacgccagacagaaccccaactgcaagcccccctacagcttcagctgcctgatcttcatggccatcgaggacagccccaccaagagactgcccgtgaaggacatctacaactggatcctggagcacttcccctacttcgccaacgcccccaccggctggaagaacagcgtgagacacaacctgagcctgaacaagtgcttcaagaaggtggacaaggagagaagccagagcatcggcaagggcagcctgtggtgcatcgaccccgagtacagacagaacctgatccaggccctgaagaagaccccctaccacccccacccccacgtgttcaacaccccccccacctgcccccaggcctaccagagcaccagcggcccccccatctggcccggcagcaccttcttcaagagaaacggcgccctgctgcaggaccccgacatcgacgccgccagcgccatgatgctgctgaacaccccccccgagatccaggccggcttcccccccggcgtgatccagaacggcgccagagtgctgagcagaggcctgttccccggcgtgagacccctgcccatcacccccatcggcgtgaccgccgccatgagaaacggcatcaccagctgcagaatgagaaccgagagcgagcccagctgcggcagccccgtggtgagcggcgaccccaaggaggaccacaactacagcagcgccaagagcagcaacgccagaagcaccagccccaccagcgacagcatcagcagcagcagcagcagcgccgacgaccactacgagttcgccaccaagggcagccaggagggcagcgagggcagcgagggcagcttcagaagccacgagagccccagcgacaccgaggaggacgacagaaagcacagccagaaggagcccaaggacagcctgggcgacagcggctacgccagccagcacaagaagagacagcacttcgccaaggccagaaaggtgcccagcgacaccctgcccctgaagaagagaagaaccgagaagccccccgagagcgacgacgaggagatgaaggaggccgccggcagcctgctgcacctggccggcatcagaagctgcctgaacaacatcaccaacagaaccgccaagggccagaaggagcagaaggagaccaccaagaactag

SEQ ID NO: 81954 - DNA, 1473 bp, synthetic construct; identical to SEQ ID NO: 81953
  misc_feature 1..1473: note = Description of Artificial Sequence: Synthetic coding sequence
  source 1..1473: mol_type = other DNA

SEQ ID NO: 81955 - DNA, 165 bp, synthetic construct
  misc_feature 1..165: note = Description of Artificial Sequence: Synthetic coding sequence
  source 1..165: mol_type = other DNA
atgggccccgtgatgccccccagcaagaagcccgagagcagcggcatcagcgtgagcagcggcctgagccagtgctacggcggcagcggcttcagcaaggccctgcaggaggacgacgacctggacttcagcctgcccgacatcagactggaggagggcgcctag

SEQ ID NO: 81956 - DNA, 282 bp, synthetic construct
  misc_feature 1..282: note = Description of Artificial Sequence: Synthetic coding sequence
  source 1..282: mol_type = other DNA
atgggccccgtgatgccccccagcaagaagcccgagagcagcggcatcagcgtgagcagcggcctgagccagtgctacggcggcagcggcttcagcaaggccctgcaggaggacgacgacctggacttcagcctgcccgacatcagactggaggagggcgccatggaggacgaggagctgaccaacctgaactggctgcacgagagcaagaacctgctgaagagcttcggcgagagcgtgctgagaagcgtgagccccgtgcaggacctggacgacgactag

SEQ ID NO: 81957 - DNA, 1407 bp, synthetic construct
  misc_feature 1..1407: note = Description of Artificial Sequence: Synthetic coding sequence
  source 1..1407: mol_type = other DNA
atgggccccgtgatgccccccagcaagaagcccgagagcagcggcatcagcgtgagcagcggcctgagccagtgctacggcggcagcggcttcagcaaggccctgcaggaggacgacgacctggacttcagcctgcccgacatcagactggaggagggcgccatggaggacgaggagctgaccaacctgaactggctgcacgagagcaagaacctgctgaagagcttcggcgagagcgtgctgagaagcgtgagccccgtgcaggacctggacgacgacaccccccccagccccgcccacagcgacatgccctacgacgccagacagaaccccaactgcaagcccccctacagcttcagctgcctgatcttcatggccatcgaggacagccccaccaagagactgcccgtgaaggacatctacaactggatcctggagcacttcccctacttcgccaacgcccccaccggctggaagaacagcgtgagacacaacctgagcctgaacaagtgcttcaagaaggtggacaaggagagaagccagagcatcggcaagggcagcctgtggtgcatcgaccccgagtacagacagaacctgatccaggccctgaagaagaccccctaccacccccacccccacgtgttcaacaccccccccacctgcccccaggcctaccagagcaccagcggcccccccatctggcccggcagcaccttcttcaagagaaacggcgccctgctgcaggtgccccccggcgtgatccagaacggcgccagagtgctgagcagaggcctgttccccggcgtgagacccctgcccatcacccccatcggcgtgaccgccgccatgagaaacggcatcaccagctgcagaatgagaaccgagagcgagcccagctgcggcagccccgtggtgagcggcgaccccaaggaggaccacaactacagcagcgccaagagcagcaacgccagaagcaccagccccaccagcgacagcatcagcagcagcagcagcagcgccgacgaccactacgagttcgccaccaagggcagccaggagggcagcgagggcagcgagggcagcttcagaagccacgagagccccagcgacaccgaggaggacgacagaaagcacagccagaaggagcccaaggacagcctgggcgacagcggctacgccagccagcacaagaagagacagcacttcgccaaggccagaaaggtgcccagcgacaccctgcccctgaagaagagaagaaccgagaagccccccgagagcgacgacgaggagatgaaggaggccgccggcagcctgctgcacctggccggcatcagaagctgcctgaacaacatcaccaacagaaccgccaagggccagaaggagcagaaggagaccaccaagaactag

SEQ ID NO: 81958 - DNA, 627 bp, synthetic construct
  misc_feature 1..627: note = Description of Artificial Sequence: Synthetic coding sequence
  source 1..627: mol_type = other DNA
atgggccccgtgatgccccccagcaagaagcccgagagcagcggcatcagcgtgagcagcggcctgagccagtgctacggcggcagcggcttcagcaaggccctgcaggaggacgacgacctggacttcagcctgcccgacatcagactggaggagggcgccatggaggacgaggagctgaccaacctgaactggctgcacgagagcaagaacctgctgaagagcttcggcgagagcgtgctgagaagcgtgagccccgtgcaggacctggacgacgacaccccccccagccccgcccacagcgacatgccctacgacgccagacagaaccccaactgcaagcccccctacagcttcagctgcctgatcttcatggccatcgaggacagccccaccaagagactgcccgtgaaggacatctacaactggatcctggagcacttcccctacttcgccaacgcccccaccggctggaagaacagcgtgagacacaacctgagcctgaacaagtgcttcaagaaggtggacaaggagagaagccagagcatcggcaagggcagcctgtggtgcatcgaccccgagtacagacagaacctgatccaggccctgaagaagaccccctactag

SEQ ID NO: 81959 - DNA, 1407 bp, synthetic construct; identical to SEQ ID NO: 81957
  misc_feature 1..1407: note = Description of Artificial Sequence: Synthetic coding sequence
  source 1..1407: mol_type = other DNA

SEQ ID NO: 81960 - DNA, 777 bp, synthetic construct
  misc_feature 1..777: note = Description of Artificial Sequence: Synthetic coding sequence
  source 1..777: mol_type = other DNA
atgatcgagagcgacaccagcagcatcatgagcggcatcatcagaaacagcggccagaaccaccaccccagcccccaggagtacagactgctggccaccaccagcgacgacgacctgcccggcgacctgcagagcctgagctggctgaccgccgtggacgtgcccagactgcagcagatggccagcggcagagtggacctgggcggcccctgcgtgccccacccccaccccggcgccctggccggcgtggccgacctgcacgtgggcgccacccccagccccctgctgcacggccccgccggcatggcccccagaggcatgcccggcctgggccccatcaccggccacagagacagccagatgagccagttccccgtgggcggccagcccagcagcggcctgcaggaccccccccacctgtacagccccgccacccagccccagttccccctgccccccggcgcccagcagctgagcgacagacacggccccgaggagcagcaggacagacagcccgcctgcgagagagacctgcagctgcacgagggcgccctgcccctgctgcaggacggccccagaagagtggaggagctgggcgccgcccagcccgtgagcgagcaggtgctgagagagggcggcgagcaggacgagagactgctgccccagggcctgcccgtgggcagcgagcccggcccccacagacaggacggcggcggcgacgcccaggtggaggaggagggccccggctgccacccccccgagtacggccagccctag

SEQ ID NO: 81961 - DNA, 1554 bp, synthetic construct
  misc_feature 1..1554: note = Description of Artificial Sequence: Synthetic coding sequence
  source 1..1554: mol_type = other DNA
atgatcgagagcgacaccagcagcatcatgagcggcatcatcagaaacagcggccagaaccaccaccccagcccccaggagtacagactgctggccaccaccagcgacgacgacctgcccggcgacctgcagagcctgagctggctgaccgccgtggacgtgcccagactgcagcagatggccagcggcagagtggacctgggcggcccctgcgtgccccacccccaccccggcgccctggccggcgtggccgacctgcacgtgggcgccacccccagccccctgctgcacggccccgccggcatggcccccagaggcatgcccggcctgggccccatcaccggccacagagacagcatgagccagttccccgtgggcggccagcccagcagcggcctgcaggaccccccccacctgtacagccccgccacccagccccagttccccctgccccccggcgcccagcagtgcccccccgtgggcctgtacggcccccccttcggcgtgagacccccctacccccagccccacgtggccgtgcacagcagccaggagctgcaccccaagcactaccccaagcccatctacagctacagctgcctgatcgccatggccctgaagaacagcaagaccggcagcctgcccgtgagcgagatctacagcttcatgaaggagcacttcccctacttcaagaccgcccccgacggctggaagaacagcgtgagacacaacctgagcctgaacaagtgcttcgagaaggtggagaacaagatgagcggcagcagcagaaagggctgcctgtgggccctgaacctggccagaatcgacaagatggaggaggagatgcacaagtggaagagaaaggacctggccgccatccacagaagcatggccaaccccgaggagctggacaagctgatcagcgacagacccgagagctgcagaagacccggcaagcccggcgagcccgaggcccccgtgctgacccacgccaccaccgtggccgtggcccacggctgcctggccgtgagccagctgcccccccagcccctgatgaccctgagcctgcagagcgtgcccctgcaccaccaggtgcagccccaggcccacctggcccccgacagccccgcccccgcccagaccccccccctgcacgccctgcccgacctgagccccagccccctgccccaccccgccatgggcagagcccccgtggacttcatcaacatcagcaccgacatgaacaccgaggtggacgccctggaccccagcatcatggacttcgccctgcagggcaacctgtgggaggagatgaaggacgagggcttcagcctggacaccctgggcgccttcgccgacagccccctgggctgcgacctgggcgccagcggcctgacccccgccagcggcggcagcgaccagagcttccccgacctgcaggtgaccggcctgtacaccgcctacagcacccccgacagcgtggccgccagcggcaccagcagcagcagccagtacctgggcgcccagggcaacaagcccatcgccctgctgtag

SEQ ID NO: 81962 - DNA, 1014 bp, synthetic construct
  misc_feature 1..1014: note = Description of Artificial Sequence: Synthetic coding sequence
  source 1..1014: mol_type = other DNA
atgcccggcctgccctgccccgccctgccctgccccgcccccccccccgcccccagctgcctgatcgccatggccctgaagaacagcaagaccggcagcctgcccgtgagcgagatctacagcttcatgaaggagcacttcccctacttcaagaccgcccccgacggctggaagaacagcgtgagacacaacctgagcctgaacaagtgcttcgagaaggtggagaacaagatgagcggcagcagcagaaagggctgcctgtgggccctgaacctggccagaatcgacaagatggaggaggagatgcacaagtggaagagaaaggacctggccgccatccacagaagcatggccaaccccgaggagctggacaagctgatcagcgacagacccgagagctgcagaagacccggcaagcccggcgagcccgaggcccccgtgctgacccacgccaccaccgtggccgtggcccacggctgcctggccgtgagccagctgcccccccagcccctgatgaccctgagcctgcagagcgtgcccctgcaccaccaggtgcagccccaggcccacctggcccccgacagccccgcccccgcccagaccccccccctgcacgccctgcccgacctgagccccagccccctgccccaccccgccatgggcagagcccccgtggacttcatcaacatcagcaccgacatgaacaccgaggtggacgccctggaccccagcatcatggacttcgccctgcagggcaacctgtgggaggagatgaaggacgagggcttcagcctggacaccctgggcgccttcgccgacagccccctgggctgcgacctgggcgccagcggcctgacccccgccagcggcggcagcgaccagagcttccccgacctgcaggtgaccggcctgtacaccgcctacagcacccccgacagcgtggccgccagcggcaccagcagcagcagccagtacctgggcgcccagggcaacaagcccatcgccctgctgtag

SEQ ID NO: 81963 - DNA, 1680 bp, synthetic construct
  misc_feature 1..1680: note = Description of Artificial Sequence: Synthetic coding sequence
  source 1..1680: mol_type = other DNA
atggccgccaagctgagagcccaccaggtggacgtggaccccgacttcgccccccagagcagacccagaagctgcacctggcccctgccccagcccgacctggccggcgacgaggacggcgccctgggcgccggcgtggccgagggcgccgaggactgcggccccgagagaagagccaccgcccccgccatggcccccgccccccccctgggcgccgaggtgggccccctgagaaaggccaagagcagcagaagaaacgcctggggcaacctgagctacgccgacctgatcaccaaggccatcgagagcgcccccgacaagagactgaccctgagccagatctacgactggatggtgagatacgtgccctacttcaaggacaagggcgacagcaacagcagcgccggctggaagaacagcatcagacacaacctgagcctgcacaccagattcatcagagtgcagaacgagggcaccggcaagagcagctggtggatgctgaaccccgagggcggcaagaccggcaagacccccagaagaagagccgtgagcatggacaacggcgccaagttcctgagaatcaagggcaaggccagcaagaagaagcagctgcaggcccccgagagaagccccgacgacagcagccccagcgcccccgcccccggccccgtgcccgccgccgccaagtgggccgccagccccgccagccacgccagcgacgactacgaggcctgggccgacttcagaggcggcggcagacccctgctgggcgaggccgccgagctggaggacgacgaggccctggaggccctggcccccagcagccccctgatgtaccccagccccgccagcgccctgagccccgccctgggcagcagatgccccggcgagctgcccagactggccgagctgggcggccccctgggcctgcacggcggcggcggcgccggcctgcccgagggcctgctggacggcgcccaggacgcctacggccccagagccagagcccaggccagacccggcgccggctgcgccggcggcgccggcgccggcggcagaagcagaagactgcccagacagagaggcggccccgtgagagccgccagagccctggcccagtgcctgagccccccccaccagccctacgacgccgccagaagaggcggcagaagaggccccggcaccgccggccccagaagaagactgagaggccccgccagaagaccccccgccggcagaagcgccggcgccctgagatgcagaagaagaagagccgccggcagaagagccagacccctgcccggcagacccggccccagacacgtgcagagagagcccagagtgagaagaggcgtgcaccacccccagagactgcacggccagagaagaaacggcctgcagctgagattcggccccgccagcgccgccgccggccccggcagaggccccgccccccagcccgagctgggcgccggcctgagagccgccagcagactgagagcccccagacccgtgcccagaggccccctgagcagccaccccgacagcagagtgcccgcccccgacagcagcagccccggcggcggccccagccccgccagagaccccagcagaagacccgccgccggcgagggcgagggcggcgccggcgccccccactgcagctgcccccacagctag

SEQ ID NO: 81964 - DNA, 2034 bp, synthetic construct
  misc_feature 1..2034: note = Description of Artificial Sequence: Synthetic coding sequence
  source 1..2034: mol_type = other DNA
atgatgcaggagagcggcaccgagaccaagagcaacggcagcgccatccagaacggcagcggcggcagcaaccacctgctggagtgcggcggcctgagagagggcagaagcaacggcgagacccccgccgtggacatcggcgccgccgacctggcccacgcccagcagcagcagcagcaggccctgcaggtggccagacagctgctgctgcagcagcagcagcagcagcaggtgagcggcctgaagagccccaagagaaacgacaagcagcccgccctgcaggtgcccgtgagcgtggccatgatgaccccccaggtgatcaccccccagcagatgcagcagatcctgcagcagcaggtgctgagcccccagcagctgcaggtgctgctgcagcagcagcaggccctgatgctgcagcagcagcagctgcaggagttctacaagaagcagcaggagcagctgcagctgcagctgctgcagcagcagcacgccggcaagcagcccaaggagcagcagcaggtggccacccagcagctggccttccagcagcagctgctgcagatgcagcagctgcagcagcagcacctgctgagcctgcagagacagggcctgctgaccatccagcccggccagcccgccctgcccctgcagcccctggcccagggcatgatccccaccgagctgcagcagctgtggaaggaggtgaccagcgcccacaccgccgaggagaccaccggcaacaaccacagcagcctggacctgaccaccacctgcgtgagcagcagcgcccccagcaagaccagcctgatcatgaacccccacgccagcaccaacggccagctgagcgtgcacacccccaagagagagagcctgagccacgaggagcacccccacagccaccccctgtacggccacggcgtgtgcaagtggcccggctgcgaggccgtgtgcgaggacttccagagcttcctgaagcacctgaacagcgagcacgccctggacgacagaagcaccgcccagtgcagagtgcagatgcaggtggtgcagcagctggagctgcagctggccaaggacaaggagagactgcaggccatgatgacccacctgcacgtgaagagcaccgagcccaaggccgccccccagcccctgaacctggtgagcagcgtgaccctgagcaagagcgccagcgaggccagcccccagagcctgccccacacccccaccacccccaccgcccccctgacccccgtgacccagggccccagcgtgatcaccaccaccagcatgcacaccgtgggccccatcagaagaagatacagcgacaagtacaacgtgcccatcagcagcgccgacatcgcccagaaccaggagttctacaagaacgccgaggtgagaccccccttcacctacgccagcctgatcagacaggccatcctggagagccccgagaagcagctgaccctgaacgagatctacaactggttcaccagaatgttcgcctacttcagaagaaacgccgccacctggaagaacgccgtgagacacaacctgagcctgcacaagtgcttcgtgagagtggagaacgtgaagggcgccgtgtggaccgtggacgaggtggagttccagaagagaagaccccagaagatcagcggcaaccccagcctgatcaagaacatgcagagcagccacgcctactgcacccccctgaacgccgccctgcaggccagcatggccgagaacagcatccccctgtacaccaccgccagcatgggcaaccccaccctgggcaacctggccagcgccatcagagaggagctgaacggcgccatggagcacaccaacagcaacgagagcgacagcagccccggcagaagccccatgcaggccgtgcaccccgtgcacgtgaaggaggagcccctggaccccgaggaggccgagggccccctgagcctggtgaccaccgccaaccacagccccgacttcgaccacgacagagactacgaggacgagcccgtgaacgaggacatggagtag

SEQ ID NO: 81965 - DNA, 1077 bp, synthetic construct
  misc_feature 1..1077: note = Description of Artificial Sequence: Synthetic coding sequence
  source 1..1077: mol_type = other DNA
atgatgaccccccaggtgatcaccccccagcagatgcagcagatcctgcagcagcaggtgctgagcccccagcagctgcaggtgctgctgcagcagcagcaggccctgatgctgcagcagcagcagctgcaggagttctacaagaagcagcaggagcagctgcagctgcagctgctgcagcagcagcacgccggcaagcagcccaaggagcagcagcaggtggccacccagcagctggccttccagcagcagctgctgcagatgcagcagctgcagcagcagcacctgctgagcctgcagagacagggcctgctgaccatccagcccggccagcccgccctgcccctgcagcccctggcccagggcatgatccccaccgagctgcagcagctgtggaaggaggtgaccagcgcccacaccgccgaggagaccaccggcaacaaccacagcagcctggacctgaccaccacctgcgtgagcagcagcgcccccagcaagaccagcctgatcatgaacccccacgccagcaccaacggccagctgagcgtgcacacccccaagagagagagcctgagccacgaggagcacccccacagccaccccctgtacggccacggcgtgtgcaagtggcccggctgcgaggccgtgtgcgaggacttccagagcttcctgaagcacctgaacagcgagcacgccctggacgacagaagcaccgcccagtgcagagtgcagatgcaggtggtgcagcagctggagctgcagctggccaaggacaaggagagactgcaggccatgatgacccacctgcacgtgaagagcaccgagcccaaggccgccccccagcccctgaacctggtgagcagcgtgaccctgagcaagagcgccagcgaggccagcccccagagcctgccccacacccccaccacccccaccccccccgacagcagacaccccagacccctgtgccaccacaaccaccagcacgcccacggcggcacccacccccaggccgtgctgagacagatccagagagcccacttcgtgagcagatactgcgccgagcccagaatcctgtag

SEQ ID NO: 81966 - DNA, 1509 bp, synthetic construct
  misc_feature 1..1509: note = Description of Artificial Sequence: Synthetic coding sequence
  source 1..1509: mol_type = other DNA
atgatgcaggagagcggcaccgagaccaagagcaacggcagcgccatccagaacggcagcggcggcagcaaccacctgctggagtgcggcggcctgagagagggcagaagcaacggcgagacccccgccgtggacatcggcgccgccgacctggcccacgcccagcagcagcagcagcaggccctgcaggtggccagacagctgctgctgcagcagcagcagcagcagcaggtgagcggcctgaagagccccaagagaaacgacaagcagcccgccctgcaggtgcccgtgagcgtggccatgatgaccccccaggtgatcaccccccagcagatgcagcagatcctgcagcagcaggtgctgagcccccagcagctgcaggtgctgctgcagcagcagcaggccctgatgctgcagcagcagcagctgcaggagttctacaagaagcagcaggagcagctgcagctgcagctgctgcagcagcagcacgccggcaagcagcccaaggagcagcagcaggtggccacccagcagctggccttccagcagcagctgctgcagatgcagcagctgcagcagcagcacctgctgagcctgcagagacagggcctgctgaccatccagcccggccagcccgccctgcccctgcagcccctggcccagggcatgatccccaccgagctgcagcagctgtggaaggaggtgaccagcgcccacaccgccgaggagaccaccggcaacaaccacagcagcctggacctgaccaccacctgcgtgagcagcagcgcccccagcaagaccagcctgatcatgaacccccacgccagcaccaacggccagctgagcgtgcacacccccaagagagagagcctgagccacgaggagcacccccacagccaccccctgtacggccacggcgtgtgcaagtggcccggctgcgaggccgtgtgcgaggacttccagagcttcctgaagcacctgaacagcgagcacgccctggacgacagaagcaccgcccagtgcagagtgcagatgcaggtggtgcagcagctggagctgcagctggccaaggacaaggagagactgcaggccatgatgacccacctgcacgtgaagagcaccgagcccaaggccgccccccagcccctgaacctggtgagcagcgtgaccctgagcaagagcgccagcgaggccagcccccagagcctgccccacacccccaccacccccaccgcccccctgacccccgtgacccagggccccagcgtgatcaccaccaccagcatgcacaccgtgggccccatcagaagaagatacagcgacaagtacaacgtgcccatcagcagcgccgacatcgcccagaaccaggagttctacaagaacgccgaggtgagaccccccttcacctacgccagcctgatcagacaggccatcctggagagccccgagaagaagaagaaggagagacagaccctgggcaccatgcccatccacagcacccagcagtag

SEQ ID NO: 81967 - DNA, 1470 bp, synthetic construct
  misc_feature 1..1470: note = Description of Artificial Sequence: Synthetic coding sequence
  source 1..1470: mol_type = other DNA
atgatgaccccccaggtgatcaccccccagcagatgcagcagatcctgcagcagcaggtgctgagcccccagcagctgcaggtgctgctgcagcagcagcaggccctgatgctgcagctgcagcagctgtggaaggaggtgaccagcgcccacaccgccgaggagaccaccggcaacaaccacagcagcctggacctgaccaccacctgcgtgagcagcagcgcccccagcaagaccagcctgatcatgaacccccacgccagcaccaacggccagctgagcgtgcacacccccaagagagagagcctgagccacgaggagcacccccacagccaccccctgtacggccacggcgtgtgcaagtggcccggctgcgaggccgtgtgcgaggacttccagagcttcctgaagcacctgaacagcgagcacgccctggacgacagaagcaccgcccagtgcagagtgcagatgcaggtggtgcagcagctggagctgcagctggccaaggacaaggagagactgcaggccatgatgacccacctgcacgtgaagagcaccgagcccaaggccgccccccagcccctgaacctggtgagcagcgtgaccctgagcaagagcgccagcgaggccagcccccagagcctgccccacacccccaccacccccaccgcccccctgacccccgtgacccagggccccagcgtgatcaccaccaccagcatgcacaccgtgggccccatcagaagaagatacagcgacaagtacaacgtgcccatcagcagcgccgacatcgcccagaaccaggagttctacaagaacgccgaggtgagaccccccttcacctacgccagcctgatcagacaggccatcctggagagccccgagaagcagctgaccctgaacgagatctacaactggttcaccagaatgttcgcctacttcagaagaaacgccgccacctggaagaacgccgtgagacacaacctgagcctgcacaagtgcttcgtgagagtggagaacgtgaagggcgccgtgtggaccgtggacgaggtggagttccagaagagaagaccccagaagatcagcggcaaccccagcctgatcaagaacatgcagagcagccacgcctactgcacccccctgaacgccgccctgcaggccagcatggccgagaacagcatccccctgtacaccaccgccagcatgggcaaccccaccctgggcaacctggccagcgccatcagagaggagctgaacggcgccatggagcacaccaacagcaacgagagcgacagcagccccggcagaagccccatgcaggccgtgcaccccgtgcacgtgaaggaggagcccctggaccccgaggaggccgagggccccctgagcctggtgaccaccgccaaccacagccccgacttcgaccacgacagagactacgaggacgagcccgtgaacgaggacatggagtag

SEQ ID NO: 81968 - DNA, 2034 bp, synthetic construct; identical to SEQ ID NO: 81964
  misc_feature 1..2034: note = Description of Artificial Sequence: Synthetic coding sequence
  source 1..2034: mol_type = other DNA

SEQ ID NO: 81969 - DNA, 1806 bp, synthetic construct
  misc_feature 1..1806: note = Description of Artificial Sequence: Synthetic coding sequence
  source 1..1806: mol_type = other DNA
atgatgcaggagagcggcaccgagaccaagagcaacggcagcgccatccagaacggcagcggcggcagcaaccacctgctggagtgcggcggcctgagagagggcagaagcaacggcgagacccccgccgtggacatcggcgccgccgacctggcccacgcccagcagcagcagcagcaggccctgcaggtggccagacagctgctgctgcagcagcagcagcagcagcaggtgagcggcctgaagagccccaagagaaacgacaagcagcccgccctgcagcagcagcaggtggccacccagcagctggccttccagcagcagctgctgcagatgcagcagctgcagcagcagcacctgctgagcctgcagagacagggcctgctgaccatccagcccggccagcccgccctgcccctgcagcccctggcccagggcatgatccccaccgagctgcagcagctgtggaaggaggtgaccagcgcccacaccgccgaggagaccaccggcaacaaccacagcagcctggacctgaccaccacctgcgtgagcagcagcgcccccagcaagaccagcctgatcatgaacccccacgccagcaccaacggccagctgagcgtgcacacccccaagagagagagcctgagccacgaggagcacccccacagccaccccctgtacggccacggcgtgtgcaagtggcccggctgcgaggccgtgtgcgaggacttccagagcttcctgaagcacctgaacagcgagcacgccctggacgacagaagcaccgcccagtgcagagtgcagatgcaggtggtgcagcagctggagctgcagctggccaaggacaaggagagactgcaggccatgatgacccacctgcacgtgaagagcaccgagcccaaggccgccccccagcccctgaacctggtgagcagcgtgaccctgagcaagagcgccagcgaggccagcccccagagcctgccccacacccccaccacccccaccgcccccctgacccccgtgacccagggccccagcgtgatcaccaccaccagcatgcacaccgtgggccccatcagaagaagatacagcgacaagtacaacgtgcccatcagcagcgccgacatcgcccagaaccaggagttctacaagaacgccgaggtgagaccccccttcacctacgccagcctgatcagacaggccatcctggagagccccgagaagcagctgaccctgaacgagatctacaactggttcaccagaatgttcgcctacttcagaagaaacgccgccacctggaagaacgccgtgagacacaacctgagcctgcacaagtgcttcgtgagagtggagaacgtgaagggcgccgtgtggaccgtggacgaggtggagttccagaagagaagaccccagaagatcagcggcaaccccagcctgatcaagaacatgcagagcagccacgcctactgcacccccctgaacgccgccctgcaggccagcatggccgagaacagcatccccctgtacaccaccgccagcatgggcaaccccaccctgggcaacctggccagcgccatcagagaggagctgaacggcgccatggagcacaccaacagcaacgagagcgacagcagccccggcagaagccccatgcaggccgtgcaccccgtgcacgtgaaggaggagcccctggaccccgaggaggccgagggccccctgagcctggtgaccaccgccaaccacagccccgacttcgaccacgacagagactacgaggacgagcccgtgaacgaggacatggagtag

SEQ ID NO: 81970 - DNA, 675 bp, synthetic construct
  misc_feature 1..675: note = Description of Artificial Sequence: Synthetic coding sequence
  source 1..675: mol_type = other DNA
atgatgaccccccaggtgatcaccccccagcagatgcagcagatcctgcagcagcaggtgctgagcccccagcagctgcaggtgctgctgcagcagcagcaggccctgatgctgcagcagcagcagctgcaggagttctacaagaagcagcaggagcagctgcagctgcagctgctgcagcagcagcacgccggcaagcagcccaaggagcagcagcaggtggccacccagcagctggccttccagcagcagctgctgcagatgcagcagctgcagcagcagcacctgctgagcctgcagagacagggcctgctgaccatccagcccggccagcccgccctgcccctgcagcccctggcccagggcatgatccccaccgagctgcagcagctgtggaaggaggtgaccagcgcccacaccgccgaggagaccaccggcaacaaccacagcagcctggacctgaccaccacctgcgtgagcagcagcgcccccagcaagaccagcctgatcatgaacccccacgccagcaccaacggccagctgagcgtgcacacccccaagagagagagcctgagccacgaggagcacccccacagccaccccctgtacggccacggcgtgtgcaagtggcccggctgcgaggccgtgtgcgaggacttccagagcttcctgtag

SEQ ID NO: 81971 - DNA, 2040 bp, synthetic construct
  misc_feature 1..2040: note = Description of Artificial Sequence: Synthetic coding sequence
  source 1..2040: mol_type = other DNA
atgttccagtgcgtgttcagcagcagcgtgctgcagccccacagcaccagctgcctgttcaagcacctgttctaccacagcgccacccccgccagccagaagcagcccgagcccatctacagcaagaagaccgagatccagagacagaccgtgagagcccccttcgccaagctgttcatcttcagcgccctgcaggtggccagacagctgctgctgcagcagcagcagcagcagcaggtgagcggcctgaagagccccaagagaaacgacaagcagcccgccctgcaggtgcccgtgagcgtggccatgatgaccccccaggtgatcaccccccagcagatgcagcagatcctgcagcagcaggtgctgagcccccagcagctgcaggtgctgctgcagcagcagcaggccctgatgctgcagcagcagcagctgcaggagttctacaagaagcagcaggagcagctgcagctgcagctgctgcagcagcagcacgccggcaagcagcccaaggagcagcagcaggtggccacccagcagctggccttccagcagcagctgctgcagatgcagcagctgcagcagcagcacctgctgagcctgcagagacagggcctgctgaccatccagcccggccagcccgccctgcccctgcagcccctggcccagggcatgatccccaccgagctgcagcagctgtggaaggaggtgaccagcgcccacaccgccgaggagaccaccggcaacaaccacagcagcctggacctgaccaccacctgcgtgagcagcagcgcccccagcaagaccagcctgatcatgaacccccacgccagcaccaacggccagctgagcgtgcacacccccaagagagagagcctgagccacgaggagcacccccacagccaccccctgtacggccacggcgtgtgcaagtggcccggctgcgaggccgtgtgcgaggacttccagagcttcctgaagcacctgaacagcgagcacgccctggacgacagaagcaccgcccagtgcagagtgcagatgcaggtggtgcagcagctggagctgcagctggccaaggacaaggagagactgcaggccatgatgacccacctgcacgtgaagagcaccgagcccaaggccgccccccagcccctgaacctggtgagcagcgtgaccctgagcaagagcgccagcgaggccagcccccagagcctgccccacacccccaccacccccaccgcccccctgacccccgtgacccagggccccagcgtgatcaccaccaccagcatgcacaccgtgggccccatcagaagaagatacagcgacaagtacaacgtgcccatcagcagcgccgacatcgcccagaaccaggagttctacaagaacgccgaggtgagaccccccttcacctacgccagcctgatcagacaggccatcctggagagccccgagaagcagctgaccctgaacgagatctacaactggttcaccagaatgttcgcctacttcagaagaaacgccgccacctggaagaacgccgtgagacacaacctgagcctgcacaagtgcttcgtgagagtggagaacgtgaagggcgccgtgtggaccgtggacgaggtggagttccagaagagaagaccccagaagatcagcggcaaccccagcctgatcaagaacatgcagagcagccacgcctactgcacccccctgaacgccgccctgcaggccagcatggccgagaacagcatccccctgtacaccaccgccagcatgggcaaccccaccctgggcaacctggccagcgccatcagagaggagctgaacggcgccatggagcacaccaacagcaacgagagcgacagcagccccggcagaagccccatgcaggccgtgcaccccgtgcacgtgaaggaggagcccctggaccccgaggaggccgagggccccctgagcctggtgaccaccgccaaccacagccccgacttcgaccacgacagagactacgaggacgagcccgtgaacgaggacatggagtag

SEQ ID NO: 81972 - DNA, 372 bp, synthetic construct
  misc_feature 1..372: note = Description of Artificial Sequence: Synthetic coding sequence
  source 1..372: mol_type = other DNA
atgatgaccccccaggtgatcaccccccagcagatgcagcagatcctgcagcagcaggtgctgagcccccagcagctgcaggtgctgctgcagcagcagcaggccctgatgctgcagcagcagcagctgcaggagttctacaagaagcagcaggagcagctgcagctgcagctgctgcagcagcagcacgccggcaagcagcccaaggagcagcagcaggtggccacccagcagctggccttccagcagcagctgctgcagatgcagcagctgcagcagcagcacctgctgagcctgcagagacagggcctgctgaccatccagcccggccagcccgccctgcccctgcagcccctggcccagggcatgtag

SEQ ID NO: 81973 - DNA, 2034 bp, synthetic construct; identical to SEQ ID NO: 81964
  misc_feature 1..2034: note = Description of Artificial Sequence: Synthetic coding sequence
  source 1..2034: mol_type = other DNA

SEQ ID NO: 81974 - DNA, 345 bp, synthetic construct
  misc_feature 1..345: note = Description of Artificial Sequence: Synthetic coding sequence
  source 1..345: mol_type = other DNA
atgatgcaggagagcggcaccgagaccaagagcaacggcagcgccatccagaacggcagcggcggcagcaaccacctgctggagtgcggcggcctgagagagggcagaagcaacggcgagacccccgccgtggacatcggcgccgccgacctggcccacgcccagcagcagcagcagcagtggcacctgatcaaccaccagcccagcagaagccccagcagctggctgaagagactgatcagcagcccctgggagctggaggtgctgcaggtgcccctgtggggcgccgtggccgagaccaagatgagcggccccgtgtgccagcccaaccccagccccttctag

SEQ ID NO: 81975 - DNA, 669 bp, synthetic construct
  misc_feature 1..669: note = Description of Artificial Sequence: Synthetic coding sequence
  source 1..669: mol_type = other DNA
atgatgcaggagagcgccaccgagaccatcagcaacagcagcatgaaccagaacggcatgagcaccctgagcagccagctggacgccggcagcagagacggcagaagcagcggcgacaccagcagcgaggtgagcaccgtggagctgctgcacctgcagcagcagcaggccctgcaggccgccagacagctgctgctgcagcagcagaccagcggcctgaagagccccaagagcagcgacaagcagagacccctgcaggtgcccgtgagcgtggccatgatgaccccccaggtgatcaccccccagcagatgcagcagatcctgcagcagcaggtgctgagcccccagcagctgcaggccctgctgcagcagcagcaggccgtgatgctgcagcagcagcagctgcaggagttctacaagaagcagcaggagcagctgcacctgcagctgctgcagcagcagcagcagcagcagcagcagcagcagcagcagcagcagcagcagcagcagcagcagcagcagcagcagcagcagcagcagcagcagcagcagcagcagcagcagcagcagcagcaccccggcaagcaggccaaggagcagcagcagcagcagcagcagcagcagcagctggccgcccagcagctggtgttccagcagcagctgctgtag

SEQ ID NO: 81976 - DNA, 2148 bp, synthetic construct
  misc_feature 1..2148: note = Description of Artificial Sequence: Synthetic coding sequence
  source 1..2148: mol_type = other DNA
atgatgcaggagagcgccaccgagaccatcagcaacagcagcatgaaccagaacggcatgagcaccctgagcagccagctggacgccggcagcagagacggcagaagcagcggcgacaccagcagcgaggtgagcaccgtggagctgctgcacctgcagcagcagcaggccctgcaggccgccagacagctgctgctgcagcagcagaccagcggcctgaagagccccaagagcagcgacaagcagagacccctgcaggtgcccgtgagcgtggccatgatgaccccccaggtgatcaccccccagcagatgcagcagatcctgcagcagcaggtgctgagcccccagcagctgcaggccctgctgcagcagcagcaggccgtgatgctgcagcagcagcagctgcaggagttctacaagaagcagcaggagcagctgcacctgcagctgctgcagcagcagcagcagcagcagcagcagcagcagcagcagcagcagcagcagcagcagcagcagcagcagcagcagcagcagcagcagcagcagcagcagcagcagcagcagcagcagcagcaccccggcaagcaggccaaggagcagcagcagcagcagcagcagcagcagcagctggccgcccagcagctggtgttccagcagcagctgctgcagatgcagcagctgcagcagcagcagcacctgctgagcctgcagagacagggcctgatcagcatcccccccggccaggccgccctgcccgtgcagagcctgccccaggccggcctgagccccgccgagatccagcagctgtggaaggaggtgaccggcgtgcacagcatggaggacaacggcatcaagcacggcggcctggacctgaccaccaacaacagcagcagcaccaccagcagcaacaccagcaaggccagcccccccatcacccaccacagcatcgtgaacggccagagcagcgtgctgagcgccagaagagacagcagcagccacgaggagaccggcgccagccacaccctgtacggccacggcgtgtgcaagtggcccggctgcgagagcatctgcgaggacttcggccagttcctgaagcacctgaacaacgagcacgccctggacgacagaagcaccgcccagtgcagagtgcagatgcaggtggtgcagcagctggagatccagctgagcaaggagagagagagactgcaggccatgatgacccacctgcacatgagacccagcgagcccaagcccagccccaagcccctgaacctggtgagcagcgtgaccatgagcaagaacatgctggagaccagcccccagagcctgccccagacccccaccacccccaccgcccccgtgacccccatcacccagggccccagcgtgatcacccccgccagcgtgcccaacgtgggcgccatcagaagaagacacagcgacaagtacaacatccccatgagcagcgagatcgcccccaactacgagttctacaagaacgccgacgtgagaccccccttcacctacgccaccctgatcagacaggccatcatggagagcagcgacagacagctgaccctgaacgagatctacagctggttcaccagaaccttcgcctacttcagaagaaacgccgccacctggaagaacgccgtgagacacaacctgagcctgcacaagtgcttcgtgagagtggagaacgtgaagggcgccgtgtggaccgtggacgaggtggagtaccagaagagaagaagccagaagatcaccggcagccccaccctggtgaagaacatccccaccagcctgggctacggcgccgccctgaacgccagcctgcaggccgccctggccgagagcagcctgcccctgctgagcaaccccggcctgatcaacaacgccagcagcggcctgctgcaggccgtgcacgaggacctgaacggcagcctggaccacatcgacagcaacggcaacagcagccccggctgcagcccccagccccacatccacagcatccacgtgaaggaggagcccgtgatcgccgaggacgaggactgccccatgagcctggtgaccaccgccaaccacagccccgagctggaggacgacagagagatcgaggaggagcccctgagcgaggacctggagtag

SEQ ID NO: 81977 - DNA, 1299 bp, synthetic construct
  misc_feature 1..1299: note = Description of Artificial Sequence: Synthetic coding sequence
  source 1..1299: mol_type = other DNA
atgatgcaggagagcgccaccgagaccatcagcaacagcagcatgaaccagaacggcatgagcaccctgagcagccagctggacgccggcagcagagacggcagaagcagcggcgacaccagcagcgaggtgagcaccgtggagctgctgcacctgcagcagcagcaggccctgcaggccgccagacagctgctgctgcagcagcagaccagcggcctgaagagccccaagagcagcgacaagcagagacccctgcaggtgcccgtgagcgtggccatgatgaccccccaggtgatcaccccccagcagatgcagcagatcctgcagcagcaggtgctgagcccccagcagctgcaggccctgctgcagcagcagcaggccgtgatgctgcagcagcagcagctgcaggagttctacaagaagcagcaggagcagctgcacctgcagctgctgcagcagcagcagcagcagcagcagcagcagcagcagcagcagcagcagcagcagcagcagcagcagcagcagcagcagcagcagcagcagcagcagcagcagcagcagcagcagcagcagcaccccggcaagcaggccaaggagcagcagcagcagcagcagcagcagcagcagctggccgcccagcagctggtgttccagcagcagctgctgcagatgcagcagctgcagcagcagcagcacctgctgagcctgcagagacagggcctgatcagcatcccccccggccaggccgccctgcccgtgcagagcctgccccaggccggcctgagccccgccgagatccagcagctgtggaaggaggtgaccggcgtgcacagcatggaggacaacggcatcaagcacggcggcctggacctgaccaccaacaacagcagcagcaccaccagcagcaacaccagcaaggccagcccccccatcacccaccacagcatcgtgaacggccagagcagcgtgctgagcgccagaagagacagcagcagccacgaggagaccggcgccagccacaccctgtacggccacggcgtgtgcaagtggcccggctgcgagagcatctgcgaggacttcggccagttcctgaagcacctgaacaacgagcacgccctggacgacagaagcaccgcccagtgcagagtgcagatgcaggtggtgcagcagctggagatccagctgagcaaggagagagagagactgcaggccatgatgacccacctgcacatgagacccagcgagcccaagcccagccccaagcccgtgagcgcctactgcttcatcaacagcaagtag

SEQ ID NO: 81978 - DNA, 1371 bp, synthetic construct
  misc_feature 1..1371: note = Description of Artificial Sequence: Synthetic coding sequence
  source 1..1371: mol_type = other DNA
atgcaggagagcgccaccgagaccatcagcaacagcagcatgaaccagaacggcatgagcaccctgagcagccagctggacgccggcagcagagacggcagaagcagcggcgacaccagcagcgaggtgagcaccgtggagctgctgcacctgcagcagcagcaggccctgcaggccgccagacagctgctgctgcagcagcagaccagcggcctgaagagccccaagagcagcgacaagcagagacccctgcaggagctgctgcccgagaccaagctgtgcatctgcggccacagcagcggcgacggccacccccacaacaccttcgccgtgcccgtgagcgtggccatgatgaccccccaggtgatcaccccccagcagatgcagcagatcctgcagcagcaggtgctgagcccccagcagctgcaggccctgctgcagcagcagcaggccgtgatgctgcagcagcagcagctgcaggagttctacaagaagcagcaggagcagctgcacctgcagctgctgcagcagcagcagcagcagcagcagcagcagcagcagcagcagcagcagcagcagcagcagcagcagcagcagcagcagcagcagcagcagcagcagcagcagcagcagcagcagcagcagcaccccggcaagcaggccaaggagcagcagcagcagcagcagcagcagcagcagctggccgcccagcagctggtgttccagcagcagctgctgcagatgcagcagctgcagcagcagcagcacctgctgagcctgcagagacagggcctgatcagcatcccccccggccaggccgccctgcccgtgcagagcctgccccaggccggcctgagccccgccgagatccagcagctgtggaaggaggtgaccggcgtgcacagcatggaggacaacggcatcaagcacggcggcctggacctgaccaccaacaacagcagcagcaccaccagcagcaacaccagcaaggccagcccccccatcacccaccacagcatcgtgaacggccagagcagcgtgctgagcgccagaagagacagcagcagccacgaggagaccggcgccagccacaccctgtacggccacggcgtgtgcaagtggcccggctgcgagagcatctgcgaggacttcggccagttcctgaagcacctgaacaacgagcacgccctggacgacagaagcaccgcccagtgcagagtgcagatgcaggtggtgcagcagctggagatccagctgagcaaggagagagagagactgcaggccatgatgacccacctgcacatgagacccagcgagcccaagcccagccccaagcccgtgagcgcctactgcttcatcaacagcaagtag

SEQ ID NO: 81979 - DNA, 1872 bp, synthetic construct
  misc_feature 1..1872: note = Description of Artificial Sequence: Synthetic coding sequence
  source 1..1872: mol_type = other DNA
atgatgaccccccaggtgatcaccccccagcagatgcagcagatcctgcagcagcaggtgctgagcccccagcagctgcaggccctgctgcagcagcagcaggccgtgatgctgcagcagcagcagctgcaggagttctacaagaagcagcaggagcagctgcacctgcagctgctgcagcagcagcagcagcagcagcagcagcagcagcagcagcagcagcagcagcagcagcagcagcagcagcagcagcagcagcagcagcagcagcagcagcagcagcagcagcagcagcagcaccccggcaagcaggccaaggagcagcagcagcagcagcagcagcagcagcagctggccgcccagcagctggtgttccagcagcagctgctgcagatgcagcagctgcagcagcagcagcacctgctgagcctgcagagacagggcctgatcagcatcccccccggccaggccgccctgcccgtgcagagcctgccccaggccggcctgagccccgccgagatccagcagctgtggaaggaggtgaccggcgtgcacagcatggaggacaacggcatcaagcacggcggcctggacctgaccaccaacaacagcagcagcaccaccagcagcaacaccagcaaggccagcccccccatcacccaccacagcatcgtgaacggccagagcagcgtgctgagcgccagaagagacagcagcagccacgaggagaccggcgccagccacaccctgtacggccacggcgtgtgcaagtggcccggctgcgagagcatctgcgaggacttcggccagttcctgaagcacctgaacaacgagcacgccctggacgacagaagcaccgcccagtgcagagtgcagatgcaggtggtgcagcagctggagatccagctgagcaaggagagagagagactgcaggccatgatgacccacctgcacatgagacccagcgagcccaagcccagccccaagcccctgaacctggtgagcagcgtgaccatgagcaagaacatgctggagaccagcccccagagcctgccccagacccccaccacccccaccgcccccgtgacccccatcacccagggccccagcgtgatcacccccgccagcgtgcccaacgtgggcgccatcagaagaagacacagcgacaagtacaacatccccatgagcagcgagatcgcccccaactacgagttctacaagaacgccgacgtgagaccccccttcacctacgccaccctgatcagacaggccatcatggagagcagcgacagacagctgaccctgaacgagatctacagctggttcaccagaaccttcgcctacttcagaagaaacgccgccacctggaagaacgccgtgagacacaacctgagcctgcacaagtgcttcgtgagagtggagaacgtgaagggcgccgtgtggaccgtggacgaggtggagtaccagaagagaagaagccagaagatcaccggcagccccaccctggtgaagaacatccccaccagcctgggctacggcgccgccctgaacgccagcctgcaggccgccctggccgagagcagcctgcccctgctgagcaaccccggcctgatcaacaacgccagcagcggcctgctgcaggccgtgcacgaggacctgaacggcagcctggaccacatcgacagcaacggcaacagcagccccggctgcagcccccagccccacatccacagcatccacgtgaaggaggagcccgtgatcgccgaggacgaggactgccccatgagcctggtgaccaccgccaaccacagccccgagctggaggacgacagagagatcgaggaggagcccctgagcgaggacctggagtag

SEQ ID NO: 81980 - DNA, 1593 bp, synthetic construct
  misc_feature 1..1593: note = Description of Artificial Sequence: Synthetic coding sequence
  source 1..1593: mol_type = other DNA
atgatgaccccccaggtgatcaccccccagcagatgcagcagatcctgcagcagcaggtgctgagcccccagcagctgcaggccctgctgcagcagcagcaggccgtgatgctgcagcagcagcagctgcaggagttctacaagaagcagcaggagcagctgcacctgcagctgctgcagcagcagcagcagcagcagcagcagcagcagcagcagcagcagcagcagcagcagcagcagcagcagcagcagcagcagcagcagcagcagcagcagcagcagcagcagcagcagcagcaccccggcaagcaggccaaggagcagcagcagcagcagcagcagcagcagcagctggccgcccagcagctggtgttccagcagcagctgctgcagatgcagcagctgcagcagcagcagcacctgctgagcctgcagagacagggcctgatcagcatcccccccggccaggccgccctgcccgtgcagagcctgccccaggccggcctgagccccgccgagatccagcagctgtggaaggaggtgaccggcgtgcacagcatggaggacaacggcatcaagcacggcggcctggacctgaccaccaacaacagcagcagcaccaccagcagcaacaccagcaaggccagcccccccatcacccaccacagcatcgtgaacggccagagcagcgtgctgagcgccagaagagacagcagcagccacgaggagaccggcgccagccacaccctgtacggccacggcgtgtgcaagtggcccggctgcgagagcatctgcgaggacttcggccagttcctgaagcacctgaacaacgagcacgccctggacgacagaagcaccgcccagtgcagagtgcagatgcaggtggtgcagcagctggagatccagctgagcaaggagagagagagactgcaggccatgatgacccacctgcacatgagacccagcgagcccaagcccagccccaagcccgccatcatggagagcagcgacagacagctgaccctgaacgagatctacagctggttcaccagaaccttcgcctacttcagaagaaacgccgccacctggaagaacgccgtgagacacaacctgagcctgcacaagtgcttcgtgagagtggagaacgtgaagggcgccgtgtggaccgtggacgaggtggagtaccagaagagaagaagccagaagatcaccggcagccccaccctggtgaagaacatccccaccagcctgggctacggcgccgccctgaacgccagcctgcaggccgccctggccgagagcagcctgcccctgctgagcaaccccggcctgatcaacaacgccagcagcggcctgctgcaggccgtgcacgaggacctgaacggcagcctggaccacatcgacagcaacggcaacagcagccccggctgcagcccccagccccacatccacagcatccacgtgaaggaggagcccgtgatcgccgaggacgaggactgccccatgagcctggtgaccaccgccaaccacagccccgagctggaggacgacagagagatcgaggaggagcccctgagcgaggacctggagtag

SEQ ID NO: 81981 - DNA, 2148 bp, synthetic construct; identical to SEQ ID NO: 81976
  misc_feature 1..2148: note = Description of Artificial Sequence: Synthetic coding sequence
  source 1..2148: mol_type = other DNA

SEQ ID NO: 81982 - DNA, 1149 bp, synthetic construct
  misc_feature 1..1149: note = Description of Artificial Sequence: Synthetic coding sequence
  source 1..1149: mol_type = other DNA
atgatgaccccccaggtgatcaccccccagcagatgcagcagatcctgcagcagcaggtgctgagcccccagcagctgcaggccctgctgcagcagcagcaggccgtgatgctgcagcaggacttcctggacagcggcctggagaacttcagagccgccctggagaagaaccagcagctgcaggagttctacaagaagcagcaggagcagctgcacctgcagctgctgcagcagcagcagcagcagcagcagcagcagcagcagcagcagcagcagcagcagcagcagcagcagcagcagcagcagcagcagcagcagcagcagcagcagcagcagcagcagcagcagcaccccggcaagcaggccaaggagcagcagcagcagcagcagcagcagcagcagctggccgcccagcagctggtgttccagcagcagctgctgcagatgcagcagctgcagcagcagcagcacctgctgagcctgcagagacagggcctgatcagcatcccccccggccaggccgccctgcccgtgcagagcctgccccaggccggcctgagccccgccgagatccagcagctgtggaaggaggtgaccggcgtgcacagcatggaggacaacggcatcaagcacggcggcctggacctgaccaccaacaacagcagcagcaccaccagcagcaacaccagcaaggccagcccccccatcacccaccacagcatcgtgaacggccagagcagcgtgctgagcgccagaagagacagcagcagccacgaggagaccggcgccagccacaccctgtacggccacggcgtgtgcaagtggcccggctgcgagagcatctgcgaggacttcggccagttcctgaagcacctgaacaacgagcacgccctggacgacagaagcaccgcccagtgcagagtgcagatgcaggtggtgcagcagctggagatccagctgagcaaggagagagagagactgcaggccatgatgacccacctgcacatgagacccagcgagcccaagcccagccccaagcccaacatctgcaaggtgacctacagatgcatctggatgttcctgagattcagcaactacgccgaggtgctgctgtacatccccgagaagctgacccccgtggccctgtag

SEQ ID NO: 81983 - DNA, 2199 bp, synthetic construct
  misc_feature 1..2199: note = Description of Artificial Sequence: Synthetic coding sequence
  source 1..2199: mol_type = other DNA
atgatgcaggagagcgccaccgagaccatcagcaacagcagcatgaaccagaacggcatgagcaccctgagcagccagctggacgccggcagcagagacggcagaagcagcggcgacaccagcagcgaggtgagcaccgtggagctgctgcacctgcagcagcagcaggccctgcaggccgccagacagctgctgctgcagcagcagaccagcggcctgaagagccccaagagcagcgacaagcagagacccctgcaggtgcccgtgagcgtggccatgatgaccccccaggtgatcaccccccagcagatgcagcagatcctgcagcagcaggtgctgagcccccagcagctgcaggccctgctgcagcagcagcaggccgtgatgctgcagcaggacttcctggacagcggcctggagaacttcagagccgccctggagaagaaccagcagctgcaggagttctacaagaagcagcaggagcagctgcacctgcagctgctgcagcagcagcagcagcagcagcagcagcagcagcagcagcagcagcagcagcagcagcagcagcagcagcagcagcagcagcagcagcagcagcagcagcagcagcagcagcagcagcagcaccccggcaagcaggccaaggagcagcagcagcagcagcagcagcagcagcagctggccgcccagcagctggtgttccagcagcagctgctgcagatgcagcagctgcagcagcagcagcacctgctgagcctgcagagacagggcctgatcagcatcccccccggccaggccgccctgcccgtgcagagcctgccccaggccggcctgagccccgccgagatccagcagctgtggaaggaggtgaccggcgtgcacagcatggaggacaacggcatcaagcacggcggcctggacctgaccaccaacaacagcagcagcaccaccagcagcaacaccagcaaggccagcccccccatcacccaccacagcatcgtgaacggccagagcagcgtgctgagcgccagaagagacagcagcagccacgaggagaccggcgccagccacaccctgtacggccacggcgtgtgcaagtggcccggctgcgagagcatctgcgaggacttcggccagttcctgaagcacctgaacaacgagcacgccctggacgacagaagcaccgcccagtgcagagtgcagatgcaggtggtgcagcagctggagatccagctgagcaaggagagagagagactgcaggccatgatgacccacctgcacatgagacccagcgagcccaagcccagccccaagcccctgaacctggtgagcagcgtgaccatgagcaagaacatgctggagaccagcccccagagcctgccccagacccccaccacccccaccgcccccgtgacccccatcacccagggccccagcgtgatcacccccgccagcgtgcccaacgtgggcgccatcagaagaagacacagcgacaagtacaacatccccatgagcagcgagatcgcccccaactacgagttctacaagaacgccgacgtgagaccccccttcacctacgccaccctgatcagacaggccatcatggagagcagcgacagacagctgaccctgaacgagatctacagctggttcaccagaaccttcgcctacttcagaagaaacgccgccacctggaagaacgccgtgagacacaacctgagcctgcacaagtgcttcgtgagagtggagaacgtgaagggcgccgtgtggaccgtggacgaggtggagtaccagaagagaagaagccagaagatcaccggcagccccaccctggtgaagaacatccccaccagcctgggctacggcgccgccctgaacgccagcctgcaggccgccctggccgagagcagcctgcccctgctgagcaaccccggcctgatcaacaacgccagcagcggcctgctgcaggccgtgcacgaggacctgaacggcagcctggaccacatcgacagcaacggcaacagcagccccggctgcagcccccagccccacatccacagcatccacgtgaaggaggagcccgtgatcgccgaggacgaggactgccccatgagcctggtgaccaccgccaaccacagccccgagctggaggacgacagagagatcgaggaggagcccctgagcgaggacctggagtag

SEQ ID NO: 81984 - DNA, 2223 bp, synthetic construct
  misc_feature 1..2223: note = Description of Artificial Sequence: Synthetic coding sequence
  source 1..2223: mol_type = other DNA
atgatgcaggagagcgccaccgagaccatcagcaacagcagcatgaaccagaacggcatgagcaccctgagcagccagctggacgccggcagcagagacggcagaagcagcggcgacaccagcagcgaggtgagcaccgtggagctgctgcacctgcagcagcagcaggccctgcaggccgccagacagctgctgctgcagcagcagaccagcggcctgaagagccccaagagcagcgacaagcagagacccctgcaggagctgctgcccgagaccaagctgtgcatctgcggccacagcagcggcgacggccacccccacaacaccttcgccgtgcccgtgagcgtggccatgatgaccccccaggtgatcaccccccagcagatgcagcagatcctgcagcagcaggtgctgagcccccagcagctgcaggccctgctgcagcagcagcaggccgtgatgctgcagcagcagcagctgcaggagttctacaagaagcagcaggagcagctgcacctgcagctgctgcagcagcagcagcagcagcagcagcagcagcagcagcagcagcagcagcagcagcagcagcagcagcagcagcagcagcagcagcagcagcagcagcagcagcagcagcagcagcagcagcaccccggcaagcaggccaaggagcagcagcagcagcagcagcagcagcagcagctggccgcccagcagctggtgttccagcagcagctgctgcagatgcagcagctgcagcagcagcagcacctgctgagcctgcagagacagggcctgatcagcatcccccccggccaggccgccctgcccgtgcagagcctgccccaggccggcctgagccccgccgagatccagcagctgtggaaggaggtgaccggcgtgcacagcatggaggacaacggcatcaagcacggcggcctggacctgaccaccaacaacagcagcagcaccaccagcagcaacaccagcaaggccagcccccccatcacccaccacagcatcgtgaacggccagagcagcgtgctgagcgccagaagagacagcagcagccacgaggagaccggcgccagccacaccctgtacggccacggcgtgtgcaagtggcccggctgcgagagcatctgcgaggacttcggccagttcctgaagcacctgaacaacgagcacgccctggacgacagaagcaccgcccagtgcagagtgcagatgcaggtggtgcagcagctggagatccagctgagcaaggagagagagagactgcaggccatgatgacccacctgcacatgagacccagcgagcccaagcccagccccaagcccctgaacctggtgagcagcgtgaccatgagcaagaacatgctggagaccagcccccagagcctgccccagacccccaccacccccaccgcccccgtgacccccatcacccagggccccagcgtgatcacccccgccagcgtgcccaacgtgggcgccatcagaagaagacacagcgacaagtacaacatccccatgagcagcgagatcgcccccaactacgagttctacaagaacgccgacgtgagaccccccttcacctacgccaccctgatcagacaggccatcatggagagcagcgacagacagctgaccctgaacgagatctacagctggttcaccagaaccttcgcctacttcagaagaaacgccgccacctggaagaacgccgtgagacacaacctgagcctgcacaagtgcttcgtgagagtggagaacgtgaagggcgccgtgtggaccgtggacgaggtggagtaccagaagagaagaagccagaagatcaccggcagccccaccctggtgaagaacatccccaccagcctgggctacggcgccgccctgaacgccagcctgcaggccgccctggccgagagcagcctgcccctgctgagcaaccccggcctgatcaacaacgccagcagcggcctgctgcaggccgtgcacgaggacctgaacggcagcctggaccacatcgacagcaacggcaacagcagccccggctgcagcccccagccccacatccacagcatccacgtgaaggaggagcccgtgatcgccgaggacgaggactgccccatgagcctggtgaccaccgccaaccacagccccgagctggaggacgacagagagatcgaggaggagcccctgagcgaggacctggagtag

SEQ ID NO: 81985 - DNA, 1191 bp, synthetic construct
  misc_feature 1..1191: note = Description of Artificial Sequence: Synthetic coding sequence
  source 1..1191: mol_type = other DNA
atgcccaaccccagacccggcaagcccagcgcccccagcctggccctgggccccagccccggcgccagccccagctggagagccgcccccaaggccagcgacctgctgggcgccagaggccccggcggcaccttccagggcagagacctgagaggcggcgcccacgccagcagcagcagcctgaaccccatgccccccagccagctgcagctgagcaccgtggacgcccacgccagaacccccgtgctgcaggtgcaccccctggagagccccgccatgatcagcctgaccccccccaccaccgccaccggcgtgttcagcctgaaggccagacccggcctgccccccggcatcaacgtggccagcctggagtgggtgagcagagagcccgccctgctgtgcaccttccccaaccccagcgcccccagaaaggacagcaccctgagcgccgtgccccagagcagctaccccctgctggccaacggcgtgtgcaagtggcccggctgcgagaaggtgttcgaggagcccgaggacttcctgaagcactgccaggccgaccacctgctggacgagaagggcagagcccagtgcctgctgcagagagagatggtgcagagcctggagcagcagctggtgctggagaaggagaagctgagcgccatgcaggcccacctggccggcaagatggccctgaccaaggccagcagcgtggccagcagcgacaagggcagctgctgcatcgtggccgccggcagccagggccccgtggtgcccgcctggagcggccccagagaggcccccgacagcctgttcgccgtgagaagacacctgtggggcagccacggcaacagcaccttccccgagttcctgcacaacatggactacttcaagttccacaacatgagaccccccttcacctacgccaccctgatcagatgggccatcctggaggcccccgagaagcagagaaccctgaacgagatctaccactggttcaccagaatgttcgccttcttcagaaaccaccccgccacctggaagaacgccatcagacacaacctgagcctgcacaagtgcttcgtgagagtggagagcgagaagggcgccgtgtggaccgtggacgagctggagttcagaaagaagagaagccagagacccagcagatgcagcaaccccacccccggcccctag

SEQ ID NO: 81986 - DNA, 1296 bp, synthetic construct
  misc_feature 1..1296: note = Description of Artificial Sequence: Synthetic coding sequence
  source 1..1296: mol_type = other DNA
atgcccaaccccagacccggcaagcccagcgcccccagcctggccctgggccccagccccggcgccagccccagctggagagccgcccccaaggccagcgacctgctgggcgccagaggccccggcggcaccttccagggcagagacctgagaggcggcgcccacgccagcagcagcagcctgaaccccatgccccccagccagctgcagctgcccaccctgcccctggtgatggtggcccccagcggcgccagactgggccccctgccccacctgcaggccctgctgcaggacagaccccacttcatgcaccagctgagcaccgtggacgcccacgccagaacccccgtgctgcaggtgcaccccctggagagccccgccatgatcagcctgaccccccccaccaccgccaccggcgtgttcagcctgaaggccagacccggcctgccccccggcatcaacgtggccagcctggagtgggtgagcagagagcccgccctgctgtgcaccttccccaaccccagcgcccccagaaaggacagcaccctgagcgccgtgccccagagcagctaccccctgctggccaacggcgtgtgcaagtggcccggctgcgagaaggtgttcgaggagcccgaggacttcctgaagcactgccaggccgaccacctgctggacgagaagggcagagcccagtgcctgctgcagagagagatggtgcagagcctggagcagcagctggtgctggagaaggagaagctgagcgccatgcaggcccacctggccggcaagatggccctgaccaaggccagcagcgtggccagcagcgacaagggcagctgctgcatcgtggccgccggcagccagggccccgtggtgcccgcctggagcggccccagagaggcccccgacagcctgttcgccgtgagaagacacctgtggggcagccacggcaacagcaccttccccgagttcctgcacaacatggactacttcaagttccacaacatgagaccccccttcacctacgccaccctgatcagatgggccatcctggaggcccccgagaagcagagaaccctgaacgagatctaccactggttcaccagaatgttcgccttcttcagaaaccaccccgccacctggaagaacgccatcagacacaacctgagcctgcacaagtgcttcgtgagagtggagagcgagaagggcgccgtgtggaccgtggacgagctggagttcagaaagaagagaagccagagacccagcagatgcagcaaccccacccccggcccctag

SEQ ID NO: 81987 - DNA, 1215 bp, synthetic construct
  misc_feature 1..1215: note = Description of Artificial Sequence: Synthetic coding sequence
  source 1..1215: mol_type = other DNA
atgcccaaccccagacccggcaagcccagcgcccccagcctggccctgggccccagccccggcgccagccccagctggagagccgcccccaaggccagcgacctgctgggcgccagaggccccggcggcaccttccagggcagagacctgagaggcggcgcccacgccagcagcagcagcctgaaccccatgccccccagccagctgcagctgcccaccctgcccctggtgatggtggcccccagcggcgccagactgggccccctgccccacctgcaggccctgctgcaggacagaccccacttcatgcaccagctgagcaccgtggacgcccacgccagaacccccgtgctgcaggtgcaccccctggagagccccgccatgatcagcctgaccccccccaccaccgccaccggcgtgttcagcctgaaggccagacccggcctgccccccggcatcaacgtggccagcctggagtgggtgagcagagagcccgccctgctgtgcaccttccccaaccccagcgcccccagaaaggacagcaccctgagcgccgtgccccagagcagctaccccctgctggccaacggcgtgtgcaagtggcccggctgcgagaaggtgttcgaggagcccgaggacttcctgaagcactgccaggccgaccacctgctggacgagaagggcagagcccagtgcctgctgcagagagagatggtgcagagcctggagcagcaggccagcagcgacaagggcagctgctgcatcgtggccgccggcagccagggccccgtggtgcccgcctggagcggccccagagaggcccccgacagcctgttcgccgtgagaagacacctgtggggcagccacggcaacagcaccttccccgagttcctgcacaacatggactacttcaagttccacaacatgagaccccccttcacctacgccaccctgatcagatgggccatcctggaggcccccgagaagcagagaaccctgaacgagatctaccactggttcaccagaatgttcgccttcttcagaaaccaccccgccacctggaagaacgccatcagacacaacctgagcctgcacaagtgcttcgtgagagtggagagcgagaagggcgccgtgtggaccgtggacgagctggagttcagaaagaagagaagccagagacccagcagatgcagcaaccccacccccggcccctag

SEQ ID NO: 81988 - DNA, 1191 bp, synthetic construct; identical to SEQ ID NO: 81985
  misc_feature 1..1191: note = Description of Artificial Sequence: Synthetic coding sequence
  source 1..1191: mol_type = other DNA

SEQ ID NO: 81989 - DNA, 2043 bp, synthetic construct
  misc_feature 1..2043: note = Description of Artificial Sequence: Synthetic coding sequence
  source 1..2043: mol_type = other DNA
atgatggtggagagcgccagcgagaccatcagaagcgcccccagcggccagaacggcgtgggcagcctgagcggccaggccgacggcagcagcggcggcgccaccggcaccaccgccagcggcaccggcagagaggtgaccaccggcgccgacagcaacggcgagatgagccccgccgagctgctgcacttccagcagcagcaggccctgcaggtggccagacagttcctgctgcagcaggccagcggcctgagcagccccggcaacaacgacagcaagcagagcgccagcgccgtgcaggtgcccgtgagcgtggccatgatgagcccccagatgctgaccccccagcagatgcagcagatcctgagccccccccagctgcaggccctgctgcagcagcagcaggccctgatgctgcagcagctgcaggagtactacaagaagcagcaggagcagctgcacctgcagctgctgacccagcagcaggccggcaagccccagcccaaggaggccctgggcaacaagcagctggccttccagcagcagctgctgcagatgcagcagctgcagcagcagcacctgctgaacctgcagagacagggcctggtgagcctgcagcccaaccaggccagcggccccctgcagaccctgccccaggccgccgtgtgccccaccgacctgccccagctgtggaagggcgagggcgcccccggccagcccgccgaggacagcgtgaagcaggagggcctggacctgaccggcaccgccgccaccgccaccagcttcgccgccccccccaaggtgagcccccccctgagccaccacaccctgcccaacggccagcccaccgtgctgaccagcagaagagacagcagcagccacgaggagacccccggcagccaccccctgtacggccacggcgagtgcaagtggcccggctgcgagaccctgtgcgaggacctgggccagttcatcaagcacctgaacaccgagcacgccctggacgacagaagcaccgcccagtgcagagtgcagatgcaggtggtgcagcagctggagatccagctggccaaggagagcgagagactgcaggccatgatggcccacctgcacatgagacccagcgagcccaagcccttcagccagcccctgaaccccgtgcccggcagcagcagcttcagcaaggtgaccgtgagcgccgccgacagcttccccgacggcctggtgcacccccccaccagcgccgccgcccccgtgacccccctgagaccccccggcctgggcagcgccagcctgcacggcggcggccccgccagaagaagaagcagcgacaagttctgcagccccatcagcagcgagctggcccagaaccacgagttctacaagaacgccgacgtgagaccccccttcacctacgccagcctgatcagacaggccatcctggagacccccgacagacagctgaccctgaacgagatctacaactggttcaccagaatgttcgcctacttcagaagaaacaccgccacctggaagaacgccgtgagacacaacctgagcctgcacaagtgcttcgtgagagtggagaacgtgaagggcgccgtgtggaccgtggacgagagagagtaccagaagagaagaccccccaagatgaccggcagccccaccctggtgaagaacatgatcagcggcctgagctacggcgccctgaacgccagctaccaggccgccctggccgagagcagcttccccctgctgaacagccccggcatgctgaaccccggcagcgccagcagcctgctgcccctgagccacgacgacgtgggcgcccccgtggagcccctgcccagcaacggcagcagcagcccccccagactgagccccccccagtacagccaccaggtgcaggtgaaggaggagcccgccgaggccgaggaggacagacagcccggcccccccctgggcgcccccaaccccagcgccagcggcccccccgaggacagagacctggaggaggagctgcccggcgaggagctgagctag

SEQ ID NO: 81990 - DNA, 2037 bp, synthetic construct
  misc_feature 1..2037: note = Description of Artificial Sequence: Synthetic coding sequence
  source 1..2037: mol_type = other DNA
atgatggtggagagcgccagcgagaccatcagaagcgcccccagcggccagaacggcgtgggcagcctgagcggccaggccgacggcagcagcggcggcgccaccggcaccaccgccagcggcaccggcagagaggtgaccaccggcgccgacagcaacggcgagatgagccccgccgagctgctgcacttccagcagcagcaggccctgcaggtggccagacagttcctgctgcagcaggccagcggcctgagcagccccggcaacaacgacagcaagcagagcgccagcgccgtgcaggtgcccgtgagcgtggccatgatgagcccccagatgctgaccccccagcagatgcagcagatcctgagccccccccagctgcaggccctgctgcagcagcagcaggccctgatgctgcagcaggagtactacaagaagcagcaggagcagctgcacctgcagctgctgacccagcagcaggccggcaagccccagcccaaggaggccctgggcaacaagcagctggccttccagcagcagctgctgcagatgcagcagctgcagcagcagcacctgctgaacctgcagagacagggcctggtgagcctgcagcccaaccaggccagcggccccctgcagaccctgccccaggccgccgtgtgccccaccgacctgccccagctgtggaagggcgagggcgcccccggccagcccgccgaggacagcgtgaagcaggagggcctggacctgaccggcaccgccgccaccgccaccagcttcgccgccccccccaaggtgagcccccccctgagccaccacaccctgcccaacggccagcccaccgtgctgaccagcagaagagacagcagcagccacgaggagacccccggcagccaccccctgtacggccacggcgagtgcaagtggcccggctgcgagaccctgtgcgaggacctgggccagttcatcaagcacctgaacaccgagcacgccctggacgacagaagcaccgcccagtgcagagtgcagatgcaggtggtgcagcagctggagatccagctggccaaggagagcgagagactgcaggccatgatggcccacctgcacatgagacccagcgagcccaagcccttcagccagcccctgaaccccgtgcccggcagcagcagcttcagcaaggtgaccgtgagcgccgccgacagcttccccgacggcctggtgcacccccccaccagcgccgccgcccccgtgacccccctgagaccccccggcctgggcagcgccagcctgcacggcggcggccccgccagaagaagaagcagcgacaagttctgcagccccatcagcagcgagctggcccagaaccacgagttctacaagaacgccgacgtgagaccccccttcacctacgccagcctgatcagacaggccatcctggagacccccgacagacagctgaccctgaacgagatctacaactggttcaccagaatgttcgcctacttcagaagaaacaccgccacctggaagaacgccgtgagacacaacctgagcctgcacaagtgcttcgtgagagtggagaacgtgaagggcgccgtgtggaccgtggacgagagagagtaccagaagagaagaccccccaagatgaccggcagccccaccctggtgaagaacatgatcagcggcctgagctacggcgccctgaacgccagctaccaggccgccctggccgagagcagcttccccctgctgaacagccccggcatgctgaaccccggcagcgccagcagcctgctgcccctgagccacgacgacgtgggcgcccccgtggagcccctgcccagcaacggcagcagcagcccccccagactgagccccccccagtacagccaccaggtgcaggtgaaggaggagcccgccgaggccgaggaggacagacagcccggcccccccctgggcgcccccaaccccagcgccagcggcccccccgaggacagagacctggaggaggagctgcccggcgaggagctgagctag

SEQ ID NO: 81991 - DNA, 2043 bp, synthetic construct; identical to SEQ ID NO: 81989
  misc_feature 1..2043: note = Description of Artificial Sequence: Synthetic coding sequence
  source 1..2043: mol_type = other DNA

SEQ ID NO: 81992 - DNA, 2004 bp, synthetic construct
  misc_feature 1..2004: note = Description of Artificial Sequence: Synthetic coding sequence
  source 1..2004: mol_type = other DNA
atgatggtggagagcgccagcgagaccatcagaagcgcccccagcggccagaacggcgtgggcagcctgagcggccaggccgacggcagcagcggcggcgccaccggcaccaccgccagcggcaccggcagagaggtgaccaccggcgccgacagcaacggcgagatgagccccgccgagctgctgcacttccagcagcagcaggccctgcaggtggccagacagttcctgctgcagcaggccagcggcctgagcagccccggcaacaacgacagcaagcagagcgccagcgccgtgcaggtgcccgtgagcgtggccatgatgagcccccagatgctgaccccccagcagatgcagcagatcctgagccccccccagctgcaggccctgctgcagcagcagcaggccctgatgctgcagcagctgcaggagtactacaagaagcagcaggagcagctgcacctgcagctgctgacccagcagcaggccggcaagccccagcccaaggaggccctgggcaacaagcagctggccttccagcagcagctgctgcagatgcagcagctgcagcagcagcacctgctgaacctgcagagacagggcctggtgagcctgcagcccaaccaggccagcggccccctgcagaccctgccccaggccgtgtgccccaccgacctgccccagctgtggaagggcgagggcgcccccggccagcccgccgaggacagcgtgaagcaggagggcctggacctgaccggcaccgccgccaccgccaccagcttcgccgccccccccaaggtgagcccccccctgagccaccacaccctgcccaacggccagcccaccgtgctgaccagcagaagagacagcagcagccacgaggagacccccggcagccaccccctgtacggccacggcgagtgcaagtggcccggctgcgagaccctgtgcgaggacctgggccagttcatcaagcacctgaacaccgagcacgccctggacgacagaagcaccgcccagtgcagagtgcagatgcaggtggtgcagcagctggagatccagctggccaaggagagcgagagactgcaggccatgatggcccacctgcacatgagacccagcgagcccaagcccttcagccagcccgtgaccgtgagcgccgccgacagcttccccgacggcctggtgcacccccccaccagcgccgccgcccccgtgacccccctgagaccccccggcctgggcagcgccagcctgcacggcggcggccccgccagaagaagaagcagcgacaagttctgcagccccatcagcagcgagctggcccagaaccacgagttctacaagaacgccgacgtgagaccccccttcacctacgccagcctgatcagacaggccatcctggagacccccgacagacagctgaccctgaacgagatctacaactggttcaccagaatgttcgcctacttcagaagaaacaccgccacctggaagaacgccgtgagacacaacctgagcctgcacaagtgcttcgtgagagtggagaacgtgaagggcgccgtgtggaccgtggacgagagagagtaccagaagagaagaccccccaagatgaccggcagccccaccctggtgaagaacatgatcagcggcctgagctacggcgccctgaacgccagctaccaggccgccctggccgagagcagcttccccctgctgaacagccccggcatgctgaaccccggcagcgccagcagcctgctgcccctgagccacgacgacgtgggcgcccccgtggagcccctgcccagcaacggcagcagcagcccccccagactgagccccccccagtacagccaccaggtgcaggtgaaggaggagcccgccgaggccgaggaggacagacagcccggcccccccctgggcgcccccaaccccagcgccagcggcccccccgaggacagagacctggaggaggagctgcccggcgaggagctgagctag

SEQ ID NO: 81993 - DNA, 2007 bp, synthetic construct
  misc_feature 1..2007: note = Description of Artificial Sequence: Synthetic coding sequence
  source 1..2007: mol_type = other DNA
atgatggtggagagcgccagcgagaccatcagaagcgcccccagcggccagaacggcgtgggcagcctgagcggccaggccgacggcagcagcggcggcgccaccggcaccaccgccagcggcaccggcagagaggtgaccaccggcgccgacagcaacggcgagatgagccccgccgagctgctgcacttccagcagcagcaggccctgcaggtggccagacagttcctgctgcagcaggccagcggcctgagcagccccggcaacaacgacagcaagcagagcgccagcgccgtgcaggtgcccgtgagcgtggccatgatgagcccccagatgctgaccccccagcagatgcagcagatcctgagccccccccagctgcaggccctgctgcagcagcagcaggccctgatgctgcagcagctgcaggagtactacaagaagcagcaggagcagctgcacctgcagctgctgacccagcagcaggccggcaagccccagcccaaggaggccctgggcaacaagcagctggccttccagcagcagctgctgcagatgcagcagctgcagcagcagcacctgctgaacctgcagagacagggcctggtgagcctgcagcccaaccaggccagcggccccctgcagaccctgccccaggccgccgtgtgccccaccgacctgccccagctgtggaagggcgagggcgcccccggccagcccgccgaggacagcgtgaagcaggagggcctggacctgaccggcaccgccgccaccgccaccagcttcgccgccccccccaaggtgagcccccccctgagccaccacaccctgcccaacggccagcccaccgtgctgaccagcagaagagacagcagcagccacgaggagacccccggcagccaccccctgtacggccacggcgagtgcaagtggcccggctgcgagaccctgtgcgaggacctgggccagttcatcaagcacctgaacaccgagcacgccctggacgacagaagcaccgcccagtgcagagtgcagatgcaggtggtgcagcagctggagatccagctggccaaggagagcgagagactgcaggccatgatggcccacctgcacatgagacccagcgagcccaagcccttcagccagcccgtgaccgtgagcgccgccgacagcttccccgacggcctggtgcacccccccaccagcgccgccgcccccgtgacccccctgagaccccccggcctgggcagcgccagcctgcacggcggcggccccgccagaagaagaagcagcgacaagttctgcagccccatcagcagcgagctggcccagaaccacgagttctacaagaacgccgacgtgagaccccccttcacctacgccagcctgatcagacaggccatcctggagacccccgacagacagctgaccctgaacgagatctacaactggttcaccagaatgttcgcctacttcagaagaaacaccgccacctggaagaacgccgtgagacacaacctgagcctgcacaagtgcttcgtgagagtggagaacgtgaagggcgccgtgtggaccgtggacgagagagagtaccagaagagaagaccccccaagatgaccggcagccccaccctggtgaagaacatgatcagcggcctgagctacggcgccctgaacgccagctaccaggccgccctggccgagagcagcttccccctgctgaacagccccggcatgctgaaccccggcagcgccagcagcctgctgcccctgagccacgacgacgtgggcgcccccgtggagcccctgcccagcaacggcagcagcagcccccccagactgagccccccccagtacagccaccaggtgcaggtgaaggaggagcccgccgaggccgaggaggacagacagcccggcccccccctgggcgcccccaaccccagcgccagcggcccccccgaggacagagacctggaggaggagctgcccggcgaggagctgagctag

SEQ ID NO: 81994 - DNA, 1212 bp, synthetic construct
  misc_feature 1..1212: note = Description of Artificial Sequence: Synthetic coding sequence
  source 1..1212: mol_type = other DNA
atgaagctggaggtgttcgtgcccagagccgcccacggcgacaagcagggcagcgacctggagggcgccggcggcagcgacgcccccagccccctgagcgccgccggcgacgacagcctgggcagcgacggcgactgcgccgccaacagccccgccgccggcggcggcgccagagacacccagggcgacggcgagcagagcgccggcggcggccccggcgccgaggaggccatccccgccgccgccgccgccgccgtggtggccgagggcgccgaggccggcgccgccggccccggcgccggcggcgccggcagcggcgagggcgccagaagcaagccctacaccagaagacccaagcccccctacagctacatcgccctgatcgccatggccatcagagacagcgccggcggcagactgaccctggccgagatcaacgagtacctgatgggcaagttccccttcttcagaggcagctacaccggctggagaaacagcgtgagacacaacctgagcctgaacgactgcttcgtgaaggtgctgagagaccccagcagaccctggggcaaggacaactactggatgctgaaccccaacagcgagtacaccttcgccgacggcgtgttcagaagaagaagaaagagactgagccacagagcccccgtgcccgcccccggcctgagacccgaggaggcccccggcctgcccgccgcccccccccccgcccccgccgcccccgccagccccagaatgagaagccccgccagacaggaggagagagccagccccgccggcaagttcagcagcagcttcgccatcgacagcatcctgagaaagcccttcagaagcagaagactgagagacaccgcccccggcaccaccctgcagtggggcgccgccccctgcccccccctgcccgccttccccgccctgctgcccgccgccccctgcagagccctgctgcccctgtgcgcctacggcgccggcgagcccgccagactgggcgccagagaggccgaggtgccccccaccgccccccccctgctgctggcccccctgcccgccgccgcccccgccaagcccctgagaggccccgccgccggcggcgcccacctgtactgccccctgagactgcccgccgccctgcaggccgccagcgtgagaagacccggcccccacctgccctaccccgtggagaccctgctggcctag

SEQ ID NO: 81995 - DNA, 1626 bp, synthetic construct
  misc_feature 1..1626: note = Description of Artificial Sequence: Synthetic coding sequence
  source 1..1626: mol_type = other DNA
atgagccagctggtggagtgcgtgcccaacttcagcgagggcaagaaccaggaggtgatcgacgccatcagcggcgccatcacccagacccccggctgcgtgctgctggacgtggacgccggccccagcaccaacagaaccgtgtacaccttcgtgggcccccccgagtgcgtggtggagggcgccctgaacgccgccagagtggccagcagactgatcgacatgagcagacaccagggcgagcaccccagaatgggcgccctggacgtgtgccccttcatccccgtgagaggcgtgagcgtggacgagtgcgtgctgtgcgcccaggccttcggccagagactggccgaggagctggacgtgcccgtgtacctgtacggcgaggccgccagaatggacagcagaagaaccctgcccgccatcagagccggcgagtacgaggccctgcccaagaagctgcagcaggccgactgggcccccgacttcggccccagcagcttcgtgcccagctggggcgccaccgccaccggcgccagaaagttcctgatcgccttcaacatcaacctgctgggcaccaaggagcaggcccacagaatcgccctgaacctgagagagcagggcagaggcaaggaccagcccggcagactgaagaaggtgcagggcatcggctggtacctggacgagaagaacctggcccaggtgagcaccaacctgctggacttcgaggtgaccgccctgcacaccgtgtacgaggagacctgcagagaggcccaggagctgagcctgcccgtggtgggcagccagctggtgggcctggtgcccctgaaggccctgctggacgccgccgccttctactgcgagaaggagaacctgttcatcctggaggaggagcagagaatcagactggtggtgagcagactgggcctggacagcctgtgccccttcagccccaaggagagaatcatcgagtacctggtgcccgagagaggccccgagagaggcctgggcagcaagagcctgagagccttcgtgggcgaggtgggcgccagaagcgccgcccccggcggcggcagcgtggccgccgccgccgccgccatgggcgccgccctgggcagcatggtgggcctgatgacctacggcagaagacagttccagagcctggacaccaccatgagaagactgatcccccccttcagagaggccagcgccaagctgaccaccctggtggacgccgacgccgaggccttcaccgcctacctggaggccatgagactgcccaagaacacccccgaggagaaggacagaagaaccgccgccctgcaggagggcctgagaagagccgtgagcgtgcccctgaccctggccgagaccgtggccagcctgtggcccgccctgcaggagctggccagatgcggcaacctggcctgcagaagcgacctgcaggtggccgccaaggccctggagatgggcgtgttcggcgcctacttcaacgtgctgatcaacctgagagacatcaccgacgaggccttcaaggaccagatccaccacagagtgagcagcctgctgcaggaggccaagacccaggccgccctggtgctggactgcctggagaccagacaggagtag

SEQ ID NO: 81996 - DNA, 1488 bp, synthetic construct
  misc_feature 1..1488: note = Description of Artificial Sequence: Synthetic coding sequence
  source 1..1488: mol_type = other DNA
atgagccagctggtggagtgcgtgcccaacttcagcgagggcaagaaccaggaggtgatcgacgccatcagcggcgccatcacccagacccccggctgcgtgctgctggacgtggacgccggccccagcaccaacagaaccgtgtacaccttcgtgggcccccccgagtgcgtggtggagggcgccctgaacgccgccagagtggccagcagactgatcgacatgagcagacaccagggcgagcaccccagaatgggcgccctggacgtgtgccccttcatccccgtgagaggcgtgagcgtggacgagtgcgtgctgtgcgcccaggccttcggccagagactggccgaggagctggacgtgcccgtgtacctgtacggcgaggccgccagaatggacagcagaagaaccctgcccgccatcagagccggcgagtacgaggccctgcccaagaagctgcagcaggccgactgggcccccgacttcggccccagcagcttcgtgcccagctggggcgccaccgccaccggcgccagaaagttcctgatcgccttcaacatcaacctgctgggcaccaaggagcaggcccacagaatcgccctgaacctgagagagcagggcagaggcaaggaccagcccggcagactgaagaaggtgcagggcatcggctggtacctggacgagaagaacctggcccaggtgagcaccaacctgctggacttcgaggtgaccgccctgcacaccgtgtacgaggagacctgcagagaggcccaggagctgagcctgcccgtggtgggcagccagctggtgggcctggtgcccctgaaggccctgctggacgccgccgccttctactgcgagaaggagaacctgttcatcctggaggaggagcagagaatcagactggtggtgagcagactgggcctggacagcctgtgccccttcagccccaaggagagaatcatcgagtacctggtgcccgagagaggccccgagagaggcctgggcagcaagagcctgagagccttcgtgggcgaggtgggcgccagaagcgccgcccccggcggcggcagcgtggccgccgccgccgccgccatgggcgccgccctgggcagcatggtgggcctgatgacctacggcagaagacagttccagagcctggacaccaccatgagaagactgatcccccccttcagagaggccagcgccaagctgaccaccctggtggacgccgacgccgaggccttcaccgcctacctggcccacggcggccccaccggcggcagcgaggccggcagcctgtgcgccgccgacgccggcggcgacggcggcctggccgtggccggccccgccggcaccggccccgtgtgggagcccggcctgcccgtgagaccccccggcggcggccagagccccggcgacggcagagtgtggagaatcttccagagagcccaccagcccgagggccaccacagaagaggcatctag

SEQ ID NO: 81997 - DNA, 1719 bp, synthetic construct
  misc_feature 1..1719: note = Description of Artificial Sequence: Synthetic coding sequence
  source 1..1719: mol_type = other DNA
atgagccagctggtggagtgcgtgcccaacttcagcgagggcaagaaccaggaggtgatcgacgccatcagcggcgccatcacccagacccccggctgcgtgctgctggacgtggacgccggccccagcaccaacagaaccgtgtacaccttcgtgggcccccccgagtgcgtggtggagggcgccctgaacgccgccagagtggccagcagactgatcgacatgagcagacaccagggcgagcaccccagaatgggcgccctggacgtgtgccccttcatccccgtgagaggcgtgagcgtggacgagtgcgtgctgtgcgcccaggccttcggccagagactggccgaggagctggacgtgcccgtgtacctgtacggcgaggccgccagaatggacagcagaagaaccctgcccgccatcagagccggcgagtacgaggccctgcccaagaagctgcagcaggccgactgggcccccgacttcggccccagcagcttcgtgcccagctggggcgccaccgccaccggcgccagaaagttcctgatcgccttcaacatcaacctgctgggcaccaaggagcaggcccacagaatcgccctgaacctgagagagcagggcagaggcaaggaccagcccggcagactgaagaaggtgcagggcatcggctggtacctggacgagaagaacctggcccaggtgagcaccaacctgctggacttcgaggtgaccgccctgcacaccgtgtacgaggagacctgcagagaggcccaggagctgagcctgcccgtggtgggcagccagctggtgggcctggtgcccctgaaggccctgctggacgccgccgccttctactgcgagaaggagaacctgttcatcctggaggaggagcagagaatcagactggtggtgagcagactgggcctggacagcctgtgccccttcagccccaaggagagaatcatcgagtacctggtgcccgagagaggccccgagagaggcctgggcagcaagagcctgagagccttcgtgggcgaggtgggcgccagaagcgccgcccccggcggcggcagcgtggccgccgccgccgccgccatgggcgccgccctgggcagcatggtgggcctgatgacctacggcagaagacagttccagagcctggacaccaccatgagaagactgatcccccccttcagagaggccagcgccaagctgaccaccctggtggacgccgacgccgaggccttcaccgcctacctggaggccatgagactgcccaagaacacccccgaggagaaggacagaagaaccgccgccctgcaggagggcctgagaagagccgtgagcgtgcccctgaccctggccgagaccgtggccagcctgtggcccgccctgcaggagctggccagatgcggcaacctggcctgcagaagcgacctgcaggtggccgccaaggccctggagatgggcgtgttcggcgcctacttcaacgtgctgatcaacctgagagacatcaccgacgaggccttcaaggaccagccccccgccggcagccaggaccccggctgcaccggcgccggcctgctgggcgaccccgccggcgtgaccgtgagagaggccagccccggcagcgtggccccccccagccccatccccagaggccagagctgcgacctggagacccccggcaccgccggccccagcaccctggagggctag

SEQ ID NO: 81998 - DNA, 1488 bp, synthetic construct; identical to SEQ ID NO: 81996
  misc_feature 1..1488: note = Description of Artificial Sequence: Synthetic coding sequence
  source 1..1488: mol_type = other DNA

SEQ ID NO: 81999 - DNA, 1626 bp, synthetic construct; identical to SEQ ID NO: 81995
  misc_feature 1..1626: note = Description of Artificial Sequence: Synthetic coding sequence
  source 1..1626: mol_type = other DNA

SEQ ID NO: 82000 - DNA, 1719 bp, synthetic construct; identical to SEQ ID NO: 81997
  misc_feature 1..1719: note = Description of Artificial Sequence: Synthetic coding sequence
  source 1..1719: mol_type = other DNA

SEQ ID NO: 82001 - DNA, 1779 bp, synthetic construct
  misc_feature 1..1779: note = Description of Artificial Sequence: Synthetic coding sequence
  source 1..1779: mol_type = other DNA
atgagctggggcaccgagctgtgggaccagttcgacaacctggagaagcacacccagtggggcatcgacatcctggagaagtacatcaagttcgtgaaggagagaaccgagatcgagctgagctacgccaagcagctgagaaacctgagcaagaagtaccagcccaagaagaacagcaaggaggaggaggagtacaagtacaccagctgcaaggccttcatcagcaacctgaacgagatgaacgactacgccggccagcacgaggtgatcagcgagaacatggccagccagatcatcgtggacctggccagatacgtgcaggagctgaagcaggagagaaagagcaacttccacgacggcagaaaggcccagcagcacatcgagacctgctggaagcagctggagagcagcaagagaagattcgagagagactgcaaggaggccgacagagcccagcagtacttcgagaagatggacgccgacatcaacgtgaccaaggccgacgtggagaaggccagacagcaggcccagatcagacaccagatggccgaggacagcaaggccgactacagcagcatcctgcagaagttcaaccacgagcagcacgagtactaccacacccacatccccaacatcttccagaagatccaggagatggaggagagaagaatcgtgagaatgggcgagagcatgaagacctacgccgaggtggacagacaggtgatccccatcatcggcaagtgcctggacggcatcgtgaaggccgccgagagcatcgaccagaagaacgacagccagctggtgatcgaggcctacaagagcggcttcgagccccccggcgacatcgagttcgaggactacacccagcccatgaagagaaccgtgagcgacaacagcctgagcaacagcagaggcgagggcaagcccgacctgaagttcggcggcaagagcaagggcaagctgtggcccttcatcaagaagaacaagagccccaagcagcagaaggagcccctgagccacagattcaacgagttcatgaccagcaagcccaagatccactgcttcagaagcctgaagagaggccacagcctgctgaagggcgccacccccgaggacttcagcaacctgccccccgagcagagaagaaagaagctgcagcagaaggtggacgagctgaacaaggagatccagaaggagatggaccagagagacgccatcaccaagatgaaggacgtgtacctgaagaacccccagatgggcgaccccgccagcctggaccacaagctggccgaggtgagccagaacatcgagaagctgagagtggagacccagaagttcgaggcctggctggccgaggtggagggcagactgcccgccagaagcgagcaggccagaagacagagcggcctgtacgacagccagaacccccccaccgtgaacaactgcgcccaggacagagagagccccgacggcagctacaccgaggagcagagccaggagagcgagatgaaggtgctggccaccgacttcgacgacgagttcgacgacgaggagcccctgcccgccatcggcacctgcaaggccctgtacaccttcgagggccagaacgagggcaccatcagcgtggtggagggcgagaccctgtacgtgatcgaggaggacaagggcgacggctggaccagaatcagaagaaacgaggacgaggagggctacgtgcccaccagctacgtggaggtgtgcctggacaagaacgccaagggcgccaagacctacatctag

SEQ ID NO: 82002 - DNA, 1854 bp, synthetic construct
  misc_feature 1..1854: note = Description of Artificial Sequence: Synthetic coding sequence
  source 1..1854: mol_type = other DNA
atcagatggaccgacgagctgtgggaccagttcgacaacctggagaagcacacccagtggggcatcgacatcctggagaagtacatcaagttcgtgaaggagagaaccgagatcgagctgagctacgccaagcagctgagaaacctgagcaagaagtaccagcccaagaagaacagcaaggaggaggaggagtacaagtacaccagctgcaaggccttcatcagcaacctgaacgagatgaacgactacgccggccagcacgaggtgatcagcgagaacatggccagccagatcatcgtggacctggccagatacgtgcaggagctgaagcaggagagaaagagcaacttccacgacggcagaaaggcccagcagcacatcgagacctgctggaagcagctggagagcagcaagagaagattcgagagagactgcaaggaggccgacagagcccagcagtacttcgagaagatggacgccgacatcaacgtgaccaaggccgacgtggagaaggccagacagcaggcccagatcagacaccagatggccgaggacagcaaggccgactacagcagcatcctgcagaagttcaaccacgagcagcacgagtactaccacacccacatccccaacatcttccagaagatccaggagatggaggagagaagaatcgtgagaatgggcgagagcatgaagacctacgccgaggtggacagacaggtgatccccatcatcggcaagtgcctggacggcatcgtgaaggccgccgagagcatcgaccagaagaacgacagccagctggtgatcgaggcctacaagagcggcttcgagccccccggcgacatcgagttcgaggactacacccagcccatgaagagaaccgtgagcgacaacagcctgagcaacagcagaggcgagggcaagcccgacctgaagttcggcggcaagagcaagggcaagctgtggcccttcatcaagaagaacaagctgatgagcctgctgaccagcccccaccagccccccccccccccccccgccagcgccagccccagcgccgtgcccaacggcccccagagccccaagcagcagaaggagcccctgagccacagattcaacgagttcatgaccagcaagcccaagatccactgcttcagaagcctgaagagaggccccagcttcaagcagggcgccacccccgaggacttcagcaacctgccccccgagcagagaagaaagaagctgcagcagaaggtggacgagctgaacaaggagatccagaaggagatggaccagagagacgccatcaccaagatgaaggacgtgtacctgaagaacccccagatgggcgaccccgccagcctggaccacaagctggccgaggtgagccagaacatcgagaagctgagagtggagacccagaagttcgaggcctggctggccgaggtggagggcagactgcccgccagaagcgagcaggccagaagacagagcggcctgtacgacagccagaacccccccaccgtgaacaactgcgcccaggacagagagagccccgacggcagctacaccgaggagcagagccaggagagcgagatgaaggtgctggccaccgacttcgacgacgagttcgacgacgaggagcccctgcccgccatcggcacctgcaaggccctgtacaccttcgagggccagaacgagggcaccatcagcgtggtggagggcgagaccctgtacgtgatcgaggaggacaagggcgacggctggaccagaatcagaagaaacgaggacgaggagggctacgtgcccaccagctacgtggaggtgtgcctggacaagaacgccaaggacagctag

SEQ ID NO: 82003 - DNA, 1854 bp, synthetic construct
  misc_feature 1..1854: note = Description of Artificial Sequence: Synthetic coding sequence
  source 1..1854: mol_type = other DNA
atgagctggggcaccgagctgtgggaccagttcgacaacctggagaagcacacccagtggggcatcgacatcctggagaagtacatcaagttcgtgaaggagagaaccgagatcgagctgagctacgccaagcagctgagaaacctgagcaagaagtaccagcccaagaagaacagcaaggaggaggaggagtacaagtacaccagctgcaaggccttcatcagcaacctgaacgagatgaacgactacgccggccagcacgaggtgatcagcgagaacatggccagccagatcatcgtggacctggccagatacgtgcaggagctgaagcaggagagaaagagcaacttccacgacggcagaaaggcccagcagcacatcgagacctgctggaagcagctggagagcagcaagagaagattcgagagagactgcaaggaggccgacagagcccagcagtacttcgagaagatggacgccgacatcaacgtgaccaaggccgacgtggagaaggccagacagcaggcccagatcagacaccagatggccgaggacagcaaggccgactacagcagcatcctgcagaagttcaaccacgagcagcacgagtactaccacacccacatccccaacatcttccagaagatccaggagatggaggagagaagaatcgtgagaatgggcgagagcatgaagacctacgccgaggtggacagacaggtgatccccatcatcggcaagtgcctggacggcatcgtgaaggccgccgagagcatcgaccagaagaacgacagccagctggtgatcgaggcctacaagagcggcttcgagccccccggcgacatcgagttcgaggactacacccagcccatgaagagaaccgtgagcgacaacagcctgagcaacagcagaggcgagggcaagcccgacctgaagttcggcggcaagagcaagggcaagctgtggcccttcatcaagaagaacaagctgatgagcctgctgaccagcccccaccagccccccccccccccccccgccagcgccagccccagcgccgtgcccaacggcccccagagccccaagcagcagaaggagcccctgagccacagattcaacgagttcatgaccagcaagcccaagatccactgcttcagaagcctgaagagaggccacagcctgctgaagggcgccacccccgaggacttcagcaacctgccccccgagcagagaagaaagaagctgcagcagaaggtggacgagctgaacaaggagatccagaaggagatggaccagagagacgccatcaccaagatgaaggacgtgtacctgaagaacccccagatgggcgaccccgccagcctggaccacaagctggccgaggtgagccagaacatcgagaagctgagagtggagacccagaagttcgaggcctggctggccgaggtggagggcagactgcccgccagaagcgagcaggccagaagacagagcggcctgtacgacagccagaacccccccaccgtgaacaactgcgcccaggacagagagagccccgacggcagctacaccgaggagcagagccaggagagcgagatgaaggtgctggccaccgacttcgacgacgagttcgacgacgaggagcccctgcccgccatcggcacctgcaaggccctgtacaccttcgagggccagaacgagggcaccatcagcgtggtggagggcgagaccctgtacgtgatcgaggaggacaagggcgacggctggaccagaatcagaagaaacgaggacgaggagggctacgtgcccaccagctacgtggaggtgtgcctggacaagaacgccaaggacagctag

SEQ ID NO: 82004 - DNA, 1827 bp, synthetic construct
  misc_feature 1..1827: note = Description of Artificial Sequence: Synthetic coding sequence
  source 1..1827: mol_type = other DNA
atgagctggggcaccgagctgtgggaccagttcgacaacctggagaagcacacccagtggggcatcgacatcctggagaagtacatcaagttcgtgaaggagagaaccgagatcgagctgagctacgccaagcagctgagaaacctgagcaagaagtaccagcccaagaagaacagcaaggaggaggaggagtacaagtacaccagctgcaaggccttcatcagcaacctgaacgagatgaacgactacgccggccagcacgaggtgatcagcgagaacatggccagccagatcatcgtggacctggccagatacgtgcaggagctgaagcaggagagaaagagcaacttccacgacggcagaaaggcccagcagcacatcgagacctgctggaagcagctggagagcagcaagagaagattcgagagagactgcaaggaggccgacagagcccagcagtacttcgagaagatggacgccgacatcaacgtgaccaaggccgacgtggagaaggccagacagcaggcccagatcagacaccagatggccgaggacagcaaggccgactacagcagcatcctgcagaagttcaaccacgagcagcacgagtactaccacacccacatccccaacatcttccagaagatccaggagatggaggagagaagaatcgtgagaatgggcgagagcatgaagacctacgccgaggtggacagacaggtgatccccatcatcggcaagtgcctggacggcatcgtgaaggccgccgagagcatcgaccagaagaacgacagccagctggtgatcgaggcctacaagagcggcttcgagccccccggcgacatcgagttcgaggactacacccagcccatgaagagaaccgtgagcgacaacagcctgagcaacagcagaggcgagggcaagcccgacctgaagttcggcggcaagagcaagggcaagctgtggcccttcatcaagaagaacaagccccccccccccccccccgccagcgccagccccagcgccgtgcccaacggcccccagagccccaagcagcagaaggagcccctgagccacagattcaacgagttcatgaccagcaagcccaagatccactgcttcagaagcctgaagagaggccacagcctgaccctgcagggcgccacccccgaggacttcagcaacctgccccccgagcagagaagaaagaagctgcagcagaaggtggacgagctgaacaaggagatccagaaggagatggaccagagagacgccatcaccaagatgaaggacgtgtacctgaagaacccccagatgggcgaccccgccagcctggaccacaagctggccgaggtgagccagaacatcgagaagctgagagtggagacccagaagttcgaggcctggctggccgaggtggagggcagactgcccgccagaagcgagcaggccagaagacagagcggcctgtacgacagccagaacccccccaccgtgaacaactgcgcccaggacagagagagccccgacggcagctacaccgaggagcagagccaggagagcgagatgaaggtgctggccaccgacttcgacgacgagttcgacgacgaggagcccctgcccgccatcggcacctgcaaggccctgtacaccttcgagggccagaacgagggcaccatcagcgtggtggagggcgagaccctgtacgtgatcgaggaggacaagggcgacggctggaccagaatcagaagaaacgaggacgaggagggctacgtgcccaccagctacgtggaggtgtgcctggacaagaacgccaaggacagctag

SEQ ID NO: 82005 - DNA, 738 bp, synthetic construct
  misc_feature 1..738: note = Description of Artificial Sequence: Synthetic coding sequence
  source 1..738: mol_type = other DNA
atgaagagaaccatcggcaagcccacctacgccttcgaggccagagactacgtgctgagcctgaagctgggcgccacccccgaggacttcagcaacctgccccccgagcagagaagaaagaagctgcagcagaaggtggacgagctgaacaaggagatccagaaggagatggaccagagagacgccatcaccaagatgaaggacgtgtacctgaagaacccccagatgggcgaccccgccagcctggaccacaagctggccgaggtgagccagaacatcgagaagctgagagtggagacccagaagttcgaggcctggctggccgaggtggagggcagactgcccgccagaagcgagcaggccagaagacagagcggcctgtacgacagccagaacccccccaccgtgaacaactgcgcccaggacagagagagccccgacggcagctacaccgaggagcagagccaggagagcgagatgaaggtgctggccaccgacttcgacgacgagttcgacgacgaggagcccctgcccgccatcggcacctgcaaggccctgtacaccttcgagggccagaacgagggcaccatcagcgtggtggagggcgagaccctgtacgtgatcgaggaggacaagggcgacggctggaccagaatcagaagaaacgaggacgaggagggctacgtgcccaccagctacgtggaggtgtgcctggacaagaacgccaaggacagctag

SEQ ID NO: 82006 - DNA, 1854 bp, synthetic construct
  misc_feature 1..1854: note = Description of Artificial Sequence: Synthetic coding sequence
  source 1..1854: mol_type = other DNA
atgagctggggcaccgagctgtgggaccagttcgacaacctggagaagcacacccagtggggcatcgacatcctggagaagtacatcaagttcgtgaaggagagaaccgagatcgagctgagctacgccaagcagctgagaaacctgagcaagaagtaccagcccaagaagaacagcaaggaggaggaggagtacaagtacaccagctgcaaggccttcatcagcaacctgaacgagatgaacgactacgccggccagcacgaggtgatcagcgagaacatggccagccagatcatcgtggacctggccagatacgtgcaggagctgaagcaggagagaaagagcaacttccacgacggcagaaaggcccagcagcacatcgagacctgctggaagcagctggagagcagcaagagaagattcgagagagactgcaaggaggccgacagagcccagcagtacttcgagaagatggacgccgacatcaacgtgaccaaggccgacgtggagaaggccagacagcaggcccagatcagacaccagatggccgaggacagcaaggccgactacagcagcatcctgcagaagttcaaccacgagcagcacgagtactaccacacccacatccccaacatcttccagaagatccaggagatggaggagagaagaatcgtgagaatgggcgagagcatgaagacctacgccgaggtggacagacaggtgatccccatcatcggcaagtgcctggacggcatcgtgaaggccgccgagagcatcgaccagaagaacgacagccagctggtgatcgaggcctacaagagcggcttcgagccccccggcgacatcgagttcgaggactacacccagcccatgaagagaaccgtgagcgacaacagcctgagcaacagcagaggcgagggcaagcccgacctgaagttcggcggcaagagcaagggcaagctgtggcccttcatcaagaagaacaagctgatgagcctgctgaccagcccccaccagccccccccccccccccccgccagcgccagccccagcgccgtgcccaacggcccccagagccccaagcagcagaaggagcccctgagccacagattcaacgagttcatgaccagcaagcccaagatccactgcttcagaagcctgaagagaggcctgagcctgaagctgggcgccacccccgaggacttcagcaacctgccccccgagcagagaagaaagaagctgcagcagaaggtggacgagctgaacaaggagatccagaaggagatggaccagagagacgccatcaccaagatgaaggacgtgtacctgaagaacccccagatgggcgaccccgccagcctggaccacaagctggccgaggtgagccagaacatcgagaagctgagagtggagacccagaagttcgaggcctggctggccgaggtggagggcagactgcccgccagaagcgagcaggccagaagacagagcggcctgtacgacagccagaacccccccaccgtgaacaactgcgcccaggacagagagagccccgacggcagctacaccgaggagcagagccaggagagcgagatgaaggtgctggccaccgacttcgacgacgagttcgacgacgaggagcccctgcccgccatcggcacctgcaaggccctgtacaccttcgagggccagaacgagggcaccatcagcgtggtggagggcgagaccctgtacgtgatcgaggaggacaagggcgacggctggaccagaatcagaagaaacgaggacgaggagggctacgtgcccaccagctacgtggaggtgtgcctggacaagaacgccaaggacagctag

SEQ ID NO: 82007 - DNA, 1722 bp, synthetic construct
  misc_feature 1..1722: note = Description of Artificial Sequence: Synthetic coding sequence
  source 1..1722: mol_type = other DNA
tgactgagctacgccaagcagctgagaaacctgagcaagaagtaccagcccaagaagaacagcaaggaggaggaggagtacaagtacaccagctgcaaggccttcatcagcaacctgaacgagatgaacgactacgccggccagcacgaggtgatcagcgagaacatggccagccagatcatcgtggacctggccagatacgtgcaggagctgaagcaggagagaaagagcaacttccacgacggcagaaaggcccagcagcacatcgagacctgctggaagcagctggagagcagcaagagaagattcgagagagactgcaaggaggccgacagagcccagcagtacttcgagaagatggacgccgacatcaacgtgaccaaggccgacgtggagaaggccagacagcaggcccagatcagacaccagatggccgaggacagcaaggccgactacagcagcatcctgcagaagttcaaccacgagcagcacgagtactaccacacccacatccccaacatcttccagaagatccaggagatggaggagagaagaatcgtgagaatgggcgagagcatgaagacctacgccgaggtggacagacaggtgatccccatcatcggcaagtgcctggacggcatcgtgaaggccgccgagagcatcgaccagaagaacgacagccagctggtgatcgaggcctacaagagcggcttcgagccccccggcgacatcgagttcgaggactacacccagcccatgaagagaaccgtgagcgacaacagcctgagcaacagcagaggcgagggcaagcccgacctgaagttcggcggcaagagcaagggcaagctgtggcccttcatcaagaagaacaagccccccccccccccccccgccagcgccagccccagcgccgtgcccaacggcccccagagccccaagcagcagaaggagcccctgagccacagattcaacgagttcatgaccagcaagcccaagatccactgcttcagaagcctgaagagaggccacagcctgctgaagggcgccacccccgaggacttcagcaacctgccccccgagcagagaagaaagaagctgcagcagaaggtggacgagctgaacaaggagatccagaaggagatggaccagagagacgccatcaccaagatgaaggacgtgtacctgaagaacccccagatgggcgaccccgccagcctggaccacaagctggccgaggtgagccagaacatcgagaagctgagagtggagacccagaagttcgaggcctggctggccgaggtggagggcagactgcccgccagaagcgagcaggccagaagacagagcggcctgtacgacagccagaacccccccaccgtgaacaactgcgcccaggacagagagagccccgacggcagctacaccgaggagcagagccaggagagcgagatgaaggtgctggccaccgacttcgacgacgagttcgacgacgaggagcccctgcccgccatcggcacctgcaaggccctgtacaccttcgagggccagaacgagggcaccatcagcgtggtggagggcgagaccctgtacgtgatcgaggaggacaagggcgacggctggaccagaatcagaagaaacgaggacgaggagggctacgtgcccaccagctacgtggaggtgtgcctggacaagaacgccaagggcgccaagacctacatctag

SEQ ID NO: 82008 - DNA, 3495 bp, synthetic construct
  misc_feature 1..3495: note = Description of Artificial Sequence: Synthetic coding sequence
  source 1..3495: mol_type = other DNA
atggccggcggcgaggacagaggcgacggcgagcccgtgagcgtggtgaccgtgagagtgcagtacctggaggacaccgaccccttcgcctgcgccaacttccccgagcccagaagagcccccacctgcagcctggacggcgccctgcccctgggcgcccagatccccgccgtgcacagactgctgggcgcccccctgaagctggaggactgcgccctgcaggtgagccccagcggctactacctggacaccgagctgagcctggaggagcagagagagatgctggagggcttctacgaggagatcagcaagggcagaaagcccaccctgatcctgagaacccagctgagcgtgagagtgaacgccatcctggagaagctgtacagcagcagcggccccgagctgagaagaagcctgttcagcctgaagcagatcttccaggaggacaaggacctggtgcccgagttcgtgcacagcgagggcctgagctgcctgatcagagtgggcgccgccgccgaccacaactaccagagctacatcctgagagccctgggccagctgatgctgttcgtggacggcatgctgggcgtggtggcccacagcgacaccatccagtggctgtacaccctgtgcgccagcctgagcagactggtggtgaagaccgccctgaagctgctgctggtgttcgtggagtacagcgagaacaacgcccccctgttcatcagagccgtgaacagcgtggccagcaccaccggcgcccccccctgggccaacctggtgagcatcctggaggagaagaacggcgccgaccccgagctgctggtgtacaccgtgaccctgatcaacaagaccctggccgccctgcccgaccaggacagcttctacgacgtgaccgacgccctggagcagcagggcatggaggccctggtgcagagacacctgggcaccgccggcaccgacgtggacctgagaacccagctggtgctgtacgagaacgccctgaagctggaggacggcgacatcgaggaggcccccggcgccggcggcagaagagagagaagaaagcccagcagcgaggagggcaagagaagcagaagaagcctggagggcggcggctgccccgccagagcccccgagcccggccccaccggccccgccagccccgtgggccccaccagcagcaccggccccgccctgctgaccggccccgccagcagccccgtgggcccccccagcggcctgcaggccagcgtgaacctgttccccaccatcagcgtggcccccagcgccgacaccagcagcgagagaagcatctacaaggccagattcctggagaacgtggccgccgccgagaccgagaagcaggtggccctggcccagggcagagccgagaccctggccggcgccatgcccaacgaggccggcggccaccccgacgccagacagctgtgggacagccccgagaccgcccccgccgccagaaccccccagagccccgccccctgcgtgctgctgagagcccagagaagcctggcccccgagcccaaggagcccctgatccccgccagccccaaggccgagcccatctgggagctgcccaccagagcccccagactgagcatcggcgacctggacttcagcgacctgggcgaggacgaggaccaggacatgctgaacgtggagagcgtggaggccggcaaggacatccccgcccccagcccccccctgcccctgctgagcggcgtgcccccccccccccccctgcccccccccccccccatcaagggccccttccccccccccccccccctgcccctggccgcccccctgccccacagcgtgcccgacagcagcgccctgcccaccaagagaaagaccgtgaagctgttctggagagagctgaagctggccggcggccacggcgtgagcgccagcagattcggcccctgcgccaccctgtgggccagcctggaccccgtgagcgtggacaccgccagactggagcacctgttcgagagcagagccaaggaggtgctgcccagcaagaaggccggcgagggcagaagaaccatgaccaccgtgctggaccccaagagaagcaacgccatcaacatcggcctgaccaccctgccccccgtgcacgtgatcaaggccgccctgctgaacttcgacgagttcgccgtgagcaaggacggcatcgagaagctgctgaccatgatgcccaccgaggaggagagacagaagatcgaggaggcccagctggccaaccccgacatccccctgggccccgccgagaacttcctgatgaccctggccagcatcggcggcctggccgccagactgcagctgtgggccttcaagctggactacgacagcatggagagagagatcgccgagcccctgttcgacctgaaggtgggcatggagcagctggtgcagaacgccaccttcagatgcatcctggccaccctgctggccgtgggcaacttcctgaacggcagccagagcagcggcttcgagctgagctacctggagaaggtgagcgaggtgaaggacaccgtgagaagacagagcctgctgcaccacctgtgcagcctggtgctgcagaccagacccgagagcagcgacctgtacagcgagatccccgccctgaccagatgcgccaaggtggacttcgagcagctgaccgagaacctgggccagctggagagaagaagcagagccgccgaggagagcctgagaagcctggccaagcacgagctggcccccgccctgagagccagactgacccacttcctggaccagtgcgccagaagagtggccatgctgagaatcgtgcacagaagagtgtgcaacagattccacgccttcctgctgtacctgggctacaccccccaggccgccagagaggtgagaatcatgcagttctgccacaccctgagagagttcgccctggagtacagaacctgcagagagagagtgctgcagcagcagcagaagcaggccacctacagagagagaaacaagaccagaggcagaatgatcaccgagaccgagaagttcagcggcgtggccggcgaggcccccagcaaccccagcgtgcccgtggccgtgagcagcggccccggcagaggcgacgccgacagccacgccagcatgaagagcctgctgaccagcagacccgaggacaccacccacaacagaagaagcagaggcatggtgcagagcagcagccccatcatgcccaccgtgggccccagcaccgccagccccgaggagccccccggcagcagcctgcccagcgacaccagcgacgagatcatggacctgctggtgcagagcgtgaccaagagcagccccagagccctggccgccagagagagaaagagaagcagaggcaacagaaagagcctgagaagaaccctgaagagcggcctgggcgacgacctggtgcaggccctgggcctgagcaagggccccggcctggaggtgtag

SEQ ID NO: 82009 - DNA, 4320 bp, synthetic construct
  misc_feature 1..4320: note = Description of Artificial Sequence: Synthetic coding sequence
  source 1..4320: mol_type = other DNA
atggccaccctggcctgcagagtgcagttcctggacgacaccgaccccttcaacagcaccaacttccccgagcccagcagaccccccctgttcaccttcagagaggacctggccctgggcacccagctggccggcgtgcacagactgctgcaggccccccacaagctggacgactgcaccctgcagctgagccacaacggcgcctacctggacctggaggccaccctggccgagcagagagacgagctggagggcttccaggacgacgccggcagaggcaagaagcacagcatcatcctgagaacccagctgagcgtgagagtgcacgcctgcatcgagaagctgtacaacagcagcggcagagacctgagaagagccctgttcagcctgaagcagatcttccaggacgacaaggacctggtgcacgagttcgtggtggccgagggcctgacctgcctgatcaaggtgggcgccgaggccgaccagaactaccagaactacatcctgagagccctgggccagatcatgctgtacgtggacggcatgaacggcgtgatcaacagaaacgagaccatccagtggctgtacaccctgatcggcagcaagttcagactggtggtgaagaccgccctgaagctgctgctggtgttcgtggagtacagcgagagcaacgcccccctgctgatccaggccgtgaccgccgtggacaccaagagaggcgtgaagccctggagcaacatcatggagatcctggaggagaaggacggcgtggacaccgagctgctggtgtacgccatgaccctggtgaacaagaccctgagcggcctgcccgaccaggacaccttctacgacgtggtggactgcctggaggagctgggcatcgccgccgtgagccagagacacctgaacaagaagggcaccgacctggacctggtggagcagctgaacatctacgaggtggccctgagacacgaggacggcgacgagaccaccgagcccccccccagcggctgcagagacagaagaagagccagcgtgtgcagcagcggcggcggcgagcacagaggcctggacagaagaagaagcagaagacacagcgtgcagagcatcaagagcaccctgagcgcccccaccagcccctgcagccagagcgcccccagcttcaagcccaaccaggtgagagacctgagagagaagtacagcaacttcggcaacaacagctaccacagcagcagacccagcagcggcagcagcgtgcccaccacccccaccagcagcgtgagccccccccaggaggccagactggagagaagcagccccagcggcctgctgaccagcagcttcagacagcaccaggagagcctggccgccgagagagagagaagaagacaggagagagaggagagactgcagagaatcgagagagaggagagaaacaagttcagcagagactacctggacaagagagaggagcagagacaggccagagaggagagatacaagtacctggagcagctggccgccgaggagcacgagaaggagctgagaagcagaagcgtgagcagaggcagagccgacctgagcctggacctgaccagccccgccgcccccgcctgcctggcccccctgagccacagccccagcagcagcgacagccaggaggccctgaccgtgagcgccagcagccccggcaccccccaccacccccaggccagcgccggcgaccccgagcccgagagcgaggccgagcccgaggccgaggccggcgccggccaggtggccgacgaggccggccaggacatcgccagcgcccacgagggcgccgagaccgaggtggagcaggccctggagcaggagcccgaggagagagccagcctgagcgagaaggagagacagaacgagggcgtgaacgagagagacaactgcagcgccagcagcgtgagcagcagcagcagcaccctggagagagaggagaaggaggacaagctgagcagagacagaaccaccggcctgtggcccgccggcgtgcaggacgccggcgtgaacggccagtgcggcgacatcctgaccaacaagagattcatgctggacatgctgtacgcccacaacagaaagagccccgacgacgaggagaagggcgacggcgaggccggcagaacccagcaggaggccgaggccgtggccagcctggccaccagaatcagcaccctgcaggccaacagccagacccaggacgagagcgtgagaagagtggacgtgggctgcctggacaacagaggcagcgtgaaggccttcgccgagaagttcaacagcggcgacctgggcagaggcagcatcagccccgacgccgagcccaacgacaaggtgcccgagaccgcccccgtgcagcccaagaccgagagcgactacatctgggaccagctgatggccaaccccagagagctgagaatccaggacatggacttcaccgacctgggcgaggaggacgacatcgacgtgctggacgtggacctgggccacagagaggcccccggccccccccccccccccccccccaccttcctgggcctgcccccccccccccccccccccctgctggacagcatcccccccccccccgtgcccggcaacctgctggtgccccccccccccgtgttcaacgccccccagggcctgggctggagccaggtgcccagaggccagcccaccttcaccaagaagaagaagaccatcagactgttctggaacgaggtgagacccttcgactggccctgcaagaacaacagaagatgcagagagttcctgtggagcaagctggagcccatcaaggtggacaccagcagactggagcacctgttcgagagcaagagcaaggagctgagcgtgagcaagaagaccgccgccgacggcaagagacaggagatcatcgtgctggacagcaagagaagcaacgccatcaacatcggcctgaccgtgctgcccccccccagaaccatcaagatcgccatcctgaacttcgacgagtacgccctgaacaaggagggcatcgagaagatcctgaccatgatccccaccgacgaggagaagcagaagatccaggaggcccagctggccaaccccgagatccccctgggcagcgccgagcagttcctgctgaccctgagcagcatcagcgagctgagcgccagactgcacctgtgggccttcaagatggactacgagaccaccgagaaggaggtggccgagcccctgctggacctgaaggagggcatcgaccagctggagaacaacaagaccctgggcttcatcctgagcaccctgctggccatcggcaacttcctgaacggcaccaacgccaaggccttcgagctgagctacctggagaaggtgcccgaggtgaaggacaccgtgcacaagcagagcctgctgcaccacgtgtgcaccatggtggtggagaacttccccgacagcagcgacctgtacagcgagatcggcgccatcaccagaagcgccaaggtggacttcgaccagctgcaggacaacctgtgccagatggagagaagatgcaaggccagctgggaccacctgaaggccatcgccaagcacgagatgaagcccgtgctgaagcagagaatgagcgagttcctgaaggactgcgccgagagaatcatcatcctgaagatcgtgcacagaagaatcatcaacagattccacagcttcctgctgttcatgggccaccccccctacgccatcagagaggtgaacatcaacaagttctgcagaatcatcagcgagttcgccctggagtacagaaccaccagagagagagtgctgcagcagaagcagaagagagccaaccacagagagagaaacaagaccagaggcaagatgatcaccgacagcggcaagttcagcggcagcagccccgccccccccagccagccccagggcctgagctacgccgaggacgccgccgagcacgagaacatgaaggccgtgctgaagaccagcagccccagcgtggaggacgccacccccgccctgggcgtgagaaccagaagcagagccagcagaggcagcaccagcagctggaccatgggcaccgacgacagccccaacgtgaccgacgacgccgccgacgagatcatggacagaatcgtgaagagcgccacccaggtgcccagccagagagtggtgcccagagagagaaagagaagcagagccaacagaaagagcctgagaagaaccctgaagagcggcctgacccccgaggaggccagagccctgggcctggtgggcaccagcgagctgcagctgtag

SEQ ID NO: 82010 - DNA, 4269 bp, synthetic construct
  misc_feature 1..4269: note = Description of Artificial Sequence: Synthetic coding sequence
  source 1..4269: mol_type = other DNA
atggccaccctggcctgcagagtgcagttcctggacgacaccgaccccttcaacagcaccaacttccccgagcccagcagaccccccctgttcaccttcagagaggacctggccctgggcacccagctggccggcgtgcacagactgctgcaggccccccacaagctggacgactgcaccctgcagctgagccacaacggcgcctacctggacctggaggccaccctggccgagcagagagacgagctggagggcttccaggacgacgccggcagaggcaagaagcacagcatcatcctgagaacccagctgagcgtgagagtgcacgcctgcatcgagaagctgtacaacagcagcggcagagacctgagaagagccctgttcagcctgaagcagatcttccaggacgacaaggacctggtgcacgagttcgtggtggccgagggcctgacctgcctgatcaaggtgggcgccgaggccgaccagaactaccagaactacatcctgagagccctgggccagatcatgctgtacgtggacggcatgaacggcgtgatcaacagaaacgagaccatccagtggctgtacaccctgatcggcagcaagttcagactggtggtgaagaccgccctgaagctgctgctggtgttcgtggagtacagcgagagcaacgcccccctgctgatccaggccgtgaccgccgtggacaccaagagaggcgtgaagccctggagcaacatcatggagatcctggaggagaaggacggcgtggacaccgagctgctggtgtacgccatgaccctggtgaacaagaccctgagcggcctgcccgaccaggacaccttctacgacgtggtggactgcctggaggagctgggcatcgccgccgtgagccagagacacctgaacaagaagggcaccgacctggacctggtggagcagctgaacatctacgaggtggccctgagacacgaggacggcgacgagaccaccgagcccccccccagcggctgcagagacagaagaagagccagcgtgtgcagcagcggcggcggcgagcacagaggcctggacagaagaagaagcagaagacacagcgtgcagagcatcaagagcaccctgagcgcccccaccagcccctgcagccagagcgcccccagcttcaagcccaaccaggtgagagacctgagagagaagtacagcaacttcggcaacaacagctaccacagcagcagacccagcagcggcagcagcgtgcccaccacccccaccagcagcgtgagccccccccaggaggccagactggagagaagcagccccagcggcctgctgaccagcagcttcagacagcaccaggagagcctggccgccgagagagagagaagaagacaggagagagaggagagactgcagagaatcgagagagaggagagaaacaagttcagatacaagtacctggagcagctggccgccgaggagcacgagaaggagctgagaagcagaagcgtgagcagaggcagagccgacctgagcctggacctgaccagccccgccgcccccgcctgcctggcccccctgagccacagccccagcagcagcgacagccaggaggccctgaccgtgagcgccagcagccccggcaccccccaccacccccaggccagcgccggcgaccccgagcccgagagcgaggccgagcccgaggccgaggccggcgccggccaggtggccgacgaggccggccaggacatcgccagcgcccacgagggcgccgagaccgaggtggagcaggccctggagcaggagcccgaggagagagccagcctgagcgagaaggagagacagaacgagggcgtgaacgagagagacaactgcagcgccagcagcgtgagcagcagcagcagcaccctggagagagaggagaaggaggacaagctgagcagagacagaaccaccggcctgtggcccgccggcgtgcaggacgccggcgtgaacggccagtgcggcgacatcctgaccaacaagagattcatgctggacatgctgtacgcccacaacagaaagagccccgacgacgaggagaagggcgacggcgaggccggcagaacccagcaggaggccgaggccgtggccagcctggccaccagaatcagcaccctgcaggccaacagccagacccaggacgagagcgtgagaagagtggacgtgggctgcctggacaacagaggcagcgtgaaggccttcgccgagaagttcaacagcggcgacctgggcagaggcagcatcagccccgacgccgagcccaacgacaaggtgcccgagaccgcccccgtgcagcccaagaccgagagcgactacatctgggaccagctgatggccaaccccagagagctgagaatccaggacatggacttcaccgacctgggcgaggaggacgacatcgacgtgctggacgtggacctgggccacagagaggcccccggccccccccccccccccccccccaccttcctgggcctgcccccccccccccccccccccctgctggacagcatcccccccccccccgtgcccggcaacctgctggtgccccccccccccgtgttcaacgccccccagggcctgggctggagccaggtgcccagaggccagcccaccttcaccaagaagaagaagaccatcagactgttctggaacgaggtgagacccttcgactggccctgcaagaacaacagaagatgcagagagttcctgtggagcaagctggagcccatcaaggtggacaccagcagactggagcacctgttcgagagcaagagcaaggagctgagcgtgagcaagaagaccgccgccgacggcaagagacaggagatcatcgtgctggacagcaagagaagcaacgccatcaacatcggcctgaccgtgctgcccccccccagaaccatcaagatcgccatcctgaacttcgacgagtacgccctgaacaaggagggcatcgagaagatcctgaccatgatccccaccgacgaggagaagcagaagatccaggaggcccagctggccaaccccgagatccccctgggcagcgccgagcagttcctgctgaccctgagcagcatcagcgagctgagcgccagactgcacctgtgggccttcaagatggactacgagaccaccgagaaggaggtggccgagcccctgctggacctgaaggagggcatcgaccagctggagaacaacaagaccctgggcttcatcctgagcaccctgctggccatcggcaacttcctgaacggcaccaacgccaaggccttcgagctgagctacctggagaaggtgcccgaggtgaaggacaccgtgcacaagcagagcctgctgcaccacgtgtgcaccatggtggtggagaacttccccgacagcagcgacctgtacagcgagatcggcgccatcaccagaagcgccaaggtggacttcgaccagctgcaggacaacctgtgccagatggagagaagatgcaaggccagctgggaccacctgaaggccatcgccaagcacgagatgaagcccgtgctgaagcagagaatgagcgagttcctgaaggactgcgccgagagaatcatcatcctgaagatcgtgcacagaagaatcatcaacagattccacagcttcctgctgttcatgggccaccccccctacgccatcagagaggtgaacatcaacaagttctgcagaatcatcagcgagttcgccctggagtacagaaccaccagagagagagtgctgcagcagaagcagaagagagccaaccacagagagagaaacaagaccagaggcaagatgatcaccgacagcggcaagttcagcggcagcagccccgccccccccagccagccccagggcctgagctacgccgaggacgccgccgagcacgagaacatgaaggccgtgctgaagaccagcagccccagcgtggaggacgccacccccgccctgggcgtgagaaccagaagcagagccagcagaggcagcaccagcagctggaccatgggcaccgacgacagccccaacgtgaccgacgacgccgccgacgagatcatggacagaatcgtgaagagcgccacccaggtgcccagccagagagtggtgcccagagagagaaagagaagcagagccaacagaaagagcctgagaagaaccctgaagagcggcctgacccccgaggaggccagagccctgggcctggtgggcaccagcgagctgcagctgtag

SEQ ID NO: 82011 - DNA, 4206 bp, synthetic construct
  misc_feature 1..4206: note = Description of Artificial Sequence: Synthetic coding sequence
  source 1..4206: mol_type = other DNA
atggccaccctggcctgcagagtgcagttcctggacgacaccgaccccttcaacagcaccaacttccccgagcccagcagaccccccctgttcaccttcagagaggacctggccctgggcacccagctggccggcgtgcacagactgctgcaggccccccacaagctggacgactgcaccctgcagctgagccacaacggcgcctacctggacctggaggccaccctggccgagcagagagacgagctggagggcttccaggacgacgccggcagaggcaagaagcacagcatcatcctgagaacccagctgagcgtgagagtgcacgcctgcatcgagaagctgtacaacagcagcggcagagacctgagaagagccctgttcagcctgaagcagatcttccaggacgacaaggacctggtgcacgagttcgtggtggccgagggcctgacctgcctgatcaaggtgggcgccgaggccgaccagaactaccagaactacatcctgagagccctgggccagatcatgctgtacgtggacggcatgaacggcgtgatcaacagaaacgagaccatccagtggctgtacaccctgatcggcagcaagttcagactggtggtgaagaccgccctgaagctgctgctggtgttcgtggagtacagcgagagcaacgcccccctgctgatccaggccgtgaccgccgtggacaccaagagaggcgtgaagccctggagcaacatcatggagatcctggaggagaaggacggcgtggacaccgagctgctggtgtacgccatgaccctggtgaacaagaccctgagcggcctgcccgaccaggacaccttctacgacgtggtggactgcctggaggagctgggcatcgccgccgtgagccagagacacctgaacaagaagggcaccgacctggacctggtggagcagctgaacatctacgaggtggccctgagacacgaggacggcgacgagaccaccgagcccccccccagcggctgcagagacagaagaagagccagcgtgtgcagcagcggcggcggcgagcacagaggcctggacagaagaagaagcagaagacacagcgtgcagagcatcaagagcaccctgagcgcccccaccagcccctgcagccagagcgcccccagcttcaagcccaaccaggtgagagacctgagagagaagagcagccccagcggcctgctgaccagcagcttcagacagcaccaggagagcctggccgccgagagagagagaagaagacaggagagagaggagagactgcagagaatcgagagagaggagagaaacaagttcagcagagactacctggacaagagagaggagcagagacaggccagagaggagagatacaagtacctggagcagctggccgccgaggagcacgagaaggagctgagaagcagaagcgtgagcagaggcagagccgacctgagcctggacctgaccagccccgccgcccccgcctgcctggcccccctgagccacagccccagcagcagcgacagccaggaggccctgaccgtgagcgccagcagccccggcaccccccaccacccccaggccagcgccggcgaccccgagcccgagagcgaggccgagcccgaggccgaggccggcgccggccaggtggccgacgaggccggccaggacatcgccagcgcccacgagggcgccgagaccgaggtggagcaggccctggagcaggagcccgaggagagagccagcctgagcgagaaggagagacagaacgagggcgtgaacgagagagacaactgcagcgccagcagcgtgagcagcagcagcagcaccctggagagagaggagaaggaggacaagctgagcagagacagaaccaccggcctgtggcccgccggcgtgcaggacgccggcgtgaacggccagtgcggcgacatcctgaccaacaagagattcatgctggacatgctgtacgcccacaacagaaagagccccgacgacgaggagaagggcgacggcgaggccggcagaacccagcaggaggccgaggccgtggccagcctggccaccagaatcagcaccctgcaggccaacagccagacccaggacgagagcgtgagaagagtggacgtgggctgcctggacaacagaggcagcgtgaaggccttcgccgagaagttcaacagcggcgacctgggcagaggcagcatcagccccgacgccgagcccaacgacaaggtgcccgagaccgcccccgtgcagcccaagaccgagagcgactacatctgggaccagctgatggccaaccccagagagctgagaatccaggacatggacttcaccgacctgggcgaggaggacgacatcgacgtgctggacgtggacctgggccacagagaggcccccggccccccccccccccccccccccaccttcctgggcctgcccccccccccccccccccccctgctggacagcatcccccccccccccgtgcccggcaacctgctggtgccccccccccccgtgttcaacgccccccagggcctgggctggagccaggtgcccagaggccagcccaccttcaccaagaagaagaagaccatcagactgttctggaacgaggtgagacccttcgactggccctgcaagaacaacagaagatgcagagagttcctgtggagcaagctggagcccatcaaggtggacaccagcagactggagcacctgttcgagagcaagagcaaggagctgagcgtgagcaagaagaccgccgccgacggcaagagacaggagatcatcgtgctggacagcaagagaagcaacgccatcaacatcggcctgaccgtgctgcccccccccagaaccatcaagatcgccatcctgaacttcgacgagtacgccctgaacaaggagggcatcgagaagatcctgaccatgatccccaccgacgaggagaagcagaagatccaggaggcccagctggccaaccccgagatccccctgggcagcgccgagcagttcctgctgaccctgagcagcatcagcgagctgagcgccagactgcacctgtgggccttcaagatggactacgagaccaccgagaaggaggtggccgagcccctgctggacctgaaggagggcatcgaccagctggagaacaacaagaccctgggcttcatcctgagcaccctgctggccatcggcaacttcctgaacggcaccaacgccaaggccttcgagctgagctacctggagaaggtgcccgaggtgaaggacaccgtgcacaagcagagcctgctgcaccacgtgtgcaccatggtggtggagaacttccccgacagcagcgacctgtacagcgagatcggcgccatcaccagaagcgccaaggtggacttcgaccagctgcaggacaacctgtgccagatggagagaagatgcaaggccagctgggaccacctgaaggccatcgccaagcacgagatgaagcccgtgctgaagcagagaatgagcgagttcctgaaggactgcgccgagagaatcatcatcctgaagatcgtgcacagaagaatcatcaacagattccacagcttcctgctgttcatgggccaccccccctacgccatcagagaggtgaacatcaacaagttctgcagaatcatcagcgagttcgccctggagtacagaaccaccagagagagagtgctgcagcagaagcagaagagagccaaccacagagagagaaacaagaccagaggcaagatgatcaccgacagcggcaagttcagcggcagcagccccgccccccccagccagccccagggcctgagctacgccgaggacgccgccgagcacgagaacatgaaggccgtgctgaagaccagcagccccagcgtggaggacgccacccccgccctgggcgtgagaaccagaagcagagccagcagaggcagcaccagcagctggaccatgggcaccgacgacagccccaacgtgaccgacgacgccgccgacgagatcatggacagaatcgtgaagagcgccacccaggtgcccagccagagagtggtgcccagagagagaaagagaagcagagccaacagaaagagcctgagaagaaccctgaagagcggcctgacccccgaggaggccagagccctgggcctggtgggcaccagcgagctgcagctgtag

SEQ ID NO: 82012 - DNA, 1053 bp, synthetic construct
  misc_feature 1..1053: note = Description of Artificial Sequence: Synthetic coding sequence
  source 1..1053: mol_type = other DNA
atggagaccaacagcagcctgcccaccaacatcagcggcggcacccccgccgtgagcgccggctacctgttcctggacatcatcacctacctggtgttcgccgtgaccttcgtgctgggcgtgctgggcaacggcctggtgatctgggtggccggcttcagaatgacccacaccgtgaccaccatcagctacctgaacctggccgtggccgacttctgcttcaccagcaccctgcccttcttcatggtgagaaaggccatgggcggccactggcccttcggctggttcctgtgcaagttcgtgttcaccatcgtggacatcaacctgttcggcagcgtgttcctgatcgccctgatcgccctggacagatgcgtgtgcgtgctgcaccccgtgtggacccagaaccacagaaccgtgagcctggccaagaaggtgatcatcggcccctgggtgatggccctgctgctgaccctgcccgtgatcatcagagtgaccaccgtgcccggcaagaccggcaccgtggcctgcaccttcaacttcagcccctggaccaacgaccccaaggagagaatcaacgtggccgtggccatgctgaccgtgagaggcatcatcagattcatcatcggcttcagcgcccccatgagcatcgtggccgtgagctacggcctgatcgccaccaagatccacaagcagggcctgatcaagagcagcagacccctgagagtgctgagcttcgtggccgccgccttcttcctgtgctggagcccctaccaggtggtggccctgatcgccaccgtgagaatcagagagctgctgcagggcatgtacaaggagatcggcatcgccgtggacgtgaccagcgccctggccttcttcaacagctgcctgaaccccatgctgtacgtgttcatgggccaggacttcagagagagactgatccacgccctgcccgccagcctggagagagccctgaccgaggacagcacccagaccagcgacaccgccaccaacagcaccctgcccagcgccgaggtggagctgcaggccaagtag

SEQ ID NO: 82013 - DNA, 1053 bp, synthetic construct; identical to SEQ ID NO: 82012
  misc_feature 1..1053: note = Description of Artificial Sequence: Synthetic coding sequence
  source 1..1053: mol_type = other DNA

SEQ ID NO: 82014 - DNA, 1056 bp, synthetic construct
  misc_feature 1..1056: note = Description of Artificial Sequence: Synthetic coding sequence
  source 1..1056: mol_type = other DNA
atggagaccaacttcagcacccccctgaacgagtacgaggaggtgagctacgagagcgccggctacaccgtgctgagaatcctgcccctggtggtgctgggcgtgaccttcgtgctgggcgtgctgggcaacggcctggtgatctgggtggccggcttcagaatgaccagaaccgtgaccaccatctgctacctgaacctggccctggccgacttcagcttcaccgccaccctgcccttcctgatcgtgagcatggccatgggcgagaagtggcccttcggctggttcctgtgcaagctgatccacatcgtggtggacatcaacctgttcggcagcgtgttcctgatcggcttcatcgccctggacagatgcatctgcgtgctgcaccccgtgtgggcccagaaccacagaaccgtgagcctggccatgaaggtgatcgtgggcccctggatcctggccctggtgctgaccctgcccgtgttcctgttcctgaccaccgtgaccatccccaacggcgacacctactgcaccttcaacttcgccagctggggcggcacccccgaggagagactgaaggtggccatcaccatgctgaccgccagaggcatcatcagattcgtgatcggcttcagcctgcccatgagcatcgtggccatctgctacggcctgatcgccgccaagatccacaagaagggcatgatcaagagcagcagacccctgagagtgctgaccgccgtggtggccagcttcttcatctgctggttccccttccagctggtggccctgctgggcaccgtgtggctgaaggagatgctgttctacggcaagtacaagatcatcgacatcctggtgaaccccaccagcagcctggccttcttcaacagctgcctgaaccccatgctgtacgtgttcgtgggccaggacttcagagagagactgatccacagcctgcccaccagcctggagagagccctgagcgaggacagcgcccccaccaacgacaccgccgccaacagcgccagcccccccgccgagaccgagctgcaggccatgtag

SEQ ID NO: 82015 - DNA, 1056 bp, synthetic construct; identical to SEQ ID NO: 82014
  misc_feature 1..1056: note = Description of Artificial Sequence: Synthetic coding sequence
  source 1..1056: mol_type = other DNA

SEQ ID NO: 82016 - DNA, 1062 bp, synthetic construct
  misc_feature 1..1062: note = Description of Artificial Sequence: Synthetic coding sequence
  source 1..1062: mol_type = other DNA
atggagaccaacttcagcatccccctgaacgagaccgaggaggtgctgcccgagcccgccggccacaccgtgctgtggatcttcagcctgctggtgcacggcgtgaccttcgtgttcggcgtgctgggcaacggcctggtgatctgggtggccggcttcagaatgaccagaaccgtgaacaccatctgctacctgaacctggccctggccgacttcagcttcagcgccatcctgcccttcagaatggtgagcgtggccatgagagagaagtggcccttcggcagcttcctgtgcaagctggtgcacgtgatgatcgacatcaacctgttcgtgagcgtgtacctgatcaccatcatcgccctggacagatgcatctgcgtgctgcaccccgcctgggcccagaaccacagaaccatgagcctggccaagagagtgatgaccggcctgtggatcttcaccatcgtgctgaccctgcccaacttcatcttctggaccaccatcagcaccaccaacggcgacacctactgcatcttcaacttcgccttctggggcgacaccgccgtggagagactgaacgtgttcatcaccatggccaaggtgttcctgatcctgcacttcatcatcggcttcagcgtgcccatgagcatcatcaccgtgtgctacggcatcatcgccgccaagatccacagaaaccacatgatcaagagcagcagacccctgagagtgttcgccgccgtggtggccagcttcttcatctgctggttcccctacgagctgatcggcatcctgatggccgtgtggctgaaggagatgctgctgaacggcaagtacaagatcatcctggtgctgatcaaccccaccagcagcctggccttcttcaacagctgcctgaaccccatcctgtacgtgttcatgggcagaaacttccaggagagactgatcagaagcctgcccaccagcctggagagagccctgaccgaggtgcccgacagcgcccagaccagcaacaccgacaccaccagcgccagcccccccgaggagaccgagctgcaggccatgtag

SEQ ID NO: 82017 - DNA, 816 bp, synthetic construct
  misc_feature 1..816: note = Description of Artificial Sequence: Synthetic coding sequence
  source 1..816: mol_type = other DNA
atgttcagagacttcggcgagcccggccccagcagcggcaacggcggcggctacggcggccccgcccagccccccgccgccgcccaggccgcccagcagaagttccacctggtgcccagcatcaacaccatgagcggcagccaggagctgcagtggatggtgcagccccacttcctgggccccagcagctaccccagacccctgacctacccccagtacagccccccccagcccagacccggcgtgatcagagccctgggccccccccccggcgtgagaagaagaccctgcgagcagatcagccccgaggaggaggagagaagaagagtgagaagagagagaaacaagctggccgccgccaagtgcagaaacagaagaaaggagctgaccgacttcctgcaggccgagaccgacaagctggaggacgagaagagcggcctgcagagagagatcgaggagctgcagaagcagaaggagagactggagctggtgctggaggcccacagacccatctgcaagatccccgagggcgccaaggagggcgacaccggcagcaccagcggcaccagcagcccccccgccccctgcagacccgtgccctgcatcagcctgagccccggccccgtgctggagcccgaggccctgcacacccccaccctgatgaccacccccagcctgacccccttcacccccagcctggtgttcacctaccccagcacccccgagccctgcgccagcgcccacagaaagagcagcagcagcagcggcgaccccagcagcgaccccctgggcagccccaccctgctggccctgtag

SEQ ID NO: 82018 - DNA, 510 bp, synthetic construct
  misc_feature 1..510: note = Description of Artificial Sequence: Synthetic coding sequence
  source 1..510: mol_type = other DNA
atgttcagagacttcggcgagcccggccccagcagcggcaacggcggcggctacggcggccccgcccagccccccgccgccgcccaggccgcccagcaggagaccgacaagctggaggacgagaagagcggcctgcagagagagatcgaggagctgcagaagcagaaggagagactggagctggtgctggaggcccacagacccatctgcaagatccccgagggcgccaaggagggcgacaccggcagcaccagcggcaccagcagcccccccgccccctgcagacccgtgccctgcatcagcctgagccccggccccgtgctggagcccgaggccctgcacacccccaccctgatgaccacccccagcctgacccccttcacccccagcctggtgttcacctaccccagcacccccgagccctgcgccagcgcccacagaaagagcagcagcagcagcggcgaccccagcagcgaccccctgggcagccccaccctgctggccctgtag

SEQ ID NO: 82019 - DNA, 351 bp, synthetic construct
  misc_feature 1..351: note = Description of Artificial Sequence: Synthetic coding sequence
  source 1..351: mol_type = other DNA
atgttcagagacttcggcgagcccggccccagcagcggcaacggcggcggctacggcggccccgcccagccccccgccgccgcccaggccgcccagcagaagttccacctggtgcccagcatcaacaccatgagcggcagccaggagctgcagtggatggtgcagccccacttcctgggccccagcagctaccccagacccctgacctacccccagtacagccccccccagcccagacccggcgtgatcagagccctgggccccccccccggcgtgagaagaagaccctgcgagcagatcagccccgaggaggaggagagctggcagcccagagacttcgtggacccctag

SEQ ID NO: 82020 - DNA, 981 bp, synthetic construct
  misc_feature 1..981: note = Description of Artificial Sequence: Synthetic coding sequence
  source 1..981: mol_type = other DNA
atgtaccaggactaccccggcaacttcgacaccagcagcagaggcagcagcggcagccccgcccacgccgagagctacagcagcggcggcggcggccagcagaagttcagagtggacatgcccggcagcggcagcgccttcatccccaccatcaacgccatcaccaccagccaggacctgcagtggatggtgcagcccaccgtgatcaccagcatgagcaacccctaccccagaagccacccctacagccccctgcccggcctggccagcgtgcccggccacatggccctgcccagacccggcgtgatcaagaccatcggcaccaccgtgggcagaagaagaagagacgagcagctgagccccgaggaggaggagaagagaagaatcagaagagagagaaacaagctggccgccgccaagtgcagaaacagaagaagagagctgaccgagaagctgcaggccgagaccgaggagctggaggaggagaagagcggcctgcagaaggagatcgccgagctgcagaaggagaaggagaagctggagttcatgctggtggcccacggccccgtgtgcaagatcagccccgaggagagaagaagcccccccgcccccggcctgcagcccatgagaagcggcggcggcagcgtgggcgccgtggtggtgaagcaggagcccctggaggaggacagccccagcagcagcagcgccggcctggacaaggcccagagaagcgtgatcaagcccatcagcatcgccggcggcttctacggcgaggagcccctgcacacccccatcgtggtgaccagcacccccgccgtgacccccggcaccagcaacctggtgttcacctaccccagcgtgctggagcaggagagccccgccagccccagcgagagctgcagcaaggcccacagaagaagcagcagcagcggcgaccagagcagcgacagcctgaacagccccaccctgctggccctgtag

SEQ ID NO: 82021 - DNA, 864 bp, synthetic construct
  misc_feature 1..864: note = Description of Artificial Sequence: Synthetic coding sequence
  source 1..864: mol_type = other DNA
atgcccggcagcggcagcgccttcatccccaccatcaacgccatcaccaccagccaggacctgcagtggatggtgcagcccaccgtgatcaccagcatgagcaacccctaccccagaagccacccctacagccccctgcccggcctggccagcgtgcccggccacatggccctgcccagacccggcgtgatcaagaccatcggcaccaccgtgggcagaagaagaagagacgagcagctgagccccgaggaggaggagaagagaagaatcagaagagagagaaacaagctggccgccgccaagtgcagaaacagaagaagagagctgaccgagaagctgcaggccgagaccgaggagctggaggaggagaagagcggcctgcagaaggagatcgccgagctgcagaaggagaaggagaagctggagttcatgctggtggcccacggccccgtgtgcaagatcagccccgaggagagaagaagcccccccgcccccggcctgcagcccatgagaagcggcggcggcagcgtgggcgccgtggtggtgaagcaggagcccctggaggaggacagccccagcagcagcagcgccggcctggacaaggcccagagaagcgtgatcaagcccatcagcatcgccggcggcttctacggcgaggagcccctgcacacccccatcgtggtgaccagcacccccgccgtgacccccggcaccagcaacctggtgttcacctaccccagcgtgctggagcaggagagccccgccagccccagcgagagctgcagcaaggcccacagaagaagcagcagcagcggcgaccagagcagcgacagcctgaacagccccaccctgctggccctgtag

SEQ ID NO: 82022 - DNA, 972 bp, synthetic construct
  misc_feature 1..972: note = Description of Artificial Sequence: Synthetic coding sequence
  source 1..972: mol_type = other DNA
atggccgagaagttcgactgccactactgcagagaccccctgcagggcaagaagtacgtgcagaaggacggccaccactgctgcctgaagtgcttcgacaagttctgcgccaacacctgcgtggagtgcagaaagcccatcggcgccgacagcaaggaggtgcactacaagaacagattctggcacgacacctgcttcagatgcgccaagtgcctgcaccccctggccaacgagaccttcgtggccaaggacaacaagatcctgtgcaacaagtgcaccaccagagaggacagccccaagtgcaagggctgcttcaaggccatcgtggccggcgaccagaacgtggagtacaagggcaccgtgtggcacaaggactgcttcacctgcagcaactgcaagcaggtgatcggcaccggcagcttcttccccaagggcgaggacttctactgcgtgacctgccacgagaccaagttcgccaagcactgcgtgaagtgcaacaaggccatcaccagcggcggcatcacctaccaggaccagccctggcacgccgactgcttcgtgtgcgtgacctgcagcaagaagctggccggccagagattcaccgccgtggaggaccagtactactgcgtggactgctacaagaacttcgtggccaagaagtgcgccggctgcaagaaccccatcaccggcaagagaaccgtgagcagagtgagccaccccgtgagcaaggccagaaagccccccgtgtgccacggcaagagactgcccctgaccctgttccccagcgccaacctgagaggcagacaccccggcggcgagagaacctgccccagctgggtggtggtgctgtacagaaagaacagaagcctggccgcccccagaggccccggcctggtgaaggcccccgtgtggtggcccatgaaggacaaccccggcaccaccaccgccagcaccgccaagaacgccccctag

SEQ ID NO: 82023 - DNA, 774 bp, synthetic construct
  misc_feature 1..774: note = Description of Artificial Sequence: Synthetic coding sequence
  source 1..774: mol_type = other DNA
atggccgagaagttcgactgccactactgcagagaccccctgcagggcaagaagtacgtgcagaaggacggccaccactgctgcctgaagtgcttcgacaagttctgcgccaacacctgcgtggagtgcagaaagcccatcggcgccgacagcaaggaggtgcactacaagaacagattctggcacgacacctgcttcagatgcgccaagtgcctgcaccccctggccaacgagaccttcgtggccaaggacaacaagatcctgtgcaacaagtgcaccaccagagaggacagccccaagtgcaagggctgcttcaaggccatcgtggccggcgaccagaacgtggagtacaagggcaccgtgtggcacaaggactgcttcacctgcagcaactgcaagcaggtgatcggcaccggcagcttcttccccaagggcgaggacttctactgcgtgacctgccacgagaccaagttcgccaagcactgcgtgaagtgcaacaaggccatcaccagcggcggcatcacctaccaggaccagccctggcacgccgactgcttcgtgtgcgtgacctgcagcaagaagctggccggccagagattcaccgccgtggaggaccagtactactgcgtggactgctacaagaacttcgtggccaagaagtgcgccggctgcaagaaccccatcaccggcttcggcaagggcagcagcgtggtggcctacgagggccagagctggcacgactactgcttccactgcaagaagtgcagcgtgtag

SEQ ID NO: 82024 - DNA, 633 bp, synthetic construct
  misc_feature 1..633: note = Description of Artificial Sequence: Synthetic coding sequence
  source 1..633: mol_type = other DNA
atggccagccacagacacagcggccccagcagctacaaggtgggcaccatggccgagaagttcgactgccactactgcagagaccccctgcagggcaagaagtacgtgcagaaggacggccaccactgctgcctgaagtgcttcgacaagttctgcgccaacacctgcgtggagtgcagaaagcccatcggcgccgacagcaaggaggtgcactacaagaacagattctggcacgacacctgcttcagatgcgccaagtgcctgcaccccctggccaacgagaccttcgtggccaaggacaacaagatcctgtgcaacaagtgcaccaccagagaggacagccccaagtgcaagggctgcttcaaggccatcgtggccggcgaccagaacgtggagtacaagggcaccgtgtggcacaaggactgcttcacctgcagcaactgcaagcaggtgatcggcaccggcagcttcttccccaagggcgaggacttctactgcgtgacctgccacgagaccaagttcgccaagcactgcgtgaagtgcaacaagggcctggtgaaggcccccgtgtggtggcccatgaaggacaaccccggcaccaccaccgccagcaccgccaagaacgccccctag

SEQ ID NO: 82025 - DNA, 891 bp, synthetic construct
  misc_feature 1..891: note = Description of Artificial Sequence: Synthetic coding sequence
  source 1..891: mol_type = other DNA
atggccagccacagacacagcggccccagcagctacaaggtgggcaccatggccgagaagttcgactgccactactgcagagaccccctgcagggcaagaagtacgtgcagaaggacggccaccactgctgcctgaagtgcttcgacaagttctgcgccaacacctgcgtggagtgcagaaagcccatcggcgccgacagcaaggaggtgcactacaagaacagattctggcacgacacctgcttcagatgcgccaagtgcctgcaccccctggccaacgagaccttcgtggccaaggacaacaagatcctgtgcaacaagtgcaccaccagagaggacagccccaagtgcaagggctgcttcaaggccatcgtggccggcgaccagaacgtggagtacaagggcaccgtgtggcacaaggactgcttcacctgcagcaactgcaagcaggtgatcggcaccggcagcttcttccccaagggcgaggacttctactgcgtgacctgccacgagaccaagttcgccaagcactgcgtgaagtgcaacaaggccatcaccagcggcggcatcacctaccaggaccagccctggcacgccgactgcttcgtgtgcgtgacctgcagcaagaagctggccggccagagattcaccgccgtggaggaccagtactactgcgtggactgctacaagaacttcgtggccaagaagtgcgccggctgcaagaaccccatcaccggcttcggcaagggcagcagcgtggtggcctacgagggccagagctggcacgactactgcttccactgcaagaagtgcagcgtgaacctggccaacaagagattcgtgttccaccaggagcaggtgtactgccccgactgcgccaagaagctgtag

SEQ ID NO: 82026 - DNA, 843 bp, synthetic construct
  misc_feature 1..843: note = Description of Artificial Sequence: Synthetic coding sequence
  source 1..843: mol_type = other DNA
atggccgagaagttcgactgccactactgcagagaccccctgcagggcaagaagtacgtgcagaaggacggccaccactgctgcctgaagtgcttcgacaagttctgcgccaacacctgcgtggagtgcagaaagcccatcggcgccgacagcaaggaggtgcactacaagaacagattctggcacgacacctgcttcagatgcgccaagtgcctgcaccccctggccaacgagaccttcgtggccaaggacaacaagatcctgtgcaacaagtgcaccaccagagaggacagccccaagtgcaagggctgcttcaaggccatcgtggccggcgaccagaacgtggagtacaagggcaccgtgtggcacaaggactgcttcacctgcagcaactgcaagcaggtgatcggcaccggcagcttcttccccaagggcgaggacttctactgcgtgacctgccacgagaccaagttcgccaagcactgcgtgaagtgcaacaaggccatcaccagcggcggcatcacctaccaggaccagccctggcacgccgactgcttcgtgtgcgtgacctgcagcaagaagctggccggccagagattcaccgccgtggaggaccagtactactgcgtggactgctacaagaacttcgtggccaagaagtgcgccggctgcaagaaccccatcaccggcttcggcaagggcagcagcgtggtggcctacgagggccagagctggcacgactactgcttccactgcaagaagtgcagcgtgaacctggccaacaagagattcgtgttccaccaggagcaggtgtactgccccgactgcgccaagaagctgtag

SEQ ID NO: 82027 - DNA, 843 bp, synthetic construct; identical to SEQ ID NO: 82026
  misc_feature 1..843: note = Description of Artificial Sequence: Synthetic coding sequence
  source 1..843: mol_type = other DNA

SEQ ID NO: 82028 - DNA, 972 bp, synthetic construct; identical to SEQ ID NO: 82022
  misc_feature 1..972: note = Description of Artificial Sequence: Synthetic coding sequence
  source 1..972: mol_type = other DNA

SEQ ID NO: 82029 - DNA, 615 bp, synthetic construct
  misc_feature 1..615: note = Description of Artificial Sequence: Synthetic coding sequence
  source 1..615: mol_type = other DNA
atggccgagaagttcgactgccactactgcagagaccccctgcagggcaagaagtacgtgcagaaggacggccaccactgctgcctgaagtgcttcgacaagttctgcgccaacacctgcgtggagtgcagaaagcccatcggcgccgacagcaaggaggtgcactacaagaacagattctggcacgacacctgcttcagatgcgccaagtgcctgcaccccctggccaacgagaccttcgtggccaaggacaacaagatcctgtgcaacaagtgcaccaccagagaggacagccccaagtgcaagggctgcttcaaggccatcgtggccggcgaccagaacgtggagtacaagggcaccgtgtggcacaaggactgcttcacctgcagcaactgcaagcaggtgatcggcaccggcagcttcttccccaagggcgaggacttctactgcgtgacctgccacgagaccaagttcgccaagcactgcgtgaagtgcaacaaggccatcaccagcggcggcatcacctaccaggaccagccctggcacgccgactgcttcgtgtgcgtgacctgcagcaagaagctggccggccagagattcaccgccgtggagtag

SEQ ID NO: 82030 - DNA, 624 bp, synthetic construct
  misc_feature 1..624: note = Description of Artificial Sequence: Synthetic coding sequence
  source 1..624: mol_type = other DNA
atggccgagaagttcgactgccactactgcagagaccccctgcagggcaagaagtacgtgcagaaggacggccaccactgctgcctgaagtgcttcgacaagttctgcgccaacacctgcgtggagtgcagaaagcccatcggcgccgacagcaaggaggtgcactacaagaacagattctggcacgacacctgcttcagatgcgccaagtgcctgcaccccctggccaacgagaccttcgtggccaaggacaacaagatcctgtgcaacaagtgcaccaccagagaggacagccccaagtgcaagggctgcttcaaggccatcgtggccggcgaccagaacgtggagtacaagggcaccgtgtggcacaaggactgcttcacctgcagcaactgcaagcaggtgatcggcaccggcagcttcttccccaagggcgaggacttctactgcgtgacctgccacgagaccaagttcgccaagcactgcgtgaagtgcaacaaggccatcaccagcggcggcatcacctaccaggaccagccctggcacgccgactgcttcgtgtgcgtgacctgcagcaagaagctggccggccagagattcaccgccgtggaggaccagtactag

SEQ ID NO: 82031 - DNA, 426 bp, synthetic construct
  misc_feature 1..426: note = Description of Artificial Sequence: Synthetic coding sequence
  source 1..426: mol_type = other DNA
atggccgagaagttcgactgccactactgcagagaccccctgcagggcaagaagtacgtgcagaaggacggccaccactgctgcctgaagtgcttcgacaagttctgcgccaacacctgcgtggagtgcagaaagcccatcggcgccgacagcaaggaggtgcactacaagaacagattctggcacgacacctgcttcagatgcgccaagtgcctgcaccccctggccaacgagaccttcgtggccaaggacaacaagatcctgtgcaacaagtgcaccaccagagaggacagccccaagtgcaagggctgcttcaaggccatcgtggccggcgaccagaacgtggagtacaagggcaccgtgtggcacaaggactgcttcacctgcagcaactgcaagcaggtgatcggcaccggcagcttctag

SEQ ID NO: 82032 - DNA, 624 bp, synthetic construct; identical to SEQ ID NO: 82030
  misc_feature 1..624: note = Description of Artificial Sequence: Synthetic coding sequence
  source 1..624: mol_type = other DNA

SEQ ID NO: 82033 - DNA, 963 bp, synthetic construct
  misc_feature 1..963: note = Description of Artificial Sequence: Synthetic coding sequence
  source 1..963: mol_type = other DNA
atgagccacttcatcctgagacacctgggcagctgcttccagccctaccccgccttcgccgagtacatcctgagcgccacccaccccgccagcggccccagcagctacaaggtgggcaccatggccgagaagttcgactgccactactgcagagaccccctgcagggcaagaagtacgtgcagaaggacggccaccactgctgcctgaagtgcttcgacaagttctgcgccaacacctgcgtggagtgcagaaagcccatcggcgccgacagcaaggaggtgcactacaagaacagattctggcacgacacctgcttcagatgcgccaagtgcctgcaccccctggccaacgagaccttcgtggccaaggacaacaagatcctgtgcaacaagtgcaccaccagagaggacagccccaagtgcaagggctgcttcaaggccatcgtggccggcgaccagaacgtggagtacaagggcaccgtgtggcacaaggactgcttcacctgcagcaactgcaagcaggtgatcggcaccggcagcttcttccccaagggcgaggacttctactgcgtgacctgccacgagaccaagttcgccaagcactgcgtgaagtgcaacaaggccatcaccagcggcggcatcacctaccaggaccagccctggcacgccgactgcttcgtgtgcgtgacctgcagcaagaagctggccggccagagattcaccgccgtggaggaccagtactactgcgtggactgctacaagaacttcgtggccaagaagtgcgccggctgcaagaaccccatcaccggcttcggcaagggcagcagcgtggtggcctacgagggccagagctggcacgactactgcttccactgcaagaagtgcagcgtgaacctggccaacaagagattcgtgttccaccaggagcaggtgtactgccccgactgcgccaagaagctgtag

SEQ ID NO: 82034 - DNA, 618 bp, synthetic construct
  misc_feature 1..618: note = Description of Artificial Sequence: Synthetic coding sequence
  source 1..618: mol_type = other DNA
atggccgagaagttcgactgccactactgcagagaccccctgcagggcaagaagtacgtgcagaaggacggccaccactgctgcctgaagtgcttcgacaagttctgcgccaacacctgcgtggagtgcagaaagcccatcggcgccgacagcaaggaggtgcactacaagaacagattctggcacgacacctgcttcagatgcgccaagtgcctgcaccccctggccaacgagaccttcgtggccaaggacaacaagatcctgtgcaacaagtgcaccaccagagaggacagccccaagtgcaagggctgcttcaaggccatcgtggccggcgaccagaacgtggagtacaagggcaccgtgtggcacaaggactgcttcacctgcagcaactgcaagcaggtgatcggcaccggcagcttcttccccaagggcgaggacttctactgcgtgacctgccacgagaccaagttcgccaagcactgcgtgaagtgcaacaaggccatcaccagcggcggcatcacctaccaggaccagccctggcacgccgactgcttcgtgtgcgtgacctgcagcaagaagctggccggccagagattcaccgccgtggaggactag

SEQ ID NO: 82035 - DNA, 468 bp, synthetic construct
  misc_feature 1..468: note = Description of Artificial Sequence: Synthetic coding sequence
  source 1..468: mol_type = other DNA
atggccgagaagttcgactgccactactgcagagaccccctgcagggcaagaagtacgtgcagaaggacggccaccactgctgcctgaagtgcttcgacaagttctgcgccaacacctgcgtggagtgcagaaagcccatcggcgccgacagcaaggaggtgcactacaagaacagattctggcacgacacctgcttcagatgcgccaagtgcctgcaccccctggccaacgagaccttcgtggccaaggacaacaagatcctgtgcaacaagtgcaccaccagagaggacagccccaagtgcaagggctgcttcaaggccatcgtggccggcgaccagaacgtggagtacaagggcaccgtgtggcacaaggactgcttcacctgcagcaactgcaagcaggtgatcggcaccggcagcttcttccccaagggcgaggacttctactgcgtgacctgccacgagtag

SEQ ID NO: 82036 - DNA, 843 bp, synthetic construct; identical to SEQ ID NO: 82026
  misc_feature 1..843: note = Description of Artificial Sequence: Synthetic coding sequence
  source 1..843: mol_type = other DNA

SEQ ID NO: 82037 - DNA, 783 bp, synthetic construct
  misc_feature 1..783: note = Description of Artificial Sequence: Synthetic coding sequence
  source 1..783: mol_type = other DNA
atggccgagaagttcgactgctgcctgaagtgcttcgacaagttctgcgccaacacctgcgtggagtgcagaaagcccatcggcgccgacagcaaggaggtgcactacaagaacagattctggcacgacacctgcttcagatgcgccaagtgcctgcaccccctggccaacgagaccttcgtggccaaggacaacaagatcctgtgcaacaagtgcaccaccagagaggacagccccaagtgcaagggctgcttcaaggccatcgtggccggcgaccagaacgtggagtacaagggcaccgtgtggcacaaggactgcttcacctgcagcaactgcaagcaggtgatcggcaccggcagcttcttccccaagggcgaggacttctactgcgtgacctgccacgagaccaagttcgccaagcactgcgtgaagtgcaacaaggccatcaccagcggcggcatcacctaccaggaccagccctggcacgccgactgcttcgtgtgcgtgacctgcagcaagaagctggccggccagagattcaccgccgtggaggaccagtactactgcgtggactgctacaagaacttcgtggccaagaagtgcgccggctgcaagaaccccatcaccggcttcggcaagggcagcagcgtggtggcctacgagggccagagctggcacgactactgcttccactgcaagaagtgcagcgtgaacctggccaacaagagattcgtgttccaccaggagcaggtgtactgccccgactgcgccaagaagctgtag

SEQ ID NO: 82038 - DNA, 930 bp, synthetic construct
  misc_feature 1..930: note = Description of Artificial Sequence: Synthetic coding sequence
  source 1..930: mol_type = other DNA
atgaccttctacgtggccagcctggccctggagctgatctggatgctgagcagccccgccggccccagcagctacaaggtgggcaccatggccgagaagttcgactgccactactgcagagaccccctgcagggcaagaagtacgtgcagaaggacggccaccactgctgcctgaagtgcttcgacaagttctgcgccaacacctgcgtggagtgcagaaagcccatcggcgccgacagcaaggaggtgcactacaagaacagattctggcacgacacctgcttcagatgcgccaagtgcctgcaccccctggccaacgagaccttcgtggccaaggacaacaagatcctgtgcaacaagtgcaccaccagagaggacagccccaagtgcaagggctgcttcaaggccatcgtggccggcgaccagaacgtggagtacaagggcaccgtgtggcacaaggactgcttcacctgcagcaactgcaagcaggtgatcggcaccggcagcttcttccccaagggcgaggacttctactgcgtgacctgccacgagaccaagttcgccaagcactgcgtgaagtgcaacaaggccatcaccagcggcggcatcacctaccaggaccagccctggcacgccgactgcttcgtgtgcgtgacctgcagcaagaagctggccggccagagattcaccgccgtggaggaccagtactactgcgtggactgctacaagaacttcgtggccaagaagtgcgccggctgcaagaaccccatcaccggcttcggcaagggcagcagcgtggtggcctacgagggccagagctggcacgactactgcttccactgcaagaagtgcagcgtgaacctggccaacaagagattcgtgttccaccaggagcaggtgtactgccccgactgcgccaagaagctgtag

SEQ ID NO: 82039 - DNA, 828 bp, synthetic construct
  misc_feature 1..828: note = Description of Artificial Sequence: Synthetic coding sequence
  source 1..828: mol_type = other DNA
atggccagccacagacacagcggccccagcagctacaaggtgggcaccatggccgagaagttcgactgccactactgcagagaccccctgcagggcaagaagtacgtgcagaaggacggccaccactgctgcctgaagtgcttcgacaagttctgcgccaacacctgcgtggagtgcagaaagcccatcggcgccgacagcaaggaggtgcactacaagaacagattctggcacgacacctgcttcagatgcgccaagtgcaccaccagagaggacagccccaagtgcaagggctgcttcaaggccatcgtggccggcgaccagaacgtggagtacaagggcaccgtgtggcacaaggactgcttcacctgcagcaactgcaagcaggtgatcggcaccggcagcttcttccccaagggcgaggacttctactgcgtgacctgccacgagaccaagttcgccaagcactgcgtgaagtgcaacaaggccatcaccagcggcggcatcacctaccaggaccagccctggcacgccgactgcttcgtgtgcgtgacctgcagcaagaagctggccggccagagattcaccgccgtggaggaccagtactactgcgtggactgctacaagaacttcgtggccaagaagtgcgccggctgcaagaaccccatcaccggcttcggcaagggcagcagcgtggtggcctacgagggccagagctggcacgactactgcttccactgcaagaagtgcagcgtgaacctggccaacaagagattcgtgttccaccaggagcaggtgtactgccccgactgcgccaagaagctgtag

SEQ ID NO: 82040 - DNA, 843 bp, synthetic construct; identical to SEQ ID NO: 82026
  misc_feature 1..843: note = Description of Artificial Sequence: Synthetic coding sequence
  source 1..843: mol_type = other DNA

SEQ ID NO: 82041 - DNA, 840 bp, synthetic construct
  misc_feature 1..840: note = Description of Artificial Sequence: Synthetic coding sequence
  source 1..840: mol_type = other DNA
atgaccgagagattcgactgccaccactgcaacgagagcctgttcggcaagaagtacatcctgagagaggagagcccctactgcgtggtgtgcttcgagaccctgttcgccaacacctgcgaggagtgcggcaagcccatcggctgcgactgcaaggacctgagctacaaggacagacactggcacgaggcctgcttccactgcagccagtgcagaaacagcctggtggacaagcccttcgccgccaaggaggaccagctgctgtgcaccgactgctacagcaacgagtacagcagcaagtgccaggagtgcaagaagaccatcatgcccggcaccagaaagatggagtacaagggcagcagctggcacgagacctgcttcatctgccacagatgccagcagcccatcggcaccaagagcttcatccccaaggacaaccagaacttctgcgtgccctgctacgagaagcagcacgccatgcagtgcgtgcagtgcaagaagcccatcaccaccggcggcgtgacctacagagagcagccctggcacaaggagtgcttcgtgtgcaccgcctgcagaaagcagctgagcggccagagattcaccgccagagacgacttcgcctactgcctgaactgcttctgcgacctgtacgccaagaagtgcgccggctgcaccaaccccatcagcggcctgggcggcaccaagtacatcagcttcgaggagagacagtggcacaacgactgcttcaactgcaagaagtgcagcctgagcctggtgggcagaggcttcctgaccgagagagacgacatcctgtgccccgactgcggcaaggacatctag

SEQ ID NO: 82042 - DNA, 456 bp, synthetic construct
  misc_feature 1..456: note = Description of Artificial Sequence: Synthetic coding sequence
  source 1..456: mol_type = other DNA
atgaccgagagattcgactgccaccactgcaacgagagcctgttcggcaagaagtacatcctgagagaggagagcccctactgcgtggtgtgcttcgagaccctgttcgccaacacctgcgaggagtgcggcaagcccatcggctgcgactgcaaggtgcccgccagatggagcaccagagccgccgccggcatgagacccgccagcagcgccaccgccgccagcagccagctggagcccagagtgagcagccccaagaccatcagaatcagcgtgtgccccgccatgagaaacaacatgccctgcagcgccttcagcgccaagagccccagccccagagagggcagcctgaccggcagcagccccggcaccagaagcgccagctgcgccccccccgccggcagcagctgcctgggcagcgccagccagctggccatgaccctgcccaccgcctag

SEQ ID NO: 82043 - DNA, 1170 bp, synthetic construct
  misc_feature 1..1170: note = Description of Artificial Sequence: Synthetic coding sequence
  source 1..1170: mol_type = other DNA
atgaccagaagaggcttcagcagagccggcgccgcccagagaagcaccagacccgccgccgagccccagccccccgccgccagagccctgcagcccagacccggcgtgcccggccccctgagatgcagagagtacctgcagccccccgcccccagaagagaggccgagggcctgagccaccagggcagcgaggtgggcgccgagagcggcgccagacccaaggagagaggcgccgagcccgagctgggcagactgtggctgagaaccgtgagcagctggagactgggctggcacttcgacttcggcgtggccgagaagcccggcgtgaagatgaccgagagattcgactgccaccactgcaacgagagcctgttcggcaagaagtacatcctgagagaggagagcccctactgcgtggtgtgcttcgagaccctgttcgccaacacctgcgaggagtgcggcaagcccatcggctgcgactgcaaggacctgagctacaaggacagacactggcacgaggcctgcttccactgcagccagtgcagaaacagcctggtggacaagcccttcgccgccaaggaggaccagctgctgtgcaccgactgctacagcaacgagtacagcagcaagtgccaggagtgcaagaagaccatcatgcccggcaccagaaagatggagtacaagggcagcagctggcacgagacctgcttcatctgccacagatgccagcagcccatcggcaccaagagcttcatccccaaggacaaccagaacttctgcgtgccctgctacgagaagcagcacgccatgcagtgcgtgcagtgcaagaagcccatcaccaccggcggcgtgacctacagagagcagccctggcacaaggagtgcttcgtgtgcaccgcctgcagaaagcagctgagcggccagagattcaccgccagagacgacttcgcctactgcctgaactgcttctgcgacctgtacgccaagaagtgcgccggctgcaccaaccccatcagcggcctgggcggcaccaagtacatcagcttcgaggagagacagtggcacaacgactgcttcaactgcaagaagtgcagcctgagcctggtgggcagaggcttcctgaccgagagagacgacatcctgtgccccgactgcggcaaggacatctag

SEQ ID NO: 82044 - DNA, 840 bp, synthetic construct; identical to SEQ ID NO: 82041
  misc_feature 1..840: note = Description of Artificial Sequence: Synthetic coding sequence
  source 1..840: mol_type = other DNA

SEQ ID NO: 82045 - DNA, 840 bp, synthetic construct; identical to SEQ ID NO: 82041
  misc_feature 1..840: note = Description of Artificial Sequence: Synthetic coding sequence
  source 1..840: mol_type = other DNA

SEQ ID NO: 82046 - DNA, 840 bp, synthetic construct; identical to SEQ ID NO: 82041
  misc_feature 1..840: note = Description of Artificial Sequence: Synthetic coding sequence
  source 1..840: mol_type = other DNA

SEQ ID NO: 82047 - DNA, 840 bp, synthetic construct; identical to SEQ ID NO: 82041
  misc_feature 1..840: note = Description of Artificial Sequence: Synthetic coding sequence
  source 1..840: mol_type = other DNA

SEQ ID NO: 82048 - DNA, 840 bp, synthetic construct; identical to SEQ ID NO: 82041
  misc_feature 1..840: note = Description of Artificial Sequence: Synthetic coding sequence
  source 1..840: mol_type = other DNA

SEQ ID NO: 82049 - DNA, 840 bp, synthetic construct; identical to SEQ ID NO: 82041
  misc_feature 1..840: note = Description of Artificial Sequence: Synthetic coding sequence
  source 1..840: mol_type = other DNA

SEQ ID NO: 82050 - DNA, 60 bp, synthetic construct
  misc_feature 1..60: note = Description of Artificial Sequence: Synthetic coding sequence
  source 1..60: mol_type = other DNA
atgaccgagagattcgactgccaccactgcaacgagagcctgttcggcaagaagtactag

SEQ ID NO: 82051 - DNA, 435 bp, synthetic construct
  misc_feature 1..435: note = Description of Artificial Sequence: Synthetic coding sequence
  source 1..435: mol_type = other DNA
atgaccagaagaggcttcagcagagccggcgccgcccagagaagcaccagacccgccgccgagccccagccccccgccgccagagccctgcagcccagacccggcgtgcccggccccctgagatgcagagagtacctgcagccccccgcccccagaagagaggccgagggcctgagccaccagggcagcgaggtgggcgccgagagcggcgccagacccaaggagagaggcgccgagcccgagctgggcagactgtggctgagaaccgtgagcagctggagactgggctggcacttcgacttcggcaccgagagcagattcgtggcccaggccggcgtgcagtggcacgacctgagcagcctgcaggccctgcccctgggcagcagacacagccccgcccccgccagccaggtggccggcaccaccggctgctag

SEQ ID NO: 82052 - DNA, 843 bp, synthetic construct
  misc_feature 1..843: note = Description of Artificial Sequence: Synthetic coding sequence
  source 1..843: mol_type = other DNA
atgagcgagagcttcgactgcgccaagtgcaacgagagcctgtacggcagaaagtacatccagaccgacagcggcccctactgcgtgccctgctacgacaacaccttcgccaacacctgcgccgagtgccagcagctgatcggccacgacagcagagagctgttctacgaggacagacacttccacgagggctgcttcagatgctgcagatgccagagaagcctggccgacgagcccttcacctgccaggacagcgagctgctgtgcaacgactgctactgcagcgccttcagcagccagtgcagcgcctgcggcgagaccgtgatgcccggcagcagaaagctggagtacggcggccagacctggcacgagcactgcttcctgtgcagcggctgcgagcagcccctgggcagcagaagcttcgtgcccgacaagggcgcccactactgcgtgccctgctacgagaacaagttcgcccccagatgcgccagatgcagcaagaccctgacccagggcggcgtgacctacagagaccagccctggcacagagagtgcctggtgtgcaccggctgccagacccccctggccggccagcagttcaccagcagagacgaggacccctactgcgtggcctgcttcggcgagctgttcgcccccaagtgcagcagctgcaagagacccatcgtgggcctgggcggcggcaagtacgtgagcttcgaggacagacactggcaccacaactgcttcagctgcgccagatgcagcaccagcctggtgggccagggcttcgtgcccgacggcgaccaggtgctgtgccagggctgcagccaggccggcccctag

SEQ ID NO: 82053 - DNA, 855 bp, synthetic construct
  misc_feature 1..855: note = Description of Artificial Sequence: Synthetic coding sequence
  source 1..855: mol_type = other DNA
atgaccaccgcccacttctactgccagtactgcaccgccagcctgctgggcaagaagtacgtgctgaaggacgacagcccctactgcgtgacctgctacgacagagtgttcagcaactactgcgaggagtgcaagaagcccatcgagagcgacagcaaggacctgtgctacaaggacagacactggcacgagggctgcttcaagtgcaccaagtgcaaccacagcctggtggagaagcccttcgccgccaaggacgagagactgctgtgcaccgagtgctacagcaacgagtgcagcagcaagtgcttccactgcaagagaaccatcatgcccggcagcagaaagatggagttcaagggcaactactggcacgagacctgcttcgtgtgcgagaactgcagacagcccatcggcaccaagcccctgatcagcaaggagagcggcaactactgcgtgccctgcttcgagaaggagttcgcccactactgcaacttctgcaagaaggtgatcaccagcggcggcatcaccttctgcgaccagctgtggcacaaggagtgcttcctgtgcagcggctgcagaaaggacctgtgcgaggagcagttcatgagcagagacgactaccccttctgcgtggactgctacaaccacctgtacgccaacaagtgcgtggcctgcagcaagcccatcagcggcctgaccggcgccaagttcatctgcttccaggacagccagtggcacagcgagtgcttcaactgcggcaagtgcagcgtgagcctggtgggcaagggcttcctgacccagaacaaggagatcttctgccagaagtgcggcagcggcatggacaccgacatctag

SEQ ID NO: 82054 - DNA, 633 bp, synthetic construct
  misc_feature 1..633: note = Description of Artificial Sequence: Synthetic coding sequence
  source 1..633: mol_type = other DNA
atgaccaccgcccacttctactgccagtactgcaccgccagcctgctgggcaagaagtacgtgctgaaggacgacagcccctactgcgtgacctgctacgacagagtgttcagcaactactgcgaggagtgcaagaagcccatcgagagcgacagcaaggacctgtgctacaaggacagacactggcacgagggctgcttcaagtgcaccaagtgcaaccacagcctggtggagaagcccttcgccgccaaggacgagagactgctgtgcaccgagtgctacagcaacgagtgcagcagcaagtgcttccactgcaagagaaccatcatgcccggcagcagaaagatggagttcaagggcaactactggcacgagacctgcttcgtgtgcgagaactgcagacagcccatcggcaccaagcccctgatcagcaaggagagcggcaactactgcgtgccctgcttcgagaaggagttcgcccactactgcaacttctgcaagaaggtgatcaccagcggcggcatcaccttctgcgaccagctgtggcacaaggagtgcttcctgtgcagcggctgcagaaaggacctgtgcgaggagcagttcatgagcagagacgactaccccttctgctag

SEQ ID NO: 82055 - DNA, 855 bp, synthetic construct; identical to SEQ ID NO: 82053
  misc_feature 1..855: note = Description of Artificial Sequence: Synthetic coding sequence
  source 1..855: mol_type = other DNA

SEQ ID NO: 82056 - DNA, 1314 bp, synthetic construct
  misc_feature 1..1314: note = Description of Artificial Sequence: Synthetic coding sequence
  source 1..1314: mol_type = other DNA
atgggcagaagaatgagaggcgccgccgccaccgccggcctgtggctgctggccctgggcagcctgctggccctgtggggcggcctgctgccccccagaaccgagctgcccgccagcagaccccccgaggacagactgcccagaagacccgccagaagcggcggccccgcccccgcccccagattccccctgcccccccccctggcctgggacgccagaggcggcagcctgaagaccttcagagccctgctgaccctggccgccggcgccgacggcccccccagacagagcagaagcgagcccagatggcacgtgagcgccagacagcccagacccgaggagagcgccgccgtgcacggcggcgtgttctggagcagaggcctggaggagcaggtgccccccggcttcagcgaggcccaggccgccgcctggctggaggccgccagaggcgccagaatggtggccctggagagaggcggctgcggcagaagcagcaacagactggccagattcgccgacggcaccagagcctgcgtgagatacggcatcaaccccgagcagatccagggcgaggccctgagctactacctggccagactgctgggcctgcagagacacgtgccccccctggccctggccagagtggaggccagaggcgcccagtgggcccaggtgcaggaggagctgagagccgcccactggaccgagggcagcgtggtgagcctgaccagatggctgcccaacctgaccgacgtggtggtgcccgccccctggagaagcgaggacggcagactgagacccctgagagacgccggcggcgagctggccaacctgagccaggccgagctggtggacctggtgcagtggaccgacctgatcctgttcgactacctgaccgccaacttcgacagactggtgagcaacctgttcagcctgcagtgggaccccagagtgatgcagagagccaccagcaacctgcacagaggccccggcggcgccctggtgttcctggacaacgaggccggcctggtgcacggctacagagtggccggcatgtgggacaagtacaacgagcccctgctgcagagcgtgtgcgtgttcagagagagaaccgccagaagagtgctggagctgcacagaggccaggacgccgccgccagactgctgagactgtacagaagacacgagcccagattccccgagctggccgccctggccgacccccacgcccagctgctgcagagaagactggacttcctggccaagcacatcctgcactgcaaggccaagtacggcagaagaagcggcacctag

SEQ ID NO: 82057 - DNA, 312 bp, synthetic construct
  misc_feature 1..312: note = Description of Artificial Sequence: Synthetic coding sequence
  source 1..312: mol_type = other DNA
atggagagacagcagcagcagcagcagcagctgagaaacctgagagacttcctgctggtgtacaacagaatgaccgagctgtgcttccagagatgcgtgcccagcctgcaccacagagccctggacgccgaggaggaggcctgcctgcacagctgcgccggcaagctgatccacagcaaccacagactgatggccgcctacgtgcagctgatgcccgccctggtgcagagaagaatcgccgactacgaggccgccagcgccgtgcccggcgtggccgccgagcagcccggcgtgagccccagcggcagctag

SEQ ID NO: 82058 - DNA, 312 bp, synthetic construct; identical to SEQ ID NO: 82057
  misc_feature 1..312: note = Description of Artificial Sequence: Synthetic coding sequence
  source 1..312: mol_type = other DNA

SEQ ID NO: 82059 - DNA, 312 bp, synthetic construct; identical to SEQ ID NO: 82057
  misc_feature 1..312: note = Description of Artificial Sequence: Synthetic coding sequence
  source 1..312: mol_type = other DNA

SEQ ID NO: 82060 - DNA, 948 bp, synthetic construct
  misc_feature 1..948: note = Description of Artificial Sequence: Synthetic coding sequence
  source 1..948: mol_type = other DNA
atgcacggccacggcggctacgacagcgacttcagcgacgacgagagatgcggcgagagcagcaagagaaagaagagaaccgtggaggacgacctgctgctgcagaagcccttccagaaggagaagcacggcaaggtggcccacaagcaggtggccgccgagctgctggacagagaggaggccagaaacagaagattccacctgatcgccatggacgcctaccagagacacaccaagttcgtgaacgactacatcctgtactacggcggcaagaaggaggacttcaagagactgggcgagaacgacaagaccgacctggacgtgatcagagagaaccacagattcctgtggaacgaggaggacgagatggacatgacctgggagaagagactggccaagaagtactacgacaagctgttcaaggagtactgcatcgccgacctgagcaagtacaaggagaacaagttcggcttcagatggagagtggagaaggaggtgatcagcggcaagggccagttcttctgcggcaacaagtactgcgacaagaaggagggcctgaagagctgggaggtgaacttcggctacatcgagcacggcgagaagagaaacgccctggtgaagctgagactgtgccaggagtgcagcatcaagctgaacttccaccacagaagaaaggagatcaagagcaagaagagaaaggacaagaccaagaaggactgcgaggagagcagccacaagaagagcagactgagcagcgccgaggaggccagcaagaagaaggacaagggccacagcagcagcaagaagagcgaggacagcctgctgagaaacagcgacgaggaggagagcgccagcgagagcgagctgtggaagggccccctgcccgagaccgacgagaagagccaggaggaggagttcgacgagtacttccaggacctgttcctgtag

SEQ ID NO: 82061 - DNA, 948 bp, synthetic construct
  misc_feature 1..948: note = Description of Artificial Sequence: Synthetic coding sequence
  source 1..948: mol_type = other DNA
atgcacggccacggcggctacgacagcgacttcagcgacgacgagagatgcggcgagagcagcaagagaaagaagagaaccgtggaggacgacctgctgctgcagaagcccttccagaaggagaagcacggcaaggtggcccacaagcaggtggccgccgagctgctggacagagaggaggccagaaacagaagattccacctgatcgccatggacgcctaccagagacacaccaagttcgtgaacgactacatcctgtactacggcggcaagaaggaggacttcaagagactgggcgagaacgacaagaccgacctggacgtgatcagagagaaccacagattcctgtggaacgaggaggacgagatggacatgacctgggagaagagactggccaagaagtactacgacaagctgttcaaggagtactgcatcgccgacctgagcaagtacaaggagaacaagttcggcttcagatggagagtggagaaggaggtgatcagcggcaagggccagttcttctgcggcaacaagtactgcgacaagaaggagggcctgaagagctgggaggtgaacttcggctacatcgagcacggcgagaagagaaacgccctggtgaagctgagactgtgccaggagtgcagcatcaagctgaacttccaccacagaagaaaggagatcaagagcaagaagagaaaggacaagaccaagaaggactgcgaggagagcagccacaagaagagcagactgagcagcgccgaggaggccagcaagaagaaggacaagggccacagcagcagcaagaagagcgaggacagcctgctgagaagaatgctggaggagctgcagatgttcacctgggagaagagcgagagaatgggcggcaagagactgatcatcatcatcggcgaggagctgagcgccaacgtgaccaccttcaagatgtag

SEQ ID NO: 82062 - DNA, 942 bp, synthetic construct
  misc_feature 1..942: note = Description of Artificial Sequence: Synthetic coding sequence
  source 1..942: mol_type = other DNA
atgcacggccacggcggctacgacagcgacttcagcgacgacgagagatgcggcgagagcagcaagagaaagaagagaaccgtggaggacgacctgctgctgcagaagcccttccagaaggagaagcacggcaaggtggcccacaagcaggtggccgccgagctgctggacagagaggaggccagaaacagaagattccacctgatcgccatggacgcctaccagagacacaccaagttcgtgaacgactacatcctgtactacggcggcaagaaggaggacttcaagagactgggcgagaacgacaagaccgacctggacgtgatcagagagaaccacagattcctgtggaacgaggaggacgagatggacatgacctgggagaagagactggccaagaagtactacgacaagctgttcaaggagtactgcatcgccgacctgagcaagtacaaggagaacaagttcggcttcagatggagagtggagaaggaggtgatcagcggcaagggccagttcttctgcggcaacaagtactgcgacaagaaggagggcctgaagagctgggaggtgaacttcggctacatcgagcacggcgagaagagaaacgccctggtgaagctgagactgtgccaggagtgcagcatcaagctgaacttccaccacagaagaaaggagatcaagagcaagaagagaaaggacaagaccaagaaggactgcgaggagagcagccacaagaagagcagactgagcagcgccgaggaggccagcaagaagaaggacaagggccacagcagcagcaagaagagcgaggacagcctgctgaacggcgtgatgctgttccaccccggctggagcgccgtggccagaagccagctgaccgccgcccccgccagccaggtgcagaccaacaaccactactggagaggcgtggtgtgctag

SEQ ID NO: 82063 - DNA, 879 bp, synthetic construct
  misc_feature 1..879: note = Description of Artificial Sequence: Synthetic coding sequence
  source 1..879: mol_type = other DNA
atgcacggccacggcggctacgacagcgacttcagcgacgacgagagatgcggcgagagcagcaagagaaagaagagaaccgtggaggacgacctgctgctgcagaagcccttccagaaggagaagcacggcaaggtggcccacaagcaggtggccgccgagctgctggacagagaggaggccagaaacagaagattccacctgatcgccatggacgcctaccagagacacaccaagttcgtgaacgactacatcctgtactacggcggcaagaaggaggacttcaagagactgggcgagaacgacaagaccgacctggacgtgatcagagagaaccacagattcctgtggaacgaggaggacgagatggacatgacctgggagaagagactggccaagaagtactacgacaagctgttcaaggagtactgcatcgccgacctgagcaagtacaaggagaacaagttcggcttcagatggagagtggagaaggaggtgatcagcggcaagggccagttcttctgcggcaacaagtactgcgacaagaaggagggcctgaagagctgggaggtgaacttcggctacatcgagcacggcgagaagagaaacgccctggtgaagctgagactgtgccaggagtgcagcatcaagctgaacttccaccacagaagaaaggagatcaagagcaagaagagaaaggacaagaccaagaaggactgcgaggagagcagccacaagaagagcagactgagcagcgccgaggaggccagcaagaagaaggacaagggccacagcagcagcaagaagagcgaggacagcctgctgaagacctacttcgtgggcctgctgagcgagagcaacgagaagacctacatgtag

SEQ ID NO: 82064 - DNA, 831 bp, synthetic construct
  misc_feature 1..831: note = Description of Artificial Sequence: Synthetic coding sequence
  source 1..831: mol_type = other DNA
atgcacggccacggcggctacgacagcgacttcagcgacgacgagagatgcggcgagagcagcaagagaaagaagagaaccgtggaggacgacctgctgctgcagaagcccttccagaaggagaagcacggcaaggtggcccacaagcaggtggccgccgagctgctggacagagaggaggccagaaacagaagattccacctgatcgccatggacgcctaccagagacacaccaagttcgtgaacgactacatcctgtactacggcggcaagaaggaggacttcaagagactgggcgagaacgacaagaccgacctggacgtgatcagagagaaccacagattcctgtggaacgaggaggacgagatggacatgacctgggagaagagactggccaagaagtactacgacaagctgttcaaggagtactgcatcgccgacctgagcaagtacaaggagaacaagttcggcttcagatggagagtggagaaggaggtgatcagcggcaagggccagttcttctgcggcaacaagtactgcgacaagaaggagggcctgaagagctgggaggtgaacttcggctacatcgagcacggcgagaagagaaacgccctggtgaagctgagactgtgccaggagtgcagcatcaagctgaacttccaccacagaagaaaggagatcaagagcaagaagagaaaggacaagaccaagaaggactgcgaggagagcagccacaagaagagcagactgagcagcgccgaggaggccagcaagaagaaggacaagggccacagcagcagcaagaagagcgaggacagcctgctgaactag

SEQ ID NO: 82065 - DNA, 978 bp, synthetic construct
  misc_feature 1..978: note = Description of Artificial Sequence: Synthetic coding sequence
  source 1..978: mol_type = other DNA
atgggcatcttccccggcatcatcctgatcttcctgagagtgaagttcgccaccgccgccgtgatcgtgagcggccaccagaagagcaccaccgtgagccacgagatgagcggcctgaactggaagcccttcgtgtacggcggcctggccagcatcgtggccgagttcggcaccttccccgtggacctgaccaagaccagactgcaggtgcagggccagagcatcgacgccagattcaaggagatcaagtacagaggcatgttccacgccctgttcagaatctgcaaggaggagggcgtgctggccctgtacagcggcatcgcccccgccctgctgagacaggccagctacggcaccatcaagatcggcatctaccagagcctgaagagactgttcgtggagagactggaggacgagaccctgctgatcaacatgatctgcggcgtggtgagcggcgtgatcagcagcaccatcgccaaccccaccgacgtgctgaagatcagaatgcaggcccagggcagcctgttccagggcagcatgatcggcagcttcatcgacatctaccagcaggagggcaccagaggcctgtggagaggcgtggtgcccaccgcccagagagccgccatcgtggtgggcgtggagctgcccgtgtacgacatcaccaagaagcacctgatcctgagcggcatgatgggcgacaccatcctgacccacttcgtgagcagcttcacctgcggcctggccggcgccctggccagcaaccccgtggacgtggtgagaaccagaatgatgaaccagagagccatcgtgggccacgtggacctgtacaagggcaccgtggacggcatcctgaagatgtggaagcacgagggcttcttcgccctgtacaagggcttctggcccaactggctgagactgggcccctggaacatcatcttcttcatcacctacgagcagctgaagagactgcagatctag

SEQ ID NO: 82066 - DNA, 894 bp, synthetic construct
  misc_feature 1..894: note = Description of Artificial Sequence: Synthetic coding sequence
  source 1..894: mol_type = other DNA
atggaggagctggtggtggaggtgagaggcagcaacggcgccttctacaaggccttcgtgaaggacgtgcacgaggacagcatcaccgtggccttcgagaacaactggcagcccgacagacagatccccttccacgacgtgagattccccccccccgtgggctacaacaaggacatcaacgagagcgacgaggtggaggtgtacagcagagccaacgagaaggagccctgctgctggtggctggccaaggtgagaatgatcaagggcgagttctacgtgatcgagtacgccgcctgcgacgccacctacaacgagatcgtgaccatcgagagactgagaagcgtgaaccccaacaagcccgccaccaaggacaccttccacaagatcaagctggacgtgcccgaggacctgagacagatgtgcgccaaggaggccgcccacaaggacttcaagaaggccgtgggcgccttcagcgtgacctacgaccccgagaactaccagctggtgatcctgagcatcaacgaggtgaccagcaagagagcccacatgctgatcgacatgcacttcagaagcctgagaaccaagctgagcctgatcatgagaaacgaggaggccagcaagcagctggagagcagcagacagctggccagcagattccacgagcagttcatcgtgagagaggacctgatgggcctggccatcggcacccacggcgccaacatccagcaggccagaaaggtgcccggcgtgaccgccatcgacctggacgaggacacctgcaccttccacatctacggcgaggaccaggacgccgtgaagaaggccagaagcttcctggagttcgccgaggacgtgatccaggtgcccagaaacctggtgggcctgaagatctag

SEQ ID NO: 82067 - DNA, 1773 bp, synthetic construct
  misc_feature 1..1773: note = Description of Artificial Sequence: Synthetic coding sequence
  source 1..1773: mol_type = other DNA
atggaggagctggtggtggaggtgagaggcagcaacggcgccttctacaaggccttcgtgaaggacgtgcacgaggacagcatcaccgtggccttcgagaacaactggcagcccgacagacagatccccttccacgacgtgagattccccccccccgtgggctacaacaaggacatcaacgagagcgacgaggtggaggtgtacagcagagccaacgagaaggagccctgctgctggtggctggccaaggtgagaatgatcaagggcgagttctacgtgatcgagtacgccgcctgcgacgccacctacaacgagatcgtgaccatcgagagactgagaagcgtgaaccccaacaagcccgccaccaaggacaccttccacaagatcaagctggacgtgcccgaggacctgagacagatgtgcgccaaggaggccgcccacaaggacttcaagaaggccgtgggcgccttcagcgtgacctacgaccccgagaactaccagctggtgatcctgagcatcaacgaggtgaccagcaagagagcccacatgctgatcgacatgcacttcagaagcctgagaaccaagctgagcctgatcatgagaaacgaggaggccagcaagcagctggagagcagcagacagctggccagcagattccacgagcagttcatcgtgagagaggacctgatgggcctggccatcggcacccacggcgccaacatccagcaggccagaaaggtgcccggcgtgaccgccatcgacctggacgaggacacctgcaccttccacatctacggcgaggaccaggacgccgtgaagaaggccagaagcttcctggagttcgccgaggacgtgatccaggtgcccagaaacctggtgggcaaggtgatcggcaagaacggcaagctgatccaggagatcgtggacaagagcggcgtggtgagagtgagaatcgaggccgagaacgagaagaacgtgccccaggaggaggagatcatgccccccaacagcctgcccagcaacaacagcagagtgggccccaacgcccccgaggagaagaagcacctggacatcaaggagaacagcacccacttcagccagcccaacagcaccaaggtgcagagagtgctggtggccagcagcgtggtggccggcgagagccagaagcccgagctgaaggcctggcagggcatggtgcccttcgtgttcgtgggcaccaaggacagcatcgccaacgccaccgtgctgctggactaccacctgaactacctgaaggaggtggaccagctgagactggagagactgcagatcgacgagcagctgagacagatcggcgccagcagcagacccccccccaacagaaccgacaaggagaagagctacgtgaccgacgacggccagggcatgggcagaggcagcagaccctacagaaacagaggccacggcagaagaggccccggctacaccagcgcccccaccgaggaggagagagagagcttcctgagaagaggcgacggcagaagaagaggcggcggcggcagaggccagggcggcagaggcagaggcggcggcttcaagggcaacgacgaccacagcagaaccgacaacagacccagaaaccccagagaggccaagggcagaaccaccgacggcagcctgcagaacaccagcagcgagggcagcagactgagaaccggcaaggacagaaaccagaagaaggagaagcccgacagcgtggacggccagcagcccctggtgaacggcgtgccctag

SEQ ID NO: 82068 - DNA, 1614 bp, synthetic construct
  misc_feature 1..1614: note = Description of Artificial Sequence: Synthetic coding sequence
  source 1..1614: mol_type = other DNA
atggaggagctggtggtggaggtgagaggcagcaacggcgccttctacaaggccttcgtgaaggacgtgcacgaggacagcatcaccgtggccttcgagaacaactggcagcccgacagacagatccccttccacgacgtgagattccccccccccgtgggctacaacaaggacatcaacgagagcgacgaggtggaggtgtacagcagagccaacgagaaggagccctgctgctggtggctggccaaggtgagaatgatcaagggcgagttctacgtgatcgagtacgccgcctgcgacgccacctacaacgagatcgtgaccatcgagagactgagaagcgtgaaccccaacaagcccgccaccaaggacaccttccacaagatcaagctggacgtgcccgaggacctgagacagatgtgcgccaaggaggccgcccacaaggacttcaagaaggccgtgggcgccttcagcgtgacctacgaccccgagaactaccagctggtgatcctgagcatcaacgaggtgaccagcaagagagcccacatgctgatcgacatgcacttcagaagcctgagaaccaagctgagcctgatcatgagaaacgaggaggccagcaagcagctggagagcagcagacagctggccagcagattccacgagcagttcatcgtgagagaggacctgatgggcctggccatcggcacccacggcgccaacatccagcaggccagaaaggtgcccggcgtgaccgccatcgacctggacgaggacacctgcaccttccacatctacggcgaggaccaggacgccgtgaagaaggccagaagcttcctggagttcgccgaggacgtgatccaggtgcccagaaacctggtgggcaaggtgatcggcaagaacggcaagctgatccaggagatcgtggacaagagcggcgtggtgagagtgagaatcgaggccgagaacgagaagaacgtgccccaggaggaggagatcatgccccccaacagcctgcccagcaacaacagcagagtgggccccaacgcccccgaggagaagaagcacctggacatcaaggagaacagcacccacttcagccagcccaacagcaccaaggtgcagagagtgctggtggccagcagcgtggtggccggcgagagccagaagcccgagctgaaggcctggcagggcatggtgcccttcgtgttcgtgggcaccaaggacagcatcgccaacgccaccgtgctgctggactaccacctgaactacctgaagctgcagcagagaaagagaggcagagccagctgcgccgaggagaccgacggcggcgtggagggcgaggaggaggacaaggaggaggaggacgtggaggaggccagcaaggagaccaccatcacccccgagcagatcatcgtgcacgtgatccaggagagactgaaggaggagcagcagatggaccccttcagaagcgagctgaccgccatcatgaagggcgtgagcaccctgaagcactacagaatcccccccgtgaaggtggtgggctgcgccagagtgaagatcgtgaccagaagaaagagaagccagaccgcctggatggtgagcaaccacagctag

SEQ ID NO: 82069 - DNA, 1899 bp, synthetic construct
  misc_feature 1..1899: note = Description of Artificial Sequence: Synthetic coding sequence
  source 1..1899: mol_type = other DNA
atggaggagctggtggtggaggtgagaggcagcaacggcgccttctacaaggccttcgtgaaggacgtgcacgaggacagcatcaccgtggccttcgagaacaactggcagcccgacagacagatccccttccacgacgtgagattccccccccccgtgggctacaacaaggacatcaacgagagcgacgaggtggaggtgtacagcagagccaacgagaaggagccctgctgctggtggctggccaaggtgagaatgatcaagggcgagttctacgtgatcgagtacgccgcctgcgacgccacctacaacgagatcgtgaccatcgagagactgagaagcgtgaaccccaacaagcccgccaccaaggacaccttccacaagatcaagctggacgtgcccgaggacctgagacagatgtgcgccaaggaggccgcccacaaggacttcaagaaggccgtgggcgccttcagcgtgacctacgaccccgagaactaccagctggtgatcctgagcatcaacgaggtgaccagcaagagagcccacatgctgatcgacatgcacttcagaagcctgagaaccaagctgagcctgatcatgagaaacgaggaggccagcaagcagctggagagcagcagacagctggccagcagattccacgagcagttcatcgtgagagaggacctgatgggcctggccatcggcacccacggcgccaacatccagcaggccagaaaggtgcccggcgtgaccgccatcgacctggacgaggacacctgcaccttccacatctacggcgaggaccaggacgccgtgaagaaggccagaagcttcctggagttcgccgaggacgtgatccaggtgcccagaaacctggtgggcaaggtgatcggcaagaacggcaagctgatccaggagatcgtggacaagagcggcgtggtgagagtgagaatcgaggccgagaacgagaagaacgtgccccaggaggaggagatcatgccccccaacagcctgcccagcaacaacagcagagtgggccccaacgcccccgaggagaagaagcacctggacatcaaggagaacagcacccacttcagccagcccaacagcaccaaggtgcagagagtgctggtggccagcagcgtggtggccggcgagagccagaagcccgagctgaaggcctggcagggcatggtgcccttcgtgttcgtgggcaccaaggacagcatcgccaacgccaccgtgctgctggactaccacctgaactacctgaaggaggtggaccagctgagactggagagactgcagatcgacgagcagctgagacagatcggcgccagcagcagacccccccccaacagaaccgacaaggagaagagctacgtgaccgacgacggccagggcatgggcagaggcagcagaccctacagaaacagaggccacggcagaagaggccccggctacaccagcggcaccaacagcgaggccagcaacgccagcgagaccgagagcgaccacagagacgagctgagcgactggagcctggcccccaccgaggaggagagagagagcttcctgagaagaggcgacggcagaagaagaggcggcggcggcagaggccagggcggcagaggcagaggcggcggcttcaagggcaacgacgaccacagcagaaccgacaacagacccagaaaccccagagaggccaagggcagaaccaccgacggcagcctgcagatcagagtggactgcaacaacgagagaagcgtgcacaccaagaccctgcagaacaccagcagcgagggcagcagactgagaaccggcaaggacagaaaccagaagaaggagaagcccgacagcgtggacggccagcagcccctggtgaacggcgtgccctag

SEQ ID NO: 82070 - DNA, 1749 bp, synthetic construct
  misc_feature 1..1749: note = Description of Artificial Sequence: Synthetic coding sequence
  source 1..1749: mol_type = other DNA
atggaggagctggtggtggaggtgagaggcagcaacggcgccttctacaaggccttcgtgaaggacgtgcacgaggacagcatcaccgtggccttcgagaacaactggcagcccgacagacagatccccttccacgacgtgagattccccccccccgtgggctacaacaaggacatcaacgagagcgacgaggtggaggtgtacagcagagccaacgagaaggagccctgctgctggtggctggccaaggtgagaatgatcaagggcgagttctacgtgatcgagtacgccgcctgcgacgccacctacaacgagatcgtgaccatcgagagactgagaagcgtgaaccccaacaagcccgccaccaaggacaccttccacaagatcaagctggacgtgcccgaggacctgagacagatgtgcgccaaggaggccgcccacaaggacttcaagaaggccgtgggcgccttcagcgtgacctacgaccccgagaactaccagctggtgatcctgagcatcaacgaggtgaccagcaagagagcccacatgctgatcgacatgcacttcagaagcctgagaaccaagctgagcctgatcatgagaaacgaggaggccagcaagcagctggagagcagcagacagctggccagcagattccacgagcagttcatcgtgagagaggacctgatgggcctggccatcggcacccacggcgccaacatccagcaggccagaaaggtgcccggcgtgaccgccatcgacctggacgaggacacctgcaccttccacatctacggcgaggaccaggacgccgtgaagaaggccagaagcttcctggagttcgccgaggacgtgatccaggtgcccagaaacctggtgggcaaggtgatcggcaagaacggcaagctgatccaggagatcgtggacaagagcggcgtggtgagagtgagaatcgaggccgagaacgagaagaacgtgccccaggaggaggagatcatgccccccaacagcctgcccagcaacaacagcagagtgggccccaacgcccccgaggagaagaagcacctggacatcaaggagaacagcacccacttcagccagcccaacagcaccaaggtgcagagaggcatggtgcccttcgtgttcgtgggcaccaaggacagcatcgccaacgccaccgtgctgctggactaccacctgaactacctgaaggaggtggaccagctgagactggagagactgcagatcgacgagcagctgagacagatcggcgccagcagcagacccccccccaacagaaccgacaaggagaagagctacgtgaccgacgacggccagggcatgggcagaggcagcagaccctacagaaacagaggccacggcagaagaggccccggctacaccagcgagagcgaccacagagacgagctgagcgactggagcctggcccccaccgaggaggagagagagagcttcctgagaagaggcgacggcagaagaagaggcggcggcggcagaggccagggcggcagaggcagaggcggcggcttcaagggcaacgacgaccacagcagaaccgacaacagacccagaaaccccagagaggccaagggcagaaccaccgacggcagcctgcagaacaccagcagcgagggcagcagactgagaaccggcaaggacagaaaccagaagaaggagaagcccgacagcgtggacggccagcagcccctggtgaacggcgtgccctag

SEQ ID NO: 82071 - DNA, 1779 bp, synthetic construct
  misc_feature 1..1779: note = Description of Artificial Sequence: Synthetic coding sequence
  source 1..1779: mol_type = other DNA
atggaggagctggtggtggaggtgagaggcagcaacggcgccttctacaaggccttcgtgaaggacgtgcacgaggacagcatcaccgtggccttcgagaacaactggcagcccgacagacagatccccttccacgacgtgagattccccccccccgtgggctacaacaaggacatcaacgagagcgacgaggtggaggtgtacagcagagccaacgagaaggagccctgctgctggtggctggccaaggtgagaatgatcaagggcgagttctacgtgatcgagtacgccgcctgcgacgccacctacaacgagatcgtgaccatcgagagactgagaagcgtgaaccccaacaagcccgccaccaaggacaccttccacaagatcaagctggacgtgcccgaggacctgagacagatgtgcgccaaggaggccgcccacaaggacttcaagaaggccgtgggcgccttcagcgtgacctacgaccccgagaactaccagctggtgatcctgagcatcaacgaggtgaccagcaagagagcccacatgctgatcgacatgcacttcagaagcctgagaaccaagctgagcctgatcatgagaaacgaggaggccagcaagcagctggagagcagcagacagctggccagcagattccacgagcagttcatcgtgagagaggacctgatgggcctggccatcggcacccacggcgccaacatccagcaggccagaaaggtgcccggcgtgaccgccatcgacctggacgaggacacctgcaccttccacatctacggcgaggaccaggacgccgtgaagaaggccagaagcttcctggagttcgccgaggacgtgatccaggtgcccagaaacctggtggtgatcggcaagaacggcaagctgatccaggagatcgtggacaagagcggcgtggtgagagtgagaatcgaggccgagaacgagaagaacgtgccccaggaggaggagatcatgccccccaacagcctgcccagcaacaacagcagagtgggccccaacgcccccgaggagaagaagcacctggacatcaaggagaacagcacccacttcagccagcccaacagcaccaaggtgcagagaggcatggtgcccttcgtgttcgtgggcaccaaggacagcatcgccaacgccaccgtgctgctggactaccacctgaactacctgaaggaggtggaccagctgagactggagagactgcagatcgacgagcagctgagacagatcggcgccagcagcagacccccccccaacagaaccgacaaggagaagagctacgtgaccgacgacggccagggcatgggcagaggcagcagaccctacagaaacagaggccacggcagaagaggccccggctacaccagcggcaccaacagcgaggccagcaacgccagcgagaccgagagcgaccacagagacgagctgagcgactggagcctggcccccaccgaggaggagagagagagcttcctgagaagaggcgacggcagaagaagaggcggcggcggcagaggccagggcggcagaggcagaggcggcggcttcaagggcaacgacgaccacagcagaaccgacaacagacccagaaaccccagagaggccaagggcagaaccaccgacggcagcctgcagaacaccagcagcgagggcagcagactgagaaccggcaaggacagaaaccagaagaaggagaagcccgacagcgtggacggccagcagcccctggtgaacggcgtgccctag

SEQ ID NO: 82072 - DNA, 789 bp, synthetic construct
  misc_feature 1..789: note = Description of Artificial Sequence: Synthetic coding sequence
  source 1..789: mol_type = other DNA
atgccccccaacagcctgcccagcaacaacagcagagtgggccccaacgcccccgaggagaagaagcacctggacatcaaggagaacagcacccacttcagccagcccaacagcaccaaggtgcagagaggcatggtgcccttcgtgttcgtgggcaccaaggacagcatcgccaacgccaccgtgctgctggactaccacctgaactacctgaaggaggtggaccagctgagactggagagactgcagatcgacgagcagctgagacagatcggcgccagcagcagacccccccccaacagaaccgacaaggagaagagctacgtgaccgacgacggccagggcatgggcagaggcagcagaccctacagaaacagaggccacggcagaagaggccccggctacaccagcggcaccaacagcgaggccagcaacgccagcgagaccgagagcgaccacagagacgagctgagcgactggagcctggcccccaccgaggaggagagagagagcttcctgagaagaggcgacggcagaagaagaggcggcggcggcagaggccagggcggcagaggcagaggcggcggcttcaagggcaacgacgaccacagcagaaccgacaacagacccagaaaccccagagaggccaagggcagaaccaccgacggcagcctgcagaacaccagcagcgagggcagcagactgagaaccggcaaggacagaaaccagaagaaggagaagcccgacagcgtggacggccagcagcccctggtgaacggcgtgccctag

SEQ ID NO: 82073 - DNA, 1611 bp, synthetic construct
  misc_feature 1..1611: note = Description of Artificial Sequence: Synthetic coding sequence
  source 1..1611: mol_type = other DNA
atgatgaagggcgagttctacgtgatcgagtacgccgcctgcgacgccacctacaacgagatcgtgaccttcgagagactgagacccgtgaaccagaacaagaccgtgaagaagaacaccttcttcaagtgcaccgtggacgtgcccgaggacctgagagaggcctgcgccaacgagaacgcccacaaggacttcaagaaggccgtgggcgcctgcagaatcttctaccaccccgagaccacccagctgatgatcctgagcgccagcgaggccaccgtgaagagagtgaacatcctgagcgacatgcacctgagaagcatcagaaccaagctgatgctgatgagcagaaacgaggaggccaccaagcacctggagtgcaccaagcagctggccgccgccttccacgaggagttcgtggtgagagaggacctgatgggcctggccatcggcacccacggcagcaacatccagcaggccagaaaggtgcccggcgtgaccgccatcgagctggacgaggacaccggcaccttcagaatctacggcgagagcgccgacgccgtgaagaaggccagaggcttcctggagttcgtggaggacttcatccaggtgcccagaaacctggtgggcaaggtgatcggcaagaacggcaaggtgatccaggagatcgtggacaagagcggcgtggtgagagtgagaatcgagggcgacaacgagaacaagctgcccagagaggacggcatggtgcccttcgtgttcgtgggcaccaaggagagcatcggcaacgtgcaggtgctgctggagtaccacatcgcctacctgaaggaggtggagcagctgagaatggagagactgcagatcgacgagcagctgagacagatcggcagcagaagctacagcggcagaggcagaggcagaagaggccccaactacaccagcggctacggcaccaacagcgagctgagcaaccccagcgagaccgagagcgagagaaaggacgagctgagcgactggagcctggccggcgaggacgacagagacagcagacaccagagagacagcagaagaagacccggcggcagaggcagaagcgtgagcggcggcagaggcagaggcggccccagaggcggcaagagcagcatcagcagcgtgctgaaggaccccgacagcaacccctacagcctgctggacaacaccgagagcgaccagaccgccgacaccgacgccagcgagagccaccacagcaccaacagaagaagaagaagcagaagaagaagaaccgacgaggacgccgtgctgatggacggcatgaccgagagcgacaccgccagcgtgaacgagaacggcctggtgaccgtggccgactacatcagcagagccgagagccagagcagacagagaaacctgcccagagagaccctggccaagaacaagaaggagatggccaaggacgtgatcgaggagcacggccccagcgagaaggccatcaacggccccaccagcgccagcggcgacgacatcagcaagctgcagagaacccccggcgaggagaagatcaacaccctgaaggaggagaacacccaggaggccgccgtgctgaacggcgtgagctag

SEQ ID NO: 82074 - DNA, 1866 bp, synthetic construct
  misc_feature 1..1866: note = Description of Artificial Sequence: Synthetic coding sequence
  source 1..1866: mol_type = other DNA
atggccgagctgaccgtggaggtgagaggcagcaacggcgccttctacaagggcttcatcaaggacgtgcacgaggacagcctgaccgtggtgttcgagaacaactggcagcccgagagacaggtgcccttcaacgaggtgagactgccccccccccccgacatcaagaaggagatcagcgagggcgacgaggtggaggtgtacagcagagccaacgaccaggagccctgcggctggtggctggccaaggtgagaatgatgaagggcgagttctacgtgatcgagtacgccgcctgcgacgccacctacaacgagatcgtgaccttcgagagactgagacccgtgaaccagaacaagaccgtgaagaagaacaccttcttcaagtgcaccgtggacgtgcccgaggacctgagagaggcctgcgccaacgagaacgcccacaaggacttcaagaaggccgtgggcgcctgcagaatcttctaccaccccgagaccacccagctgatgatcctgagcgccagcgaggccaccgtgaagagagtgaacatcctgagcgacatgcacctgagaagcatcagaaccaagctgatgctgatgagcagaaacgaggaggccaccaagcacctggagtgcaccaagcagctggccgccgccttccacgaggagttcgtggtgagagaggacctgatgggcctggccatcggcacccacggcagcaacatccagcaggccagaaaggtgcccggcgtgaccgccatcgagctggacgaggacaccggcaccttcagaatctacggcgagagcgccgacgccgtgaagaaggccagaggcttcctggagttcgtggaggacttcatccaggtgcccagaaacctggtgggcaaggtgatcggcaagaacggcaaggtgatccaggagatcgtggacaagagcggcgtggtgagagtgagaatcgagggcgacaacgagaacaagctgcccagagaggacggcatggtgcccttcgtgttcgtgggcaccaaggagagcatcggcaacgtgcaggtgctgctggagtaccacatcgcctacctgaaggaggtggagcagctgagaatggagagactgcagatcgacgagcagctgagacagatcggcagcagaagctacagcggcagaggcagaggcagaagaggccccaactacaccagcggctacggcaccaacagcgagctgagcaaccccagcgagaccgagagcgagagaaaggacgagctgagcgactggagcctggccggcgaggacgacagagacagcagacaccagagagacagcagaagaagacccggcggcagaggcagaagcgtgagcggcggcagaggcagaggcggccccagaggcggcaagagcagcatcagcagcgtgctgaaggaccccgacagcaacccctacagcctgctggacaacaccgagagcgaccagaccgccgacaccgacgccagcgagagccaccacagcaccaacagaagaagaagaagcagaagaagaagaaccgacgaggacgccgtgctgatggacggcatgaccgagagcgacaccgccagcgtgaacgagaacggcctggtgaccgtggccgactacatcagcagagccgagagccagagcagacagagaaacctgcccagagagaccctggccaagaacaagaaggagatggccaaggacgtgatcgaggagcacggccccagcgagaaggccatcaacggccccaccagcgccagcggcgacgacatcagcaagctgcagagaacccccggcgaggagaagatcaacaccctgaaggaggagaacacccaggaggccgccgtgctgaacggcgtgagctag

SEQ ID NO: 82075 - DNA, 1620 bp, synthetic construct
  misc_feature 1..1620: note = Description of Artificial Sequence: Synthetic coding sequence
  source 1..1620: mol_type = other DNA
atggccgagctgaccgtggaggtgagaggcagcaacggcgccttctacaagggcttcatcaaggacgtgcacgaggacagcctgaccgtggtgttcgagaacaactggcagcccgagagacaggtgcccttcaacgaggtgagactgccccccccccccgacatcaagaaggagatcagcgagggcgacgaggtggaggtgtacagcagagccaacgaccaggagccctgcggctggtggctggccaaggtgagaatgatgaagggcgagttctacgtgatcgagtacgccgcctgcgacgccacctacaacgagatcgtgaccttcgagagactgagacccgtgaaccagaacaagaccgtgaagaagaacaccttcttcaagtgcaccgtggacgtgcccgaggacctgagagaggcctgcgccaacgagaacgcccacaaggacttcaagaaggccgtgggcgcctgcagaatcttctaccaccccgagaccacccagctgatgatcctgagcgccagcgaggccaccgtgaagagagtgaacatcctgagcgacatgcacctgagaagcatcagaaccaagctgatgctgatgagcagaaacgaggaggccaccaagcacctggagtgcaccaagcagctggccgccgccttccacgaggagttcgtggtgagagaggacctgatgggcctggccatcggcacccacggcagcaacatccagcaggccagaaaggtgcccggcgtgaccgccatcgagctggacgaggacaccggcaccttcagaatctacggcgagagcgccgacgccgtgaagaaggccagaggcttcctggagttcgtggaggacttcatccaggtgcccagaaacctggtgggcaaggtgatcggcaagaacggcaaggtgatccaggagatcgtggacaagagcggcgtggtgagagtgagaatcgagggcgacaacgagaacaagctgcccagagaggacggcatggtgcccttcgtgttcgtgggcaccaaggagagcatcggcaacgtgcaggtgctgctggagtaccacatcgcctacctgaaggaggtggagcagctgagaatggagagactgcagatcgacgagcagctgagacagatcggcagcagaagctacagcggcagaggcagaggcagaagaggccccaactacaccagcggctacggcaccaacagcgagctgagcaaccccagcgagaccgagagcgagagaaaggacgagctgagcgactggagcctggccggcgaggacgacagagacagcagacaccagagagacagcagaagaagacccggcggcagaggcagaagcgtgagcggcggcagaggcagaggcggccccagaggcggcaagagcagcatcagcagcgtgctgaaggaccccgacagcaacccctacagcctgctggacaacaccgagagcgaccagaccgccgacaccgacgccagcgagagccaccacagcaccaacagaagaagaagaagcagaagaagaagaaccgacgaggacgccgtgctgatggacggcatgaccgagagcgacaccgccagcgtgaacgagaacggcctgggcaagagatgcgactag

SEQ ID NO: 82076 - DNA, 1827 bp, synthetic construct
  misc_feature 1..1827: note = Description of Artificial Sequence: Synthetic coding sequence
  source 1..1827: mol_type = other DNA
atggtgaccgagggcttcatcaaggacgtgcacgaggacagcctgaccgtggtgttcgagaacaactggcagcccgagagacaggtgcccttcaacgaggtgagactgccccccccccccgacatcaagaaggagatcagcgagggcgacgaggtggaggtgtacagcagagccaacgaccaggagccctgcggctggtggctggccaaggtgagaatgatgaagggcgagttctacgtgatcgagtacgccgcctgcgacgccacctacaacgagatcgtgaccttcgagagactgagacccgtgaaccagaacaagaccgtgaagaagaacaccttcttcaagtgcaccgtggacgtgcccgaggacctgagagaggcctgcgccaacgagaacgcccacaaggacttcaagaaggccgtgggcgcctgcagaatcttctaccaccccgagaccacccagctgatgatcctgagcgccagcgaggccaccgtgaagagagtgaacatcctgagcgacatgcacctgagaagcatcagaaccaagctgatgctgatgagcagaaacgaggaggccaccaagcacctggagtgcaccaagcagctggccgccgccttccacgaggagttcgtggtgagagaggacctgatgggcctggccatcggcacccacggcagcaacatccagcaggccagaaaggtgcccggcgtgaccgccatcgagctggacgaggacaccggcaccttcagaatctacggcgagagcgccgacgccgtgaagaaggccagaggcttcctggagttcgtggaggacttcatccaggtgcccagaaacctggtgggcaaggtgatcggcaagaacggcaaggtgatccaggagatcgtggacaagagcggcgtggtgagagtgagaatcgagggcgacaacgagaacaagctgcccagagaggacggcatggtgcccttcgtgttcgtgggcaccaaggagagcatcggcaacgtgcaggtgctgctggagtaccacatcgcctacctgaaggaggtggagcagctgagaatggagagactgcagatcgacgagcagctgagacagatcggcagcagaagctacagcggcagaggcagaggcagaagaggccccaactacaccagcggctacggcaccaacagcgagctgagcaaccccagcgagaccgagagcgagagaaaggacgagctgagcgactggagcctggccggcgaggacgacagagacagcagacaccagagagacagcagaagaagacccggcggcagaggcagaagcgtgagcggcggcagaggcagaggcggccccagaggcggcaagagcagcatcagcagcgtgctgaaggaccccgacagcaacccctacagcctgctggacaacaccgagagcgaccagaccgccgacaccgacgccagcgagagccaccacagcaccaacagaagaagaagaagcagaagaagaagaaccgacgaggacgccgtgctgatggacggcatgaccgagagcgacaccgccagcgtgaacgagaacggcctggtgaccgtggccgactacatcagcagagccgagagccagagcagacagagaaacctgcccagagagaccctggccaagaacaagaaggagatggccaaggacgtgatcgaggagcacggccccagcgagaaggccatcaacggccccaccagcgccagcggcgacgacatcagcaagctgcagagaacccccggcgaggagaagatcaacaccctgaaggaggagaacacccaggaggccgccgtgctgaacggcgtgagctag

SEQ ID NO: 82077 - DNA, 2022 bp, synthetic construct
  misc_feature 1..2022: note = Description of Artificial Sequence: Synthetic coding sequence
  source 1..2022: mol_type = other DNA
atgggcggcctggccagcggcggcgacgtggagcccggcctgcccgtggaggtgagaggcagcaacggcgccttctacaagggcttcgtgaaggacgtgcacgaggacagcgtgaccatcttcttcgagaacaactggcagagcgagagacagatccccttcggcgacgtgagactgcccccccccgccgactacaacaaggagatcaccgagggcgacgaggtggaggtgtacagcagagccaacgagcaggagccctgcggctggtggctggccagagtgagaatgatgaagggcgacttctacgtgatcgagtacgccgcctgcgacgccacctacaacgagatcgtgaccctggagagactgagacccgtgaaccccaaccccctggccaccaagggcagcttcttcaaggtgaccatggccgtgcccgaggacctgagagaggcctgcagcaacgagaacgtgcacaaggagttcaagaaggccctgggcgccaactgcatcttcctgaacatcaccaacagcgagctgttcatcctgagcaccaccgaggcccccgtgaagagagccagcctgctgggcgacatgcacttcagaagcctgagaaccaagctgctgctgatgagcagaaacgaggaggccaccaagcacctggagaccagcaagcagctggccgccgccttccaggaggagttcaccgtgagagaggacctgatgggcctggccatcggcacccacggcgccaacatccagcaggccagaaaggtgcccggcgtgaccgccatcgagctgggcgaggagacctgcaccttcagaatctacggcgagacccccgaggcctgcagacaggccagaagctacctggagttcagcgaggacagcgtgcaggtgcccagaaacctggtgggcaaggtgatcggcaagaacggcaaggtgatccaggagatcgtggacaagagcggcgtggtgagagtgagagtggagggcgacaacgacaagaagaaccccagagaggagggcatggtgcccttcatcttcgtgggcaccagagagaacatcagcaacgcccaggccctgctggagtaccacctgagctacctgcaggaggtggagcagctgagactggagagactgcagatcgacgagcagctgagacagatcggcctgggcttcagaccccccggcagcggcagaggcagcggcggcagcgacaaggccggctacagcaccgacgagagcagcagcagcagcctgcacgccaccagaacctacggcggcagctacggcggcagaggcagaggcagaagaaccggcggccccgcctacggccccagcagcgacgtgagcaccgccagcgagaccgagagcgagaagagagaggagcccaacagagccggccccggcgacagagacccccccaccagaggcgaggagagcagaagaagacccaccggcggcagaggcagaggccccccccccgcccccagacccaccagcagatacaacagcagcagcatcagcagcgtgctgaaggaccccgacagcaacccctacagcctgctggacaccagcgagcccgagccccccgtggacagcgagcccggcgagcccccccccgccagcgccagaagaagaagaagcagaagaagaagaaccgacgaggacagaaccgtgatggacggcggcctggagagcgacggccccaacatgaccgagaacggcctggaggacgagagcagaccccagagaagaaacagaagcagaagaagaagaaacagaggcaacagaaccgacggcagcatcagcggcgacagacagcccgtgaccgtggccgactacatcagcagagccgagagccagagcagacagagaccccccctggagagaaccaagcccagcgaggacagcctgagcggccagaagggcgacagcgtgagcaagctgcccaagggccccagcgagaacggcgagctgagcgcccccctggagctgggcagcatggtgaacggcgtgagctag

SEQ ID NO: 82078 - DNA, 6540 bp, synthetic construct
  misc_feature 1..6540: note = Description of Artificial Sequence: Synthetic coding sequence
  source 1..6540: mol_type = other DNA
atgaacagcctgagctggggcgccgccaacgccgtgctgctgctgctgctgctggcctgggccagccccaccttcatcagcatcaacagaggcgtgagagtgatgaagggccacagcgccttcctgagcggcgacgacctgaagttcgccatccccaaggagaaggacgcctgcaaggtggaggtggtgatgaacgagcccatcacccagagagtgggcaagctgaccccccaggtgttcgactgccacttcctgcccaacgaggtgaagtacgtgcacaacggctgccccatcctggacgaggacaccgtgaagctgagactgtacagattcaccgagagagacaccttcatcgagaccttcatcctgtgggtgtacctgctggagcccgactgcaacatcatccacatgagcaacaacgtgctggaggtgcccgagttcaacggcctgagccaggccatcgacaagaacctgctgagattcgactacgacagaatggccagcctggagtgcaccgtgagcctggacaccgccagaaccagactgcccgcccacggccagatggtgctgggcgagcccagacccgaggagcccagaggcgaccagccccacagcttcttccccgagagccagctgagagccaagctgaagtgccccggcggcagctgcacccccggcctgaagaagatcggcagcctgaaggtgagctgcgaggagttcctgctgatgggcctgagataccagcacctggacccccccagccccaacatcgactacatcagcatccagctggacctgaccgacaccagaagcaagatcgtgtacaagagcgagagcgcctggctgcccgtgtacatcagagccggcatccccaaccagatccccaaggccgccttcatggccgtgttcatcctggaggtggaccagttcatcctgaccagcctgaccaccagcgtgctggactgcgaggaggacgagacccccaagcccctgctggtgttcaacatcaccaaggcccccctgcagggctacgtgacccacctgctggaccacaccagacccatcagcagcttcacctggaaggacctgagcgacatgcagatcgcctaccagccccccaacagcagccacagcgagagaagacacgacgaggtggagctggaggtgtacgacttcttcttcgagagaagcgcccccatgaccgtgcacatcagcatcagaaccgccgacaccaacgcccccagagtgagctggaacaccggcctgagcctgctggagggccagagcagagccatcacctgggagcagttccaggtggtggacaacgacgacatcggcgccgtgagactggtgaccgtgggcggcctgcagcacggctggctgaccctgagaggcggcaagggcttcctgttcaccgtggccgacctgcaggccggcgtggtgagataccaccacgacgacagcgacagcaccaaggacttcgtggtgttcagaatcttcgacggccaccacagcatcagacacaagttccccatcaacgtgctgcccaaggacgacagcccccccttcctgatcaccaacgtggtgatcgagctggaggagggccagaccatcctgatccagggcagcatgctgagagccagcgacgtggacgccagcgacgactacatcttcttcaacatcaccaagcccccccaggccggcgagatcatgaagaagcccggccccggcctgatcggctaccccgtgcacggcttcctgcagagagacctgttcaacggcatcatctactacagacacttcggcggcgagatcttcgaggacagcttccagttcgtgctgtgggacagccacgagccccccaacctgagcgtgccccaggtggccaccatccacatcacccccgtggacgaccagctgcccaaggaggcccccggcgtgagcagacacctggtggtgaaggagaccgaggtggcctacatcaccaagaagcagctgcacttcatcgacagcgagagctacgacagagagctggtgtacaccatcaccaccccccccttcttcagcttcagccacagacacctggacgccggcaagctgttcatggtggacagcatccccaaggtggtgaagaaccccaccgccctggagctgagaagcttcacccagcacgccgtgaactacatgaaggtggcctacatgccccccatgcaggacatcggcccccactgcagagacgtgcagttcaccttcagcgtgagcaaccagcacggcggcaccctgcacggcatctgcttcaacatcaccatcctgcccgtggacaaccaggtgcccgaggccttcaccaaccccctgaaggtgaccgagggcggccagagcatcatcagcaccgagcacatcctgatcagcgacgccgacaccaagctggacaacatcgacctgagcctgagagagctgcccctgcacggcagagtggagctgaacggcttccccctgaacagcggcggcaccttcagctggggcgacctgcacaccctgaaggtgagataccagcacgacggcaccgaggtgctgcaggacgacctgctgctggaggtgaccgacggcaccaacagcgccgagttcgtgctgcacgtggaggtgttccccgtgaacgacgagccccccgtgctgaaggccgacctgatgcccgtgatgaactgcagcgagggcggcgaggtggtgatcaccagcgagtacatcttcgccaccgacgtggacagcgacaacctgaagctgatgttcgtgatcgccagagagccccagcacggcgtggtgagaagagccggcgtgaccgtggaccagttcagccagagagacgtgatcagcgaggccgtgacctacaagcacaccggcggcgagatcggcctgatgccctgcttcgacaccatcaccctggtggtgagcgacggcgaggccggccccttcgtgaacggctgctgctacaacggccccaaccccagcgtgcccctgcacgccagcttccccgtgtacgacctgaacatcaccgtgtaccccgtggacaaccagccccccagcatcgccatcggccccgtgttcgtggtggacgagggctgcagcaccgccctgaccgtgaaccacctgagcgccaccgaccccgacaccgccgccgacgacctggagttcgtgctggtgagccccccccagttcggctacctggagaacatcctgcccagcgtgggcttcgagaagagcaacatcggcatcagcatcgacagcttccagtggaaggacatgaacgccttccacatcaactacgtgcagagcagacacctgagaatcgagcccaccgccgaccagttcaccgtgtacgtgaccgacggcaagcaccacagcctggagatccccttcagcatcatcatcaaccccaccaacgacgaggcccccgacttcgtggtgcagaacatcaccgtgtgcgagggccagatgaaggagctggacagcagcatcatcagcgccgtggacctggacatcccccaggacgccctgctgttcagcatcacccagaagcccagacacggcctgctgatcgacagaggcttcagcaaggacttcagcgagaacaagcagcccgccaacccccaccagaagcacgcccccgtgcacagcttcagcatggagctgctgaagaccggcatgagactgacctacatgcacgacgacagcgagagcctggccgacgacttcaccatccagctgagcgacggcaagcacaagatcctgaagaccatcagcgtggaggtgatccccgtgaacgacgagaagcccatgctgagcaagaaggccgagatcgccatgaacatgggcgagaccagaatcatcagcagcgccatcctgagcgccatcgacgaggacagccccagagagaagatctactacgtgttcgagagactgccccagaacggccagctgcagctgaagatcggcagagactgggtgcccctgagccccggcatgaagtgcacccaggaggaggtggacctgaacctgctgagatacacccacaccggcgccatggacagccagaaccaggacagcttcaccttctacctgtgggacggcaacaacagaagccccgccctggactgccagatcaccatcaaggacatggagaagggcgacatcgtgatcctgaccaagcccctggtggtgagcaagggcgacagaggcttcctgaccaccaccaccctgctggccgtggacggcaccgacaagcccgaggagctgctgtacgtgatcaccagcccccccagatacggccagatcgagtacgtgcactaccccggcgtgcccatcaccaacttcagccagatggacgtggtgggccagaccgtgtgctacgtgcacaagagcaaggtgaccgtgagcagcgacagattcagattcatcatcagcaacggcctgagaaccgagcacggcgtgttcgagatcaccctggagaccgtggacagagccctgcccgtggtgaccagaaacaagggcctgagactggcccagggcgccgtgggcctgctgagccccgacctgctgcagctgaccgaccccgacacccccgccgagaacctgaccttcctgctggtgcagctgccccagcacggccagctgtacctgtggggcaccggcctgctgcagcacaacttcacccagcaggacgtggacagcaagaacgtggcctacagacacagcggcggcgacagccagaccgactgcttcaccttcatggccaccgacggcaccaaccagggcttcatcgtgaacggcagagtgtgggaggagcccgtgctgttcaccatccaggtggaccagctggacaagaccgcccccagaatcaccctgctgcacagccccagccaggtgggcctgctgaagaacggctgctacggcatctacatcaccagcagagtgctgaaggccagcgaccccgacaccgaggacgaccagatcatcttcaagatcctgcagggccccaagcacggccacctggagaacaccaccaccggcgagttcatccacgagaagttcagccagaaggacctgaacagcaagaccatcctgtacatcatcaaccccagcctggaggtgaacagcgacaccgtggagttccagatcatggaccccaccggcaacagcgccaccccccagatcctggagctgaagtggagccacatcgagtggagccagaccgagtacgaggtgtgcgagaacgtgggcctgctgcccctggagatcatcagaagaggctacagcatggacagcgccttcgtgggcatcaaggtgaaccaggtgagcgccgccgtgggcaaggacttcaccgtgatccccagcaagctgatccagttcgaccccggcatgagcaccaagatgtggaacatcgccatcacctacgacggcctggaggaggacgacgaggtgttcgaggtgatcctgaacagccccgtgaacgccgtgctgggcaccaagaccaaggccgccgtgaagatcctggacagcaagggcggccagtgccaccccagctacagcagcaaccagagcaagcacagcacctgggagaagggcatctggcacctgctgccccccggcagcagcagcagcaccaccagcggcagcttccacctggagagaagacccctgcccagcagcatgcagctggccgtgatcagaggcgacaccctgagaggcttcgacagcaccgacctgagccagagaaagctgagaaccagaggcaacggcaagaccgtgagacccagcagcgtgtacagaaacggcaccgacatcatctacaactaccacggcatcgtgagcctgaagctggaggacgacagcttccccacccacaagagaaaggccaaggtgagcatcatcagccagccccagaagaccatcaaggtggccgagctgccccaggccgacaaggtggagagcaccaccgacagccacttccccagacaggaccagctgcccagcttccccaagaactgcaccctggagctgaagggcctgttccacttcgaggagggcatccagaagctgtaccagtgcaacggcatcgcctggaaggcctggagcccccagaccaaggacgtggaggacaagagctgccccgccggctggcaccagcacagcggctactgccacatcctgatcaccgagcagaagggcacctggaacgccgccgcccaggcctgcagagagcagtacctgggcaacctggtgaccgtgttcagcagacagcacatgagatggctgtgggacatcggcggcagaaagagcttctggatcggcctgaacgaccaggtgcacgccggccactgggagtggatcggcggcgagcccgtggccttcaccaacggcagaagaggccccagccagagaagcaagctgggcaagagctgcgtgctggtgcagagacagggcaagtggcagaccaaggactgcagaagagccaagccccacaactacgtgtgcagcagaaagctgtag

SEQ ID NO: 82079 - DNA, 6543 bp, synthetic construct
  misc_feature 1..6543: note = Description of Artificial Sequence: Synthetic coding sequence
  source 1..6543: mol_type = other DNA
atgaacagcctgagctggggcgccgccaacgccgtgctgctgctgctgctgctggcctgggccagccccaccttcatcagcatcaacagaggcgtgagagtgatgaagggccacagcgccttcctgagcggcgacgacctgaagttcgccatccccaaggagaaggacgcctgcaaggtggaggtggtgatgaacgagcccatcacccagagagtgggcaagctgaccccccaggtgttcgactgccacttcctgcccaacgaggtgaagtacgtgcacaacggctgccccatcctggacgaggacaccgtgaagctgagactgtacagattcaccgagagagacaccttcatcgagaccttcatcctgtgggtgtacctgctggagcccgactgcaacatcatccacatgagcaacaacgtgctggaggtgcccgagttcaacggcctgagccaggccatcgacaagaacctgctgagattcgactacgacagaatggccagcctggagtgcaccgtgagcctggacaccgccagaaccagactgcccgcccacggccagatggtgctgggcgagcccagacccgaggagcccagaggcgaccagccccacagcttcttccccgagagccagctgagagccaagctgaagtgccccggcggcagctgcacccccggcctgaagaagatcggcagcctgaaggtgagctgcgaggagttcctgctgatgggcctgagataccagcacctggacccccccagccccaacatcgactacatcagcatccagctggacctgaccgacaccagaagcaagatcgtgtacaagaagagcgagagcgcctggctgcccgtgtacatcagagccggcatccccaaccagatccccaaggccgccttcatggccgtgttcatcctggaggtggaccagttcatcctgaccagcctgaccaccagcgtgctggactgcgaggaggacgagacccccaagcccctgctggtgttcaacatcaccaaggcccccctgcagggctacgtgacccacctgctggaccacaccagacccatcagcagcttcacctggaaggacctgagcgacatgcagatcgcctaccagccccccaacagcagccacagcgagagaagacacgacgaggtggagctggaggtgtacgacttcttcttcgagagaagcgcccccatgaccgtgcacatcagcatcagaaccgccgacaccaacgcccccagagtgagctggaacaccggcctgagcctgctggagggccagagcagagccatcacctgggagcagttccaggtggtggacaacgacgacatcggcgccgtgagactggtgaccgtgggcggcctgcagcacggctggctgaccctgagaggcggcaagggcttcctgttcaccgtggccgacctgcaggccggcgtggtgagataccaccacgacgacagcgacagcaccaaggacttcgtggtgttcagaatcttcgacggccaccacagcatcagacacaagttccccatcaacgtgctgcccaaggacgacagcccccccttcctgatcaccaacgtggtgatcgagctggaggagggccagaccatcctgatccagggcagcatgctgagagccagcgacgtggacgccagcgacgactacatcttcttcaacatcaccaagcccccccaggccggcgagatcatgaagaagcccggccccggcctgatcggctaccccgtgcacggcttcctgcagagagacctgttcaacggcatcatctactacagacacttcggcggcgagatcttcgaggacagcttccagttcgtgctgtgggacagccacgagccccccaacctgagcgtgccccaggtggccaccatccacatcacccccgtggacgaccagctgcccaaggaggcccccggcgtgagcagacacctggtggtgaaggagaccgaggtggcctacatcaccaagaagcagctgcacttcatcgacagcgagagctacgacagagagctggtgtacaccatcaccaccccccccttcttcagcttcagccacagacacctggacgccggcaagctgttcatggtggacagcatccccaaggtggtgaagaaccccaccgccctggagctgagaagcttcacccagcacgccgtgaactacatgaaggtggcctacatgccccccatgcaggacatcggcccccactgcagagacgtgcagttcaccttcagcgtgagcaaccagcacggcggcaccctgcacggcatctgcttcaacatcaccatcctgcccgtggacaaccaggtgcccgaggccttcaccaaccccctgaaggtgaccgagggcggccagagcatcatcagcaccgagcacatcctgatcagcgacgccgacaccaagctggacaacatcgacctgagcctgagagagctgcccctgcacggcagagtggagctgaacggcttccccctgaacagcggcggcaccttcagctggggcgacctgcacaccctgaaggtgagataccagcacgacggcaccgaggtgctgcaggacgacctgctgctggaggtgaccgacggcaccaacagcgccgagttcgtgctgcacgtggaggtgttccccgtgaacgacgagccccccgtgctgaaggccgacctgatgcccgtgatgaactgcagcgagggcggcgaggtggtgatcaccagcgagtacatcttcgccaccgacgtggacagcgacaacctgaagctgatgttcgtgatcgccagagagccccagcacggcgtggtgagaagagccggcgtgaccgtggaccagttcagccagagagacgtgatcagcgaggccgtgacctacaagcacaccggcggcgagatcggcctgatgccctgcttcgacaccatcaccctggtggtgagcgacggcgaggccggccccttcgtgaacggctgctgctacaacggccccaaccccagcgtgcccctgcacgccagcttccccgtgtacgacctgaacatcaccgtgtaccccgtggacaaccagccccccagcatcgccatcggccccgtgttcgtggtggacgagggctgcagcaccgccctgaccgtgaaccacctgagcgccaccgaccccgacaccgccgccgacgacctggagttcgtgctggtgagccccccccagttcggctacctggagaacatcctgcccagcgtgggcttcgagaagagcaacatcggcatcagcatcgacagcttccagtggaaggacatgaacgccttccacatcaactacgtgcagagcagacacctgagaatcgagcccaccgccgaccagttcaccgtgtacgtgaccgacggcaagcaccacagcctggagatccccttcagcatcatcatcaaccccaccaacgacgaggcccccgacttcgtggtgcagaacatcaccgtgtgcgagggccagatgaaggagctggacagcagcatcatcagcgccgtggacctggacatcccccaggacgccctgctgttcagcatcacccagaagcccagacacggcctgctgatcgacagaggcttcagcaaggacttcagcgagaacaagcagcccgccaacccccaccagaagcacgcccccgtgcacagcttcagcatggagctgctgaagaccggcatgagactgacctacatgcacgacgacagcgagagcctggccgacgacttcaccatccagctgagcgacggcaagcacaagatcctgaagaccatcagcgtggaggtgatccccgtgaacgacgagaagcccatgctgagcaagaaggccgagatcgccatgaacatgggcgagaccagaatcatcagcagcgccatcctgagcgccatcgacgaggacagccccagagagaagatctactacgtgttcgagagactgccccagaacggccagctgcagctgaagatcggcagagactgggtgcccctgagccccggcatgaagtgcacccaggaggaggtggacctgaacctgctgagatacacccacaccggcgccatggacagccagaaccaggacagcttcaccttctacctgtgggacggcaacaacagaagccccgccctggactgccagatcaccatcaaggacatggagaagggcgacatcgtgatcctgaccaagcccctggtggtgagcaagggcgacagaggcttcctgaccaccaccaccctgctggccgtggacggcaccgacaagcccgaggagctgctgtacgtgatcaccagcccccccagatacggccagatcgagtacgtgcactaccccggcgtgcccatcaccaacttcagccagatggacgtggtgggccagaccgtgtgctacgtgcacaagagcaaggtgaccgtgagcagcgacagattcagattcatcatcagcaacggcctgagaaccgagcacggcgtgttcgagatcaccctggagaccgtggacagagccctgcccgtggtgaccagaaacaagggcctgagactggcccagggcgccgtgggcctgctgagccccgacctgctgcagctgaccgaccccgacacccccgccgagaacctgaccttcctgctggtgcagctgccccagcacggccagctgtacctgtggggcaccggcctgctgcagcacaacttcacccagcaggacgtggacagcaagaacgtggcctacagacacagcggcggcgacagccagaccgactgcttcaccttcatggccaccgacggcaccaaccagggcttcatcgtgaacggcagagtgtgggaggagcccgtgctgttcaccatccaggtggaccagctggacaagaccgcccccagaatcaccctgctgcacagccccagccaggtgggcctgctgaagaacggctgctacggcatctacatcaccagcagagtgctgaaggccagcgaccccgacaccgaggacgaccagatcatcttcaagatcctgcagggccccaagcacggccacctggagaacaccaccaccggcgagttcatccacgagaagttcagccagaaggacctgaacagcaagaccatcctgtacatcatcaaccccagcctggaggtgaacagcgacaccgtggagttccagatcatggaccccaccggcaacagcgccaccccccagatcctggagctgaagtggagccacatcgagtggagccagaccgagtacgaggtgtgcgagaacgtgggcctgctgcccctggagatcatcagaagaggctacagcatggacagcgccttcgtgggcatcaaggtgaaccaggtgagcgccgccgtgggcaaggacttcaccgtgatccccagcaagctgatccagttcgaccccggcatgagcaccaagatgtggaacatcgccatcacctacgacggcctggaggaggacgacgaggtgttcgaggtgatcctgaacagccccgtgaacgccgtgctgggcaccaagaccaaggccgccgtgaagatcctggacagcaagggcggccagtgccaccccagctacagcagcaaccagagcaagcacagcacctgggagaagggcatctggcacctgctgccccccggcagcagcagcagcaccaccagcggcagcttccacctggagagaagacccctgcccagcagcatgcagctggccgtgatcagaggcgacaccctgagaggcttcgacagcaccgacctgagccagagaaagctgagaaccagaggcaacggcaagaccgtgagacccagcagcgtgtacagaaacggcaccgacatcatctacaactaccacggcatcgtgagcctgaagctggaggacgacagcttccccacccacaagagaaaggccaaggtgagcatcatcagccagccccagaagaccatcaaggtggccgagctgccccaggccgacaaggtggagagcaccaccgacagccacttccccagacaggaccagctgcccagcttccccaagaactgcaccctggagctgaagggcctgttccacttcgaggagggcatccagaagctgtaccagtgcaacggcatcgcctggaaggcctggagcccccagaccaaggacgtggaggacaagagctgccccgccggctggcaccagcacagcggctactgccacatcctgatcaccgagcagaagggcacctggaacgccgccgcccaggcctgcagagagcagtacctgggcaacctggtgaccgtgttcagcagacagcacatgagatggctgtgggacatcggcggcagaaagagcttctggatcggcctgaacgaccaggtgcacgccggccactgggagtggatcggcggcgagcccgtggccttcaccaacggcagaagaggccccagccagagaagcaagctgggcaagagctgcgtgctggtgcagagacagggcaagtggcagaccaaggactgcagaagagccaagccccacaactacgtgtgcagcagaaagctgtag

SEQ ID NO: 82080 - DNA, 648 bp, synthetic construct
  misc_feature 1..648: note = Description of Artificial Sequence: Synthetic coding sequence
  source 1..648: mol_type = other DNA
atgctggacgagagcctggccgtgagaagaagcaagaagtgcaaggagatgatcatgcactgggagaagaaggaggacatcgacatcgtgaacaccgtggaccagctggacaagaccgcccccagaatcaccctgctgcacagccccagccaggtgggcctgctgaagaacggctgctacggcatctacatcaccagcagagtgctgaaggccagcgaccccgacaccgaggacgaccagatcatcttcaagatcctgcagggccccaagcacggccacctggagaacaccaccaccggcgagttcatccacgagaagttcagccagaaggacctgaacagcaagaccatcctgtacatcatcaaccccagcctggaggtgaacagcgacaccgtggagttccagatcatggaccccaccggcaacagcgccaccccccagatcctggagctgaagtggagccacatcgagtggagccagaccgagtacgaggtgtgcgagaacgtgggcctgctgcccctggagatcatcagaagaggctacagcatggacagcgccttcgtgggcatcaaggtgaaccaggtgagcgccgccgtgggcaaggacttcaccgtgatccccagcaagctgatccagttcgacccctag

SEQ ID NO: 82081 - DNA, 2148 bp, synthetic construct
  misc_feature 1..2148: note = Description of Artificial Sequence: Synthetic coding sequence
  source 1..2148: mol_type = other DNA
atggtgacccaggagagcatgctgaaggccgccctgcccctgttcaccagattcatcatcagcaacggcctgagaaccgagcacggcgtgttcgagatcaccctggagaccgtggacagagccctgcccgtggtgaccagaaacaagggcctgagactggcccagggcgccgtgggcctgctgagccccgacctgctgcagctgaccgaccccgacacccccgccgagaacctgaccttcctgctggtgcagctgccccagcacggccagctgtacctgtggggcaccggcctgctgcagcacaacttcacccagcaggacgtggacagcaagaacgtggcctacagacacagcggcggcgacagccagaccgactgcttcaccttcatggccaccgacggcaccaaccagggcttcatcgtgaacggcagagtgtgggaggagcccgtgctgttcaccatccaggtggaccagctggacaagaccgcccccagaatcaccctgctgcacagccccagccaggtgggcctgctgaagaacggctgctacggcatctacatcaccagcagagtgctgaaggccagcgaccccgacaccgaggacgaccagatcatcttcaagatcctgcagggccccaagcacggccacctggagaacaccaccaccggcgagttcatccacgagaagttcagccagaaggacctgaacagcaagaccatcctgtacatcatcaaccccagcctggaggtgaacagcgacaccgtggagttccagatcatggaccccaccggcaacagcgccaccccccagatcctggagctgaagtggagccacatcgagtggagccagaccgagtacgaggtgtgcgagaacgtgggcctgctgcccctggagatcatcagaagaggctacagcatggacagcgccttcgtgggcatcaaggtgaaccaggtgagcgccgccgtgggcaaggacttcaccgtgatccccagcaagctgatccagttcgaccccggcatgagcaccaagatgtggaacatcgccatcacctacgacggcctggaggaggacgacgaggtgttcgaggtgatcctgaacagccccgtgaacgccgtgctgggcaccaagaccaaggccgccgtgaagatcctggacagcaagggcggccagtgccaccccagctacagcagcaaccagagcaagcacagcacctgggagaagggcatctggcacctgctgccccccggcagcagcagcagcaccaccagcggcagcttccacctggagagaagacccctgcccagcagcatgcagctggccgtgatcagaggcgacaccctgagaggcttcgacagcaccgacctgagccagagaaagctgagaaccagaggcaacggcaagaccgtgagacccagcagcgtgtacagaaacggcaccgacatcatctacaactaccacggcatcgtgagcctgaagctggaggacgacagcttccccacccacaagagaaaggccaaggtgagcatcatcagccagccccagaagaccatcaaggtggccgagctgccccaggccgacaaggtggagagcaccaccgacagccacttccccagacaggaccagctgcccagcttccccaagaactgcaccctggagctgaagggcctgttccacttcgaggagggcatccagaagctgtaccagtgcaacggcatcgcctggaaggcctggagcccccagaccaaggacgtggaggacaagagctgccccgccggctggcaccagcacagcggctactgccacatcctgatcaccgagcagaagggcacctggaacgccgccgcccaggcctgcagagagcagtacctgggcaacctggtgaccgtgttcagcagacagcacatgagatggctgtgggacatcggcggcagaaagagcttctggatcggcctgaacgaccaggtgcacgccggccactgggagtggatcggcggcgagcccgtggccttcaccaacggcagaagaggccccagccagagaagcaagctgggcaagagctgcgtgctggtgcagagacagggcaagtggcagaccaaggactgcagaagagccaagccccacaactacgtgtgcagcagaaagctgtag

SEQ ID NO: 82082 - DNA, 6540 bp, synthetic construct; identical to SEQ ID NO: 82078
  misc_feature 1..6540: note = Description of Artificial Sequence: Synthetic coding sequence
  source 1..6540: mol_type = other DNA

SEQ ID NO: 82083 - DNA, 9510 bp, synthetic construct
  misc_feature 1..9510: note = Description of Artificial Sequence: Synthetic coding sequence
  source 1..9510: mol_type = other DNA
atgcacagcgccggcacccccggcctgagcagcagaagaaccggcaacagcaccagcttccagcccggccccccccccccccccagactgctgctgctgctgctgctgctgctgagcctggtgagcagagtgcccgcccagcccgccgccttcggcagagccctgctgagccccggcctggccggcgccgccggcgtgcccgccgaggaggccatcgtgctggccaacagaggcctgagagtgcccttcggcagagaggtgtggctggaccccctgcacgacctggtgctgcaggtgcagcccggcgacagatgcgccgtgagcgtgctggacaacgacgccctggcccagagacccggcagactgagccccaagagattcccctgcgacttcggccccggcgaggtgagatacagccacctgggcgccagaagccccagcagagacagagtgagactgcagctgagatacgacgcccccggcggcgccgtggtgctgcccctggtgctggaggtggaggtggtgttcacccagctggaggtggtgaccagaaacctgcccctggtggtggaggagctgctgggcaccagcaacgccctggacgccagaagcctggagttcgccttccagcccgagaccgaggagtgcagagtgggcatcctgagcggcctgggcgccctgcccagatacggcgagctgctgcactacccccaggtgcccggcggcgccagagagggcggcgcccccgagaccctgctgatggactgcaaggccttccaggagctgggcgtgagatacagacacaccgccgccagcagaagccccaacagagactggatccccatggtggtggagctgagaagcagaggcgcccccgtgggcagccccgccctgaagagagagcacttccaggtgctggtgagaatcagaggcggcgccgagaacaccgcccccaagcccagcttcgtggccatgatgatgatggaggtggaccagttcgtgctgaccgccctgacccccgacatgctggccgccgaggacgccgagagccccagcgacctgctgatcttcaacctgaccagccccttccagcccggccagggctacctggtgagcaccgacgacagaagcctgcccctgagcagcttcacccagagagacctgagactgctgaagatcgcctaccagccccccagcgaggacagcgaccaggagagactgttcgagctggagctggaggtggtggacctggagggcgccgccagcgaccccttcgccttcatggtggtggtgaagcccatgaacaccatggcccccgtggtgaccagaaacaccggcctgatcctgtacgagggccagagcagacccctgaccggccccgccggcagcggcccccagaacctggtgatcagcgacgaggacgacctggaggccgtgagactggaggtggtggccggcctgagacacggccacctggtgatcctgggcgccagcagcggcagcagcgcccccaagagcttcaccgtggccgagctggccgccggccaggtggtgtaccagcacgacgacagagacggcagcctgagcgacaacctggtgctgagaatggtggacggcggcggcagacaccaggtgcagttcctgttccccatcaccctggtgcccgtggacgaccagccccccgtgctgaacgccaacaccggcctgaccctggccgagggcgagaccgtgcccatcctgcccctgagcctgagcgccaccgacatggacagcgacgacagcctgctgctgttcgtgctggagagccccttcctgaccaccggccacctgctgctgagacagacccaccccccccacgagaagcaggagctgctgagaggcctgtggagaaaggagggcgccttctacgagagaaccgtgaccgagtggcagcagcaggacatcaccgagggcagactgttctacagacacagcggcccccacagccccggccccgtgaccgaccagttcaccttcagagtgcaggacaaccacgacccccccaaccagagcggcctgcagagattcgtgatcagaatccaccccgtggacagactgccccccgagctgggcagcggctgccccctgagaatggtggtgcaggagagccagctgacccccctgagaaagaagtggctgagatacaccgacctggacaccgacgacagagagctgagatacaccgtgacccagagccccaccgacaccgacgagaaccacctgcccgcccccctgggcaccctggtgctgaccgacaaccccagcgtggtggtgacccacttcacccaggcccagatcaaccaccacaagatcgcctacagaccccccggccaggagctgggcgtggccaccagagtggcccagttccagttccaggtggaggacagagccggcaacgtggcccccggcaccttcaccctgtacctgcaccccgtggacaaccagccccccgagatcctgaacaccggcttcaccatccaggagaagggccaccacatcctgagcgagaccgagctgcacgtgaacgacgtggacaccgacgtggcccacatcagcttcaccctgacccaggcccccaagcacggccacatgagagtgagcggccagatcctgcacgtgggcggcctgttccacctggaggacatcaagcagggcagagtgagctacgcccacaacggcgacaagagcctgaccgacagctgcagcctggaggtgagcgacagacaccacgtggtgcccatcaccctgagagtgaacgtgagacccgtggacgacgaggtgcccatcctgagccaccccaccggcaccctggagagctacctggacgtgctggagaacggcgccaccgagatcaccgccaacgtgatcaagggcaccaacgaggagaccgacgacctgatgctgaccttcctgctggaggacccccccctgtacggcgagatcctggtgaacggcatccccgccgagcagttcacccagagagacatcctggagggcagcgtggtgtacacccacaccagcggcgagatcggcctgctgcccaaggccgacagcttcaacctgagcctgagcgacatgagccaggagtggagaatcggcggcaacaccatccagggcgtgaccatctgggtgaccatcctgcccgtggacagccaggcccccgagatcttcgtgggcgagcagctgatcgtgatggagggcgacaagagcgtgatcaccagcgtgcacatcagcgccgaggacgtggacagcctgaacgacgacatcctgtgcaccatcgtgatccagcccaccagcggctacgtggagaacatcagccccgcccccggcagcgagaagagcagagccggcatcgccatcagcgccttcaacctgaaggacctgagacagggccacatcaactacgtgcagagcgtgcacaagggcgtggagcccgtggaggacagattcgtgttcagatgcagcgacggcatcaacttcagcgagagacagttcttccccatcgtgatcatccccaccaacgacgagcagcccgagatgttcatgagagagttcatggtgatggagggcatgagcctggtgatcgacacccccatcctgaacgccgccgacgccgacgtgcccctggacgacctgaccttcaccatcacccagttccccacccacggccacatcatgaaccagctgatcaacggcaccgtgctggtggagagcttcaccctggaccagatcatcgagagcagcagcatcatctacgagcacgacgacagcgagacccaggaggacagcttcgtgatcaagctgaccgacggcaagcacagcgtggagaagaccgtgctgatcatcgtgatccccgtggacgacgagacccccagaatgaccatcaacaacggcctggagatcgagatcggcgacaccaagatcatcaacaacaagatcctgatggccaccgacctggacagcgaggacaagagcctggtgtacatcatcagatacggccccggccacggcctgctgcagagaagaaagcccaccggcgccttcgagaacatcaccctgggcatgaacttcacccaggacgaggtggacagaaacctgatccagtacgtgcacctgggccaggagggcatcagagacctgatcaagttcgacgtgaccgacggcatcaaccccctgatcgacagatacttctacgtgagcatcggcagcatcgacatcgtgttccccgacgtgatcagcaagggcgtgagcctgaaggagggcggcaaggtgaccctgaccaccgacctgctgagcaccagcgacctgaacagccccgacgagaacctggtgttcaccatcaccagagcccccatgagaggccacctggagtgcaccgaccagcccggcgtgagcatcaccagcttcacccagctgcagctggccggcaacaagatctactacatccacaccgccgacgacgaggtgaagatggacagcttcgagttccaggtgaccgacggcagaaaccccgtgttcagaaccttcagaatcagcatcagcgacgtggacaacaagaagcccgtggtgaccatccacaagctggtggtgagcgagagcgagaacaagctgatcacccccttcgagctgaccgtggaggacagagacacccccgacaagctgctgaagttcaccatcacccaggtgcccatccacggccacctgctgttcaacaacaccagacccgtgatggtgttcaccaagcaggacctgaacgagaacctgatcagctacaagcacgacggcaccgagagcagcgaggacagcttcagcttcaccgtgaccgacggcacccacaccgacttctacgtgttccccgacaccgtgttcgagaccagaagaccccaggtgatgaagatccaggtgctggccgtggacaacagcgtgccccagatcgccgtgaacaagggcgccagcaccctgagaaccctggccaccggccacctgggcttcatgatcaccagcaagatcctgaaggtggaggacagagacagcctgcacatcagcctgagattcatcgtgaccgaggccccccagcacggctacctgctgaacctggacaagggcaaccacagcatcacccagttcacccaggccgacatcgacgacatgaagatctgctacgtgctgagagagggcgccaacgccaccagcgacatgttctacttcgccgtggaggacggcggcggcaacaagctgacctaccagaacttcagactgaactgggcctggatcagcttcgagaaggagtactacctggtgaacgaggacagcaagttcctggacgtggtgctgaagagaagaggctacctgggcgagaccagcttcatcagcatcggcaccagagacagaaccgccgagaaggacaaggacttcaagggcaaggcccagaagcaggtgcagttcaaccccggccagaccagagccacctggagagtgagaatcctgagcgacggcgagcacgagcagagcgagaccttccaggtggtgctgagcgagcccgtgctggccgccctggagttccccaccgtggccaccgtggagatcgtggaccccggcgacgagcccaccgtgttcatcccccagagcaagtacagcgtggaggaggacgtgggcgagctgttcatccccatcagaagaagcggcgacgtgagccaggagctgatggtggtgtgctacacccagcagggcaccgccaccggcaccgtgcccaccagcgtgctgagctacagcgactacatcagcagacccgaggaccacaccagcgtggtgagattcgacaaggacgagagagagaagctgtgcagaatcgtgatcatcgacgacagcctgtacgaggaggaggagaccttccacgtgctgctgagcatgcccatgggcggcagaatcggcagcgagttccccggcgcccaggtgaccatcgtgcccgacaaggacgacgagcccatcttctacttcggcgacgtggagtacagcgtggacgagagcgccggctacgtggaggtgcaggtgtggagaaccggcaccgacctgagcaagagcagcagcgtgaccgtgagaagcagaaagaccgacccccccagcgccgacgccggcaccgactacgtgggcatcagcagaaacctggacttcgcccccggcgtgaacatgcagcccgtgagagtggtgatcctggacgacctgggccagcccgccctggagggcatcgagaagttcgagctggtgctgagaatgcccatgaacgccgccctgggcgagcccagcaaggccaccgtgagcatcaacgacagcgtgagcgacctgcccaagatgcagttcaaggagagaatctacaccggcagcgagagcgacggccagatcgtgaccatgatccacagaaccggcgacgtgcagtacagaagcagcgtgagatgctacaccagacagggcagcgcccaggtgatgatggacttcgaggagagacccaacaccgacaccagcatcatcaccttcctgcccggcgagaccgagaagccctgcatcctggagctgatggacgacgtgctgtacgaggaggtggaggagctgagactggtgctgggcaccccccagagcaacagccccttcggcgccgccgtgggcgagcagaacgagaccctgatcagaatcagagacgacgccgacaagaccgtgatcaagttcggcgagaccaagttcagcgtgaccgagcccaaggagcccggcgagagcgtggtgatcagaatccccgtgatcagacagggcgacaccagcaaggtgagcatcgtgagagtgcacaccaaggacggcagcgccaccagcggcgaggactaccaccccgtgagcgaggagatcgagttcaaggagggcgagacccagcacgtggtggagatcgaggtgaccttcgacggcgtgagagagatgagagaggccttcaccgtgcacctgaagcccgacgagaacatgatcgccgagatgcagctgaccaaggccatcgtgtacatcgaggagatgagcagcatggccgacgtgaccttccccagcgtgccccagatcgtgagcctgctgatgtacgacgacaccagcaaggccaaggagagcgccgagcccatgagcggctaccccgtgatctgcatcaccgcctgcaaccccaagtacagcgactacgacaagaccggcagcatctgcgccagcgagaacatcaacgacaccctgaccagatacagatggctgatcagcgcccccgccggccccgacggcgtgaccagccccatgagagaggtggacttcgacaccttcttcaccagcagcaagatggtgaccctggacagcatctacttccagcccggcagcagagtgcagtgcgccgccagagccgtgaacaccaacggcgacgagggcctggagctgatgagccccatcgtgaccatcagcagagaggagggcctgtgccagcccagagtgcccggcgtggtgggcgccgagcccttcagcgccaagctgagatacaccggccccgaggacgccgactacaccaacctgatcaagctgaccgtgaccatgccccacatcgacggcatgctgcccgtgatcagcaccagagagctgagcaacttcgagctgaccctgagccccgacggcaccagagtgggcaaccacaagtgcagcaacctgctggactacaccgaggtgaagacccactacggcttcctgaccgacgccaccaagaaccccgagatcatcggcgagacctacccctaccagtacagcctgagcatcagaggcagcaccaccctgagattctacagaaacctgaacctggaggcctgcctgtgggagttcgtgagctactacgacatgagcgagctgctggccgactgcggcggcaccatcggcaccgacggccaggtgctgaacctggtgcagagctacgtgaccctgagagtgcccctgtacgtgagctacgtgttccacagccccgtgggcgtgggcggctggcagcacttcgacctgaagagcgagctgagactgaccttcgtgtacgacaccgccatcctgtggaacgacggcatcggcagcccccccgaggccgagctgcagggcagcctgtaccccaccagcatgagaatcggcgacgagggcagactggccgtgcacttcaagaccgaggcccagttccacggcctgttcgtgctgagccaccccgccagcttcaccagcagcgtgatcatgagcgccgaccaccccggcctgaccttcagcctgagactgatcagaagcgagcccacctacaaccagcccgtgcagcagtggagcttcgtgagcgacttcgccgtgagagactacagcggcacctacaccgtgaagctggtgccctgcaccgcccccagccaccaggagtacagactgcccgtgacctgcaaccccagagagcccgtgaccttcgacctggacatcagattccagcaggtgagcgaccccgtggccgccgagttcagcctgaacacccagatgtacctgctgagcaagaagagcctgtggctgagcgacggcagcatgggcttcggccaggagagcgacgtggccttcgccgagggcgacatcatctacggcagagtgatggtggaccccgtgcagaacctgggcgacagcttctactgcagcatcgagaaggtgttcctgtgcaccggcgccgacggctacgtgcccaagtacagccccatgaacgccgagtacggctgcctggccgacagccccagcctgctgtacagattcaagatcgtggacaaggcccagcccgagacccaggccaccagcttcggcaacgtgctgttcaacgccaagctggccgtggacgaccccgaggccatcctgctggtgaaccagcccggcagcgacggcttcaaggtggacagcacccccctgttccaggtggccctgggcagagagtggtacatccacaccatctacaccgtgagaagcaaggacaacgccaacagaggcatcggcaagagaagcgtggagtaccacagcctggtgagccagggcaagccccagagcaccaccaagagcagaaagaagagagagatcagaagcacccccagcctggcctgggagatcggcgccgagaacagcagaggcaccaacatccagcacatcgccctggacagaaccaagagacagatcccccacggcagagccccccccgacggcatcctgccctgggagctgaacagccccagcagcgccgtgagcctggtgaccgtggtgggcggcaccaccgtgggcctgctgaccatctgcctgaccgtgatcgccgtgctgatgtgcagaggcaaggagagcttcagaggcaaggacgcccccaagggcagcagcagcagcgagcccatggtgcccccccagagccaccacaacgacagcagcgaggtgtag

SEQ ID NO: 82084 - DNA, 12039 bp, synthetic construct
  misc_feature 1..12039: note = Description of Artificial Sequence: Synthetic coding sequence
  source 1..12039: mol_type = other DNA
atgggcgtgctgaaggtgtggctgggcctggccctggccctggccgagttcgccgtgctgccccaccacagcgagggcgcctgcgtgtaccaggacagcctgctggccgacgccaccatctggaagcccgacagctgccagagctgcagatgccacggcgacatcgtgatctgcaagcccgccgtgtgcagaaacccccagtgcgccttcgagaagggcgaggtgctgcagatcgccgccaaccagtgctgccccgagtgcgtgctgagaacccccggcagctgccaccacgagaagaagatccacgagcacggcaccgagtgggccagcagcccctgcagcgtgtgcagctgcaaccacggcgaggtgagatgcaccccccagccctgcccccccctgagctgcggccaccaggagctggccttcatccccgagggcagctgctgccccgtgtgcgtgggcctgggcaagccctgcagctacgagggccacgtgttccaggacggcgaggactggagactgagcagatgcgccaagtgcctgtgcagaaacggcgtggcccagtgcttcaccgcccagtgccagcccctgttctgcaaccaggacgagaccgtggtgagagtgcccggcaagtgctgcccccagtgcagcgccagaagctgcagcgccgccggccaggtgtacgagcacggcgagcagtggagcgagaacgcctgcaccacctgcatctgcgacagaggcgaggtgagatgccacaagcaggcctgcctgcccctgagatgcggcaagggccagagcagagccagaagacacggccagtgctgcgaggagtgcgtgagccccgccggcagctgcagctacgacggcgtggtgagataccaggacgagatgtggaagggcagcgcctgcgagttctgcatgtgcgaccacggccaggtgacctgccagaccggcgagtgcgccaaggtggagtgcgccagagacgaggagctgatccacctggacggcaagtgctgccccgagtgcatcagcagaaacggctactgcgtgtacgaggagaccggcgagttcatgagcagcaacgccagcgaggtgaagagaatccccgagggcgagaagtgggaggacggcccctgcaaggtgtgcgagtgcagaggcgcccaggtgacctgctacgagcccagctgccccccctgccccgtgggcaccctggccctggaggtgaagggccagtgctgccccgactgcaccagcgtgcactgccaccccgactgcctgacctgcagccagagccccgaccactgcgacctgtgccaggaccccaccaagctgctgcagaacggctggtgcgtgcacagctgcggcctgggcttctaccaggccggcagcctgtgcctggcctgccagccccagtgcagcacctgcaccagcggcctggagtgcagcagctgccagccccccctgctgatgagacacggccagtgcgtgcccacctgcggcgacggcttctaccaggacagacacagctgcgccgtgtgccacgagagctgcgccggctgctggggccccaccgagaagcactgcctggcctgcagagaccccctgcacgtgctgagagacggcggctgcgagagcagctgcggcaagggcttctacaacagacagggcacctgcagcgcctgcgaccagagctgcgacagctgcggccccagcagccccagatgcctgacctgcaccgagaagaccgtgctgcacgacggcaagtgcatgagcgagtgccccggcggctactacgccgacgccaccggcagatgcaaggtgtgccacaacagctgcgccagctgcagcggccccacccccagccactgcaccgcctgcagcccccccaaggccctgagacagggccactgcctgcccagatgcggcgagggcttctacagcgaccacggcgtgtgcaaggcctgccacagcagctgcctggcctgcatgggccccgcccccagccactgcaccggctgcaagaagcccgaggagggcctgcaggtggagcagctgagcgacgtgggcatccccagcggcgagtgcctggcccagtgcagagcccacttctacctggagagcaccggcatctgcgaggcctgccaccagagctgcttcagatgcgccggcaagagcccccacaactgcaccgactgcggccccagccacgtgctgctggacggccagtgcctgagccagtgccccgacggctacttccaccaggagggcagctgcaccgagtgccaccccacctgcagacagtgccacggccccctggagagcgactgcatcagctgctacccccacatcagcctgaccaacggcaactgcagaaccagctgcagagaggagcagttcctgaacctggtgggctactgcgccgactgccaccacctgtgccagcactgcgccgccgacctgcacaacaccggcagcatctgcctgagatgccagaacgcccactacctgctgctgggcgaccactgcgtgcccgactgccccagcggctactacgccgagagaggcgcctgcaagaagtgccacagcagctgcagaacctgccagggcagaggccccttcagctgcagcagctgcgacaccaacctggtgctgagccacaccggcacctgcagcaccacctgcttccccggccactacctggacgacaaccacgtgtgccagccctgcaacacccactgcggcagctgcgacagccaggccagctgcaccagctgcagagaccccaacaaggtgctgctgttcggcgagtgccagtacgagagctgcgccccccagtactacctggacttcagcaccaacacctgcaaggagtgcgactggagctgcagcgcctgcagcggccccctgaagaccgactgcctgcagtgcatggacggctacgtgctgcaggacggcgcctgcgtggagcagtgcctgagcagcttctaccaggacagcggcctgtgcaagaactgcgacagctactgcctgcagtgccagggcccccacgagtgcaccagatgcaagggccccttcctgctgctggaggcccagtgcgtgcaggagtgcggcaagggctacttcgccgaccacgccaagcacaagtgcaccgcctgcccccagggctgcctgcagtgcagccacagagacagatgccacctgtgcgaccacggcttcttcctgaagagcggcctgtgcgtgtacaactgcgtgcccggcttcagcgtgcacaccagcaacgagacctgcagcggcaagatccacacccccagcctgcacgtgaacggcagcctgatcctgcccatcggcagcatcaagcccctggacttcagcctgctgaacgtgcaggaccaggagggcagagtggaggacctgctgttccacgtggtgagcacccccaccaacggccagctggtgctgagcagaaacggcaaggaggtgcagctggacaaggccggcagattcagctggaaggacgtgaacgagaagaaggtgagattcgtgcacagcaaggagaagctgagaaagggctacctgttcctgaagatcagcgaccagcagttcttcagcgagccccagctgatcaacatccaggccttcagcacccaggccccctacgtgctgagaaacgaggtgctgcacatcagcagaggcgagagagccaccatcaccacccagatgctggacatcagagacgacgacaacccccaggacgtggtgatcgagatcatcgacccccccctgcacggccagctgctgcagaccctgcagagccccgccacccccatctaccagttccagctggacgagctgagcagaggcctgctgcactacgcccacgacggcagcgacagcaccagcgacgtggccgtgctgcaggccaacgacggccacagcttccacaacatcctgttccaggtgaagaccgtgccccagaacgacagaggcctgcagctggtggccaacagcatggtgtgggtgcccgagggcggcatgctgcagatcaccaacagaatcctgcaggccgaggcccccggcgccagcgccgaggagatcatctacaagatcacccaggactacccccagttcggcgaggtggtgctgctggtgaacatgcccgccgacagccccgccgacgagggccagcacctgcccgacggcagaaccgccacccccaccagcaccttcacccagcaggacatcaacgagggcatcgtgtggtacagacacagcggcgcccccgcccagagcgacagcttcagattcgaggtgagcagcgccagcaacgcccagaccagactggagagccacatgttcaacatcgccatcctgccccagacccccgaggcccccaaggtgagcctggaggccagcctgcacatgaccgccagagaggacggcctgaccgtgatccagccccacagcctgagcttcatcaacagcgagaagcccagcggcaagatcgtgtacaacatcaccctgcccctgcaccccaaccagggcatcatcgagcacagagaccacccccacagccccatcagatacttcacccaggaggacatcaaccagggcaaggtgatgtacagacccccccccgccgccccccacctgcaggagctgatggccttcagcttcgccggcctgcccgagagcgtgaagttccacttcaccgtgagcgacggcgagcacaccagccccgagatggtgctgaccatccacctgctgcccagcgaccagcagctgcccgtgttccaggtgaccgcccccagactggccgtgagccccggcggcagcaccagcgtgggcctgcaggtggtggtgagagacgccgagaccgcccccaaggagctgttcttcgagctgagaagacccccccagcacggcgtgctgctgaagcacaccgccgagttcagaagacccatggccaccggcgacaccttcacctacgaggacgtggagaagaacgccctgcagtacatccacgacggcagcagcaccagagaggacagcatggagatcagcgtgaccgacggcctgaccgtgaccatgctggaggtgagagtggaggtgagcctgagcgaggacagaggccccagactggccgccggcagcagcctgagcatcaccgtggccagcaagagcaccgccatcatcaccagaagccacctggcctacgtggacgacagcagccccgaccccgagatctggatccagctgaactacctgcccagctacggcaccctgctgagaatcagcggcagcgaggtggaggagctgagcgaggtgagcaacttcaccatggaggacatcaacaacaagaagatcagatacagcgccgtgttcgagaccgacggccacctggtgaccgacagcttctacttcagcgtgagcgacatggaccacaaccacctggacaaccagatcttcaccatcatgatcacccccgccgagaaccccccccccgtgatcgccttcgccgacctgatcaccgtggacgagggcggcagagcccccctgagcttccaccacttcttcgccaccgacgacgacgacaacctgcagagagacgccatcatcaagctgagcgccctgcccaagtacggctgcatcgagaacaccggcaccggcgacagattcggccccgagaccgccagcgacctggaggccagcttccccatccaggacgtgctggagaactacatctactacttccagagcgtgcacgagagcatcgagcccacccacgacatcttcagcttctacgtgagcgacggcaccagcagaagcgagatccacagcatcaacatcaccatcgagagaaagaacgacgagccccccagaatgaccctgcagcccctgagagtgcagctgagcagcggcgtggtgatcagcaacagcagcctgagcctgcaggacctggacacccccgacaacgagctgatcttcgtgctgaccaagaagcccgaccacggccacgtgctgtggagacagaccgccagcgagcccctggagaacggcagagtgctggtgcagggcagcaccttcacctaccaggacatcctggccggcctggtgggctacgtgcccagcgtgcccggcatggtggtggacgagttccagttcagcctgaccgacggcctgcacgtggacaccggcagaatgaagatctacaccgagctgcccgccagcgacaccccccacctggccatcaaccagggcctgcagctgagcgccggcagcgtggccagaatcaccgagcagcacctgaaggtgaccgacatcgacagcgacgaccaccaggtgatgtacatcatgaaggaggaccccggcgccggcagactgcagatgatgaagcacggcaacctggagcagatcagcatcaagggccccatcagaagcttcacccaggccgacatcagccagggccacgtggagtacagccacggcaccggcgagcccggcggcagcttcgccttcaagttcgacgtggtggacggcgagggcaacagactgatcgacaagagcttcagcatcagcatcctggaggacaagagcccccccgtgatcaccaccaacaagggcctggtgctggacgagaacagcgtgaagaagatcaccaccctgcagctgagcgccaccgaccaggacagcggccccaccgagctgatctacagaatcaccagacagccccagctgggccacctggagcacgccgccagccccggcatccagatcagcagcttcacccaggccgacctgaccagcagaaacgtgcagtacgtgcacagcagcgaggccgagaagcacagcgacgccttcagcttcaccctgagcgacggcgtgagcgaggtgacccagaccttccacatcaccctgcaccccgtggacgacagcctgcccgtggtgcagaacctgggcatgagagtgcaggagggcatgagaaagaccatcaccgagttcgagctgaaggccgtggacgccgacaccgaggccgagagcgtgaccttcaccatcgtgcagccccccagacacggcaccatcgagagaaccagcaacggccagcacttccacctgaccagcaccttcaccatgaaggacatctaccagaacagagtgagctacagccacgacggcagcaacagcctgaaggacagattcaccttcaccgtgagcgacggcaccaaccccttcttcatcatcgaggagggcggcaaggagatcatgaccgccgccccccagcccttcagagtggacatcctgcccgtggacgacggcacccccagaatcgtgaccaacctgggcctgcagtggctggagtacatggacggcaaggccaccaacctgatcaccaagaaggagctgctgaccatggaccccgacaccgaggacgcccagctggtgtacgagatcaccaccggccccaagcacggcttcgtggagaacaagctgcagcccggcagagccgccgccaccttcacccaggaggacgtgaacctgggcctgatcagatacgtgctgcacaaggagaagatcagagagatgatggacagcttccagttcctggtgaaggacagcaagcccaacgtggtgagcgacaacgtgttccacatccagtggagcctgatcagcttcaagtacaccagctacaacgtgagcgagaaggccggcagcgtgagcgtgaccgtgcagagaaccggcaacctgaaccagtacgccatcgtgctgtgcagaaccgagcagggcaccgccagcagcagcagcagagtgagcagccagcccggccagcaggactacgtggagtacgccggccaggtgcagttcgacgagagagaggacaccaagagctgcaccatcgtgatcaacgacgacgacgtgttcgagaacgtggagagcttcaccgtggagctgagcatgcccgcctacgccctgctgggcgagttcacccaggccaaggtgatcatcaacgacaccgaggacgagcccaccctggagttcgacaagaagatctactgggtgaacgagagcgccggcttcctgttcgcccccatcgagagaaagggcgacgccagcagcatcgtgagcgccatctgctacaccgtgcccaagagcgccatgggcagcagcctgtacgccctggagagcggcagcgacttcaagagcagaggcatgagcgccgccagcagagtgatcttcggccccggcgtgaccatgagcacctgcgacgtgatgctgatcgacgacagcgagtacgaggaggaggaggagttcgagatcgccctggccgacgccagcgacaacgccagaatcggcagagtggccaccgccaaggtgctgatcagcggccccaacgacgccagcaccgtgagcctgggcaacaccgccttcaccgtgagcgaggacgccggcaccgtgaagatccccgtgatcagacacggcaccgacctgagcaccttcgccagcgtgtggtgcgccaccagacccagcgaccccgccagcgccacccccggcgtggactacgtgcccagcagcagaaaggtggagttcggccccggcgtgatcgagcagtactgcaccctgaccatcctggacgacacccagtaccccgtgatcgagggcctggagaccttcgtggtgttcctgagcagcgcccagggcgccgagctgaccaagcccttccaggccgtgatcgccatcaacgacaccttccaggacgtgcccagcatgcagttcgccaaggacctgctgctggtgaaggagaaggagggcgtgctgcacgtgcccatcaccagaagcggcgacctgagctacgagagcagcgtgagatgctacacccagagccacagcgcccaggtgatggaggacttcgaggagagacagaacgccgacagcagcagaatcaccttcctgaagggcgacaaggtgaagaactgcaccgtgtacatccacgacgacagcatgttcgagcccgaggagcagttcagagtgtacctgggcctgcccctgggcaaccactggagcggcgccagaatcggcaagaacaacatggccaccatcaccatcagcaacgacgaggacgcccccaccatcgagttcgaggaggccgcctaccaggtgagagagcccgccggccccgacgccatcgccatcctgaacatcaaggtgatcagaagaggcgaccagaacagaaccagcaaggtgagatgcagcaccagagacggcagcgcccagagcggcgtggactactaccccaagagcagagtgctgaagttcagccccggcgtggaccacatcttcttcaaggtggagatcctgagcaacgaggacagagagtggcacgagagcttcagcctggtgctgggccccgacgaccccgtggaggccgtgctgggcgacgtgaccaccgccaccgtgaccatcctggaccaggaggccgccggcagcctgatcctgcccgccccccccatcgtggtgaccctggccgactacgaccacgtggaggaggtgaccaaggagggcgtgaagaagagccccagccccggctaccccctggtgtgcgtgaccccctgcgacccccacttccccagatacgccgtgatgaaggagagatgcagcgaggccggcatcaaccagaccagcgtgcagttcagctgggaggtggccgcccccaccgacggcaacggcgccagaagccccttcgagaccatcaccgacaacacccccttcaccagcgtgaaccacatggtgctggacagcatctacttcagcagaagattccacgtgagatgcgtggccaaggccgtggacaaggtgggccacgtgggcacccccctgagaagcaacatcgtgaccatcggcaccgacagcgccatctgccacacccccgtggtggccggcaccagcagaggcttccaggcccagagcttcatcgccaccctgaagtacctggacgtgaagcacaaggagcaccccaacagaatccacatcagcgtgcagatcccccaccaggacggcatgctgcccctgatcagcaccatgcccctgcacaacctgcacttcctgctgagcgagagcatctacagacaccagcacgtgtgcagcaacctggtgaccacctacgacctgagaggcatcagcgaggccggcttcctggacgacgtggtgtacgacagcaccgccctgggccccggctacgacagacccttccagttcgaccccagcgtgagagagcccaagaccatccagctgtacaagcacctgaacctgaagagctgcgtgtggaccttcgacgcctactacgacatgaccgagctgatcgacgtgtgcggcggcagcgtgaccgccgacttccaggtgagagacagcgcccagagcttcctgaccgtgcacgtgcccctgtacgtgagctacatctacgtgaccgcccccagaggctgggccagcctggagcaccacaccgagatggagttcagcttcttctacgacaccgtgctgtggagaaccggcatccagaccgacagcgtgctgagcgccagactgcagatcatcagaatctacatcagagaggacggcagactggtgatcgagttcaagacccacgccaagttcagaggccagttcgtgatggagcaccacaccctgcccgaggtgaagagcttcgtgctgacccccgaccacctgggcggcatcgagttcgacctgcagctgctgtggagcgcccagaccttcgacagcccccaccagctgtggagagccaccagcagctacaacagaaaggactacagcggcgagtacaccatctacctgatcccctgcaccgtgcagcccacccagccctgggtggaccccggcgagaagcccctggcctgcaccgcccacgcccccgagagattcctgatccccatcgccttccagcagaccaacagacccgtgcccgtggtgtacagcctgaacaccgagttccagctgtgcaacaacgagaaggtgttcctgatggaccccaacaccagcgacatgagcctggccgagatggactacaagggcgccttcagcaagggccagatcctgtacggcagagtgctgtggaaccccgagcagaacctgaacagcgcctacaagctgcagctggagaaggtgtacctgtgcaccggcaaggacggctacgtgcccttcttcgaccccaccggcaccatctacaacgagggcccccagtacggctgcatccagcccaacaagcacctgaagcacagattcctgctgctggacagaaaccagcccgaggtgaccgacaagtacttccacgacgtgcccttcgaggcccacttcgccagcgagctgcccgacttccacgtggtgagcaacatgcccggcgtggacggcttcaccctgaaggtggacgccctgtacaaggtggaggccggccaccagtggtacctgcaggtgatctacatcatcggccccgacaccatcagcggccccagagtgcagagaagcctgaccgcccccctgagaagaaacagaagagacctggtggagcccgacggccagctgatcctggacgacagcctgatctacgacaacgagggcgaccaggtgaagaacggcaccaacatgaagagcctgaacctggagatgcaggagctggccgtggccgccagcctgagccagaccggcgccagcatcggcagcgccctggccgccatcatgctgctgctgctggtgttcctggtggcctgcttcatcaacagaaagtgccagaagcagagaaagaagaagcccgccgaggacatcctggaggagtaccccctgaacaccaaggtggaggtgcccaagagacaccccgacagagtggagaagaacgtgaacagacactactgcaccgtgagaaacgtgaacatcctgagcgagcccgaggccgcctacaccttcaagggcgccaaggtgaagagactgaacctggaggtgagagtgcacaacaacctgcaggacggcaccgaggtgtag

SEQ ID NO: 82085 - DNA, 2214 bp, synthetic construct
  misc_feature 1..2214: note = Description of Artificial Sequence: Synthetic coding sequence
  source 1..2214: mol_type = other DNA
atgggcgtgctgaaggtgtggctgggcctggccctggccctggccgagttcgccgtgctgccccaccacagcgagggcgcctgcgtgtaccaggacagcctgctggccgacgccaccatctggaagcccgacagctgccagagctgcagatgccacggcgacatcgtgatctgcaagcccgccgtgtgcagaaacccccagtgcgccttcgagaagggcgaggtgctgcagatcgccgccaaccagtgctgccccgagtgcgtgctgagaacccccggcagctgccaccacgagaagaagatccacgagcacggcaccgagtgggccagcagcccctgcagcgtgtgcagctgcaaccacggcgaggtgagatgcaccccccagccctgcccccccctgagctgcggccaccaggagctggccttcatccccgagggcagctgctgccccgtgtgcgtgggcctgggcaagccctgcagctacgagggccacgtgttccaggacggcgaggactggagactgagcagatgcgccaagtgcctgtgcagaaacggcgtggcccagtgcttcaccgcccagtgccagcccctgttctgcaaccaggacgagaccgtggtgagagtgcccggcaagtgctgcccccagtgcagcgccagaagctgcagcgccgccggccaggtgtacgagcacggcgagcagtggagcgagaacgcctgcaccacctgcatctgcgacagaggcgaggtgagatgccacaagcaggcctgcctgcccctgagatgcggcaagggccagagcagagccagaagacacggccagtgctgcgaggagtgcgtgagccccgccggcagctgcagctacgacggcgtggtgagataccaggacgagatgtggaagggcagcgcctgcgagttctgcatgtgcgaccacggccaggtgacctgccagaccggcgagtgcgccaaggtggagtgcgccagagacgaggagctgatccacctggacggcaagtgctgccccgagtgcatcagcagaaacggctactgcgtgtacgaggagaccggcgagttcatgagcagcaacgccagcgaggtgaagagaatccccgagggcgagaagtgggaggacggcccctgcaaggtgtgcgagtgcagaggcgcccaggtgacctgctacgagcccagctgccccccctgccccgtgggcaccctggccctggaggtgaagggccagtgctgccccgactgcaccagcgtgcactgccaccccgactgcctgacctgcagccagagccccgaccactgcgacctgtgccaggaccccaccaagctgctgcagaacggctggtgcgtgcacagctgcggcctgggcttctaccaggccggcagcctgtgcctggcctgccagccccagtgcagcacctgcaccagcggcctggagtgcagcagctgccagccccccctgctgatgagacacggccagtgcgtgcccacctgcggcgacggcttctaccaggacagacacagctgcgccgtgtgccacgagagctgcgccggctgctggggccccaccgagaagcactgcctggcctgcagagaccccctgcacgtgctgagagacggcggctgcgagagcagctgcggcaagggcttctacaacagacagggcacctgcagcgcctgcgaccagagctgcgacagctgcggccccagcagccccagatgcctgacctgcaccgagaagaccgtgctgcacgacggcaagtgcatgagcgagtgccccggcggctactacgccgacgccaccggcagatgcaaggtgtgccacaacagctgcgccagctgcagcggccccacccccagccactgcaccgcctgcagcccccccaaggccctgagacagggccactgcctgcccagatgcggcgagggcttctacagcgaccacggcgtgtgcaaggcctgccacagcagctgcctggcctgcatgggccccgcccccagccactgcaccggctgcaagaagcccgaggagggcctgcaggtggagcagctgagcgacgtgggcatccccagcggcgagtgcctggcccagtgcagagcccacttctacctggagagcaccggcatctgcgagggccagaacctggacttctgccagaacctggaggtgatcagcgccgtgtgcctgggcatcagcagcaccgagaactag

SEQ ID NO: 82086 - DNA, 954 bp, synthetic construct
  misc_feature 1..954: note = Description of Artificial Sequence: Synthetic coding sequence
  source 1..954: mol_type = other DNA
atgggcgtgctgaaggtgtggctgggcctggccctggccctggccgagttcgccgtgctgccccaccacagcgagggcgcctgcgtgtaccaggacagcctgctggccgacgccaccatctggaagcccgacagctgccagagctgcagatgccacggcgacatcgtgatctgcaagcccgccgtgtgcagaaacccccagtgcgccttcgagaagggcgaggtgctgcagatcgccgccaaccagtgctgccccgagtgcgtgctgagaacccccggcagctgccaccacgagaagaagatccacgagcacggcaccgagtgggccagcagcccctgcagcgtgtgcagctgcaaccacggcgaggtgagatgcaccccccagccctgcccccccctgagctgcggccaccaggagctggccttcatccccgagggcagctgctgccccgtgtgcgtgggcctgggcaagccctgcagctacgagggccacgtgttccaggacggcgaggactggagactgagcagatgcgccaagtgcctgtgcagaaacggcgtggcccagtgcttcaccgcccagtgccagcccctgttctgcaaccaggacgagaccgtggtgagagtgcccggcaagtgctgcccccagtgcagcgccagaagctgcagcgccgccggccaggtgtacgagcacggcgagcagtggagcgagaacgcctgcaccacctgcatctgcgacagaggcgaggtgagatgccacaagcaggcctgcctgcccctgagatgcggcaagggccagagcagagccagaagacacggccagtgctgcgaggagtgcgtgagccccgccctggccagccagagcgtgggcatcaccggcatgagccaccacgcccagagcctgctgggccccttcctgacccagatcaagaagccccacttcagctgcctggagtag

SEQ ID NO: 82087 - DNA, 6726 bp, synthetic construct
  misc_feature 1..6726: note = Description of Artificial Sequence: Synthetic coding sequence
  source 1..6726: mol_type = other DNA
tgaagcgaggtgagcaacttcaccatggaggacatcaacaacaagaagatcagatacagcgccgtgttcgagaccgacggccacctggtgaccgacagcttctacttcagcgtgagcgacatggaccacaaccacctggacaaccagatcttcaccatcatgatcacccccgccgagaaccccccccccgtgatcgccttcgccgacctgatcaccgtggacgagggcggcagagcccccctgagcttccaccacttcttcgccaccgacgacgacgacaacctgcagagagacgccatcatcaagctgagcgccctgcccaagtacggctgcatcgagaacaccggcaccggcgacagattcggccccgagaccgccagcgacctggaggccagcttccccatccaggacgtgctggagaactacatctactacttccagagcgtgcacgagagcatcgagcccacccacgacatcttcagcttctacgtgagcgacggcaccagcagaagcgagatccacagcatcaacatcaccatcgagagaaagaacgacgagccccccagaatgaccctgcagcccctgagagtgcagctgagcagcggcgtggtgatcagcaacagcagcctgagcctgcaggacctggacacccccgacaacgagctgatcttcgtgctgaccaagaagcccgaccacggccacgtgctgtggagacagaccgccagcgagcccctggagaacggcagagtgctggtgcagggcagcaccttcacctaccaggacatcctggccggcctggtgggctacgtgcccagcgtgcccggcatggtggtggacgagttccagttcagcctgaccgacggcctgcacgtggacaccggcagaatgaagatctacaccgagctgcccgccagcgacaccccccacctggccatcaaccagggcctgcagctgagcgccggcagcgtggccagaatcaccgagcagcacctgaaggtgaccgacatcgacagcgacgaccaccaggtgatgtacatcatgaaggaggaccccggcgccggcagactgcagatgatgaagcacggcaacctggagcagatcagcatcaagggccccatcagaagcttcacccaggccgacatcagccagggccacgtggagtacagccacggcaccggcgagcccggcggcagcttcgccttcaagttcgacgtggtggacggcgagggcaacagactgatcgacaagagcttcagcatcagcatcctggaggacaagagcccccccgtgatcaccaccaacaagggcctggtgctggacgagaacagcgtgaagaagatcaccaccctgcagctgagcgccaccgaccaggacagcggccccaccgagctgatctacagaatcaccagacagccccagctgggccacctggagcacgccgccagccccggcatccagatcagcagcttcacccaggccgacctgaccagcagaaacgtgcagtacgtgcacagcagcgaggccgagaagcacagcgacgccttcagcttcaccctgagcgacggcgtgagcgaggtgacccagaccttccacatcaccctgcaccccgtggacgacagcctgcccgtggtgcagaacctgggcatgagagtgcaggagggcatgagaaagaccatcaccgagttcgagctgaaggccgtggacgccgacaccgaggccgagagcgtgaccttcaccatcgtgcagccccccagacacggcaccatcgagagaaccagcaacggccagcacttccacctgaccagcaccttcaccatgaaggacatctaccagaacagagtgagctacagccacgacggcagcaacagcctgaaggacagattcaccttcaccgtgagcgacggcaccaaccccttcttcatcatcgaggagggcggcaaggagatcatgaccgccgccccccagcccttcagagtggacatcctgcccgtggacgacggcacccccagaatcgtgaccaacctgggcctgcagtggctggagtacatggacggcaaggccaccaacctgatcaccaagaaggagctgctgaccatggaccccgacaccgaggacgcccagctggtgtacgagatcaccaccggccccaagcacggcttcgtggagaacaagctgcagcccggcagagccgccgccaccttcacccaggaggacgtgaacctgggcctgatcagatacgtgctgcacaaggagaagatcagagagatgatggacagcttccagttcctggtgaaggacagcaagcccaacgtggtgagcgacaacgtgttccacatccagtggagcctgatcagcttcaagtacaccagctacaacgtgagcgagaaggccggcagcgtgagcgtgaccgtgcagagaaccggcaacctgaaccagtacgccatcgtgctgtgcagaaccgagcagggcaccgccagcagcagcagcagagtgagcagccagcccggccagcaggactacgtggagtacgccggccaggtgcagttcgacgagagagaggacaccaagagctgcaccatcgtgatcaacgacgacgacgtgttcgagaacgtggagagcttcaccgtggagctgagcatgcccgcctacgccctgctgggcgagttcacccaggccaaggtgatcatcaacgacaccgaggacgagcccaccctggagttcgacaagaagatctactgggtgaacgagagcgccggcttcctgttcgcccccatcgagagaaagggcgacgccagcagcatcgtgagcgccatctgctacaccgtgcccaagagcgccatgggcagcagcctgtacgccctggagagcggcagcgacttcaagagcagaggcatgagcgccgccagcagagtgatcttcggccccggcgtgaccatgagcacctgcgacgtgatgctgatcgacgacagcgagtacgaggaggaggaggagttcgagatcgccctggccgacgccagcgacaacgccagaatcggcagagtggccaccgccaaggtgctgatcagcggccccaacgacgccagcaccgtgagcctgggcaacaccgccttcaccgtgagcgaggacgccggcaccgtgaagatccccgtgatcagacacggcaccgacctgagcaccttcgccagcgtgtggtgcgccaccagacccagcgaccccgccagcgccacccccggcgtggactacgtgcccagcagcagaaaggtggagttcggccccggcgtgatcgagcagtactgcaccctgaccatcctggacgacacccagtaccccgtgatcgagggcctggagaccttcgtggtgttcctgagcagcgcccagggcgccgagctgaccaagcccttccaggccgtgatcgccatcaacgacaccttccaggacgtgcccagcatgcagttcgccaaggacctgctgctggtgaaggagaaggagggcgtgctgcacgtgcccatcaccagaagcggcgacctgagctacgagagcagcgtgagatgctacacccagagccacagcgcccaggtgatggaggacttcgaggagagacagaacgccgacagcagcagaatcaccttcctgaagggcgacaaggtgaagaactgcaccgtgtacatccacgacgacagcatgttcgagcccgaggagcagttcagagtgtacctgggcctgcccctgggcaaccactggagcggcgccagaatcggcaagaacaacatggccaccatcaccatcagcaacgacgaggacgcccccaccatcgagttcgaggaggccgcctaccaggtgagagagcccgccggccccgacgccatcgccatcctgaacatcaaggtgatcagaagaggcgaccagaacagaaccagcaaggtgagatgcagcaccagagacggcagcgcccagagcggcgtggactactaccccaagagcagagtgctgaagttcagccccggcgtggaccacatcttcttcaaggtggagatcctgagcaacgaggacagagagtggcacgagagcttcagcctggtgctgggccccgacgaccccgtggaggccgtgctgggcgacgtgaccaccgccaccgtgaccatcctggaccaggaggccgccggcagcctgatcctgcccgccccccccatcgtggtgaccctggccgactacgaccacgtggaggaggtgaccaaggagggcgtgaagaagagccccagccccggctaccccctggtgtgcgtgaccccctgcgacccccacttccccagatacgccgtgatgaaggagagatgcagcgaggccggcatcaaccagaccagcgtgcagttcagctgggaggtggccgcccccaccgacggcaacggcgccagaagccccttcgagaccatcaccgacaacacccccttcaccagcgtgaaccacatggtgctggacagcatctacttcagcagaagattccacgtgagatgcgtggccaaggccgtggacaaggtgggccacgtgggcacccccctgagaagcaacatcgtgaccatcggcaccgacagcgccatctgccacacccccgtggtggccggcaccagcagaggcttccaggcccagagcttcatcgccaccctgaagtacctggacgtgaagcacaaggagcaccccaacagaatccacatcagcgtgcagatcccccaccaggacggcatgctgcccctgatcagcaccatgcccctgcacaacctgcacttcctgctgagcgagagcatctacagacaccagcacgtgtgcagcaacctggtgaccacctacgacctgagaggcatcagcgaggccggcttcctggacgacgtggtgtacgacagcaccgccctgggccccggctacgacagacccttccagttcgaccccagcgtgagagagcccaagaccatccagctgtacaagcacctgaacctgaagagctgcgtgtggaccttcgacgcctactacgacatgaccgagctgatcgacgtgtgcggcggcagcgtgaccgccgacttccaggtgagagacagcgcccagagcttcctgaccgtgcacgtgcccctgtacgtgagctacatctacgtgaccgcccccagaggctgggccagcctggagcaccacaccgagatggagttcagcttcttctacgacaccgtgctgtggagaaccggcatccagaccgacagcgtgctgagcgccagactgcagatcatcagaatctacatcagagaggacggcagactggtgatcgagttcaagacccacgccaagttcagaggccagttcgtgatggagcaccacaccctgcccgaggtgaagagcttcgtgctgacccccgaccacctgggcggcatcgagttcgacctgcagctgctgtggagcgcccagaccttcgacagcccccaccagctgtggagagccaccagcagctacaacagaaaggactacagcggcgagtacaccatctacctgatcccctgcaccgtgcagcccacccagccctgggtggaccccggcgagaagcccctggcctgcaccgcccacgcccccgagagattcctgatccccatcgccttccagcagaccaacagacccgtgcccgtggtgtacagcctgaacaccgagttccagctgtgcaacaacgagaaggtgttcctgatggaccccaacaccagcgacatgagcctggccgagatggactacaagggcgccttcagcaagggccagatcctgtacggcagagtgctgtggaaccccgagcagaacctgaacagcgcctacaagctgcagctggagaaggtgtacctgtgcaccggcaaggacggctacgtgcccttcttcgaccccaccggcaccatctacaacgagggcccccagtacggctgcatccagcccaacaagcacctgaagcacagattcctgctgctggacagaaaccagcccgaggtgaccgacaagtacttccacgacgtgcccttcgaggcccacttcgccagcgagctgcccgacttccacgtggtgagcaacatgcccggcgtggacggcttcaccctgaaggtggacgccctgtacaaggtggaggccggccaccagtggtacctgcaggtgatctacatcatcggccccgacaccatcagcggccccagagtgcagagaagcctgaccgcccccctgagaagaaacagaagagacctggtggagcccgacggccagctgatcctggacgacagcctgatctacgacaacgagggcgaccaggtgaagaacggcaccaacatgaagagcctgaacctggagatgcaggagctggccgtggccgccagcctgagccagaccggcgccagcatcggcagcgccctggccgccatcatgctgctgctgctggtgttcctggtggcctgcttcatcaacagaaagtgccagaagcagagaaagaagaagcccgccgaggacatcctggaggagtaccccctgaacaccaaggtggaggtgcccaagagacaccccgacagagtggagaagaacgtgaacagacactactgcaccgtgagaaacgtgaacatcctgagcgagcccgaggccgcctacaccttcaagggcgccaaggtgaagagactgaacctggaggtgagagtgcacaacaacctgcaggacggcaccgaggtgtag

SEQ ID NO: 82088 - DNA, 768 bp, synthetic construct
  misc_feature 1..768: note = Description of Artificial Sequence: Synthetic coding sequence
  source 1..768: mol_type = other DNA
gagagacagggccagagcagagccagaagacacggccagtgctgcgaggagtgcgtgagccccgccggcagctgcagctacgacggcgtggtgagataccaggacgagatgtggaagggcagcgcctgcgagttctgcatgtgcgaccacggccaggtgacctgccagaccggcgagtgcgccaaggtggagtgcgccagagacgaggagctgatccacctggacggcaagtgctgccccgagtgcatcagcagaaacggctactgcgtgtacgaggagaccggcgagttcatgagcagcaacgccagcgaggtgaagagaatccccgagggcgagaagtgggaggacggcccctgcaaggtgtgcgagtgcagaggcgcccaggtgacctgctacgagcccagctgccccccctgccccgtgggcaccctggccctggaggtgaagggccagtgctgccccgactgcaccagcgtgcactgccaccccgactgcctgacctgcagccagagccccgaccactgcgacctgtgccaggaccccaccaagctgctgcagaacggctggtgcgtgcacagctgcggcctgggcttctaccaggccggcagcctgtgcctggacgacggcttcagcctgcccgcccccgtgctgcacgtgtaccagtgggccggcgtgctgatcctgcccgccagccccgccgacgccgccagagccgtgtgcgcctacctgtggggcagactgctgcccagaagccccttcctgtgctag

SEQ ID NO: 82089 - DNA, 840 bp, synthetic construct
  misc_feature 1..840: note = Description of Artificial Sequence: Synthetic coding sequence
  source 1..840: mol_type = other DNA
atggtgctgaccatccacctgctgcccagcgaccagcagctgcccgtgttccaggtgaccgcccccagactggccgtgagccccggcggcagcaccagcgtgggcctgcaggtggtggtgagagacgccgagaccgcccccaaggagctgttcttcgagctgagaagacccccccagcacggcgtgctgctgaagcacaccgccgagttcagaagacccatggccaccggcgacaccttcacctacgaggacgtggagaagaacgccctgcagtacatccacgacggcagcagcaccagagaggacagcatggagatcagcgtgaccgacggcctgaccgtgaccatgctggaggtgagagtggaggtgagcctgagcgaggacagaggccccagactggccgccggcagcagcctgagcatcaccgtggccagcaagagcaccgccatcatcaccagaagccacctggcctacgtggacgacagcagccccgaccccgagatctggatccagctgaactacctgcccagctacggcaccctgctgagaatcagcggcagcgaggtggaggagctgagcgaggtgagcaacttcaccatggaggacatcaacaacaagaagatcagatacagcgccgtgttcgagaccgacggccacctggtgaccgacagcttctacttcagcgtgagcgacatggaccacaaccacctggacaaccagatcttcaccatcatgatcacccccgccgagaaccccccccccgtgatcgccttcgccgacctgatcaccgtggacgagggcggcagagcccccctgagcttccaccacttctgctactag

SEQ ID NO: 82090 - DNA, 5931 bp, synthetic construct
  misc_feature 1..5931: note = Description of Artificial Sequence: Synthetic coding sequence
  source 1..5931: mol_type = other DNA
atgggcgtgctgaaggtgtggctgggcctggccctggccctggccgagttcgccgtgctgccccaccacagcgagggcgcctgcgtgtaccaggacagcctgctggccgacgccaccatctggaagcccgacagctgccagagctgcagatgccacggcgacatcgtgatctgcaagcccgccgtgtgcagaaacccccagtgcgccttcgagaagggcgaggtgctgcagatcgccgccaaccagtgctgccccgagtgcgtgctgagaacccccggcagctgccaccacgagaagaagatccacgagcacggcaccgagtgggccagcagcccctgcagcgtgtgcagctgcaaccacggcgaggtgagatgcaccccccagccctgcccccccctgagctgcggccaccaggagctggccttcatccccgagggcagctgctgccccgtgtgcgtgggcctgggcaagccctgcagctacgagggccacgtgttccaggacggcgaggactggagactgagcagatgcgccaagtgcctgtgcagaaacggcgtggcccagtgcttcaccgcccagtgccagcccctgttctgcaaccaggacgagaccgtggtgagagtgcccggcaagtgctgcccccagtgcagcgccagaagctgcagcgccgccggccaggtgtacgagcacggcgagcagtggagcgagaacgcctgcaccacctgcatctgcgacagaggcgaggtgagatgccacaagcaggcctgcctgcccctgagatgcggcaagggccagagcagagccagaagacacggccagtgctgcgaggagtgcgtgagccccgccggcagctgcagctacgacggcgtggtgagataccaggacgagatgtggaagggcagcgcctgcgagttctgcatgtgcgaccacggccaggtgacctgccagaccggcgagtgcgccaaggtggagtgcgccagagacgaggagctgatccacctggacggcaagtgctgccccgagtgcatcagcagaaacggctactgcgtgtacgaggagaccggcgagttcatgagcagcaacgccagcgaggtgaagagaatccccgagggcgagaagtgggaggacggcccctgcaaggtgtgcgagtgcagaggcgcccaggtgacctgctacgagcccagctgccccccctgccccgtgggcaccctggccctggaggtgaagggccagtgctgccccgactgcaccagcgtgcactgccaccccgactgcctgacctgcagccagagccccgaccactgcgacctgtgccaggaccccaccaagctgctgcagaacggctggtgcgtgcacagctgcggcctgggcttctaccaggccggcagcctgtgcctggcctgccagccccagtgcagcacctgcaccagcggcctggagtgcagcagctgccagccccccctgctgatgagacacggccagtgcgtgcccacctgcggcgacggcttctaccaggacagacacagctgcgccgtgtgccacgagagctgcgccggctgctggggccccaccgagaagcactgcctggcctgcagagaccccctgcacgtgctgagagacggcggctgcgagagcagctgcggcaagggcttctacaacagacagggcacctgcagcgcctgcgaccagagctgcgacagctgcggccccagcagccccagatgcctgacctgcaccgagaagaccgtgctgcacgacggcaagtgcatgagcgagtgccccggcggctactacgccgacgccaccggcagatgcaaggtgtgccacaacagctgcgccagctgcagcggccccacccccagccactgcaccgcctgcagcccccccaaggccctgagacagggccactgcctgcccagatgcggcgagggcttctacagcgaccacggcgtgtgcaaggcctgccacagcagctgcctggcctgcatgggccccgcccccagccactgcaccggctgcaagaagcccgaggagggcctgcaggtggagcagctgagcgacgtgggcatccccagcggcgagtgcctggcccagtgcagagcccacttctacctggagagcaccggcatctgcgaggcctgccaccagagctgcttcagatgcgccggcaagagcccccacaactgcaccgactgcggccccagccacgtgctgctggacggccagtgcctgagccagtgccccgacggctacttccaccaggagggcagctgcaccgagtgccaccccacctgcagacagtgccacggccccctggagagcgactgcatcagctgctacccccacatcagcctgaccaacggcaactgcagaaccagctgcagagaggagcagttcctgaacctggtgggctactgcgccgactgccaccacctgtgccagcactgcgccgccgacctgcacaacaccggcagcatctgcctgagatgccagaacgcccactacctgctgctgggcgaccactgcgtgcccgactgccccagcggctactacgccgagagaggcgcctgcaagaagtgccacagcagctgcagaacctgccagggcagaggccccttcagctgcagcagctgcgacaccaacctggtgctgagccacaccggcacctgcagcaccacctgcttccccggccactacctggacgacaaccacgtgtgccagccctgcaacacccactgcggcagctgcgacagccaggccagctgcaccagctgcagagaccccaacaaggtgctgctgttcggcgagtgccagtacgagagctgcgccccccagtactacctggacttcagcaccaacacctgcaaggagtgcgactggagctgcagcgcctgcagcggccccctgaagaccgactgcctgcagtgcatggacggctacgtgctgcaggacggcgcctgcgtggagcagtgcctgagcagcttctaccaggacagcggcctgtgcaagaactgcgacagctactgcctgcagtgccagggcccccacgagtgcaccagatgcaagggccccttcctgctgctggaggcccagtgcgtgcaggagtgcggcaagggctacttcgccgaccacgccaagcacaagtgcaccgcctgcccccagggctgcctgcagtgcagccacagagacagatgccacctgtgcgaccacggcttcttcctgaagagcggcctgtgcgtgtacaactgcgtgcccggcttcagcgtgcacaccagcaacgagacctgcagcggcaagatccacacccccagcctgcacgtgaacggcagcctgatcctgcccatcggcagcatcaagcccctggacttcagcctgctgaacgtgcaggaccaggagggcagagtggaggacctgctgttccacgtggtgagcacccccaccaacggccagctggtgctgagcagaaacggcaaggaggtgcagctggacaaggccggcagattcagctggaaggacgtgaacgagaagaaggtgagattcgtgcacagcaaggagaagctgagaaagggctacctgttcctgaagatcagcgaccagcagttcttcagcgagccccagctgatcaacatccaggccttcagcacccaggccccctacgtgctgagaaacgaggtgctgcacatcagcagaggcgagagagccaccatcaccacccagatgctggacatcagagacgacgacaacccccaggacgtggtgatcgagatcatcgacccccccctgcacggccagctgctgcagaccctgcagagccccgccacccccatctaccagttccagctggacgagctgagcagaggcctgctgcactacgcccacgacggcagcgacagcaccagcgacgtggccgtgctgcaggccaacgacggccacagcttccacaacatcctgttccaggtgaagaccgtgccccagaacgacagaggcctgcagctggtggccaacagcatggtgtgggtgcccgagggcggcatgctgcagatcaccaacagaatcctgcaggccgaggcccccggcgccagcgccgaggagatcatctacaagatcacccaggactacccccagttcggcgaggtggtgctgctggtgaacatgcccgccgacagccccgccgacgagggccagcacctgcccgacggcagaaccgccacccccaccagcaccttcacccagcaggacatcaacgagggcatcgtgtggtacagacacagcggcgcccccgcccagagcgacagcttcagattcgaggtgagcagcgccagcaacgcccagaccagactggagagccacatgttcaacatcgccatcctgccccagacccccgaggcccccaaggtgagcctggaggccagcctgcacatgaccgccagagaggacggcctgaccgtgatccagccccacagcctgagcttcatcaacagcgagaagcccagcggcaagatcgtgtacaacatcaccctgcccctgcaccccaaccagggcatcatcgagcacagagaccacccccacagccccatcagatacttcacccaggaggacatcaaccagggcaaggtgatgtacagacccccccccgccgccccccacctgcaggagctgatggccttcagcttcgccggcctgcccgagagcgtgaagttccacttcaccgtgagcgacggcgagcacaccagccccgagatggtgctgaccatccacctgctgcccagcgaccagcagctgcccgtgttccaggtgaccgcccccagactggccgtgagccccggcggcagcaccagcgtgggcctgcaggtggtggtgagagacgccgagaccgcccccaaggagctgttcttcgagctgagaagacccccccagcacggcgtgctgctgaagcacaccgccgagttcagaagacccatggccaccggcgacaccttcacctacgaggacgtggagaagaacgccctgcagtacatccacgacggcagcagcaccagagaggacagcatggagatcagcgtgaccgacggcctgaccgtgaccatgctggaggtgagagtggaggtgagcctgagcgaggacagaggccccagactggccgccggcagcagcctgagcatcaccgtggccagcaagagcaccgccatcatcaccagaagccacctggcctacgtggacgacagcagccccgaccccgagatctggatccagctgaactacctgcccagctacggcaccctgctgagaatcagcggcagcgaggtggaggagctgagcgaggtgagcaacttcaccatggaggacatcaacaacaagaagatcagatacagcgccgtgttcgagaccgacggccacctggtgaccgacagcttctacttcagcgtgagcgacatggaccacaaccacctggacaaccagatcttcaccatcatgatcacccccgccgagaaccccccccccgtgatcgccttcgccgacctgatcaccgtggacgagggcggcagagcccccctgagcttccaccacttcttcgccaccgacgacgacgacaacctgcagagagacgccatcatcaagctgagcgccctgcccaagtacggctgcatcgagaacaccggcaccggcgacagattcggccccgagaccgccagcgacctggaggccagcttccccatccaggacgtgctggagaactacatctactacttccagagcgtgcacgagagcatcgagcccacccacgacatcttcagcttctacgtgagcgacggcaccagcagaagcgagatccacagcatcaacatcaccatcgaggtgaagaccctggaggtgggcaaggtggagcccctgaccaccatcttccacaccatcagagagctgagcctgtag

SEQ ID NO: 82091 - DNA, 633 bp, synthetic construct
  misc_feature 1..633: note = Description of Artificial Sequence: Synthetic coding sequence
  source 1..633: mol_type = other DNA
atgtggaccctgggcagaagagccgtggccggcctgctggccagccccagccccgcccaggcccagaccctgaccagagtgcccagacccgccgagctggcccccctgtgcggcagaagaggcctgagaaccgacatcgacgccacctgcacccccagaagagccagcagcaaccagagaggcctgaaccagatctggaacgtgaagaagcagagcgtgtacctgatgaacctgagaaagagcggcaccctgggccaccccggcagcctggacgagaccacctacgagagactggccgaggagaccctggacagcctggccgagttcttcgaggacctggccgacaagccctacaccttcgaggactacgacgtgagcttcggcagcggcgtgctgaccgtgaagctgggcggcgacctgggcacctacgtgatcaacaagcagacccccaacaagcagatctggctgagcagccccagcagcggccccaagagatacgactggaccggcaagaactgggtgtacagccacgacggcgtgagcctgcacgagctgctggccgccgagctgaccaaggccctgaagaccaagctggacctgagcagcctggcctacagcggcaaggacgcctag

SEQ ID NO: 82092 - DNA, 516 bp, synthetic construct
  misc_feature 1..516: note = Description of Artificial Sequence: Synthetic coding sequence
  source 1..516: mol_type = other DNA
atgtggaccctgggcagaagagccgtggccggcctgctggccagccccagccccgcccaggcccagaccctgaccagagtgcccagacccgccgagctggcccccctgtgcggcagaagaggcctgagaaccgacatcgacgccacctgcacccccagaagagccagcagcaaccagagaggcctgaaccagatctggaacgtgaagaagcagagcgtgtacctgatgaacctgagaaagagcggcaccctgggccaccccggcagcctggacgagaccacctacgagagactggccgaggagaccctggacagcctggccgagttcttcgaggacctggccgacaagccctacaccttcgaggactacgacgtgagcttcggcagcggcgtgctgaccgtgaagctgggcggcgacctgggcacctacgtgatcaacaagcagacccccaacaagcagatctggctgagcagccccagcagactgacctggctgctgtggctgttccacccctag

SEQ ID NO: 82093 - DNA, 591 bp, synthetic construct
  misc_feature 1..591: note = Description of Artificial Sequence: Synthetic coding sequence
  source 1..591: mol_type = other DNA
atgtggaccctgggcagaagagccgtggccggcctgctggccagccccagccccgcccaggcccagaccctgaccagagtgcccagacccgccgagctggcccccctgtgcggcagaagaggcctgagaaccgacatcgacgccacctgcacccccagaagagccagcagcaaccagagaggcctgaaccagatctggaacgtgaagaagcagagcgtgtacctgatgaacctgagaaagagcggcaccctgggccaccccggcagcctggacgagaccacctacgagagactggccgaggagaccctggacagcctggccgagttcttcgaggacctggccgacaagccctacaccttcgaggactacgacgtgagcttcggcagcggcgtgctgaccgtgaagctgggcggcgacctgggcacctacgtgatcaacaagcagacccccaacaagcagatctggctgagcagccccagcagatacgtggtggacctgagcgtgatgaccggcctgggcaagaccggctgcacccccaccaccgcctgccccagcatgagctgctggccccagagcagcctgaagccctag

SEQ ID NO: 82094 - DNA, 702 bp, synthetic construct
  misc_feature 1..702: note = Description of Artificial Sequence: Synthetic coding sequence
  source 1..702: mol_type = other DNA
atgccctgcagaagagaggaggaggaggaggccggcgaggaggccgagggcgaggaggaggaggacgacagcttcctgctgctgcagcagagcgtgaccctgggcagcagcggcgaggtggacagactggtggcccagatcggcgagaccctgcagctggacgccgcccaggacagccccgccagcccctgcgccccccccggcgtgcccctgagagcccccggccccctggccgccgccgtgcccgccgacaaggccagaccccccgccgtgcccctgctgctgccccccgccagcgccgagaccgtgggccccgcccccagcggcgccctgagatgcgccctgggcgacagaggcagagtgagaggcagagccgccccctactgcgtggccgaggtggccgccggccccagcgccctgcccggcccctgcagaagaggctggctgagagacgccgtgaccagcagaagactgcagcagagaagatggacccaggccggcgccagagccggcgacgacgacccccacagactgctgcagcagctggtgctgagcggcaacctgatcaaggaggccgtgagaagactgcagagagccgtggccgccgtggccgccaccggccccgccagcgcccccggccccggcggcggcagaagcggccccgacagaatcgccctgcagcccagcggcagcctgctgtag

SEQ ID NO: 82095 - DNA, 1161 bp, synthetic construct
  misc_feature 1..1161: note = Description of Artificial Sequence: Synthetic coding sequence
  source 1..1161: mol_type = other DNA
atggagggcggcctggccggcgagagagccagagagagccccgtggactgcagcgtgagcaagtgcagcaagctggtgggcggcggcgagagcaaccccatgaactacaacagctacatggacgagaagaacggcccccccccccccaacatgaccaccaacgagagaagagtgatcgtgcccgccgaccccaccctgtggacccaggagcacgtgagacagtggctggagtgggccatcaaggagtacagcctgatggagatcgacaccagcttcttccagaacatggacggcaaggagctgtgcaagatgaacaaggaggacttcctgagagccaccaccctgtacaacaccgaggtgctgctgagccacctgagctacctgagagagagcagcctgctggcctacaacaccaccagccacaccgaccagagcagcagactgagcgtgaaggaggaccccagctacgacagcgtgagaagaggcgcctggggcaacaacatgaacagcggcctgaacaagagcccccccctgggcggcgcccagaccatcagcaagaacaccgagcagagaccccagcccgacccctaccagatcctgggccccaccagcagcagactggccaaccccggcagcggccagatccagctgtggcagttcctgctggagctgctgagcgacagcgccaacgccagctgcatcacctgggagggcaccaacggcgagttcaagatgaccgaccccgacgaggtggccagaagatggggcgagagaaagagcaagcccaacatgaactacgacaagctgagcagagccctgagatactactacgacaagaacatcatgaccaaggtgcacggcaagagatacgcctacaagttcgacttccacggcatcgcccaggccctgcagccccaccccaccgagagcagcatgtacaagtaccccagcgacatcagctacatgcccagctaccacgcccaccagcagaaggtgaacttcgtgcccccccaccccagcagcatgcccgtgaccagcagcagcttcttcggcgccgccagccagtactggaccagccccaccggcggcatctaccccaaccccaacgtgcccagacaccccaacacccacgtgcccagccacctgggcagctactactag

SEQ ID NO: 82096 - DNA, 1260 bp, synthetic construct
  misc_feature 1..1260: note = Description of Artificial Sequence: Synthetic coding sequence
  source 1..1260: mol_type = other DNA
atgaccgccagcggcagccccgactacggccagccccacaagatcaaccccctgcccccccagcaggagtggatcaaccagcccgtgagagtgaacgtgaagagagagtacgaccacatgaacggcagcagagagagccccgtggactgcagcgtgagcaagtgcagcaagctggtgggcggcggcgagagcaaccccatgaactacaacagctacatggacgagaagaacggcccccccccccccaacatgaccaccaacgagagaagagtgatcgtgcccgccgaccccaccctgtggacccaggagcacgtgagacagtggctggagtgggccatcaaggagtacagcctgatggagatcgacaccagcttcttccagaacatggacggcaaggagctgtgcaagatgaacaaggaggacttcctgagagccaccaccctgtacaacaccgaggtgctgctgagccacctgagctacctgagagagagcagcctgctggcctacaacaccaccagccacaccgaccagagcagcagactgagcgtgaaggaggaccccagctacgacagcgtgagaagaggcgcctggggcaacaacatgaacagcggcctgaacaagagcccccccctgggcggcgcccagaccatcagcaagaacaccgagcagagaccccagcccgacccctaccagatcctgggccccaccagcagcagactggccaaccccggcagcggccagatccagctgtggcagttcctgctggagctgctgagcgacagcgccaacgccagctgcatcacctgggagggcaccaacggcgagttcaagatgaccgaccccgacgaggtggccagaagatggggcgagagaaagagcaagcccaacatgaactacgacaagctgagcagagccctgagatactactacgacaagaacatcatgaccaaggtgcacggcaagagatacgcctacaagttcgacttccacggcatcgcccaggccctgcagccccaccccaccgagagcagcatgtacaagtaccccagcgacatcagctacatgcccagctaccacgcccaccagcagaaggtgaacttcgtgcccccccaccccagcagcatgcccgtgaccagcagcagcttcttcggcgccgccagccagtactggaccagccccaccggcggcatctaccccaaccccaacgtgcccagacaccccaacacccacgtgcccagccacctgggcagctactactag

SEQ ID NO: 82097 - DNA, 1359 bp, synthetic construct
  misc_feature 1..1359: note = Description of Artificial Sequence: Synthetic coding sequence
  source 1..1359: mol_type = other DNA
atggacggcaccatcaaggaggccctgagcgtggtgagcgacgaccagagcctgttcgacagcgcctacggcgccgccgcccacctgcccaaggccgacatgaccgccagcggcagccccgactacggccagccccacaagatcaaccccctgcccccccagcaggagtggatcaaccagcccgtgagagtgaacgtgaagagagagtacgaccacatgaacggcagcagagagagccccgtggactgcagcgtgagcaagtgcagcaagctggtgggcggcggcgagagcaaccccatgaactacaacagctacatggacgagaagaacggcccccccccccccaacatgaccaccaacgagagaagagtgatcgtgcccgccgaccccaccctgtggacccaggagcacgtgagacagtggctggagtgggccatcaaggagtacagcctgatggagatcgacaccagcttcttccagaacatggacggcaaggagctgtgcaagatgaacaaggaggacttcctgagagccaccaccctgtacaacaccgaggtgctgctgagccacctgagctacctgagagagagcagcctgctggcctacaacaccaccagccacaccgaccagagcagcagactgagcgtgaaggaggaccccagctacgacagcgtgagaagaggcgcctggggcaacaacatgaacagcggcctgaacaagagcccccccctgggcggcgcccagaccatcagcaagaacaccgagcagagaccccagcccgacccctaccagatcctgggccccaccagcagcagactggccaaccccggcagcggccagatccagctgtggcagttcctgctggagctgctgagcgacagcgccaacgccagctgcatcacctgggagggcaccaacggcgagttcaagatgaccgaccccgacgaggtggccagaagatggggcgagagaaagagcaagcccaacatgaactacgacaagctgagcagagccctgagatactactacgacaagaacatcatgaccaaggtgcacggcaagagatacgcctacaagttcgacttccacggcatcgcccaggccctgcagccccaccccaccgagagcagcatgtacaagtaccccagcgacatcagctacatgcccagctaccacgcccaccagcagaaggtgaacttcgtgcccccccaccccagcagcatgcccgtgaccagcagcagcttcttcggcgccgccagccagtactggaccagccccaccggcggcatctaccccaaccccaacgtgcccagacaccccaacacccacgtgcccagccacctgggcagctactactag

SEQ ID NO: 82098 - DNA, 780 bp, synthetic construct
  misc_feature 1..780: note = Description of Artificial Sequence: Synthetic coding sequence
  source 1..780: mol_type = other DNA
atggaccccggcagcctgctggcctacaacaccaccagccacaccgaccagagcagcagactgagcgtgaaggaggaccccagctacgacagcgtgagaagaggcgcctggggcaacaacatgaacagcggcctgaacaagagcccccccctgggcggcgcccagaccatcagcaagaacaccgagcagagaccccagcccgacccctaccagatcctgggccccaccagcagcagactggccaaccccggcagcggccagatccagctgtggcagttcctgctggagctgctgagcgacagcgccaacgccagctgcatcacctgggagggcaccaacggcgagttcaagatgaccgaccccgacgaggtggccagaagatggggcgagagaaagagcaagcccaacatgaactacgacaagctgagcagagccctgagatactactacgacaagaacatcatgaccaaggtgcacggcaagagatacgcctacaagttcgacttccacggcatcgcccaggccctgcagccccaccccaccgagagcagcatgtacaagtaccccagcgacatcagctacatgcccagctaccacgcccaccagcagaaggtgaacttcgtgcccccccaccccagcagcatgcccgtgaccagcagcagcttcttcggcgccgccagccagtactggaccagccccaccggcggcatctaccccaaccccaacgtgcccagacaccccaacacccacgtgcccagccacctgggcagctactactag

SEQ ID NO: 82099 - DNA, 1944 bp, synthetic construct
  misc_feature 1..1944: note = Description of Artificial Sequence: Synthetic coding sequence
  source 1..1944: mol_type = other DNA
atggccgaggaggaggcccccaagaagagcagagccgccggcggcggcgccagctgggagctgtgcgccggcgccctgagcgccagactggccgaggagggcagcggcgacgccggcggcagaagaagaccccccgtggaccccagaagactggccagacagctgctgctgctgctgtggctgctggaggcccccctgctgctgggcgtgagagcccaggccgccggccagggccccggccagggccccggccccggccagcagccccccccccccccccagcagcagcagagcggccagcagtacaacggcgagagaggcatcagcgtgcccgaccacggctactgccagcccatcagcatccccctgtgcaccgacatcgcctacaaccagaccatcatgcccaacctgctgggccacaccaaccaggaggacgccggcctggaggtgcaccagttctaccccctggtgaaggtgcagtgcagcgccgagctgaagttcttcctgtgcagcatgtacgcccccgtgtgcaccgtgctggagcaggccctgcccccctgcagaagcctgtgcgagagagccagacagggctgcgaggccctgatgaacaagttcggcttccagtggcccgacaccctgaagtgcgagaagttccccgtgcacggcgccggcgagctgtgcgtgggccagaacaccagcgacaagggcacccccacccccagcctgctgcccgagttctggaccagcaacccccagcacggcggcggcggccacagaggcggcttccccggcggcgccggcgccagcgagagaggcaagttcagctgccccagagccctgaaggtgcccagctacctgaactaccacttcctgggcgagaaggactgcggcgccccctgcgagcccaccaaggtgtacggcctgatgtacttcggccccgaggagctgagattcagcagaacctggatcggcatctggagcgtgctgtgctgcgccagcaccctgttcaccgtgctgacctacctggtggacatgagaagattcagctaccccgagagacccatcatcttcctgagcggctgctacaccgccgtggccgtggcctacatcgccggcttcctgctggaggacagagtggtgtgcaacgacaagttcgccgaggacggcgccagaaccgtggcccagggcaccaagaaggagggctgcaccatcctgttcatgatgctgtacttcttcagcatggccagcagcatctggtgggtgatcctgagcctgacctggttcctggccgccggcatgaagtggggccacgaggccatcgaggccaacagccagtacttccacctggccgcctgggccgtgcccgccatcaagaccatcaccatcctggccctgggccaggtggacggcgacgtgctgagcggcgtgtgcttcgtgggcctgaacaacgtggacgccctgagaggcttcgtgctggcccccctgttcgtgtacctgttcatcggcaccagcttcctgctggccggcttcgtgagcctgttcagaatcagaaccatcatgaagcacgacggcaccaagaccgagaagctggagaagctgatggtgagaatcggcgtgttcagcgtgctgtacaccgtgcccgccaccatcgtgatcgcctgctacttctacgagcaggccttcagagaccagtgggagagaagctgggtggcccagagctgcaagagctacgccatcccctgcccccacctgcaggccggcggcggcgcccccccccacccccccatgagccccgacttcaccgtgttcatgatcaagtacctgatgaccctgatcgtgggcatcaccagcggcttctggatctggagcggcaagaccctgaacagctggagaaagttctacaccagactgaccaacagcaagcagggcgagaccaccgtgtag

SEQ ID NO: 82100 - DNA, 1284 bp, synthetic construct
  misc_feature 1..1284: note = Description of Artificial Sequence: Synthetic coding sequence
  source 1..1284: mol_type = other DNA
atggaggccatggccgccagcaccagcctgcccgaccccggcgacttcgacagaaacgtgcccagaatctgcggcgtgtgcggcgacagagccaccggcttccacttcaacgccatgacctgcgagggctgcaagggcttcttcagaagaagcatgaagagaaaggccctgttcacctgccccttcaacggcgactgcagaatcaccaaggacaacagaagacactgccaggcctgcagactgaagagatgcgtggacatcggcatgatgaaggagttcatcctgaccgacgaggaggtgcagagaaagagagagatgatcctgaagagaaaggaggaggaggccctgaaggacagcctgagacccaagctgagcgaggagcagcagagaatcatcgccatcctgctggacgcccaccacaagacctacgaccccacctacagcgacttctgccagttcagaccccccgtgagagtgaacgacggcggcggcagccaccccagcagacccaacagcagacacacccccagcttcagcggcgacagcagcagcagctgcagcgaccactgcatcaccagcagcgacatgatggacagcagcagcttcagcaacctggacctgagcgaggaggacagcgacgaccccagcgtgaccctggagctgagccagctgagcatgctgccccacctggccgacctggtgagctacagcatccagaaggtgatcggcttcgccaagatgatccccggcttcagagacctgaccagcgaggaccagatcgtgctgctgaagagcagcgccatcgaggtgatcatgctgagaagcaacgagagcttcaccatggacgacatgagctggacctgcggcaaccaggactacaagtacagagtgagcgacgtgaccaaggccggccacagcctggagctgatcgagcccctgatcaagttccaggtgggcctgaagaagctgaacctgcacgaggaggagcacgtgctgctgatggccatctgcatcgtgagccccgacagacccggcgtgcaggacgccgccctgatcgaggccatccaggacagactgagcaacaccctgcagacctacatcagatgcagacaccccccccccggcagccacctgctgtacgccaagatgatccagaagctggccgacctgagaagcctgaacgaggagcacagcaagcagtacagatgcctgagcttccagcccgagtgcagcatgaagctgacccccctggtgctggaggtgttcggcaacgagatcagctag

SEQ ID NO: 82101 - DNA, 1365 bp, synthetic construct
  misc_feature 1..1365: note = Description of Artificial Sequence: Synthetic coding sequence
  source 1..1365: mol_type = other DNA
atgcccgcccacagagaccccgacgtgcagggccacagactgcagcacgacagctacgcccagcccgacggccccagagagcccgccagaggcagccaccccgtggccagagtgagagccgccggcggcgtgagactgcccagacccccccccctgctgcccgtgctggccgtgagagccgacgtgcacagagccggcctgtacccccaccccagactgcccggccacgtgagagccggccccgcccaggtgctgcccgactacggcgccgtgcagctgcaggtggccagactgcccggcctgcccgagaccccccagcaggagagaccccagctgcccgtgcacggcggcgcccagcagagactgggcagagcccaccccggcctgggccccgtgcccgccgccgtgcccgccgccgccgccccccagagagccggcgcccccgccgagggcagaggccccagagccagaagactgagacagcccggccaggtgccccccagaggcgaggagagagtggtgagagccgccctgcacgccagaagaggcagagtgctggagcccagaggccaggccctgagaagcggcctggccggccacctgggcggcgccgtgctgctgctgcagagactgcacagagcccacctgccccacagacccggccccctgcccctgcccagagccccccaccacctgcccctgcacgtgctgctgagactgctgagaggcctgccccacccccccctgagaagaagaagagagcacagactgagacccggccagagacccgccctgtgccaccccggcggcaccggcgagcacagactgcacgccggcctgcccggccccctgctgctgagacacggccagctggccgtggtgggcggcccccacgcccacctggtgcccggcagaagacaggaggtgggccccagaggccacagaagccagcagcagctgctgccccccggcagcctgggccaccccggcggcgaggaccaccccgaccccggccacgcccagggcggcggcggcagagcccacagaggcctgctgagaggccagcacggcagacagagagcccacagactgagagcccacagccccggcctgctgcccggccacagacacgtgctgcaccccctgggcctgagaggccccgtgccccaccccgagggcgacgaggacggcagaagagagcacggccaggccggcgaggcccacggcgcctacagagccctgctgtgcgccgtgcacagagccggccacctgtgcgacagactgctgctgctgagaaccccccagcacggcctgctggaggaccccggcggcgccgcccaggtgcagaacgagcagcccgactag

SEQ ID NO: 82102 - DNA, 1698 bp, synthetic construct
  misc_feature 1..1698: note = Description of Artificial Sequence: Synthetic coding sequence
  source 1..1698: mol_type = other DNA
atgagacccagaagcgccctgcccagactgctgctgcccctgctgctgctgcccgccgccggccccgcccagttccacggcgagaagggcatcagcatccccgaccacggcttctgccagcccatcagcatccccctgtgcaccgacatcgcctacaaccagaccatcatgcccaacctgctgggccacaccaaccaggaggacgccggcctggaggtgcaccagttctaccccctggtgaaggtgcagtgcagccccgagctgagattcttcctgtgcagcatgtacgcccccgtgtgcaccgtgctggagcaggccatccccccctgcagaagcatctgcgagagagccagacagggctgcgaggccctgatgaacaagttcggcttccagtggcccgagagactgagatgcgagcacttccccagacacggcgccgagcagatctgcgtgggccagaaccacagcgaggacggcgcccccgccctgctgaccaccgcccccccccccggcctgcagcccggcgccggcggcacccccggcggccccggcggcggcggcgccccccccagatacgccaccctggagcaccccttccactgccccagagtgctgaaggtgcccagctacctgagctacaagttcctgggcgagagagactgcgccgccccctgcgagcccgccagacccgacggcagcatgttcttcagccaggaggagaccagattcgccagactgtggatcctgacctggagcgtgctgtgctgcgccagcaccttcttcaccgtgaccacctacctggtggacatgcagagattcagataccccgagagacccatcatcttcctgagcggctgctacaccatggtgagcgtggcctacatcgccggcttcgtgctgcaggagagagtggtgtgcaacgagagattcagcgaggacggctacagaaccgtggtgcagggcaccaagaaggagggctgcaccatcctgttcatgatgctgtacttcttcagcatggccagcagcatctggtgggtgatcctgagcctgacctggttcctggccgccggcatgaagtggggccacgaggccatcgaggccaacagccagtacttccacctggccgcctgggccgtgcccgccgtgaagaccatcaccatcctggccatgggccagatcgacggcgacctgctgagcggcgtgtgcttcgtgggcctgaacagcctggaccccctgagaggcttcgtgctggcccccctgttcgtgtacctgttcatcggcaccagcttcctgctggccggcttcgtgagcctgttcagaatcagaaccatcatgaagcacgacggcaccaagaccgagaagctggagagactgatggtgagaatcggcgtgttcagcgtgctgtacaccgtgcccgccaccatcgtgatcgcctgctacttctacgagcaggccttcagagagcactgggagagaagctgggtgagccagcactgcaagagcctggccatcccctgccccgcccactacacccccagaatgagccccgacttcaccgtgtacatgatcaagtacctgatgaccctgatcgtgggcatcaccagcggcttctggatctggagcggcaagaccctgcacagctggagaaagttctacaccagactgaccaacagcagacacggcgagaccaccgtgtag

SEQ ID NO: 82103 - DNA, 1926 bp, synthetic construct
  misc_feature 1..1926: note = Description of Artificial Sequence: Synthetic coding sequence
  source 1..1926: mol_type = other DNA
gccagaggcgtgagcggctgcagcgtgagacccagacaggccagcggccaggcccacagacccctgcccagacccgccagccccaccctgagacccagagtgaagttcgccaagagaagaggcagaagacagccccagagaggcggcggcggcgaggaggcccagagccccggctggggcagaggcagaggcggcagacagggcgccggctggggcgccgccgccagcatgagacccagaagcgccctgcccagactgctgctgcccctgctgctgctgcccgccgccggccccgcccagttccacggcgagaagggcatcagcatccccgaccacggcttctgccagcccatcagcatccccctgtgcaccgacatcgcctacaaccagaccatcatgcccaacctgctgggccacaccaaccaggaggacgccggcctggaggtgcaccagttctaccccctggtgaaggtgcagtgcagccccgagctgagattcttcctgtgcagcatgtacgcccccgtgtgcaccgtgctggagcaggccatccccccctgcagaagcatctgcgagagagccagacagggctgcgaggccctgatgaacaagttcggcttccagtggcccgagagactgagatgcgagcacttccccagacacggcgccgagcagatctgcgtgggccagaaccacagcgaggacggcgcccccgccctgctgaccaccgcccccccccccggcctgcagcccggcgccggcggcacccccggcggccccggcggcggcggcgccccccccagatacgccaccctggagcaccccttccactgccccagagtgctgaaggtgcccagctacctgagctacaagttcctgggcgagagagactgcgccgccccctgcgagcccgccagacccgacggcagcatgttcttcagccaggaggagaccagattcgccagactgtggatcctgacctggagcgtgctgtgctgcgccagcaccttcttcaccgtgaccacctacctggtggacatgcagagattcagataccccgagagacccatcatcttcctgagcggctgctacaccatggtgagcgtggcctacatcgccggcttcgtgctgcaggagagagtggtgtgcaacgagagattcagcgaggacggctacagaaccgtggtgcagggcaccaagaaggagggctgcaccatcctgttcatgatgctgtacttcttcagcatggccagcagcatctggtgggtgatcctgagcctgacctggttcctggccgccggcatgaagtggggccacgaggccatcgaggccaacagccagtacttccacctggccgcctgggccgtgcccgccgtgaagaccatcaccatcctggccatgggccagatcgacggcgacctgctgagcggcgtgtgcttcgtgggcctgaacagcctggaccccctgagaggcttcgtgctggcccccctgttcgtgtacctgttcatcggcaccagcttcctgctggccggcttcgtgagcctgttcagaatcagaaccatcatgaagcacgacggcaccaagaccgagaagctggagagactgatggtgagaatcggcgtgttcagcgtgctgtacaccgtgcccgccaccatcgtgatcgcctgctacttctacgagcaggccttcagagagcactgggagagaagctgggtgagccagcactgcaagagcctggccatcccctgccccgcccactacacccccagaatgagccccgacttcaccgtgtacatgatcaagtacctgatgaccctgatcgtgggcatcaccagcggcttctggatctggagcggcaagaccctgcacagctggagaaagttctacaccagactgaccaacagcagacacggcgagaccaccgtgtag

SEQ ID NO: 82104 - DNA, 2001 bp, synthetic construct
  misc_feature 1..2001: note = Description of Artificial Sequence: Synthetic coding sequence
  source 1..2001: mol_type = other DNA
atggccatgacctggatcgtgttcagcctgtggcccctgaccgtgttcatgggccacatcggcggccacagcctgttcagctgcgagcccatcaccctgagaatgtgccaggacctgccctacaacaccaccttcatgcccaacctgctgaaccactacgaccagcagaccgccgccctggccatggagcccttccaccccatggtgaacctggactgcagcagagacttcagacccttcctgtgcgccctgtacgcccccatctgcatggagtacggcagagtgaccctgccctgcagaagactgtgccagagagcctacagcgagtgcagcaagctgatggagatgttcggcgtgccctggcccgaggacatggagtgcagcagattccccgactgcgacgagccctaccccagactggtggacctgaacctggccggcgagcccaccgagggcgcccccgtggccgtgcagagagactacggcttctggtgccccagagagctgaagatcgaccccgacctgggctacagcttcctgcacgtgagagactgcagccccccctgccccaacatgtacttcagaagagaggagctgagcttcgccagatacttcatcggcctgatcagcatcatctgcctgagcgccaccctgttcaccttcctgaccttcctgatcgacgtgaccagattcagataccccgagagacccatcatcttctacgccgtgtgctacatgatggtgagcctgatcttcttcatcggcttcctgctggaggacagagtggcctgcaacgccagcatccccgcccagtacaaggccagcaccgtgacccagggcagccacaacaaggcctgcaccatgctgttcatgatcctgtacttcttcaccatggccggcagcgtgtggtgggtgatcctgaccatcacctggttcctggccgccgtgcccaagtggggcagcgaggccatcgagaagaaggccctgctgttccacgccagcgcctggggcatccccggcaccctgaccatcatcctgctggccatgaacaagatcgagggcgacaacatcagcggcgtgtgcttcgtgggcctgtacgacgtggacgccctgagatacttcgtgctggcccccctgtgcctgtacgtggtggtgggcgtgagcctgctgctggccggcatcatcagcctgaacagagtgagaatcgagatccccctggagaaggagaaccaggacaagctggtgaagttcatgatcagaatcggcgtgttcagcatcctgtacctggtgcccctgctggtggtgatcggctgctacttctacgagcaggcctacagaggcatctgggagaccacctggatccaggagagatgcagagagtaccacatcccctgcccctaccaggtgacccagatgagcagacccgacctgatcctgttcctgatgaagtacctgatggccctgatcgtgggcatccccagcgtgttctgggtgggcagcaagaagacctgcttcgagtgggccagcttcttccacggcagaagaaagaaggagatcgtgaacgagagcagacaggtgctgcaggagcccgacttcgcccagagcctgctgagagaccccaacacccccatcatcagaaagagcagaggcaccagcacccagggcaccagcacccacgccagcagcacccagctggccatggtggacgaccagagaagcaaggccggcagcatccacagcaaggtgagcagctaccacggcagcctgcacagaagcagagacggcagatacaccccctgcagctacagaggcatggaggagagactgccccacggcagcatgagcagactgaccgaccacagcagacacagcagcagccacagactgaacgagcagagcagacacagcagcatcagagacctgagcaacaaccccatgacccacatcacccacggcaccagcatgaacagagtgatcgaggaggacggcaccagcgcctag

SEQ ID NO: 82105 - DNA, 108 bp, synthetic construct
  misc_feature 1..108: note = Description of Artificial Sequence: Synthetic coding sequence
  source 1..108: mol_type = other DNA
atggccatgacctggatcgtgttcagcctgtggcccctgaccgtgttcatgggccacatcggcggccacagcctgttcagctgcgagcccatcaccctgagaatgtag

SEQ ID NO: 82106 - DNA, 2001 bp, synthetic construct; identical to SEQ ID NO: 82104
  misc_feature 1..2001: note = Description of Artificial Sequence: Synthetic coding sequence
  source 1..2001: mol_type = other DNA

SEQ ID NO: 82107 - DNA, 1614 bp, synthetic construct
  misc_feature 1..1614: note = Description of Artificial Sequence: Synthetic coding sequence
  source 1..1614: mol_type = other DNA
atggcctggagaggcgccggccccagcgtgcccggcgcccccggcggcgtgggcctgagcctgggcctgctgctgcagctgctgctgctgctgggccccgccagaggcttcggcgacgaggaggagagaagatgcgaccccatcagaatcagcatgtgccagaacctgggctacaacgtgaccaagatgcccaacctggtgggccacgagctgcagaccgacgccgagctgcagctgaccaccttcacccccctgatccagtacggctgcagcagccagctgcagttcttcctgtgcagcgtgtacgtgcccatgtgcaccgagaagatcaacatccccatcggcccctgcggcggcatgtgcctgagcgtgaagagaagatgcgagcccgtgctgaaggagttcggcttcgcctggcccgagagcctgaactgcagcaagttccccccccagaacgaccacaaccacatgtgcatggagggccccggcgacgaggaggtgcccctgccccacaagacccccatccagcccggcgaggagtgccacagcgtgggcaccaacagcgaccagtacatctgggtgaagagaagcctgaactgcgtgctgaagtgcggctacgacgccggcctgtacagcagaagcgccaaggagttcaccgacatctggatggccgtgtgggccagcctgtgcttcatcagcaccgccttcaccgtgctgaccttcctgatcgacagcagcagattcagctaccccgagagacccatcatcttcctgagcatgtgctacaacatctacagcatcgcctacatcgtgagactgaccgtgggcagagagagaatcagctgcgacttcgaggaggccgccgagcccgtgctgatccaggagggcctgaagaacaccggctgcgccatcatcttcctgctgatgtacttcttcggcatggccagcagcatctggtgggtgatcctgaccctgacctggttcctggccgccggcctgaagtggggccacgaggccatcgagatgcacagcagctacttccacatcgccgcctgggccatccccgccgtgaagaccatcgtgatcctgatcatgagactggtggacgccgacgagctgaccggcctgtgctacgtgggcaaccagaacctggacgccctgaccggcttcgtggtggcccccctgttcacctacctggtgatcggcaccctgttcatcgccgccggcctggtggccctgttcaagatcagaagcaacctgcagaaggacggcaccaagaccgacaagctggagagactgatggtgaagatcggcgtgttcagcgtgctgtacaccgtgcccgccacctgcgtgatcgcctgctacttctacgagatcagcaactgggccctgttcagatacagcgccgacgacagcaacatggccgtggagatgctgaagatcttcatgagcctgctggtgggcatcaccagcggcatgtggatctggagcgccaagaccctgcacacctggcagaagtgcagcaacagactggtgaacagcggcaaggtgaagagagagaagagaggcaacggctgggtgaagcccggcaagggcagcgagaccgtggtgtag

SEQ ID NO: 82108 - DNA, 2121 bp, synthetic construct
  misc_feature 1..2121: note = Description of Artificial Sequence: Synthetic coding sequence
  source 1..2121: mol_type = other DNA
atggagatgttcaccttcctgctgacctgcatcttcctgcccctgctgagaggccacagcctgttcacctgcgagcccatcaccgtgcccagatgcatgaagatggcctacaacatgaccttcttccccaacctgatgggccactacgaccagagcatcgccgccgtggagatggagcacttcctgcccctggccaacctggagtgcagccccaacatcgagaccttcctgtgcaaggccttcgtgcccacctgcatcgagcagatccacgtggtgcccccctgcagaaagctgtgcgagaaggtgtacagcgactgcaagaagctgatcgacaccttcggcatcagatggcccgaggagctggagtgcgacagactgcagtactgcgacgagaccgtgcccgtgaccttcgacccccacaccgagttcctgggcccccagaagaagaccgagcaggtgcagagagacatcggcttctggtgccccagacacctgaagaccagcggcggccagggctacaagttcctgggcatcgaccagtgcgcccccccctgccccaacatgtacttcaagagcgacgagctggagttcgccaagagcttcatcggcaccgtgagcatcttctgcctgtgcgccaccctgttcaccttcctgaccttcctgatcgacgtgagaagattcagataccccgagagacccatcatctactacagcgtgtgctacagcatcgtgagcctgatgtacttcatcggcttcctgctgggcgacagcaccgcctgcaacaaggccgacgagaagctggagctgggcgacaccgtggtgctgggcagccagaacaaggcctgcaccgtgctgttcatgctgctgtacttcttcaccatggccggcaccgtgtggtgggtgatcctgaccatcacctggttcctggccgccggcagaaagtggagctgcgaggccatcgagcagaaggccgtgtggttccacgccgtggcctggggcacccccggcttcctgaccgtgatgctgctggccatgaacaaggtggagggcgacaacatcagcggcgtgtgcttcgtgggcctgtacgacctggacgccagcagatacttcgtgctgctgcccctgtgcctgtgcgtgttcgtgggcctgagcctgctgctggccggcatcatcagcctgaaccacgtgagacaggtgatccagcacgacggcagaaaccaggagaagctgaagaagttcatgatcagaatcggcgtgttcagcggcctgtacctggtgcccctggtgaccctgctgggctgctacgtgtacgagcaggtgaacagaatcacctgggagatcacctgggtgagcgaccactgcagacagtaccacatcccctgcccctaccaggccaaggccaaggccagacccgagctggccctgttcatgatcaagtacctgatgaccctgatcgtgggcatcagcgccgtgttctgggtgggcagcaagaagacctgcaccgagtgggccggcttcttcaagagaaacagaaagagagaccccatcagcgagagcagaagagtgctgcaggagagctgcgagttcttcctgaagcacaacagcaaggtgaagcacaagaagaagcactacaagcccagcagccacaagctgaaggtgatcagcaagagcatgggcaccagcaccggcgccaccgccaaccacggcaccagcgccgtggccatcaccagccacgactacctgggccaggagaccctgaccgagatccagaccagccccgagaccagcatgagagaggtgaaggccgacggcgccagcacccccagactgagagagcaggactgcggcgagcccgccagccccgccgccagcatcagcagactgagcggcgagcaggtggacggcaagggccaggccggcagcgtgagcgagagcgccagaagcgagggcagaatcagccccaagagcgacatcaccgacaccggcctggcccagagcaacaacctgcaggtgcccagcagcagcgagcccagcagcctgaagggcagcaccagcctgctggtgcaccccgtgagcggcgtgagaaaggagcagggcggcggctgccacagcgacacctag

SEQ ID NO: 82109 - DNA, 2121 bp, synthetic construct; identical to SEQ ID NO: 82108
  misc_feature 1..2121: note = Description of Artificial Sequence: Synthetic coding sequence
  source 1..2121: mol_type = other DNA

SEQ ID NO: 82110 - DNA, 2025 bp, synthetic construct
  misc_feature 1..2025: note = Description of Artificial Sequence: Synthetic coding sequence
  source 1..2025: mol_type = other DNA
atgaagatggcctacaacatgaccttcttccccaacctgatgggccactacgaccagagcatcgccgccgtggagatggagcacttcctgcccctggccaacctggagtgcagccccaacatcgagaccttcctgtgcaaggccttcgtgcccacctgcatcgagcagatccacgtggtgcccccctgcagaaagctgtgcgagaaggtgtacagcgactgcaagaagctgatcgacaccttcggcatcagatggcccgaggagctggagtgcgacagactgcagtactgcgacgagaccgtgcccgtgaccttcgacccccacaccgagttcctgggcccccagaagaagaccgagcaggtgcagagagacatcggcttctggtgccccagacacctgaagaccagcggcggccagggctacaagttcctgggcatcgaccagtgcgcccccccctgccccaacatgtacttcaagagcgacgagctggagttcgccaagagcttcatcggcaccgtgagcatcttctgcctgtgcgccaccctgttcaccttcctgaccttcctgatcgacgtgagaagattcagataccccgagagacccatcatctactacagcgtgtgctacagcatcgtgagcctgatgtacttcatcggcttcctgctgggcgacagcaccgcctgcaacaaggccgacgagaagctggagctgggcgacaccgtggtgctgggcagccagaacaaggcctgcaccgtgctgttcatgctgctgtacttcttcaccatggccggcaccgtgtggtgggtgatcctgaccatcacctggttcctggccgccggcagaaagtggagctgcgaggccatcgagcagaaggccgtgtggttccacgccgtggcctggggcacccccggcttcctgaccgtgatgctgctggccatgaacaaggtggagggcgacaacatcagcggcgtgtgcttcgtgggcctgtacgacctggacgccagcagatacttcgtgctgctgcccctgtgcctgtgcgtgttcgtgggcctgagcctgctgctggccggcatcatcagcctgaaccacgtgagacaggtgatccagcacgacggcagaaaccaggagaagctgaagaagttcatgatcagaatcggcgtgttcagcggcctgtacctggtgcccctggtgaccctgctgggctgctacgtgtacgagcaggtgaacagaatcacctgggagatcacctgggtgagcgaccactgcagacagtaccacatcccctgcccctaccaggccaaggccaaggccagacccgagctggccctgttcatgatcaagtacctgatgaccctgatcgtgggcatcagcgccgtgttctgggtgggcagcaagaagacctgcaccgagtgggccggcttcttcaagagaaacagaaagagagaccccatcagcgagagcagaagagtgctgcaggagagctgcgagttcttcctgaagcacaacagcaaggtgaagcacaagaagaagcactacaagcccagcagccacaagctgaaggtgatcagcaagagcatgggcaccagcaccggcgccaccgccaaccacggcaccagcgccgtggccatcaccagccacgactacctgggccaggagaccctgaccgagatccagaccagccccgagaccagcatgagagaggtgaaggccgacggcgccagcacccccagactgagagagcaggactgcggcgagcccgccagccccgccgccagcatcagcagactgagcggcgagcaggtggacggcaagggccaggccggcagcgtgagcgagagcgccagaagcgagggcagaatcagccccaagagcgacatcaccgacaccggcctggcccagagcaacaacctgcaggtgcccagcagcagcgagcccagcagcctgaagggcagcaccagcctgctggtgcaccccgtgagcggcgtgagaaaggagcagggcggcggctgccacagcgacacctag

SEQ ID NO: 82111 - DNA, 1956 bp, synthetic construct
  misc_feature 1..1956: note = Description of Artificial Sequence: Synthetic coding sequence
  source 1..1956: mol_type = other DNA
atgctggcccagcacttcctgcccctggccaacctggagtgcagccccaacatcgagaccttcctgtgcaaggccttcgtgcccacctgcatcgagcagatccacgtggtgcccccctgcagaaagctgtgcgagaaggtgtacagcgactgcaagaagctgatcgacaccttcggcatcagatggcccgaggagctggagtgcgacagactgcagtactgcgacgagaccgtgcccgtgaccttcgacccccacaccgagttcctgggcccccagaagaagaccgagcaggtgcagagagacatcggcttctggtgccccagacacctgaagaccagcggcggccagggctacaagttcctgggcatcgaccagtgcgcccccccctgccccaacatgtacttcaagagcgacgagctggagttcgccaagagcttcatcggcaccgtgagcatcttctgcctgtgcgccaccctgttcaccttcctgaccttcctgatcgacgtgagaagattcagataccccgagagacccatcatctactacagcgtgtgctacagcatcgtgagcctgatgtacttcatcggcttcctgctgggcgacagcaccgcctgcaacaaggccgacgagaagctggagctgggcgacaccgtggtgctgggcagccagaacaaggcctgcaccgtgctgttcatgctgctgtacttcttcaccatggccggcaccgtgtggtgggtgatcctgaccatcacctggttcctggccgccggcagaaagtggagctgcgaggccatcgagcagaaggccgtgtggttccacgccgtggcctggggcacccccggcttcctgaccgtgatgctgctggccatgaacaaggtggagggcgacaacatcagcggcgtgtgcttcgtgggcctgtacgacctggacgccagcagatacttcgtgctgctgcccctgtgcctgtgcgtgttcgtgggcctgagcctgctgctggccggcatcatcagcctgaaccacgtgagacaggtgatccagcacgacggcagaaaccaggagaagctgaagaagttcatgatcagaatcggcgtgttcagcggcctgtacctggtgcccctggtgaccctgctgggctgctacgtgtacgagcaggtgaacagaatcacctgggagatcacctgggtgagcgaccactgcagacagtaccacatcccctgcccctaccaggccaaggccaaggccagacccgagctggccctgttcatgatcaagtacctgatgaccctgatcgtgggcatcagcgccgtgttctgggtgggcagcaagaagacctgcaccgagtgggccggcttcttcaagagaaacagaaagagagaccccatcagcgagagcagaagagtgctgcaggagagctgcgagttcttcctgaagcacaacagcaaggtgaagcacaagaagaagcactacaagcccagcagccacaagctgaaggtgatcagcaagagcatgggcaccagcaccggcgccaccgccaaccacggcaccagcgccgtggccatcaccagccacgactacctgggccaggagaccctgaccgagatccagaccagccccgagaccagcatgagagaggtgaaggccgacggcgccagcacccccagactgagagagcaggactgcggcgagcccgccagccccgccgccagcatcagcagactgagcggcgagcaggtggacggcaagggccaggccggcagcgtgagcgagagcgccagaagcgagggcagaatcagccccaagagcgacatcaccgacaccggcctggcccagagcaacaacctgcaggtgcccagcagcagcgagcccagcagcctgaagggcagcaccagcctgctggtgcaccccgtgagcggcgtgagaaaggagcagggcggcggctgccacagcgacacctag

SEQ ID NO: 82112 - DNA, 1206 bp, synthetic construct
  misc_feature 1..1206: note = Description of Artificial Sequence: Synthetic coding sequence
  source 1..1206: mol_type = other DNA
atgaccagagtgctgcccagatggaagtggagctgcgaggccatcgagcagaaggccgtgtggttccacgccgtggcctggggcacccccggcttcctgaccgtgatgctgctggccatgaacaaggtggagggcgacaacatcagcggcgtgtgcttcgtgggcctgtacgacctggacgccagcagatacttcgtgctgctgcccctgtgcctgtgcgtgttcgtgggcctgagcctgctgctggccggcatcatcagcctgaaccacgtgagacaggtgatccagcacgacggcagaaaccaggagaagctgaagaagttcatgatcagaatcggcgtgttcagcggcctgtacctggtgcccctggtgaccctgctgggctgctacgtgtacgagcaggtgaacagaatcacctgggagatcacctgggtgagcgaccactgcagacagtaccacatcccctgcccctaccaggccaaggccaaggccagacccgagctggccctgttcatgatcaagtacctgatgaccctgatcgtgggcatcagcgccgtgttctgggtgggcagcaagaagacctgcaccgagtgggccggcttcttcaagagaaacagaaagagagaccccatcagcgagagcagaagagtgctgcaggagagctgcgagttcttcctgaagcacaacagcaaggtgaagcacaagaagaagcactacaagcccagcagccacaagctgaaggtgatcagcaagagcatgggcaccagcaccggcgccaccgccaaccacggcaccagcgccgtggccatcaccagccacgactacctgggccaggagaccctgaccgagatccagaccagccccgagaccagcatgagagaggtgaaggccgacggcgccagcacccccagactgagagagcaggactgcggcgagcccgccagccccgccgccagcatcagcagactgagcggcgagcaggtggacggcaagggccaggccggcagcgtgagcgagagcgccagaagcgagggcagaatcagccccaagagcgacatcaccgacaccggcctggcccagagcaacaacctgcaggtgcccagcagcagcgagcccagcagcctgaagggcagcaccagcctgctggtgcaccccgtgagcggcgtgagaaaggagcagggcggcggctgccacagcgacacctag

SEQ ID NO: 82113 - DNA, 2085 bp, synthetic construct
  misc_feature 1..2085: note = Description of Artificial Sequence: Synthetic coding sequence
  source 1..2085: mol_type = other DNA
atggagtggggctacctgctggaggtgaccagcctgctggccgccctggccctgctgcagagaagcagcggcgccgccgccgccagcgccaaggagctggcctgccaggagatcaccgtgcccctgtgcaagggcatcggctacaactacacctacatgcccaaccagttcaaccacgacacccaggacgaggccggcctggaggtgcaccagttctggcccctggtggagatccagtgcagccccgacctgaagttcttcctgtgcagcatgtacacccccatctgcctggaggactacaagaagcccctgcccccctgcagaagcgtgtgcgagagagccaaggccggctgcgcccccctgatgagacagtacggcttcgcctggcccgacagaatgagatgcgacagactgcccgagcagggcaaccccgacaccctgtgcatggactacaacagaaccgacctgaccaccgccgcccccagcccccccagaagactgcccccccccccccccggcgagcagccccccagcggcagcggccacggcagaccccccggcgccagacccccccacagaggcggcggcagaggcggcggcggcggcgacgccgccgccccccccgccagaggcggcggcggcggcggcaaggccagaccccccggcggcggcgccgccccctgcgagcccggctgccagtgcagagcccccatggtgagcgtgagcagcgagagacaccccctgtacaacagagtgaagaccggccagatcgccaactgcgccctgccctgccacaaccccttcttcagccaggacgagagagccttcaccgtgttctggatcggcctgtggagcgtgctgtgcttcgtgagcaccttcgccaccgtgagcaccttcctgatcgacatggagagattcaagtaccccgagagacccatcatcttcctgagcgcctgctacctgttcgtgagcgtgggctacctggtgagactggtggccggccacgagaaggtggcctgcagcggcggcgcccccggcgccggcggcgccggcggcgccggcggcgccgccgccggcgccggcgccgccggcgccggcgccggcggccccggcggcagaggcgagtacgaggagctgggcgccgtggagcagcacgtgagatacgagaccaccggccccgccctgtgcaccgtggtgttcctgctggtgtacttcttcggcatggccagcagcatctggtgggtgatcctgagcctgacctggttcctggccgccggcatgaagtggggcaacgaggccatcgccggctacagccagtacttccacctggccgcctggctggtgcccagcgtgaagagcatcgccgtgctggccctgagcagcgtggacggcgaccccgtggccggcatctgctacgtgggcaaccagagcctggacaacctgagaggcttcgtgctggcccccctggtgatctacctgttcatcggcaccatgttcctgctggccggcttcgtgagcctgttcagaatcagaagcgtgatcaagcagcaggacggccccaccaagacccacaagctggagaagctgatgatcagactgggcctgttcaccgtgctgtacaccgtgcccgccgccgtggtggtggcctgcctgttctacgagcagcacaacagacccagatgggaggccacccacaactgcccctgcctgagagacctgcagcccgaccaggccagaagacccgactacgccgtgttcatgctgaagtacttcatgtgcctggtggtgggcatcaccagcggcgtgtgggtgtggagcggcaagaccctggagagctggagaagcctgtgcaccagatgctgctgggccagcaagggcgccgccgtgggcggcggcgccggcgccaccgccgccggcggcggcggcggccccggcggcggcggcggcggcggccccggcggcggcggcggccccggcggcggcggcggcagcctgtacagcgacgtgagcaccggcctgacctggagaagcggcaccgccagcagcgtgagctaccccaagcagatgcccctgagccaggtgtag

SEQ ID NO: 82114 - DNA, 1776 bp, synthetic construct
  misc_feature 1..1776: note = Description of Artificial Sequence: Synthetic coding sequence
  source 1..1776: mol_type = other DNA
atggccgtggcccccctgagaggcgccctgctgctgtggcagctgctggccgccggcggcgccgccctggagatcggcagattcgaccccgagagaggcagaggcgccgccccctgccaggccgtggagatccccatgtgcagaggcatcggctacaacctgaccagaatgcccaacctgctgggccacaccagccagggcgaggccgccgccgagctggccgagttcgcccccctggtgcagtacggctgccacagccacctgagattcttcctgtgcagcctgtacgcccccatgtgcaccgaccaggtgagcacccccatccccgcctgcagacccatgtgcgagcaggccagactgagatgcgcccccatcatggagcagttcaacttcggctggcccgacagcctggactgcgccagactgcccaccagaaacgacccccacgccctgtgcatggaggcccccgagaacgccaccgccggccccgccgagccccacaagggcctgggcatgctgcccgtggcccccagacccgccagaccccccggcgacctgggccccggcgccggcggcagcggcacctgcgagaaccccgagaagttccagtacgtggagaagagcagaagctgcgcccccagatgcggccccggcgtggaggtgttctggagcagaagagacaaggacttcgccctggtgtggatggccgtgtggagcgccctgtgcttcttcagcaccgccttcaccgtgctgaccttcctgctggagccccacagattccagtaccccgagagacccatcatcttcctgagcatgtgctacaacgtgtacagcctggccttcctgatcagagccgtggccggcgcccagagcgtggcctgcgaccaggaggccggcgccctgtacgtgatccaggagggcctggagaacaccggctgcaccctggtgttcctgctgctgtactacttcggcatggccagcagcctgtggtgggtggtgctgaccctgacctggttcctggccgccggcaagaagtggggccacgaggccatcgaggcccacggcagctacttccacatggccgcctggggcctgcccgccctgaagaccatcgtgatcctgaccctgagaaaggtggccggcgacgagctgaccggcctgtgctacgtggccagcaccgacgccgccgccctgaccggcttcgtgctggtgcccctgagcggctacctggtgctgggcagcagcttcctgctgaccggcttcgtggccctgttccacatcagaaagatcatgaagaccggcggcaccaacaccgagaagctggagaagctgatggtgaagatcggcgtgttcagcatcctgtacaccgtgcccgccacctgcgtgatcgtgtgctacgtgtacgagagactgaacatggacttctggagactgagagccaccgagcagccctgcgccgccgccgccggccccggcggcagaagagactgcagcctgcccggcggcagcgtgcccaccgtggccgtgttcatgctgaagatcttcatgagcctggtggtgggcatcaccagcggcgtgtgggtgtggagcagcaagaccttccagacctggcagagcctgtgctacagaaagatcgccgccggcagagccagagccaaggcctgcagagcccccggcagctacggcagaggcacccactgccactacaaggcccccaccgtggtgctgcacatgaccaagaccgaccccagcctggagaaccccacccacctgtag

SEQ ID NO: 82115 - DNA, 978 bp, synthetic construct
  misc_feature 1..978: note = Description of Artificial Sequence: Synthetic coding sequence
  source 1..978: mol_type = other DNA
atggtgtgcggcagccccggcggcatgctgctgctgagagccggcctgctggccctggccgccctgtgcctgctgagagtgcccggcgccagagccgccgcctgcgagcccgtgagaatccccctgtgcaagagcctgccctggaacatgaccaagatgcccaaccacctgcaccacagcacccaggccaacgccatcctggccatcgagcagttcgagggcctgctgggcacccactgcagccccgacctgctgttcttcctgtgcgccatgtacgcccccatctgcaccatcgacttccagcacgagcccatcaagccctgcaagagcgtgtgcgagagagccagacagggctgcgagcccatcctgatcaagtacagacacagctggcccgagaacctggcctgcgaggagctgcccgtgtacgacagaggcgtgtgcatcagccccgaggccatcgtgaccgccgacggcgccgacttccccatggacagcagcaacggcaactgcagaggcgccagcagcgagagatgcaagtgcaagcccatcagagccacccagaagacctacttcagaaacaactacaactacgtgatcagagccaaggtgaaggagatcaagaccaagtgccacgacgtgaccgccgtggtggaggtgaaggagatcctgaagagcagcctggtgaacatccccagagacaccgtgaacctgtacaccagcagcggctgcctgtgcccccccctgaacgtgaacgaggagtacatcatcatgggctacgaggacgaggagagaagcagactgctgctggtggagggcagcatcgccgagaagtggaaggacagactgggcaagaaggtgaagagatgggacatgaagctgagacacctgggcctgagcaagagcgacagcagcaacagcgacagcacccagagccagaagagcggcagaaacagcaaccccagacaggccagaaactag

SEQ ID NO: 82116 - DNA, 930 bp, synthetic construct
  misc_feature 1..930: note = Description of Artificial Sequence: Synthetic coding sequence
  source 1..930: mol_type = other DNA
atggaggagctgctgagaagagagctgggctgcagcagcgtgagagccaccggccacagcggcggcggctgcatcagccagggcagaagctacgacaccgaccagggcagagtgttcgtgaaggtgaaccccaaggccgaggccagaagaatgttcgagggcgagatggccagcctgaccgccatcctgaagaccaacaccgtgaaggtgcccaagcccatcaaggtgctggacgcccccggcggcggcagcgtgctggtgatggagcacatggacatgagacacctgagcagccacgccgccaagctgggcgcccagctggccgacctgcacctggacaacaagaagctgggcgagatgagactgaaggaggccggcaccgtgggcagaggcggcggccaggaggagagacccttcgtggccagattcggcttcgacgtggtgacctgctgcggctacctgccccaggtgaacgactggcaggaggactgggtggtgttctacgccagacagagaatccagccccagatggacatggtggagaaggagagcggcgacagagaggccctgcagctgtggagcgccctgcagctgaagatccccgacctgttcagagacctggagatcatccccgccctgctgcacggcgacctgtggggcggcaacgtggccgaggacagcagcggccccgtgatcttcgaccccgccagcttctacggccacagcgagtacgagctggccatcgccggcatgttcggcggcttcagcagcagcttctacagcgcctaccacggcaagatccccaaggcccccggcttcgagaagagactgcagctgtaccagctgttccactacctgaaccactggaaccacttcggcagcggctacagaggcagcagcctgaacatcatgagaaacctggtgaagtag

SEQ ID NO: 82117 - DNA, 780 bp, synthetic construct
  misc_feature 1..780: note = Description of Artificial Sequence: Synthetic coding sequence
  source 1..780: mol_type = other DNA
atgttcgagggcgagatggccagcctgaccgccatcctgaagaccaacaccgtgaaggtgcccaagcccatcaaggtgctggacgcccccggcggcggcagcgtgctggtgatggagcacatggacatgagacacctgagcagccacgccgccaagctgggcgcccagctggccgacctgcacctggacaacaagaagctgggcgagatgagactgaaggaggccggcaccgtgggcagaggcggcggccaggaggagagacccttcgtggccagattcggcttcgacgtggtgacctgctgcggctacctgccccaggtgaacgactggcaggaggactgggtggtgttctacgccagacagagaatccagccccagatggacatggtggagaaggagagcggcgacagagaggccctgcagctgtggagcgccctgcagctgaagatccccgacctgttcagagacctggagatcatccccgccctgctgcacggcgacctgtggggcggcaacgtggccgaggacagcagcggccccgtgatcttcgaccccgccagcttctacggccacagcgagtacgagctggccatcgccggcatgttcggcggcttcagcagcagcttctacagcgcctaccacggcaagatccccaaggcccccggcttcgagaagagactgcagctgtaccagctgttccactacctgaaccactggaaccacttcggcagcggctacagaggcagcagcctgaacatcatgagaaacctggtgaagtag

SEQ ID NO: 82118 - DNA, 1017 bp, synthetic construct
  misc_feature 1..1017: note = Description of Artificial Sequence: Synthetic coding sequence
  source 1..1017: mol_type = other DNA
atggccgaccaggcccccttcgacaccgacgtgaacaccctgaccagattcgtgatggaggagggcagaaaggccagaggcaccggcgagctgacccagctgctgaacagcctgtgcaccgccgtgaaggccatcagcagcgccgtgagaaaggccggcatcgcccacctgtacggcatcgccggcagcaccaacgtgaccggcgaccaggtgaagaagctggacgtgctgagcaacgacctggtgatgaacatgctgaagagcagcttcgccacctgcgtgctggtgagcgaggaggacaagcacgccatcatcgtggagcccgagaagagaggcaagtacgtggtgtgcttcgaccccctggacggcagcagcaacatcgactgcctggtgagcgtgggcaccatcttcggcatctacagaaagaagagcaccgacgagcccagcgagaaggacgccctgcagcccggcagaaacctggtggccgccggctacgccctgtacggcagcgccaccatgctggtgctggccatggactgcggcgtgaactgcttcatgctggaccccgccatcggcgagttcatcctggtggacaaggacgtgaagatcaagaagaagggcaagatctacagcctgaacgagggctacgccagagacttcgaccccgccgtgaccgagtacatccagagaaagaagttcccccccgacaacagcgccccctacggcgccagatacgtgggcagcatggtggccgacgtgcacagaaccctggtgtacggcggcatcttcctgtaccccgccaacaagaagagccccaacggcaagctgagactgctgtacgagtgcaaccccatggcctacgtgatggagaaggccggcggcatggccaccaccggcaaggaggccgtgctggacgtgatccccaccgacatccaccagagagcccccgtgatcctgggcagccccgacgacgtgctggagttcctgaaggtgtacgagaagcacagcgcccagtag

SEQ ID NO: 82119 - DNA, 456 bp, synthetic construct
  misc_feature 1..456: note = Description of Artificial Sequence: Synthetic coding sequence
  source 1..456: mol_type = other DNA
atgctgaagagcagcttcgccacctgcgtgctggtgagcgaggaggacaagcacgccatcatcgtggagcccgagaagagaggcaagtacgtggtgtgcttcgaccccctggacggcagcagcaacatcgactgcctggtgagcgtgggcaccatcttcggcatctacagaaagaagagcaccgacgagcccagcgagaaggacgccctgcagcccggcagaaacctggtggccgccggctacgccctgtacggcagcgccaccatgctggtgctggccatggactgcggcgtgaactgcttcatgctggaccccgccatcggcgagttcatcctggtggacaaggacgtgaagatcaagaagaagggcaagatctacagcctgaacgagggctacgccagagacttcgaccccgccgtgaccgagtacatccagagaaagaagttccccccctag

SEQ ID NO: 82120 - DNA, 1017 bp, synthetic construct; identical to SEQ ID NO: 82118
  misc_feature 1..1017: note = Description of Artificial Sequence: Synthetic coding sequence
  source 1..1017: mol_type = other DNA

SEQ ID NO: 82121 - DNA, 1020 bp, synthetic construct
  misc_feature 1..1020: note = Description of Artificial Sequence: Synthetic coding sequence
  source 1..1020: mol_type = other DNA
atgaccgacagaagccccttcgagaccgacatgctgaccctgaccagatacgtgatggagaagggcagacaggccaagggcaccggcgagctgacccagctgctgaacagcatgctgaccgccatcaaggccatcagcagcgccgtgagaaaggccggcctggcccacctgtacggcatcgccggcagcgtgaacgtgaccggcgacgaggtgaagaagctggacgtgctgagcaacagcctggtgatcaacatggtgcagagcagctacagcacctgcgtgctggtgagcgaggagaacaaggacgccatcatcaccgccaaggagaagagaggcaagtacgtggtgtgcttcgaccccctggacggcagcagcaacatcgactgcctggccagcatcggcaccatcttcgccatctacagaaagaccagcgaggacgagcccagcgagaaggacgccctgcagtgcggcagaaacatcgtggccgccggctacgccctgtacggcagcgccaccctggtggccctgagcaccggccagggcgtggacctgttcatgctggaccccgccctgggcgagttcgtgctggtggagaaggacgtgaagatcaagaagaagggcaagatctacagcctgaacgagggctacgccaagtacttcgacgccgccaccaccgagtacgtgcagaagaagaagttccccgaggacggcagcgccccctacggcgccagatacgtgggcagcatggtggccgacgtgcacagaaccctggtgtacggcggcatcttcctgtaccccgccaaccagaagagccccaagggcaagctgagactgctgtacgagtgcaaccccgtggcctacatcatcgagcaggccggcggcctggccaccaccggcacccagcccgtgctggacgtgaagcccgaggccatccaccagagagtgcccctgatcctgggcagccccgaggacgtgcaggagtacctgacctgcgtgcagaagaaccaggccggcagctag

SEQ ID NO: 82122 - DNA, 837 bp, synthetic construct
  misc_feature 1..837: note = Description of Artificial Sequence: Synthetic coding sequence
  source 1..837: mol_type = other DNA
atgggcaagggcaacgaggacagcgacctgcactgcagcagcatccagtgcagcaccgaccagccccccttccagcagatcagcttcaccgagaagggcagcgacgagaagaagcccttcaaggagaagggcaagaccgccttcagccacagcagcgagaagcacatccagagacagggcagcgagcccaaccccaacaaggagaacagcgaggagaccaagctgaaggccggcaacagcaccgccggcagcgagcccgagagcagcagctacagagagaactgcagaaagagaaagatgagcagcaaggacagctgccaggacaccgccggcaactgccccgagaaggagtgcagcctgagcctgaacaagaagagcagaagcagcaccgccgtgcacaacagcgagatccaggagacctgcgacgcccaccacagaggccacagcagagcctgcaccggccacagcaagagacacagaagcagagccctgggcgtgcagacccccagcatcagaaagagcctggtgaccagcgtgagagccatgagcgaggccgtgtaccaggacctggcccaggtgtgggcccagcagatccacagccccctgacctgcgagcagctgaccctgctgaccagactgagaggccccctgtgcgcccaggtgcagaccctgtacagcatggccacccaggccgcctacgtgttccccgccgagagctggctggtgcccgccaccctgcccggccccggcgagagcgccctggacagagaggcccaccccttccccggccaggagatcaccgagaccgtgagcggcagcgacgaggccaagctgtag

SEQ ID NO: 82123 - DNA, 984 bp, synthetic construct
  misc_feature 1..984: note = Description of Artificial Sequence: Synthetic coding sequence
  source 1..984: mol_type = other DNA
atgggcagaaccagcaaggacaagagagacgtgtactacagactggccaaggagaacggctggagagccagaagcgccttcaagctgctgcagctggacaaggagttccagctgttccagggcgtgaccagagccgtggacctgtgcgccgcccccggcagctggagccaggtgctgagccagaagatcggcggccagggcagcggccacgtggtggccgtggacctgcaggccatggcccccctgcccggcgtggtgcagatccagggcgacatcacccagctgagcaccgccaaggagatcatccagcacttcaagggctgccccgccgacctggtggtgtgcgacggcgcccccgacgtgaccggcctgcacgacgtggacgagtacatgcaggcccagctgctgctggccgccctgaacatcgccacccacgtgctgaagcccggcggctgcttcgtggccaagatcttcagaggcagagacgtgaccctgctgtacagccagctgcaggtgttcttcagcagcgtgctgtgcgccaagcccagaagcagcagaaacagcagcatcgaggccttcgccgtgtgccagggctacgacccccccgagggcttcatccccgacctgagcaagcccctgctggaccacagctacgacttcaaccagctggacggccccaccagaatcatcgtgcccttcgtgacctgcggcgacctgagcagctacgacagcgacagaagctaccccctggacctggagggcggcagcgagtacaagtacaccccccccacccagccccccatcagccccccctaccaggaggcctgcaccctgaagagaaagggccagctggccaaggagatcagaccccaggactgccccatcagcagagtggacaccttcccccagcccctggccgccccccagtgccacaccctgctggcccccgagatggaggacaacgagatgagctgcagcccctag

SEQ ID NO: 82124 - DNA, 990 bp, synthetic construct
  misc_feature 1..990: note = Description of Artificial Sequence: Synthetic coding sequence
  source 1..990: mol_type = other DNA
atgggcagaaccagcaaggacaagagagacgtgtactacagactggccaaggagaacggctggagagccagaagcgccttcaagctgctgcagctggacaaggagttccagctgttccagggcgtgaccagagccgtggacctgtgcgccgcccccggcagctggagccaggtgctgagccagaagatcggcggccagggcagcggccacgtggtggccgtggacctgcaggccatggcccccctgcccggcgtggtgcagatccagggcgacatcacccagctgagcaccgccaaggagatcatccagcacttcaagggctgccccgccgacctggtggtgtgcgacggcgcccccgacgtgaccggcctgcacgacgtggacgagtacatgcaggcccagctgctgctggccgccctgaacatcgccacccacgtgctgaagcccggcggctgcttcgtggccaagatcttcagaggcagagacgtgaccctgctgtacagccagctgcaggtgttcttcagcagcgtgctgtgcgccaagcccagaagcagcagaaacagcagcatcgaggccttcgccgtgtgccagggctacgacccccccgagggcttcatccccgacctgagcaagcccctgctggaccacagctacgaccccgacttcaaccagctggacggccccaccagaatcatcgtgcccttcgtgacctgcggcgacctgagcagctacgacagcgacagaagctaccccctggacctggagggcggcagcgagtacaagtacaccccccccacccagccccccatcagccccccctaccaggaggcctgcaccctgaagagaaagggccagctggccaaggagatcagaccccaggactgccccatcagcagagtggacaccttcccccagcccctggccgccccccagtgccacaccctgctggcccccgagatggaggacaacgagatgagctgcagcccctag

SEQ ID NO: 82125 - DNA, 579 bp, synthetic construct
  misc_feature 1..579: note = Description of Artificial Sequence: Synthetic coding sequence
  source 1..579: mol_type = other DNA
atggccctgaacatcgccacccacgtgctgaagcccggcggctgcttcgtggccaagatcttcagaggcagagacgtgaccctgctgtacagccagctgcaggtgttcttcagcagcgtgctgtgcgccaagcccagaagcagcagaaacagcagcatcgaggccttcgccgtgtgccagggctacgacccccccgagggcttcatccccgacctgagcaagcccctgctggaccacagctacgaccccgacttcaaccagctggacggccccaccagaatcatcgtgcccttcgtgacctgcggcgacctgagcagctacgacagcgacagaagctaccccctggacctggagggcggcagcgagtacaagtacaccccccccacccagccccccatcagccccccctaccaggaggcctgcaccctgaagagaaagggccagctggccaaggagatcagaccccaggactgccccatcagcagagtggacaccttcccccagcccctggccgccccccagtgccacaccctgctggcccccgagatggaggacaacgagatgagctgcagcccctag

SEQ ID NO: 82126 - DNA, 984 bp, synthetic construct; identical to SEQ ID NO: 82123
  misc_feature 1..984: note = Description of Artificial Sequence: Synthetic coding sequence
  source 1..984: mol_type = other DNA

SEQ ID NO: 82127 - DNA, 741 bp, synthetic construct
  misc_feature 1..741: note = Description of Artificial Sequence: Synthetic coding sequence
  source 1..741: mol_type = other DNA
atggccggctacctgaagctggtgtgcgtgagcttccagagacagggcttccacaccgtgggcagcagatgcaagaacagaaccggcgccgagcacctgtggctgaccagacacctgagagaccccttcgtgaaggccgccaaggtggagagctacagatgcagaagcgccttcaagctgctggaggtgaacgagagacaccagatcctgagacccggcctgagagtgctggactgcggcgccgcccccggcgcctggagccaggtggccgtgcagaaggtgaacgccgccggcaccgaccccagcagccccgtgggcttcgtgctgggcgtggacctgctgcacatcttccccctggagggcgccaccttcctgtgccccgccgacgtgaccgaccccagaaccagccagagaatcctggaggtgctgcccggcagaagagccgacgtgatcctgagcgacatggcccccaacgccaccggcttcagagacctggaccacgacagactgatcagcctgtgcctgaccctgctgagcgtgacccccgacatcctgcagcccggcggcaccttcctgtgcaagacctgggccggcagccagagcagaagactgcagagaagactgaccgaggagttccagaacgtgagaatcatcaagcccgaggccagcagaaaggagagcagcgaggtgtacttcctggccacccagtaccacggcagaaagggcaccgtgaagcagtag

SEQ ID NO: 82128 - DNA, 438 bp, synthetic construct
  misc_feature 1..438: note = Description of Artificial Sequence: Synthetic coding sequence
  source 1..438: mol_type = other DNA
atggccggctacctgaagctggtgtgcgtgagcttccagagacagggcttccacaccgtgggcagcagatgcaagaacagaaccggcgccgagcacctgtggctgaccagacacctgagagaccccttcgtgaaggccgccaaggtggagagctacagatgcagaagcgccttcaagctgctggaggtgaacgagagacaccagatcctgagacccggcctgagagtgctggactgcggcgccgcccccggcgcctggagccaggtggccgtgcagaaggtgaacgccgccggcaccgacggcgtgagcctgctgcccagactgcagtgcaacggcgtgatcagcgcccactgcaacctgtgcctgcccggcagcagcgacagccccgccagcgccagccagatccccgccctgctgctggccagctgcctgggctag

SEQ ID NO: 82129 - DNA, 768 bp, synthetic construct
  misc_feature 1..768: note = Description of Artificial Sequence: Synthetic coding sequence
  source 1..768: mol_type = other DNA
atgcccgagctgtacgacctggtgaacagctacaagcccgacctgatctggagcgacggcgagtgggagtgccccgacacctactggaacagcaccaacttcctgagctggctgtacaacgacagccccgtgaaggacgaggtggtggtgaacgacagatggggccagaactgcagctgccaccacggcggctactacaactgcgaggacaagttcaagccccagagcctgcccgaccacaagtgggagatgtgcaccagcatcgacaagttcagctggggctacagaagagacatggccctgagcgacgtgaccgaggagagcgagatcatcagcgagctggtgcagaccgtgagcctgggcggcaactacctgctgaacatcggccccaccaaggacggcctgatcgtgcccatcttccaggagagactgctggccgtgggcaagtggctgagcatcaacggcgaggccatctacgccagcaagccctggagagtgcagtgggagaagaacaccaccagcgtgtggtacaccagcaagggcagcgccgtgtacgccatcttcctgcactggcccgagaacggcgtgctgaacctggagagccccatcaccaccagcaccaccaagatcaccatgctgggcatccagggcgacctgaagtggagcaccgaccccgacaagggcctgttcatcagcctgccccagctgccccccagcgccgtgcccgccgagttcgcctggaccatcaagctgaccggcgtgaagtag

SEQ ID NO: 82130 - DNA, 1401 bp, synthetic construct
  misc_feature 1..1401: note = Description of Artificial Sequence: Synthetic coding sequence
  source 1..1401: mol_type = other DNA
atgagagcccccggcatgagaagcagacccgccggccccgccctgctgctgctgctgctgttcctgggcgccgccgagagcgtgagaagagcccagccccccagaagatacacccccgactggcccagcctggacagcagacccctgcccgcctggttcgacgaggccaagttcggcgtgttcatccactggggcgtgttcagcgtgcccgcctggggcagcgagtggttctggtggcactggcagggcgagggcagaccccagtaccagagattcatgagagacaactacccccccggcttcagctacgccgacttcggcccccagttcaccgccagattcttccaccccgaggagtgggccgacctgttccaggccgccggcgccaagtacgtggtgctgaccaccaagcaccacgagggcttcaccaactggcccagccccgtgagctggaactggaacagcaaggacgtgggcccccacagagacctggtgggcgagctgggcaccgccctgagaaagagaaacatcagatacggcctgtaccacagcctgctggagtggttccaccccctgtacctgctggacaagaagaacggcttcaagacccagcacttcgtgagcgccaagaccatgcccgagctgtacgacctggtgaacagctacaagcccgacctgatctggagcgacggcgagtgggagtgccccgacacctactggaacagcaccaacttcctgagctggctgtacaacgacagccccgtgaaggacgaggtggtggtgaacgacagatggggccagaactgcagctgccaccacggcggctactacaactgcgaggacaagttcaagccccagagcctgcccgaccacaagtgggagatgtgcaccagcatcgacaagttcagctggggctacagaagagacatggccctgagcgacgtgaccgaggagagcgagatcatcagcgagctggtgcagaccgtgagcctgggcggcaactacctgctgaacatcggccccaccaaggacggcctgatcgtgcccatcttccaggagagactgctggccgtgggcaagtggctgagcatcaacggcgaggccatctacgccagcaagccctggagagtgcagtgggagaagaacaccaccagcgtgtggtacaccagcaagggcagcgccgtgtacgccatcttcctgcactggcccgagaacggcgtgctgaacctggagagccccatcaccaccagcaccaccaagatcaccatgctgggcatccagggcgacctgaagtggagcaccgaccccgacaagggcctgttcatcagcctgccccagctgccccccagcgccgtgcccgccgagttcgcctggaccatcaagctgaccggcgtgaagtag

SEQ ID NO: 82131 - DNA, 1404 bp, synthetic construct
  misc_feature 1..1404: note = Description of Artificial Sequence: Synthetic coding sequence
  source 1..1404: mol_type = other DNA
atgagaccccaggagctgcccagactggccttccccctgctgctgctgctgctgctgctgctgcccccccccccctgccccgcccacagcgccaccagattcgaccccacctgggagagcctggacgccagacagctgcccgcctggttcgaccaggccaagttcggcatcttcatccactggggcgtgttcagcgtgcccagcttcggcagcgagtggttctggtggtactggcagaaggagaagatccccaagtacgtggagttcatgaaggacaactacccccccagcttcaagtacgaggacttcggccccctgttcaccgccaagttcttcaacgccaaccagtgggccgacatcttccaggccagcggcgccaagtacatcgtgctgaccagcaagcaccacgagggcttcaccctgtggggcagcgagtacagctggaactggaacgccatcgacgagggccccaagagagacatcgtgaaggagctggaggtggccatcagaaacagaaccgacctgagattcggcctgtactacagcctgttcgagtggttccaccccctgttcctggaggacgagagcagcagcttccacaagagacagttccccgtgagcaagaccctgcccgagctgtacgagctggtgaacaactaccagcccgaggtgctgtggagcgacggcgacggcggcgcccccgaccagtactggaacagcaccggcttcctggcctggctgtacaacgagagccccgtgagaggcaccgtggtgaccaacgacagatggggcgccggcagcatctgcaagcacggcggcttctacacctgcagcgacagatacaaccccggccacctgctgccccacaagtgggagaactgcatgaccatcgacaagctgagctggggctacagaagagaggccggcatcagcgactacctgaccatcgaggagctggtgaagcagctggtggagaccgtgagctgcggcggcaacctgctgatgaacatcggccccaccctggacggcaccatcagcgtggtgttcgaggagagactgagacagatgggcagctggctgaaggtgaacggcgaggccatctacgagacccacacctggagaagccagaacgacaccgtgacccccgacgtgtggtacaccagcaagcccaaggagaagctggtgtacgccatcttcctgaagtggcccaccagcggccagctgttcctgggccaccccaaggccatcctgggcgccaccgaggtgaagctgctgggccacggccagcccctgaactggatcagcctggagcagaacggcatcatggtggagctgccccagctgaccatccaccagatgccctgcaagtggggctgggccctggccctgaccaacgtgatctag

SEQ ID NO: 82132 - DNA, 498 bp, synthetic construct
  misc_feature 1..498: note = Description of Artificial Sequence: Synthetic coding sequence
  source 1..498: mol_type = other DNA
atgagaccccaggagctgcccagactggccttccccctgctgctgctgctgctgctgctgctgcccccccccccctgccccgcccacagcgccaccagattcgaccccacctgggagagcctggacgccagacagctgcccgcctggttcgaccaggccaagttcggcatcttcatccactggggcgtgttcagcgtgcccagcttcggcagcgagtggttctggtggtactggcagaaggagaagatccccaagtacgtggagttcatgaaggacaactacccccccagcttcaagtacgaggacttcggccccctgttcaccgccaagttcttcaacgccaaccagtgggccgacatcttccaggccagcggcgccaagtacatcgtgctgaccagcaagcaccacgaggccacctgcagagacagcttcatgtggagaaagagcttcgacgagtactgggcccacaccagatggcaccacttctgcagcttctag

SEQ ID NO: 82133 - DNA, 498 bp, synthetic construct; identical to SEQ ID NO: 82132
  misc_feature 1..498: note = Description of Artificial Sequence: Synthetic coding sequence
  source 1..498: mol_type = other DNA

SEQ ID NO: 82134 - DNA, 330 bp, synthetic construct
  misc_feature 1..330: note = Description of Artificial Sequence: Synthetic coding sequence
  source 1..330: mol_type = other DNA
cagctggtggagaccgtgagctgcggcggcaacctgctgatgaacatcggccccaccctggacggcaccatcagcgtggtgttcgaggagagactgagacagatgggcagctggctgaaggtgaacggcgaggccatctacgagacccacacctggagaagccagaacgacaccgtgacccccgacgtgtggtacaccagcaagcccaaggagaagctggtgtacgccatcttcctgaagtggcccaccagcggccagctgttcctgggccaccccaaggccatcctgggcgccaccgaggtgagaggcaacttcaccctgttcctgtag

SEQ ID NO: 82135 - DNA, 1098 bp, synthetic construct
  misc_feature 1..1098: note = Description of Artificial Sequence: Synthetic coding sequence
  source 1..1098: mol_type = other DNA
atgtggctgagaagccacagacagctgtgcctggccttcctgctggtgtgcgtgctgagcgtgatcttcttcctgcacatccaccaggacagcttcccccacggcctgggcctgagcatcctgtgccccgacagaagactggtgaccccccccgtggccatcttctgcctgcccggcaccgccatgggccccaacgccagcagcagctgcccccagcaccccgccagcctgagcggcacctggaccgtgtaccccaacggcagattcggcaaccagatgggccagtacgccaccctgctggccctggcccagctgaacggcagaagagccttcatcctgcccgccatgcacgccgccctggcccccgtgttcagaatcaccctgcccgtgctggcccccgaggtggacagcagaaccccctggagagagctgcagctgcacgactggatgagcgaggagtacgccgacctgagagaccccttcctgaagctgagcggcttcccctgcagctggaccttcttccaccacctgagagagcagatcagaagagagttcaccctgcacgaccacctgagagaggaggcccagagcgtgctgggccagctgagactgggcagaaccggcgacagacccagaaccttcgtgggcgtgcacgtgagaagaggcgactacctgcaggtgatgccccagagatggaagggcgtggtgggcgacagcgcctacctgagacaggccatggactggttcagagccagacacgaggcccccgtgttcgtggtgaccagcaacggcatggagtggtgcaaggagaacatcgacaccagccagggcgacgtgaccttcgccggcgacggccaggaggccaccccctggaaggacttcgccctgctgacccagtgcaaccacaccatcatgaccatcggcaccttcggcttctgggccgcctacctggccggcggcgacaccgtgtacctggccaacttcaccctgcccgacagcgagttcctgaagatcttcaagcccgaggccgccttcctgcccgagtgggtgggcatcaacgccgacctgagccccctgtggaccctggccaagccctag

SEQ ID NO: 82136 - DNA, 1068 bp, synthetic construct
  misc_feature 1..1068: note = Description of Artificial Sequence: Synthetic coding sequence
  source 1..1068: mol_type = other DNA
atgtggctgagaagccacagacagctgtgcctggccttcctgctggtgtgcgtgctgagcgtgatcttcttcctgcacatccaccaggacagcttcccccacggcctgggcctgagcatcctgtgccccgacagaagactggtgaccccccccgtggccatcttctgcctgcccggcaccgccatgggccccaacgccagcagcagctgcccccagcaccccgccagcctgagcggcacctggaccgtgtaccccaacggcagattcggcaaccagatgggccagtacgccaccctgctggccctggcccagctgaacggcagaagagccttcatcctgcccgccatgcacgccgccctggccccccccgaggtggacagcagaaccccctggagagagctgcagctgcacgactggatgagcgaggagtacgccgacctgagagaccccttcctgaagctgagcggcttcccctgcagctggaccttcttccaccacctgagagagcagatcagaagagagttcaccctgcacgaccacctgagagaggaggcccagagcgtgctgggccagctgagactgggcagaaccggcgacagacccagaaccttcgtgggcgtgcacgtgagaagaggcgactacctgcaggtgatgccccagagatggaagggcgtggtgggcgacagcgcctacctgagacaggccatggactggttcagagccagacacgaggcccccgtgttcgtggtgaccagcaacggcatggagtggtgcaaggagaacatcgacaccagccagggcgacgtgaccttcgccggcgacggccaggaggccaccccctggaaggacttcgccctgctgacccagtgcaaccacaccatcatgaccatcggcaccttcggcttctgggccgcctacctggccggcggcgacaccgtgtacctggccaacttcaccctgcccgacagcgagttcctgaagatcttcaagcccgaggccgccttcctgcccgagtgggtgggcatcaacgccgacctgagccccctgtggaccctggccaagccctag

SEQ ID NO: 82137 - DNA, 1032 bp, synthetic construct
  misc_feature 1..1032: note = Description of Artificial Sequence: Synthetic coding sequence
  source 1..1032: mol_type = other DNA
atgctggtggtgcagatgcccttcagcttccccatggcccacttcatcctgttcgtgttcaccgtgagcaccatcttccacgtgcagcagagactggccaagatccaggccatgtgggagctgcccgtgcagatccccgtgctggccagcaccagcaaggccctgggccccagccagctgagaggcatgtggaccatcaacgccatcggcagactgggcaaccagatgggcgagtacgccaccctgtacgccctggccaagatgaacggcagacccgccttcatccccgcccagatgcacagcaccctggcccccatcttcagaatcaccctgcccgtgctgcacagcgccaccgccagcagaatcccctggcagaactaccacctgaacgactggatggaggaggagtacagacacatccccggcgagtacgtgagattcaccggctacccctgcagctggaccttctaccaccacctgagacaggagatcctgcaggagttcaccctgcacgaccacgtgagagaggaggcccagaagttcctgagaggcctgcaggtgaacggcagcagacccggcaccttcgtgggcgtgcacgtgagaagaggcgactacgtgcacgtgatgcccaaggtgtggaagggcgtggtggccgacagaagatacctgcagcaggccctggactggttcagagccagatacagcagcctgatcttcgtggtgaccagcaacggcatggcctggtgcagagagaacatcgacaccagccacggcgacgtggtgttcgccggcgacggcatcgagggcagccccgccaaggacttcgccctgctgacccagtgcaaccacaccatcatgaccatcggcaccttcggcatctgggccgcctacctgaccggcggcgacaccatctacctggccaactacaccctgcccgacagccccttcctgaagatcttcaagcccgaggccgccttcctgcccgagtggaccggcatcgccgccgacctgagccccctgctgaagcactag

SEQ ID NO: 82138 - DNA, 1032 bp, synthetic construct; identical to SEQ ID NO: 82137
  misc_feature 1..1032: note = Description of Artificial Sequence: Synthetic coding sequence
  source 1..1032: mol_type = other DNA

SEQ ID NO: 82139 - DNA, 663 bp, synthetic construct
  misc_feature 1..663: note = Description of Artificial Sequence: Synthetic coding sequence
  source 1..663: mol_type = other DNA
atgctggtggtgcagatgcccttcagcttccccatggcccacttcatcctgttcgtgttcaccgtgagcaccatcttccacgtgcagcagagactggccaagatccaggccatgtgggagctgcccgtgcagatccccgtgctggccagcaccagcaaggccctgggccccagccagctgagaggcatgtggaccatcaacgccatcggcagactgggcaaccagatgggcgagtacgccaccctgtacgccctggccaagatgaacggcagacccgccttcatccccgcccagatgcacagcaccctggcccccatcttcagaatcaccctgcccgtgctgcacagcgccaccgccagcagaatcccctggcagaactaccacctgaacgactggatggaggaggagtacagacacatccccggcgagtacgtgagattcaccggctacccctgcagctggaccttctaccaccacctgagacaggagatcctgcaggagttcaccctgcacgaccacgtgagagaggaggcccagaagttcctgagaggcctgcaggtgaacggcagcagacccggcaccttcgtgggcgtgcacgtgagaagaggcgactacgtgcacgtgatgcccaaggtgtggaagggcgtggtggccgacagatag

SEQ ID NO: 82140 - DNA, 1086 bp, synthetic construct
  misc_feature 1..1086: note = Description of Artificial Sequence: Synthetic coding sequence
  source 1..1086: mol_type = other DNA
atggaccccctgggcgccgccaagccccagtggccctggagaagatgcctggccgccctgctgttccagctgctggtggccgtgtgcttcttcagctacctgagagtgagcagagacgacgccaccggcagccccagagcccccagcggcagcagcagacaggacaccacccccaccagacccaccctgctgatcctgctgagaacctggcccttccacatccccgtggccctgagcagatgcagcgagatggtgcccggcaccgccgactgccacatcaccgccgacagaaaggtgtacccccaggccgacatggtgatcgtgcaccactgggacatcatgagcaaccccaagagcagactgccccccagccccagaccccagggccagagatggatctggttcaacctggagcccccccccaactgccagcacctggaggccctggacagatacttcaacctgaccatgagctacagaagcgacagcgacatcttcaccccctacggctggctggagccctggagcggccagcccgcccacccccccctgaacctgagcgccaagaccgagctggtggcctgggccgtgagcaactggaagcccgacagcgccagagtgagatactaccagagcctgcaggcccacctgaaggtggacgtgtacggcagaagccacaagcccctgcccaagggcaccatgatggagaccctgagcagatacaagttctacctggccttcgagaacagcctgcaccccgactacatcaccgagaagctgtggagaaacgccctggaggcctgggccgtgcccgtggtgctgggccccagcagaagcaactacgagagattcctgccccccgacgccttcatccacgtggacgacttccagagccccaaggacctggccagatacctgcaggagctggacaaggaccacgccagatacctgagctacttcagatggagagagaccctgagacccagaagcttcagctgggccctggacttctgcaaggcctgctggaagctgcagcaggagagcagataccagaccgtgagaagcatcgccgcctggttcacctag

SEQ ID NO: 82141 - DNA, 1086 bp, synthetic construct; identical to SEQ ID NO: 82140
  misc_feature 1..1086: note = Description of Artificial Sequence: Synthetic coding sequence
  source 1..1086: mol_type = other DNA

SEQ ID NO: 82142 - DNA, 1086 bp, synthetic construct; identical to SEQ ID NO: 82140
  misc_feature 1..1086: note = Description of Artificial Sequence: Synthetic coding sequence
  source 1..1086: mol_type = other DNA

SEQ ID NO: 82143 - DNA, 1086 bp, synthetic construct; identical to SEQ ID NO: 82140
  misc_feature 1..1086: note = Description of Artificial Sequence: Synthetic coding sequence
  source 1..1086: mol_type = other DNA

SEQ ID NO: 82144 - DNA, 1593 bp, synthetic construct
  misc_feature 1..1593: note = Description of Artificial Sequence: Synthetic coding sequence
  source 1..1593: mol_type = other DNA
atgagaagactgtggggcgccgccagaaagcccagcggcgccggctgggagaaggagtgggccgaggccccccaggaggcccccggcgcctggagcggcagactgggccccggcagaagcggcagaaagggcagagccgtgcccggctgggccagctggcccgcccacctggccctggccgccagacccgccagacacctgggcggcgccggccagggccccagacccctgcacagcggcaccgcccccttccacagcagagccagcggcgagagacagagaagactggagccccagctgcagcacgagagcagatgcagaagcagcacccccgccgacgcctggagagccgaggccgccctgcccgtgagagccatgggcgccccctggggcagccccaccgccgccgccggcggcagaagaggctggagaagaggcagaggcctgccctggaccgtgtgcgtgctggccgccgccggcctgacctgcaccgccctgatcacctacgcctgctggggccagctgccccccctgccctgggccagccccacccccagcagacccgtgggcgtgctgctgtggtgggagcccttcggcggcagagacagcgcccccagacccccccccgactgcagactgagattcaacatcagcggctgcagactgctgaccgacagagccagctacggcgaggcccaggccgtgctgttccaccacagagacctggtgaagggcccccccgactggccccccccctggggcatccaggcccacaccgccgaggaggtggacctgagagtgctggactacgaggaggccgccgccgccgccgaggccctggccaccagcagccccagaccccccggccagagatgggtgtggatgaacttcgagagccccagccacagccccggcctgagaagcctggccagcaacctgttcaactggaccctgagctacagagccgacagcgacgtgttcgtgccctacggctacctgtaccccagaagccaccccggcgacccccccagcggcctggccccccccctgagcagaaagcagggcctggtggcctgggtggtgagccactgggacgagagacaggccagagtgagatactaccaccagctgagccagcacgtgaccgtggacgtgttcggcagaggcggccccggccagcccgtgcccgagatcggcctgctgcacaccgtggccagatacaagttctacctggccttcgagaacagccagcacctggactacatcaccgagaagctgtggagaaacgccctgctggccggcgccgtgcccgtggtgctgggccccgacagagccaactacgagagattcgtgcccagaggcgccttcatccacgtggacgacttccccagcgccagcagcctggccagctacctgctgttcctggacagaaaccccgccgtgtacagaagatacttccactggagaagaagctacgccgtgcacatcaccagcttctgggacgagccctggtgcagagtgtgccaggccgtgcagagagccggcgacagacccaagagcatcagaaacctggccagctggttcgagagatag

SEQ ID NO: 82145 - DNA, 1125 bp, synthetic construct
  misc_feature 1..1125: note = Description of Artificial Sequence: Synthetic coding sequence
  source 1..1125: mol_type = other DNA
atggaccccctgggccccgccaagccccagtggctgtggagaagatgcctggccggcctgctgttccagctgctggtggccgtgtgcttcttcagctacctgagagtgagcagagacgacgccaccggcagccccagacccggcctgatggccgtggagcccgtgaccggcgcccccaacggcagcagatgccaggacagcatggccacccccgcccaccccaccctgctgatcctgctgtggacctggcccttcaacacccccgtggccctgcccagatgcagcgagatggtgcccggcgccgccgactgcaacatcaccgccgacagcagcgtgtacccccaggccgacgccgtgatcgtgcaccactgggacatcatgtacaaccccagcgccaacctgcccccccccaccagaccccagggccagagatggatctggttcagcatggagagccccagcaactgcagacacctggaggccctggacggctacttcaacctgaccatgagctacagaagcgacagcgacatcttcaccccctacggctggctggagccctggagcggccagcccgcccacccccccctgaacctgagcgccaagaccgagctggtggcctgggccgtgagcaactggaagcccgacagcgccagagtgagatactaccagagcctgcaggcccacctgaaggtggacgtgtacggcagaagccacaagcccctgcccaagggcaccatgatggagaccctgagcagatacaagttctacctggccttcgagaacagcctgcaccccgactacatcaccgagaagctgtggagaaacgccctggaggcctgggccgtgcccgtggtgctgggccccagcagaagcaactacgagagattcctgccccccgacgccttcatccacgtggacgacttccagagccccaaggacctggccagatacctgcaggagctggacaaggaccacgccagatacctgagctacttccactggagagagaccctgagacccagaagcttcagctgggccctggccttctgcaaggcctgctggaagctgcagcaggagagcagataccagaccgtgagaagcatcgccgcctggttcacctag

SEQ ID NO: 82146 - DNA, 1125 bp, synthetic construct; identical to SEQ ID NO: 82145
  misc_feature 1..1125: note = Description of Artificial Sequence: Synthetic coding sequence
  source 1..1125: mol_type = other DNA

SEQ ID NO: 82147 - DNA, 1080 bp, synthetic construct
  misc_feature 1..1080: note = Description of Artificial Sequence: Synthetic coding sequence
  source 1..1080: mol_type = other DNA
atggaccccctgggccccgccaagccccagtggagctggagatgctgcctgaccaccctgctgttccagctgctgatggccgtgtgcttcttcagctacctgagagtgagccaggacgaccccaccgtgtaccccaacggcagcagattccccgacagcaccggcacccccgcccacagcatccccctgatcctgctgtggacctggcccttcaacaagcccatcgccctgcccagatgcagcgagatggtgcccggcaccgccgactgcaacatcaccgccgacagaaaggtgtacccccaggccgacgccgtgatcgtgcaccacagagaggtgatgtacaaccccagcgcccagctgcccagaagccccagaagacagggccagagatggatctggttcagcatggagagccccagccactgctggcagctgaaggccatggacggctacttcaacctgaccatgagctacagaagcgacagcgacatcttcaccccctacggctggctggagccctggagcggccagcccgcccacccccccctgaacctgagcgccaagaccgagctggtggcctgggccgtgagcaactggggccccaacagcgccagagtgagatactaccagagcctgcaggcccacctgaaggtggacgtgtacggcagaagccacaagcccctgccccagggcaccatgatggagaccctgagcagatacaagttctacctggccttcgagaacagcctgcaccccgactacatcaccgagaagctgtggagaaacgccctggaggcctgggccgtgcccgtggtgctgggccccagcagaagcaactacgagagattcctgccccccgacgccttcatccacgtggacgacttccagagccccaaggacctggccagatacctgcaggagctggacaaggaccacgccagatacctgagctacttcagatggagagagaccctgagacccagaagcttcagctgggccctggccttctgcaaggcctgctggaagctgcaggaggagagcagataccagaccagaggcatcgccgcctggttcacctag

SEQ ID NO: 82148 - DNA, 1080 bp, synthetic construct; identical to SEQ ID NO: 82147
  misc_feature 1..1080: note = Description of Artificial Sequence: Synthetic coding sequence
  source 1..1080: mol_type = other DNA

SEQ ID NO: 82149 - DNA, 1098 bp, synthetic construct
  misc_feature 1..1098: note = Description of Artificial Sequence: Synthetic coding sequence
  source 1..1098: mol_type = other DNA
atggaccccctgggccccgccaagccccagtggagctggagatgctgcctgaccaccctgctgttccagctgctgatggccgtgtgcttcttcagctacctgagagtgagccaggacgaccccaccgtgtaccccaacggcagcagattccccgacagcaccggcacccccgcccacagcatccccctgatcctgctgtggacctggcccttcaacaagcccatcgccctgcccagatgcagcgagatggtgcccggcaccgccgactgcaacatcaccgccgacagaaaggtgtacccccaggccgacgccgtgatcgtgcaccacagagaggtgatgtacaaccccagcgcccagctgcccagaagccccagaagacagggccagagatggatctggttcagcatggagagccccagccactgctggcagctgaaggccatggacggctacttcaacctgaccatgagctacagaagcgacagcgacatcttcaccccctacggctggctggagccctggagcggccagcccgcccacccccccctgaacctgagcgccaagaccgagctggtggcctgggccgtgagcaactggggccccaacagcgccagagtgagatactaccagagcctgcaggcccacctgaaggtggacgtgtacggcagaagccacaagcccctgccccagggcaccatgatggagaccctgagcagatacaagttctacctggccttcgagaacagcctgcaccccgactacatcaccgagaagctgtggagaaacgccctggaggcctgggccgtgcccgtggtgctgggccccagcagaagcaactacgagagattcctgccccccgacgccttcatccacgtggacgacttccagagccccaaggacctggccagatacctgcaggagctggacaaggaccacgccagatacctgagctacttcagatggagagagaccctgagacccagaagcttcagctgggccctggccttctgcaaggcctgctggaagctgcaggaggagagcagaagcggcggcctgatctacctgagaaccagactgcccgaggccagccccgcctag

SEQ ID NO: 82150 - DNA, 1080 bp, synthetic construct; identical to SEQ ID NO: 82147
  misc_feature 1..1080: note = Description of Artificial Sequence: Synthetic coding sequence
  source 1..1080: mol_type = other DNA

SEQ ID NO: 82151 - DNA, 1080 bp, synthetic construct; identical to SEQ ID NO: 82147
  misc_feature 1..1080: note = Description of Artificial Sequence: Synthetic coding sequence
  source 1..1080: mol_type = other DNA

SEQ ID NO: 82152 - DNA, 93 bp, synthetic construct
  misc_feature 1..93: note = Description of Artificial Sequence: Synthetic coding sequence
  source 1..93: mol_type = other DNA
atggaccccctgggccccgccaagccccagtggagctggagatgctgcctgaccaccctgctgttccagctgctgatggccgtgtgcttctag

SEQ ID NO: 82153 - DNA, 414 bp, synthetic construct
  misc_feature 1..414: note = Description of Artificial Sequence: Synthetic coding sequence
  source 1..414: mol_type = other DNA
atggaccccctgggccccgccaagccccagtggagctggagatgctgcctgaccaccctgctgttccagctgctgatggccgtgtgcttcttcagctacctgagagtgagccaggacgaccccaccgtgtaccccaacggcagcagattccccgacagcaccggcacccccgcccacagcatccccctgatcctgctgtggacctggcccttcaacaagcccatcgccctgcccagatgcagcgagatggtgcccggcaccgccgactgcaacatcaccgccgacagaaaggtgtacccccaggccgacgccgtgatcgtgcaccacagagaggtgatgtacaaccccagcgcccagctgcccagaagccccagaagacagggccagagatggatctggttcagcatggagtag

SEQ ID NO: 82154 - DNA, 210 bp, synthetic construct
  misc_feature 1..210: note = Description of Artificial Sequence: Synthetic coding sequence
  source 1..210: mol_type = other DNA
atggaccccctgggccccgccaagccccagtggagctggagatgctgcctgaccaccctgctgttccagctgctgatggccgtgtgcttcttcagctacctgagagtgagccaggacgaccccaccgtgtaccccaacggcagcagattccccgacagcaccggcacccccgcccacagcatccccctgatcctgctgtggacctggtag

SEQ ID NO: 82155 - DNA, 201 bp, synthetic construct
  misc_feature 1..201: note = Description of Artificial Sequence: Synthetic coding sequence
  source 1..201: mol_type = other DNA
atggaccccctgggccccgccaagccccagtggagctggagatgctgcctgaccaccctgctgttccagctgctgatggccgtgtgcttcttcagctacctgagagtgagccaggacgaccccaccgtgtaccccaacggcagcagattccccgacagcaccggcacccccgcccacagcatccccctgatcctgctgtag

SEQ ID NO: 82156 - DNA, 138 bp, synthetic construct
  misc_feature 1..138: note = Description of Artificial Sequence: Synthetic coding sequence
  source 1..138: mol_type = other DNA
atggaccccctgggccccgccaagccccagtggagctggagatgctgcctgaccaccctgctgttccagctgctgatggccgtgtgcttcttcagctacctgagagtgagccaggacgaccccaccgtgtacccctag

SEQ ID NO: 82157 - DNA, 1029 bp, synthetic construct
  misc_feature 1..1029: note = Description of Artificial Sequence: Synthetic coding sequence
  source 1..1029: mol_type = other DNA
atgaacaacgccggccacggccccaccagaagactgagaggcctgggcgtgctggccggcgtggccctgctggccgccctgtggctgctgtggctgctgggcagcgcccccagaggcacccccgccccccagcccaccatcaccatcctggtgtggcactggcccttcaccgaccagccccccgagctgcccagcgacacctgcaccagatacggcatcgccagatgccacctgagcgccaacagaagcctgctggccagcgccgacgccgtggtgttccaccacagagagctgcagaccagaagaagccacctgcccctggcccagagacccagaggccagccctgggtgtgggccagcatggagagccccagccacacccacggcctgagccacctgagaggcatcttcaactgggtgctgagctacagaagagacagcgacatcttcgtgccctacggcagactggagccccactggggccccagcccccccctgcccgccaagagcagagtggccgcctgggtggtgagcaacttccaggagagacagctgagagccagactgtacagacagctggccccccacctgagagtggacgtgttcggcagagccaacggcagacccctgtgcgccagctgcctggtgcccaccgtggcccagtacagattctacctgagcttcgagaacagccagcacagagactacatcaccgagaagttctggagaaacgccctggtggccggcaccgtgcccgtggtgctgggcccccccagagccacctacgaggccttcgtgcccgccgacgccttcgtgcacgtggacgacttcggcagcgccagagagctggccgccttcctgaccggcatgaacgagagcagataccagagattcttcgcctggagagacagactgagagtgagactgttcaccgactggagagagagattctgcgccatctgcgacagatacccccacctgcccagaagccaggtgtacgaggacctggagggctggttccaggcctag

SEQ ID NO: 82158 - DNA, 1728 bp, synthetic construct
  misc_feature 1..1728: note = Description of Artificial Sequence: Synthetic coding sequence
  source 1..1728: mol_type = other DNA
atgagaccctggaccggcagctggagatggatcatgctgatcctgttcgcctggggcaccctgctgttctacatcggcggccacctggtgagagacaacgaccaccccgaccacagcagcagagagctgagcaagatcctggccaagctggagagactgaagcagcagaacgaggacctgagaagaatggccgagagcctgagaatccccgagggccccatcgaccagggccccgccatcggcagagtgagagtgctggaggagcagctggtgaaggccaaggagcagatcgagaactacaagaagcagaccagaaacggcctgggcaaggaccacgagatcctgagaagaagaatcgagaacggcgccaaggagctgtggttcttcctgcagagcgagctgaagaagctgaagaacctggagggcaacgagctgcagagacacgccgacgagttcctgctggacctgggccaccacgagagaagcatcatgaccgacctgtactacctgagccagaccgacggcgccggcgactggagagagaaggaggccaaggacctgaccgagctggtgcagagaagaatcacctacctgcagaaccccaaggactgcagcaaggccaagaagctggtgtgcaacatcaacaagggctgcggctacggctgccagctgcaccacgtggtgtactgcttcatgatcgcctacggcacccagagaaccctgatcctggagagccagaactggagatacgccaccggcggctgggagaccgtgttcagacccgtgagcgagacctgcaccgacagaagcggcatcagcaccggccactggagcggcgaggtgaaggacaagaacgtgcaggtggtggagctgcccatcgtggacagcctgcaccccagacccccctacctgcccctggccgtgcccgaggacctggccgacagactggtgagagtgcacggcgaccccgccgtgtggtgggtgagccagttcgtgaagtacctgatcagaccccagccctggctggagaaggagatcgaggaggccaccaagaagctgggcttcaagcaccccgtgatcggcgtgcacgtgagaagaaccgacaaggtgggcaccgaggccgccttccaccccatcgaggagtacatggtgcacgtggaggagcacttccagctgctggccagaagaatgcaggtggacaagaagagagtgtacctggccaccgacgaccccagcctgctgaaggaggccaagaccaagtaccccaactacgagttcatcagcgacaacagcatcagctggagcgccggcctgcacaacagatacaccgagaacagcctgagaggcgtgatcctggacatccacttcctgagccaggccgacttcctggtgtgcaccttcagcagccaggtgtgcagagtggcctacgagatcatgcagaccctgcaccccgacgccagcgccaacttccacagcctggacgacatctactacttcggcggccagaacgcccacaaccagatcgccatctacgcccaccagcccagaaccgccgacgagatccccatggagcccggcgacatcatcggcgtggccggcaaccactgggacggctacagcaagggcgtgaacagaaagctgggcagaaccggcctgtaccccagctacaaggtgagagagaagatcgagaccgtgaagtaccccacctaccccgaggccgagaagtag

SEQ ID NO: 82159 - DNA, 1728 bp, synthetic construct; identical to SEQ ID NO: 82158
  misc_feature 1..1728: note = Description of Artificial Sequence: Synthetic coding sequence
  source 1..1728: mol_type = other DNA

SEQ ID NO: 82160 - DNA, 1728 bp, synthetic construct; identical to SEQ ID NO: 82158
  misc_feature 1..1728: note = Description of Artificial Sequence: Synthetic coding sequence
  source 1..1728: mol_type = other DNA

SEQ ID NO: 82161 - DNA, 510 bp, synthetic construct
  misc_feature 1..510: note = Description of Artificial Sequence: Synthetic coding sequence
  source 1..510: mol_type = other DNA
atgcacagacagatctggcacctgcactggaccctggtgagataccccaactacgagttcatcagcgacaacagcatcagctggagcgccggcctgcacaacagatacaccgagaacagcctgagaggcgtgatcctggacatccacttcctgagccaggccgacttcctggtgtgcaccttcagcagccaggtgtgcagagtggcctacgagatcatgcagaccctgcaccccgacgccagcgccaacttccacagcctggacgacatctactacttcggcggccagaacgcccacaaccagatcgccatctacgcccaccagcccagaaccgccgacgagatccccatggagcccggcgacatcatcggcgtggccggcaaccactgggacggctacagcaagggcgtgaacagaaagctgggcagaaccggcctgtaccccagctacaaggtgagagagaagatcgagaccgtgaagtaccccacctaccccgaggccgagaagtag

SEQ ID NO: 82162 - DNA, 48 bp, synthetic construct
  misc_feature 1..48: note = Description of Artificial Sequence: Synthetic coding sequence
  source 1..48: mol_type = other DNA
atgagaccctggaccggcagctggagatggatcatgctgatcctgtag

SEQ ID NO: 82163 - DNA, 135 bp, synthetic construct
  misc_feature 1..135: note = Description of Artificial Sequence: Synthetic coding sequence
  source 1..135: mol_type = other DNA
atgagaccctggaccggcagctggagatggatcatgctgatcctgttcgcctggggcaccctgctgttctacatcggcggccacctggtgagagacaacgaccaccccgaccacagcagcagagagctgagctag

SEQ ID NO: 82164 - DNA, 141 bp, synthetic construct
  misc_feature 1..141: note = Description of Artificial Sequence: Synthetic coding sequence
  source 1..141: mol_type = other DNA
atgagaccctggaccggcagctggagatggatcatgctgatcctgttcgcctggggcaccctgctgttctacatcggcggccacctggtgagagacaacgaccaccccgaccacagcagcagagagctgagcaagatctag

SEQ ID NO: 82165 - DNA, 126 bp, synthetic construct
  misc_feature 1..126: note = Description of Artificial Sequence: Synthetic coding sequence
  source 1..126: mol_type = other DNA
atgagaccctggaccggcagctggagatggatcatgctgatcctgttcgcctggggcaccctgctgttctacatcggcggccacctggtgagagacaacgaccaccccgaccacagcagcagatag

SEQ ID NO: 82166 - DNA, 93 bp, synthetic construct
  misc_feature 1..93: note = Description of Artificial Sequence: Synthetic coding sequence
  source 1..93: mol_type = other DNA
atgagaccctggaccggcagctggagatggatcatgctgatcctgttcgcctggggcaccctgctgttctacatcggcggccacctggtgtag

SEQ ID NO: 82167 - DNA, 1239 bp, synthetic construct
  misc_feature 1..1239: note = Description of Artificial Sequence: Synthetic coding sequence
  source 1..1239: mol_type = other DNA
atgaccgacctgtactacctgagccagaccgacggcgccggcgactggagagagaaggaggccaaggacctgaccgagctggtgcagagaagaatcacctacctgcagaaccccaaggactgcagcaaggccaagaagctggtgtgcaacatcaacaagggctgcggctacggctgccagctgcaccacgtggtgtactgcttcatgatcgcctacggcacccagagaaccctgatcctggagagccagaactggagatacgccaccggcggctgggagaccgtgttcagacccgtgagcgagacctgcaccgacagaagcggcatcagcaccggccactggagcggcgaggtgaaggacaagaacgtgcaggtggtggagctgcccatcgtggacagcctgcaccccagacccccctacctgcccctggccgtgcccgaggacctggccgacagactggtgagagtgcacggcgaccccgccgtgtggtgggtgagccagttcgtgaagtacctgatcagaccccagccctggctggagaaggagatcgaggaggccaccaagaagctgggcttcaagcaccccgtgatcggcgtgcacgtgagaagaaccgacaaggtgggcaccgaggccgccttccaccccatcgaggagtacatggtgcacgtggaggagcacttccagctgctggccagaagaatgcaggtggacaagaagagagtgtacctggccaccgacgaccccagcctgctgaaggaggccaagaccaagtaccccaactacgagttcatcagcgacaacagcatcagctggagcgccggcctgcacaacagatacaccgagaacagcctgagaggcgtgatcctggacatccacttcctgagccaggccgacttcctggtgtgcaccttcagcagccaggtgtgcagagtggcctacgagatcatgcagaccctgcaccccgacgccagcgccaacttccacagcctggacgacatctactacttcggcggccagaacgcccacaaccagatcgccatctacgcccaccagcccagaaccgccgacgagatccccatggagcccggcgacatcatcggcgtggccggcaaccactgggacggctacagcaagggcgtgaacagaaagctgggcagaaccggcctgtaccccagctacaaggtgagagagaagatcgagaccgtgaagtaccccacctaccccgaggccgagaagtag

SEQ ID NO: 82168 - DNA, 153 bp, synthetic construct
  misc_feature 1..153: note = Description of Artificial Sequence: Synthetic coding sequence
  source 1..153: mol_type = other DNA
atgagaccctggaccggcagctggagatggatcatgctgatcctgttcgcctggggcaccctgctgttctacatcggcggccacctggtgagagacaacgaccaccccgaccacagcagcagagagctgagcaagatcctggccaagctgtag

SEQ ID NO: 82169 - DNA, 1080 bp, synthetic construct
  misc_feature 1..1080: note = Description of Artificial Sequence: Synthetic coding sequence
  source 1..1080: mol_type = other DNA
atgaccagcaccagcaagggcatcctgagacccttcctgatcgtgtgcatcatcctgggctgcttcatggcctgcctgctgatctacatcaagcccaccaacagctggatcttcagccccatggagagcgccagcagcgtgctgaagatgaagaacttcttcagcaccaagaccgactacttcaacgagaccaccatcctggtgtgggtgtggcccttcggccagaccttcgacctgaccagctgccaggccatgttcaacatccagggctgccacctgaccaccgacagaagcctgtacaacaagagccacgccgtgctgatccaccacagagacatcagctgggacctgaccaacctgccccagcaggccagaccccccttccagaagtggatctggatgaacctggagagccccacccacaccccccagaagagcggcatcgagcacctgttcaacctgaccctgacctacagaagagacagcgacatccaggtgccctacggcttcctgaccgtgagcaccaaccccttcgtgttcgaggtgcccagcaaggagaagctggtgtgctgggtggtgagcaactggaaccccgagcacgccagagtgaagtactacaacgagctgagcaagagcatcgagatccacacctacggccaggccttcggcgagtacgtgaacgacaagaacctgatccccaccatcagcacctgcaagttctacctgagcttcgagaacagcatccacaaggactacatcaccgagaagctgtacaacgccttcctggccggcagcgtgcccgtggtgctgggccccagcagagagaactacgagaactacatccccgccgacagcttcatccacgtggaggactacaacagccccagcgagctggccaagtacctgaaggaggtggacaagaacaacaagctgtacctgagctacttcaactggagaaaggacttcaccgtgaacctgcccagattctgggagagccacgcctgcctggcctgcgaccacgtgaagagacaccaggagtacaagagcgtgggcaacctggagaagtggttctggaactag

SEQ ID NO: 82170 - DNA, 660 bp, synthetic construct
  misc_feature 1..660: note = Description of Artificial Sequence: Synthetic coding sequence
  source 1..660: mol_type = other DNA
atgaacagactgttcggcaaggccaagcccaaggcccccccccccagcctgaccgactgcatcggcaccgtggacagcagagccgagagcatcgacaagaagatcagcagactggacgccgagctggtgaagtacaaggaccagatcaagaagatgagagagggccccgccaagaacatggtgaagcagaaggccctgagagtgctgaagcagaagagaatgtacgagcagcagagagacaacctggcccagcagagcttcaacatggagcaggccaactacaccatccagagcctgaaggacaccaagaccaccgtggacgccatgaagctgggcgtgaaggagatgaagaaggcctacaagcaggtgaagatcgaccagatcgaggacctgcaggaccagctggaggacatgatggaggacgccaacgagatccaggaggccctgagcagaagctacggcacccccgagctggacgaggacgacctggaggccgagctggacgccctgggcgacgagctgctggccgacgaggacagcagctacctggacgaggccgccagcgcccccgccatccccgagggcgtgcccaccgacaccaagaacaaggacggcgtgctggtggacgagttcggcctgccccagatccccgccagctag

SEQ ID NO: 82171 - DNA, 1293 bp, synthetic construct
  misc_feature 1..1293: note = Description of Artificial Sequence: Synthetic coding sequence
  source 1..1293: mol_type = other DNA
atgagcagaatcaacaagaacgtggtgctggccctgctgaccctgaccagcagcgccttcctgctgttccagctgtactactacaagcactacctgagcaccaagaacggcgccggcctgagcaagagcaagggcagcagaatcggcttcgacagcacccagtggagagccgtgaagaagttcatcatgctgaccagcaaccagaacgtgcccgtgttcctgatcgaccccctgatcctggagctgatcaacaagaacttcgagcaggtgaagaacaccagccacggcagcaccagccagtgcaagttcttctgcgtgcccagagacttcaccgccttcgccctgcagtaccacctgtggaagaacgaggagggctggttcagaatcgccgagaacatgggcttccagtgcctgaagatcgagagcaaggaccccagactggacggcatcgacagcctgagcggcaccgagatccccctgcactacatctgcaagctggccacccacgccatccacctggtggtgttccacgagagaagcggcaactacctgtggcacggccacctgagactgaaggagcacatcgacagaaagttcgtgcccttcagaaagctgcagttcggcagataccccggcgccttcgacagacccgagctgcagcaggtgaccgtggacggcctggaggtgctgatccccaaggaccccatgcacttcgtggaggaggtgccccacagcagattcatcgagtgcagatacaaggaggccagagccttcttccagcagtacctggacgacaacaccgtggaggccgtggccttcagaaagagcgccaaggagctgctgcagctggccgccaagaccctgaacaagctgggcgtgcccttctggctgagcagcggcacctgcctgggctggtacagacagtgcaacatcatcccctacagcaaggacgtggacctgggcatcttcatccaggactacaagagcgacatcatcctggccttccaggacgccggcctgcccctgaagcacaagttcggcaaggtggaggacagcctggagctgagcttccagggcaaggacgacgtgaagctggacgtgttcttcttctacgaggagaccgaccacatgtggaacggcggcacccaggccaagaccggcaagaagttcaagtacctgttccccaagttcaccctgtgctggaccgagttcgtggacatgaaggtgcacgtgccctgcgagaccctggagtacatcgaggccaactacggcaagaaccagcagggcgcctag

SEQ ID NO: 82172 - DNA, 708 bp, synthetic construct
  misc_feature 1..708: note = Description of Artificial Sequence: Synthetic coding sequence
  source 1..708: mol_type = other DNA
atgatcctggaggtgggcgagaacaacggcttcttcagcaagagcctgctgcccagatacgccagcaagaagctgaagagcagcctgccccacagcagagccgtgaagaagttcatcatgctgaccagcaaccagaacgtgcccgtgttcctgatcgaccccctgatcctggagctgatcaacaagaacttcgagcaggtgaagaacaccagccacggcagcaccagccagtgcaagttcttctgcgtgcccagagacttcaccgccttcgccctgcagtaccacctgtggaagaacgaggagggctggttcagaatcgccgagaacatgggcttccagtgcctgaagatcgagagcaaggaccccagactggacggcatcgacagcctgagcggcaccgagatccccctgcactacatctgcaagctggccacccacgccatccacctggtggtgttccacgagagaagcggcaactacctgtggcacggccacctgagactgaaggagcacatcgacagaaagttcgtgcccttcagaaagctgcagttcggcagataccccggcgccttcgacagacccgagctgcagcaggtgaccgtggacggcctggaggtgctgatccccaaggaccccatgcacttcgtggaggaggtgccccacagcagattcatcgagtgcagatacaaggaggccagagccttctag

SEQ ID NO: 82173 - DNA, 552 bp, synthetic construct
  misc_feature 1..552: note = Description of Artificial Sequence: Synthetic coding sequence
  source 1..552: mol_type = other DNA
atgagcagaatcaacaagaacgtggtgctggccctgctgaccctgaccagcagcgccttcctgctgttccagctgtactactacaagcactacctgagcaccaagaacggcgccggcctgagcaagagcaagggcagcagaatcggcttcgacagcacccagtggagagccgtgaagaagttcatcatgctgaccagcaaccagaacgtgcccgtgttcctgatcgaccccctgatcctggagctgatcaacaagaacttcgagcaggtgaagaacaccagccacggcagcaccagccagtgcaagttcttctgcgtgcccagagacttcaccgccttcgccctgcagtaccacctgtggaagaacgaggagggctggttcagaatcgccgagaacatgggcttccagtgcctgaagatcgagagcaaggaccccagactggacggcatcgacagcctgagcggcaccgagatccccctgcactacatctgcaagctggccacccacgccatccacctggtggtgttccacgagagaagcggcaactactag

SEQ ID NO: 82174 - DNA, 483 bp, synthetic construct
  misc_feature 1..483: note = Description of Artificial Sequence: Synthetic coding sequence
  source 1..483: mol_type = other DNA
tgatggtacagacagtgcaacatcatcccctacagcaaggacgtggacctgggcatcttcatccaggactacaagagcgacatcatcctggccttccaggacgccggcctgcccctgaagcacaagttcggcaaggtggaggacagcctggagctgagcttccagggcaaggacgacgtgaagctggacgtgttcttcttctacgaggagaccgaccacatgtggaacggcggcacccaggccaagaccggcaagaagttcaagtacctgttccccaagttcaccctgtgctggaccgagttcgtggacatgaaggtgcacgtgccctgcgagaccctggagtacatcgaggccaactacggcaaggaggccgagagctacatcctgagcatgctgttcagaaccaccttctggagcctggccgacttccccctgacccccgagaacaacagcagcctgaagaacggcaacctgaacgtgtag

SEQ ID NO: 82175 - DNA, 816 bp, synthetic construct
  misc_feature 1..816: note = Description of Artificial Sequence: Synthetic coding sequence
  source 1..816: mol_type = other DNA
atgagcagaatcaacaagaacgtggtgctggccctgctgaccctgaccagcagcgccttcctgctgttccagctgtactactacaagcactacctgagcaccaagaacggcgccggcctgagcaagagcaagggcagcagaatcggcttcgacagcacccagtggagagccgtgaagaagttcatcatgctgaccagcaaccagaacgtgcccgtgttcctgatcgaccccctgatcctggagctgatcaacaagaacttcgagcaggtgaagaacaccagccacggcagcaccagccagtgcaagttcttctgcgtgcccagagacttcaccgccttcgccctgcagtaccacctgtggaagaacgaggagggctggttcagaatcgccgagaacatgggcttccagtgcctgaagatcgagagcaaggaccccagactggacggcatcgacagcctgagcggcaccgagatccccctgcactacatctgcaagctggccacccacgccatccacctggtggtgttccacgagagaagcggcaactacctgtggcacggccacctgagactgaaggagcacatcgacagaaagttcgtgcccttcagaaagctgcagttcggcagataccccggcgccttcgacagacccgagctgcagcaggtgaccgtggacggcctggaggtgctgatccccaaggaccccatgcacttcgtggaggaggtgccccacagcagattcatcgagtgcagatacaaggaggccagagccttcttccagatccccgtgagcgaggtgtacaccgtgctggactag

SEQ ID NO: 82176 - DNA, 1488 bp, synthetic construct
  misc_feature 1..1488: note = Description of Artificial Sequence: Synthetic coding sequence
  source 1..1488: mol_type = other DNA
atgagactgaccagatgccaggccgccctggccgccgccatcaccctgaacctgctggtgctgttctacgtgagctggctgcagcaccagcccagaaacagcagagccagaggccccagaagagccagcgccgccggccccagagtgaccgtgctggtgagagagttcgaggccttcgacaacgccgtgcccgagctggtggacagcttcctgcagcaggaccccgcccagcccgtggtggtggccgccgacaccctgccctacccccccctggccctgcccagaatccccaacgtgagactggccctgctgcagcccgccctggacagacccgccgccgccagcagacccgagacctacgtggccaccgagttcgtggccctggtgcccgacggcgccagagccgaggcccccggcctgctggagagaatggtggaggccctgagagccggcagcgccagactggtggccgcccccgtggccaccgccaaccccgccagatgcctggccctgaacgtgagcctgagagagtggaccgccagatacggcgccgcccccgccgcccccagatgcgacgccctggacggcgacgccgtggtgctgctgagagccagagacctgttcaacctgagcgcccccctggccagacccgtgggcaccagcctgttcctgcagaccgccctgagaggctgggccgtgcagctgctggacctgaccttcgccgccgccagacagccccccctggccaccgcccacgccagatggaaggccgagagagagggcagagccagaagagccgccctgctgagagccctgggcatcagactggtgagctgggagggcggcagactggagtggttcggctgcaacaaggagaccaccagatgcttcggcaccgtggtgggcgacacccccgcctacctgtacgaggagagatggacccccccctgctgcctgagagccctgagagagaccgccagatacgtggtgggcgtgctggaggccgccggcgtgagatactggctggagggcggcagcctgctgggcgccgccagacacggcgacatcatcccctgggactacgacgtggacctgggcatctacctggaggacgtgggcaactgcgagcagctgagaggcgccgaggccggcagcgtggtggacgagagaggcttcgtgtgggagaaggccgtggagggcgacttcttcagagtgcagtacagcgagagcaaccacctgcacgtggacctgtggcccttctaccccagaaacggcgtgatgaccaaggacacctggctggaccacagacaggacgtggagttccccgagcacttcctgcagcccctggtgcccctgcccttcgccggcttcgtggcccaggcccccaacaactacagaagattcctggagctgaagttcggccccggcgtgatcgagaacccccagtaccccaaccccgccctgctgagcctgaccggcagcggctag

SEQ ID NO: 82177 - DNA, 1488 bp, synthetic construct; identical to SEQ ID NO: 82176
  misc_feature 1..1488: note = Description of Artificial Sequence: Synthetic coding sequence
  source 1..1488: mol_type = other DNA

SEQ ID NO: 82178 - DNA, 2385 bp, synthetic construct
  misc_feature 1..2385: note = Description of Artificial Sequence: Synthetic coding sequence
  source 1..2385: mol_type = other DNA
atggagctgagaccctggctgctgtgggtggtggccgccaccggcaccctggtgctgctggccgccgacgcccagggccagaaggtgttcaccaacacctgggccgtgagaatccccggcggccccgccgtggccaacagcgtggccagaaagcacggcttcctgaacctgggccagatcttcggcgactactaccacttctggcacagaggcgtgaccaagagaagcctgagcccccacagacccagacacagcagactgcagagagagccccaggtgcagtggctggagcagcaggtggccaagagaagaaccaagagagacgtgtaccaggagcccaccgaccccaagttcccccagcagtggtacctgagcggcgtgacccagagagacctgaacgtgaaggccgcctgggcccagggctacaccggccacggcatcgtggtgagcatcctggacgacggcatcgagaagaaccaccccgacctggccggcaactacgaccccggcgccagcttcgacgtgaacgaccaggaccccgacccccagcccagatacacccagatgaacgacaacagacacggcaccagatgcgccggcgaggtggccgccgtggccaacaacggcgtgtgcggcgtgggcgtggcctacaacgccagaatcggcggcgtgagaatgctggacggcgaggtgaccgacgccgtggaggccagaagcctgggcctgaaccccaaccacatccacatctacagcgccagctggggccccgaggacgacggcaagaccgtggacggccccgccagactggccgaggaggccttcttcagaggcgtgagccagggcagaggcggcctgggcagcatcttcgtgtgggccagcggcaacggcggcagagagcacgacagctgcaactgcgacggctacaccaacagcatctacaccctgagcatcagcagcgccacccagttcggcaacgtgccctggtacagcgaggcctgcagcagcaccctggccaccacctacagcagcggcaaccagaacgagaagcagatcgtgaccaccgacctgagacagaagtgcaccgagagccacaccggcaccagcgccagcgcccccctggccgccggcatcatcgccctgaccctggaggccaacaagaacctgacctggagagacatgcagcacctggtggtgcagaccagcaagcccgcccacctgaacgccaacgactgggccaccaacggcgtgggcagaaaggtgagccacagctacggctacggcctgctggacgccggcgccatggtggccctggcccagaactggaccaccgtggccccccagagaaagtgcatcatcgacatcctgaccgagcccaaggacatcggcaagagactggaggtgagaaagaccgtgaccgcctgcctgggcgagcccaaccacatcaccagactggagcacgcccaggccagactgaccctgagctacaacagaagaggcgacctggccatccacctggtgagccccatgggcaccagaagcaccctgctggccgccagaccccacgactacagcgccgacggcttcaacgactgggccttcatgaccacccacagctgggacgaggaccccagcggcgagtgggtgctggagatcgagaacaccagcgaggccaacaactacggcaccctgaccaagttcaccctggtgctgtacggcaccgcccccgagggcctgcccgtgccccccgagagcagcggctgcaagaccctgaccagcagccaggcctgcgtggtgtgcgaggagggcttcagcctgcaccagaagagctgcgtgcagcactgcccccccggcttcgccccccaggtgctggacacccactacagcaccgagaacgacgtggagaccatcagagccagcgtgtgcgccccctgccacgccagctgcgccacctgccagggccccgccctgaccgactgcctgagctgccccagccacgccagcctggaccccgtggagcagacctgcagcagacagagccagagcagcagagagagccccccccagcagcagccccccagactgccccccgaggtggaggccggccagagactgagagccggcctgctgcccagccacctgcccgaggtggtggccggcctgagctgcgccttcatcgtgctggtgttcgtgaccgtgttcctggtgctgcagctgagaagcggcttcagcttcagaggcgtgaaggtgtacaccatggacagaggcctgatcagctacaagggcctgccccccgaggcctggcaggaggagtgccccagcgacagcgaggaggacgagggcagaggcgagagaaccgccttcatcaaggaccagagcgccctgtag

SEQ ID NO: 82179 - DNA, 210 bp, synthetic construct
  misc_feature 1..210: note = Description of Artificial Sequence: Synthetic coding sequence
  source 1..210: mol_type = other DNA
aagcccgcccacctgaacgccaacgactgggccaccaacggcgtgggcagaaaggtgagccacagctacggctacggcctgtggacccaggccccctggtggccctggcccagaatcggcccccagtggccccccagcggcagcgccagcagcaccagcagccccagccccaagaccagcggcaacggcagcagatgcggcagaccctag

SEQ ID NO: 82180 - DNA, 210 bp, synthetic construct
  misc_feature 1..210: note = Description of Artificial Sequence: Synthetic coding sequence
  source 1..210: mol_type = other DNA
atggagctgagaccctggctgctgtgggtggtggccgccaccggcaccctggtgctgctggccgccgacgcccagggccagaaggtgttcaccaacacctgggccgtgagaatccccggcggccccgccgtggccaacagcgtggccagaaagcacggcttcctgaacctgggccagatcttcggcgactactaccacttctggcactag

SEQ ID NO: 82181 - DNA, 1581 bp, synthetic construct
  misc_feature 1..1581: note = Description of Artificial Sequence: Synthetic coding sequence
  source 1..1581: mol_type = other DNA
atggccagcaacgactacacccagcaggccacccagagctacggcgcctaccccacccagcccggccagggctacagccagcagagcagccagccctacggccagcagagctacagcggctacagccagagcaccgacaccagcggctacggccagagcagctacagcagctacggccagagccagaacaccggctacggcacccagagcaccccccagggctacggcagcaccggcggctacggcagcagccagagcagccagagcagctacggccagcagagcagctaccccggctacggccagcagcccgcccccagcagcaccagcggcagctacggcagcagcagccagagcagcagctacggccagccccagagcggcagctacagccagcagcccagctacggcggccagcagcagagctacggccagcagcagagctacaaccccccccagggctacggccagcagaaccagtacaacagcagcagcggcggcggcggcggcggcggcggcggcggcaactacggccaggaccagagcagcatgagcagcggcggcggcagcggcggcggctacggcaaccaggaccagagcggcggcggcggcagcggcggctacggccagcaggacagaggcggcagaggcagaggcggcagcggcggcggcggcggcggcggcggcggcggctacaacagaagcagcggcggctacgagcccagaggcagaggcggcggcagaggcggcagaggcggcatgggcggcagcgacagaggcggcttcaacaagttcggcggccccagagaccagggcagcagacacgacagcgagcaggacaacagcgacaacaacaccatcttcgtgcagggcctgggcgagaacgtgaccatcgagagcgtggccgactacttcaagcagatcggcatcatcaagaccaacaagaagaccggccagcccatgatcaacctgtacaccgacagagagaccggcaagctgaagggcgaggccaccgtgagcttcgacgacccccccagcgccaaggccgccatcgactggttcgacggcaaggagttcagcggcaaccccatcaaggtgagcttcgccaccagaagagccgacttcaacagaggcggcggcaacggcagaggcggcagaggcagaggcggccccatgggcagaggcggctacggcggcggcggcagcggcggcggcggcagaggcggcttccccagcggcggcggcggcggcggcggccagcagagagccggcgactggaagtgccccaaccccacctgcgagaacatgaacttcagctggagaaacgagtgcaaccagtgcaaggcccccaagcccgacggccccggcggcggccccggcggcagccacatgggcggcaactacggcgacgacagaagaggcggcagaggcggctacgacagaggcggctacagaggcagaggcggcgacagaggcggcttcagaggcggcagaggcggcggcgacagaggcggcttcggccccggcaagatggacagcagaggcgagcacagacaggacagaagagagagaccctactag

SEQ ID NO: 82182 - DNA, 456 bp, synthetic construct
  misc_feature 1..456: note = Description of Artificial Sequence: Synthetic coding sequence
  source 1..456: mol_type = other DNA
atgaaccccgaggtggtggaggtggccgtggaggccgaggtggcctgggccgaggtgaccgtggtggccagcatcaacctggtggccctgggcaccaaggaccacgtgatgacccccaccaacaagaagaccggccagcccatgatcaacctgtacaccgacagagagaccggcaagctgaagggcgaggccaccgtgagcttcgacgacccccccagcgccaaggccgccatcgactggttcgacggcaaggagttcagcggcaaccccatcaaggtgagcttcgccaccagaagagccgacttcaacagaggcggcggcaacggcagaggcggcagaggcagaggcggccccatgggcagaggcggctacggcggcggcggcagcggcggcggcggcagaggcggcttccccagcggcggcggcggcggcggcggccagcagagagccggctag

SEQ ID NO: 82183 - DNA, 1290 bp, synthetic construct
  misc_feature 1..1290: note = Description of Artificial Sequence: Synthetic coding sequence
  source 1..1290: mol_type = other DNA
atggccagcaacgactacacccagcaggccacccagagctacggcgcctaccccacccagcccggccagggctacagccagcagagcagccagccctacggccagcagagctacagcggctacagccagagcaccgacaccagcggctacggccagagcagctacagcagctacggccagagccagaacaccggctacggcacccagagcaccccccagggctacggcagcaccggcggctacggcagcagccagagcagccagagcagctacggccagcagagcagctaccccggctacggccagcagcccgcccccagcagcaccagcggcagctacggcagcagcagccagagcagcagctacggccagccccagagcggcagctacagccagcagcccagctacggcggccagcagcagagctacggccagcagcagagctacaaccccccccagggctacggccagcagaaccagtacaacagcagcagcggcggctacgagcccagaggcagaggcggcggcagaggcggcagaggcggcatgggcggcagcgacagaggcggcttcaacaagttcggcggccccagagaccagggcagcagacacgacagcgagcaggacaacagcgacaacaacaccatcttcgtgcagggcctgggcgagaacgtgaccatcgagagcgtggccgactacttcaagcagatcggcatcatcaagaccaacaagaagaccggccagcccatgatcaacctgtacaccgacagagagaccggcaagctgaagggcgaggccaccgtgagcttcgacgacccccccagcgccaaggccgccatcgactggttcgacggcaaggagttcagcggcaaccccatcaaggtgagcttcgccaccagaagagccgacttcaacagaggcggcggcaacggcagaggcggcagaggcagaggcggccccatgggcagaggcggctacggcggcggcggcagcggcggcggcggcagaggcggcttccccagcggcggcggcggcggcggcggccagcagagagccggcgactggaagtgccccaaccccacctgcgagaacatgaacttcagctggagaaacgagtgcaaccagtgcaaggcccccaagcccgacggccccggcggcggccccggcggcagccacatgggcggcaactacggcgacgacagaagaggcggcgacagaggcggcttcggccccggcaagatggacagcagaggcgagcacagacaggacagaagagagagaccctactag

SEQ ID NO: 82184 - DNA, 1257 bp, synthetic construct
  misc_feature 1..1257: note = Description of Artificial Sequence: Synthetic coding sequence
  source 1..1257: mol_type = other DNA
atgggcgaggagggcaccggcggcaccgtgcacctgctgtgcctggccgccagcagcggcgtgcccctgttctgcagaagcagcagaggcggcgcccccgccagacagcagctgcccttcagcgtgatcggcagcctgaacggcgtgcacatgttcggccagaacctggaggtgcagctgagcagcgccagaaccgagaacaccaccgtggtgtggaagagcttccacgacagcatcaccctgatcgtgctgagcagcgaggtgggcatcagcgagctgagactggagagactgctgcagatggtgttcggcgccatggtgctgctggtgggcctggaggagctgaccaacatcagaaacgtggagagactgaagaaggacctgagagccagctactgcctgatcgacagcttcctgggcgacagcgagctgatcggcgacctgacccagtgcgtggactgcgtgatcccccccgagggcagcctgctgcaggaggccctgagcggcttcgccgaggccgccggcaccaccttcgtgagcctggtggtgagcggcagagtggtggccgccaccgagggctggtggagactgggcacccccgaggccgtgctgctgccctggctggtgggcagcctgcccccccagaccgccagagactaccccgtgtacctgccccacggcagccccaccgtgccccacagactgctgaccctgaccctgctgcccagcctggagctgtgcctgctgtgcggccccagcccccccctgagccagctgtacccccagctgctggagagatggtggcagcccctgctggaccccctgagagcctgcctgcccctgggccccagagccctgcccagcggcttccccctgcacaccgacatcctgggcctgctgctgctgcacctggagctgaagagatgcctgttcaccgtggagcccctgggcgacaaggagcccagccccgagcagagaagaagactgctgagaaacttctacaccctggtgaccagcacccacttcccccccgagcccggcccccccgagaagaccgaggacgaggtgtaccaggcccagctgcccagagcctgctacctggtgctgggcaccgaggagcccggcaccggcgtgagactggtggccctgcagctgggcctgagaagactgctgctgctgctgagcccccagagccccacccacggcctgagaagcctggccacccacaccctgcacgccctgacccccctgctgtag

SEQ ID NO: 82185 - DNA, 711 bp, synthetic construct
  misc_feature 1..711: note = Description of Artificial Sequence: Synthetic coding sequence
  source 1..711: mol_type = other DNA
atgggcgaggagggcaccggcggcaccgtgcacctgctgtgcctggccgccagcagcggcgtgcccctgttctgcagaagcagcagaggcggcgcccccgccagacagcagctgcccttcagcgtgatcggcagcctgaacggcgtgcacatgttcggccagaacctggaggtgcagctgagcagcgccagaaccgagaacaccaccgtggtgtggaagagcttccacgacagcatcaccctgatcgtgctgagcagcgaggtgggcatcagcgagctgagactggagagactgctgcagatggtgttcggcgccatggtgctgctggtgggcctggaggagctgaccaacatcagaaacgtggagagactgaagaaggacctgagagccagctactgcctgatcgacagcttcctgggcgacagcgagctgatcggcgacctgacccagtgcgtggactgcgtgatcccccccgagggcagcctgctgcaggtgctgggcatgctgtggaagctgctgcacctgttctgctggccctggctgagcccccaccccctgagcagcggccccctgagccagcccccccccatcctgagcgccagcagccccatccccacctggagccagaagaacctgttcagcttcttcttcagcttcctgagcctgagcttcctgttcagcttcctgagcctgttcctgttcgagacctag

SEQ ID NO: 82186 - DNA, 1164 bp, synthetic construct
  misc_feature 1..1164: note = Description of Artificial Sequence: Synthetic coding sequence
  source 1..1164: mol_type = other DNA
atgggcgaggagggcaccggcggcaccgtgcacctgctgtgcctggccgccagcagcggcgtgcccctgttctgcagaagcagcagaggcggcgcccccgccagacagcagctgcccttcagcgtgatcggcagcctgaacggcgtgcacatgttcggccagaacctggaggtgcagctgagcagcgccagaaccgagaacaccaccgtggtgtggaagagcttccacgacagcatcaccctgatcgtgctgagcagcgaggtgggcatcagcgagctgagactggagagactgctgcagatggtgttcggcgccatggtgctgctggtgggcctggaggagctgaccaacatcagaaacgtggagagactgaagaaggacctgagagccagctactgcctgatcgacagcttcctgggcgacagcgagctgatcggcgacctgacccagtgcgtggactgcgtgatcccccccgagggcagcctgctgcaggaggccctgagcggcttcgccgaggccgccggcaccaccttcgtgagcctggtggtgagcggcagagtggtggccgccaccgagggctggtggagactgggcacccccgaggccgtgctgctgccctggctggtgggcagcctgcccccccagaccgccagagactaccccgtgtacctgccccacggcagccccaccgtgccccacagactgctgaccctgaccctgctgcccagcctggagctgtgcctgctgtgcggccccagcccccccctgagccagctgtacccccagctgctggagagatggtggcagcccctgctggaccccctgagagcctgcctgcccctgggccccagagccctgcccagcggcttccccctgcacaccgacatcctgggcctgctgctgctgcacctggagctgaagagatgcctgttcaccgtggagcccctgggcgacaaggagcccagccccgagcagagaagaagactgctgagaaacttctacaccctggtgaccagcacccacttcccccccgagcccggcccccccgagaagaccgaggacgaggtgtaccaggcccagctgcccagagcctgctacctggtgatgggcgacggccacagacacggcgccgtgagcgtgagcctgttcatcagaagccagtag

SEQ ID NO: 82187 - DNA, 1149 bp, synthetic construct
  misc_feature 1..1149: note = Description of Artificial Sequence: Synthetic coding sequence
  source 1..1149: mol_type = other DNA
atgggcgaggagggcaccggcggcaccgtgcacctgctgtgcctggccgccagcagcggcgtgcccctgttctgcagaagcagcagaggcggcgcccccgccagacagcagctgcccttcagcgtgatcggcagcctgaacggcgtgcacatgttcggccagaacctggaggtgcagctgagcagcgccagaaccgagaacaccaccgtggtgctgctggtgggcctggaggagctgaccaacatcagaaacgtggagagactgaagaaggacctgagagccagctactgcctgatcgacagcttcctgggcgacagcgagctgatcggcgacctgacccagtgcgtggactgcgtgatcccccccgagggcagcctgctgcaggaggccctgagcggcttcgccgaggccgccggcaccaccttcgtgagcctggtggtgagcggcagagtggtggccgccaccgagggctggtggagactgggcacccccgaggccgtgctgctgccctggctggtgggcagcctgcccccccagaccgccagagactaccccgtgtacctgccccacggcagccccaccgtgccccacagactgctgaccctgaccctgctgcccagcctggagctgtgcctgctgtgcggccccagcccccccctgagccagctgtacccccagctgctggagagatggtggcagcccctgctggaccccctgagagcctgcctgcccctgggccccagagccctgcccagcggcttccccctgcacaccgacatcctgggcctgctgctgctgcacctggagctgaagagatgcctgttcaccgtggagcccctgggcgacaaggagcccagccccgagcagagaagaagactgctgagaaacttctacaccctggtgaccagcacccacttcccccccgagcccggcccccccgagaagaccgaggacgaggtgtaccaggcccagctgcccagagcctgctacctggtgctgggcaccgaggagcccggcaccggcgtgagactggtggccctgcagctgggcctgagaagactgctgctgctgctgagcccccagagccccacccacggcctgagaagcctggccacccacaccctgcacgccctgacccccctgctgtag

SEQ ID NO: 82188 - DNA, 279 bp, synthetic construct
  misc_feature 1..279: note = Description of Artificial Sequence: Synthetic coding sequence
  source 1..279: mol_type = other DNA
atggccagcctgggccacatcctggtgttctgcgtgggcctgctgaccatggccaaggccgagagccccaaggagcacgaccccttcacctacgactaccagagcctgcagatcggcggcctggtgatcgccggcatcctgttcatcctgggcatcctgatcgtgctgagcagaagatgcagatgcaagttcaaccagcagcagagaaccggcgagcccgacgaggaggagggcaccttcagaagcagcatcagaagactgagcaccagaagaagatag

SEQ ID NO: 82189 - DNA, 279 bp, synthetic construct; identical to SEQ ID NO: 82188
  misc_feature 1..279: note = Description of Artificial Sequence: Synthetic coding sequence
  source 1..279: mol_type = other DNA

SEQ ID NO: 82190 - DNA, 195 bp, synthetic construct
  misc_feature 1..195: note = Description of Artificial Sequence: Synthetic coding sequence
  source 1..195: mol_type = other DNA
atggacagatggtacctgggcggcagccccaagggcgacgtggaccccttctactacgactacgagaccgtgagaaacggcggcctgatcttcgccggcctggccttcatcgtgggcctgctgatcctgctgagcagaagattcagatgcggcggcaacaagaagagaagacagatcaacgaggacgagccctag

SEQ ID NO: 82191 - DNA, 201 bp, synthetic construct
  misc_feature 1..201: note = Description of Artificial Sequence: Synthetic coding sequence
  source 1..201: mol_type = other DNA
atgaccggcctgagcatggacggcggcggcagccccaagggcgacgtggaccccttctactacgactacgagaccgtgagaaacggcggcctgatcttcgccggcctggccttcatcgtgggcctgctgatcctgctgagcagaagattcagatgcggcggcaacaagaagagaagacagatcaacgaggacgagccctag

SEQ ID NO: 82192 - DNA, 195 bp, synthetic construct; identical to SEQ ID NO: 82190
  misc_feature 1..195: note = Description of Artificial Sequence: Synthetic coding sequence
  source 1..195: mol_type = other DNA

SEQ ID NO: 82193 - DNA, 264 bp, synthetic construct
  misc_feature 1..264: note = Description of Artificial Sequence: Synthetic coding sequence
  source 1..264: mol_type = other DNA
atgcagaaggtgaccctgggcctgctggtgttcctggccggcttccccgtgctggacgccaacgacctggaggacaagaacagccccttctactacgactggcacagcctgcaggtgggcggcctgatctgcgccggcgtgctgtgcgccatgggcatcatcatcgtgatgagcgccaagtgcaagtgcaagttcggccagaagagcggccaccaccccggcgagaccccccccctgatcacccccggcagcgcccagagctag

SEQ ID NO: 82194 - DNA, 342 bp, synthetic construct
  misc_feature 1..342: note = Description of Artificial Sequence: Synthetic coding sequence
  source 1..342: mol_type = other DNA
atgcagaaggtgaccctgggcctgctggtgttcctggccggcttccccgtgctggacgccaacgacctggaggacaagaacagccccttctactacgactggcacagcctgcaggtgggcggcctgatctgcgccggcgtgctgtgcgccatgggcatcatcatcgtgatgagcgagtggagaagcagcggcgagcaggccggcagaggctggggcagcccccccctgaccacccagctgagccccaccggcgccaagtgcaagtgcaagttcggccagaagagcggccaccaccccggcgagaccccccccctgatcacccccggcagcgcccagagctag

SEQ ID NO: 82195 - DNA, 291 bp, synthetic construct
  misc_feature 1..291: note = Description of Artificial Sequence: Synthetic coding sequence
  source 1..291: mol_type = other DNA
atgcagaaggtgaccctgggcctgctggtgttcctggccggcttccccgtgctggacgccaacgacctggaggacaagaacagccccttctactacgactggcacagcctgcaggtgggcggcctgatctgcgccggcgtgctgtgcgccatgggcatcatcatcgtgatgagcgagtggagaagcagcggcgagcaggccggcagaggctggggcagcccccccctgaccacccagctgagccccaccggcgccaagtgcaagtgcaagttcggccagaagagcggctag

SEQ ID NO: 82196 - DNA, 264 bp, synthetic construct; identical to SEQ ID NO: 82193
  misc_feature 1..264: note = Description of Artificial Sequence: Synthetic coding sequence
  source 1..264: mol_type = other DNA

SEQ ID NO: 82197 - DNA, 435 bp, synthetic construct
  misc_feature 1..435: note = Description of Artificial Sequence: Synthetic coding sequence
  source 1..435: mol_type = other DNA
atgggcagaggctacagcggcgccctgcaggccagaggcggcctggaggagcccctggagagaggcctgagaggccccagcttcacccagagccccctgcacggcgccgccgccgcctacctgagcgcccagagagacgccagcctgcccgtgcccggccagagaagcgacatgcagaaggtgaccctgggcctgctggtgttcctggccggcttccccgtgctggacgccaacgacctggaggacaagaacagccccttctactacgactggcacagcctgcaggtgggcggcctgatctgcgccggcgtgctgtgcgccatgggcatcatcatcgtgatgagcgccaagtgcaagtgcaagttcggccagaagagcggccaccaccccggcgagaccccccccctgatcacccccggcagcgcccagagctag

SEQ ID NO: 82198 - DNA, 186 bp, synthetic construct
  misc_feature 1..186: note = Description of Artificial Sequence: Synthetic coding sequence
  source 1..186: mol_type = other DNA
atgcagaaggtgaccctgggcctgctggtgttcctggccggcttccccgtgctggacgccaacgacctggaggacaagaacagccccttctactacggcgagagcccctgccccctgagccccccccacaaccccacctactgcctggtgcccagagtgcccatccagggctggggcctgacctag

SEQ ID NO: 82199 - DNA, 435 bp, synthetic construct; identical to SEQ ID NO: 82197
  misc_feature 1..435: note = Description of Artificial Sequence: Synthetic coding sequence
  source 1..435: mol_type = other DNA

SEQ ID NO: 82200 - DNA, 288 bp, synthetic construct
  misc_feature 1..288: note = Description of Artificial Sequence: Synthetic coding sequence
  source 1..288: mol_type = other DNA
atggagctggtgctggtgttcctgtgcagcctgctggcccccatggtgctggccagcgccgccgagaaggagaaggagatggaccccttccactacgactaccagaccctgagaatcggcggcctggtgttcgccgtggtgctgttcagcgtgggcatcctgctgatcctgagcagaagatgcaagtgcagcttcaaccagaagcccagagcccccggcgacgaggaggcccaggtggagaacctgatcaccgccaacgccaccgagccccagaaggccgagaactag

SEQ ID NO: 82201 - DNA, 288 bp, synthetic construct; identical to SEQ ID NO: 82200
  misc_feature 1..288: note = Description of Artificial Sequence: Synthetic coding sequence
  source 1..288: mol_type = other DNA

SEQ ID NO: 82202 - DNA, 288 bp, synthetic construct; identical to SEQ ID NO: 82200
  misc_feature 1..288: note = Description of Artificial Sequence: Synthetic coding sequence
  source 1..288: mol_type = other DNA

SEQ ID NO: 82203 - DNA, 288 bp, synthetic construct; identical to SEQ ID NO: 82200
  misc_feature 1..288: note = Description of Artificial Sequence: Synthetic coding sequence
  source 1..288: mol_type = other DNA

SEQ ID NO: 82204 - DNA, 288 bp, synthetic construct; identical to SEQ ID NO: 82200
  misc_feature 1..288: note = Description of Artificial Sequence: Synthetic coding sequence
  source 1..288: mol_type = other DNA

SEQ ID NO: 82205 - DNA, 288 bp, synthetic construct; identical to SEQ ID NO: 82200
  misc_feature 1..288: note = Description of Artificial Sequence: Synthetic coding sequence
  source 1..288: mol_type = other DNA

SEQ ID NO: 82206 - DNA, 243 bp, synthetic construct
  misc_feature 1..243: note = Description of Artificial Sequence: Synthetic coding sequence
  source 1..243: mol_type = other DNA
atggccacccccacccagacccccaccaaggcccccgaggagcccgaccccttctactacgactacaacaccgtgcagaccgtgggcatgaccctggccaccatcctgttcctgctgggcatcctgatcgtgatcagcaagaaggtgaagtgcagaaaggccgacagcagaagcgagagccccacctgcaagagctgcaagagcgagctgcccagcagcgcccccggcggcggcggcgtgtag

SEQ ID NO: 82207 - DNA, 402 bp, synthetic construct
  misc_feature 1..402: note = Description of Artificial Sequence: Synthetic coding sequence
  source 1..402: mol_type = other DNA
atggtgagcgtgggcttcggcgacagagccggcctgggcagcagctgcagatgcagccagatcacccccgacatggccagcgccgtggccaccagatacgtgctgggccactggcccagagaccacatctgcggctgcggcagccaccagctgagcagctggagagccgagcccgacggcggcgtgggcatgccccacaccctgagcgagccccccagcggcctgaccggcatctgggccggcgccctggtgagccccgagaagcagatgaaggagaacctgagaagcaacgacagcgagcccagactgcccggcttcgagagctgcctgatccacagcctggccgtgtggccctgggccagcaacttcgccagcctgggccccagcgtgaacaagggctag

SEQ ID NO: 82208 - DNA, 882 bp, synthetic construct
  misc_feature 1..882: note = Description of Artificial Sequence: Synthetic coding sequence
  source 1..882: mol_type = other DNA
atgtacttcctgacccccatcctggtggccatcctgtgcatcctggtggtgtggatcttcaagaacgccgacagaagcatggagaagaagaagggcgagcccagaaccagagccgaggccagaccctgggtggacgaggacctgaaggacagcagcgacctgcaccaggccgaggaggacgccgacgagtggcaggagagcgaggagaacgtggagcacatccccttcagccacaaccactaccccgagaaggagatggtgaagagaagccaggagttctacgagctgctgaacaagagaagaagcgtgagattcatcagcaacgagcaggtgcccatggaggtgatcgacaacgtgatcagaaccgccggcaccgcccccagcggcgcccacaccgagccctggaccttcgtggtggtgaaggaccccgacgtgaagcacaagatcagaaagatcatcgaggaggaggaggagatcaactacatgaagagaatgggccacagatgggtgaccgacctgaagaagctgagaaccaactggatcaaggagtacctggacaccgcccccatcctgatcctgatcttcaagcaggtgcacggcttcgccgccaacggcaagaagaaggtgcactactacaacgagatcagcgtgagcatcgcctgcggcatcctgctggccgccctgcaggtgaacaacggcatcaccatgagacaccagaccgccagacacagacacctgatcgagggccccggcagaagcagcgaggcctgcagcaagctgagcagccagggctgccccgagtgcagaagcggcgactgccactaccacagcagccagctgtggcccagcaccgagggcgcccccggcccccccagaacctag

SEQ ID NO: 82209 - DNA, 1458 bp, synthetic construct
  misc_feature 1..1458: note = Description of Artificial Sequence: Synthetic coding sequence
  source 1..1458: mol_type = other DNA
atgggctgcgtgcagtgcaaggacaaggaggccaccaagctgaccgaggagagagacggcagcctgaaccagagcagcggctacagatacggcaccgaccccaccccccagcactaccccagcttcggcgtgaccagcatccccaactacaacaacttccacgccgccggcggccagggcctgaccgtgttcggcggcgtgaacagcagcagccacaccggcaccctgagaaccagaggcggcaccggcgtgaccctgttcgtggccctgtacgactacgaggccagaaccgaggagtggtacttcggcaagctgggcagaaaggacgccgagagacagctgctgagcttcggcaaccccagaggcaccttcctgatcagagagagcgagaccaccaagggcgcctacagcctgagcatcagagactgggacgacatgaagggcgaccacgtgaagcactacaagatcagaaagctggacaacggcggctactacatcaccaccagagcccagttcgagaccctgcagcagctggtgcagcactacagcgagaaggccgacggcctgtgcttcaacctgaccgtgatcgccagcagctgcaccccccagaccagcggcctggccaaggacgcctgggaggtggccagaagaagcctgtgcctggagaagaagctgggccagggctgcttcgccgaggtgtggctgggcacctggaacggcaacaccaaggtggccatcaagaccctgaagcccggcaccatgagccccgagagcttcctggaggaggcccagatcatgaagaagctgaagcacgacaagctggtgcagctgtacgccgtggtgagcgaggagcccatctacatcgtgaccgagtacatgaacaagggcagcctgctggacttcctgaaggacggcgagggcagagccctgaagctgcccaacctggtggacatggccgcccaggtggccgccggcatggcctacatcgagagaatgaactacatccacagagacctgagaagcgccaacatcctggtgggcaacggcctgatctgcaagatcgccgacttcggcctggccagactgatcgaggacaacgagtacaccgccagacagggcgccaagttccccatcaagtggaccgcccccgaggccgccctgtacggcagattcaccatcaagagcgacgtgtggagcttcggcatcctgctgaccgagctggtgaccaagggcagagtgccctaccccggcatgaacaacagagaggtgctggagcaggtggagagaggctacagaatgccctgcccccaggactgccccatcagcctgcacgagctgatgatccactgctggaagaaggaccccgaggagagacccaccttcgagtacctgcagagcttcctggaggactacttcaccgccaccgagccccagtaccagcccggcgagaacctgtag

SEQ ID NO: 82210 - DNA, 1614 bp, synthetic construct
  misc_feature 1..1614: note = Description of Artificial Sequence: Synthetic coding sequence
  source 1..1614: mol_type = other DNA
atgggctgcgtgcagtgcaaggacaaggaggccaccaagctgaccgaggagagagacggcagcctgaaccagagcagcggctacagatacggcaccgaccccaccccccagcactaccccagcttcggcgtgaccagcatccccaactacaacaacttccacgccgccggcggccagggcctgaccgtgttcggcggcgtgaacagcagcagccacaccggcaccctgagaaccagaggcggcaccggcgtgaccctgttcgtggccctgtacgactacgaggccagaaccgaggacgacctgagcttccacaagggcgagaagttccagatcctgaacagcagcgagggcgactggtgggaggccagaagcctgaccaccggcgagaccggctacatccccagcaactacgtggcccccgtggacagcatccaggccgaggagtggtacttcggcaagctgggcagaaaggacgccgagagacagctgctgagcttcggcaaccccagaggcaccttcctgatcagagagagcgagaccaccaagggcgcctacagcctgagcatcagagactgggacgacatgaagggcgaccacgtgaagcactacaagatcagaaagctggacaacggcggctactacatcaccaccagagcccagttcgagaccctgcagcagctggtgcagcactacagcgagagagccgccggcctgtgctgcagactggtggtgccctgccacaagggcatgcccagactgaccgacctgagcgtgaagaccaaggacgtgtgggagatccccagagagagcctgcagctgatcaagagactgggcaacggccagttcggcgaggtgtggatgggcacctggaacggcaacaccaaggtggccatcaagaccctgaagcccggcaccatgagccccgagagcttcctggaggaggcccagatcatgaagaagctgaagcacgacaagctggtgcagctgtacgccgtggtgagcgaggagcccatctacatcgtgaccgagtacatgaacaagggcagcctgctggacttcctgaaggacggcgagggcagagccctgaagctgcccaacctggtggacatggccgcccaggtggccgccggcatggcctacatcgagagaatgaactacatccacagagacctgagaagcgccaacatcctggtgggcaacggcctgatctgcaagatcgccgacttcggcctggccagactgatcgaggacaacgagtacaccgccagacagggcgccaagttccccatcaagtggaccgcccccgaggccgccctgtacggcagattcaccatcaagagcgacgtgtggagcttcggcatcctgctgaccgagctggtgaccaagggcagagtgccctaccccggcatgaacaacagagaggtgctggagcaggtggagagaggctacagaatgccctgcccccaggactgccccatcagcctgcacgagctgatgatccactgctggaagaaggaccccgaggagagacccaccttcgagtacctgcagagcttcctggaggactacttcaccgccaccgagccccagtaccagcccggcgagaacctgtag

SEQ ID NO: 82211 - DNA, 1449 bp, synthetic construct
  misc_feature 1..1449: note = Description of Artificial Sequence: Synthetic coding sequence
  source 1..1449: mol_type = other DNA
atgggctgcgtgcagtgcaaggacaaggaggccaccaagctgaccgaggagagagacggcagcctgaaccagagcagcggctacagatacggcaccgaccccaccccccagcactaccccagcttcggcgtgaccagcatccccaactacaacaacttccacgccgccggcggccagggcctgaccgtgttcggcggcgtgaacagcagcagccacaccggcaccctgagaaccagaggcggcaccggcgtgaccctgttcgtggccctgtacgactacgaggccagaaccgaggacgacctgagcttccacaagggcgagaagttccagatcctgaacagcagcgagggcgactggtgggaggccagaagcctgaccaccggcgagaccggctacatccccagcaactacgtggcccccgtggacagcatccaggccgaggagtggtacttcggcaagctgggcagaaaggacgccgagagacagctgctgagcttcggcaaccccagaggcaccttcctgatcagagagagcgagaccaccaagggcgcctacagcctgagcatcagagactgggacgacatgaagggcgaccacgtgaagcactacaagatcagaaagctggacaacggcggctactacatcaccaccagagcccagttcgagaccctgcagcagctggtgcagcactacagcggcacctggaacggcaacaccaaggtggccatcaagaccctgaagcccggcaccatgagccccgagagcttcctggaggaggcccagatcatgaagaagctgaagcacgacaagctggtgcagctgtacgccgtggtgagcgaggagcccatctacatcgtgaccgagtacatgaacaagggcagcctgctggacttcctgaaggacggcgagggcagagccctgaagctgcccaacctggtggacatggccgcccaggtggccgccggcatggcctacatcgagagaatgaactacatccacagagacctgagaagcgccaacatcctggtgggcaacggcctgatctgcaagatcgccgacttcggcctggccagactgatcgaggacaacgagtacaccgccagacagggcgccaagttccccatcaagtggaccgcccccgaggccgccctgtacggcagattcaccatcaagagcgacgtgtggagcttcggcatcctgctgaccgagctggtgaccaagggcagagtgccctaccccggcatgaacaacagagaggtgctggagcaggtggagagaggctacagaatgccctgcccccaggactgccccatcagcctgcacgagctgatgatccactgctggaagaaggaccccgaggagagacccaccttcgagtacctgcagagcttcctggaggactacttcaccgccaccgagccccagtaccagcccggcgagaacctgtag

SEQ ID NO: 82212 - DNA, 1614 bp, synthetic construct; identical to SEQ ID NO: 82210
  misc_feature 1..1614: note = Description of Artificial Sequence: Synthetic coding sequence
  source 1..1614: mol_type = other DNA

SEQ ID NO: 82213 - DNA, 1605 bp, synthetic construct
  misc_feature 1..1605: note = Description of Artificial Sequence: Synthetic coding sequence
  source 1..1605: mol_type = other DNA
atgggctgcgtgcagtgcaaggacaaggaggccaccaagctgaccgaggagagagacggcagcctgaaccagagcagcggctacagatacggcaccgaccccaccccccagcactaccccagcttcggcgtgaccagcatccccaactacaacaacttccacgccgccggcggccagggcctgaccgtgttcggcggcgtgaacagcagcagccacaccggcaccctgagaaccagaggcggcaccggcgtgaccctgttcgtggccctgtacgactacgaggccagaaccgaggacgacctgagcttccacaagggcgagaagttccagatcctgaacagcagcgagggcgactggtgggaggccagaagcctgaccaccggcgagaccggctacatccccagcaactacgtggcccccgtggacagcatccaggccgaggagtggtacttcggcaagctgggcagaaaggacgccgagagacagctgctgagcttcggcaaccccagaggcaccttcctgatcagagagagcgagaccaccaagggcgcctacagcctgagcatcagagactgggacgacatgaagggcgaccacgtgaagcactacaagatcagaaagctggacaacggcggctactacatcaccaccagagcccagttcgagaccctgcagcagctggtgcagcactacagcgagaaggccgacggcctgtgcttcaacctgaccgtgatcgccagcagctgcaccccccagaccagcggcctggccaaggacgcctgggaggtggccagaagaagcctgtgcctggagaagaagctgggccagggctgcttcgccgaggtgtggctgggcacctggaacggcaacaccaaggtggccatcaagaccctgaagcccggcaccatgagccccgagagcttcctggaggaggcccagatcatgaagaagctgaagcacgacaagctggtgcagctgtacgccgtggtgagcgaggagcccatctacatcgtgaccgagtacatgaacaagggcagcctgctggacttcctgaaggacggcgagggcagagccctgaagctgcccaacctggtggacatggccgcccaggtggccgccggcatggcctacatcgagagaatgaactacatccacagagacctgagaagcgccaacatcctggtgggcaacggcctgatctgcaagatcgccgacttcggcctggccagactgatcgaggacaacgagtacaccgccagacagggcgccaagttccccatcaagtggaccgcccccgaggccgccctgtacggcagattcaccatcaagagcgacgtgtggagcttcggcatcctgctgaccgagctggtgaccaagggcagagtgccctaccccggcatgaacaacagagaggtgctggagcaggtggagagaggctacagaatgccctgcccccaggactgccccatcagcctgcacgagctgatgatccactgctggaagaaggaccccgaggagagacccaccttcgagtacctgcagagcttcctggaggactacttcaccgccaccgagccccagtaccagcccggcgagaacctgtag

SEQ ID NO: 82214 - DNA, 1605 bp, synthetic construct; identical to SEQ ID NO: 82213
  misc_feature 1..1605: note = Description of Artificial Sequence: Synthetic coding sequence
  source 1..1605: mol_type = other DNA

SEQ ID NO: 82215 - DNA, 363 bp, synthetic construct
  misc_feature 1..363: note = Description of Artificial Sequence: Synthetic coding sequence
  source 1..363: mol_type = other DNA
atgggctgcgtgcagtgcaaggacaaggaggccaccaagctgaccgaggagagagacggcagcctgaaccagagcagcggctacagatacggcaccgaccccaccccccagcactaccccagcttcggcgtgaccagcatccccaactacaacaacttccacgccgccggcggccagggcctgaccgtgttcggcggcgtgaacagcagcagccacaccggcaccctgagaaccagaggcggcaccggcgtgaccctgttcgtggccctgtacgactacgaggccagaaccgaggacgacctgagcttccacaagggcgagaagttccagatcctgaacagcagcgagggcgactggtggtag

SEQ ID NO: 82216 - DNA, 699 bp, synthetic construct
  misc_feature 1..699: note = Description of Artificial Sequence: Synthetic coding sequence
  source 1..699: mol_type = other DNA
atgggctgcgtgcagtgcaaggacaaggaggccaccaagctgaccgaggagagagacggcagcctgaaccagagcagcggctacagatacggcaccgaccccaccccccagcactaccccagcttcggcgtgaccagcatccccaactacaacaacttccacgccgccggcggccagggcctgaccgtgttcggcggcgtgaacagcagcagccacaccggcaccctgagaaccagaggcggcaccggcgtgaccctgttcgtggccctgtacgactacgaggccagaaccgaggacgacctgagcttccacaagggcgagaagttccagatcctgaacagcagcgagggcgactggtgggaggccagaagcctgaccaccggcgagaccggctacatccccagcaactacgtggcccccgtggacagcatccaggccgaggagtggtacttcggcaagctgggcagaaaggacgccgagagacagctgctgagcttcggcaaccccagaggcaccttcctgatcagagagagcgagaccaccaagggcgcctacagcctgagcatcagagactgggacgacatgaagggcgaccacgtgaagcactacaagatcagaaagctggacaacggcggctactacatcaccaccagagcccagttcgagaccctgcagcagctggtgcagcactacagctag

SEQ ID NO: 82217 - DNA, 321 bp, synthetic construct
  misc_feature 1..321: note = Description of Artificial Sequence: Synthetic coding sequence
  source 1..321: mol_type = other DNA
atgggctgcgtgcagtgcaaggacaaggaggccaccaagctgaccgaggagagagacggcagcctgaaccagagcagcggctacagatacggcaccgaccccaccccccagcactaccccagcttcggcgtgaccagcatccccaactacaacaacttccacgccgccggcggccagggcctgaccgtgttcggcggcgtgaacagcagcagccacaccggcaccctgagaaccagaggcggcaccggcgtgaccctgttcgtggccctgtacgactacgaggccagaaccgaggacgacctgagcttccacaagggctag

SEQ ID NO: 82218 - DNA, 198 bp, synthetic construct
  misc_feature 1..198: note = Description of Artificial Sequence: Synthetic coding sequence
  source 1..198: mol_type = other DNA
atgggctgcgtgcagtgcaaggacaaggaggccaccaagctgaccgaggagagagacggcagcctgaaccagagcagcggctacagatacggcaccgaccccaccccccagcactaccccagcttcggcgtgaccagcatccccaactacaacaacttccacgccgccggcggccagggcctgaccgtgttcggctag

SEQ ID NO: 82219 - DNA, 528 bp, synthetic construct
  misc_feature 1..528: note = Description of Artificial Sequence: Synthetic coding sequence
  source 1..528: mol_type = other DNA
atgggctgcgtgcagtgcaaggacaaggaggccaccaagctgaccgaggagagagacggcagcctgaaccagagcagcggctacagatacggcaccgaccccaccccccagcactaccccagcttcggcgtgaccagcatccccaactacaacaacttccacgccgccggcggccagggcctgaccgtgttcggcggcgtgaacagcagcagccacaccggcaccctgagaaccagaggcggcaccggcgtgaccctgttcgtggccctgtacgactacgaggccagaaccgaggacgacctgagcttccacaagggcgagaagttccagatcctgaacagcagcgagggcgactggtgggaggccagaagcctgaccaccggcgagaccggctacatccccagcaactacgtggcccccgtggacagcatccaggccgaggagtggtacttcggcaagctgggcagaaaggacgccgagagacagctgctgagcttcggcaaccccagaggcaccttcctgatctag

SEQ ID NO: 82220 - DNA, 462 bp, synthetic construct
  misc_feature 1..462: note = Description of Artificial Sequence: Synthetic coding sequence
  source 1..462: mol_type = other DNA
atgggctgcgtgcagtgcaaggacaaggaggccaccaagctgaccgaggagagagacggcagcctgaaccagagcagcggctacagatacggcaccgaccccaccccccagcactaccccagcttcggcgtgaccagcatccccaactacaacaacttccacgccgccggcggccagggcctgaccgtgttcggcggcgtgaacagcagcagccacaccggcaccctgagaaccagaggcggcaccggcgtgaccctgttcgtggccctgtacgactacgaggccagaaccgaggacgacctgagcttccacaagggcgagaagttccagatcctgaacagcagcgagggcgactggtgggaggccagaagcctgaccaccggcgagaccggctacatccccagcaactacgtggcccccgtggacagcatccaggccgaggagtggtacttcggcaagtag

SEQ ID NO: 82221 - DNA, 357 bp, synthetic construct
  misc_feature 1..357: note = Description of Artificial Sequence: Synthetic coding sequence
  source 1..357: mol_type = other DNA
atgggctgcgtgcagtgcaaggacaaggaggccaccaagctgaccgaggagagagacggcagcctgaaccagagcagcggctacagatacggcaccgaccccaccccccagcactaccccagcttcggcgtgaccagcatccccaactacaacaacttccacgccgccggcggccagggcctgaccgtgttcggcggcgtgaacagcagcagccacaccggcaccctgagaaccagaggcggcaccggcgtgaccctgttcgtggccctgtacgactacgaggccagaaccgaggacgacctgagcttccacaagggcgagaagttccagatcctgaacagcagcgagggcgactag

SEQ ID NO: 82222 - DNA, 561 bp, synthetic construct
  misc_feature 1..561: note = Description of Artificial Sequence: Synthetic coding sequence
  source 1..561: mol_type = other DNA
atgggctgcgtgcagtgcaaggacaaggaggccaccaagctgaccgaggagagagacggcagcctgaaccagagcagcggctacagatacggcaccgaccccaccccccagcactaccccagcttcggcgtgaccagcatccccaactacaacaacttccacgccgccggcggccagggcctgaccgtgttcggcggcgtgaacagcagcagccacaccggcaccctgagaaccagaggcggcaccggcgtgaccctgttcgtggccctgtacgactacgaggccagaaccgaggacgacctgagcttccacaagggcgagaagttccagatcctgaacagcagcgagggcgactggtgggaggccagaagcctgaccaccggcgagaccggctacatccccagcaactacgtggcccccgtggacagcatccaggccgaggagtggtacttcggcaagctgggcagaaaggacgccgagagacagctgctgagcttcggcaaccccagaggcaccttcctgatcagagagagcgagaccaccaagggcgcctacagctag

SEQ ID NO: 82223 - DNA, 312 bp, synthetic construct
  misc_feature 1..312: note = Description of Artificial Sequence: Synthetic coding sequence
  source 1..312: mol_type = other DNA
atgggctgcgtgcagtgcaaggacaaggaggccaccaagctgaccgaggagagagacggcagcctgaaccagagcagcggctacagatacggcaccgaccccaccccccagcactaccccagcttcggcgtgaccagcatccccaactacaacaacttccacgccgccggcggccagggcctgaccgtgttcggcggcgtgaacagcagcagccacaccggcaccctgagaaccagaggcggcaccggcgtgaccctgttcgtggccctgtacgactacgaggccagaaccgaggacgacctgagcttctag

SEQ ID NO: 82224 - DNA, 459 bp, synthetic construct
  misc_feature 1..459: note = Description of Artificial Sequence: Synthetic coding sequence
  source 1..459: mol_type = other DNA
atgggctgcgtgcagtgcaaggacaaggaggccaccaagctgaccgaggagagagacggcagcctgaaccagagcagcggctacagatacggcaccgaccccaccccccagcactaccccagcttcggcgtgaccagcatccccaactacaacaacttccacgccgccggcggccagggcctgaccgtgttcggcggcgtgaacagcagcagccacaccggcaccctgagaaccagaggcggcaccggcgtgaccctgttcgtggccctgtacgactacgaggccagaaccgaggacgacctgagcttccacaagggcgagaagttccagatcctgaacagcagcgagggcgactggtgggaggccagaagcctgaccaccggcgagaccggctacatccccagcaactacgtggcccccgtggacagcatccaggccgaggagtggtacttcggctag

SEQ ID NO: 82225 - DNA, 351 bp, synthetic construct
  misc_feature 1..351: note = Description of Artificial Sequence: Synthetic coding sequence
  source 1..351: mol_type = other DNA
atgggctgcgtgcagtgcaaggacaaggaggccaccaagctgaccgaggagagagacggcagcctgaaccagagcagcggctacagatacggcaccgaccccaccccccagcactaccccagcttcggcgtgaccagcatccccaactacaacaacttccacgccgccggcggccagggcctgaccgtgttcggcggcgtgaacagcagcagccacaccggcaccctgagaaccagaggcggcaccggcgtgaccctgttcgtggccctgtacgactacgaggccagaaccgaggacgacctgagcttccacaagggcgagaagttccagatcctgaacagcagcgagtag

SEQ ID NO: 82226 - DNA, 423 bp, synthetic construct
  misc_feature 1..423: note = Description of Artificial Sequence: Synthetic coding sequence
  source 1..423: mol_type = other DNA
atgggctgcgtgcagtgcaaggacaaggaggccaccaagctgaccgaggagagagacggcagcctgaaccagagcagcggctacagatacggcaccgaccccaccccccagcactaccccagcttcggcgtgaccagcatccccaactacaacaacttccacgccgccggcggccagggcctgaccgtgttcggcggcgtgaacagcagcagccacaccggcaccctgagaaccagaggcggcaccggcgtgaccctgttcgtggccctgtacgactacgaggccagaaccgaggacgacctgagcttccacaagggcgagaagttccagatcctgaacagcagcgagggcgactggtgggaggccagaagcctgaccaccggcgagaccggctacatccccagcaactacgtggccccctag

SEQ ID NO: 82227 - DNA, 438 bp, synthetic construct
  misc_feature 1..438: note = Description of Artificial Sequence: Synthetic coding sequence
  source 1..438: mol_type = other DNA
atgggctgcgtgcagtgcaaggacaaggaggccaccaagctgaccgaggagagagacggcagcctgaaccagagcagcggctacagatacggcaccgaccccaccccccagcactaccccagcttcggcgtgaccagcatccccaactacaacaacttccacgccgccggcggccagggcctgaccgtgttcggcggcgtgaacagcagcagccacaccggcaccctgagaaccagaggcggcaccggcgtgaccctgttcgtggccctgtacgactacgaggccagaaccgaggacgacctgagcttccacaagggcgagaagttccagatcctgaacagcagcgagggcgactggtgggaggccagaagcctgaccaccggcgagaccggctacatccccagcaactacgtggcccccgtggacagcatccagtag

SEQ ID NO: 82228 - DNA, 1605 bp, synthetic construct; identical to SEQ ID NO: 82213
  misc_feature 1..1605: note = Description of Artificial Sequence: Synthetic coding sequence
  source 1..1605: mol_type = other DNA

SEQ ID NO: 82229 - DNA, 1458 bp, synthetic construct
  misc_feature 1..1458: note = Description of Artificial Sequence: Synthetic coding sequence
  source 1..1458: mol_type = other DNA
atgggctgcgtgcagtgcaaggacaaggaggccaccaagctgaccgaggagagagacggcagcctgaaccagagcagcggctacagatacggcaccgaccccaccccccagcactaccccagcttcggcgtgaccagcatccccaactacaacaacttccacgccgccggcggccagggcctgaccgtgttcggcggcgtgaacagcagcagccacaccggcaccctgagaaccagaggcggcaccggcgtgaccctgttcgtggccctgtacgactacgaggcccaggccgaggagtggtacttcggcaagctgggcagaaaggacgccgagagacagctgctgagcttcggcaaccccagaggcaccttcctgatcagagagagcgagaccaccaagggcgcctacagcctgagcatcagagactgggacgacatgaagggcgaccacgtgaagcactacaagatcagaaagctggacaacggcggctactacatcaccaccagagcccagttcgagaccctgcagcagctggtgcagcactacagcgagaaggccgacggcctgtgcttcaacctgaccgtgatcgccagcagctgcaccccccagaccagcggcctggccaaggacgcctgggaggtggccagaagaagcctgtgcctggagaagaagctgggccagggctgcttcgccgaggtgtggctgggcacctggaacggcaacaccaaggtggccatcaagaccctgaagcccggcaccatgagccccgagagcttcctggaggaggcccagatcatgaagaagctgaagcacgacaagctggtgcagctgtacgccgtggtgagcgaggagcccatctacatcgtgaccgagtacatgaacaagggcagcctgctggacttcctgaaggacggcgagggcagagccctgaagctgcccaacctggtggacatggccgcccaggtggccgccggcatggcctacatcgagagaatgaactacatccacagagacctgagaagcgccaacatcctggtgggcaacggcctgatctgcaagatcgccgacttcggcctggccagactgatcgaggacaacgagtacaccgccagacagggcgccaagttccccatcaagtggaccgcccccgaggccgccctgtacggcagattcaccatcaagagcgacgtgtggagcttcggcatcctgctgaccgagctggtgaccaagggcagagtgccctaccccggcatgaacaacagagaggtgctggagcaggtggagagaggctacagaatgccctgcccccaggactgccccatcagcctgcacgagctgatgatccactgctggaagaaggaccccgaggagagacccaccttcgagtacctgcagagcttcctggaggactacttcaccgccaccgagccccagtaccagcccggcgagaacctgtag

SEQ ID NO: 82230 - DNA, 4437 bp, synthetic construct
  misc_feature 1..4437: note = Description of Artificial Sequence: Synthetic coding sequence
  source 1..4437: mol_type = other DNA
atggccagcaccaacgccgagagccagctgcagagaatcatcagagacctgcaggacgccgtgaccgagctgagcaaggagttccaggaggccggcgagcccatcaccgacgacagcaccagcctgcacaagttcagctacaagctggagtacctgctgcagttcgaccagaaggagaaggccaccctgctgggcaacaagaaggactactgggactacttctgcgcctgcctggccaaggtgaagggcgccaacgacggcatcagattcgtgaagagcatcagcgagctgagaaccagcctgggcaagggcagagccttcatcagatacagcctggtgcaccagagactggccgacaccctgcagcagtgcttcatgaacaccaaggtgaccagcgactggtactacgccagaagccccttcctgcagcccaagctgagcagcgacatcgtgggccagctgtacgagctgaccgaggtgcagttcgacctggccagcagaggcttcgacctggacgccgcctggcccaccttcgccagaagaaccctgaccaccggcagcagcgcctacctgtggaagccccccagcagaagcagcagcatgagcagcctggtgagcagctacctgcagacccaggagatggtgagcaacttcgacctgaacagccccctgaacaacgaggccctggagggcttcgacgagatgagactggagctggaccagctggaggtgagagagaagcagctgagagagagaatgcagcagctggacagagagaaccaggagctgagagccgccgtgagccagcagggcgagcagctgcagaccgagagagagagaggcagaaccgccgccgaggacaacgtgagactgacctgcctggtggccgagctgcagaagcagtgggaggtgacccaggccacccagaacaccgtgaaggagctgcagacctgcctgcagggcctggagctgggcgccgccgagaaggaggaggactaccacaccgccctgagaagactggagagcatgctgcagcccctggcccaggagctggaggccaccagagacagcctggacaagaagaaccagcacctggccagcttccccggctggctggccatggcccagcagaaggccgacaccgccagcgacaccaagggcagacaggagcccatccccagcgacgccgcccaggagatgcaggagctgggcgagaagctgcaggccctggagagagagagaaccaaggtggaggaggtgaacagacagcagagcgcccagctggagcagctggtgaaggagctgcagctgaaggaggacgccagagccagcctggagagactggtgaaggagatggcccccctgcaggaggagctgagcggcaagggccaggaggccgaccagctgtggagaagactgcaggagctgctggcccacaccagcagctgggaggaggagctggccgagctgagaagagagaagaagcagcagcaggaggagaaggagctgctggagcaggaggtgagaagcctgaccagacagctgcagttcctggagacccagctggcccaggtgagccagcacgtgagcgacctggaggagcagaagaagcagctgatccaggacaaggaccacctgagccagcaggtgggcatgctggagagactggccggcccccccggccccgagctgcccgtggccggcgagaagaacgaggccctggtgcccgtgaacagcagcctgcaggaggcctggggcaagcccgaggaggagcagagaggcctgcaggaggcccagctggacgacaccaaggtgcaggagggcagccaggaggaggagctgagacaggccaacagagagctggagaaggagctgcagaacgtggtgggcagaaaccagctgctggagggcaagctgcaggccctgcaggccgactaccaggccctgcagcagagagagagcgccatccagggcagcctggccagcctggaggccgagcaggccagcatcagacacctgggcgaccagatggaggccagcctgctggccgtgagaaaggccaaggaggccatgaaggcccagatggccgagaaggaggccatcctgcagagcaaggagggcgagtgccagcagctgagagaggaggtggagcagtgccagcagctggccgaggccagacacagagagctgagagccctggagagccagtgccagcagcagacccagctgatcgaggtgctgaccgccgagaagggccagcagggcgtgggcccccccaccgacaacgaggccagagagctggccgcccagctggccctgagccaggcccagctggaggtgcaccagggcgaggtgcagagactgcaggcccaggtggtggacctgcaggccaagatgagagccgccctggacgaccaggacaaggtgcagagccagctgagcatggccgaggccgtgctgagagagcacaagaccctggtgcagcagctgaaggagcagaacgaggccctgaacagagcccacgtgcaggagctgctgcagtgcagcgagagagagggcgccctgcaggaggagagagccgacgaggcccagcagagagaggaggagctgagagccctgcaggaggagctgagccaggccaagtgcagcagcgaggaggcccagctggagcacgccgagctgcaggagcagctgcacagagccaacaccgacaccgccgagctgggcatccaggtgtgcgccctgaccgtggagaaggagagagtggaggaggccctggcctgcgccgtgcaggagctgcaggacgccaaggaggccgccagcagagagagagagggcctggagagacaggtggccggcctgcagcaggagaaggagagcctgcaggagaagctgaaggccgccaaggccgccgccggcagcctgcccggcctgcaggcccagctggcccaggccgagcagagagcccagagcctgcaggaggccgcccaccaggagctgaacaccctgaagttccagctgagcgccgagatcatggactaccagagcagactgaagaacgccggcgaggagtgcaagagcctgagaggccagctggaggagcagggcagacagctgcaggccgccgaggaggccgtggagaagctgaaggccacccaggccgacatgggcgagaagctgagctgcaccagcaaccacctggccgagtgccaggccgccatgctgagaaaggacaaggagggcgccgccctgagagaggacctggagagaacccagaaggagctggagaaggccaccaccaagatccaggagtactacaacaagctgtgccaggaggtgaccaacagagagagaaacgaccagaagatgctggccgacctggacgacctgaacagaaccaagaagtacctggaggagagactgatcgagctgctgagagacaaggacgccctgtggcagaagagcgacgccctggagttccagcagaagctgagcgccgaggagagatggctgggcgacaccgaggccaaccactgcctggactgcaagagagagttcagctggatggtgagaagacaccactgcagaatctgcggcagaatcttctgctactactgctgcaacaactacgtgctgagcaagcacggcggcaagaaggagagatgctgcagagcctgcttccagaagctgagcgagggccccggcagccccgacagcagcggcagcggcaccagccagggcgagcccagccccgccctgagccccgccagccccggcccccaggccaccggcggccagggcgccaacaccgactacagaccccccgacgacgccgtgttcgacatcatcaccgacgaggagctgtgccagatccaggagagcggcagcagcctgcccgagacccccaccgagaccgacagcctggaccccaacgccgccgagcaggacaccaccagcaccagcctgacccccgaggacaccgaggacatgcccgtgggccaggacagcgagatctgcctgctgaagagcggcgagctgatgatcaaggtgcccctgaccgtggacgagatcgccagcttcggcgagggcagcagagagctgttcgtgagaagcagcacctacagcctgatccccatcaccgtggccgaggccggcctgaccatcagctgggtgttcagcagcgaccccaagagcatcagcttcagcgtggtgttccaggaggccgaggacacccccctggaccagtgcaaggtgctgatccccaccaccagatgcaacagccacaaggagaacatccagggccagctgaaggtgagaacccccggcatctacatgctgatcttcgacaacaccttcagcagattcgtgagcaagaaggtgttctaccacctgaccgtggacagacccgtgatctacgacggcagcgacttcctgtag

SEQ ID NO: 82231 - DNA, 804 bp, synthetic construct
  misc_feature 1..804: note = Description of Artificial Sequence: Synthetic coding sequence
  source 1..804: mol_type = other DNA
tgaagcaagcacggcggcaagaaggagagatgctgcagagcctgcttccagaagctgagcgagggccccggcagccccgacagcagcggcagcggcaccagccagggcgagcccagccccgccctgagccccgccagccccggcccccaggccaccggcggccagggcgccaacaccgactacagaccccccgacgacgccgtgttcgacatcatcaccgacgaggagctgtgccagatccaggagagcggcagcagcctgcccgagacccccaccgagaccgacagcctggaccccaacgccgccgagcaggacaccaccagcaccagcctgacccccgaggacaccgaggacatgcccgtgggccaggacagcgagatctgcctgctgaagagcggcgagctgatgatcaaggtgcccctgaccgtggacgagatcgccagcttcggcgagggcagcagagagctgttcgtgagaagcagcacctacagcctgatccccatcaccgtggccgaggccggcctgaccatcagctgggtgttcagcagcgaccccaagagcatcagcttcagcgtggtgttccaggaggccgaggacacccccctggaccagtgcaaggtgctgatccccaccaccagatgcaacagccacaaggagaacatccagggccagctgaaggtgagaacccccggcatctacatgctgatcttcgacaacaccttcagcagattcgtgagcaagaaggtgttctaccacctgaccgtggacagacccgtgatctacgacggcagcgacttcctgtag

SEQ ID NO: 82232 - DNA, 4497 bp, synthetic construct
  misc_feature 1..4497: note = Description of Artificial Sequence: Synthetic coding sequence
  source 1..4497: mol_type = other DNA
atggccagcaccaacgccgagagccagctgcagagaatcatcagagacctgcaggacgccgtgaccgagctgagcaaggagttccaggaggccggcgagcccatcaccgacgacagcaccagcctgcacaagttcagctacaagctggagtacctgctgcagttcgaccagaaggagaaggccaccctgctgggcaacaagaaggactactgggactacttctgcgcctgcctggccaaggtgaagggcgccaacgacggcatcagattcgtgaagagcatcagcgagctgagaaccagcctgggcaagggcagagccttcatcagatacagcctggtgcaccagagactggccgacaccctgcagcagtgcttcatgaacaccaaggtgaccagcgactggtactacgccagaagccccttcctgcagcccaagctgagcagcgacatcgtgggccagctgtacgagctgaccgaggtgcagttcgacctggccagcagaggcttcgacctggacgccgcctggcccaccttcgccagaagaaccctgaccaccggcagcagcgcctacctgtggaagccccccagcagaagcagcagcatgagcagcctggtgagcagctacctgcagacccaggagatggtgagcaacttcgacctgaacagccccctgaacaacgaggccctggagggcttcgacgagatgagactggagctggaccagctggaggtgagagagaagcagctgagagagagaatgcagcagctggacagagagaaccaggagctgagagccgccgtgagccagcagggcgagcagctgcagaccgagagagagagaggcagaaccgccgccgaggacaacgtgagactgacctgcctggtggccgagctgcagaagcagtgggaggtgacccaggccacccagaacaccgtgaaggagctgcagacctgcctgcagggcctggagctgggcgccgccgagaaggaggaggactaccacaccgccctgagaagactggagagcatgctgcagcccctggcccaggagctggaggccaccagagacagcctggacaagaagaaccagcacctggccagcttccccggctggctggccatggcccagcagaaggccgacaccgccagcgacaccaagggcagacaggagcccatccccagcgacgccgcccaggagatgcaggagctgggcgagaagctgcaggccctggagagagagagaaccaaggtggaggaggtgaacagacagcagagcgcccagctggagcagctggtgaaggagctgcagctgaaggaggacgccagagccagcctggagagactggtgaaggagatggcccccctgcaggaggagctgagcggcaagggccaggaggccgaccagctgtggagaagactgcaggagctgctggcccacaccagcagctgggaggaggagctggccgagctgagaagagagaagaagcagcagcaggaggagaaggagctgctggagcaggaggtgagaagcctgaccagacagctgcagttcctggagacccagctggcccaggtgagccagcacgtgagcgacctggaggagcagaagaagcagctgatccaggacaaggaccacctgagccagcaggtgggcatgctggagagactggccggcccccccggccccgagctgcccgtggccggcgagaagaacgaggccctggtgcccgtgaacagcagcctgcaggaggcctggggcaagcccgaggaggagcagagaggcctgcaggaggcccagctggacgacaccaaggtgcaggagggcagccaggaggaggagctgagacaggccaacagagagctggagaaggagctgcagaacgtggtgggcagaaaccagctgctggagggcaagctgcaggccctgcaggccgactaccaggccctgcagcagagagagagcgccatccagggcagcctggccagcctggaggccgagcaggccagcatcagacacctgggcgaccagatggaggccagcctgctggccgtgagaaaggccaaggaggccatgaaggcccagatggccgagaaggaggccatcctgcagagcaaggagggcgagtgccagcagctgagagaggaggtggagcagtgccagcagctggccgaggccagacacagagagctgagagccctggagagccagtgccagcagcagacccagctgatcgaggtgctgaccgccgagaagggccagcagggcgtgggcccccccaccgacaacgaggccagagagctggccgcccagctggccctgagccaggcccagctggaggtgcaccagggcgaggtgcagagactgcaggcccaggtggtggacctgcaggccaagatgagagccgccctggacgaccaggacaaggtgcagagccagctgagcatggccgaggccgtgctgagagagcacaagaccctggtgcagcagctgaaggagcagaacgaggccctgaacagagcccacgtgcaggagctgctgcagtgcagcgagagagagggcgccctgcaggaggagagagccgacgaggcccagcagagagaggaggagctgagagccctgcaggaggagctgagccaggccaagtgcagcagcgaggaggcccagctggagcacgccgagctgcaggagcagctgcacagagccaacaccgacaccgccgagctgggcatccaggtgtgcgccctgaccgtggagaaggagagagtggaggaggccctggcctgcgccgtgcaggagctgcaggacgccaaggaggccgccagcagagagagagagggcctggagagacaggtggccggcctgcagcaggagaaggagagcctgcaggagaagctgaaggccgccaaggccgccgccggcagcctgcccggcctgcaggcccagctggcccaggccgagcagagagcccagagcctgcaggaggccgcccaccaggagctgaacaccctgaagttccagctgagcgccgagatcatggactaccagagcagactgaagaacgccggcgaggagtgcaagagcctgagaggccagctggaggagcagggcagacagctgcaggccgccgaggaggccgtggagaagctgaaggccacccaggccgacatgggcgagaagctgagctgcaccagcaaccacctggccgagtgccaggccgccatgctgagaaaggacaaggagggcgccgccctgagagaggacctggagagaacccagaaggagctggagaaggccaccaccaagatccaggagtactacaacaagctgtgccaggaggtgaccaacagagagagaaacgaccagaagatgctggccgacctggacgacctgaacagaaccaagaagtacctggaggagagactgatcgagctgctgagagacaaggacgccctgtggcagaagagcgacgccctggagttccagcagaagctgagcgccgaggagagatggctgggcgacaccgaggccaaccactgcctggactgcaagagagagttcagctggatggtgagaagacaccactgcagaatctgcggcagaatcttctgctactactgctgcaacaactacgtgctgagcaagcacggcggcaagaaggagagatgctgcagagcctgcttccagaagctgagcgagggccccggcagccccgacagcagcggcagcggcaccagccagggcgagcccagccccgccctgagccccgccagccccggcccccaggccaccggcggccagggcgccaacaccgactacagaccccccgacgacgccgtgttcgacatcatcaccgacgaggagctgtgccagatccaggagagcggcagcagcctgcccgagacccccaccgagaccgacagcctggaccccaacgccgccgagcaggccagcgtgggcgccagcaagggcctgggcaacctgctgtgcgagagcagcgcctgcagagacaccaccagcaccagcctgacccccgaggacaccgaggacatgcccgtgggccaggacagcgagatctgcctgctgaagagcggcgagctgatgatcaaggtgcccctgaccgtggacgagatcgccagcttcggcgagggcagcagagagctgttcgtgagaagcagcacctacagcctgatccccatcaccgtggccgaggccggcctgaccatcagctgggtgttcagcagcgaccccaagagcatcagcttcagcgtggtgttccaggaggccgaggacacccccctggaccagtgcaaggtgctgatccccaccaccagatgcaacagccacaaggagaacatccagggccagctgaaggtgagaacccccggcatctacatgctgatcttcgacaacaccttcagcagattcgtgagcaagaaggtgttctaccacctgaccgtggacagacccgtgatctacgacggcagcgacttcctgtag

SEQ ID NO: 82233 - DNA, 2886 bp, synthetic construct
  misc_feature 1..2886: note = Description of Artificial Sequence: Synthetic coding sequence
  source 1..2886: mol_type = other DNA
atgcacggccacagagcccccggcggcgccggccccagcgagcccgagcaccccgccaccaacccccccggcgccgccccccccgcctgcgccgacagcgaccccggcgccagcgagcccggcctgctggccagaagaggcagcggcagcgccctgggcggccccctggacccccagttcgtgggccccagcgacaccagcctgggcgccgcccccggccacagagtgctgccctgcggccccagcccccagcaccacagagccctgagattcagctaccacctggagggcagccagcccagacccggcctgcaccagggcaacagaatcctggtgaagagcctgagcctggaccccggccagagcctggagccccaccccgagggcccccagagactgagaagcgaccccggcccccccaccgagacccccagccagagacccagccccctgaagagagcccccggccccaagccccaggtgccccccaagcccagctacctgcagatgcccagaatgcccccccccctggagcccatcccccccccccccagcagacccctgcccgccgaccccagagtggccaagggcctggcccccagagccgaggccagccccagcagcgccgccgtgagcagcctgatcgagaagttcgagagagagcccgtgatcgtggccagcgacagacccgtgcccggccccagccccggcccccccgagcccgtgatgctgccccagcccaccagccagccccccgtgccccagctgcccgagggcgaggccagcagatgcctgttcctgctggcccccggccccagagacggcgagaaggtgcccaacagagacagcggcatcgacagcatcagcagccccagcaacagcgaggagacctgcttcgtgagcgacgacggcccccccagccacagcctgtgccccggcccccccgccctggccagcgtgcccgtggccctggccgacccccacagacccggcagccaggaggtggacagcgacctggaggaggaggacgacgaggaggaggaggaggagaaggacagagagatccccgtgcccctgatggagagacaggagagcgtggagctgaccgtgcagcagaaggtgttccacatcgccaacgagctgctgcagaccgagaaggcctacgtgagcagactgcacctgctggaccaggtgttctgcgccagactgctggaggaggccagaaacagaagcagcttccccgccgacgtggtgcacggcatcttcagcaacatctgcagcatctactgcttccaccagcagttcctgctgcccgagctggagaagagaatggaggagtgggacagataccccagaatcggcgacatcctgcagaagctggcccccttcctgaagatgtacggcgagtacgtgaagaacttcgacagagccgtggagctggtgaacacctggaccgagagaagcacccagttcaaggtgatcatccacgaggtgcagaaggaggaggcctgcggcaacctgaccctgcagcaccacatgctggagcccgtgcagagaatccccagatacgagctgctgctgaaggactacctgctgaagctgccccacggcagccccgacagcaaggacgcccagaagagcctggagctgatcgccaccgccgccgagcacagcaacgccgccatcagaaagatggagagaatgcacaagctgctgaaggtgtacgagctgctgggcggcgaggaggacatcgtgagccccaccaaggagctgatcaaggagggccacatcctgaagctgagcgccaagaacggcaccacccaggacagatacctgatcctgttcaacgacagactgctgtactgcgtgcccagactgagactgctgggccagaagttcagcgtgagagccagaatcgacgtggacggcatggagctgaaggagagcagcaacctgaacctgcccagaaccttcctggtgagcggcaagcagagaagcctggagctgcaggccagaaccgaggaggagaagaaggactgggtgcaggccatcaacagcaccctgctgaagcacgagcagaccctggagaccttcaagctgctgaacagcaccaacagagaggacgaggacaccccccccaacagccccaacgtggacctgggcaagagagcccccacccccatcagagagaaggaggtgaccatgtgcatgagatgccaggagcccttcaacagcatcaccaagagaagacaccactgcaaggcctgcggccacgtggtgtgcggcaagtgcagcgagttcagagccagactggtgtacgacaacaacagaagcaacagagtgtgcaccgactgctacgtggccctgcacggcgtgcccggcagcagccccgcctgcagccagcacaccccccagagaagaagaagcatcctggagaagcaggccagcgtggccgccgagaacagcgtgatctgcagcttcctgcactacatggagaagggcggcaagggctggcacaaggcctggttcgtggtgcccgagaacgagcccctggtgctgtacatctacggcgccccccaggacgtgaaggcccagagaagcctgcccctgatcggcttcgaggtgggcccccccgaggccggcgagagacccgacagaagacacgtgttcaagatcacccagagccacctgagctggtacttcagccccgagaccgaggagctgcagagaagatggatggccgtgctgggcagagccggcagaggcgacaccttctgccccggccccaccctgagcgaggacagagagatggaggaggcccccgtggccgccctgggcgccaccgccgagccccccgagagcccccagaccagagacaagacctag

SEQ ID NO: 82234 - DNA, 1968 bp, synthetic construct
  misc_feature 1..1968: note = Description of Artificial Sequence: Synthetic coding sequence
  source 1..1968: mol_type = other DNA
atgaagggcgccagcgaggagaagctggccagcgtgagcaacctggtgaccgtgttcgagaacagcagaacccccgaggccgcccccagaggccagagactggaggacgtgcaccacagacccgagtgcagaccccccgagagccccggccccagagagaagaccaacgtgggcgaggccgtgggcagcgagcccagaaccgtgagcagaagatacctgaacagcctgaagaacaagctgagcagcgaggcctggagaaagagctgccagcccgtgaccctgagcggcagcggcacccaggagcccgagaagaagatcgtgcaggagctgctggagaccgagcaggcctacgtggccagactgcacctgctggaccaggtgttcttccaggagctgctgaagaccgccagaagcagcaaggccttccccgaggacgtggtgagagtgatcttcagcaacatcagcagcatctaccagttccacagccagttcttcctgcccgagctgcagagaagactggacgactggaccgccaaccccagaatcggcgacgtgatccagaagctggcccccttcctgaagatgtacagcgagtacgtgaagaacttcgagagagccgccgagctgctggccacctggaccgacaagagccccctgttccaggaggtgctgaccagaatccagagcagcgaggccagcggcagcctgaccctgcagcaccacatgctggagcccgtgcagagaatccccagatacgagctgctgctgaaggagtacatccagaagctgcccgcccaggcccccgaccaggccgacgcccagaaggccctggacatgatcttcagcgccgcccagcacagcaacgccgccatcaccgagatggagagactgcaggacctgtgggaggtgtaccagagactgggcctggaggacgacatcgtggaccccagcaacaccctgctgagagagggccccgtgctgaagatcagcttcagaagaaacgaccccatggagagatacctgttcctgttcaacaacatgctgctgtactgcgtgcccagagtgatccaggtgggcgcccagttccaggtgagaaccagaatcgacgtggccggcatgaaggtgagagagctgatggacgccgagttcccccacagcttcctggtgagcggcaagcagagaaccctggagctgcaggccagaagccaggaggagatgatcagctggatgcaggccttccaggccgccatcgaccagatcgagaagagaaacgagaccttcaaggccgccgcccagggccccgagggcgacatccaggagcaggagctgcagagcgaggagctgggcctgagagccccccagtgggtgagagacaagatggtgaccatgtgcatgagatgccaggagcccttcaacgccctgaccagaagaagacaccactgcagagcctgcggctacgtggtgtgcgccagatgcagcgactacagagccgagctgaagtacgacgacaacagacccaacagagtgtgcctgcactgctacgccttcctgaccggcaacgtgctgcccgaggccaaggaggacaagagaagaggcatcctggagaagggcagcagcgccacccccgaccagagcctgatgtgcagcttcctgcagctgatcggcgacaagtggggcaagagcggccccagaggctggtgcgtgatccccagagacgaccccctggtgctgtacgtgtacgccgccccccaggacatgagagcccacaccagcatccccctgctgggctaccaggtgaccgtgggcccccagggcgaccccagagtgttccagctgcagcagagcggccagctgtacaccttcaaggccgagaccgaggagctgaagggcagatgggtgaaggccatggagagagccgccagcggctggagccccagctggcccaacgacggcgacctgagcgactag

SEQ ID NO: 82235 - DNA, 852 bp, synthetic construct
  misc_feature 1..852: note = Description of Artificial Sequence: Synthetic coding sequence
  source 1..852: mol_type = other DNA
atgaaggtgagagagctgatggacgccgagttcccccacagcttcctggtgagcggcaagcagagaaccctggagctgcaggccagaagccaggaggagatgatcagctggatgcaggccttccaggccgccatcgaccagatcgagaagagaaacgagaccttcaaggccgccgcccagggccccgagggcgacatccaggagcaggagctgcagagcgaggagctgggcctgagagccccccagtgggtgagagacaagatggtgaccatgtgcatgagatgccaggagcccttcaacgccctgaccagaagaagacaccactgcagagcctgcggctacgtggtgtgcgccagatgcagcgactacagagccgagctgaagtacgacgacaacagacccaacagagtgtgcctgcactgctacgccttcctgaccggcaacgtgctgcccgaggccaaggaggacaagagaagaggcatcctggagaagggcagcagcgccacccccgaccagagcctgatgtgcagcttcctgcagctgatcggcgacaagtggggcaagagcggccccagaggctggtgcgtgatccccagagacgaccccctggtgctgtacgtgtacgccgccccccaggacatgagagcccacaccagcatccccctgctgggctaccaggtgaccgtgggcccccagggcgaccccagagtgttccagctgcagcagagcggccagctgtacaccttcaaggccgagaccgaggagctgaagggcagatgggtgaaggccatggagagagccgccagcggctggagccccagctggcccaacgacggcgacctgagcgactag

SEQ ID NO: 82236 - DNA, 2178 bp, synthetic construct
  misc_feature 1..2178: note = Description of Artificial Sequence: Synthetic coding sequence
  source 1..2178: mol_type = other DNA
atggagagcggcagaggcagcagcaccccccccggccccatcgccgccctgggcatgcccgacaccggccccggcagcagcagcctgggcaagctgcaggccctgcccgtgggccccagagcccactgcggcgaccccgtgagcctggccgccgccggcgacggcagccccgacatcggccccaccggcgagctgagcggcagcctgaagatccccaacagagacagcggcatcgacagccccagcagcagcgtggccggcgagaacttcccctgcgaggagggcctggaggccggccccagccccaccgtgctgggcgcccacgccgagatggccctggacagccaggtgcccaaggtgaccccccaggaggaggccgacagcgacgtgggcgaggagcccgacagcgagaacaccccccagaaggccgacaaggacgccggcctggcccagcacagcggcccccagaagctgctgcacatcgcccaggagctgctgcacaccgaggagacctacgtgaagagactgcacctgctggaccaggtgttctgcaccagactgaccgacgccggcatcccccccgaggtgatcatgggcatcttcagcaacatcagcagcatccacagattccacggccagttcctgctgcccgagctgaagaccagaatcaccgaggagtgggacaccaaccccagactgggcgacatcctgcagaagctggcccccttcctgaagatgtacggcgagtacgtgaagaacttcgacagagccgtgggcctggtgagcacctggacccagagaagccccctgttcaaggacgtggtgcacagcatccagaagcaggaggtgtgcggcaacctgaccctgcagcaccacatgctggagcccgtgcagagagtgcccagatacgagctgctgctgaaggactacctgaagagactgccccaggacgcccccgacagaaaggacgccgagagaagcctggagctgatcagcaccgccgccaaccacagcaacgccgccatcagaaaggtggagaagatgcacaagctgctggaggtgtacgagcagctgggcggcgaggaggacatcgtgaaccccgccaacgagctgatcaaggagggccagatccagaagctgagcgccaagaacggcaccccccaggacagacacctgttcctgttcaacagcatgatcctgtactgcgtgcccaagctgagactgatgggccagaagttcagcgtgagagagaagatggacatcagcggcctgcaggtgcaggacatcgtgaagcccaacaccgcccacaccttcatcatcaccggcagaaagagaagcctggagctgcagaccagaaccgaggaggagaagaaggagtggatccagatcatccaggccaccatcgagaagcacaagcagaacagcgagaccttcaaggccttcggcggcgccttcagccaggacgaggaccccagcctgagccccgacatgcccatcaccagcaccagccccgtggagcccgtggtgaccaccgagggcagcagcggcgccgccggcctggagcccagaaagctgagcagcaagaccagaagagacaaggagaagcagagctgcaagagctgcggcgagaccttcaacagcatcaccaagagaagacaccactgcaagctgtgcggcgccgtgatctgcggcaagtgcagcgagttcaaggccgagaacagcagacagagcagagtgtgcagagactgcttcctgacccagcccgtggcccccgagagcaccgagaagacccccaccgccgacccccagcccagcctgctgtgcggccccctgagactgagcgagagcggcgagacctggagcgaggtgtgggccgccatccccatgagcgacccccaggtgctgcacctgcagggcggcagccaggacggcagactgcccagaaccatccccctgcccagctgcaagctgagcgtgcccgaccccgaggagagactggacagcggccacgtgtggaagctgcagtgggccaagcagagctggtacctgagcgccagcagcgccgagctgcagcagcagtggctggagaccctgagcaccgccgcccacggcgacaccgcccaggacagccccggcgccctgcagctgcaggtgcccatgggcgccgccgccccctag

SEQ ID NO: 82237 - DNA, 2178 bp, synthetic construct; identical to SEQ ID NO: 82236
  misc_feature 1..2178: note = Description of Artificial Sequence: Synthetic coding sequence
  source 1..2178: mol_type = other DNA

SEQ ID NO: 82238 - DNA, 2175 bp, synthetic construct
  misc_feature 1..2175: note = Description of Artificial Sequence: Synthetic coding sequence
  source 1..2175: mol_type = other DNA
atggagagcggcagaggcagcagcaccccccccggccccatcgccgccctgggcatgcccgacaccggccccggcagcagcagcctgggcaagctgcaggccctgcccgtgggccccagagcccactgcggcgaccccgtgagcctggccgccgccggcgacggcagccccgacatcggccccaccggcgagctgagcggcagcctgaagatccccaacagagacagcggcatcgacagccccagcagcagcgtggccggcgagaacttcccctgcgaggagggcctggaggccggccccagccccaccgtgctgggcgcccacgccgagatggccctggacagccaggtgcccaaggtgaccccccaggaggaggccgacagcgacgtgggcgaggagcccgacagcgagaacaccccccagaaggccgacaaggacgccggcctggcccagcacagcggcccccagaagctgctgcacatcgcccaggagctgctgcacaccgaggagacctacgtgaagagactgcacctgctggaccaggtgttctgcaccagactgaccgacgccggcatcccccccgaggtgatcatgggcatcttcagcaacatcagcagcatccacagattccacggccagttcctgctgcccgagctgaagaccagaatcaccgaggagtgggacaccaaccccagactgggcgacatcctgcagaagctggcccccttcctgaagatgtacggcgagtacgtgaagaacttcgacagagccgtgggcctggtgagcacctggacccagagaagccccctgttcaaggacgtggtgcacagcatccagaagcaggaggtgtgcggcaacctgaccctgcagcaccacatgctggagcccgtgcagagagtgcccagatacgagctgctgctgaaggactacctgaagagactgccccaggacgcccccgacagaaaggacgccgagagaagcctggagctgatcagcaccgccgccaaccacagcaacgccgccatcagaaaggtggagaagatgcacaagctgctggaggtgtacgagcagctgggcggcgaggaggacatcgtgaaccccgccaacgagctgatcaaggagggccagatccagaagctgagcgccaagaacggcaccccccaggacagacacctgttcctgttcaacagcatgatcctgtactgcgtgcccaagctgagactgatgggccagaagttcagcgtgagagagaagatggacatcagcggcctgcaggtgcaggacatcgtgaagcccaacaccgcccacaccttcatcatcaccggcagaaagagaagcctggagctgcagaccagaaccgaggaggagaagaaggagtggatccagatcatccaggccaccatcgagaagcacaagcagaacagcgagaccttcaaggccttcggcggcgccttcagccaggacgaggaccccagcctgagccccgacatgcccatcaccagcaccagccccgtggagcccgtggtgaccaccgagggcagcagcggcgccgccggcctggagcccagaaagctgagcagcaagaccagaagagacaaggagaagcagagctgcaagagctgcggcgagaccttcaacagcatcaccaagagaagacaccactgcaagctgtgcggcgccgtgatctgcggcaagtgcagcgagttcaaggccgagaacagcagacagagcagagtgtgcagagactgcttcctgacccagcccgtggcccccgagagcaccgagacccccaccgccgacccccagcccagcctgctgtgcggccccctgagactgagcgagagcggcgagacctggagcgaggtgtgggccgccatccccatgagcgacccccaggtgctgcacctgcagggcggcagccaggacggcagactgcccagaaccatccccctgcccagctgcaagctgagcgtgcccgaccccgaggagagactggacagcggccacgtgtggaagctgcagtgggccaagcagagctggtacctgagcgccagcagcgccgagctgcagcagcagtggctggagaccctgagcaccgccgcccacggcgacaccgcccaggacagccccggcgccctgcagctgcaggtgcccatgggcgccgccgccccctag

SEQ ID NO: 82239 - DNA, 987 bp, synthetic construct
  misc_feature 1..987: note = Description of Artificial Sequence: Synthetic coding sequence
  source 1..987: mol_type = other DNA
atgatcctgtactgcgtgcccaagctgagactgatgggccagaagttcagcgtgagagagaagatggacatcagcggcctgcaggtgcaggacatcgtgaagcccaacaccgcccacaccttcatcatcaccggcagaaagagaagcctggagctgcagaccagaaccgaggaggagaagaaggagtggatccagatcatccaggccaccatcgagaagcacaagcagaacagcgagaccttcaaggccttcggcggcgccttcagccaggacgaggaccccagcctgagccccgacatgcccatcaccagcaccagccccgtggagcccgtggtgaccaccgagggcagcagcggcgccgccggcctggagcccagaaagctgagcagcaagaccagaagagacaaggagaagcagagctgcaagagctgcggcgagaccttcaacagcatcaccaagagaagacaccactgcaagctgtgcggcgccgtgatctgcggcaagtgcagcgagttcaaggccgagaacagcagacagagcagagtgtgcagagactgcttcctgacccagcccgtggcccccgagagcaccgagaagacccccaccgccgacccccagcccagcctgctgtgcggccccctgagactgagcgagagcggcgagacctggagcgaggtgtgggccgccatccccatgagcgacccccaggtgctgcacctgcagggcggcagccaggacggcagactgcccagaaccatccccctgcccagctgcaagctgagcgtgcccgaccccgaggagagactggacagcggccacgtgtggaagctgcagtgggccaagcagagctggtacctgagcgccagcagcgccgagctgcagcagcagtggctggagaccctgagcaccgccgcccacggcgacaccgcccaggacagccccggcgccctgcagctgcaggtgcccatgggcgccgccgccccctag

SEQ ID NO: 82240 - DNA, 1416 bp, synthetic construct
  misc_feature 1..1416: note = Description of Artificial Sequence: Synthetic coding sequence
  source 1..1416: mol_type = other DNA
atggtgaacaagatcttcagcaacatcagcagcatcaacgccttccacagcaagttcctgctgcccgagctggagaagagaatgcaggagtgggagaccacccccagaatcggcgacatcctgcagaagctggcccccttcctgaagatgtacggcgagtacgtgaagggcttcgacaacgccatggagctggtgaagaacatgaccgagagaatcccccagttcaagagcgtggtggaggagatccagaagcagaagatctgcggcagcctgaccctgcagcaccacatgctggagcccgtgcagagaatccccagatacgagatgctgctgaaggactacctgagaaagctgccccccgacagcctggactggaacgacgccaagaagagcctggagatcatcagcaccgccgccagccacagcaacagcgccatcagaaagatggagaacctgaagaagctgctggagatctacgagatgctgggcgaggaggaggacatcgtgaaccccagcaacgagctgatcaaggagggccagatcctgaagctggccgccagaaacaccagcgcccaggagagatacctgttcctgttcaacaacatgctgctgtactgcgtgcccaagttcagcctggtgggcagcaagttcaccgtgagaaccagagtgggcatcgacggcatgaagatcgtggagacccagaacgaggagtacccccacaccttccaggtgagcggcaaggagagaaccctggagctgcaggccagcagcgcccaggacaaggaggagtggatcaaggccctgcaggagaccatcgacgccttccaccagagacacgagaccttcagaaacgccatcgccaaggacaacgacatccacagcgaggtgagcaccgccgagctgggcaagagagcccccagatggatcagagacaacgaggtgaccatgtgcatgaagtgcaaggagcccttcaacgccctgaccagaagaagacaccactgcagagcctgcggctacgtggtgtgctggaagtgcagcgactacaaggcccagctggagtacgacggcggcaagctgagcaaggtgtgcaaggactgctaccagatcatcagcggcttcaccgacagcgaggagaagaagagaaagggcatcctggagatcgagagcgccgaggtgagcggcaacagcgtggtgtgcagcttcctgcagtacatggagaagagcaagccctggcagaaggcctggtgcgtgatccccaagcaggaccccctggtgctgtacatgtacggcgccccccaggtgagcaagccccacctgagcgagggcaccgacgccctgggcggcaagggcaagagagtggacagcggcctgaagatctgcagaaccagagtgcaggccgtgagcctgttccactag

SEQ ID NO: 82241 - DNA, 843 bp, synthetic construct
  misc_feature 1..843: note = Description of Artificial Sequence: Synthetic coding sequence
  source 1..843: mol_type = other DNA
atggtgaacaagatcttcagcaacatcagcagcatcaacgccttccacagcaagttcctgctgcccgagctggagaagagaatgcaggagtgggagaccacccccagaatcggcgacatcctgcagaagctggcccccttcctgaagatgtacggcgagtacgtgaagggcttcgacaacgccatggagctggtgaagaacatgaccgagagaatcccccagttcaagagcgtggtggaggagatccagaagcagaagatctgcggcagcctgaccctgcagcaccacatgctggagcccgtgcagagaatccccagatacgagatgctgctgaaggactacctgagaaagctgccccccgacagcctggactggaacgacgccaagaagagcctggagatcatcagcaccgccgccagccacagcaacagcgccatcagaaagatggagaacctgaagaagctgctggagatctacgagatgctgggcgaggaggaggacatcgtgaaccccagcaacgagctgatcaaggagggccagatcctgaagctggccgccagaaacaccagcgcccaggagagatacctgttcctgttcaacaacatgctgctgtactgcgtgcccaagttcagcctggtgggcagcaagttcaccgtgagaaccagagtgggcatcgacggcatgaagatcgtggagacccagaacgaggagtacccccacaccttccaggtgagcggcaaggagagaaccctggagctgcaggccagcagcgcccaggacaaggaggagtggatcaagagaagaggcttcgccatgctgcccagactgatcagcaacagctag

SEQ ID NO: 82242 - DNA, 567 bp, synthetic construct
  misc_feature 1..567: note = Description of Artificial Sequence: Synthetic coding sequence
  source 1..567: mol_type = other DNA
atgttcagctgcttcctgtgcatcctgagcttcagcagcctgagcaactacagcgacctgaagaaggagagcgccgtgaacctgaacgcccccagaacccccggcagacacggcctgaccaccaccccccagcagaagctgctgagccagcacctgccccagagacagggcaacgacaccgacaagacccagggcgcccagacctgcgtggccaacggcgtgatggccgcccagaaccagatggagtgcgaggaggagaaggccgccaccctgagcagcgacaccagcatccaggccagcgagcccctgctggacacccacatcgtgaacggcgagagagacgagaccgccaccgcccccgccagccccaccaccgacagctgcgacggcaacgccagcgacagcagctacagaacccccggcatcggccccgtgctgcccctggaggagagaggcgccgagaccgagaccaaggtgcaggagagagagaacggcgagagccccctggagctggagcagctggaccagcaccacgagatgaaggtggagcacgagaccagcagctag

SEQ ID NO: 82243 - DNA, 2301 bp, synthetic construct
  misc_feature 1..2301: note = Description of Artificial Sequence: Synthetic coding sequence
  source 1..2301: mol_type = other DNA
atggaggagatcaagcccgccagcgccagctgcgtgagcaaggagaagcccagcaaggtgagcgacctgatcagcagattcgagggcggcagcagcctgagcaactacagcgacctgaagaaggagagcgccgtgaacctgaacgcccccagaacccccggcagacacggcctgaccaccaccccccagcagaagctgctgagccagcacctgccccagagacagggcaacgacaccgacaagacccagggcgcccagacctgcgtggccaacggcgtgatggccgcccagaaccagatggagtgcgaggaggagaaggccgccaccctgagcagcgacaccagcatccaggccagcgagcccctgctggacacccacatcgtgaacggcgagagagacgagaccgccaccgcccccgccagccccaccaccgacagctgcgacggcaacgccagcgacagcagctacagaacccccggcatcggccccgtgctgcccctggaggagagaggcgccgagaccgagaccaaggtgcaggagagagagaacggcgagagccccctggagctggagcagctggaccagcaccacgagatgaaggagaccaacgagcagaagctgcacaagatcgccaacgagctgctgctgaccgagagagcctacgtgaacagactggacctgctggaccaggtgttctactgcaagctgctggaggaggccaacagaggcagcttccccgccgagatggtgaacaagatcttcagcaacatcagcagcatcaacgccttccacagcaagttcctgctgcccgagctggagaagagaatgcaggagtgggagaccacccccagaatcggcgacatcctgcagaagctggcccccttcctgaagatgtacggcgagtacgtgaagggcttcgacaacgccatggagctggtgaagaacatgaccgagagaatcccccagttcaagagcgtggtggaggagatccagaagcagaagatctgcggcagcctgaccctgcagcaccacatgctggagcccgtgcagagaatccccagatacgagatgctgctgaaggactacctgagaaagctgccccccgacagcctggactggaacgacgccaagaagagcctggagatcatcagcaccgccgccagccacagcaacagcgccatcagaaagatggagaacctgaagaagctgctggagatctacgagatgctgggcgaggaggaggacatcgtgaaccccagcaacgagctgatcaaggagggccagatcctgaagctggccgccagaaacaccagcgcccaggagagatacctgttcctgttcaacaacatgctgctgtactgcgtgcccaagttcagcctggtgggcagcaagttcaccgtgagaaccagagtgggcatcgacggcatgaagatcgtggagacccagaacgaggagtacccccacaccttccaggtgagcggcaaggagagaaccctggagctgcaggccagcagcgcccaggacaaggaggagtggatcaaggccctgcaggagaccatcgacgccttccaccagagacacgagaccttcagaaacgccatcgccaaggacaacgacatccacagcgaggtgagcaccgccgagctgggcaagagagcccccagatggatcagagacaacgaggtgaccatgtgcatgaagtgcaaggagcccttcaacgccctgaccagaagaagacaccactgcagagcctgcggctacgtggtgtgctggaagtgcagcgactacaaggcccagctggagtacgacggcggcaagctgagcaaggtgtgcaaggactgctaccagatcatcagcggcttcaccgacagcgaggagaagaagagaaagggcatcctggagatcgagagcgccgaggtgagcggcaacagcgtggtgtgcagcttcctgcagtacatggagaagagcaagccctggcagaaggcctggtgcgtgatccccaagcaggaccccctggtgctgtacatgtacggcgccccccaggacgtgagagcccaggccaccatccccctgctgggctacgtggtggacgagatgcccagaagcgccgacctgccccacagcttcaagctgacccagagcaagagcgtgcacagcttcgccgccgacagcgaggagctgaagcagaagtggctgaaggtgatcctgctggccgtgaccggcgagacccccggcggccccaacgagcaccccgccaccctggacgaccaccccgagcccaagaagaagagcgagtgctag

SEQ ID NO: 82244 - DNA, 624 bp, synthetic construct
  misc_feature 1..624: note = Description of Artificial Sequence: Synthetic coding sequence
  source 1..624: mol_type = other DNA
atggaggagatcaagcccgccagcgccagctgcgtgagcaaggagaagcccagcaaggtgagcgacctgatcagcagattcgagggcggcagcagcctgagcaactacagcgacctgaagaaggagagcgccgtgaacctgaacgcccccagaacccccggcagacacggcctgaccaccaccccccagcagaagctgctgagccagcacctgccccagagacagggcaacgacaccgacaagacccagggcgcccagacctgcgtggccaacggcgtgatggccgcccagaaccagatggagtgcgaggaggagaaggccgccaccctgagcagcgacaccagcatccaggccagcgagcccctgctggacacccacatcgtgaacggcgagagagacgagaccgccaccgcccccgccagccccaccaccgacagctgcgacggcaacgccagcgacagcagctacagaacccccggcatcggccccgtgctgcccctggaggagagaggcgccgagaccgagaccaaggtgcaggagagagagaacggcgagagccccctggagctggagcagctggaccagcaccacgagatgaaggtggagcacgagaccagcagctag

SEQ ID NO: 82245 - DNA, 2637 bp, synthetic construct
  misc_feature 1..2637: note = Description of Artificial Sequence: Synthetic coding sequence
  source 1..2637: mol_type = other DNA
atgaacttcaagagagtgaagcccaacatcttcctgctgaaccagagcagactgatcatcagcatctgcgagatcatgagcaccgaccagggcagcagcacctgccccaagatcgccctggtgcccccctgcagcaccagcagcaccaccaccctggtgggcgagaacgtgagcgaggaggaggcccagggcatcaacggcaacagacccgccaagcacagcgccgccagccccaagccccaggtgccccccaagcccctgcacctgcagaacagccccagcagcaacatccaccagacccccagacacaaggccctgcccagcgccaagcccagaatggaggagatcaagcccgccagcgccagctgcgtgagcaaggagaagcccagcaaggtgagcgacctgatcagcagattcgagggcggcagcagcctgagcaactacagcgacctgaagaaggagagcgccgtgaacctgaacgcccccagaacccccggcagacacggcctgaccaccaccccccagcagaagctgctgagccagcacctgccccagagacagggcaacgacaccgacaagacccagggcgcccagacctgcgtggccaacggcgtgatggccgcccagaaccagatggagtgcgaggaggagaaggccgccaccctgagcagcgacaccagcatccaggccagcgagcccctgctggacacccacatcgtgaacggcgagagagacgagaccgccaccgcccccgccagccccaccaccgacagctgcgacggcaacgccagcgacagcagctacagaacccccggcatcggccccgtgctgcccctggaggagagaggcgccgagaccgagaccaaggtgcaggagagagagaacggcgagagccccctggagctggagcagctggaccagcaccacgagatgaaggagaccaacgagcagaagctgcacaagatcgccaacgagctgctgctgaccgagagagcctacgtgaacagactggacctgctggaccaggtgttctactgcaagctgctggaggaggccaacagaggcagcttccccgccgagatggtgaacaagatcttcagcaacatcagcagcatcaacgccttccacagcaagttcctgctgcccgagctggagaagagaatgcaggagtgggagaccacccccagaatcggcgacatcctgcagaagctggcccccttcctgaagatgtacggcgagtacgtgaagggcttcgacaacgccatggagctggtgaagaacatgaccgagagaatcccccagttcaagagcgtggtggaggagatccagaagcagaagatctgcggcagcctgaccctgcagcaccacatgctggagcccgtgcagagaatccccagatacgagatgctgctgaaggactacctgagaaagctgccccccgacagcctggactggaacgacgccaagaagagcctggagatcatcagcaccgccgccagccacagcaacagcgccatcagaaagatggagaacctgaagaagctgctggagatctacgagatgctgggcgaggaggaggacatcgtgaaccccagcaacgagctgatcaaggagggccagatcctgaagctggccgccagaaacaccagcgcccaggagagatacctgttcctgttcaacaacatgctgctgtactgcgtgcccaagttcagcctggtgggcagcaagttcaccgtgagaaccagagtgggcatcgacggcatgaagatcgtggagacccagaacgaggagtacccccacaccttccaggtgagcggcaaggagagaaccctggagctgcaggccagcagcgcccaggacaaggaggagtggatcaaggccctgcaggagaccatcgacgccttccaccagagacacgagaccttcagaaacgccatcgccaaggacaacgacatccacagcgaggtgagcaccgccgagctgggcaagagagcccccagatggatcagagacaacgaggtgaccatgtgcatgaagtgcaaggagcccttcaacgccctgaccagaagaagacaccactgcagagcctgcggctacgtggtgtgctggaagtgcagcgactacaaggcccagctggagtacgacggcggcaagctgagcaaggtgtgcaaggactgctaccagatcatcagcggcttcaccgacagcgaggagaagaagagaaagggcatcctggagatcgagagcgccgaggtgagcggcaacagcgtggtgtgcagcttcctgcagtacatggagaagagcaagccctggcagaaggcctggtgcgtgatccccaagcaggaccccctggtgctgtacatgtacggcgccccccaggacgtgagagcccaggccaccatccccctgctgggctacgtggtggacgagatgcccagaagcgccgacctgccccacagcttcaagctgacccagagcaagagcgtgcacagcttcgccgccgacagcgaggagctgaagcagaagtggctgaaggtgatcctgctggccgtgaccggcgagacccccggcggccccaacgagcaccccgccaccctggacgaccaccccgagcccaagaagaagagcgagtgctag

SEQ ID NO: 82246 - DNA, 2556 bp, synthetic construct
  misc_feature 1..2556: note = Description of Artificial Sequence: Synthetic coding sequence
  source 1..2556: mol_type = other DNA
atgggcggctgcagcagcacctgccccaagatcgccctggtgcccccctgcagcaccagcagcaccaccaccctggtgggcgagaacgtgagcgaggaggaggcccagggcatcaacggcaacagacccgccaagcacagcgccgccagccccaagccccaggtgccccccaagcccctgcacctgcagaacagccccagcagcaacatccaccagacccccagacacaaggccctgcccagcgccaagcccagaatggaggagatcaagcccgccagcgccagctgcgtgagcaaggagaagcccagcaaggtgagcgacctgatcagcagattcgagggcggcagcagcctgagcaactacagcgacctgaagaaggagagcgccgtgaacctgaacgcccccagaacccccggcagacacggcctgaccaccaccccccagcagaagctgctgagccagcacctgccccagagacagggcaacgacaccgacaagacccagggcgcccagacctgcgtggccaacggcgtgatggccgcccagaaccagatggagtgcgaggaggagaaggccgccaccctgagcagcgacaccagcatccaggccagcgagcccctgctggacacccacatcgtgaacggcgagagagacgagaccgccaccgcccccgccagccccaccaccgacagctgcgacggcaacgccagcgacagcagctacagaacccccggcatcggccccgtgctgcccctggaggagagaggcgccgagaccgagaccaaggtgcaggagagagagaacggcgagagccccctggagctggagcagctggaccagcaccacgagatgaaggagaccaacgagcagaagctgcacaagatcgccaacgagctgctgctgaccgagagagcctacgtgaacagactggacctgctggaccaggtgttctactgcaagctgctggaggaggccaacagaggcagcttccccgccgagatggtgaacaagatcttcagcaacatcagcagcatcaacgccttccacagcaagttcctgctgcccgagctggagaagagaatgcaggagtgggagaccacccccagaatcggcgacatcctgcagaagctggcccccttcctgaagatgtacggcgagtacgtgaagggcttcgacaacgccatggagctggtgaagaacatgaccgagagaatcccccagttcaagagcgtggtggaggagatccagaagcagaagatctgcggcagcctgaccctgcagcaccacatgctggagcccgtgcagagaatccccagatacgagatgctgctgaaggactacctgagaaagctgccccccgacagcctggactggaacgacgccaagaagagcctggagatcatcagcaccgccgccagccacagcaacagcgccatcagaaagatggagaacctgaagaagctgctggagatctacgagatgctgggcgaggaggaggacatcgtgaaccccagcaacgagctgatcaaggagggccagatcctgaagctggccgccagaaacaccagcgcccaggagagatacctgttcctgttcaacaacatgctgctgtactgcgtgcccaagttcagcctggtgggcagcaagttcaccgtgagaaccagagtgggcatcgacggcatgaagatcgtggagacccagaacgaggagtacccccacaccttccaggtgagcggcaaggagagaaccctggagctgcaggccagcagcgcccaggacaaggaggagtggatcaaggccctgcaggagaccatcgacgccttccaccagagacacgagaccttcagaaacgccatcgccaaggacaacgacatccacagcgaggtgagcaccgccgagctgggcaagagagcccccagatggatcagagacaacgaggtgaccatgtgcatgaagtgcaaggagcccttcaacgccctgaccagaagaagacaccactgcagagcctgcggctacgtggtgtgctggaagtgcagcgactacaaggcccagctggagtacgacggcggcaagctgagcaaggtgtgcaaggactgctaccagatcatcagcggcttcaccgacagcgaggagaagaagagaaagggcatcctggagatcgagagcgccgaggtgagcggcaacagcgtggtgtgcagcttcctgcagtacatggagaagagcaagccctggcagaaggcctggtgcgtgatccccaagcaggaccccctggtgctgtacatgtacggcgccccccaggacgtgagagcccaggccaccatccccctgctgggctacgtggtggacgagatgcccagaagcgccgacctgccccacagcttcaagctgacccagagcaagagcgtgcacagcttcgccgccgacagcgaggagctgaagcagaagtggctgaaggtgatcctgctggccgtgaccggcgagacccccggcggccccaacgagcaccccgccaccctggacgaccaccccgagcccaagaagaagagcgagtgctag

SEQ ID NO: 82247 - DNA, 2712 bp, synthetic construct
  misc_feature 1..2712: note = Description of Artificial Sequence: Synthetic coding sequence
  source 1..2712: mol_type = other DNA
atgagcgacgagggcggcagcaacttcagaagagtggccatcagaagaaagagcaaccccagctacctgccccccggcgtgcccagaccctggagcagacccgccagccacctgggcagagtgggcaccgccgccttcaagggccaggtgcccagcggcgccaccggcagcagcacctgccccaagatcgccctggtgcccccctgcagcaccagcagcaccaccaccctggtgggcgagaacgtgagcgaggaggaggcccagggcatcaacggcaacagacccgccaagcacagcgccgccagccccaagccccaggtgccccccaagcccctgcacctgcagaacagccccagcagcaacatccaccagacccccagacacaaggccctgcccagcgccaagcccagaatggaggagatcaagcccgccagcgccagctgcgtgagcaaggagaagcccagcaaggtgagcgacctgatcagcagattcgagggcggcagcagcctgagcaactacagcgacctgaagaaggagagcgccgtgaacctgaacgcccccagaacccccggcagacacggcctgaccaccaccccccagcagaagctgctgagccagcacctgccccagagacagggcaacgacaccgacaagacccagggcgcccagacctgcgtggccaacggcgtgatggccgcccagaaccagatggagtgcgaggaggagaaggccgccaccctgagcagcgacaccagcatccaggccagcgagcccctgctggacacccacatcgtgaacggcgagagagacgagaccgccaccgcccccgccagccccaccaccgacagctgcgacggcaacgccagcgacagcagctacagaacccccggcatcggccccgtgctgcccctggaggagagaggcgccgagaccgagaccaaggtgcaggagagagagaacggcgagagccccctggagctggagcagctggaccagcaccacgagatgaaggagaccaacgagcagaagctgcacaagatcgccaacgagctgctgctgaccgagagagcctacgtgaacagactggacctgctggaccaggtgttctactgcaagctgctggaggaggccaacagaggcagcttccccgccgagatggtgaacaagatcttcagcaacatcagcagcatcaacgccttccacagcaagttcctgctgcccgagctggagaagagaatgcaggagtgggagaccacccccagaatcggcgacatcctgcagaagctggcccccttcctgaagatgtacggcgagtacgtgaagggcttcgacaacgccatggagctggtgaagaacatgaccgagagaatcccccagttcaagagcgtggtggaggagatccagaagcagaagatctgcggcagcctgaccctgcagcaccacatgctggagcccgtgcagagaatccccagatacgagatgctgctgaaggactacctgagaaagctgccccccgacagcctggactggaacgacgccaagaagagcctggagatcatcagcaccgccgccagccacagcaacagcgccatcagaaagatggagaacctgaagaagctgctggagatctacgagatgctgggcgaggaggaggacatcgtgaaccccagcaacgagctgatcaaggagggccagatcctgaagctggccgccagaaacaccagcgcccaggagagatacctgttcctgttcaacaacatgctgctgtactgcgtgcccaagttcagcctggtgggcagcaagttcaccgtgagaaccagagtgggcatcgacggcatgaagatcgtggagacccagaacgaggagtacccccacaccttccaggtgagcggcaaggagagaaccctggagctgcaggccagcagcgcccaggacaaggaggagtggatcaaggccctgcaggagaccatcgacgccttccaccagagacacgagaccttcagaaacgccatcgccaaggacaacgacatccacagcgaggtgagcaccgccgagctgggcaagagagcccccagatggatcagagacaacgaggtgaccatgtgcatgaagtgcaaggagcccttcaacgccctgaccagaagaagacaccactgcagagcctgcggctacgtggtgtgctggaagtgcagcgactacaaggcccagctggagtacgacggcggcaagctgagcaaggtgtgcaaggactgctaccagatcatcagcggcttcaccgacagcgaggagaagaagagaaagggcatcctggagatcgagagcgccgaggtgagcggcaacagcgtggtgtgcagcttcctgcagtacatggagaagagcaagccctggcagaaggcctggtgcgtgatccccaagcaggaccccctggtgctgtacatgtacggcgccccccaggacgtgagagcccaggccaccatccccctgctgggctacgtggtggacgagatgcccagaagcgccgacctgccccacagcttcaagctgacccagagcaagagcgtgcacagcttcgccgccgacagcgaggagctgaagcagaagtggctgaaggtgatcctgctggccgtgaccggcgagacccccggcggccccaacgagcaccccgccaccctggacgaccaccccgagcccaagaagaagagcgagtgctag

SEQ ID NO: 82248 - DNA, 420 bp, synthetic construct
  misc_feature 1..420: note = Description of Artificial Sequence: Synthetic coding sequence
  source 1..420: mol_type = other DNA
atgagctggagaggcagaagcacctactactggcccagacccagaagatacgtgcagccccccgagatgatcggccccatgagacccgagcagttcagcgacgaggtggagcccgccacccccgaggagggcgagcccgccacccagagacaggaccccgccgccgcccaggagggcgaggacgagggcgccagcgccggccagggccccaagcccgaggccgacagccaggagcagggccacccccagaccggctgcgagtgcgaggacggccccgacggccaggagatggacccccccaaccccgaggaggtgaagacccccgaggaggagatgagaagccactacgtggcccagaccggcatcctgtggctgctgatgaacaactgcttcctgaacctgagccccagaaagccctag

SEQ ID NO: 82249 - DNA, 351 bp, synthetic construct
  misc_feature 1..351: note = Description of Artificial Sequence: Synthetic coding sequence
  source 1..351: mol_type = other DNA
atgagctggagaggcagaagcacctacagaagcagacccagactgtacgtggagccccccgagatgatcggccccatgctgcccgagcagttcagcgacgaggtggagcccgccacccccgaggagggcgagcccgccacccagagacaggaccccgccgccgcccaggagggcgaggacgagggcgccagcgccggccagggccccaagcccgaggccgacagccaggagcaggtgcaccccaagaccggctgcgagtgcggcgacggccccgacggccaggagatgggcctgcccaaccccgaggaggtgaagagacccgaggagggcgagaagcagagccagtgctag

SEQ ID NO: 82250 - DNA, 354 bp, synthetic construct
  misc_feature 1..354: note = Description of Artificial Sequence: Synthetic coding sequence
  source 1..354: mol_type = other DNA
atgagctggagaggcagaagcacctactactggcccagacccagaagatacgtgcagccccccgagatgatcggccccatgagacccgagcagttcagcgacgaggtggagcccgccacccccgaggagggcgagcccgccacccagtgccaggaccccgccgccgcccaggagggcgaggacgagggcgccagcgccggccagggccccaagcccgaggcccacagccaggagcagggccacccccagaccggctgcgagtgcgaggacggccccgacggccaggagatggacccccccaaccccgaggaggtgaagacccccgaggagggcgagaagcagagccagtgctag

SEQ ID NO: 82251 - DNA, 354 bp, synthetic construct; identical to SEQ ID NO: 82250
  misc_feature 1..354: note = Description of Artificial Sequence: Synthetic coding sequence
  source 1..354: mol_type = other DNA

SEQ ID NO: 82252 - DNA, 354 bp, synthetic construct; identical to SEQ ID NO: 82250
  misc_feature 1..354: note = Description of Artificial Sequence: Synthetic coding sequence
  source 1..354: mol_type = other DNA

SEQ ID NO: 82253 - DNA, 354 bp, synthetic construct
  misc_feature 1..354: note = Description of Artificial Sequence: Synthetic coding sequence
  source 1..354: mol_type = other DNA
atgagctggagaggcagaagcacctactactggcccagacccagaagatacgtgcagccccccgagatgatcggccccatgagacccgagcagttcagcgacgaggtggagcccgccacccccgaggagggcgagcccgccacccagagacaggaccccgccgccgcccaggagggcgaggacgagggcgccagcgccggccagggccccaagcccgaggcccacagccaggagcagggccacccccagaccggctgcgagtgcgaggacggccccgacggccaggagatggacccccccaaccccgaggaggtgaagacccccgaggagggcgagaagcagagccagtgctag

SEQ ID NO: 82254 - DNA, 354 bp, synthetic construct; identical to SEQ ID NO: 82253
  misc_feature 1..354: note = Description of Artificial Sequence: Synthetic coding sequence
  source 1..354: mol_type = other DNA

SEQ ID NO: 82255 - DNA, 354 bp, synthetic construct
  misc_feature 1..354: note = Description of Artificial Sequence: Synthetic coding sequence
  source 1..354: mol_type = other DNA
atgagctggagaggcagaagcacctactactggcccagacccagaagatacgtgcagccccccgagatgatcggccccatgagacccgagcagttcagcgacgaggtggagcccgccacccccgaggagggcgagcccgccacccagtgccaggaccccgccgccgcccagaagggcgaggacgagggcgccagcgccggccagggccccaagcccgaggcccacagccaggagcagggccacccccagaccggctgcgagtgcgaggacggccccgacggccaggagatggacccccccaaccccgaggaggtgaagacccccgaggagggcgagaagcagagccagtgctag

SEQ ID NO: 82256 - DNA, 354 bp, synthetic construct
  misc_feature 1..354: note = Description of Artificial Sequence: Synthetic coding sequence
  source 1..354: mol_type = other DNA
atgagctggagaggcagaagcacctactactggcccagacccagaccctacgtgcagccccccgagatgatcggccccatgagacccgagcagttcagcgacgaggtggagcccgccacccccgaggagggcgagcccgccacccagagacaggaccccgccgccgcccaggagggcgaggacgagggcgccagcgccggccagggccccaagcccgaggccgacagccaggagcagggccacccccagaccggctgcgagtgcgaggacggccccgacggccaggagatggacccccccaaccccgaggaggtgaagacccccgaggagggcaagaagcagagccagtgctag

SEQ ID NO: 82257 - DNA, 354 bp, synthetic construct
  misc_feature 1..354: note = Description of Artificial Sequence: Synthetic coding sequence
  source 1..354: mol_type = other DNA
atgagctggagaggcagaagcacctactacagacccagacccagaagatacgtggagccccccgagatgatcggccccatgagacccgagcagttcagcgacgaggtggagcccgccacccccgaggagggcgagcccgccacccagtgccaggaccccgccgccgcccaggagggcgaggacgagggcgccagcgccggccagggccccaagcccgaggccgacagccaggagcagggccacccccagaccggctgcgagtgcgaggacggccccgacggccaggagatggacccccccaaccccgaggaggtgaagacccccgaggagggcaagaagcagagccagtgctag

SEQ ID NO: 82258 - DNA, 351 bp, synthetic construct
  misc_feature 1..351: note = Description of Artificial Sequence: Synthetic coding sequence
  source 1..351: mol_type = other DNA
atgagctggagaggcagaagcacctacagacccagacccagaagatacgtggagccccccgagatgatcggccccatgagacccgagcagttcagcgacgaggtggagcccgccacccccgaggagggcgagcccgccacccagagacaggaccccgccgccgcccaggagggccaggacgagggcgccagcgccggccagggccccaagcccgaggcccacagccaggagcagggccacccccagaccggctgcgagtgcgaggacggccccgacggccaggagatggacccccccaaccccgaggaggtgaagacccccgaggagggcgagaagcagagccagtgctag

SEQ ID NO: 82259 - DNA, 351 bp, synthetic construct
  misc_feature 1..351: note = Description of Artificial Sequence: Synthetic coding sequence
  source 1..351: mol_type = other DNA
atgagctggagaggcagaagcacctacagacccagacccagaagatacgtggagccccccgagatgatcggccccatgagacccgagcagttcagcgacgaggtggagcccgccacccccgaggagggcgagcccgccacccagagacaggaccccgccgccgcccaggagggcgaggacgagggcgccagcgccggccagggccccaagcccgaggcccacagccaggagcagggccacccccagaccggctgcgagtgcgaggacggccccgacggccaggagatggacccccccaaccccgaggaggtgaagacccccgaggagggcgagaagcagagccagtgctag

SEQ ID NO: 82260 - DNA, 351 bp, synthetic construct; identical to SEQ ID NO: 82259
  misc_feature 1..351: note = Description of Artificial Sequence: Synthetic coding sequence
  source 1..351: mol_type = other DNA

SEQ ID NO: 82261 - DNA, 351 bp, synthetic construct
  misc_feature 1..351: note = Description of Artificial Sequence: Synthetic coding sequence
  source 1..351: mol_type = other DNA
atgagctggagaggcagaagcacctacagacccagacccagaagatacgtggagccccccgagatgatcggccccatgagacccgagcagttcagcgacgaggtggagcccgccacccccgaggagggcgagcccgccacccagagacaggaccccgccgccgcccaggagggcgaggacgagggcgccagcgccggccagggccccaagcccgaggccgacagccaggagcagggccacccccagaccggctgcgagtgcgaggacggccccgacggccaggagatggacccccccaaccccgaggaggtgaagacccccgaggagggcgagaagcagagccagtgctag

SEQ ID NO: 82262 - DNA, 351 bp, synthetic construct
  misc_feature 1..351: note = Description of Artificial Sequence: Synthetic coding sequence
  source 1..351: mol_type = other DNA
atgagctggagaggcagaagcacctacagacccagacccagaagatacgtggagccccccgagatgatcggccccatgagacccgagcagttcagcgacgaggtggagcccgccacccccgaggagggcgagcccgccacccagagacaggaccccgccgccgcccaggagggcgaggacgagggcgccagcgccggccagggccccaagcccgaggccgacagccaggagcagggccacccccagaccggctgcgagtgcgaggacggccccgacggccaggagatggacccccccaaccccgaggaggtgaagacccccgaggagggcaagaagcagagccagtgctag

SEQ ID NO: 82263 - DNA, 435 bp, synthetic construct
  misc_feature 1..435: note = Description of Artificial Sequence: Synthetic coding sequence
  source 1..435: mol_type = other DNA
atgttcctggaggagaagatccccagcatcagcgacctgaagctggccatcagaagagccaccctgaagagaagcttcacccccgtgttcctgggcagcgccctgaagaacaagggcgtgcagcccctgctggacgccgtgctggagtacctgcccaaccccagcgaggtgcagaactacgccatcctgaacaaggaggacgacagcaaggagaagaccaagatcctgatgaacagcagcagagacaacagccaccccttcgtgggcctggccttcaagctggagttcctgagcagaagcttcttcagactgaccagacagaaggaccacagaagacccatccagagaaccaccctgtacctgatcgtgatgagcccctacgacctgctgggctgcaacagcttcctggacttcccctgcttcagcagagactag

SEQ ID NO: 82264 - DNA, 2256 bp, synthetic construct
  misc_feature 1..2256: note = Description of Artificial Sequence: Synthetic coding sequence
  source 1..2256: mol_type = other DNA
atgagactgctgggcgccgccgccgtggccgccctgggcagaggcagagcccccgccagcctgggctggcagagaaagcaggtgaactggaaggcctgcagatggagcagcagcggcgtgatccccaacgagaagatcagaaacatcggcatcagcgcccacatcgacagcggcaagaccaccctgaccgagagagtgctgtactacaccggcagaatcgccaagatgcacgaggtgaagggcaaggacggcgtgggcgccgtgatggacagcatggagctggagagacagagaggcatcaccatccagagcgccgccacctacaccatgtggaaggacgtgaacatcaacatcatcgacacccccggccacgtggacttcaccatcgaggtggagagagccctgagagtgctggacggcgccgtgctggtgctgtgcgccgtgggcggcgtgcagtgccagaccatgaccgtgaacagacagatgaagagatacaacgtgcccttcctgaccttcatcaacaagctggacagaatgggcagcaaccccgccagagccctgcagcagatgagaagcaagctgaaccacaacgccgccttcatgcagatccccatgggcctggagggcaacttcaagggcatcgtggacctgatcgaggagagagccatctacttcgacggcgacttcggccagatcgtgagatacggcgagatccccgccgagctgagagccgccgccaccgaccacagacaggagctgatcgagtgcgtggccaacagcgacgagcagctgggcgagatgttcctggaggagaagatccccagcatcagcgacctgaagctggccatcagaagagccaccctgaagagaagcttcacccccgtgttcctgggcagcgccctgaagaacaagggcgtgcagcccctgctggacgccgtgctggagtacctgcccaaccccagcgaggtgcagaactacgccatcctgaacaaggaggacgacagcaaggagaagaccaagatcctgatgaacagcagcagagacaacagccaccccttcgtgggcctggccttcaagctggaggtgggcagattcggccagctgacctacgtgagaagctaccagggcgagctgaagaagggcgacaccatctacaacaccagaaccagaaagaaggtgagactgcagagactggccagaatgcacgccgacatgatggaggacgtggaggaggtgtacgccggcgacatctgcgccctgttcggcatcgactgcgccagcggcgacaccttcaccgacaaggccaacagcggcctgagcatggagagcatccacgtgcccgaccccgtgatcagcatcgccatgaagcccagcaacaagaacgacctggagaagttcagcaagggcatcggcagattcaccagagaggaccccaccttcaaggtgtacttcgacaccgagaacaaggagaccgtgatcagcggcatgggcgagctgcacctggagatctacgcccagagactggagagagagtacggctgcccctgcatcaccggcaagcccaaggtggccttcagagagaccatcaccgcccccgtgcccttcgacttcacccacaagaagcagagcggcggcgccggccagtacggcaaggtgatcggcgtgctggagcccctggaccccgaggactacaccaagctggagttcagcgacgagaccttcggcagcaacatccccaagcagttcgtgcccgccgtggagaagggcttcctggacgcctgcgagaagggccccctgagcggccacaagctgagcggcctgagattcgtgctgcaggacggcgcccaccacatggtggacagcaacgagatcagcttcatcagagccggcgagggcgccctgaagcaggccctggccaacgccaccctgtgcatcctggagcccatcatggccgtggaggtggtggcccccaacgagttccagggccaggtgatcgccggcatcaacagaagacacggcgtgatcaccggccaggacggcgtggaggactacttcaccctgtacgccgacgtgcccctgaacgacatgttcggctacagcaccgagctgagaagctgcaccgagggcaagggcgagtacaccatggagtacagcagataccagccctgcctgcccagcacccaggaggacgtgatcaacaagtacctggaggccaccggccagctgcccgtgaagaagggcaaggccaagaactag

SEQ ID NO: 82265 - DNA, 459 bp, synthetic construct
  misc_feature 1..459: note = Description of Artificial Sequence: Synthetic coding sequence
  source 1..459: mol_type = other DNA
atgagcctggtgatccccgagaagttccagcacatcctgagagtgctgaacaccaacatcgacggcagaagaaagatcgccttcgccatcaccgccatcaagggcgtgggcagaagatacgcccacgtggtgctgagaaaggccgacatcgacctgaccaagagagccggcgagctgaccgaggacgaggtggagagagtgatcaccatcatgcagaaccccagacagtacaagatccccgactggttcctgaacagacagaaggacgtgaaggacggcaagtacagccaggtgctggccaacggcctggacaacaagctgagagaggacctggagagactgaagaagatcagagcccacagaggcctgagacacttctggggcctgagagtgagaggccagcacaccaagaccaccggcagaagaggcagaaccgtgggcgtgagcaagaagaagtag

SEQ ID NO: 82266 - DNA, 1071 bp, synthetic construct
  misc_feature 1..1071: note = Description of Artificial Sequence: Synthetic coding sequence
  source 1..1071: mol_type = other DNA
atgagcagacccctgctgatcaccttcacccccgccaccgaccccagcgacctgtggaaggacggccagcagcagccccagcccgagaagcccgagagcaccctggacggcgccgccgccagagccttctacgaggccctgatcggcgacgagagcagcgcccccgacagccagagaagccagaccgagcccgccagagagagaaagagaaagaagagaagaatcatgaaggcccccgccgccgaggccgtggccgagggcgccagcggcagacacggccagggcagaagcctggaggccgaggacaagatgacccacagaatcctgagagccgcccaggagggcgacctgcccgagctgagaagactgctggagccccacgaggccggcggcgccggcggcaacatcaacgccagagacgccttctggtggacccccctgatgtgcgccgccagagccggccagggcgccgccgtgagctacctgctgggcagaggcgccgcctgggtgggcgtgtgcgagctgagcggcagagacgccgcccagctggccgaggaggccggcttccccgaggtggccagaatggtgagagagagccacggcgagaccagaagccccgagaacagaagccccacccccagcctgcagtactgcgagaactgcgacacccacttccaggacagcaaccacagaaccagcaccgcccacctgctgagcctgagccagggcccccagccccccaacctgcccctgggcgtgcccatcagcagccccggcttcaagctgctgctgagaggcggctgggagcccggcatgggcctgggccccagaggcgagggcagagccaaccccatccccaccgtgctgaagagagaccaggagggcctgggctacagaagcgccccccagcccagagtgacccacttccccgcctgggacaccagagccgtggccggcagagagagaccccccagagtggccaccctgagctggagagaggagagaagaagagaggagaaggacagagcctgggagagagacctgagaacctacatgaacctggagttctag

SEQ ID NO: 82267 - DNA, 1071 bp, synthetic construct; identical to SEQ ID NO: 82266
  misc_feature 1..1071: note = Description of Artificial Sequence: Synthetic coding sequence
  source 1..1071: mol_type = other DNA

SEQ ID NO: 82268 - DNA, 1071 bp, synthetic construct; identical to SEQ ID NO: 82266
  misc_feature 1..1071: note = Description of Artificial Sequence: Synthetic coding sequence
  source 1..1071: mol_type = other DNA

SEQ ID NO: 82269 - DNA, 1071 bp, synthetic construct; identical to SEQ ID NO: 82266
  misc_feature 1..1071: note = Description of Artificial Sequence: Synthetic coding sequence
  source 1..1071: mol_type = other DNA

SEQ ID NO: 82270 - DNA, 1071 bp, synthetic construct; identical to SEQ ID NO: 82266
  misc_feature 1..1071: note = Description of Artificial Sequence: Synthetic coding sequence
  source 1..1071: mol_type = other DNA

SEQ ID NO: 82271 - DNA, 1071 bp, synthetic construct; identical to SEQ ID NO: 74103
  misc_feature 1..1071: note = Description of Artificial Sequence: Synthetic coding sequence
  source 1..1071: mol_type = other DNA

SEQ ID NO: 82272 - DNA, 1071 bp, synthetic construct; identical to SEQ ID NO: 74103
  misc_feature 1..1071: note = Description of Artificial Sequence: Synthetic coding sequence
  source 1..1071: mol_type = other DNA

SEQ ID NO: 82273 - DNA, 1071 bp, synthetic construct; identical to SEQ ID NO: 74103
  misc_feature 1..1071: note = Description of Artificial Sequence: Synthetic coding sequence
  source 1..1071: mol_type = other DNA

SEQ ID NO: 82274 - DNA, 1071 bp, synthetic construct; identical to SEQ ID NO: 74103
  misc_feature 1..1071: note = Description of Artificial Sequence: Synthetic coding sequence
  source 1..1071: mol_type = other DNA

SEQ ID NO: 82275 - DNA, 1071 bp, synthetic construct; identical to SEQ ID NO: 74103
  misc_feature 1..1071: note = Description of Artificial Sequence: Synthetic coding sequence
  source 1..1071: mol_type = other DNA

SEQ ID NO: 82276 - DNA, 498 bp, synthetic construct
  misc_feature 1..498: note = Description of Artificial Sequence: Synthetic coding sequence
  source 1..498: mol_type = other DNA
atgagcagacccctgctgatcaccttcacccccgccaccgaccccagcgacctgtggaaggacggccagcagcagccccagcccgagaagcccgagagcaccctggacggcgccgccgccagagccttctacgaggccctgatcggcgacgagagcagcgcccccgacagccagagaagccagaccgagcccgccagagagagaaagagaaagaagagaagaatcatgaaggcccccgccgccgaggccgtggccgagggcgccagcggcagacacggccagggcagaagcctggaggccgaggacaagatgacccacagaatcctgagagccgcccaggagggcgacctgcccgagctgagaagactgctggagccccacgaggccggcggcgccggcggcaacatcaacgccagagacgccttctggtggacccccctgatgtgcgccgccagagccggccagggcgccgccgtgagctacctgctgggcagatag

SEQ ID NO: 82277 - DNA, 459 bp, synthetic construct
  misc_feature 1..459: note = Description of Artificial Sequence: Synthetic coding sequence
  source 1..459: mol_type = other DNA
atgagcagacccctgctgatcaccttcacccccgccaccgaccccagcgacctgtggaaggacggccagcagcagccccagcccgagaagcccgagagcaccctggacggcgccgccgccctggccttctacgaggccctgatcggcgacgagagcagcgcccccgacagccagagaagccagaccgagcccgccagagagagaaagagaaagaagagaagaatcatgaaggcccccgccgccgaggccgtggccgagggcgccagcggcagacacggccagggcagaagcctggaggccgaggacaagatgacccacagaatcctgagagccgcccaggagggcgacctgcccgagctgagaagactgctggagccccacgaggccggcggcgccggcggcaacatcaacgccagagacgccttctggtggacccccctgatgtgcgccgccagatag

SEQ ID NO: 82278 - DNA, 1071 bp, synthetic construct; identical to SEQ ID NO: 74103
  misc_feature 1..1071: note = Description of Artificial Sequence: Synthetic coding sequence
  source 1..1071: mol_type = other DNA

SEQ ID NO: 82279 - DNA, 459 bp, synthetic construct
  misc_feature 1..459: note = Description of Artificial Sequence: Synthetic coding sequence
  source 1..459: mol_type = other DNA
atgagcagacccctgctgatcaccttcacccccgccaccgaccccagcgacctgtggaaggacggccagcagcagccccagcccgagaagcccgagagcaccctggacggcgccgccgccagagccttctacgaggccctgatcggcgacgagagcagcgcccccgacagccagagaagccagaccgagcccgccagagagagaaagagaaagaagagaagaatcatgaaggcccccgccgccgaggccgtggccgagggcgccagcggcagacacggccagggcagaagcctggaggccgaggacaagatgacccacagaatcctgagagccgcccaggagggcgacctgcccgagctgagaagactgctggagccccacgaggccggcggcgccggcggcaacatcaacgccagagacgccttctggtggacccccctgatgtgcgccgccagatag

SEQ ID NO: 82280 - DNA, 498 bp, synthetic construct
  misc_feature 1..498: note = Description of Artificial Sequence: Synthetic coding sequence
  source 1..498: mol_type = other DNA
atgagcagacccctgctgatcaccttcacccccgccaccgaccccagcgacctgtggaaggacggccagcagcagccccagcccgagaagcccgagagcaccctggacggcgccgccgccctggccttctacgaggccctgatcggcgacgagagcagcgcccccgacagccagagaagccagaccgagcccgccagagagagaaagagaaagaagagaagaatcatgaaggcccccgccgccgaggccgtggccgagggcgccagcggcagacacggccagggcagaagcctggaggccgaggacaagatgacccacagaatcctgagagccgcccaggagggcgacctgcccgagctgagaagactgctggagccccacgaggccggcggcgccggcggcaacatcaacgccagagacgccttctggtggacccccctgatgtgcgccgccagagccggccagggcgccgccgtgagctacctgctgggcagatag

SEQ ID NO: 82281 - DNA, 273 bp, synthetic construct
  misc_feature 1..273: note = Description of Artificial Sequence: Synthetic coding sequence
  source 1..273: mol_type = other DNA
atgagcagacccctgctgatcaccttcacccccgccaccgaccccagcgacctgtggaaggacggccagcagcagccccagcccgagaagcccgagagcaccctggacggcgccgccgccctggccttctacgaggccctgatcggcgacgagagcagcgcccccgacagccagagaagccagaccgagcccgccagagagagaaagagaaagaagagaagaatcatgaaggcccccgccgccgaggccgtggccgagggcgccagcggctag

SEQ ID NO: 82282 - DNA, 1071 bp, synthetic construct; identical to SEQ ID NO: 82266
  misc_feature 1..1071: note = Description of Artificial Sequence: Synthetic coding sequence
  source 1..1071: mol_type = other DNA

SEQ ID NO: 82283 - DNA, 1071 bp, synthetic construct; identical to SEQ ID NO: 82266
  misc_feature 1..1071: note = Description of Artificial Sequence: Synthetic coding sequence
  source 1..1071: mol_type = other DNA

SEQ ID NO: 82284 - DNA, 324 bp, synthetic construct
  misc_feature 1..324: note = Description of Artificial Sequence: Synthetic coding sequence
  source 1..324: mol_type = other DNA
atgagcagacccctgctgatcaccttcacccccgccaccgaccccagcgacctgtggaaggacggccagcagcagccccagcccgagaagcccgagagcaccctggacggcgccgccgccagagccttctacgaggccctgatcggcgacgagagcagcgcccccgacagccagagaagccagaccgagcccgccagagagagaaagagaaagaagagaagaatcatgaaggcccccgccgccgaggccgtggccgagggcgccagcggcagacacggccagggcagaagcctggaggccgaggacaagatgacccacagatag

SEQ ID NO: 82285 - DNA, 324 bp, synthetic construct
  misc_feature 1..324: note = Description of Artificial Sequence: Synthetic coding sequence
  source 1..324: mol_type = other DNA
atgagcagacccctgctgatcaccttcacccccgccaccgaccccagcgacctgtggaaggacggccagcagcagccccagcccgagaagcccgagagcaccctggacggcgccgccgccctggccttctacgaggccctgatcggcgacgagagcagcgcccccgacagccagagaagccagaccgagcccgccagagagagaaagagaaagaagagaagaatcatgaaggcccccgccgccgaggccgtggccgagggcgccagcggcagacacggccagggcagaagcctggaggccgaggacaagatgacccacagatag

SEQ ID NO: 82286 - DNA, 1071 bp, synthetic construct; identical to SEQ ID NO: 82266
  misc_feature 1..1071: note = Description of Artificial Sequence: Synthetic coding sequence
  source 1..1071: mol_type = other DNA

SEQ ID NO: 82287 - DNA, 1071 bp, synthetic construct
  misc_feature 1..1071: note = Description of Artificial Sequence: Synthetic coding sequence
  source 1..1071: mol_type = other DNA
atgagcagacccctgctgatcaccttcacccccgccaccgaccccagcgacctgtggaaggacggccagcagcagccccagcccgagaagcccgagagcaccctggacggcgccgccgccagagccttctacgaggccctgatcggcgacgagagcagcgcccccgacagccagagaagccagaccgagcccgccagagagagaaagagaaagaagagaagaatcatgaaggcccccgccgccgaggccgtggccgagggcgccagcggcagacacggccagggcagaagcctggaggccgaggacaagatgacccacagaatcctgagagccgcccaggagggcgacctgcccgagctgagaagactgctggagccccacgaggccggcggcgccggcggcaacatcaacgccagagacgccttctggtggacccccctgatgtgcgccgccagagccggccagggcgccgccgtgagctacctgctgggcagaggcgccgcctgggtgggcgtgtgcgagctgagcggcagagacgccgcccagctggccgaggaggccggcttccccgaggtggccagaatggtgagagagagccacggcgagaccagaagccccgagaacagaagccccacccccagcctgcagtactgcgagaactgcgacacccacttccaggacagcaaccacagaaccagcaccgcccacctgctgagcctgagccagggcccccagccccccaacctgcccctgggcgtgcccatcagcagccccggcttcaagctgctgctgagaagaggctgggagcccggcatgggcctgggccccagaggcgagggcagagccaaccccatccccaccgtgctgaagagagaccaggagggcctgggctacagaagcgccccccagcccagagtgacccacttccccgcctgggacaccagagccgtggccggcagagagagaccccccagagtggccaccctgagctggagagaggagagaagaagagaggagaaggacagagcctgggagagagacctgagaacctacatgaacctggagttctag

SEQ ID NO: 82288 - DNA, 1071 bp, synthetic construct; identical to SEQ ID NO: 82287
  misc_feature 1..1071: note = Description of Artificial Sequence: Synthetic coding sequence
  source 1..1071: mol_type = other DNA

SEQ ID NO: 82289 - DNA, 498 bp, synthetic construct; identical to SEQ ID NO: 82276
  misc_feature 1..498: note = Description of Artificial Sequence: Synthetic coding sequence
  source 1..498: mol_type = other DNA

SEQ ID NO: 82290 - DNA, 1071 bp, synthetic construct; identical to SEQ ID NO: 82266
  misc_feature 1..1071: note = Description of Artificial Sequence: Synthetic coding sequence
  source 1..1071: mol_type = other DNA

SEQ ID NO: 82291 - DNA, 597 bp, synthetic construct
  misc_feature 1..597: note = Description of Artificial Sequence: Synthetic coding sequence
  source 1..597: mol_type = other DNA
atgagcagacccctgctgatcaccttcacccccgccaccgaccccagcgacctgtggaaggacggccagcagcagccccagcccgagaagcccgagagcaccctggacggcgccgccgccagagccttctacgaggccctgatcggcgacgagagcagcgcccccgacagccagagaagccagaccgagcccgccagagagagaaagagaaagaagagaagaatcatgaaggcccccgccgccgaggccgtggccgagggcgccagcggcagacacggccagggcagaagcctggaggccgaggacaagatgacccacagaatcctgagagccgcccaggagggcgacctgcccgagctgagaagactgctggagccccacgaggccggcggcgccggcggcaacatcaacgccagagacgccttctggtggacccccctgatgtgcgccgccagagccggccagggcgccgccgtgagctacctgctgggcagaggcgccgcctgggtgggcgtgtgcgagctgagcggcagagacgccgcccagctggccgaggaggccggcttccccgaggtggccagaatggtgagagagtag

SEQ ID NO: 82292 - DNA, 1071 bp, synthetic construct; identical to SEQ ID NO: 82287
  misc_feature 1..1071: note = Description of Artificial Sequence: Synthetic coding sequence
  source 1..1071: mol_type = other DNA

SEQ ID NO: 82293 - DNA, 498 bp, synthetic construct; identical to SEQ ID NO: 82280
  misc_feature 1..498: note = Description of Artificial Sequence: Synthetic coding sequence
  source 1..498: mol_type = other DNA

SEQ ID NO: 82294 - DNA, 459 bp, synthetic construct; identical to SEQ ID NO: 82277
  misc_feature 1..459: note = Description of Artificial Sequence: Synthetic coding sequence
  source 1..459: mol_type = other DNA

SEQ ID NO: 82295 - DNA, 459 bp, synthetic construct; identical to SEQ ID NO: 82277
  misc_feature 1..459: note = Description of Artificial Sequence: Synthetic coding sequence
  source 1..459: mol_type = other DNA

SEQ ID NO: 82296 - DNA, 597 bp, synthetic construct
  misc_feature 1..597: note = Description of Artificial Sequence: Synthetic coding sequence
  source 1..597: mol_type = other DNA
atgagcagacccctgctgatcaccttcacccccgccaccgaccccagcgacctgtggaaggacggccagcagcagccccagcccgagaagcccgagagcaccctggacggcgccgccgccctggccttctacgaggccctgatcggcgacgagagcagcgcccccgacagccagagaagccagaccgagcccgccagagagagaaagagaaagaagagaagaatcatgaaggcccccgccgccgaggccgtggccgagggcgccagcggcagacacggccagggcagaagcctggaggccgaggacaagatgacccacagaatcctgagagccgcccaggagggcgacctgcccgagctgagaagactgctggagccccacgaggccggcggcgccggcggcaacatcaacgccagagacgccttctggtggacccccctgatgtgcgccgccagagccggccagggcgccgccgtgagctacctgctgggcagaggcgccgcctgggtgggcgtgtgcgagctgagcggcagagacgccgcccagctggccgaggaggccggcttccccgaggtggccagaatggtgagagagtag

SEQ ID NO: 82297 - DNA, 597 bp, synthetic construct; identical to SEQ ID NO: 82296
  misc_feature 1..597: note = Description of Artificial Sequence: Synthetic coding sequence
  source 1..597: mol_type = other DNA

SEQ ID NO: 82298 - DNA, 1071 bp, synthetic construct; identical to SEQ ID NO: 82287
  misc_feature 1..1071: note = Description of Artificial Sequence: Synthetic coding sequence
  source 1..1071: mol_type = other DNA

SEQ ID NO: 82299 - DNA, 1071 bp, synthetic construct; identical to SEQ ID NO: 74103
  misc_feature 1..1071: note = Description of Artificial Sequence: Synthetic coding sequence
  source 1..1071: mol_type = other DNA

SEQ ID NO: 82300 - DNA, 597 bp, synthetic construct; identical to SEQ ID NO: 82296
  misc_feature 1..597: note = Description of Artificial Sequence: Synthetic coding sequence
  source 1..597: mol_type = other DNA

SEQ ID NO: 82301 - DNA, 1071 bp, synthetic construct; identical to SEQ ID NO: 74103
  misc_feature 1..1071: note = Description of Artificial Sequence: Synthetic coding sequence
  source 1..1071: mol_type = other DNA

SEQ ID NO: 82302 - DNA, 597 bp, synthetic construct; identical to SEQ ID NO: 82291
  misc_feature 1..597: note = Description of Artificial Sequence: Synthetic coding sequence
  source 1..597: mol_type = other DNA

SEQ ID NO: 82303 - DNA, 1071 bp, synthetic construct; identical to SEQ ID NO: 82266
  misc_feature 1..1071: note = Description of Artificial Sequence: Synthetic coding sequence
  source 1..1071: mol_type = other DNA

SEQ ID NO: 82304 - DNA, 324 bp, synthetic construct; identical to SEQ ID NO: 82284
  misc_feature 1..324: note = Description of Artificial Sequence: Synthetic coding sequence
  source 1..324: mol_type = other DNA

SEQ ID NO: 82305 - DNA, 1071 bp, synthetic construct; identical to SEQ ID NO: 82287
  misc_feature 1..1071: note = Description of Artificial Sequence: Synthetic coding sequence
  source 1..1071: mol_type = other DNA

SEQ ID NO: 82306 - DNA, 324 bp, synthetic construct; identical to SEQ ID NO: 82284
  misc_feature 1..324: note = Description of Artificial Sequence: Synthetic coding sequence
  source 1..324: mol_type = other DNA

SEQ ID NO: 82307 - DNA, 459 bp, synthetic construct; identical to SEQ ID NO: 82279
  misc_feature 1..459: note = Description of Artificial Sequence: Synthetic coding sequence
  source 1..459: mol_type = other DNA

SEQ ID NO: 82308 - DNA, 1071 bp, synthetic construct; identical to SEQ ID NO: 74103
  misc_feature 1..1071: note = Description of Artificial Sequence: Synthetic coding sequence
  source 1..1071: mol_type = other DNA

SEQ ID NO: 82309 - DNA, 1071 bp, synthetic construct; identical to SEQ ID NO: 74103
  misc_feature 1..1071: note = Description of Artificial Sequence: Synthetic coding sequence
  source 1..1071: mol_type = other DNA

SEQ ID NO: 82310 - DNA, 498 bp, synthetic construct; identical to SEQ ID NO: 82276
  misc_feature 1..498: note = Description of Artificial Sequence: Synthetic coding sequence
  source 1..498: mol_type = other DNA

SEQ ID NO: 82311 - DNA, 273 bp, synthetic construct; identical to SEQ ID NO: 82281
  misc_feature 1..273: note = Description of Artificial Sequence: Synthetic coding sequence
  source 1..273: mol_type = other DNA

SEQ ID NO: 82312 - DNA, 1071 bp, synthetic construct; identical to SEQ ID NO: 82266
  misc_feature 1..1071: note = Description of Artificial Sequence: Synthetic coding sequence
  source 1..1071: mol_type = other DNA

SEQ ID NO: 82313 - DNA, 273 bp, synthetic construct; identical to SEQ ID NO: 82281
  misc_feature 1..273: note = Description of Artificial Sequence: Synthetic coding sequence
  source 1..273: mol_type = other DNA

SEQ ID NO: 82314 - DNA, 1071 bp, synthetic construct; identical to SEQ ID NO: 82266
  misc_feature 1..1071: note = Description of Artificial Sequence: Synthetic coding sequence
  source 1..1071: mol_type = other DNA

SEQ ID NO: 82315 - DNA, 597 bp, synthetic construct; identical to SEQ ID NO: 82291
  misc_feature 1..597: note = Description of Artificial Sequence: Synthetic coding sequence
  source 1..597: mol_type = other DNA

SEQ ID NO: 82316 - DNA, 324 bp, synthetic construct; identical to SEQ ID NO: 82285
  misc_feature 1..324: note = Description of Artificial Sequence: Synthetic coding sequence
  source 1..324: mol_type = other DNA

SEQ ID NO: 82317 - DNA, 324 bp, synthetic construct; identical to SEQ ID NO: 82285
  misc_feature 1..324: note = Description of Artificial Sequence: Synthetic coding sequence
  source 1..324: mol_type = other DNA

SEQ ID NO: 82318 - DNA, 273 bp, synthetic construct
  misc_feature 1..273: note = Description of Artificial Sequence: Synthetic coding sequence
  source 1..273: mol_type = other DNA
atgagcagacccctgctgatcaccttcacccccgccaccgaccccagcgacctgtggaaggacggccagcagcagccccagcccgagaagcccgagagcaccctggacggcgccgccgccagagccttctacgaggccctgatcggcgacgagagcagcgcccccgacagccagagaagccagaccgagcccgccagagagagaaagagaaagaagagaagaatcatgaaggcccccgccgccgaggccgtggccgagggcgccagcggctag

SEQ ID NO: 82319 - DNA, 273 bp, synthetic construct; identical to SEQ ID NO: 82318
  misc_feature 1..273: note = Description of Artificial Sequence: Synthetic coding sequence
  source 1..273: mol_type = other DNA

SEQ ID NO: 82320 - DNA, 459 bp, synthetic construct; identical to SEQ ID NO: 82279
  misc_feature 1..459: note = Description of Artificial Sequence: Synthetic coding sequence
  source 1..459: mol_type = other DNA

SEQ ID NO: 82321 - DNA, 597 bp, synthetic construct; identical to SEQ ID NO: 82291
  misc_feature 1..597: note = Description of Artificial Sequence: Synthetic coding sequence
  source 1..597: mol_type = other DNA

SEQ ID NO: 82322 - DNA, 1071 bp, synthetic construct; identical to SEQ ID NO: 74103
  misc_feature 1..1071: note = Description of Artificial Sequence: Synthetic coding sequence
  source 1..1071: mol_type = other DNA

SEQ ID NO: 82323 - DNA, 1071 bp, synthetic construct; identical to SEQ ID NO: 82266
  misc_feature 1..1071: note = Description of Artificial Sequence: Synthetic coding sequence
  source 1..1071: mol_type = other DNA

SEQ ID NO: 82324 - DNA, 1071 bp, synthetic construct; identical to SEQ ID NO: 82266
  misc_feature 1..1071: note = Description of Artificial Sequence: Synthetic coding sequence
  source 1..1071: mol_type = other DNA

SEQ ID NO: 82325 - DNA, 498 bp, synthetic construct; identical to SEQ ID NO: 82280
  misc_feature 1..498: note = Description of Artificial Sequence: Synthetic coding sequence
  source 1..498: mol_type = other DNA

SEQ ID NO: 82326 - DNA, 273 bp, synthetic construct; identical to SEQ ID NO: 82318
  misc_feature 1..273: note = Description of Artificial Sequence: Synthetic coding sequence
  source 1..273: mol_type = other DNA

SEQ ID NO: 82327 - DNA, 324 bp, synthetic construct; identical to SEQ ID NO: 82284
  misc_feature 1..324: note = Description of Artificial Sequence: Synthetic coding sequence
  source 1..324: mol_type = other DNA

SEQ ID NO: 82328 - DNA, 1071 bp, synthetic construct; identical to SEQ ID NO: 82266
  misc_feature 1..1071: note = Description of Artificial Sequence: Synthetic coding sequence
  source 1..1071: mol_type = other DNA

SEQ ID NO: 82329 - DNA, 1071 bp, synthetic construct; identical to SEQ ID NO: 74103
  misc_feature 1..1071: note = Description of Artificial Sequence: Synthetic coding sequence
  source 1..1071: mol_type = other DNA

SEQ ID NO: 82330 - DNA, 1071 bp, synthetic construct; identical to SEQ ID NO: 74103
  misc_feature 1..1071: note = Description of Artificial Sequence: Synthetic coding sequence
  source 1..1071: mol_type = other DNA

SEQ ID NO: 82331 - DNA, 273 bp, synthetic construct; identical to SEQ ID NO: 82318
  misc_feature 1..273: note = Description of Artificial Sequence: Synthetic coding sequence
  source 1..273: mol_type = other DNA

SEQ ID NO: 82332 - DNA, 1071 bp, synthetic construct; identical to SEQ ID NO: 74103
  misc_feature 1..1071: note = Description of Artificial Sequence: Synthetic coding sequence
  source 1..1071: mol_type = other DNA

SEQ ID NO: 82333 - DNA, 498 bp, synthetic construct; identical to SEQ ID NO: 82276
  misc_feature 1..498: note = Description of Artificial Sequence: Synthetic coding sequence
  source 1..498: mol_type = other DNA

SEQ ID NO: 82334 - DNA, 459 bp, synthetic construct; identical to SEQ ID NO: 82279
  misc_feature 1..459: note = Description of Artificial Sequence: Synthetic coding sequence
  source 1..459: mol_type = other DNA

SEQ ID NO: 82335 - DNA, 4509 bp, synthetic construct
  misc_feature 1..4509: note = Description of Artificial Sequence: Synthetic coding sequence
  source 1..4509: mol_type = other DNA
atggccgacagattcagcagattcaacgaggacagagacttccagggcaaccacttcgaccagtacgaggagggccacctggagatcgagcaggccagcctggacaagcccatcgagagcgacaacatcggccacagactgctgcagaagcacggctggaagctgggccagggcctgggcaagagcctgcagggcagaaccgaccccatccccatcgtggtgaagtacgacgtgatgggcatgggcagaatggagatggagctggactacgccgaggacgccaccgagagaagaagagtgctggaggtggagaaggaggacaccgaggagctgagacagaagtacaaggactacgtggacaaggagaaggccatcgccaaggccctggaggacctgagagccaacttctactgcgagctgtgcgacaagcagtaccagaagcaccaggagttcgacaaccacatcaacagctacgaccacgcccacaagcagagactgaaggacctgaagcagagagagttcgccagaaacgtgagcagcagaagcagaaaggacgagaagaagcaggagaaggccctgagaagactgcacgagctggccgagcagagaaagcaggccgagtgcgcccccggcagcggccccatgttcaagcccaccaccgtggccgtggacgaggagggcggcgaggacgacaaggacgagagcgccaccaacagcggcaccggcgccaccgccagctgcggcctgggcagcgagttcagcaccgacaagggcggccccttcaccgccgtgcagatcaccaacaccaccggcctggcccaggcccccggcctggccagccagggcatcagcttcggcatcaagaacaacctgggcacccccctgcagaagctgggcgtgagcttcagcttcgccaagaaggcccccgtgaagctggagagcatcgccagcgtgttcaaggaccacgccgaggagggcaccagcgaggacggcaccaagcccgacgagaagagcagcgaccagggcctgcagaaggtgggcgacagcgacggcagcagcaacctggacggcaagaaggaggacgaggacccccaggacggcggcagcctggccagcaccctgagcaagctgaagagaatgaagagagaggagggcgccggcgccaccgagcccgagtactaccactacatcccccccgcccactgcaaggtgaagcccaacttccccttcctgctgttcatgagagccagcgagcagatggacggcgacaacaccacccaccccaagaacgcccccgagagcaagaagggcagcagccccaagcccaagagctgcatcaaggccgccgccagccagggcgccgagaagaccgtgagcgaggtgagcgagcagcccaaggagaccagcatgaccgagcccagcgagcccggcagcaaggccgaggccaagaaggccctgggcggcgacgtgagcgaccagagcctggagagccacagccagaaggtgagcgagacccagatgtgcgagagcaacagcagcaaggagaccagcctggccacccccgccggcaaggagagccaggagggccccaagcaccccaccggccccttcttccccgtgctgagcaaggacgagagcaccgccctgcagtggcccagcgagctgctgatcttcaccaaggccgagcccagcatcagctacagctgcaaccccctgtacttcgacttcaagctgagcagaaacaaggacgccagaaccaagggcaccgagaagcccaaggacatcggcagcagcagcaaggaccacctgcagggcctggaccccggcgagcccaacaagagcaaggaggtgggcggcgagaagatcgtgagaagcagcggcggcagaatggacgcccccgccagcggcagcgcctgcagcggcctgaacaagcaggagcccggcggcagccacggcagcgagaccgaggacaccggcagaagcctgcccagcaagaaggagagaagcggcaagagccacagacacaagaagaagaagaagcacaagaagagcagcaagcacaagagaaagcacaaggccgacaccgaggagaagagcagcaaggccgagagcggcgagaagagcaagaagagaaagaagagaaagagaaagaagaacaagagcagcgcccccgccgacagcgagagaggccccaagcccgagccccccggcagcggcagccccgccccccccagaagaagaagaagagcccaggacgacagccagagaagaagcctgcccgccgaggagggcagcagcggcaagaaggacgagggcggcggcggcagcagcagccaggaccacggcggcagaaagcacaagggcgagctgccccccagcagctgccagagaagagccggcaccaagagaagcagcagaagcagccacagaagccagcccagcagcggcgacgaggacagcgacgacgccagcagccacagactgcaccagaagagccccagccagtacagcgaggaggaggaggaggaggacagcggcagcgagcacagcagaagcagaagcagaagcggcagaagacacagcagccacagaagcagcagaagaagctacagcagcagcagcgacgccagcagcgaccagagctgctacagcagacagagaagctacagcgacgacagctacagcgactacagcgacagaagcagaagacacagcaagagaagccacgacagcgacgacagcgactacgccagcagcaagcacagaagcaagagacacaagtacagcagcagcgacgacgactacagcctgagctgcagccagagcagaagcagaagcagaagccacaccagagagagaagcagaagcagaggcagaagcagaagcagcagctgcagcagaagcagaagcaagagaagaagcagaagcaccaccgcccacagctggcagagaagcagaagctacagcagagacagaagcagaagcaccagaagccccagccagagaagcggcagcagaaagagaagctggggccacgagagccccgaggagagacacagcggcagaagagacttcatcagaagcaagatctacagaagccagagcccccactacttcagaagcggcagaggcgagggccccggcaagaaggacgacggcagaggcgacgacagcaaggccaccggcccccccagccagaacagcaacatcggcaccggcagaggcagcgagggcgactgcagccccgaggacaagaacagcgtgaccgccaagctgctgctggagaagatccagagcagaaaggtggagagaaagcccagcgtgagcgaggaggtgcaggccacccccaacaaggccggccccaagctgaaggaccccccccagggctacttcggccccaagctgccccccagcctgggcaacaagcccgtgctgcccctgatcggcaagctgcccgccaccagaaagcccaacaagaagtgcgaggagagcggcctggagagaggcgaggagcaggagcagagcgagaccgaggagggcccccccggcagcagcgacgccctgttcggccaccagttccccagcgaggagaccaccggccccctgctggaccccccccccgaggagagcaagagcggcgaggccaccgccgaccaccccgtggcccccctgggcacccccgcccacagcgactgctaccccggcgaccccaccatcagccacaactacctgcccgaccccagcgacggcgacaccctggagagcctggacagcagcagccagcccggccccgtggagagcagcctgctgcccatcgcccccgacctggagcacttccccagctacgccccccccagcggcgaccccagcatcgagagcaccgacggcgccgaggacgccagcctggcccccctggagagccagcccatcaccttcacccccgaggagatggagaagtacagcaagctgcagcaggccgcccagcagcacatccagcagcagctgctggccaagcaggtgaaggccttccccgccagcgccgccctggcccccgccacccccgccctgcagcccatccacatccagcagcccgccaccgccagcgccaccagcatcaccaccgtgcagcacgccatcctgcagcaccacgccgccgccgccgccgccgccatcggcatccacccccacccccacccccagcccctggcccaggtgcaccacatcccccagccccacctgacccccatcagcctgagccacctgacccacagcatcatccccggccaccccgccaccttcctggccagccaccccatccacatcatccccgccagcgccatccaccccggccccttcaccttccaccccgtgccccacgccgccctgtaccccaccctgctggcccccagacccgccgccgccgccgccaccgccctgcacctgcaccccctgctgcaccccatcttcagcggccaggacctgcagcacccccccagccacggcacctag

SEQ ID NO: 82336 - DNA, 4275 bp, synthetic construct
  misc_feature 1..4275: note = Description of Artificial Sequence: Synthetic coding sequence
  source 1..4275: mol_type = other DNA
atgggcatgggcagaatggagatggagctggactacgccgaggacgccaccgagagaagaagagtgctggaggtggagaaggaggacaccgaggagctgagacagaagtacaaggactacgtggacaaggagaaggccatcgccaaggccctggaggacctgagagccaacttctactgcgagctgtgcgacaagcagtaccagaagcaccaggagttcgacaaccacatcaacagctacgaccacgcccacaagcagagactgaaggacctgaagcagagagagttcgccagaaacgtgagcagcagaagcagaaaggacgagaagaagcaggagaaggccctgagaagactgcacgagctggccgagcagagaaagcaggccgagtgcgcccccggcagcggccccatgttcaagcccaccaccgtggccgtggacgaggagggcggcgaggacgacaaggacgagagcgccaccaacagcggcaccggcgccaccgccagctgcggcctgggcagcgagttcagcaccgacaagggcggccccttcaccgccgtgcagatcaccaacaccaccggcctggcccaggcccccggcctggccagccagggcatcagcttcggcatcaagaacaacctgggcacccccctgcagaagctgggcgtgagcttcagcttcgccaagaaggcccccgtgaagctggagagcatcgccagcgtgttcaaggaccacgccgaggagggcaccagcgaggacggcaccaagcccgacgagaagagcagcgaccagggcctgcagaaggtgggcgacagcgacggcagcagcaacctggacggcaagaaggaggacgaggacccccaggacggcggcagcctggccagcaccctgagcaagctgaagagaatgaagagagaggagggcgccggcgccaccgagcccgagtactaccactacatcccccccgcccactgcaaggtgaagcccaacttccccttcctgctgttcatgagagccagcgagcagatggacggcgacaacaccacccaccccaagaacgcccccgagagcaagaagggcagcagccccaagcccaagagctgcatcaaggccgccgccagccagggcgccgagaagaccgtgagcgaggtgagcgagcagcccaaggagaccagcatgaccgagcccagcgagcccggcagcaaggccgaggccaagaaggccctgggcggcgacgtgagcgaccagagcctggagagccacagccagaaggtgagcgagacccagatgtgcgagagcaacagcagcaaggagaccagcctggccacccccgccggcaaggagagccaggagggccccaagcaccccaccggccccttcttccccgtgctgagcaaggacgagagcaccgccctgcagtggcccagcgagctgctgatcttcaccaaggccgagcccagcatcagctacagctgcaaccccctgtacttcgacttcaagctgagcagaaacaaggacgccagaaccaagggcaccgagaagcccaaggacatcggcagcagcagcaaggaccacctgcagggcctggaccccggcgagcccaacaagagcaaggaggtgggcggcgagaagatcgtgagaagcagcggcggcagaatggacgcccccgccagcggcagcgcctgcagcggcctgaacaagcaggagcccggcggcagccacggcagcgagaccgaggacaccggcagaagcctgcccagcaagaaggagagaagcggcaagagccacagacacaagaagaagaagaagcacaagaagagcagcaagcacaagagaaagcacaaggccgacaccgaggagaagagcagcaaggccgagagcggcgagaagagcaagaagagaaagaagagaaagagaaagaagaacaagagcagcgcccccgccgacagcgagagaggccccaagcccgagccccccggcagcggcagccccgccccccccagaagaagaagaagagcccaggacgacagccagagaagaagcctgcccgccgaggagggcagcagcggcaagaaggacgagggcggcggcggcagcagcagccaggaccacggcggcagaaagcacaagggcgagctgccccccagcagctgccagagaagagccggcaccaagagaagcagcagaagcagccacagaagccagcccagcagcggcgacgaggacagcgacgacgccagcagccacagactgcaccagaagagccccagccagtacagcgaggaggaggaggaggaggacagcggcagcgagcacagcagaagcagaagcagaagcggcagaagacacagcagccacagaagcagcagaagaagctacagcagcagcagcgacgccagcagcgaccagagctgctacagcagacagagaagctacagcgacgacagctacagcgactacagcgacagaagcagaagacacagcaagagaagccacgacagcgacgacagcgactacgccagcagcaagcacagaagcaagagacacaagtacagcagcagcgacgacgactacagcctgagctgcagccagagcagaagcagaagcagaagccacaccagagagagaagcagaagcagaggcagaagcagaagcagcagctgcagcagaagcagaagcaagagaagaagcagaagcaccaccgcccacagctggcagagaagcagaagctacagcagagacagaagcagaagcaccagaagccccagccagagaagcggcagcagaaagagaagctggggccacgagagccccgaggagagacacagcggcagaagagacttcatcagaagcaagatctacagaagccagagcccccactacttcagaagcggcagaggcgagggccccggcaagaaggacgacggcagaggcgacgacagcaaggccaccggcccccccagccagaacagcaacatcggcaccggcagaggcagcgagggcgactgcagccccgaggacaagaacagcgtgaccgccaagctgctgctggagaagatccagagcagaaaggtggagagaaagcccagcgtgagcgaggaggtgcaggccacccccaacaaggccggccccaagctgaaggaccccccccagggctacttcggccccaagctgccccccagcctgggcaacaagcccgtgctgcccctgatcggcaagctgcccgccaccagaaagcccaacaagaagtgcgaggagagcggcctggagagaggcgaggagcaggagcagagcgagaccgaggagggcccccccggcagcagcgacgccctgttcggccaccagttccccagcgaggagaccaccggccccctgctggaccccccccccgaggagagcaagagcggcgaggccaccgccgaccaccccgtggcccccctgggcacccccgcccacagcgactgctaccccggcgaccccaccatcagccacaactacctgcccgaccccagcgacggcgacaccctggagagcctggacagcagcagccagcccggccccgtggagagcagcctgctgcccatcgcccccgacctggagcacttccccagctacgccccccccagcggcgaccccagcatcgagagcaccgacggcgccgaggacgccagcctggcccccctggagagccagcccatcaccttcacccccgaggagatggagaagtacagcaagctgcagcaggccgcccagcagcacatccagcagcagctgctggccaagcaggtgaaggccttccccgccagcgccgccctggcccccgccacccccgccctgcagcccatccacatccagcagcccgccaccgccagcgccaccagcatcaccaccgtgcagcacgccatcctgcagcaccacgccgccgccgccgccgccgccatcggcatccacccccacccccacccccagcccctggcccaggtgcaccacatcccccagccccacctgacccccatcagcctgagccacctgacccacagcatcatccccggccaccccgccaccttcctggccagccaccccatccacatcatccccgccagcgccatccaccccggccccttcaccttccaccccgtgccccacgccgccctgtaccccaccctgctggcccccagacccgccgccgccgccgccaccgccctgcacctgcaccccctgctgcaccccatcttcagcggccaggacctgcagcacccccccagccacggcacctag

SEQ ID NO: 82337 - DNA, 132 bp, synthetic construct
  misc_feature 1..132: note = Description of Artificial Sequence: Synthetic coding sequence
  source 1..132: mol_type = other DNA
atggccgacagattcagcagattcaacgaggacagagacttccagggcaaccacttcgaccagtacgaggagggccacctggagatcgagcaggccagcctggacaagcccatcgagagcagctgcttctag

SEQ ID NO: 82338 - DNA, 4509 bp, synthetic construct; identical to SEQ ID NO: 82335
  misc_feature 1..4509: note = Description of Artificial Sequence: Synthetic coding sequence
  source 1..4509: mol_type = other DNA

SEQ ID NO: 82339 - DNA, 1476 bp, synthetic construct
  misc_feature 1..1476: note = Description of Artificial Sequence: Synthetic coding sequence
  source 1..1476: mol_type = other DNA
atgcccctgcccgtgcaggtgttcaacctgcagggcgccgtggagcccatgcagatcgacgtggacccccaggaggacccccagaacgcccccgacgtgaactacgtggtggagaaccccagcctggacctggagcagtacgccgccagctacagcggcctgatgagaatcgagagactgcagttcatcgccgaccactgccccaccctgagagtggaggccctgaagatggccctgagcttcgtgcagagaaccttcaacgtggacatgtacgaggagatccacagaaagctgagcgaggccaccagaagcagcctgagagagctgcagaacgcccccgacgccatccccgagagcggcgtggagccccccgccctggacaccgcctgggtggaggccaccagaaagaaggccctgctgaagctggagaagctggacaccgacctgaagaactacaagggcaacagcatcaaggagagcatcagaagaggccacgacgacctgggcgaccactacctggactgcggcgacctgagcaacgccctgaagtgctacagcagagccagagactactgcaccagcgccaagcacgtgatcaacatgtgcctgaacgtgatcaaggtgagcgtgtacctgcagaactggagccacgtgctgagctacgtgagcaaggccgagagcacccccgagatcgccgagcagagaggcgagagagacagccagacccaggccatcctgaccaagctgaagtgcgccgccggcctggccgagctggccgccagaaagtacaagcaggccgccaagtgcctgctgctggccagcttcgaccactgcgacttccccgagctgctgagccccagcaacgtggccatctacggcggcctgtgcgccctggccaccttcgacagacaggagctgcagagaaacgtgatcagcagcagcagcttcaagctgttcctggagctggagccccaggtgagagacatcatcttcaagttctacgagagcaagtacgccagctgcctgaagatgctggacgagatgaaggacaacctgctgctggacatgtacctggccccccacgtgagaaccctgtacacccagatcagaaacagagccctgatccagtacttcagcccctacgtgagcgccgacatgcacagaatggccgccgccttcaacaccaccgtggccgccctggaggacgagctgacccagctgatcctggagggcctgatcagcgccagagtggacagccacagcaagatcctgtacgccagagacgtggaccagagaagcaccaccttcgagaagagcctgctgatgggcaaggagttccagagaagagccaaggccatgatgctgagagccgccgtgctgagaaaccagatccacgtgaagagcccccccagagagggcagccagggcgagctgacccccgccaacagccagagcagaatgagcaccaacatgtag

SEQ ID NO: 82340 - DNA, 1653 bp, synthetic construct
  misc_feature 1..1653: note = Description of Artificial Sequence: Synthetic coding sequence
  source 1..1653: mol_type = other DNA
atgcccctgcccgtgcaggtgttcaacctgcagcagcccgccagcagcgtgagcggcagcggcggcgccgagagccaggacagaatgagagacagcagcgcccccagcagcgccagcagcagcgtgaccgacctgtactgcaccccccacagcagcagaagcgacctggtgctgcccggcaccgccggcgacttcagcctgagcgccagcctgagcgcctgcaccctgctgtacgagggcgccgtggagcccatgcagatcgacgtggacccccaggaggacccccagaacgcccccgacgccatccccgagagcggcgtggagccccccgccctggacaccgcctgggtggaggccaccagaaagaaggccctgctgaagctggagaagctggacaccgacctgaagaactacaagggcaacagcatcaaggagagcatcagaagaggccacgacgacctgggcgaccactacctggactgcggcgacctgagcaacgccctgaagtgctacagcagagccagagactactgcaccagcgccaagcacgtgatcaacatgtgcctgaacgtgatcaaggtgagcgtgtacctgcagaactggagccacgtgctgagctacgtgagcaaggccgagagcacccccgagatcgccgagcagagaggcgagagagacagccagacccaggccatcctgaccaagctgaagtgcgccgccggcctggccgagctggccgccagaaagtacaagcaggccgccaagtgcctgctgctggccagcttcgaccactgcgacttccccgagctgctgagccccagcaacgtggccatctacggcggcctgtgcgccctggccaccttcgacagacaggagctgcagagaaacgtgatcagcagcagcagcttcaagctgttcctggagctggagccccaggtgagagacatcatcttcaagttctacgagagcaagtacgccagctgcctgaagatgctggacgagatgaaggacaacctgctgctggacatgtacctggccccccacgtgagaaccctgtacacccagatcagaaacagagccctgatccagtacttcagcccctacgtgagcgccgacatgcacagaatggccgccgccttcaacaccaccgtggccgccctggaggacgagctgacccagctgatcctggagggcctgatcagcgccagagtggacagccacagcaagatcctgtacgccagagacgtggaccagagaagcaccaccttcgagaagagcctgctgatgggcaaggagttccagagaagagccaaggccatgatgctgagagccgccgtgctgagaaaccagatccacgtgaagcccctgcccaccagcaccgacctgggcccccccggcggcagcgtgctgcccgccgcccagctgagaggcctggccaccggctgccaccccgcctgcgtgcccagcctgggcctgagaagacaggccgccgccagctgcggccccagctggaaggagagacccgccggcctggaccccgtgggcttctgcccccagggcgccgactgcgccgcccccagacccagcggcaccatcagccagaccccccccgtgcccgccagcgtgagatgcagacaggtgggcggcgtgcactag

SEQ ID NO: 82341 - DNA, 1584 bp, synthetic construct
  misc_feature 1..1584: note = Description of Artificial Sequence: Synthetic coding sequence
  source 1..1584: mol_type = other DNA
atgagagacagcagcgcccccagcagcgccagcagcagcgtgaccgacctgtactgcaccccccacagcagcagaagcgacctggtgctgcccggcaccgccggcgacttcagcctgagcgccagcctgagcgcctgcaccctgctgtacgagggcgccgtggagcccatgcagatcgacgtggacccccaggaggacccccagaacgcccccgacgtgaactacgtggtggagaaccccagcctggacctggagcagtacgccgccagctacagcggcctgatgagaatcgagagactgcagttcatcgccgaccactgccccaccctgagagtggaggccctgaagatggccctgagcttcgtgcagagaaccttcaacgtggacatgtacgaggagatccacagaaagctgagcgaggccaccagagagctgcagaacgcccccgacgccatccccgagagcggcgtggagccccccgccctggacaccgcctgggtggaggccaccagaaagaaggccctgctgaagctggagaagctggacaccgacctgaagaactacaagggcaacagcatcaaggagagcatcagaagaggccacgacgacctgggcgaccactacctggactgcggcgacctgagcaacgccctgaagtgctacagcagagccagagactactgcaccagcgccaagcacgtgatcaacatgtgcctgaacgtgatcaaggtgagcgtgtacctgcagaactggagccacgtgctgagctacgtgagcaaggccgagagcacccccgagatcgccgagcagagaggcgagagagacagccagacccaggccatcctgaccaagctgaagtgcgccgccggcctggccgagctggccgccagaaagtacaagcaggccgccaagtgcctgctgctggccagcttcgaccactgcgacttccccgagctgctgagccccagcaacgtggccatctacggcggcctgtgcgccctggccaccttcgacagacaggagctgcagagaaacgtgatcagcagcagcagcttcaagctgttcctggagctggagccccaggtgagagacatcatcttcaagttctacgagagcaagtacgccagctgcctgaagatgctggacgagatgaaggacaacctgctgctggacatgtacctggccccccacgtgagaaccctgtacacccagatcagaaacagagccctgatccagtacttcagcccctacgtgagcgccgacatgcacagaatggccgccgccttcaacaccaccgtggccgccctggaggacgagctgacccagctgatcctggagggcctgatcagcgccagagtggacagccacagcaagatcctgtacgccagagacgtggaccagagaagcaccaccttcgagaagagcctgctgatgggcaaggagttccagagaagagccaaggccatgatgctgagagccgccgtgctgagaaaccagatccacgtgaagagcccccccagagagggcagccagggcgagctgacccccgccaacagccagagcagaatgagcaccaacatgtag

SEQ ID NO: 82342 - DNA, 855 bp, synthetic construct
  misc_feature 1..855: note = Description of Artificial Sequence: Synthetic coding sequence
  source 1..855: mol_type = other DNA
ggccagcccgagatcggcggcttcctgcccagcagcctggcccccgtgaccgccgccatcctgatggccagaagcagcctgagagagctgcagaacgcccccgacgccatccccgagagcggcgtggagccccccgccctggacaccgcctgggtggaggccaccagaaagaaggccctgctgaagctggagaagctggacaccgacctgaagaactacaagggcaacagcatcaaggagagcatcagaagaggccacgacgacctgggcgaccactacctggactgcggcgacctgagcaacgccctgaagtgctacagcagagccagagactactgcaccagcgccaagcacgtgatcaacatgtgcctgaacgtgatcaaggtgagcgtgtacctgcagaactggagccacgtgctgagctacgtgagcaaggccgagagcacccccgagatcgccgaggtgagagccaccagcagcgagaccctgccccccggcttcctgaccaccgccggccccagctgccccccccccccccacagcccccccgacctgaacctgcccagcagccccctgagcctgggcgccggccacagagccctgggcaacgtggagcacggcccccacgcctgcggcttcctgctgcagcagagaggcgagagagacagccagacccaggccatcctgaccaagctgaagtgcgccgccggcgagggcctgggccacgcccagctgacccccagaagccccgtggccaagagcagccagcccagagccgtgggctggagcctgccccagcccggcaagaccagcctggccggcagaagaatgctgtgggcccacgtgcaggtgtag

SEQ ID NO: 82343 - DNA, 1584 bp, synthetic construct; identical to SEQ ID NO: 82341
  misc_feature 1..1584: note = Description of Artificial Sequence: Synthetic coding sequence
  source 1..1584: mol_type = other DNA

SEQ ID NO: 82344 - DNA, 993 bp, synthetic construct
  misc_feature 1..993: note = Description of Artificial Sequence: Synthetic coding sequence
  source 1..993: mol_type = other DNA
atgacccccaacagcaccggcgaggtgcccagccccatccccaagggcgccctgggcctgagcctggccctggccagcctgatcatcaccgccaacctgctgctggccctgggcatcgcctgggacagaagactgagaagcccccccgccggctgcttcttcctgagcctgctgctggccggcctgctgaccggcctggccctgcccaccctgcccggcctgtggaaccagagcagaagaggctactggagctgcctgctggtgtacctggcccccaacttcagcttcctgagcctgctggccaacctgctgctggtgcacggcgagagatacatggccgtgctgagacccctgcagccccccggcagcatcagactggccctgctgctgacctgggccggccccctgctgttcgccagcctgcccgccctgggctggaaccactggacccccggcgccaactgcagcagccaggccatcttccccgccccctacctgtacctggaggtgtacggcctgctgctgcccgccgtgggcgccgccgccttcctgagcgtgagagtgctggccaccgcccacagacagctgcaggacatctgcagactggagagagccgtgtgcagagacgagcccagcgccctggccagagccctgacctggagacaggccagagcccaggccggcgccatgctgctgttcggcctgtgctggggcccctacgtggccaccctgctgctgagcgtgctggcctacgagcagagaccccccctgggccccggcaccctgctgagcctgctgagcctgggcagcgccagcgccgccgccgtgcccgtggccatgggcctgggcgaccagagatacaccgccccctggagagccgccgcccagagatgcctgcagggcctgtggggcagagccagcagagacagccccggccccagcatcgcctaccaccccagcagccagagcagcgtggacctggacctgaactag

SEQ ID NO: 82345 - DNA, 993 bp, synthetic construct; identical to SEQ ID NO: 82344
  misc_feature 1..993: note = Description of Artificial Sequence: Synthetic coding sequence
  source 1..993: mol_type = other DNA

SEQ ID NO: 82346 - DNA, 993 bp, synthetic construct; identical to SEQ ID NO: 82344
  misc_feature 1..993: note = Description of Artificial Sequence: Synthetic coding sequence
  source 1..993: mol_type = other DNA

SEQ ID NO: 82347 - DNA, 993 bp, synthetic construct; identical to SEQ ID NO: 82344
  misc_feature 1..993: note = Description of Artificial Sequence: Synthetic coding sequence
  source 1..993: mol_type = other DNA

SEQ ID NO: 82348 - DNA, 1128 bp, synthetic construct
  misc_feature 1..1128: note = Description of Artificial Sequence: Synthetic coding sequence
  source 1..1128: mol_type = other DNA
atggacgtgaccagccaggccagaggcgtgggcctggagatgtaccccggcaccgcccagcccgccgcccccaacaccaccagccccgagctgaacctgagccaccccctgctgggcaccgccctggccaacggcaccggcgagctgagcgagcaccagcagtacgtgatcggcctgttcctgagctgcctgtacaccatcttcctgttccccatcggcttcgtgggcaacatcctgatcctggtggtgaacatcagcttcagagagaagatgaccatccccgacctgtacttcatcaacctggccgtggccgacctgatcctggtggccgacagcctgatcgaggtgttcaacctgcacgagagatactacgacatcgccgtgctgtgcaccttcatgagcctgttcctgcaggtgaacatgtacagcagcgtgttcttcctgacctggatgagcttcgacagatacatcgccctggccagagccatgagatgcagcctgttcagaaccaagcaccacgccagactgagctgcggcctgatctggatggccagcgtgagcgccaccctggtgcccttcaccgccgtgcacctgcagcacaccgacgaggcctgcttctgcttcgccgacgtgagagaggtgcagtggctggaggtgaccctgggcttcatcgtgcccttcgccatcatcggcctgtgctacagcctgatcgtgagagtgctggtgagagcccacagacacagaggcctgagacccagaagacagaaggccctgagaatgatcctggccgtggtgctggtgttcttcgtgtgctggctgcccgagaacgtgttcatcagcgtgcacctgctgcagagaacccagcccggcgccgccccctgcaagcagagcttcagacacgcccaccccctgaccggccacatcgtgaacctggccgccttcagcaacagctgcctgaaccccctgatctacagcttcctgggcgagaccttcagagacaagctgagactgtacatcgagcagaagaccaacctgcccgccctgaacagattctgccacgccgccctgaaggccgtgatccccgacagcaccgagcagagcgacgtgagattcagcagcgccgtgtag

SEQ ID NO: 82349 - DNA, 531 bp, synthetic construct
  misc_feature 1..531: note = Description of Artificial Sequence: Synthetic coding sequence
  source 1..531: mol_type = other DNA
atgagcctgaactgcggccagatgtggctgctggcccccagaggcctggccagagtgaccctggcctggagcccctggggctgcctgggcaacctgaccaccggccacctggccctgctgacccagaactgctacaaccccaaggccctggccccccagggccccaaggccagcggcgaccagcccgtgacccagctgctgcccgccaaccccgcctgcagatgcacctgcctgcccctgcaggagaccttcctgagcgtgctgcacctgcccggctggcagcagtggagatgcgccgccagccccggccccagaggcgccgccgccctgggccccgagcagcaggagggccccagcgtggagagaccccccagcgcccccggctggttcagccactgcctgctgaccagcacctggcagctgcacagctgcggcctgggcccctgcgagctgccctgcggcctggtgggctgccaggacaacgagatcctgcagcacctgtggctgaccaacctgttcctgcagaagtag

SEQ ID NO: 82350 - DNA, 1128 bp, synthetic construct; identical to SEQ ID NO: 82348
  misc_feature 1..1128: note = Description of Artificial Sequence: Synthetic coding sequence
  source 1..1128: mol_type = other DNA

SEQ ID NO: 82351 - DNA, 1128 bp, synthetic construct; identical to SEQ ID NO: 82348
  misc_feature 1..1128: note = Description of Artificial Sequence: Synthetic coding sequence
  source 1..1128: mol_type = other DNA

SEQ ID NO: 82352 - DNA, 1128 bp, synthetic construct; identical to SEQ ID NO: 82348
  misc_feature 1..1128: note = Description of Artificial Sequence: Synthetic coding sequence
  source 1..1128: mol_type = other DNA

SEQ ID NO: 82353 - DNA, 222 bp, synthetic construct
  misc_feature 1..222: note = Description of Artificial Sequence: Synthetic coding sequence
  source 1..222: mol_type = other DNA
atggacgtgaccagccaggccagaggcgtgggcctggagatgtaccccggcaccgcccagcccgccgcccccaacaccaccagccccgagctgaacctgagccaccccctgctgggcaccgccctggccaacggcaccggcgagctgagcgagcaccagcagtacgtgatcggcctgttcctgagctgcctgtacaccatcttcctgttccccatcggctag

SEQ ID NO: 82354 - DNA, 1227 bp, synthetic construct
  misc_feature 1..1227: note = Description of Artificial Sequence: Synthetic coding sequence
  source 1..1227: mol_type = other DNA
atggacgtgaccagccaggccagaggcgtgggcctggagatgtaccccggcaccgcccagcccgccgcccccaacaccaccagccccgagctgaacctgagccaccccctgctgggcaccgccctggccaacggcaccggcgagctgagcgagcaccagcagtacgtgatcggcctgttcctgagctgcctgtacaccatcttcctgttccccatcggcttcgtgggcaacatcctgatcctggtggtgaacatcagcttcagagagaagatgaccatccccgacctgtacttcatcaacctggccgtggccgacctgatcctggtggccgacagcctgatcgaggtgttcaacctgcacgagagatactacgacatcgccgtgctgtgcaccttcatgagcctgttcctgcaggtgaacatgtacagcagcgtgttcttcctgacctggatgagcttcgacagatacatcgccctggccagagccatgagatgcagcctgttcagaaccaagcaccacgccagactgagctgcggcctgatctggatggccagcgtgagcgccaccctggtgcccttcaccgccgtgcacctgcagcacaccgacgaggcctgcttctgcttcgccgacgtgagagaggtgcagtggctggaggtgaccctgggcttcatcgtgcccttcgccatcatcggcctgtgctacagcctgatcgtgagagtgctggtgagagcccacagacacagaggcctgagacccagaagacagaaggccctgagaatgatcctggccgtggtgctggtgttcttcgtgtgctggctgcccgagaacgtgttcatcagcgtgcacctgctgcagagaacccagcccggcgccgccccctgcaagcagagcttcagacacgcccaccccctgacccacggccacgtgatgagcctgaactgcggccagatgtggctgctggcccccagaggcctggccagagtgaccctggcctggagcccctggggctgcctgggcaacctgaccaccggccacctggccctgctgacccagaactgctacaaccccaaggccctggccccccagggccccaaggccagcggcgaccagcccgtgacccagctgctgcccgccaaccccgcctgcagatgcacctgcctgcccctgcaggagaccttcctgacccccagcaccagaaaggccaccagaagaggccactgcggctag

SEQ ID NO: 82355 - DNA, 1068 bp, synthetic construct
  misc_feature 1..1068: note = Description of Artificial Sequence: Synthetic coding sequence
  source 1..1068: mol_type = other DNA
atggaggacctggaggagaccctgttcgaggagttcgagaactacagctacgacctggactactacagcctggagagcgacctggaggagaaggtgcagctgggcgtggtgcactgggtgagcctggtgctgtactgcctggccttcgtgctgggcatccccggcaacgccatcgtgatctggttcaccggcttcaagtggaagaagaccgtgaccaccctgtggttcctgaacctggccatcgccgacttcatcttcctgctgttcctgcccctgtacatcagctacgtggccatgaacttccactggcccttcggcatctggctgtgcaaggccaacagcttcaccgcccagctgaacatgttcgccagcgtgttcttcctgaccgtgatcagcctggaccactacatccacctgatccaccccgtgctgagccacagacacagaaccctgaagaacagcctgatcgtgatcatcttcatctggctgctggccagcctgatcggcggccccgccctgtacttcagagacaccgtggagttcaacaaccacaccctgtgctacaacaacttccagaagcacgaccccgacctgaccctgatcagacaccacgtgctgacctgggtgaagttcatcatcggctacctgttccccctgctgaccatgagcatctgctacctgtgcctgatcttcaaggtgaagaagagaagcatcctgatcagcagcagacacttctggaccatcctggtggtggtggtggccttcgtggtgtgctggaccccctaccacctgttcagcatctgggagctgaccatccaccacaacagctacagccaccacgtgatgcaggccggcatccccctgagcaccggcctggccttcctgaacagctgcctgaaccccatcctgtacgtgctgatcagcaagaagttccaggccagattcagaagcagcgtggccgagatcctgaagtacaccctgtgggaggtgagctgcagcggcaccgtgagcgagcagctgagaaacagcgagaccaagaacctgtgcctgctggagaccgcccagtag

SEQ ID NO: 82356 - DNA, 225 bp, synthetic construct
  misc_feature 1..225: note = Description of Artificial Sequence: Synthetic coding sequence
  source 1..225: mol_type = other DNA
atggaggacctggaggagaccctgttcgaggagttcgagaactacagctacgacctggactactacagcctggagagcgacctggaggagaaggtgcagctgggcgtggtgcactgggtgagcctggtgctgtactgcctggccttcgtgctgggcatccccggcaacgccatcgtgatctggttcaccggcttcaagtggaagaagaccgtgaccaccctgtag

SEQ ID NO: 82357 - DNA, 1068 bp, synthetic construct; identical to SEQ ID NO: 82355
  misc_feature 1..1068: note = Description of Artificial Sequence: Synthetic coding sequence
  source 1..1068: mol_type = other DNA

SEQ ID NO: 82358 - DNA, 249 bp, synthetic construct
  misc_feature 1..249: note = Description of Artificial Sequence: Synthetic coding sequence
  source 1..249: mol_type = other DNA
atggaggacctggaggagaccctgttcgaggagttcgagaactacagctacgacctggactactacagcctggagagcgacctggaggagaaggtgcagctgggcgtggtgcactgggtgagcctggtgctgtactgcctggccttcgtgctgggcatccccggcaacgccatcgtgatctggttcaccggcttcaagtggaagaagaccgtgaccaccctgtggttcctgaacctggccatcgcctag

SEQ ID NO: 82359 - DNA, 684 bp, synthetic construct
  misc_feature 1..684: note = Description of Artificial Sequence: Synthetic coding sequence
  source 1..684: mol_type = other DNA
atggaggacctggaggagaccctgttcgaggagttcgagaactacagctacgacctggactactacagcctggagagcgacctggaggagaaggtgcagctgggcgtggtgcactgggtgagcctggtgctgtactgcctggccttcgtgctgggcatccccggcaacgccatcgtgatctggttcaccggcttcaagtggaagaagaccgtgaccaccctgtggttcctgaacctggccatcgccgacttcatcttcctgctgttcctgcccctgtacatcagctacgtggccatgaacttccactggcccttcggcatctggctgtgcaaggccaacagcttcaccgcccagctgaacatgttcgccagcgtgttcttcctgaccgtgatcagcctggaccactacatccacctgatccaccccgtgctgagccacagacacagaaccctgaagaacagcctgatcgtgatcatcttcatctggctgctggccagcctgatcggcggccccgccctgtacttcagagacaccgtggagttcaacaaccacaccctgtgctacaacaacttccagaagcacgaccccgacctgaccctgatcagacaccacgtgctgacctgggtgaagttcatcatcggctacctgttccccctgctgaccatgagcatctgctacctgtag

SEQ ID NO: 82360 - DNA, 414 bp, synthetic construct
  misc_feature 1..414: note = Description of Artificial Sequence: Synthetic coding sequence
  source 1..414: mol_type = other DNA
atggaggacctggaggagaccctgttcgaggagttcgagaactacagctacgacctggactactacagcctggagagcgacctggaggagaaggtgcagctgggcgtggtgcactgggtgagcctggtgctgtactgcctggccttcgtgctgggcatccccggcaacgccatcgtgatctggttcaccggcttcaagtggaagaagaccgtgaccaccctgtggttcctgaacctggccatcgccgacttcatcttcctgctgttcctgcccctgtacatcagctacgtggccatgaacttccactggcccttcggcatctggctgtgcaaggccaacagcttcaccgcccagctgaacatgttcgccagcgtgttcttcctgaccgtgatcagcctggaccactacatctag

SEQ ID NO: 82361 - DNA, 537 bp, synthetic construct
  misc_feature 1..537: note = Description of Artificial Sequence: Synthetic coding sequence
  source 1..537: mol_type = other DNA
atggaggacctggaggagaccctgttcgaggagttcgagaactacagctacgacctggactactacagcctggagagcgacctggaggagaaggtgcagctgggcgtggtgcactgggtgagcctggtgctgtactgcctggccttcgtgctgggcatccccggcaacgccatcgtgatctggttcaccggcttcaagtggaagaagaccgtgaccaccctgtggttcctgaacctggccatcgccgacttcatcttcctgctgttcctgcccctgtacatcagctacgtggccatgaacttccactggcccttcggcatctggctgtgcaaggccaacagcttcaccgcccagctgaacatgttcgccagcgtgttcttcctgaccgtgatcagcctggaccactacatccacctgatccaccccgtgctgagccacagacacagaaccctgaagaacagcctgatcgtgatcatcttcatctggctgctggccagcctgatcggcggccccgccctgtacttcagagacacctag

SEQ ID NO: 82362 - DNA, 60 bp, synthetic construct
  misc_feature 1..60: note = Description of Artificial Sequence: Synthetic coding sequence
  source 1..60: mol_type = other DNA
atggaggacctggaggagaccctgttcgaggagttcgagaactacagctacgacctgtag

SEQ ID NO: 82363 - DNA, 1527 bp, synthetic construct
  misc_feature 1..1527: note = Description of Artificial Sequence: Synthetic coding sequence
  source 1..1527: mol_type = other DNA
atgaccagcacctgcaccaacagcaccagagagagcaacagcagccacacctgcatgcccctgagcaagatgcccatcagcctggcccacggcatcatcagaagcaccgtgctggtgatcttcctggccgccagcttcgtgggcaacatcgtgctggccctggtgctgcagagaaagccccagctgctgcaggtgaccaacagattcatcttcaacctgctggtgaccgacctgctgcagatcagcctggtggccccctgggtggtggccaccagcgtgcccctgttctggcccctgaacagccacttctgcaccgccctggtgagcctgacccacctgttcgccttcgccagcgtgaacaccatcgtggtggtgagcgtggacagatacctgagcatcatccaccccctgagctaccccagcaagatgacccagagaagaggctacctgctgctgtacggcacctggatcgtggccatcctgcagagcaccccccccctgtacggctggggccaggccgccttcgacgagagaaacgccctgtgcagcatgatctggggcgccagccccagctacaccatcctgagcgtggtgagcttcatcgtgatccccctgatcgtgatgatcgcctgctacagcgtggtgttctgcgccgccagaagacagcacgccctgctgtacaacgtgaagagacacagcctggaggtgagagtgaaggactgcgtggagaacgaggacgaggagggcgccgagaagaaggaggagttccaggacgagagcgagttcagaagacagcacgagggcgaggtgaaggccaaggagggcagaatggaggccaaggacggcagcctgaaggccaaggagggcagcaccggcaccagcgagagcagcgtggaggccagaggcagcgaggaggtgagagagagcagcaccgtggccagcgacggcagcatggagggcaaggagggcagcaccaaggtggaggagaacagcatgaaggccgacaagggcagaaccgaggtgaaccagtgcagcatcgacctgggcgaggacgacatggagttcggcgaggacgacatcaacttcagcgaggacgacgtggaggccgtgaacatccccgagagcctgccccccagcagaagaaacagcaacagcaacccccccctgcccagatgctaccagtgcaaggccgccaaggtgatcttcatcatcatcttcagctacgtgctgagcctgggcccctactgcttcctggccgtgctggccgtgtgggtggacgtggagacccaggtgccccagtgggtgatcaccatcatcatctggctgttcttcctgcagtgctgcatccacccctacgtgtacggctacatgcacaagaccatcaagaaggagatccaggacatgctgaagaagttcttctgcaaggagaagccccccaaggaggacagccaccccgacctgcccggcaccgagggcggcaccgagggcaagatcgtgcccagctacgacagcgccaccttcccctag

SEQ ID NO: 82364 - DNA, 2088 bp, synthetic construct
  misc_feature 1..2088: note = Description of Artificial Sequence: Synthetic coding sequence
  source 1..2088: mol_type = other DNA
atgaagatgaagagccaggccaccatgatctgctgcctggtgttcttcctgagcaccgagtgcagccactacagaagcaagatccacctgaaggccggcgacaagctgcagagccccgagggcaagcccaagaccggcagaatccaggagaagtgcgagggcccctgcatcagcagcagcaactgcagccagccctgcgccaaggacttccacggcgagatcggcttcacctgcaaccagaagaagtggcagaagagcgccgagacctgcaccagcctgagcgtggagaagctgttcaaggacagcaccggcgccagcagactgagcgtggccgcccccagcatccccctgcacatcctggacttcagagcccccgagaccatcgagagcgtggcccagggcatcagaaagaactgccccttcgactacgcctgcatcaccgacatggtgaagagcagcgagaccaccagcggcaacatcgccttcatcgtggagctgctgaagaacatcagcaccgacctgagcgacaacgtgaccagagagaagatgaagagctacagcgaggtggccaaccacatcctggacaccgccgccatcagcaactgggccttcatccccaacaagaacgccagcagcgacctgctgcagagcgtgaacctgttcgccagacagctgcacatccacaacaacagcgagaacatcgtgaacgagctgttcatccagaccaagggcttccacatcaaccacaacaccagcgagaagagcctgaacttcagcatgagcatgaacaacaccaccgaggacatcctgggcatggtgcagatccccagacaggagctgagaaagctgtggcccaacgccagccaggccatcagcatcgccttccccaccctgggcgccatcctgagagaggcccacctgcagaacgtgagcctgcccagacaggtgaacggcctggtgctgagcgtggtgctgcccgagagactgcaggagatcatcctgaccttcgagaagatcaacaagaccagaaacgccagagcccagtgcgtgggctggcacagcaagaagagaagatgggacgagaaggcctgccagatgatgctggacatcagaaacgaggtgaagtgcagatgcaactacaccagcgtggtgatgagcttcagcatcctgatgagcagcaagagcatgaccgacaaggtgctggactacatcacctgcatcggcctgagcgtgagcatcctgagcctggtgctgtgcctgatcatcgaggccaccgtgtggagcagagtggtggtgaccgagatcagctacatgagacacgtgtgcatcgtgaacatcgccgtgagcctgctgaccgccaacgtgtggttcatcatcggcagccacttcaacatcaaggcccaggactacaacatgtgcgtggccgtgaccttcttcagccacttcttctacctgagcctgttcttctggatgctgttcaaggccctgctgatcatctacggcatcctggtgatcttcagaagaatgatgaagagcagaatgatggtgatcggcttcgccatcggctacggctgccccctgatcatcgccgtgaccaccgtggccatcaccgagcccgagaagggctacatgagacccgaggcctgctggctgaactgggacaacaccaaggccctgctggccttcgccatccccgccttcgtgatcgtggccgtgaacctgatcgtggtgctggtggtggccgtgaacacccagagacccagcatcggcagcagcaagagccaggacgtggtgatcatcatgagaatcagcaagaacgtggccatcctgacccccctgctgggcctgacctggggcttcggcatcgccaccctgatcgagggcaccagcctgaccttccacatcatcttcgccctgctgaacgccttccagggcttcttcatcctgctgttcggcaccatcatggaccacaagatcagagacgccctgagaatgagaatgagcagcctgaagggcaagagcagagccgccgagaacgccagcctgggccccaccaacggcagcaagctgatgaacagacagggctag

SEQ ID NO: 82365 - DNA, 2088 bp, synthetic construct; identical to SEQ ID NO: 82364
  misc_feature 1..2088: note = Description of Artificial Sequence: Synthetic coding sequence
  source 1..2088: mol_type = other DNA

SEQ ID NO: 82366 - DNA, 2259 bp, synthetic construct
  misc_feature 1..2259: note = Description of Artificial Sequence: Synthetic coding sequence
  source 1..2259: mol_type = other DNA
atgtacaccggcccctgcaaggtgctgcacctgagcagcggcctgctgcccaacagcggcagattcggcatcgtgctgagcgacgagtaccaggtggtgaccagcctgtggtgccagctgtacaccacccacgccccccagcaggccagcggcatgctgctgctgaactacctggtgatccccagcaaggcccaggtgaacaagcccggctacatccccaacctgggcgagtgcagccactacagaagcaagatccacctgaaggccggcgacaagctgcagagccccgagggcaagcccaagaccggcagaatccaggagaagtgcgagggcccctgcatcagcagcagcaactgcagccagccctgcgccaaggacttccacggcgagatcggcttcacctgcaaccagaagaagtggcagaagagcgccgagacctgcaccagcctgagcgtggagaagctgttcaaggacagcaccggcgccagcagactgagcgtggccgcccccagcatccccctgcacatcctggacttcagagcccccgagaccatcgagagcgtggcccagggcatcagaaagaactgccccttcgactacgcctgcatcaccgacatggtgaagagcagcgagaccaccagcggcaacatcgccttcatcgtggagctgctgaagaacatcagcaccgacctgagcgacaacgtgaccagagagaagatgaagagctacagcgaggtggccaaccacatcctggacaccgccgccatcagcaactgggccttcatccccaacaagaacgccagcagcgacctgctgcagagcgtgaacctgttcgccagacagctgcacatccacaacaacagcgagaacatcgtgaacgagctgttcatccagaccaagggcttccacatcaaccacaacaccagcgagaagagcctgaacttcagcatgagcatgaacaacaccaccgaggacatcctgggcatggtgcagatccccagacaggagctgagaaagctgtggcccaacgccagccaggccatcagcatcgccttccccaccctgggcgccatcctgagagaggcccacctgcagaacgtgagcctgcccagacaggtgaacggcctggtgctgagcgtggtgctgcccgagagactgcaggagatcatcctgaccttcgagaagatcaacaagaccagaaacgccagagcccagtgcgtgggctggcacagcaagaagagaagatgggacgagaaggcctgccagatgatgctggacatcagaaacgaggtgaagtgcagatgcaactacaccagcgtggtgatgagcttcagcatcctgatgagcagcaagagcatgaccgacaaggtgctggactacatcacctgcatcggcctgagcgtgagcatcctgagcctggtgctgtgcctgatcatcgaggccaccgtgtggagcagagtggtggtgaccgagatcagctacatgagacacgtgtgcatcgtgaacatcgccgtgagcctgctgaccgccaacgtgtggttcatcatcggcagccacttcaacatcaaggcccaggactacaacatgtgcgtggccgtgaccttcttcagccacttcttctacctgagcctgttcttctggatgctgttcaaggccctgctgatcatctacggcatcctggtgatcttcagaagaatgatgaagagcagaatgatggtgatcggcttcgccatcggctacggctgccccctgatcatcgccgtgaccaccgtggccatcaccgagcccgagaagggctacatgagacccgaggcctgctggctgaactgggacaacaccaaggccctgctggccttcgccatccccgccttcgtgatcgtggccgtgaacctgatcgtggtgctggtggtggccgtgaacacccagagacccagcatcggcagcagcaagagccaggacgtggtgatcatcatgagaatcagcaagaacgtggccatcctgacccccctgctgggcctgacctggggcttcggcatcgccaccctgatcgagggcaccagcctgaccttccacatcatcttcgccctgctgaacgccttccagggcttcttcatcctgctgttcggcaccatcatggaccacaagatcagagacgccctgagaatgagaatgagcagcctgaagggcaagagcagagccgccgagaacgccagcctgggccccaccaacggcagcaagctgatgaacagacagggctag

SEQ ID NO: 82367 - DNA, 1005 bp, synthetic construct
  misc_feature 1..1005: note = Description of Artificial Sequence: Synthetic coding sequence
  source 1..1005: mol_type = other DNA
atgaacgaggacctgaaggtgaacctgagcggcctgcccagagactacctggacgccgccgccgccgagaacatcagcgccgccgtgagcagcagagtgcccgccgtggagcccgagcccgagctggtggtgaacccctgggacatcgtgctgtgcaccagcggcaccctgatcagctgcgagaacgccatcgtggtgctgatcatcttccacaaccccagcctgagagcccccatgttcctgctgatcggcagcctggccctggccgacctgctggccggcatcggcctgatcaccaacttcgtgttcgcctacctgctgcagagcgaggccaccaagctggtgaccatcggcctgatcgtggccagcttcagcgccagcgtgtgcagcctgctggccatcaccgtggacagatacctgagcctgtactacgccctgacctaccacagcgagagaaccgtgaccttcacctacgtgatgctggtgatgctgtggggcaccagcatctgcctgggcctgctgcccgtgatgggctggaactgcctgagagacgagagcacctgcagcgtggtgagacccctgaccaagaacaacgccgccatcctgagcgtgagcttcctgttcatgttcgccctgatgctgcagctgtacatccagatctgcaagatcgtgatgagacacgcccaccagatcgccctgcagcaccacttcctggccaccagccactacgtgaccaccagaaagggcgtgagcaccctggccatcatcctgggcaccttcgccgcctgctggatgcccttcaccctgtacagcctgatcgccgactacacctaccccagcatctacacctacgccaccctgctgcccgccacctacaacagcatcatcaaccccgtgatctacgccttcagaaaccaggagatccagaaggccctgtgcctgatctgctgcggctgcatccccagcagcctggcccagagagccagaagccccagcgacgtgtag

SEQ ID NO: 82368 - DNA, 1005 bp, synthetic construct; identical to SEQ ID NO: 82367
  misc_feature 1..1005: note = Description of Artificial Sequence: Synthetic coding sequence
  source 1..1005: mol_type = other DNA

SEQ ID NO: 82369 - DNA, 3840 bp, synthetic construct
  misc_feature 1..3840: note = Description of Artificial Sequence: Synthetic coding sequence
  source 1..3840: mol_type = other DNA
atgagaggccacggcaaccacagcagactgaagagcagatgcgccagcctgggcaacgtgcaccaccaccaggcccagatggcccacggcgcccactgcagaggcggcagaaccccccagagccccgacagcagaggccccaccgccggcggccacaccagaggcagatggacctacagacccatcgaggccctgatcaacgtgagcttccccggcgccaagggcggcagaaccgccgagggcgagcccagctgggcctgggtgttcagaagcggctacctgcagagacaggccctgcccggcctgcccgtgagcaccagagtggccgcctgctggtggcagcaccaccccggcagagacagcggcttcctgggccccggcttcatcgacctgctgagagaggagcccagcggcagagccgacggcaaggccgccgcccagaagaccggcagactgtacctgttccccaccttcctgggcaacaagctgcccgaggccgccgacagcttcggcgagatcgccagcggcaacagcgtgatcttcaccagcgtgctgcagagcagccacccccccggcacccccccccccagcgccagaaagcccagccccggcgccgccatgctggtgtgcgaggagaccctggagctgggcgcccagggctgctggggcagcaccagccccagaggccaggccgtgagcctggtgggcggccccaccgccggcggcagcagactgggcggcgccggctgcaccatgggcctgctgatggccctgcaggccagaagacccagagacggcacctgggccgaccccagaagatgcagcagagccgtggagggcagcggcctgaccagagccgccctggtgagccccggccccagcggcgtggaggaggacaccagaagagagggctgcgtgctggtgggcagctggagaagcagcacccacagaagcagagtgctgatcatcaacacccccagcggcagaaccccctggagccagggcagcctgggcagcaccggcagatacaaccagaccagagcccccggcagccagcagcagggcctgtgcagcgacgccgccctgcacgaggacttcgtgcccgagcccacccccgccttcttccagtaccccccccaggccttcagcaagaccaaggtgagagacctgggcagaggcggcctgtacgccttcagcaaggaggagaaggtgagcgaggcccagagagtggaggcctacgagacccacggcctgggcctgagcaccggcagacagaaccccgtgcccagcccctgcaagcccggctgcgtgtgccagggcctggccctggacgccgaggcctggcccagacaccccggcagaagaccctgcgccgccaaggaggcctgcctgggcccccccggctgcagcggcgagctgagcctgcccgaggaggagggcatcgcccccggcgccgccaccgccgcccccgcctgggtgccccacggcagagtgagcagattcctgaccgtgaagctgttcacctacgtgaccatgtaccagtgcaagcaggagagaatcctgagactgtgcatcagcggcgagagcggcagatacgtgagaagaagcagattcagaaacttcgccgccctgatggtgagcaccggcgtgcccggcgtgctgcagctgggcgccagacccctgagaggcggcggccacccctacggcgacagccaggccggcaaggtggtggagtggagagccggcgacagagccagcggcctgagcgccggcgagagaagattcctgagccagagcgagctgcagacctggcccagaaccccccactgcgtgggcaagaaggtgccccagcccgtgggcgccgccgacctggcccccgacaccagcctgtgcagaaaggagggcagcagcgccagcagaagctgcagacccggccccggccacctgaccagaagagaggaggacagcttcagacagctggccttccccagattcgaggaggtgaccttcccccccctgaccgccgccgagagagcccccagcgtgcacggcggccacagcctggccagccagggcctggtgctggccggcagaaccagaagcgtggccagcggcggcaagcaggagctgagcggccccctggccgcctgcatccccacccaggacctgaagaccgtgctgagcctgcccagataccccggcgagttcctgcaccccgtggtgtacgcctgcaccgccgtgatgctgctgtgcctgctggccagcttcgtgacctacatcgtgcaccagagcgccatcagaatcagcagaaagggcagacacaccctgctgaacttctgcttccacgccgccctgaccttcaccgtgttcgccggcggcatcaacagaaccaagtaccccatcctgtgccaggccgtgggcatcgtgctgcactacagcaccctgagcaccatgctgtggatcggcgtgaccgccagaaacatctacaagcaggtgaccaagaaggcccccctgtgcctggacaccgaccagcccccctaccccagacagcccctgctgagattctacctggtgagcggcggcgtgcccttcatcatctgcggcgtgaccgccgccaccaacatcagaaactacggcaccgaggacgaggacaccgcctgctggatggcctgggagcccagcctgggcgccttctacggccccgccgccatcatcaccctggtgacctgcgtgtacttcctgggcacctacgtgcagctgagaagacaccccggcagaagatacgagctgagaacccagcccgaggagcagagaagactggccacccccgagggcggcagaggcatcagacccggcaccccccccgcccacgacgcccccggcgccagcgtgctgcagaacgagcacagcttccaggcccagctgagagccgccgccttcaccctgttcctgttcaccgccacctgggccttcggcgccctggccgtgagccagggccacttcctggacatggtgttcagctgcctgtacggcgccttctgcgtgaccctgggcctgttcgtgctgatccaccactgcgccaagagagaggacgtgtggcagtgctggtgggcctgctgcccccccagaaaggacgcccaccccgccctggacgccaacggcgccgccctgggcagagccgcctgcctgcacagccccggcctgggccagcccagaggcttcgcccacccccccggcccctgcaagatgaccaacctgcaggccgcccagggccacgccagctgcctgagccccgccaccccctgctgcgccaagatgcactgcgagcccctgaccgccgacgaggcccacgtgcacctgcaggaggagggcgccttcggccacgacccccacctgcacggctgcctgcagggcagaaccaagcccccctacttcagcagacaccccgccgaggagcccgagtacgcctaccacatccccagcagcctggacggcagccccagaagcagcagaaccgacagcccccccagcagcctggacggccccgccggcacccacaccctggcctgctgcacccagggcgaccccttccccatggtgacccagcccgagggcagcgacggcagccccgccctgtacagctgccccacccagcccggcagagaggccgccctgggccccggccacctggagatgctgagaagaacccagagcctgcccttcggcggccccagccagaacggcctgcccaagggcaagctgctggagggcctgcccttcggcaccgacggcaccggcaacatcagaaccggcccctggaagaacgagaccaccgtgtag

SEQ ID NO: 82370 - DNA, 1395 bp, synthetic construct
  misc_feature 1..1395: note = Description of Artificial Sequence: Synthetic coding sequence
  source 1..1395: mol_type = other DNA
atgctgtggatcggcgtgaccgccagaaacatctacaagcaggtgaccaagaaggcccccctgtgcctggacaccgaccagcccccctaccccagacagcccctgctgagcagattctacctggtgagcggcggcgtgcccttcatcatctgcggcgtgaccgccgccaccaacatcagaaactacggcaccgaggacgaggacaccgcctactgctggatggcctgggagcccagcctgggcgccttctacggccccgccgccatcatcaccctggtgacctgcgtgtacttcctgggcacctacgtgcagctgagaagacaccccggcagaagatacgagctgagaacccagcccgaggagcagagaagactggccacccccgagggcggcagaggcatcagacccggcaccccccccgcccacgacgcccccggcgccagcgtgctgcagaacgagcacagcttccaggcccagctgagagccgccgccttcaccctgttcctgttcaccgccacctgggccttcggcgccctggccgtgagccagggccacttcctggacatggtgttcagctgcctgtacggcgccttctgcgtgaccctgggcctgttcgtgctgatccaccactgcgccaagagagaggacgtgtggcagtgctggtgggcctgctgcccccccagaaaggacgcccaccccgccctggacgccaacggcgccgccctgggcagagccgcctgcctgcacagccccggcctgggccagcccagaggcttcgcccacccccccggcccctgcaagatgaccaacctgcaggccgcccagggccacgccagctgcctgagccccgccaccccctgctgcgccaagatgcactgcgagcccctgaccgccgacgaggcccacgtgcacctgcaggaggagggcgccttcggccacgacccccacctgcacggctgcctgcagggcagaaccaagcccccctacttcagcagacaccccgccgaggagcccgagtacgcctaccacatccccagcagcctggacggcagccccagaagcagcagaaccgacagcccccccagcagcctggacggccccgccggcacccacaccctggcctgctgcacccagggcgaccccttccccatggtgacccagcccgagggcagcgacggcagccccgccctgtacagctgccccacccagcccggcagagaggccgccctgggccccggccacctggagatgctgagaagaacccagagcctgcccttcggcggccccagccagaacggcctgcccaagggcaagctgctggagggcctgcccttcggcaccgacggcaccggcaacatcagaaccggcccctggaagaacgagaccaccgtgtag

SEQ ID NO: 82371 - DNA, 1683 bp, synthetic construct
  misc_feature 1..1683: note = Description of Artificial Sequence: Synthetic coding sequence
  source 1..1683: mol_type = other DNA
atggacctgaagaccgtgctgagcctgcccagataccccggcgagttcctgcaccccgtggtgtacgcctgcaccgccgtgatgctgctgtgcctgctggccagcttcgtgacctacatcgtgcaccagagcgccatcagaatcagcagaaagggcagacacaccctgctgaacttctgcttccacgccgccctgaccttcaccgtgttcgccggcggcatcaacagaaccaagtaccccatcctgtgccaggccgtgggcatcgtgctgcactacagcaccctgagcaccatgctgtggatcggcgtgaccgccagaaacatctacaagcaggtgaccaagaaggcccccctgtgcctggacaccgaccagcccccctaccccagacagcccctgctgagattctacctggtgagcggcggcgtgcccttcatcatctgcggcgtgaccgccgccaccaacatcagaaactacggcaccgaggacgaggacaccgcctactgctggatggcctgggagcccagcctgggcgccttctacggccccgccgccatcatcaccctggtgacctgcgtgtacttcctgggcacctacgtgcagctgagaagacaccccggcagaagatacgagctgagaacccagcccgaggagcagagaagactggccacccccgagggcggcagaggcatcagacccggcaccccccccgcccacgacgcccccggcgccagcgtgctgcagaacgagcacagcttccaggcccagctgagagccgccgccttcaccctgttcctgttcaccgccacctgggccttcggcgccctggccgtgagccagggccacttcctggacatggtgttcagctgcctgtacggcgccttctgcgtgaccctgggcctgttcgtgctgatccaccactgcgccaagagagaggacgtgtggcagtgctggtgggcctgctgcccccccagaaaggacgcccaccccgccctggacgccaacggcgccgccctgggcagagccgcctgcctgcacagccccggcctgggccagcccagaggcttcgcccacccccccggcccctgcaagatgaccaacctgcaggccgcccagggccacgccagctgcctgagccccgccaccccctgctgcgccaagatgcactgcgagcccctgaccgccgacgaggcccacgtgcacctgcaggaggagggcgccttcggccacgacccccacctgcacggctgcctgcagggcagaaccaagcccccctacttcagcagacaccccgccgaggagcccgagtacgcctaccacatccccagcagcctggacggcagccccagaagcagcagaaccgacagcccccccagcagcctggacggccccgccggcacccacaccctggcctgctgcacccagggcgaccccttccccatggtgacccagcccgagggcagcgacggcagccccgccctgtacagctgccccacccagcccggcagagaggccgccctgggccccggccacctggagatgctgagaagaacccagagcctgcccttcggcggccccagccagaacggcctgcccaagggcaagctgctggagggcctgcccttcggcaccgacggcaccggcaacatcagaaccggcccctggaagaacgagaccaccgtgtag

SEQ ID NO: 82372 - DNA, 2562 bp, synthetic construct
  misc_feature 1..2562: note = Description of Artificial Sequence: Synthetic coding sequence
  source 1..2562: mol_type = other DNA
atgagaggccacggcaaccacagcagactgaagagcagatgcgccagcctgggcaacgtgcaccaccaccaggcccagatggcccacggcgcccactgcagaggcggcagaaccccccagagccccgacagcagaggccccaccgccggcggccacaccagaggcagatggacctacagacccatcgaggccctgatcaacgtgagcttccccggcgccaagggcggcagaaccgccgagggcgagcccagctgggcctgggtgttcagaagcggctacctgcagagacaggccctgcccggcctgcccgtgagcaccagagtggccgcctgctggtggcagcaccaccccggcagagacagcggcttcctgggccccggcttcatcgacctgctgagagaggagcccagcggcagagccgacggcaaggccgccgcccagaagaccggcagactgtacctgttccccaccttcctgggcaacaagctgcccgaggccgccgacagcttcggcgagatcgccagcggcaacagcgtgatcttcaccagcgtgctgcagagcagccacccccccggcacccccccccccagcgccagaaagcccagccccggcgccgccatgctggtgtgcgaggagaccctggagctgggcgcccagggctgctggggcagcaccagccccagaggccaggccgtgagcctggtgggcggccccaccgccggcggcagcagactgggcggcgccggctgcaccatgggcctgctgatggccctgcaggccagaagacccagagacggcacctgggccgaccccagaagatgcagcagagccgtggagggcagcggcctgaccagagccgccctggtgagccccggccccagcggcgtggaggaggacaccagaagagagggctgcgtgctggtgggcagctggagaagcagcacccacagaagcagagtgctgatcatcaacacccccagcggcagaaccccctggagccagggcagcctgggcagcaccggcagatacaaccagaccagagcccccggcagccagcagcagggcctgtgcagcgacgccgccctgcacgaggacttcgtgcccgagcccacccccgccttcttccagtaccccccccaggccttcagcaagaccaaggtgagagacctgggcagaggcggcctgtacgccttcagcaaggaggagaaggtgagcgaggcccagagagtggaggcctacgagacccacggcctgggcctgagcaccggcagacagaaccccgtgcccagcccctgcaagcccggctgcgtgtgccagggcctggccctggacgccgaggcctggcccagacaccccggcagaagaccctgcgccgccaaggaggcctgcctgggcccccccggctgcagcggcgagctgagcctgcccgaggaggagggcatcgcccccggcgccgccaccgccgcccccgcctgggtgccccacggcagagtgagcagattcctgaccgtgaagctgttcacctacgtgaccatgtaccagtgcaagcaggagagaatcctgagactgtgcatcagcggcgagagcggcagatacgtgagaagaagcagattcagaaacttcgccgccctgatggtgagcaccggcgtgcccggcgtgctgcagctgggcgccagacccctgagaggcggcggccacccctacggcgacagccaggccggcaaggtggtggagtggagagccggcgacagagccagcggcctgagcgccggcgagagaagattcctgagccagagcgagctgcagacctggcccagaaccccccactgcgtgggcaagaaggtgccccagcccgtgggcgccgccgacctggcccccgacaccagcctgtgcagaaaggagggcagcagcgccagcagaagctgcagacccggccccggccacctgaccagaagagaggaggacagcttcagacagctggccttccccagattcgaggaggtgaccttcccccccctgaccgccgccgagagagcccccagcgtgcacggcggccacagcctggccagccagggcctggtgctggccggcagaaccagaagcgtggccagcggcggcaagcaggagctgagcggccccctggccgcctgcatccccacccaggacctgaagaccgtgctgagcctgcccagataccccggcgagttcctgcaccccgtggtgtacgcctgcaccgccgtgatgctgctgtgcctgctggccagcttcgtgacctacatcgtgcaccagagcgccatcagaatcagcagaaagggcagacacaccctgctgaacttctgcttccacgccgccgagcaccccggcgtgacccccctgagaaccagcccccccctgccctggtggacccccatccaggtgggcatcgtgctgcactacagcaccctgagcaccatgctgtggatcggcgtgaccgccagaaacatctacaagcaggtgaccaagaaggcccccctgtgcctggacaccgaccagcccccctaccccagacagcccctgctgtag

SEQ ID NO: 82373 - DNA, 3366 bp, synthetic construct
  misc_feature 1..3366: note = Description of Artificial Sequence: Synthetic coding sequence
  source 1..3366: mol_type = other DNA
atgggcgccggcggcagaagaatgagaggcgcccccgccagactgctgctgcccctgctgccctggctgctgctgctgctggcccccgaggccagaggcgcccccggctgccccctgagcatcagaagctgcaagtgcagcggcgagagacccaagggcctgagcggcggcgtgcccggccccgccagaagaagagtggtgtgcagcggcggcgacctgcccgagccccccgagcccggcctgctgcccaacggcaccgtgaccctgctgctgagcaacaacaagatcaccggcctgagaaacggcagcttcctgggcctgagcctgctggagaagctggacctgagaaacaacatcatcagcaccgtgcagcccggcgccttcctgggcctgggcgagctgaagagactggacctgagcaacaacagaatcggctgcctgaccagcgagaccttccagggcctgcccagactgctgagactgaacatcagcggcaacatcttcagcagcctgcagcccggcgtgttcgacgagctgcccgccctgaaggtggtggacctgggcaccgagttcctgacctgcgactgccacctgagatggctgctgccctgggcccagaacagaagcctgcagctgagcgagcacaccctgtgcgcctaccccagcgccctgcacgcccaggccctgggcagcctgcaggaggcccagctgtgctgcgagggcgccctggagctgcacacccaccacctgatccccagcctgagacaggtggtgttccagggcgacagactgcccttccagtgcagcgccagctacctgggcaacgacaccagaatcagatggtaccacaacagagcccccgtggagggcgacgagcaggccggcatcctgctggccgagagcctgatccacgactgcaccttcatcaccagcgagctgaccctgagccacatcggcgtgtgggccagcggcgagtgggagtgcaccgtgagcatggcccagggcaacgccagcaagaaggtggagatcgtggtgctggagaccagcgccagctactgccccgccgagagagtggccaacaacagaggcgacttcagatggcccagaaccctggccggcatcaccgcctaccagagctgcctgcagtaccccttcaccagcgtgcccctgggcggcggcgcccccggcaccagagccagcagaagatgcgacagagccggcagatgggagcccggcgactacagccactgcctgtacaccaacgacatcaccagagtgctgtacaccttcgtgctgatgcccatcaacgccagcaacgccctgaccctggcccaccagctgagagtgtacaccgccgaggccgccagcttcagcgacatgatggacgtggtgtacgtggcccagatgatccagaagttcctgggctacgtggaccagatcaaggagctggtggaggtgatggtggacatggccagcaacctgatgctggtggacgagcacctgctgtggctggcccagagagaggacaaggcctgcagcagaatcgtgggcgccctggagagaatcggcggcgccgccctgagcccccacgcccagcacatcagcgtggagctgagcgccttccccagagaggtgggcggcgccggcgccggcctgcaccccgtggtgtacccctgcaccgccctgctgctgctgtgcctgttcgccaccatcatcacctacatcctgaaccacagcagcatcagagtgagcagaaagggctggcacatgctgctgaacctgtgcttccacatcgccatgaccagcgccgtgttcgccggcggcatcaccctgaccaactaccagatggtgtgccaggccgtgggcatcaccctgcactacagcagcctgagcaccctgctgtggatgggcgtgaaggccagagtgctgcacaaggagctgacctggagagccccccccccccaggagggcgaccccgccctgcccacccccagccccatgctgagattctacctgatcgccggcggcatccccctgatcatctgcggcatcaccgccgccgtgaacatccacaactacagagaccacagcccctactgctggctggtgtggagacccagcctgggcgccttctacatccccgtggccctgatcctgctgatcacctggatctacttcctgtgcgccggcctgagactgagaggccccctggcccagaaccccaaggccggcaacagcagagccagcctggaggccggcgaggagctgagaggcagcaccagactgagaggcagcggccccctgctgagcgacagcggcagcctgctggccaccggcagcgccagagtgggcacccccggcccccccgaggacggcgacagcctgtacagccccggcgtgcagctgggcgccctggtgaccacccacttcctgtacctggccatgtgggcctgcggcgccctggccgtgagccagagatggctgcccagagtggtgtgcagctgcctgtacggcgtggccgccagcgccctgggcctgttcgtgttcacccaccactgcgccagaagaagagacgtgagagccagctggagagcctgctgcccccccgccagccccgccgccccccacgccccccccagagccctgcccgccgccgccgaggacggcagccccgtgttcggcgagggcccccccagcctgaagagcagccccagcggcagcagcggccaccccctggccctgggcccctgcaagctgaccaacctgcagctggcccagagccaggtgtgcgaggccggcgccgccgccggcggcgagggcgagcccgagcccgccggcaccagaggcaacctggcccacagacaccccaacaacgtgcaccacggcagaagagcccacaagagcagagccaagggccacagagccggcgaggcctgcggcaagaacagactgaaggccctgagaggcggcgccgccggcgccctggagctgctgagcagcgagagcggcagcctgcacaacagccccaccgacagctacctgggcagcagcagaaacagccccggcgccggcctgcagctggagggcgagcccatgctgacccccagcgagggcagcgacaccagcgccgcccccctgagcgaggccggcagagccggccagagaagaagcgccagcagagacagcctgaagggcggcggcgccctggagaaggagagccacagaagaagctaccccctgaacgccgccagcctgaacggcgcccccaagggcggcaagtacgacgacgtgaccctgatgggcgccgaggtggccagcggcggctgcatgaagaccggcctgtggaagagcgagaccaccgtgtag

SEQ ID NO: 82374 - DNA, 4017 bp, synthetic construct
  misc_feature 1..4017: note = Description of Artificial Sequence: Synthetic coding sequence
  source 1..4017: mol_type = other DNA
atgggcgccggcggcagaagaatgagaggcgcccccgccagactgctgctgcccctgctgccctggctgctgctgctgctggcccccgaggccagaggcgcccccggctgccccctgagcatcagaagctgcaagtgcagcggcgagagacccaagggcctgagcggcggcgtgcccggccccgccagaagaagagtggtgtgcagcggcggcgacctgcccgagccccccgagcccggcctgctgcccaacggcaccgtgaccctgctgctgagcaacaacaagatcaccggcctgagaaacggcagcttcctgggcctgagcctgctggagaagctggacctgagaaacaacatcatcagcaccgtgcagcccggcgccttcctgggcctgggcgagctgaagagactggacctgagcaacaacagaatcggctgcctgaccagcgagaccttccagggcctgcccagactgctgagactgaacatcagcggcaacatcttcagcagcctgcagcccggcgtgttcgacgagctgcccgccctgaaggtggtggacctgggcaccgagttcctgacctgcgactgccacctgagatggctgctgccctgggcccagaacagaagcctgcagctgagcgagcacaccctgtgcgcctaccccagcgccctgcacgcccaggccctgggcagcctgcaggaggcccagctgtgctgcgagggcgccctggagctgcacacccaccacctgatccccagcctgagacaggtggtgttccagggcgacagactgcccttccagtgcagcgccagctacctgggcaacgacaccagaatcagatggtaccacaacagagcccccgtggagggcgacgagcaggccggcatcctgctggccgagagcctgatccacgactgcaccttcatcaccagcgagctgaccctgagccacatcggcgtgtgggccagcggcgagtgggagtgcaccgtgagcatggcccagggcaacgccagcaagaaggtggagatcgtggtgctggagaccagcgccagctactgccccgccgagagagtggccaacaacagaggcgacttcagatggcccagaaccctggccggcatcaccgcctaccagagctgcctgcagtaccccttcaccagcgtgcccctgggcggcggcgcccccggcaccagagccagcagaagatgcgacagagccggcagatgggagcccggcgactacagccactgcctgtacaccaacgacatcaccagagtgctgtacaccttcgtgctgatgcccatcaacgccagcaacgccctgaccctggcccaccagctgagagtgtacaccgccgaggccgccagcttcagcgacatgatggacgtggtgtacgtggcccagatgatccagaagttcctgggctacgtggaccagatcaaggagctggtggaggtgatggtggacatggccagcaacctgatgctggtggacgagcacctgctgtggctggcccagagagaggacaaggcctgcagcagaatcgtgggcgccctggagagaatcggcggcgccgccctgagcccccacgcccagcacatcagcgtgaacgccagaaacgtggccctggaggcctacctgatcaagccccacagctacgtgggcctgacctgcaccgccttccagagaagagagggcggcgtgcccggcaccagacccggcagccccggccagaaccccccccccgagcccgagccccccgccgaccagcagctgagattcagatgcaccaccggcagacccaacgtgagcctgagcagcttccacatcaagaacagcgtggccctggccagcatccagctgccccccagcctgttcagcagcctgcccgccgccctggccccccccgtgccccccgactgcaccctgcagctgctggtgttcagaaacggcagactgttccacagccacagcaacaccagcagacccggcgccgccggccccggcaagagaagaggcgtggccacccccgtgatcttcgccggcaccagcggctgcggcgtgggcaacctgaccgagcccgtggccgtgagcctgagacactgggccgagggcgccgagcccgtggccgcctggtggagccaggagggccccggcgaggccggcggctggaccagcgagggctgccagctgagaagcagccagcccaacgtgagcgccctgcactgccagcacctgggcaacgtggccgtgctgatggagctgagcgccttccccagagaggtgggcggcgccggcgccggcctgcaccccgtggtgtacccctgcaccgccctgctgctgctgtgcctgttcgccaccatcatcacctacatcctgaaccacagcagcatcagagtgagcagaaagggctggcacatgctgctgaacctgtgcttccacatcgccatgaccagcgccgtgttcgccggcggcatcaccctgaccaactaccagatggtgtgccaggccgtgggcatcaccctgcactacagcagcctgagcaccctgctgtggatgggcgtgaaggccagagtgctgcacaaggagctgacctggagagccccccccccccaggagggcgaccccgccctgcccacccccagccccatgctgagattctacctgatcgccggcggcatccccctgatcatctgcggcatcaccgccgccgtgaacatccacaactacagagaccacagcccctactgctggctggtgtggagacccagcctgggcgccttctacatccccgtggccctgatcctgctgatcacctggatctacttcctgtgcgccggcctgagactgagaggccccctggcccagaaccccaaggccggcaacagcagagccagcctggaggccggcgaggagctgagaggcagcaccagactgagaggcagcggccccctgctgagcgacagcggcagcctgctggccaccggcagcgccagagtgggcacccccggcccccccgaggacggcgacagcctgtacagccccggcgtgcagctgggcgccctggtgaccacccacttcctgtacctggccatgtgggcctgcggcgccctggccgtgagccagagatggctgcccagagtggtgtgcagctgcctgtacggcgtggccgccagcgccctgggcctgttcgtgttcacccaccactgcgccagaagaagagacgtgagagccagctggagagcctgctgcccccccgccagccccgccgccccccacgccccccccagagccctgcccgccgccgccgaggacggcagccccgtgttcggcgagggcccccccagcctgaagagcagccccagcggcagcagcggccaccccctggccctgggcccctgcaagctgaccaacctgcagctggcccagagccaggtgtgcgaggccggcgccgccgccggcggcgagggcgagcccgagcccgccggcaccagaggcaacctggcccacagacaccccaacaacgtgcaccacggcagaagagcccacaagagcagagccaagggccacagagccggcgaggcctgcggcaagaacagactgaaggccctgagaggcggcgccgccggcgccctggagctgctgagcagcgagagcggcagcctgcacaacagccccaccgacagctacctgggcagcagcagaaacagccccggcgccggcctgcagctggagggcgagcccatgctgacccccagcgagggcagcgacaccagcgccgcccccctgagcgaggccggcagagccggccagagaagaagcgccagcagagacagcctgaagggcggcggcgccctggagaaggagagccacagaagaagctaccccctgaacgccgccagcctgaacggcgcccccaagggcggcaagtacgacgacgtgaccctgatgggcgccgaggtggccagcggcggctgcatgaagaccggcctgtggaagagcgagaccaccgtgtag

SEQ ID NO: 82375 - DNA, 3771 bp, synthetic construct
  misc_feature 1..3771: note = Description of Artificial Sequence: Synthetic coding sequence
  source 1..3771: mol_type = other DNA
atgagaggcgcccccgccagactgctgctgcccctgctgccctggctgctgctgctgctggcccccgaggccagaggcgcccccggctgccccctgagcatcagaagctgcaagtgcagcggcgagagacccaagggcctgagcggcggcgtgcccggccccgccagaagaagagtggtgtgcagcggcggcgacctgcccgagccccccgagcccggcctgctgcccaacggcaccgtgaccctgctgctgagcaacaacaagatcaccggcctgagaaacggcagcttcctgggcctgagcctgctggagaagctggacctgagaaacaacatcatcagcaccgtgcagcccggcgccttcctgggcctgggcgagctgaagagactggacctgagcaacaacagaatcggctgcctgaccagcgagaccttccagggcctgcccagactgctgagactgaacatcagcggcaacatcttcagcagcctgcagcccggcgtgttcgacgagctgcccgccctgaaggtggtggacctgggcaccgagttcctgacctgcgactgccacctgagatggctgctgccctgggcccagaacagaagcctgcagctgagcgagcacaccctgtgcgcctaccccagcgccctgcacgcccaggccctgggcagcctgcaggaggcccagctgtgctgcgagggcgccctggagctgcacacccaccacctgatccccagcctgagacaggtggtgttccagggcgacagactgcccttccagtgcagcgccagctacctgggcaacgacaccagaatcagatggtaccacaacagagcccccgtggagggcgacgagcaggccggcatcctgctggccgagagcctgatccacgactgcaccttcatcaccagcgagctgaccctgagccacatcggcgtgtgggccagcggcgagtgggagtgcaccgtgagcatggcccagggcaacgccagcaagaaggtggagatcgtggtgctggagaccagcgccagctactgccccgccgagagagtggccaacaacagaggcgacttcagatggcccagaaccctggccggcatcaccgcctaccagagctgcctgcagtaccccttcaccagcgtgcccctgggcggcggcgcccccggcaccagagccagcagaagatgcgacagagccggcagatgggagcccggcgactacagccactgcctgtacaccaacgacatcaccagagtgctgtacaccttcgtgctgatgcccatcaacgccagcaacgccctgaccctggcccaccagctgagagtgtacaccgccgaggccgccagcttcagcgacatgatggacgtggtgtacgtggcccagatgatccagaagttcctgggctacgtggaccagatcaaggagctggtggaggtgatggtggacatggccagcaacctgatgctggtggacgagcacctgctgtggctggcccagagagaggacaaggcctgcagcagaatcgtgggcgccctggagagaatcggcggcgccgccctgagcccccacgcccagcacatcagcgtgaacgccagaaacgtggccctggaggcctacctgatcaagccccacagctacgtgggcctgacctgcaccgccttccagagaagagagggcggcgtgcccggcaccagacccggcagccccggccagaaccccccccccgagcccgagccccccgccgaccagcagctgagattcagatgcaccaccggcagacccaacgtgagcctgagcagcttccacatcaagaacagcgtggccctggccagcatccagctgccccccagcctgttcagcagcctgcccgccgccctggccccccccgtgccccccgactgcaccctgcagctgctggtgttcagaaacggcagactgttccacagccacagcaacaccagcagacccggcgccgccggccccggcaagagaagaggcgtggccacccccgtgatcttcgccggcaccagcggctgcggcgtgggcaacctgaccgagcccgtggccgtgagcctgagacactgggccgagggcgccgagcccgtggccgcctggtggagccaggagggccccggcgaggccggcggctggaccagcgagggctgccagctgagaagcagccagcccaacgtgagcgccctgcactgccagcacctgggcaacgtggccgtgctgatggagctgagcgccttccccagagaggtgggcggcgccggcgccggcctgcaccccgtggtgtacccctgcaccgccctgctgctgctgtgcctgttcgccaccatcatcacctacatcctgaaccacagcagcatcagagtgagcagaaagggctggcacatgctgctgaacctgtgcttccacatcgccatgaccagcgccgtgttcgccggcggcatcaccctgaccaactaccagatggtgtgccaggccgtgggcatcaccctgcactacagcagcctgagcaccctgctgtggatgggcgtgaaggccagagtgctgcacaaggagctgacctggagagccccccccccccaggagggcgaccccgccctgcccacccccagccccatgctgagattctacctgatcgccggcggcatccccctgatcatctgcggcatcaccgccgccgtgaacatccacaactacagagaccacagcccctactgctggctggtgtggagacccagcctgggcgccttctacatccccgtggccctgatcctgctgatcacctggatctacttcctgtgcgccggcctgagactgagaggccccctggcccagaaccccaaggccggcaacagcagagccagcctggaggccggcgaggagctgagaggcagcaccagactgagaggcagcggccccctgctgagcgacagcggcagcctgctggccaccggcagcgccagagtgggcacccccggcccccccgaggacggcgacagcctgtacagccccggcgtgcagagaggcgccggcgaccacgccctgcccgtgctgggccacgtgggcctgagaggcagcggcagcgtgcccgccctggccgcccccggcggcgtgcagctgctggtgagaggcggcagcctgagacccggccccctgagactgcacagccccctgtgccaggccgagggcagagagagcctggtggccagactgctgcccccctgcctgagcagaggccccccctgccccgcccccggccccgccagaagaagaagaggcagattccccggcgtgagaggcggcccccccctgccccaggtgctgcccaagagacagcagagacccagcgccggcagcggccccctgcaggcccaccagcccgccgccggccccgagagcggcgtgagaggcggcggcggcggcagaagaggcagaagagccggcgccggcggccaccccggcaagcccagacccccccccccccagcagagagcccccagagccagcggcgcccaggagcccggccagggcacccccagaggcggcggcctgagacaggagcccgcccagggccccgccagaggcagaggcggcggcgccggcgccgccgtgcagagagagagacagagcgcccagcagccccacagacagctgcccggccagcagccccagcagcccggcagaagacccgccgccggcagaagagcccacgcccacgccgtgagaggccagagacaccagagaagagccgccttctag

SEQ ID NO: 82376 - DNA, 3966 bp, synthetic construct
  misc_feature 1..3966: note = Description of Artificial Sequence: Synthetic coding sequence
  source 1..3966: mol_type = other DNA
atggagccccccggcagaagaagaggcagagcccagccccccctgctgctgcccctgagcctgctggccctgctggccctgctgggcggcggcggcggcggcggcgccgccgccctgcccgccggctgcaagcacgacggcagacccagaggcgccggcagagccgccggcgccgccgagggcaaggtggtgtgcagcagcctggagctggcccaggtgctgccccccgacaccctgcccaacagaaccgtgaccctgatcctgagcaacaacaagatcagcgagctgaagaacggcagcttcagcggcctgagcctgctggagagactggacctgagaaacaacctgatcagcagcatcgaccccggcgccttctggggcctgagcagcctgaagagactggacctgaccaacaacagaatcggctgcctgaacgccgacatcttcagaggcctgaccaacctggtgagactgaacctgagcggcaacctgttcagcagcctgagccagggcaccttcgactacctggccagcctgagaagcctggagttccagaccgagtacctgctgtgcgactgcaacatcctgtggatgcacagatgggtgaaggagaagaacatcaccgtgagagacaccagatgcgtgtaccccaagagcctgcaggcccagcccgtgaccggcgtgaagcaggagctgctgacctgcgacccccccctggagctgcccagcttctacatgacccccagccacagacaggtggtgttcgagggcgacagcctgcccttccagtgcatggccagctacatcgaccaggacatgcaggtgctgtggtaccaggacggcagaatcgtggagaccgacgagagccagggcatcttcgtggagaagaacatgatccacaactgcagcctgatcgccagcgccctgaccatcagcaacatccaggccggcagcaccggcaactggggctgccacgtgcagaccaagagaggcaacaacaccagaaccgtggacatcgtggtgctggagagcagcgcccagtactgcccccccgagagagtggtgaacaacaagggcgacttcagatggcccagaaccctggccggcatcaccgcctacctgcagtgcaccagaaacacccacggcagcggcatctaccccggcaacccccaggacgagagaaaggcctggagaagatgcgacagaggcggcttctgggccgacgacgactacagcagatgccagtacgccaacgacgtgaccagagtgctgtacatgttcaaccagatgcccctgaacctgaccaacgccgtggccaccgccagacagctgctggcctacaccgtggaggccgccaacttcagcgacaagatggacgtgatcttcgtggccgagatgatcgagaagttcggcagattcaccaaggaggagaagagcaaggagctgggcgacgtgatggtggacatcgccagcaacatcatgctggccgacgagagagtgctgtggctggcccagagagaggccaaggcctgcagcagaatcgtgcagtgcctgcagagaatcgccacctacagactggccggcggcgcccacgtgtacagcacctacagccccaacatcgccctggaggcctacgtgatcaagagcaccggcttcaccggcatgacctgcaccgtgttccagaaggtggccgccagcgacagaaccggcctgagcgactacggcagaagagaccccgagggcaacctggacaagcagctgagcttcaagtgcaacgtgagcaacaccttcagcagcctggccctgaagaacaccatcgtggaggccagcatccagctgccccccagcctgttcagccccaagcagaagagagagctgagacccaccgacgacagcctgtacaagctgcagctgatcgccttcagaaacggcaagctgttccccgccaccggcaacagcaccaacctggccgacgacggcaagagaagaaccgtggtgacccccgtgatcctgaccaagatcgacggcgtgaacgtggacacccaccacatccccgtgaacgtgaccctgagaagaatcgcccacggcgccgacgccgtggccgccagatgggacttcgacctgctgaacggccagggcggctggaagagcgacggctgccacatcctgtacagcgacgagaacatcaccaccatccagtgctacagcctgagcaactacgccgtgctgatggacctgaccggcagcgagctgtacacccaggccgccagcctgctgcaccccgtggtgtacaccaccgccatcatcctgctgctgtgcctgctggccgtgatcgtgagctacatctaccaccacagcctgatcagaatcagcctgaagagctggcacatgctggtgaacctgtgcttccacatcttcctgacctgcgtggtgttcgtgggcggcatcacccagaccagaaacgccagcatctgccaggccgtgggcatcatcctgcactacagcaccctggccaccgtgctgtgggtgggcgtgaccgccagaaacatctacaagcaggtgaccaagaaggccaagagatgccaggaccccgacgagcccccccccccccccagacccatgctgagattctacctgatcggcggcggcatccccatcatcgtgtgcggcatcaccgccgccgccaacatcaagaactacggcagcagacccaacgccccctactgctggatggcctgggagcccagcctgggcgccttctacggccccgccagcttcatcaccttcgtgaactgcatgtacttcctgagcatcttcatccagctgaagagacaccccgagagaaagtacgagctgaaggagcccaccgaggagcagcagagactggccgccaacgagaacggcgagatcaaccaccaggacagcatgagcctgagcctgatcagcaccagcgccctggagaacgagcacaccttccacagccagctgctgggcgccagcctgaccctgctgctgtacgtggccctgtggatgttcggcgccctggccgtgagcctgtactaccccctggacctggtgttcagcttcgtgttcggcgccaccagcctgagcttcagcgccttcttcgtggtgcaccactgcgtgaacagagaggacgtgagactggcctggatcatgacctgctgccccggcagaagcagctacagcgtgcaggtgaacgtgcagccccccaacagcaacggcaccaacggcgaggcccccaagtgccccaacagcagcgccgagagcagctgcaccaacaagagcgccagcagcttcaagaacagcagccagggctgcaagctgaccaacctgcaggccgccgccgcccagtgccacgccaacagcctgcccctgaacagcaccccccagctggacaacagcctgaccgagcacagcatggacaacgacatcaagatgcacgtggcccccctggaggtgcagttcagaaccaacgtgcacagcagcagacaccacaagaacagaagcaagggccacagagccagcagactgaccgtgctgagagagtacgcctacgacgtgcccaccagcgtggagggcagcgtgcagaacggcctgcccaagagcagactgggcaacaacgagggccacagcagaagcagaagagcctacctggcctacagagagagacagtacaaccccccccagcaggacagcagcgacgcctgcagcaccctgcccaagagcagcagaaacttcgagaagcccgtgagcaccaccagcaagaaggacgccctgagaaagcccgccgtggtggagctggagaaccagcagaagagctacggcctgaacctggccatccagaacggccccatcaagagcaacggccaggagggccccctgctgggcaccgacagcaccggcaacgtgagaaccggcctgtggaagcacgagaccaccgtgtag

SEQ ID NO: 82377 - DNA, 1851 bp, synthetic construct
  misc_feature 1..1851: note = Description of Artificial Sequence: Synthetic coding sequence
  source 1..1851: mol_type = other DNA
atggagccccccggcagaagaagaggcagagcccagccccccctgctgctgcccctgagcctgctggccctgctggccctgctgggcggcggcggcggcggcggcgccgccgccctgcccgccggctgcaagcacgacggcagacccagaggcgccggcagagccgccggcgccgccgagggcaaggtggtgtgcagcagcctggagctggcccaggtgctgccccccgacaccctgcccaacagaaccgtgaccctgatcctgagcaacaacaagatcagcgagctgaagaacggcagcttcagcggcctgagcctgctggagagactggacctgagaaacaacctgatcagcagcatcgaccccggcgccttctggggcctgagcagcctgaagagactggacctgaccaacaacagaatcggctgcctgaacgccgacatcttcagaggcctgaccaacctggtgagactgaacctgagcggcaacctgttcagcagcctgagccagggcaccttcgactacctggccagcctgagaagcctggagttccagaccgagtacctgctgtgcgactgcaacatcctgtggatgcacagatgggtgaaggagaagaacatcaccgtgagagacaccagatgcgtgtaccccaagagcctgcaggcccagcccgtgaccggcgtgaagcaggagctgctgacctgcgacccccccctggagctgcccagcttctacatgacccccagccacagacaggtggtgttcgagggcgacagcctgcccttccagtgcatggccagctacatcgaccaggacatgcaggtgctgtggtaccaggacggcagaatcgtggagaccgacgagagccagggcatcttcgtggagaagaacatgatccacaactgcagcctgatcgccagcgccctgaccatcagcaacatccaggccggcagcaccggcaactggggctgccacgtgcagaccaagagaggcaacaacaccagaaccgtggacatcgtggtgctggagagcagcgcccagtactgcccccccgagagagtggtgaacaacaagggcgacttcagatggcccagaaccctggccggcatcaccgcctacctgcagtgcaccagaaacacccacggcagcggcatctaccccggcaacccccaggacgagagaaaggcctggagaagatgcgacagaggcggcttctgggccgacgacgactacagcagatgccagtacgccaacgacgtgaccagagtgctgtacatgttcaaccagatgcccctgaacctgaccaacgccgtggccaccgccagacagctgctggcctacaccgtggaggccgccaacttcagcgacaagatggacgtgatcttcgtggccgagatgatcgagaagttcggcagattcaccaaggaggagaagagcaaggagctgggcgacgtgatggtggacatcgccagcaacatcatgctggccgacgagagagtgctgtggctggcccagagagaggccaaggcctgcagcagaatcgtgcagtgcctgcagagaatcgccacctacagactggccggcggcgcccacgtgtacagcacctacagccccaacatcgccctggaggcctacgtgatcaagagcaccggcttcaccggcatgacctgcaccgtgttccagaaggtggccgccagcgacagaaccggcctgagcgactacggcagaagagaccccgagggcaacctggacaagcagctgagcttcaagtgcaacgtgagcaacaccttcagcagcctggccctgaaggtgtgctacatcctgcagagcttcaagaccatctacagctag

SEQ ID NO: 82378 - DNA, 1146 bp, synthetic construct
  misc_feature 1..1146: note = Description of Artificial Sequence: Synthetic coding sequence
  source 1..1146: mol_type = other DNA
atgcccctgaagagaaacaacagcaagtacccccccctggagctgcccagcttctacatgacccccagccacagacaggtggtgttcgagggcgacagcctgcccttccagtgcatggccagctacatcgaccaggacatgcaggtgctgtggtaccaggacggcagaatcgtggagaccgacgagagccagggcatcttcgtggagaagaacatgatccacaactgcagcctgatcgccagcgccctgaccatcagcaacatccaggccggcagcaccggcaactggggctgccacgtgcagaccaagagaggcaacaacaccagaaccgtggacatcgtggtgctggagagcagcgcccagtactgcccccccgagagagtggtgaacaacaagggcgacttcagatggcccagaaccctggccggcatcaccgcctacctgcagtgcaccagaaacacccacggcagcggcatctaccccggcaacccccaggacgagagaaaggcctggagaagatgcgacagaggcggcttctgggccgacgacgactacagcagatgccagtacgccaacgacgtgaccagagtgctgtacatgttcaaccagatgcccctgaacctgaccaacgccgtggccaccgccagacagctgctggcctacaccgtggaggccgccaacttcagcgacaagatggacgtgatcttcgtggccgagatgatcgagaagttcggcagattcaccaaggaggagaagagcaaggagctgggcgacgtgatggtggacatcgccagcaacatcatgctggccgacgagagagtgctgtggctggcccagagagaggccaaggcctgcagcagaatcgtgcagtgcctgcagagaatcgccacctacagactggccggcggcgcccacgtgtacagcacctacagccccaacatcgccctggaggcctacgtgatcaagagcaccggcttcaccggcatgacctgcaccgtgttccagaaggtggccgccagcgacagaaccggcctgagcgactacggcagaagagaccccgagggcaacctggacaagcagctgagcttcaagtgcaacgtgagcaacaccttcagcagcctggccctgaagggcaagttcagatag

SEQ ID NO: 82379 - DNA, 2724 bp, synthetic construct
  misc_feature 1..2724: note = Description of Artificial Sequence: Synthetic coding sequence
  source 1..2724: mol_type = other DNA
atgcccaccgccgccgcccccatcatcagcagcgtgcagaagctggtgctgtacgagaccagagccagatacttcctggtgggcagcaacaacgccgagaccaagtacagagtgctgaagatcgacagaaccgagcccaaggacctggtgatcatcgacgacagacacgtgtacacccagcaggaggtgagagagctgctgggcagactggacctgggcaacagaaccaagatgggccagaagggcagcagcggcctgttcagagccgtgagcgccttcggcgtggtgggcttcgtgagattcctggagggctactacatcgtgctgatcaccaagagaagaaagatggccgacatcggcggccacgccatctacaaggtggaggacaccaacatgatctacatccccaacgacagcgtgagagtgacccaccccgacgaggccagatacctgagaatcttccagaacgtggacctgagcagcaacttctacttcagctacagctacgacctgagccacagcctgcagtacaacctgaccgtgctgagaatgcccctggagatgctgaagagcgagatgacccagaacagacaggagagcttcgacatcttcgaggacgagggcctgatcacccagggcggcagcggcgtgttcggcatctgcagcgagccctacatgaagtacgtgtggaacggcgagctgctggacatcatcaagagcaccgtgcacagagactggctgctgtacatcatccacggcttctgcggccagagcaagctgctgatctacggcagacccgtgtacgtgaccctgatcgccagaagaagcagcaagttcgccggcaccagattcctgaagagaggcgccaactgcgagggcgacgtggccaacgaggtggagaccgagcagatcctgtgcgacgccagcgtgatgagcttcaccgccggcagctacagcagctacgtgcaggtgagaggcagcgtgcccctgtactggagccaggacatcagcaccatgatgcccaagccccccatcaccctggaccaggccgaccccttcgcccacgtggccgccctgcacttcgaccagatgttccagagattcggcagccccatcatcatcctgaacctggtgaaggagagagagaagagaaagcacgagagaatcctgagcgaggagctggtggccgccgtgacctacctgaaccagttcctgccccccgagcacaccatcgtgtacatcccctgggacatggccaagtacaccaagagcaagctgtgcaacgtgctggacagactgaacgtgatcgccgagagcgtggtgaagaagaccggcttcttcgtgaacagacccgacagctactgcagcatcctgagacccgacgagaagtggaacgagctgggcggctgcgtgatccccaccggcagactgcagaccggcatcctgagaaccaactgcgtggactgcctggacagaaccaacaccgcccagttcatggtgggcaagtgcgccctggcctaccagctgtacagcctgggcctgatcgacaagcccaacctgcagttcgacaccgacgccgtgagactgttcgaggagctgtacgaggaccacggcgacaccctgagcctgcagtacggcggcagccagctggtgcacagagtgaagacctacagaaagatcgccccctggacccagcacagcaaggacatcatgcagaccctgagcagatactacagcaacgccttcagcgacgccgacagacaggacagcatcaacctgttcctgggcgtgttccaccccaccgagggcaagccccacctgtgggagctgcccaccgacttctacctgcaccacaagaacaccatgagactgctgcccaccagaagaagctacacctactggtggacccccgaggtgatcaagcacctgcccctgccctacgacgaggtgatctgcgccgtgaacctgaagaagctgatcgtgaagaagttccacaagtacgaggaggagatcgacatccacaacgagttcttcagaccctacgagctgagcagcttcgacgacaccttctgcctggccatgaccagcagcgccagagacttcatgcccaagaccgtgggcatcgaccccagccccttcaccgtgagaaagcccgacgagaccggcaagagcgtgctgggcaacaagagcaacagagaggaggccgtgctgcagagaaagaccgccgccagcgccccccccccccccagcgaggaggccgtgagcagcagcagcgaggacgacagcggcaccgacagagaggaggagggcagcgtgagccagagaagcacccccgtgaagatgaccgacgccggcgacagcgccaaggtgaccgagaacgtggtgcagcccatgaaggagctgtacggcatcaacctgagcgacggcctgagcgaggaggacttcagcatctacagcagattcgtgcagctgggccagagccagcacaagcaggacaagaacagccagcagccctgcagcagatgcagcgacggcgtgatcaagctgacccccatcagcgccttcagccaggacaacatctacgaggtgcagccccccagagtggacagaaagagcaccgagatcttccaggcccacatccaggccagccagggcatcatgcagcccctgggcaaggaggacagcagcatgtacagagagtacatcagaaacagatacctgtag

SEQ ID NO: 82380 - DNA, 3582 bp, synthetic construct
  misc_feature 1..3582: note = Description of Artificial Sequence: Synthetic coding sequence
  source 1..3582: mol_type = other DNA
atgatgttcagaagcgacagaatgtggagctgccactggaagtggaagcccagccccctgctgttcctgttcgccctgtacatcatgtgcgtgccccacagcgtgtggggctgcgccaactgcagagtggtgctgagcaaccccagcggcaccttcaccagcccctgctaccccaacgactaccccaacagccaggcctgcatgtggaccctgagagcccccaccggctacatcatccagatcaccttcaacgacttcgacatcgaggaggcccccaactgcatctacgacagcctgagcctggacaacggcgagagccagaccaagttctgcggcgccaccgccaagggcctgagcttcaacagcagcgccaacgagatgcacgtgagcttcagcagcgacttcagcatccagaagaagggcttcaacgccagctacatcagagtggccgtgagcctgagaaaccagaaggtgatcctgccccagaccagcgacgcctaccaggtgagcgtggccaagagcatcagcatccccgagctgagcgccttcaccctgtgcttcgaggccaccaaggtgggccacgaggacagcgactggaccgccttcagctacagcaacgccagcttcacccagctgctgagcttcggcaaggccaagagcggctacttcctgagcatcagcgacagcaagtgcctgctgaacaacgccctgcccgtgaaggagaaggaggacatcttcgccgagagcttcgagcagctgtgcctggtgtggaacaacagcctgggcagcatcggcgtgaacttcaagagaaactacgagaccgtgccctgcgacagcaccatcagcaaggtgatccccggcaacggcaagctgctgctgggcagcaaccagaacgagatcgtgagcctgaagggcgacatctacaacttcagactgtggaacttcaccatgaacgccaagatcctgagcaacctgagctgcaacgtgaagggcaacgtggtggactggcagaacgacttctggaacatccccaacctggccctgaaggccgagagcaacctgagctgcggcagctacctgatccccctgcccgccgccgagctggccagctgcgccgacctgggcaccctgtgccaggacggcatcatctacagaatcagcgtggtgatccagaacatcctgagacaccccgaggtgaaggtgcagagcaaggtggccgagtggctgaacagcaccttccagaactggaactacaccgtgtacgtggtgaacatcagcttccacctgagcgccggcgaggacaagatcaaggtgaagagaagcctggaggacgagcccagactggtgctgtgggccctgctggtgtacaacgccaccaacaacaccaacctggagggcaagatcatccagcagaagctgctgaagaacaacgagagcctggacgagggcctgagactgcacaccgtgaacgtgagacagctgggccactgcctggccatggaggagcccaagggctactactggcccagcatccagcccagcgagtacgtgctgccctgccccgacaagcccggcttcagcgccagcagaatctgcttctacaacgccaccaaccccctggtgacctactggggccccgtggacatcagcaactgcctgaaggaggccaacgaggtggccaaccagatcctgaacctgaccgccgacggccagaacctgaccagcgccaacatcaccaacatcgtggagcaggtgaagagaatcgtgaacaaggaggagaacatcgacatcaccctgggcagcaccctgatgaacatcttcagcaacatcctgagcagcagcgacagcgacctgctggagagcagcagcgaggccctgaagaccatcgacgagctggccttcaagatcgacctgaacagcaccagccacgtgaacatcaccaccagaaacctggccctgagcgtgagcagcctgctgcccggcaccaacgccatcagcaacttcagcatcggcctgcccagcaacaacgagagctacttccagatggacttcgagagcggccaggtggaccccctggccagcgtgatcctgccccccaacctgctggagaacctgagccccgaggacagcgtgctggtgagaagagcccagttcaccttcttcaacaagaccggcctgttccaggacgtgggcccccagagaaagaccctggtgagctacgtgatggcctgcagcatcggcaacatcaccatccagaacctgaaggaccccgtgcagatcaagatcaagcacaccagaacccaggaggtgcaccaccccatctgcgccttctgggacctgaacaagaacaagagcttcggcggctggaacaccagcggctgcgtggcccacagagacagcgacgccagcgagaccgtgtgcctgtgcaaccacttcacccacttcggcgtgctgatggacctgcccagaagcgccagccagctggacgccagaaacaccaaggtgctgaccttcatcagctacatcggctgcggcatcagcgccatcttcagcgccgccaccctgctgacctacgtggccttcgagaagctgagaagagactaccccagcaagatcctgatgaacctgagcaccgccctgctgttcctgaacctgctgttcctgctggacggctggatcaccagcttcaacgtggacggcctgtgcatcgccgtggccgtgctgctgcacttcttcctgctggccaccttcacctggatgggcctggaggccatccacatgtacatcgccctggtgaaggtgttcaacacctacatcagaagatacatcctgaagttctgcatcatcggctggggcctgcccgccctggtggtgagcgtggtgctggccagcagaaacaacaacgaggtgtacggcaaggagagctacggcaaggagaagggcgacgagttctgctggatccaggaccccgtgatcttctacgtgacctgcgccggctacttcggcgtgatgttcttcctgaacatcgccatgttcatcgtggtgatggtgcagatctgcggcagaaacggcaagagaagcaacagaaccctgagagaggaggtgctgagaaacctgagaagcgtggtgagcctgaccttcctgctgggcatgacctggggcttcgccttcttcgcctggggccccctgaacatccccttcatgtacctgttcagcatcttcaacagcctgcagggcctgttcatcttcatcttccactgcgccatgaaggagaacgtgcagaagcagtggagacagcacctgtgctgcggcagattcagactggccgacaacagcgactggagcaagaccgccaccaacatcatcaagaagagcagcgacaacctgggcaagagcctgagcagcagcagcatcggcagcaacagcacctacctgaccagcaagagcaagagcagcagcaccacctacttcaagagaaacagccacaccgacaacgtgagctacgagcacagcttcaacaagagcggcagcctgagacagtgcttccacggccaggtgctggtgaagaccggcccctgctag

SEQ ID NO: 82381 - DNA, 3669 bp, synthetic construct
  misc_feature 1..3669: note = Description of Artificial Sequence: Synthetic coding sequence
  source 1..3669: mol_type = other DNA
atgatgttcagaagcgacagaatgtggagctgccactggaagtggaagcccagccccctgctgttcctgttcgccctgtacatcatgtgcgtgccccacagcgtgtggggctgcgccaactgcagagtggtgctgagcaaccccagcggcaccttcaccagcccctgctaccccaacgactaccccaacagccaggcctgcatgtggaccctgagagcccccaccggctacatcatccagatcaccttcaacgacttcgacatcgaggaggcccccaactgcatctacgacagcctgagcctggacaacggcgagagccagaccaagttctgcggcgccaccgccaagggcctgagcttcaacagcagcgccaacgagatgcacgtgagcttcagcagcgacttcagcatccagaagaagggcttcaacgccagctacatcagagtggccgtgagcctgagaaaccagaaggtgatcctgccccagaccagcgacgcctaccaggtgagcgtggccaagagcatcagcatccccgagctgagcgccttcaccctgtgcttcgaggccaccaaggtgggccacgaggacagcgactggaccgccttcagctacagcaacgccagcttcacccagctgctgagcttcggcaaggccaagagcggctacttcctgagcatcagcgacagcaagtgcctgctgaacaacgccctgcccgtgaaggagaaggaggacatcttcgccgagagcttcgagcagctgtgcctggtgtggaacaacagcctgggcagcatcggcgtgaacttcaagagaaactacgagaccgtgccctgcgacagcaccatcagcaaggtgatccccggcaacggcaagctgctgctgggcagcaaccagaacgagatcgtgagcctgaagggcgacatctacaacttcagactgtggaacttcaccatgaacgccaagatcctgagcaacctgagctgcaacgtgaagggcaacgtggtggactggcagaacgacttctggaacatccccaacctggccctgaaggccgagagcaacctgagctgcggcagctacctgatccccctgcccgccgccgagctggccagctgcgccgacctgggcaccctgtgccaggacggcatcatctacagaatcagcgtggtgatccagaacatcctgagacaccccgaggtgaaggtgcagagcaaggtggccgagtggctgaacagcaccttccagaactggaactacaccgtgtacgtggtgaacatcagcttccacctgagcgccggcgaggacaagatcaaggtgaagagaagcctggaggacgagcccagactggtgctgtgggccctgctggtgtacaacgccaccaacaacaccaacctggagggcaagatcatccagcagaagctgctgaagaacaacgagagcctggacgagggcctgagactgcacaccgtgaacgtgagacagctgggccactgcctggccatggaggagcccaagggctactactggcccagcatccagcccagcgagtacgtgctgccctgccccgacaagcccggcttcagcgccagcagaatctgcttctacaacgccaccaaccccctggtgacctactggggccccgtggacatcagcaactgcctgaaggaggccaacgaggtggccaaccagatcctgaacctgaccgccgacggccagaacctgaccagcgccaacatcaccaacatcgtggagcaggtgaagagaatcgtgaacaaggaggagaacatcgacatcaccctgggcagcaccctgatgaacatcttcagcaacatcctgagcagcagcgacagcgacctgctggagagcagcagcgaggccctgaagaccatcgacgagctggccttcaagatcgacctgaacagcaccagccacgtgaacatcaccaccagaaacctggccctgagcgtgagcagcctgctgcccggcaccaacgccatcagcaacttcagcatcggcctgcccagcaacaacgagagctacttccagatggacttcgagagcggccaggtggaccccctggccagcgtgatcctgccccccaacctgctggagaacctgagccccgaggacagcgtgctggtgagaagagcccagttcaccttcttcaacaagaccggcctgttccaggacgtgggcccccagagaaagaccctggtgagctacgtgatggcctgcagcatcggcaacatcaccatccagaacctgaaggaccccgtgcagatcaagatcaagcacaccagaacccaggaggtgcaccaccccatctgcgccttctgggacctgaacaagaacaagagcttcggcggctggaacaccagcggctgcgtggcccacagagacagcgacgccagcgagaccgtgtgcctgtgcaaccacttcacccacttcggcgtgctgatggacctgcccagaagcgccagccagctggacgccagaaacaccaaggtgctgaccttcatcagctacatcggctgcggcatcagcgccatcttcagcgccgccaccctgctgacctacgtggccttcgagaagctgagaagagactaccccagcaagatcctgatgaacctgagcaccgccctgctgttcctgaacctgctgttcctgctggacggctggatcaccagcttcaacgtggacggcctgtgcatcgccgtggccgtgctgctgcacttcttcctgctggccaccttcacctggatgggcctggaggccatccacatgtacatcgccctggtgaaggtgttcaacacctacatcagaagatacatcctgaagttctgcatcatcggctggggcctgcccgccctggtggtgagcgtggtgctggccagcagaaacaacaacgaggtgtacggcaaggagagctacggcaaggagaagggcgacgagttctgctggatccaggaccccgtgatcttctacgtgacctgcgccggctacttcggcgtgatgttcttcctgaacatcgccatgttcatcgtggtgatggtgcagatctgcggcagaaacggcaagagaagcaacagaaccctgagagaggaggtgctgagaaacctgagaagcgtggtgagcctgaccttcctgctgggcatgacctggggcttcgccttcttcgcctggggccccctgaacatccccttcatgtacctgttcagcatcttcaacagcctgcagggcctgttcatcttcatcttccactgcgccatgaaggagaacgtgcagaagcagtggagacagcacctgtgctgcggcagattcagactggccgacaacagcgactggagcaagaccgccaccaacatcatcaagaagagcagcgacaacctgggcaagagcctgagcagcagcagcatcggcagcaacagcacctacctgaccagcaagagcaagagcagcagcaccacctacttcaagagaaacagccacaccgacagcgccagcatggacaagagcctgagcaagctggcccacgccgacggcgaccagaccagcatcatccccgtgcaccaggtgatcgacaaggtgaagggctactgcaacgcccacagcgacaacttctacaagaacatcatcatgagcgacaccttcagccacagcaccaagttctag

SEQ ID NO: 82382 - DNA, 3753 bp, synthetic construct
  misc_feature 1..3753: note = Description of Artificial Sequence: Synthetic coding sequence
  source 1..3753: mol_type = other DNA
atgatgttcagaagcgacagaatgtggagctgccactggaagtggaagcccagccccctgctgttcctgttcgccctgtacatcatgtgcgtgccccacagcgtgtggggctgcgccaactgcagagtggtgctgagcaaccccagcggcaccttcaccagcccctgctaccccaacgactaccccaacagccaggcctgcatgtggaccctgagagcccccaccggctacatcatccagatcaccttcaacgacttcgacatcgaggaggcccccaactgcatctacgacagcctgagcctggacaacggcgagagccagaccaagttctgcggcgccaccgccaagggcctgagcttcaacagcagcgccaacgagatgcacgtgagcttcagcagcgacttcagcatccagaagaagggcttcaacgccagctacatcagagtggccgtgagcctgagaaaccagaaggtgatcctgccccagaccagcgacgcctaccaggtgagcgtggccaagagcatcagcatccccgagctgagcgccttcaccctgtgcttcgaggccaccaaggtgggccacgaggacagcgactggaccgccttcagctacagcaacgccagcttcacccagctgctgagcttcggcaaggccaagagcggctacttcctgagcatcagcgacagcaagtgcctgctgaacaacgccctgcccgtgaaggagaaggaggacatcttcgccgagagcttcgagcagctgtgcctggtgtggaacaacagcctgggcagcatcggcgtgaacttcaagagaaactacgagaccgtgccctgcgacagcaccatcagcaaggtgatccccggcaacggcaagctgctgctgggcagcaaccagaacgagatcgtgagcctgaagggcgacatctacaacttcagactgtggaacttcaccatgaacgccaagatcctgagcaacctgagctgcaacgtgaagggcaacgtggtggactggcagaacgacttctggaacatccccaacctggccctgaaggccgagagcaacctgagctgcggcagctacctgatccccctgcccgccgccgagctggccagctgcgccgacctgggcaccctgtgccaggccaccgtgaacagccccagcaccaccccccccaccgtgaccaccaacatgcccgtgaccaacagaatcgacaagcagagaaacgacggcatcatctacagaatcagcgtggtgatccagaacatcctgagacaccccgaggtgaaggtgcagagcaaggtggccgagtggctgaacagcaccttccagaactggaactacaccgtgtacgtggtgaacatcagcttccacctgagcgccggcgaggacaagatcaaggtgaagagaagcctggaggacgagcccagactggtgctgtgggccctgctggtgtacaacgccaccaacaacaccaacctggagggcaagatcatccagcagaagctgctgaagaacaacgagagcctggacgagggcctgagactgcacaccgtgaacgtgagacagctgggccactgcctggccatggaggagcccaagggctactactggcccagcatccagcccagcgagtacgtgctgccctgccccgacaagcccggcttcagcgccagcagaatctgcttctacaacgccaccaaccccctggtgacctactggggccccgtggacatcagcaactgcctgaaggaggccaacgaggtggccaaccagatcctgaacctgaccgccgacggccagaacctgaccagcgccaacatcaccaacatcgtggagcaggtgaagagaatcgtgaacaaggaggagaacatcgacatcaccctgggcagcaccctgatgaacatcttcagcaacatcctgagcagcagcgacagcgacctgctggagagcagcagcgaggccctgaagaccatcgacgagctggccttcaagatcgacctgaacagcaccagccacgtgaacatcaccaccagaaacctggccctgagcgtgagcagcctgctgcccggcaccaacgccatcagcaacttcagcatcggcctgcccagcaacaacgagagctacttccagatggacttcgagagcggccaggtggaccccctggccagcgtgatcctgccccccaacctgctggagaacctgagccccgaggacagcgtgctggtgagaagagcccagttcaccttcttcaacaagaccggcctgttccaggacgtgggcccccagagaaagaccctggtgagctacgtgatggcctgcagcatcggcaacatcaccatccagaacctgaaggaccccgtgcagatcaagatcaagcacaccagaacccaggaggtgcaccaccccatctgcgccttctgggacctgaacaagaacaagagcttcggcggctggaacaccagcggctgcgtggcccacagagacagcgacgccagcgagaccgtgtgcctgtgcaaccacttcacccacttcggcgtgctgatggacctgcccagaagcgccagccagctggacgccagaaacaccaaggtgctgaccttcatcagctacatcggctgcggcatcagcgccatcttcagcgccgccaccctgctgacctacgtggccttcgagaagctgagaagagactaccccagcaagatcctgatgaacctgagcaccgccctgctgttcctgaacctgctgttcctgctggacggctggatcaccagcttcaacgtggacggcctgtgcatcgccgtggccgtgctgctgcacttcttcctgctggccaccttcacctggatgggcctggaggccatccacatgtacatcgccctggtgaaggtgttcaacacctacatcagaagatacatcctgaagttctgcatcatcggctggggcctgcccgccctggtggtgagcgtggtgctggccagcagaaacaacaacgaggtgtacggcaaggagagctacggcaaggagaagggcgacgagttctgctggatccaggaccccgtgatcttctacgtgacctgcgccggctacttcggcgtgatgttcttcctgaacatcgccatgttcatcgtggtgatggtgcagatctgcggcagaaacggcaagagaagcaacagaaccctgagagaggaggtgctgagaaacctgagaagcgtggtgagcctgaccttcctgctgggcatgacctggggcttcgccttcttcgcctggggccccctgaacatccccttcatgtacctgttcagcatcttcaacagcctgcagggcctgttcatcttcatcttccactgcgccatgaaggagaacgtgcagaagcagtggagacagcacctgtgctgcggcagattcagactggccgacaacagcgactggagcaagaccgccaccaacatcatcaagaagagcagcgacaacctgggcaagagcctgagcagcagcagcatcggcagcaacagcacctacctgaccagcaagagcaagagcagcagcaccacctacttcaagagaaacagccacaccgacagcgccagcatggacaagagcctgagcaagctggcccacgccgacggcgaccagaccagcatcatccccgtgcaccaggtgatcgacaaggtgaagggctactgcaacgcccacagcgacaacttctacaagaacatcatcatgagcgacaccttcagccacagcaccaagttctag

SEQ ID NO: 82383 - DNA, 2394 bp, synthetic construct
  misc_feature 1..2394: note = Description of Artificial Sequence: Synthetic coding sequence
  source 1..2394: mol_type = other DNA
atggccagctgcagagcctggaacctgagagtgctggtggccgtggtgtgcggcctgctgaccggcatcatcctgggcctgggcatctggagaatcgtgatcagaatccagagaggcaagagcaccagcagcagcagcacccccaccgagttctgcagaaacggcggcacctgggagaacggcagatgcatctgcaccgaggagtggaagggcctgagatgcaccatcgccaacttctgcgagaacagcacctacatgggcttcaccttcgccagaatccccgtgggcagatacggccccagcctgcagacctgcggcaaggacacccccaacgccggcaaccccatggccgtgagactgtgcagcctgagcctgtacggcgagatcgagctgcagaaggtgaccatcggcaactgcaacgagaacctggagaccctggagaagcaggtgaaggacgtgaccgcccccctgaacaacatcagcagcgaggtgcagatcctgaccagcgacgccaacaagctgaccgccgagaacatcaccagcgccaccagagtggtgggccagatcttcaacaccagcagaaacgccagccccgaggccaagaaggtggccatcgtgaccgtgagccagctgctggacgccagcgaggacgccttccagagagtggccgccaccgccaacgacgacgccctgaccaccctgatcgagcagatggagacctacagcctgagcctgggcaaccagagcgtggtggagcccaacatcgccatccagagcgccaacttcagcagcgagaacgccgtgggccccagcaacgtgagattcagcgtgcagaagggcgccagcagcagcctggtgagcagcagcaccttcatccacaccaacgtggacggcctgaaccccgacgcccagaccgagctgcaggtgctgctgaacatgaccaagaactacaccaagacctgcggcttcgtggtgtaccagaacgacaagctgttccagagcaagaccttcaccgccaagagcgacttcagccagaagatcatcagcagcaagaccgacgagaacgagcaggaccagagcgccagcgtggacatggtgttcagccccaagtacaaccagaaggagttccagctgtacagctacgcctgcgtgtactggaacctgagcgccaaggactgggacacctacggctgccagaaggacaagggcaccgacggcttcctgagatgcagatgcaaccacaccaccaacttcgccgtgctgatgaccttcaagaaggactaccagtaccccaagagcctggacatcctgagcaacgtgggctgcgccctgagcgtgaccggcctggccctgaccgtgatcttccagatcgtgaccagaaaggtgagaaagaccagcgtgacctgggtgctggtgaacctgtgcatcagcatgctgatcttcaacctgctgttcgtgttcggcatcgagaacagcaacaagaacctgcagaccagcgacggcgacatcaacaacatcgacttcgacaacaacgacatccccagaaccgacaccatcaacatccccaaccccatgtgcaccgccatcgccgccctgctgcactacttcctgctggtgaccttcacctggaacgccctgagcgccgcccagctgtactacctgctgatcagaaccatgaagcccctgcccagacacttcatcctgttcatcagcctgatcggctggggcgtgcccgccatcgtggtggccatcaccgtgggcgtgatctacagccagaacggcaacaacccccagtgggagctggactacagacaggagaagatctgctggctggccatccccgagcccaacggcgtgatcaagagccccctgctgtggagcttcatcgtgcccgtgaccatcatcctgatcagcaacgtggtgatgttcatcaccatcagcatcaaggtgctgtggaagaacaaccagaacctgaccagcaccaagaaggtgagcagcatgaagaagatcgtgagcaccctgagcgtggccgtggtgttcggcatcacctggatcctggcctacctgatgctggtgaacgacgacagcatcagaatcgtgttcagctacatcttctgcctgttcaacaccacccagggcctgcagatcttcatcctgtacaccgtgagaaccaaggtgttccagagcgaggccagcaaggtgctgatgctgctgagcagcatcggcagaagaaagagcctgcccagcgtgaccagacccagactgagagtgaagatgtacaacttcctgagaagcctgcccaccctgcacgagagattcagactgctggagaccagccccagcaccgaggagatcaccctgagcgagagcgacaacgccaaggagagcatctag

SEQ ID NO: 82384 - DNA, 1509 bp, synthetic construct
  misc_feature 1..1509: note = Description of Artificial Sequence: Synthetic coding sequence
  source 1..1509: mol_type = other DNA
atgcccgtgaagatgctgttcaaggagctgctgctgctgctgatgatgatgcccctgcagcactacaccaagacctgcggcttcgtggtgtaccagaacgacaagctgttccagagcaagaccttcaccgccaagagcgacttcagccagaagatcatcagcagcaagaccgacgagaacgagcaggaccagagcgccagcgtggacatggtgttcagccccaagtacaaccagaaggagttccagctgtacagctacgcctgcgtgtactggaacctgagcgccaaggactgggacacctacggctgccagaaggacaagggcaccgacggcttcctgagatgcagatgcaaccacaccaccaacttcgccgtgctgatgaccttcaagaaggactaccagtaccccaagagcctggacatcctgagcaacgtgggctgcgccctgagcgtgaccggcctggccctgaccgtgatcttccagatcgtgaccagaaaggtgagaaagaccagcgtgacctgggtgctggtgaacctgtgcatcagcatgctgatcttcaacctgctgttcgtgttcggcatcgagaacagcaacaagaacctgcagaccagcgacggcgacatcaacaacatcgacttcgacaacaacgacatccccagaaccgacaccatcaacatccccaaccccatgtgcaccgccatcgccgccctgctgcactacttcctgctggtgaccttcacctggaacgccctgagcgccgcccagctgtactacctgctgatcagaaccatgaagcccctgcccagacacttcatcctgttcatcagcctgatcggctggggcgtgcccgccatcgtggtggccatcaccgtgggcgtgatctacagccagaacggcaacaacccccagtgggagctggactacagacaggagaagatctgctggctggccatccccgagcccaacggcgtgatcaagagccccctgctgtggagcttcatcgtgcccgtgaccatcatcctgatcagcaacgtggtgatgttcatcaccatcagcatcaaggtgctgtggaagaacaaccagaacctgaccagcaccaagaaggtgagcagcatgaagaagatcgtgagcaccctgagcgtggccgtggtgttcggcatcacctggatcctggcctacctgatgctggtgaacgacgacagcatcagaatcgtgttcagctacatcttctgcctgttcaacaccacccagggcctgcagatcttcatcctgtacaccgtgagaaccaaggtgttccagagcgaggccagcaaggtgctgatgctgctgagcagcatcggcagaagaaagagcctgcccagcgtgaccagacccagactgagagtgaagatgtacaacttcctgagaagcctgcccaccctgcacgagagattcagactgctggagaccagccccagcaccgaggagatcaccctgagcgagagcgacaacgccaaggagagcatctag

SEQ ID NO: 82385 - DNA, 1143 bp, synthetic construct
  misc_feature 1..1143: note = Description of Artificial Sequence: Synthetic coding sequence
  source 1..1143: mol_type = other DNA
atgtgccccatgctgctgaagaacggctacaacggcaacgccacccccgtgaccaccaccgccccctgggccagcctgggcctgagcgccaagacctgcaacaacgtgagcttcgaggagagcagaatcgtgctggtggtggtgtacagcgccgtgtgcaccctgggcgtgcccgccaactgcctgaccgcctggctggccctgctgcaggtgctgcagggcaacgtgctggccgtgtacctgctgtgcctggccctgtgcgagctgctgtacaccggcaccctgcccctgtgggtgatctacatcagaaaccagcacagatggaccctgggcctgctggcctgcaaggtgaccgcctacatcttcttctgcaacatctacgtgagcatcctgttcctgtgctgcatcagctgcgacagattcgtggccgtggtgtacgccctggagagcagaggcagaagaagaagaagaaccgccatcctgatcagcgcctgcatcttcatcctggtgggcatcgtgcactaccccgtgttccagaccgaggacaaggagacctgcttcgacatgctgcagatggacagcagaatcgccggctactactacgccagattcaccgtgggcttcgccatccccctgagcatcatcgccttcaccaaccacagaatcttcagaagcatcaagcagagcatgggcctgagcgccgcccagaaggccaaggtgaagcacagcgccatcgccgtggtggtgatcttcctggtgtgcttcgccccctaccacctggtgctgctggtgaaggccgccgccttcagctactacagaggcgacagaaacgccatgtgcggcctggaggagagactgtacaccgccagcgtggtgttcctgtgcctgagcaccgtgaacggcgtggccgaccccatcatctacgtgctggccaccgaccacagcagacaggaggtgagcagaatccacaagggctggaaggagtggagcatgaagaccgacgtgaccagactgacccacagcagagacaccgaggagctgcagagccccgtggccctggccgaccactacaccttcagcagacccgtgcacccccccggcagcccctgccccgccaagagactgatcgaggagagctgctag

SEQ ID NO: 82386 - DNA, 1116 bp, synthetic construct
  misc_feature 1..1116: note = Description of Artificial Sequence: Synthetic coding sequence
  source 1..1116: mol_type = other DNA
atgcccggcaacgccacccccgtgaccaccaccgccccctgggccagcctgggcctgagcgccaagacctgcaacaacgtgagcttcgaggagagcagaatcgtgctggtggtggtgtacagcgccgtgtgcaccctgggcgtgcccgccaactgcctgaccgcctggctggccctgctgcaggtgctgcagggcaacgtgctggccgtgtacctgctgtgcctggccctgtgcgagctgctgtacaccggcaccctgcccctgtgggtgatctacatcagaaaccagcacagatggaccctgggcctgctggcctgcaaggtgaccgcctacatcttcttctgcaacatctacgtgagcatcctgttcctgtgctgcatcagctgcgacagattcgtggccgtggtgtacgccctggagagcagaggcagaagaagaagaagaaccgccatcctgatcagcgcctgcatcttcatcctggtgggcatcgtgcactaccccgtgttccagaccgaggacaaggagacctgcttcgacatgctgcagatggacagcagaatcgccggctactactacgccagattcaccgtgggcttcgccatccccctgagcatcatcgccttcaccaaccacagaatcttcagaagcatcaagcagagcatgggcctgagcgccgcccagaaggccaaggtgaagcacagcgccatcgccgtggtggtgatcttcctggtgtgcttcgccccctaccacctggtgctgctggtgaaggccgccgccttcagctactacagaggcgacagaaacgccatgtgcggcctggaggagagactgtacaccgccagcgtggtgttcctgtgcctgagcaccgtgaacggcgtggccgaccccatcatctacgtgctggccaccgaccacagcagacaggaggtgagcagaatccacaagggctggaaggagtggagcatgaagaccgacgtgaccagactgacccacagcagagacaccgaggagctgcagagccccgtggccctggccgaccactacaccttcagcagacccgtgcacccccccggcagcccctgccccgccaagagactgatcgaggagagctgctag

SEQ ID NO: 82387 - DNA, 1143 bp, synthetic construct; identical to SEQ ID NO: 82385
  misc_feature 1..1143: note = Description of Artificial Sequence: Synthetic coding sequence
  source 1..1143: mol_type = other DNA

SEQ ID NO: 82388 - DNA, 33 bp, synthetic construct
  misc_feature 1..33: note = Description of Artificial Sequence: Synthetic coding sequence
  source 1..33: mol_type = other DNA
atgtgccccatgctgctgaagaacggctactag

SEQ ID NO: 82389 - DNA, 2625 bp, synthetic construct
  misc_feature 1..2625: note = Description of Artificial Sequence: Synthetic coding sequence
  source 1..2625: mol_type = other DNA
atggagaagctgctgagactgtgctgctggtacagctggctgctgctgttctactacaacttccaggtgagaggcgtgtacagcagaagccaggaccaccccggcttccaggtgctggccagcgccagccactactggcccctggagaacgtggacggcatccacgagctgcaggacaccaccggcgacatcgtggagggcaaggtgaacaagggcatctacctgaaggaggagaagggcgtgaccctgctgtactacggcagatacaacagcagctgcatcagcaagcccgagcagtgcggccccgagggcgtgaccttcagcttcttctggaagacccagggcgagcagagcagacccatccccagcgcctacggcggccaggtgatcagcaacggcttcaaggtgtgcagcagcggcggcagaggcagcgtggagctgtacaccagagacaacagcatgacctgggaggccagcttcagcccccccggcccctactggacccacgtgctgttcacctggaagagcaaggagggcctgaaggtgtacgtgaacggcaccctgagcaccagcgaccccagcggcaaggtgagcagagactacggcgagagcaacgtgaacctggtgatcggcagcgagcaggaccaggccaagtgctacgagaacggcgccttcgacgagttcatcatctgggagagagccctgacccccgacgagatcgccatgtacttcaccgccgccatcggcaagcacgccctgctgagcagcaccctgcccagcctgttcatgaccagcaccgccagccccgtgatgcccaccgacgcctaccaccccatcatcaccaacctgaccgaggagagaaagaccttccagagccccggcgtgatcctgagctacctgcagaacgtgagcctgagcctgcccagcaagagcctgagcgagcagaccgccctgaacctgaccaagaccttcctgaaggccgtgggcgagatcctgctgctgcccggctggatcgccctgagcgaggacagcgccgtggtgctgagcctgatcgacaccatcgacaccgtgatgggccacgtgagcagcaacctgcacggcagcaccccccaggtgaccgtggagggcagcagcgccatggccgagttcagcgtggccaagatcctgcccaagaccgtgaacagcagccactacagattccccgcccacggccagagcttcatccagatcccccacgaggccttccacagacacgcctggagcaccgtggtgggcctgctgtaccacagcatgcactactacctgaacaacatctggcccgcccacaccaagatcgccgaggccatgcaccaccaggactgcctgctgttcgccaccagccacctgatcagcctggaggtgagccccccccccaccctgagccagaacctgagcggcagccccctgatcaccgtgcacctgaagcacagactgaccagaaagcagcacagcgaggccaccaacagcagcaacagagtgttcgtgtactgcgccttcctggacttcagcagcggcgagggcgtgtggagcaaccacggctgcgccctgaccagaggcaacctgacctacagcgtgtgcagatgcacccacctgaccaacttcgccatcctgatgcaggtggtgcccctggagctggccagaggccaccaggtggccctgagcagcatcagctacgtgggctgcagcctgagcgtgctgtgcctggtggccaccctggtgaccttcgccgtgctgagcagcgtgagcaccatcagaaaccagagataccacatccacgccaacctgagcttcgccgtgctggtggcccaggtgctgctgctgatcagcttcagactggagcccggcaccaccccctgccaggtgatggccgtgctgctgcactacttcttcctgagcgccttcgcctggatgctggtggagggcctgcacctgtacagcatggtgatcaaggtgttcggcagcgaggacagcaagcacagatactactacggcatgggctggggcttccccctgctgatctgcatcatcagcctgagcttcgccatggacagctacggcaccagcaacaactgctggctgagcctggccagcggcgccatctgggccttcgtggcccccgccctgttcgtgatcgtggtgaacatcggcatcctgatcgccgtgaccagagtgatcagccagatcagcgccgacaactacaagatccacggcgaccccagcgccttcaagctgaccgccaaggccgtggccgtgctgctgcccatcctgggcaccagctgggtgttcggcgtgctggccgtgaacggctgcgccgtggtgttccagtacatgttcgccaccctgaacagcctgcagggcctgttcatcttcctgttccactgcctgctgaacagcgaggtgagagccgccttcaagcacaagaccaaggtgtggagcctgaccagcagcagcgccagaaccagcaacgccaagcccttccacagcgacctgatgaacggcaccagacccggcatggccagcaccaagctgagcccctgggacaagagcagccacagcgcccacagagtggacctgagcgccgtgtag

SEQ ID NO: 82390 - DNA, 687 bp, synthetic construct
  misc_feature 1..687: note = Description of Artificial Sequence: Synthetic coding sequence
  source 1..687: mol_type = other DNA
tgacacggcgtgagcgccagagacgtgctggagagcagaaccagaaagcagcacagcgaggccaccaacagcagcaacagagtgttcgtgtactgcgccttcctggacttcagcagcggcgagggcgtgtggagcaaccacggctgcgccctgaccagaggcaacctgacctacagcgtgtgcagatgcacccacctgaccaacttcgccatcctgatgcaggtggtgcccctggaggtgaacatcggcatcctgatcgccgtgaccagagtgatcagccagatcagcgccgacaactacaagatccacggcgaccccagcgccttcaagctgaccgccaaggccgtggccgtgctgctgcccatcctgggcaccagctgggtgttcggcgtgctggccgtgaacggctgcgccgtggtgttccagtacatgttcgccaccctgaacagcctgcagggcctgttcatcttcctgttccactgcctgctgaacagcgaggtgagagccgccttcaagcacaagaccaaggtgtggagcctgaccagcagcagcgccagaaccagcaacgccaagcccttccacagcgacctgatgaacggcaccagacccggcatggccagcaccaagctgagcccctgggacaagagcagccacagcgcccacagagtggacctgagcgccgtgtag

SEQ ID NO: 82391 - DNA, 2721 bp, synthetic construct
  misc_feature 1..2721: note = Description of Artificial Sequence: Synthetic coding sequence
  source 1..2721: mol_type = other DNA
atggagaagctgctgagactgtgctgctggtacagctggctgctgctgttctactacaacttccaggtgagaggcgtgtacagcagaagccaggaccaccccggcttccaggtgctggccagcgccagccactactggcccctggagaacgtggacggcatccacgagctgcaggacaccaccggcgccagcagaacccacaagctgaccgtgctgcccagcagaaacgccaccttcgtgtacagcaacgacagcgcctacagcaacctgagcgccaccgtggacatcgtggagggcaaggtgaacaagggcatctacctgaaggaggagaagggcgtgaccctgctgtactacggcagatacaacagcagctgcatcagcaagcccgagcagtgcggccccgagggcgtgaccttcagcttcttctggaagacccagggcgagcagagcagacccatccccagcgcctacggcggccaggtgatcagcaacggcttcaaggtgtgcagcagcggcggcagaggcagcgtggagctgtacaccagagacaacagcatgacctgggaggccagcttcagcccccccggcccctactggacccacgtgctgttcacctggaagagcaaggagggcctgaaggtgtacgtgaacggcaccctgagcaccagcgaccccagcggcaaggtgagcagagactacggcgagagcaacgtgaacctggtgatcggcagcgagcaggaccaggccaagtgctacgagaacggcgccttcgacgagttcatcatctgggagagagccctgacccccgacgagatcgccatgtacttcaccgccgccatcggcaagcacgccctgctgagcagcaccctgcccagcctgttcatgaccagcaccgccagccccgtgatgcccaccgacgcctaccaccccatcatcaccaacctgaccgaggagagaaagaccttccagagccccggcgtgatcctgagctacctgcagaacgtgagcctgagcctgcccagcaagagcctgagcgagcagaccgccctgaacctgaccaagaccttcctgaaggccgtgggcgagatcctgctgctgcccggctggatcgccctgagcgaggacagcgccgtggtgctgagcctgatcgacaccatcgacaccgtgatgggccacgtgagcagcaacctgcacggcagcaccccccaggtgaccgtggagggcagcagcgccatggccgagttcagcgtggccaagatcctgcccaagaccgtgaacagcagccactacagattccccgcccacggccagagcttcatccagatcccccacgaggccttccacagacacgcctggagcaccgtggtgggcctgctgtaccacagcatgcactactacctgaacaacatctggcccgcccacaccaagatcgccgaggccatgcaccaccaggactgcctgctgttcgccaccagccacctgatcagcctggaggtgagccccccccccaccctgagccagaacctgagcggcagccccctgatcaccgtgcacctgaagcacagactgaccagaaagcagcacagcgaggccaccaacagcagcaacagagtgttcgtgtactgcgccttcctggacttcagcagcggcgagggcgtgtggagcaaccacggctgcgccctgaccagaggcaacctgacctacagcgtgtgcagatgcacccacctgaccaacttcgccatcctgatgcaggtggtgcccctggagctggccagaggccaccaggtggccctgagcagcatcagctacgtgggctgcagcctgagcgtgctgtgcctggtggccaccctggtgaccttcgccgtgctgagcagcgtgagcaccatcagaaaccagagataccacatccacgccaacctgagcttcgccgtgctggtggcccaggtgctgctgctgatcagcttcagactggagcccggcaccaccccctgccaggtgatggccgtgctgctgcactacttcttcctgagcgccttcgcctggatgctggtggagggcctgcacctgtacagcatggtgatcaaggtgttcggcagcgaggacagcaagcacagatactactacggcatgggctggggcttccccctgctgatctgcatcatcagcctgagcttcgccatggacagctacggcaccagcaacaactgctggctgagcctggccagcggcgccatctgggccttcgtggcccccgccctgttcgtgatcgtggtgaacatcggcatcctgatcgccgtgaccagagtgatcagccagatcagcgccgacaactacaagatccacggcgaccccagcgccttcaagctgaccgccaaggccgtggccgtgctgctgcccatcctgggcaccagctgggtgttcggcgtgctggccgtgaacggctgcgccgtggtgttccagtacatgttcgccaccctgaacagcctgcagggcctgttcatcttcctgttccactgcctgctgaacagcgaggtgagagccgccttcaagcacaagaccaaggtgtggagcctgaccagcagcagcgccagaaccagcaacgccaagcccttccacagcgacctgatgaacggcaccagacccggcatggccagcaccaagctgagcccctgggacaagagcagccacagcgcccacagagtggacctgagcgccgtgtag

SEQ ID NO: 82392 - DNA, 1275 bp, synthetic construct
  misc_feature 1..1275: note = Description of Artificial Sequence: Synthetic coding sequence
  source 1..1275: mol_type = other DNA
atgacccaggccggcagaagaggccccggcacccccgagcccagacccagaacccagcccatggccagccccagactgggcaccttctgctgccccaccagagacgccgccacccagctggtgctgagcttccagcccagagccttccacgccctgtgcctgggcagcggcggcctgagactggccctgggcctgctgcagctgctgcccggcagaagacccgccggccccggcagccccgccaccagcccccccgccagcgtgagaatcctgagagccgccgccgcctgcgacctgctgggctgcctgggcatggtgatcagaagcaccgtgtggctgggcttccccaacttcgtggacagcgtgagcgacatgaaccacaccgagatctggcccgccgccttctgcgtgggcagcgccatgtggatccagctgctgtacagcgcctgcttctggtggctgttctgctacgccgtggacgcctacctggtgatcagaagaagcgccggcctgagcaccatcctgctgtaccacatcatggcctggggcctggccaccctgctgtgcgtggagggcgccgccatgctgtactaccccagcgtgagcagatgcgagagaggcctggaccacgccatcccccactacgtgaccatgtacctgcccctgctgctggtgctggtggccaaccccatcctgttccagaagaccgtgaccgccgtggccagcctgctgaagggcagacagggcatctacaccgagaacgagagaagaatgggcgccgtgatcaagatcagattcttcaagatcatgctggtgctgatcatctgctggctgagcaacatcatcaacgagagcctgctgttctacctggagatgcagaccgacatcaacggcggcagcctgaagcccgtgagaaccgccgccaagaccacctggttcatcatgggcatcctgaaccccgcccagggcttcctgctgagcctggccttctacggctggaccggctgcagcctgggcttccagagccccagaaaggagatccagtgggagagcctgaccaccagcgccgccgagggcgcccaccccagccccctgatgccccacgagaaccccgccagcggcaaggtgagccaggtgggcggccagaccagcgacgaggccctgagcatgctgagcgagggcagcgacgccagcaccatcgagatccacaccgccagcgagagctgcaacaagaacgagggcgaccccgccctgcccacccacggcgacctgtag

SEQ ID NO: 82393 - DNA, 516 bp, synthetic construct
  misc_feature 1..516: note = Description of Artificial Sequence: Synthetic coding sequence
  source 1..516: mol_type = other DNA
atggtgatcagaagcaccgtgtggctgggcttccccaacttcgtggacagcgtgagcgacatgaaccacaccgagatctggcccgccgccttctgcgtgggcagcgccatgtggatccagctgctgtacagcgcctgcttctggtggctgttctgctacgccgtggacgcctacctggtgatcagaagaagcgccggcctgagcaccatcctgctgtaccacatcatggcctggggcctggccaccctgctgtgcgtggagggcgccgccatgctgtactaccccagcgtgagcagatgcgagagaggcctggaccacgccatcccccactacgtgaccatgtacctgcccctgctgctggtgctggtggccaaccccatcctgttccagaagaccgtgaccgccgtggccagcctgctgaagggcagacagggcatctacaccgagaacgagagaagaatgggcgccgtgatcaagatcagattcttcaagatcatgctggtgctgatcatctag

SEQ ID NO: 82394 - DNA, 864 bp, synthetic construct
  misc_feature 1..864: note = Description of Artificial Sequence: Synthetic coding sequence
  source 1..864: mol_type = other DNA
tgaaccgccggccccgtgaccggcagcgccagcagaggccccgccagaggccccaagggcatggtgatcagaagcaccgtgtggctgggcttccccaacttcgtggacagcgtgagcgacatgaaccacaccgagatctggcccgccgccttctgcgtgggcagcgccatgtggatccagctgctgtacagcgcctgcttctggtggctgttctgctacgccgtggacgcctacctggtgatcagaagaagcgccggcctgagcaccatcctgctgtaccacatcatggcctggggcctggccaccctgctgtgcgtggagggcgccgccatgctgtactaccccagcgtgagcagatgcgagagaggcctggaccacgccatcccccactacgtgaccatgtacctgcccctgctgctggtgctggtggccaaccccatcctgttccagaagaccgtgaccgccgtggccagcctgctgaagggcagacagggcatctacaccgagaacgagagaagaatgggcgccgtgatcaagatcagattcttcaagatcatgctggtgctgatcatctgctggctgagcaacatcatcaacgagagcctgctgttctacctggagatgcagaccgacatcaacggcggcagcctgaagcccgtgagaaccgccgccaagaccacctggttcatcatgggcatcctgaaccccgcccagggcttcctgctgagcctggccttctacggctggaccggctgcagcctgggcttccagagccccagaaaggagatccagtgggagagcctgaccaccagcgccgccgagggcgcccaccccagccccctgatgccccacgagaacccctag

SEQ ID NO: 82395 - DNA, 1215 bp, synthetic construct
  misc_feature 1..1215: note = Description of Artificial Sequence: Synthetic coding sequence
  source 1..1215: mol_type = other DNA
atggccagccccagactgggcaccttctgctgccccaccagagacgccgccacccagctggtgctgagcttccagcccagagccttccacgccctgtgcctgggcagcggcggcctgagactggccctgggcctgctgcagctgctgcccggcagaagacccgccggccccggcagccccgccaccagcccccccgccagcgtgagaatcctgagagccgccgccgcctgcgacctgctgggctgcctgggcatggtgatcagaagcaccgtgtggctgggcttccccaacttcgtggacagcgtgagcgacatgaaccacaccgagatctggcccgccgccttctgcgtgggcagcgccatgtggatccagctgctgtacagcgcctgcttctggtggctgttctgctacgccgtggacgcctacctggtgatcagaagaagcgccggcctgagcaccatcctgctgtaccacatcatggcctggggcctggccaccctgctgtgcgtggagggcgccgccatgctgtactaccccagcgtgagcagatgcgagagaggcctggaccacgccatcccccactacgtgaccatgtacctgcccctgctgctggtgctggtggccaaccccatcctgttccagaagaccgtgaccgccgtggccagcctgctgaagggcagacagggcatctacaccgagaacgagagaagaatgggcgccgtgatcaagatcagattcttcaagatcatgctggtgctgatcatctgctggctgagcaacatcatcaacgagagcctgctgttctacctggagatgcagaccgacatcaacggcggcagcctgaagcccgtgagaaccgccgccaagaccacctggttcatcatgggcatcctgaaccccgcccagggcttcctgctgagcctggccttctacggctggaccggctgcagcctgggcttccagagccccagaaaggagatccagtgggagagcctgaccaccagcgccgccgagggcgcccaccccagccccctgatgccccacgagaaccccgccagcggcaaggtgagccaggtgggcggccagaccagcgacgaggccctgagcatgctgagcgagggcagcgacgccagcaccatcgagatccacaccgccagcgagagctgcaacaagaacgagggcgaccccgccctgcccacccacggcgacctgtag

SEQ ID NO: 82396 - DNA, 1083 bp, synthetic construct
  misc_feature 1..1083: note = Description of Artificial Sequence: Synthetic coding sequence
  source 1..1083: mol_type = other DNA
atggaccccgaggagaccagcgtgtacctggactactactacgccaccagccccaacagcgacatcagagagacccacagccacgtgccctacaccagcgtgttcctgcccgtgttctacaccgccgtgttcctgaccggcgtgctgggcaacctggtgctgatgggcgccctgcacttcaagcccggcagcagaagactgatcgacatcttcatcatcaacctggccgccagcgacttcatcttcctggtgaccctgcccctgtgggtggacaaggaggccagcctgggcctgtggagaaccggcagcttcctgtgcaagggcagcagctacatgatcagcgtgaacatgcactgcagcgtgctgctgctgacctgcatgagcgtggacagatacctggccatcgtgtggcccgtggtgagcagaaagttcagaagaaccgactgcgcctacgtggtgtgcgccagcatctggttcatcagctgcctgctgggcctgcccaccctgctgagcagagagctgaccctgatcgacgacaagccctactgcgccgagaagaaggccacccccatcaagctgatctggagcctggtggccctgatcttcaccttcttcgtgcccctgctgagcatcgtgacctgctactgctgcatcgccagaaagctgtgcgcccactaccagcagagcggcaagcacaacaagaagctgaagaagagcatcaagatcatcttcatcgtggtggccgccttcctggtgagctggctgcccttcaacaccttcaagttcctggccatcgtgagcggcctgagacaggagcactacctgcccagcgccatcctgcagctgggcatggaggtgagcggccccctggccttcgccaacagctgcgtgaaccccttcatctactacatcttcgacagctacatcagaagagccatcgtgcactgcctgtgcccctgcctgaagaactacgacttcggcagcagcaccgagaccagcgacagccacctgaccaaggccctgagcaccttcatccacgccgaggacttcgccagaagaagaaagagaagcgtgagcctgtag

SEQ ID NO: 82397 - DNA, 1830 bp, synthetic construct
  misc_feature 1..1830: note = Description of Artificial Sequence: Synthetic coding sequence
  source 1..1830: mol_type = other DNA
atgagcgacgagagaagactgcccggcagcgccgtgggctggctggtgtgcggcggcctgagcctgctggccaacgcctggggcatcctgagcgtgggcgccaagcagaagaagtggaagcccctggagttcctgctgtgcaccctggccgccacccacatgctgaacgtggccgtgcccatcgccacctacagcgtggtgcagctgagaagacagagacccgacttcgagtggaacgagggcctgtgcaaggtgttcgtgagcaccttctacaccctgaccctggccacctgcttcagcgtgaccagcctgagctaccacagaatgtggatggtgtgctggcccgtgaactacagactgagcaacgccaagaagcaggccgtgcacaccgtgatgggcatctggatggtgagcttcatcctgagcgccctgcccgccgtgggctggcacgacaccagcgagagattctacacccacggctgcagattcatcgtggccgagatcggcctgggcttcggcgtgtgcttcctgctgctggtgggcggcagcgtggccatgggcgtgatctgcaccgccatcgccctgttccagaccctggccgtgcaggtgggcagacaggccgacagaagagccttcaccgtgcccaccatcgtggtggaggacgcccagggcaagagaagaagcagcatcgacggcagcgagcccgccaagaccagcctgcagaccaccggcctggtgaccaccatcgtgttcatctacgactgcctgatgggcttccccgtgctggtggtgagcttcagcagcctgagagccgacgccagcgccccctggatggccctgtgcgtgctgtggtgcagcgtggcccaggccctgctgctgcccgtgttcctgtgggcctgcgacagatacagagccgacctgaaggccgtgagagagaagtgcatggccctgatggccaacgacgaggagagcgacgacgagaccagcctggagggcggcatcagccccgacctggtgctggagagaagcctggactacggctacggcggcgacttcgtggccctggacagaatggccaagtacgagatcagcgccctggagggcggcctgccccagctgtaccccctgagacccctgcaggaggacaagatgcagtacctgcaggtgccccccaccagaagattcagccacgacgacgccgacgtgtgggccgccgtgcccctgcccgccttcctgcccagatggggcagcggcgaggacctggccgccctggcccacctggtgctgcccgccggccccgagagaagaagagccagcctgctggccttcgccgaggacgccccccccagcagagccagaagaagaagcgccgagagcctgctgagcctgagacccagcgccctggacagcggccccagaggcgccagagacagcccccccggcagccccagaagaagacccggccccggccccagaagcgccagcgccagcctgctgcccgacgccttcgccctgaccgccttcgagtgcgagccccaggccctgagaagaccccccggccccttccccgccgcccccgccgcccccgacggcgccgaccccggcgaggcccccaccccccccagcagcgcccagagaagccccggccccagacccagcgcccacagccacgccggcagcctgagacccggcctgagcgccagctggggcgagcccggcggcctgagagccgccggcggcggcggcagcaccagcagcttcctgagcagccccagcgagagcagcggctacgccaccctgcacagcgacagcctgggcagcgccagctag

SEQ ID NO: 82398 - DNA, 2445 bp, synthetic construct
  misc_feature 1..2445: note = Description of Artificial Sequence: Synthetic coding sequence
  source 1..2445: mol_type = other DNA
atggagcccgagatcaactgcagcgagctgtgcgacagcttccccggccaggagctggacagaagacccctgcacgacctgtgcaagaccaccatcaccagcagccaccacagcagcaagaccatcagcagcctgagccccgtgctgctgggcatcgtgtggaccttcctgagctgcggcctgctgctgatcctgttcttcctggccttcaccatccactgcagaaagaacagaatcgtgaagatgagcagccccaacctgaacatcgtgaccctgctgggcagctgcctgacctacagcagcgcctacctgttcggcatccaggacgtgctggtgggcagcagcatggagaccctgatccagaccagactgagcatgctgtgcatcggcaccagcctggtgttcggccccatcctgggcaagagctggagactgtacaaggtgttcacccagagagtgcccgacaagagagtgatcatcaaggacctgcagctgctgggcctggtggccgccctgctgatggccgacgtgatcctgctgatgacctgggtgctgaccgaccccatccagtgcctgcagatcctgagcgtgagcatgaccgtgaccggcaaggacgtgagctgcaccagcaccagcacccacttctgcgccagcagatacagcgacgtgtggatcgccctgatctggggctgcaagggcctgctgctgctgtacggcgcctacctggccggcctgaccggccacgtgagcagcccccccgtgaaccagagcctgaccatcatggtgggcgtgaacctgctggtgctggccgccggcctgctgttcgtggtgaccagatacctgcacagctggcccaacctggtgttcggcctgaccagcggcggcatcttcgtgtgcaccaccaccatcaactgcttcatcttcatcccccagctgaagcagtggaaggccttcgaggaggagaaccagaccatcagaagaatggccaagtacttcagcacccccaacaagagcttccacacccagtacggcgaggaggagaactgccaccccagaggcgagaagagcagcatggagagactgctgaccgagaagaacgccgtgatcgagagcctgcaggagcaggtgaacaacgccaaggagaagatcgtgagactgatgagcgccgagtgcacctacgacctgcccgagggcgccgccccccccgccagcagccccaacaaggacgtgcaggccgtggccagcgtgcacaccctggccgccgcccagggccccagcggccacctgagcgacttccagaacgaccccggcatggccgccagagacagccagtgcaccagcggccccagcagctacgcccagagcctggagggccccggcaaggacagcagcttcagccccggcaaggaggagaagatcagcgacagcaaggacttcagcgaccacctggacagcggctgcagccagaagccctggaccgagcagagcctgggccccgagagaggcgaccaggtgcccatgaaccccagccagagcctgctgcccgagagaggcggcagcgacccccagagacagagacacctggagaacagcgaggagccccccgagagaagaagcagagtgagcagcgtgatcagagagaagctgcaggaggtgctgcaggacctgggcctgggccccgaggccagcctgagcaccgcccccagctgccaccagcagacctggaagaacagcgccgccttcagcccccagaagatgcccctgagcaaggagctgggcttcagcccctacatggtgagaagaagaagagccgcccagagagccagaagccacttccccggcagcgcccccagcagcgtgggccacagagccaacagaaccgtgcccggcgcccacagcagactgcacgtgcagaacggcgacagccccagcctggccccccagaccaccgacagcagagtgagaagacccagcagcagaaagcccagcctgcccagcgacccccaggacagacccggcaccctggagggcagcaagcagagccagaccgagcccgagggcgccagaggcagcaaggccgccttcctgagacagcccagcggcagcggcagagcccccagccccgccgccccctgcctgagcaaggccagccccgacctgcccgagcagtggcagctgtggccccccgtgcccagcggctgcgccagcctgagcagccagcacagctacttcgacaccgagagcagcagcagcgacgagttcttctgcagatgccacagaccctactgcgagatctgcttccagagcagcagcgacagcagcgacagcggcaccagcgacaccgaccccgagcccaccggcggcctggccagctgggagaagctgtgggccagaagcaagcccatcgtgaacttcaaggacgacctgaagcccaccctggtgtag

SEQ ID NO: 82399 - DNA, 2445 bp, synthetic construct; identical to SEQ ID NO: 82398
  misc_feature 1..2445: note = Description of Artificial Sequence: Synthetic coding sequence
  source 1..2445: mol_type = other DNA

SEQ ID NO: 82400 - DNA, 2433 bp, synthetic construct
  misc_feature 1..2433: note = Description of Artificial Sequence: Synthetic coding sequence
  source 1..2433: mol_type = other DNA
atggagcccgagatcaactgcagcgagctgtgcgacagcttccccggccaggagctggacagaagacccctgcacgacctgtgcaagaccaccatcaccagcagccaccacagcagcaagaccatcagcagcctgagccccgtgctgctgggcatcgtgtggaccttcctgagctgcggcctgctgctgatcctgttcttcctggccttcaccatccactgcagaaagaacagaatcgtgaagatgagcagccccaacctgaacatcgtgaccctgctgggcagctgcctgacctacagcagcgcctacctgttcggcatccaggacgtgctggtgggcagcagcatggagaccctgatccagaccagactgagcatgctgtgcatcggcaccagcctggtgttcggccccatcctgggcaagagctggagactgtacaaggtgttcacccagagagtgcccgacaagagagtgatcatcaaggacctgcagctgctgggcctggtggccgccctgctgatggccgacgtgatcctgctgatgacctgggtgctgaccgaccccatccagtgcctgcagatcctgagcgtgaccggcaaggacgtgagctgcaccagcaccagcacccacttctgcgccagcagatacagcgacgtgtggatcgccctgatctggggctgcaagggcctgctgctgctgtacggcgcctacctggccggcctgaccggccacgtgagcagcccccccgtgaaccagagcctgaccatcatggtgggcgtgaacctgctggtgctggccgccggcctgctgttcgtggtgaccagatacctgcacagctggcccaacctggtgttcggcctgaccagcggcggcatcttcgtgtgcaccaccaccatcaactgcttcatcttcatcccccagctgaagcagtggaaggccttcgaggaggagaaccagaccatcagaagaatggccaagtacttcagcacccccaacaagagcttccacacccagtacggcgaggaggagaactgccaccccagaggcgagaagagcagcatggagagactgctgaccgagaagaacgccgtgatcgagagcctgcaggagcaggtgaacaacgccaaggagaagatcgtgagactgatgagcgccgagtgcacctacgacctgcccgagggcgccgccccccccgccagcagccccaacaaggacgtgcaggccgtggccagcgtgcacaccctggccgccgcccagggccccagcggccacctgagcgacttccagaacgaccccggcatggccgccagagacagccagtgcaccagcggccccagcagctacgcccagagcctggagggccccggcaaggacagcagcttcagccccggcaaggaggagaagatcagcgacagcaaggacttcagcgaccacctggacagcggctgcagccagaagccctggaccgagcagagcctgggccccgagagaggcgaccaggtgcccatgaaccccagccagagcctgctgcccgagagaggcggcagcgacccccagagacagagacacctggagaacagcgaggagccccccgagagaagaagcagagtgagcagcgtgatcagagagaagctgcaggaggtgctgcaggacctgggcctgggccccgaggccagcctgagcaccgcccccagctgccaccagcagacctggaagaacagcgccgccttcagcccccagaagatgcccctgagcaaggagctgggcttcagcccctacatggtgagaagaagaagagccgcccagagagccagaagccacttccccggcagcgcccccagcagcgtgggccacagagccaacagaaccgtgcccggcgcccacagcagactgcacgtgcagaacggcgacagccccagcctggccccccagaccaccgacagcagagtgagaagacccagcagcagaaagcccagcctgcccagcgacccccaggacagacccggcaccctggagggcagcaagcagagccagaccgagcccgagggcgccagaggcagcaaggccgccttcctgagacagcccagcggcagcggcagagcccccagccccgccgccccctgcctgagcaaggccagccccgacctgcccgagcagtggcagctgtggccccccgtgcccagcggctgcgccagcctgagcagccagcacagctacttcgacaccgagagcagcagcagcgacgagttcttctgcagatgccacagaccctactgcgagatctgcttccagagcagcagcgacagcagcgacagcggcaccagcgacaccgaccccgagcccaccggcggcctggccagctgggagaagctgtgggccagaagcaagcccatcgtgaacttcaaggacgacctgaagcccaccctggtgtag

SEQ ID NO: 82401 - DNA, 1590 bp, synthetic construct
  misc_feature 1..1590: note = Description of Artificial Sequence: Synthetic coding sequence
  source 1..1590: mol_type = other DNA
atgagcctgaacagcagcctgagctgcagaaaggagctgagcaacctgaccgaggaggagggcggcgagggcggcgtgatcatcacccagttcatcgccatcatcgtgatcaccatcttcgtgtgcctgggcaacctggtgatcgtggtgaccctgtacaagaagagctacctgctgaccctgagcaacaagttcgtgttcagcctgaccctgagcaacttcctgctgagcgtgctggtgctgcccttcgtggtgaccagcagcatcagaagagagtggatcttcggcgtggtgtggtgcaacttcagcgccctgctgtacctgctgatcagcagcgccagcatgctgaccctgggcgtgatcgccatcgacagatactacgccgtgctgtaccccatggtgtaccccatgaagatcaccggcaacagagccgtgatggccctggtgtacatctggctgcacagcctgatcggctgcctgccccccctgttcggctggagcagcgtggagttcgacgagttcaagtggatgtgcgtggccgcctggcacagagagcccggctacaccgccttctggcagatctggtgcgccctgttccccttcctggtgatgctggtgtgctacggcttcatcttcagagtggccagagtgaaggccagaaaggtgcactgcggcaccgtggtgatcgtggaggaggacgcccagagaaccggcagaaagaacagcagcaccagcaccagcagcagcggcagcagaagaaacgccttccagggcgtggtgtacagcgccaaccagtgcaaggccctgatcaccatcctggtggtgctgggcgccttcatggtgacctggggcccctacatggtggtgatcgccagcgaggccctgtggggcaagagcagcgtgagccccagcctggagacctgggccacctggctgagcttcgccagcgccgtgtgccaccccctgatctacggcctgtggaacaagaccgtgagaaaggagctgctgggcatgtgcttcggcgacagatactacagagagcccttcgtgcagagacagagaaccagcagactgttcagcatcagcaacagaatcaccgacctgggcctgagcccccacctgaccgccctgatggccggcggccagcccctgggccacagcagcagcaccggcgacaccggcttcagctgcagccaggacagcggcaccgacatgatgctgctggaggactacaccagcgacgacaacccccccagccactgcacctgcccccccaagagaagaagcagcgtgaccttcgaggacgaggtggagcagatcaaggaggccgccaagaacagcatcctgcacgtgaaggccgaggtgcacaagagcctggacagctacgccgccagcctggccaaggccatcgaggccgaggccaagatcaacctgttcggcgaggaggccctgcccggcgtgctggtgaccgccagaaccgtgcccggcggcggcttcggcggcagaagaggcagcagaaccctggtgagccagagactgcagctgcagagcatcgaggagggcgacgtgctggccgccgagcagagatag

SEQ ID NO: 82402 - DNA, 1590 bp, synthetic construct; identical to SEQ ID NO: 82401
  misc_feature 1..1590: note = Description of Artificial Sequence: Synthetic coding sequence
  source 1..1590: mol_type = other DNA

SEQ ID NO: 82403 - DNA, 1590 bp, synthetic construct; identical to SEQ ID NO: 82401
  misc_feature 1..1590: note = Description of Artificial Sequence: Synthetic coding sequence
  source 1..1590: mol_type = other DNA

SEQ ID NO: 82404 - DNA, 1590 bp, synthetic construct; identical to SEQ ID NO: 82401
  misc_feature 1..1590: note = Description of Artificial Sequence: Synthetic coding sequence
  source 1..1590: mol_type = other DNA

SEQ ID NO: 82405 - DNA, 1650 bp, synthetic construct
  misc_feature 1..1650: note = Description of Artificial Sequence: Synthetic coding sequence
  source 1..1650: mol_type = other DNA
atgagcgccagaggcgtggtgcagcacgccctgcccacccccagaagaggcgccctgaccatgagcctgaacagcagcctgagctgcagaaaggagctgagcaacctgaccgaggaggagggcggcgagggcggcgtgatcatcacccagttcatcgccatcatcgtgatcaccatcttcgtgtgcctgggcaacctggtgatcgtggtgaccctgtacaagaagagctacctgctgaccctgagcaacaagttcgtgttcagcctgaccctgagcaacttcctgctgagcgtgctggtgctgcccttcgtggtgaccagcagcatcagaagagagtggatcttcggcgtggtgtggtgcaacttcagcgccctgctgtacctgctgatcagcagcgccagcatgctgaccctgggcgtgatcgccatcgacagatactacgccgtgctgtaccccatggtgtaccccatgaagatcaccggcaacagagccgtgatggccctggtgtacatctggctgcacagcctgatcggctgcctgccccccctgttcggctggagcagcgtggagttcgacgagttcaagtggatgtgcgtggccgcctggcacagagagcccggctacaccgccttctggcagatctggtgcgccctgttccccttcctggtgatgctggtgtgctacggcttcatcttcagagtggccagagtgaaggccagaaaggtgcactgcggcaccgtggtgatcgtggaggaggacgcccagagaaccggcagaaagaacagcagcaccagcaccagcagcagcggcagcagaagaaacgccttccagggcgtggtgtacagcgccaaccagtgcaaggccctgatcaccatcctggtggtgctgggcgccttcatggtgacctggggcccctacatggtggtgatcgccagcgaggccctgtggggcaagagcagcgtgagccccagcctggagacctgggccacctggctgagcttcgccagcgccgtgtgccaccccctgatctacggcctgtggaacaagaccgtgagaaaggagctgctgggcatgtgcttcggcgacagatactacagagagcccttcgtgcagagacagagaaccagcagactgttcagcatcagcaacagaatcaccgacctgggcctgagcccccacctgaccgccctgatggccggcggccagcccctgggccacagcagcagcaccggcgacaccggcttcagctgcagccaggacagcggcaccgacatgatgctgctggaggactacaccagcgacgacaacccccccagccactgcacctgcccccccaagagaagaagcagcgtgaccttcgaggacgaggtggagcagatcaaggaggccgccaagaacagcatcctgcacgtgaaggccgaggtgcacaagagcctggacagctacgccgccagcctggccaaggccatcgaggccgaggccaagatcaacctgttcggcgaggaggccctgcccggcgtgctggtgaccgccagaaccgtgcccggcggcggcttcggcggcagaagaggcagcagaaccctggtgagccagagactgcagctgcagagcatcgaggagggcgacgtgctggccgccgagcagagatag

SEQ ID NO: 82406 - DNA, 1356 bp, synthetic construct
  misc_feature 1..1356: note = Description of Artificial Sequence: Synthetic coding sequence
  source 1..1356: mol_type = other DNA
atgggcggcagaagatgcgtgcccggcaccctgcccatgagagccgccccccccggcgccaagagactgcacgtgcccctgagagccaagggcgtgggcagaagcggccacgcccccagactggagagcgtgagaaccagctactacgccgtgctgtaccccatggtgtaccccatgaagatcaccggcaacagagccgtgatggccctggtgtacatctggctgcacagcctgatcggctgcctgccccccctgttcggctggagcagcgtggagttcgacgagttcaagtggatgtgcgtggccgcctggcacagagagcccggctacaccgccttctggcagatctggtgcgccctgttccccttcctggtgatgctggtgtgctacggcttcatcttcagagtggccagagtgaaggccagaaaggtgcactgcggcaccgtggtgatcgtggaggaggacgcccagagaaccggcagaaagaacagcagcaccagcaccagcagcagcggcagcagaagaaacgccttccagggcgtggtgtacagcgccaaccagtgcaaggccctgatcaccatcctggtggtgctgggcgccttcatggtgacctggggcccctacatggtggtgatcgccagcgaggccctgtggggcaagagcagcgtgagccccagcctggagacctgggccacctggctgagcttcgccagcgccgtgtgccaccccctgatctacggcctgtggaacaagaccgtgagaaaggagctgctgggcatgtgcttcggcgacagatactacagagagcccttcgtgcagagacagagaaccagcagactgttcagcatcagcaacagaatcaccgacctgggcctgagcccccacctgaccgccctgatggccggcggccagcccctgggccacagcagcagcaccggcgacaccggcttcagctgcagccaggacagcggcaccgacatgatgctgctggaggactacaccagcgacgacaacccccccagccactgcacctgcccccccaagagaagaagcagcgtgaccttcgaggacgaggtggagcagatcaaggaggccgccaagaacagcatcctgcacgtgaaggccgaggtgcacaagagcctggacagctacgccgccagcctggccaaggccatcgaggccgaggccaagatcaacctgttcggcgaggaggccctgcccggcgtgctggtgaccgccagaaccgtgcccggcggcggcttcggcggcagaagaggcagcagaaccctggtgagccagagactgcagctgcagagcatcgaggagggcgacgtgctggccgccgagcagagatag

SEQ ID NO: 82407 - DNA, 1248 bp, synthetic construct
  misc_feature 1..1248: note = Description of Artificial Sequence: Synthetic coding sequence
  source 1..1248: mol_type = other DNA
atgctggtgcccgtgggctggatgaacgagagctactacgccgtgctgtaccccatggtgtaccccatgaagatcaccggcaacagagccgtgatggccctggtgtacatctggctgcacagcctgatcggctgcctgccccccctgttcggctggagcagcgtggagttcgacgagttcaagtggatgtgcgtggccgcctggcacagagagcccggctacaccgccttctggcagatctggtgcgccctgttccccttcctggtgatgctggtgtgctacggcttcatcttcagagtggccagagtgaaggccagaaaggtgcactgcggcaccgtggtgatcgtggaggaggacgcccagagaaccggcagaaagaacagcagcaccagcaccagcagcagcggcagcagaagaaacgccttccagggcgtggtgtacagcgccaaccagtgcaaggccctgatcaccatcctggtggtgctgggcgccttcatggtgacctggggcccctacatggtggtgatcgccagcgaggccctgtggggcaagagcagcgtgagccccagcctggagacctgggccacctggctgagcttcgccagcgccgtgtgccaccccctgatctacggcctgtggaacaagaccgtgagaaaggagctgctgggcatgtgcttcggcgacagatactacagagagcccttcgtgcagagacagagaaccagcagactgttcagcatcagcaacagaatcaccgacctgggcctgagcccccacctgaccgccctgatggccggcggccagcccctgggccacagcagcagcaccggcgacaccggcttcagctgcagccaggacagcggcaccgacatgatgctgctggaggactacaccagcgacgacaacccccccagccactgcacctgcccccccaagagaagaagcagcgtgaccttcgaggacgaggtggagcagatcaaggaggccgccaagaacagcatcctgcacgtgaaggccgaggtgcacaagagcctggacagctacgccgccagcctggccaaggccatcgaggccgaggccaagatcaacctgttcggcgaggaggccctgcccggcgtgctggtgaccgccagaaccgtgcccggcggcggcttcggcggcagaagaggcagcagaaccctggtgagccagagactgcagctgcagagcatcgaggagggcgacgtgctggccgccgagcagagatag

SEQ ID NO: 82408 - DNA, 1104 bp, synthetic construct
  misc_feature 1..1104: note = Description of Artificial Sequence: Synthetic coding sequence
  source 1..1104: mol_type = other DNA
atgagcaagagaagctggtgggccggcagcagaaagccccccagagagatgctgaagctgagcggcagcgacagcagccagagcatgaacggcctggaggtggccccccccggcctgatcaccaacttcagcctggccaccgccgagcagtgcggccaggagacccccctggagaacatgctgttcgccagcttctacctgctggacttcatcctggccctggtgggcaacaccctggccctgtggctgttcatcagagaccacaagagcggcacccccgccaacgtgttcctgatgcacctggccgtggccgacctgagctgcgtgctggtgctgcccaccagactggtgtaccacttcagcggcaaccactggcccttcggcgagatcgcctgcagactgaccggcttcctgttctacctgaacatgtacgccagcatctacttcctgacctgcatcagcgccgacagattcctggccatcgtgcaccccgtgaagagcctgaagctgagaagacccctgtacgcccacctggcctgcgccttcctgtgggtggtggtggccgtggccatggcccccctgctggtgagcccccagaccgtgcagaccaaccacaccgtggtgtgcctgcagctgtacagagagaaggccagccaccacgccctggtgagcctggccgtggccttcaccttccccttcatcaccaccgtgacctgctacctgctgatcatcagaagcctgagacagggcctgagagtggagaagagactgaagaccaaggccgtgagaatgatcgccatcgtgctggccatcttcctggtgtgcttcgtgccctaccacgtgaacagaagcgtgtacgtgctgcactacagaagccacggcgccagctgcgccacccagagaatcctggccctggccaacagaatcaccagctgcctgaccagcctgaacggcgccctggaccccatcatgtacttcttcgtggccgagaagttcagacacgccctgtgcaacctgctgtgcggcaagagactgaagggccccccccccagcttcgagggcaagaccaacgagagcagcctgagcgccaagagcgagctgtag

SEQ ID NO: 82409 - DNA, 312 bp, synthetic construct
  misc_feature 1..312: note = Description of Artificial Sequence: Synthetic coding sequence
  source 1..312: mol_type = other DNA
atgaacggcctggaggtggccccccccggcctgatcaccaacttcagcctggccaccgccgagcagtgcggccaggagacccccctggagaacatgctgttcgccagcttctacctgcccctgcccagacagcccagaatgtgcaccgtgaccggcctgaccgccggcagcaccgccagaagcaagcagcacctggaggtggtgttcgccgtgctgcccgccttcaagctgcagagaggcagaagagagagaaccagcaagccccccatcatccccatgagcagccccggcccctgctgggtgagaacctag

SEQ ID NO: 82410 - DNA, 1104 bp, synthetic construct; identical to SEQ ID NO: 82408
  misc_feature 1..1104: note = Description of Artificial Sequence: Synthetic coding sequence
  source 1..1104: mol_type = other DNA

SEQ ID NO: 82411 - DNA, 411 bp, synthetic construct
  misc_feature 1..411: note = Description of Artificial Sequence: Synthetic coding sequence
  source 1..411: mol_type = other DNA
atgagcaagagaagctggtgggccggcagcagaaagccccccagagagatgctgaagctgagcggcagcgacagcagccagagcatgaacggcctggaggtggccccccccggcctgatcaccaacttcagcctggccaccgccgagcagtgcggccaggagacccccctggagaacatgctgttcgccagcttctacctgctggacttcatcctggccctggtgggcaacaccctggccctgtggctgttcatcagagaccacaagagcggcacccccgccaacgtgttcctgatgcacctggccgtggccgacctgagctgcgtgctggtgctgcccaccagactggtgtaccacttcagcggcaaccactggcccttcggcgagatcgcctgcagactgaccggctag

SEQ ID NO: 82412 - DNA, 1104 bp, synthetic construct; identical to SEQ ID NO: 82408
  misc_feature 1..1104: note = Description of Artificial Sequence: Synthetic coding sequence
  source 1..1104: mol_type = other DNA

SEQ ID NO: 82413 - DNA, 1338 bp, synthetic construct
  misc_feature 1..1338: note = Description of Artificial Sequence: Synthetic coding sequence
  source 1..1338: mol_type = other DNA
atggccgcccccacccccgccagacccgtgctgacccacctgctggtggccctgttcggcatgggcagctgggccgccgtgaacggcatctgggtggagctgcccgtggtggtgaaggagctgcccgagggctggagcctgcccagctacgtgagcgtgctggtggccctgggcaacctgggcctgctggtggtgaccctgtggagaagactggcccccggcaaggacgagcaggtgcccatcagagtggtgcaggtgctgggcatggtgggcaccgccctgctggccagcctgtggcaccacgtggcccccgtggccggccagctgcacagcgtggccttcctggccctggccttcgtgctggccctggcctgctgcgccagcaacgtgaccttcctgcccttcctgagccacctgccccccagattcctgagaagcttcttcctgggccagggcctgagcgccctgctgccctgcgtgctggccctggtgcagggcgtgggcagactggagtgcccccccgcccccatcaacggcacccccggcccccccctggacttcctggagagattccccgccagcaccttcttctgggccctgaccgccctgctggtggccagcgccgccgccttccagggcctgctgctgctgctgccccccccccccagcgtgcccaccggcgagctgggcagcggcctgcaggtgggcgcccccggcgccgaggaggaggtggaggagagcagccccctgcaggagccccccagccaggccgccggcaccacccccggccccgaccccaaggcctaccagctgctgagcgccagaagcgcctgcctgctgggcctgctggccgccaccaacgccctgaccaacggcgtgctgcccgccgtgcagagcttcagctgcctgccctacggcagactggcctaccacctggccgtggtgctgggcagcgccgccaaccccctggcctgcttcctggccatgggcgtgctgtgcagaagcctggccggcctgggcggcctgagcctgctgggcgtgttctgcggcggctacctgatggccctggccgtgctgagcccctgcccccccctggtgggcaccagcgccggcgtggtgctggtggtgctgagctgggtgctgtgcctgggcgtgttcagctacgtgaaggtggccgccagcagcctgctgcacggcggcggcagacccgccctgctggccgccggcgtggccatccaggtgggcagcctgctgggcgccgtggccatgttcccccccaccagcatctaccacgtgttccacagcagaaaggactgcgccgacccctgcgacagctag

SEQ ID NO: 82414 - DNA, 1338 bp, synthetic construct; identical to SEQ ID NO: 82413
  misc_feature 1..1338: note = Description of Artificial Sequence: Synthetic coding sequence
  source 1..1338: mol_type = other DNA

SEQ ID NO: 82415 - DNA, 1338 bp, synthetic construct; identical to SEQ ID NO: 82413
  misc_feature 1..1338: note = Description of Artificial Sequence: Synthetic coding sequence
  source 1..1338: mol_type = other DNA

SEQ ID NO: 82416 - DNA, 1338 bp, synthetic construct; identical to SEQ ID NO: 82413
  misc_feature 1..1338: note = Description of Artificial Sequence: Synthetic coding sequence
  source 1..1338: mol_type = other DNA

SEQ ID NO: 82417 - DNA, 1338 bp, synthetic construct; identical to SEQ ID NO: 82413
  misc_feature 1..1338: note = Description of Artificial Sequence: Synthetic coding sequence
  source 1..1338: mol_type = other DNA

SEQ ID NO: 82418 - DNA, 1074 bp, synthetic construct
  misc_feature 1..1074: note = Description of Artificial Sequence: Synthetic coding sequence
  source 1..1074: mol_type = other DNA
atggtgggcaccgccctgctggccagcctgtggcaccacgtggcccccgtggccggccagctgcacagcgtggccttcctggccctggccttcgtgctggccctggcctgctgcgccagcaacgtgaccttcctgcccttcctgagccacctgccccccagattcctgagaagcttcttcctgggccagggcctgagcgccctgctgccctgcgtgctggccctggtgcagggcgtgggcagactggagtgcccccccgcccccatcaacggcacccccggcccccccctggacttcctggagagattccccgccagcaccttcttctgggccctgaccgccctgctggtggccagcgccgccgccttccagggcctgctgctgctgctgccccccccccccagcgtgcccaccggcgagctgggcagcggcctgcaggtgggcgcccccggcgccgaggaggaggtggaggagagcagccccctgcaggagccccccagccaggccgccggcaccacccccggccccgaccccaaggcctaccagctgctgagcgccagaagcgcctgcctgctgggcctgctggccgccaccaacgccctgaccaacggcgtgctgcccgccgtgcagagcttcagctgcctgccctacggcagactggcctaccacctggccgtggtgctgggcagcgccgccaaccccctggcctgcttcctggccatgggcgtgctgtgcagaagcctggccggcctgggcggcctgagcctgctgggcgtgttctgcggcggctacctgatggccctggccgtgctgagcccctgcccccccctggtgggcaccagcgccggcgtggtgctggtggtgctgagctgggtgctgtgcctgggcgtgttcagctacgtgaaggtggccgccagcagcctgctgcacggcggcggcagacccgccctgctggccgccggcgtggccatccaggtgggcagcctgctgggcgccgtggccatgttcccccccaccagcatctaccacgtgttccacagcagaaaggactgcgccgacccctgcgacagctag

SEQ ID NO: 82419 - DNA, 1347 bp, synthetic construct
  misc_feature 1..1347: note = Description of Artificial Sequence: Synthetic coding sequence
  source 1..1347: mol_type = other DNA
atggccgcccccaccctgggcagactggtgctgacccacctgctggtggccctgttcggcatgggcagctgggccgccgtgaacggcatctgggtggagctgcccgtggtggtgaaggacctgcccgagggctggagcctgcccagctacctgagcgtggtggtggccctgggcaacctgggcctgctggtggtgaccctgtggagacagctggcccccggcaagggcgagcaggtgcccatccaggtggtgcaggtgctgagcgtggtgggcaccgccctgctggcccccctgtggcaccacgtggcccccgtggccggccagctgcacagcgtggccttcctgaccctggccctggtgctggccatggcctgctgcaccagcaacgtgaccttcctgcccttcctgagccacctgcccccccccttcctgagaagcttcttcctgggccagggcctgagcgccctgctgccctgcgtgctggccctggtgcagggcgtgggcagactggagtgcccccccgcccccaccaacggcaccagcggcccccccctggacttccccgagagattccccgccagcaccttcttctgggccctgaccgccctgctggtgaccagcgccgccgccttcagaggcctgctgctgctgctgcccagcctgcccagcgtgaccaccggcggcagcggccccgagctgcagctgggcagccccggcgccgaggaggaggagaaggaggaggaggaggccctgcccctgcaggagccccccagccaggccgccggcaccatccccggccccgaccccgaggcccaccagctgttcagcgcccacggcgccttcctgctgggcctgatggccttcaccagcgccgtgaccaacggcgtgctgcccagcgtgcagagcttcagctgcctgccctacggcagactggcctaccacctggccgtggtgctgggcagcgccgccaaccccctggcctgcttcctggccatgggcgtgctgtgcagaagcctggccggcctggtgggcctgagcctgctgggcatgctgttcggcgcctacctgatggccctggccatcctgagcccctgcccccccctggtgggcaccaccgccggcgtggtgctggtggtgctgagctgggtgctgtgcctgtgcgtgttcagctacgtgaaggtggccgccagcagcctgctgcacggcggcggcagacccgccctgctggccgccggcgtggccatccaggtgggcagcctgctgggcgccggcgccatgttcccccccaccagcatctaccacgtgttccagagcagaaaggactgcgtggacccctgcggcccctag

SEQ ID NO: 82420 - DNA, 1347 bp, synthetic construct; identical to SEQ ID NO: 82419
  misc_feature 1..1347: note = Description of Artificial Sequence: Synthetic coding sequence
  source 1..1347: mol_type = other DNA

SEQ ID NO: 82421 - DNA, 1053 bp, synthetic construct
  misc_feature 1..1053: note = Description of Artificial Sequence: Synthetic coding sequence
  source 1..1053: mol_type = other DNA
atggccgcccccaccctgggcagactggtgctgacccacctgctggtggccctgttcggcatgggcagctgggccgccgtgaacggcatctgggtggagctgcccgtggtggtgaaggacctgcccgagggctggagcctgcccagctacctgagcgtggtggtggccctgggcaacctgggcctgctggtggtgaccctgtggagacagctggcccccggcaagggcgagcaggtgcccatccaggtggtgcaggtgctgagcgtggtgggcaccgccctgctggcccccctgtggcaccacgtggcccccgtggccggccagctgcacagcgtggccttcctgaccctggccctggtgctggccatggcctgctgcaccagcaacgtgaccttcctgcccttcctgagccacctgcccccccccttcctgagaagcttcttcctgggccagggcctgagcgccctgctgccctgcgtgctggccctggtgcagggcgtgggcagactggagtgcccccccgcccccaccaacggcaccagcggcccccccctggacttccccgagagattccccgccagcaccttcttctgggccctgaccgccctgctggtgaccagcgccgccgccttcagaggcctgctgctgctgctgcccagcctgcccagcgtgaccaccggcggcagcggccccgagctgcagctgggcagccccggcgccgaggaggaggagaaggaggaggaggaggccctgcccctgcaggagccccccagccaggccgccggcaccatccccggccccgaccccgaggcccaccagctgttcagcgcccacggcgccttcctgctgggcctgatggccttcaccagcgccgtgaccaacggcgtgctgcccagcgtgcagagcttcagctgcctgccctacggcagactggcctaccacctggccgtggtgctgggcagcgccgccaaccccctggcctgcttcctggccatgggcgtgctgtgcagatgctgcagaggctgctgcgtgtgcgtgtgcagccacatgtag

SEQ ID NO: 82422 - DNA, 1413 bp, synthetic construct
  misc_feature 1..1413: note = Description of Artificial Sequence: Synthetic coding sequence
  source 1..1413: mol_type = other DNA
atgcccgcccccctgctgctgatcagcagaaccctgggcaacttcatggtgctgtggagcacctgcagaaccaccgtgttcaagagcgtgaccaacagattcatcaagaacctggcctgcagcggcatctgcgccagcctggtgtgcgtgcccttcgacatcatcctgagcaccagcccccactgctgctggtggatctacaccatgctgttctgcaaggtggtgaagttcctgcacaaggtgttctgcagcgtgaccatcctgagcttccccgccatcgccctggacagatactacagcgtgctgtaccccctggagagaaagatcagcgacgccaagagcagagagctggtgatgtacatctgggcccacgccgtggtggccagcgtgcccgtgttcgccgtgaccaacgtggccgacatctacgccaccagcacctgcaccgaggtgtggagcaacagcctgggccacctggtgtacgtgctggtgtacaacatcaccaccgtgatcgtgcccgtggtggtggtgttcctgttcctgatcctgatcagaagagccctgagcgccagccagaagaagaaggtgatcatcgccgccctgagaaccccccagaacaccatcagcatcccctacgccagccagagagaggccgagctgcacgccaccctgctgagcatggtgatggtgttcatcctgtgcagcgtgccctacgccaccctggtggtgtaccagaccgtgctgaacgtgcccgacaccagcgtgttcctgctgctgaccgccgtgtggctgcccaaggtgagcctgctggccaaccccgtgctgttcctgaccgtgaacaagagcgtgagaaagtgcctgatcggcaccctggtgcagctgcaccacagatacagcagaagaaacgtggtgagcaccggcagcggcatggccgaggccagcctggagcccagcatcagaagcggcagccagctgctggagatgttccacatcggccagcagcagatcttcaagcccaccgaggacgaggaggagagcgaggccaagtacatcggcagcgccgacttccaggccaaggagatcttcagcacctgcctggagggcgagcagggcccccagttcgcccccagcgccccccccctgagcaccgtggacagcgtgagccaggtggcccccgccgcccccgtggagcccgagaccttccccgacaagtacagcctgcagttcggcttcggccccttcgagctgcccccccagtggctgagcgagaccagaaacagcaagaagagactgctgccccccctgggcaacacccccgaggagctgatccagaccaaggtgcccaaggtgggcagagtggagagaaagatgagcagaaacaacaaggtgagcatcttccccaaggtggacagctag

SEQ ID NO: 82423 - DNA, 1548 bp, synthetic construct
  misc_feature 1..1548: note = Description of Artificial Sequence: Synthetic coding sequence
  source 1..1548: mol_type = other DNA
atgggccacaacggcagctggatcagccccaacgccagcgagccccacaacgccagcggcgccgaggccgccggcgtgaacagaagcgccctgggcgagttcggcgaggcccagctgtacagacagttcaccaccaccgtgcaggtggtgatcttcatcggcagcctgctgggcaacttcatggtgctgtggagcacctgcagaaccaccgtgttcaagagcgtgaccaacagattcatcaagaacctggcctgcagcggcatctgcgccagcctggtgtgcgtgcccttcgacatcatcctgagcaccagcccccactgctgctggtggatctacaccatgctgttctgcaaggtggtgaagttcctgcacaaggtgttctgcagcgtgaccatcctgagcttccccgccatcgccctggacagatactacagcgtgctgtaccccctggagagaaagatcagcgacgccaagagcagagagctggtgatgtacatctgggcccacgccgtggtggccagcgtgcccgtgttcgccgtgaccaacgtggccgacatctacgccaccagcacctgcaccgaggtgtggagcaacagcctgggccacctggtgtacgtgctggtgtacaacatcaccaccgtgatcgtgcccgtggtggtggtgttcctgttcctgatcctgatcagaagagccctgagcgccagccagaagaagaaggtgatcatcgccgccctgagaaccccccagaacaccatcagcatcccctacgccagccagagagaggccgagctgcacgccaccctgctgagcatggtgatggtgttcatcctgtgcagcgtgccctacgccaccctggtggtgtaccagaccgtgctgaacgtgcccgacaccagcgtgttcctgctgctgaccgccgtgtggctgcccaaggtgagcctgctggccaaccccgtgctgttcctgaccgtgaacaagagcgtgagaaagtgcctgatcggcaccctggtgcagctgcaccacagatacagcagaagaaacgtggtgagcaccggcagcggcatggccgaggccagcctggagcccagcatcagaagcggcagccagctgctggagatgttccacatcggccagcagcagatcttcaagcccaccgaggacgaggaggagagcgaggccaagtacatcggcagcgccgacttccaggccaaggagatcttcagcacctgcctggagggcgagcagggcccccagttcgcccccagcgccccccccctgagcaccgtggacagcgtgagccaggtggcccccgccgcccccgtggagcccgagaccttccccgacaagtacagcctgcagttcggcttcggccccttcgagctgcccccccagtggctgagcgagaccagaaacagcaagaagagactgctgccccccctgggcaacacccccgaggagctgatccagaccaaggtgcccaaggtgggcagagtggagagaaagatgagcagaaacaacaaggtgagcatcttccccaaggtggacagctag

SEQ ID NO: 82424 - DNA, 1548 bp, synthetic construct; identical to SEQ ID NO: 82423
  misc_feature 1..1548: note = Description of Artificial Sequence: Synthetic coding sequence
  source 1..1548: mol_type = other DNA

SEQ ID NO: 82425 - DNA, 996 bp, synthetic construct
  misc_feature 1..996: note = Description of Artificial Sequence: Synthetic coding sequence
  source 1..996: mol_type = other DNA
atgatcaccctgaacaaccaggaccagcccgtgcccttcaacagcagccaccccgacgagtacaagatcgccgccctggtgttctacagctgcatcttcatcatcggcctgttcgtgaacatcaccgccctgtgggtgttcagctgcaccaccaagaagagaaccaccgtgaccatctacatgatgaacgtggccctggtggacctgatcttcatcatgaccctgcccttcagaatgttctactacgccaaggacgagtggcccttcggcgagtacttctgccagatcctgggcgccctgaccgtgttctaccccagcatcgccctgtggctgctggccttcatcagcgccgacagatacatggccatcgtgcagcccaagtacgccaaggagctgaagaacacctgcaaggccgtgctggcctgcgtgggcgtgtggatcatgaccctgaccaccaccacccccctgctgctgctgtacaaggaccccgacaaggacagcacccccgccacctgcctgaagatcagcgacatcatctacctgaaggccgtgaacgtgctgaacctgaccagactgaccttcttcttcctgatccccctgttcatcatgatcggctgctacctggtgatcatccacaacctgctgcacggcagaaccagcaagctgaagcccaaggtgaaggagaagagcatcagaatcatcatcaccctgctggtgcaggtgctggtgtgcttcatgcccttccacatctgcttcgccttcctgatgctgggcaccggcgagaacagctacaacccctggggcgccttcaccaccttcctgatgaacctgagcacctgcctggacgtgatcctgtactacatcgtgagcaagcagttccaggccagagtgatcagcgtgatgctgtacagaaactacctgagaagcatgagaagaaagagcttcagaagcggcagcctgagaagcctgagcaacatcaacagcgagatgctgtag

SEQ ID NO: 82426 - DNA, 996 bp, synthetic construct; identical to SEQ ID NO: 82425
  misc_feature 1..996: note = Description of Artificial Sequence: Synthetic coding sequence
  source 1..996: mol_type = other DNA

SEQ ID NO: 82427 - DNA, 996 bp, synthetic construct; identical to SEQ ID NO: 82425
  misc_feature 1..996: note = Description of Artificial Sequence: Synthetic coding sequence
  source 1..996: mol_type = other DNA

SEQ ID NO: 82428 - DNA, 297 bp, synthetic construct
  misc_feature 1..297: note = Description of Artificial Sequence: Synthetic coding sequence
  source 1..297: mol_type = other DNA
atgatcaccctgaacaaccaggaccagcccgtgcccttcaacagcagccaccccgacgagtacaagatcgccgccctggtgttctacagctgcatcttcatcatcggcctgttcgtgaacatcaccgccctgtgggtgttcagctgcaccaccaagaagagaaccaccgtgaccatctacatgatgaacgtggccctggtggacctgatcttcatcatgaccctgcccttcagaatgttctactacgccaaggacgagtggcccttcggcgagtacttctgccagatcctgggctag

SEQ ID NO: 82429 - DNA, 1086 bp, synthetic construct
  misc_feature 1..1086: note = Description of Artificial Sequence: Synthetic coding sequence
  source 1..1086: mol_type = other DNA
atggacatccagatggccaacaacttcaccccccccagcgccaccccccagggcaacgactgcgacctgtacgcccaccacagcaccgccagaatcgtgatgcccctgcactacagcctggtgttcatcatcggcctggtgggcaacctgctggccctggtggtgatcgtgcagaacagaaagaagatcaacagcaccaccctgtacagcaccaacctggtgatcagcgacatcctgttcaccaccgccctgcccaccagaatcgcctactacgccatgggcttcgactggagaatcggcgacgccctgtgcagaatcaccgccctggtgttctacatcaacacctacgccggcgtgaacttcatgacctgcctgagcatcgacagattcatcgccgtggtgcaccccctgagatacaacaagatcaagagaatcgagcacgccaagggcgtgtgcatcttcgtgtggatcctggtgttcgcccagaccctgcccctgctgatcaaccccatgagcaagcaggaggccgagagaatcacctgcatggagtaccccaacttcgaggagaccaagagcctgccctggatcctgctgggcgcctgcttcatcggctacgtgctgcccctgatcatcatcctgatctgctacagccagatctgctgcaagctgttcagaaccgccaagcagaaccccctgaccgagaagagcggcgtgaacaagaaggccctgaacaccatcatcctgatcatcgtggtgttcgtgctgtgcttcaccccctaccacgtggccatcatccagcacatgatcaagaagctgagattcagcaacttcctggagtgcagccagagacacagcttccagatcagcctgcacttcaccgtgtgcctgatgaacttcaactgctgcatggaccccttcatctacttcttcgcctgcaagggctacaagagaaaggtgatgagaatgctgaagagacaggtgagcgtgagcatcagcagcgccgtgaagagcgcccccgaggagaacagcagagagatgaccgagacccagatgatgatccacagcaagagcagcaacggcaagtag

SEQ ID NO: 82430 - DNA, 1248 bp, synthetic construct
  misc_feature 1..1248: note = Description of Artificial Sequence: Synthetic coding sequence
  source 1..1248: mol_type = other DNA
atggtgttcgcccacagaatggacaacagcaagccccacctgatcatccccaccctgctggtgcccctgcagaacagaagctgcaccgagaccgccacccccctgcccagccagtacctgatggagctgagcgaggagcacagctggatgagcaaccagaccgacctgcactacgtgctgaagcccggcgaggtggccaccgccagcatcttcttcggcatcctgtggctgttcagcatcttcggcaacagcctggtgtgcctggtgatccacagaagcagaagaacccagagcaccaccaactacttcgtggtgagcatggcctgcgccgacctgctgatcagcgtggccagcacccccttcgtgctgctgcagttcaccaccggcagatggaccctgggcagcgccacctgcaaggtggtgagatacttccagtacctgacccccggcgtgcagatctacgtgctgctgagcatctgcatcgacagattctacaccatcgtgtaccccctgagcttcaaggtgagcagagagaaggccaagaagatgatcgccgccagctgggtgttcgacgccggcttcgtgacccccgtgctgttcttctacggcagcaactgggacagccactgcaactacttcctgcccagcagctgggagggcaccgcctacaccgtgatccacttcctggtgggcttcgtgatccccagcgtgctgatcatcctgttctaccagaaggtgatcaagtacatctggagaatcggcaccgacggcagaaccgtgagaagaaccatgaacatcgtgcccagaaccaaggtgaagaccatcaagatgttcctgatcctgaacctgctgttcctgctgagctggctgcccttccacgtggcccagctgtggcacccccacgagcaggactacaagaagagcagcctggtgttcaccgccatcacctggatcagcttcagcagcagcgccagcaagcccaccctgtacagcatctacaacgccaacttcagaagaggcatgaaggagaccttctgcatgagcagcatgaagtgctacagaagcaacgcctacaccatcaccaccagcagcagaatggccaagaagaactacgtgggcatcagcgagatccccagcatggccaagaccatcaccaaggacagcatctacgacagcttcgacagagaggccaaggagaagaagctggcctggcccatcaacagcaacccccccaacaccttcgtgtag

SEQ ID NO: 82431 - DNA, 1248 bp, synthetic construct; identical to SEQ ID NO: 82430
  misc_feature 1..1248: note = Description of Artificial Sequence: Synthetic coding sequence
  source 1..1248: mol_type = other DNA

SEQ ID NO: 82432 - DNA, 180 bp, synthetic construct
  misc_feature 1..180: note = Description of Artificial Sequence: Synthetic coding sequence
  source 1..180: mol_type = other DNA
atggtgttcgcccacagaatggacaacagcaagccccacctgatcatccccaccctgctggtgcccctgcagaacagaagctgcaccgagaccgccacccccctgcccagccagtacctgatggagctgagcgaggagcacagctggatgagcaaccagaccgacctgcactacgtgtag

SEQ ID NO: 82433 - DNA, 1077 bp, synthetic construct
  misc_feature 1..1077: note = Description of Artificial Sequence: Synthetic coding sequence
  source 1..1077: mol_type = other DNA
atgcccagcgtgagccccgccggccccagcgccggcgccgtgcccaacgccaccgccgtgaccaccgtgagaaccaacgccagcggcctggaggtgcccctgttccacctgttcgccagactggacgaggagctgcacggcaccttccccggcctgtggctggccctgatggccgtgcacggcgccatcttcctggccggcctggtgctgaacggcctggccctgtacgtgttctgctgcagaaccagagccaagacccccagcgtgatctacaccatcaacctggtggtgaccgacctgctggtgggcctgagcctgcccaccagattcgccgtgtactacggcgccagaggctgcctgagatgcgccttcccccacgtgctgggctacttcctgaacatgcactgcagcatcctgttcctgacctgcatctgcgtggacagatacctggccatcgtgagacccgagggcagcagaagatgcagacagcccgcctgcgccagagccgtgtgcgccttcgtgtggctggccgccggcgccgtgaccctgagcgtgctgggcgtgaccggcagcagaccctgctgcagagtgttcgccctgaccgtgctggagttcctgctgcccctgctggtgatcagcgtgttcaccggcagaatcatgtgcgccctgagcagacccggcctgctgcaccagggcagacagagaagagtgagagccatgcagctgctgctgaccgtgctgatcatcttcctggtgtgcttcacccccttccacgccagacaggtggccgtggccctgtggcccgacatgccccaccacaccagcctggtggtgtaccacgtggccgtgaccctgagcagcctgaacagctgcatggaccccatcgtgtactgcttcgtgaccagcggcttccaggccaccgtgagaggcctgttcggccagcacggcgagagagagcccagcagcggcgacgtggtgagcatgcacagaagcagcaagggcagcggcagacaccacatcctgagcgccggcccccacgccctgacccaggccctggccaacggccccgaggcctag

SEQ ID NO: 82434 - DNA, 1050 bp, synthetic construct
  misc_feature 1..1050: note = Description of Artificial Sequence: Synthetic coding sequence
  source 1..1050: mol_type = other DNA
atgaacagcaccctggacggcaaccagagcagccaccccttctgcctgctggccttcggctacctggagaccgtgaacttctgcctgctggaggtgctgatcatcgtgttcctgaccgtgctgatcatcagcggcaacatcatcgtgatcttcgtgttccactgcgcccccctgctgaaccaccacaccaccagctacttcatccagaccatggcctacgccgacctgttcgtgggcgtgagctgcgtggtgcccagcctgagcctgctgcaccaccccctgcccgtggaggagagcctgacctgccagatcttcggcttcgtggtgagcgtgctgaagagcgtgagcatggccagcctggcctgcatcagcatcgacagatacatcgccatcaccaagcccctgacctacaacaccctggtgaccccctggagactgagactgtgcatcttcctgatctggctgtacagcaccctggtgttcctgcccagcttcttccactggggcaagcccggctaccacggcgacgtgttccagtggtgcgccgagagctggcacaccgacagctacttcaccctgttcatcgtgatgatgctgtacgcccccgccgccctgatcgtgtgcttcacctacttcaacatcttcagaatctgccagcagcacaccaaggacatcagcgagagacaggccagattcagcagccagagcggcgagaccggcgaggtgcaggcctgccccgacaagagatacgccatggtgctgttcagaatcaccagcgtgttctacatcctgtggctgccctacatcatctacttcctgctggagagcagcaccggccacagcaacagattcgccagcttcctgaccacctggctggccatcagcaacagcttctgcaactgcgtgatctacagcctgagcaacagcgtgttccagagaggcctgaagagactgagcggcgccatgtgcaccagctgcgccagccagaccaccgccaacgacccctacaccgtgagaagcaagggccccctgaacggctgccacatctag

SEQ ID NO: 82435 - DNA, 753 bp, synthetic construct
  misc_feature 1..753: note = Description of Artificial Sequence: Synthetic coding sequence
  source 1..753: mol_type = other DNA
atgaacagcaccctggacggcaaccagagcagccaccccttctgcctgctggccttcggctacctggagaccgtgaacttctgcctgctggaggtgctgatcatcgtgttcctgaccgtgctgatcatcagcggcaacatcatcgtgatcttcgtgttccactgcgcccccctgctgaaccaccacaccaccagctacttcatccagaccatggcctacgccgacctgttcgtgggcgtgagctgcgtggtgcccagcctgagcctgctgcaccaccccctgcccgtggaggagagcctgacctgccagatcttcggcttcgtggtgagcgtgctgaagagcgtgagcatggccagcctggcctgcatcagcatcgacagatacatcgccatcaccaagcccctgacctacaacaccctggtgaccccctggagactgagactgtgcatcttcctgatctggctgtacagcaccctggtgttcctgcccagcttcttccactggggcaagcccggctaccacggcgacgtgttccagtggtgcgccgagagctggcacaccgacagctacttcaccctgttcatcgtgatgatgctgtacgcccccgccgccctgatcgtgtgcttcacctacttcaacatcttcagaatctgccagcagcacaccaaggacatcagcgagagacaggccagattcagcagccagagcggcgagaccggcgaggtgcaggcctgccccgtgagcaaccactag

SEQ ID NO: 82436 - DNA, 1302 bp, synthetic construct
  misc_feature 1..1302: note = Description of Artificial Sequence: Synthetic coding sequence
  source 1..1302: mol_type = other DNA
atgtgcttcagccccatcctggagatcaacatgcagagcgagagcaacatcaccgtgagagacgacatcgacgacatcaacaccaacatgtaccagcccctgagctaccccctgagcttccaggtgagcctgaccggcttcctgatgctggagatcgtgctgggcctgggcagcaacctgaccgtgctggtgctgtactgcatgaagagcaacctgatcaacagcgtgagcaacatcatcaccatgaacctgcacgtgctggacgtgatcatctgcgtgggctgcatccccctgaccatcgtgatcctgctgctgagcctggagagcaacaccgccctgatctgctgcttccacgaggcctgcgtgagcttcgccagcgtgagcaccgccatcaacgtgttcgccatcaccctggacagatacgacatcagcgtgaagcccgccaacagaatcctgaccatgggcagagccgtgatgctgatgatcagcatctggatcttcagcttcttcagcttcctgatccccttcatcgaggtgaacttcttcagcctgcagagcggcaacacctgggagaacaagaccctgctgtgcgtgagcaccaacgagtactacaccgagctgggcatgtactaccacctgctggtgcagatccccatcttcttcttcaccgtggtggtgatgctgatcacctacaccaagatcctgcaggccctgaacatcagaatcggcaccagattcagcaccggccagaagaagaaggccagaaagaagaagaccatcagcctgaccacccagcacgaggccaccgacatgagccagagcagcggcggcagaaacgtggtgttcggcgtgagaaccagcgtgagcgtgatcatcgccctgagaagagccgtgaagagacacagagagagaagagagagacagaagagagtgttcagaatgagcctgctgatcatcagcaccttcctgctgtgctggacccccatcagcgtgctgaacaccaccatcctgtgcctgggccccagcgacctgctggtgaagctgagactgtgcttcctggtgatggcctacggcaccaccatcttccaccccctgctgtacgccttcaccagacagaagttccagaaggtgctgaagagcaagatgaagaagagagtggtgagcatcgtggaggccgaccccctgcccaacaacgccgtgatccacaacagctggatcgaccccaagagaaacaagaagatcaccttcgaggacagcgagatcagagagaagtgcctggtgccccaggtggtgaccgactag

SEQ ID NO: 82437 - DNA, 1086 bp, synthetic construct
  misc_feature 1..1086: note = Description of Artificial Sequence: Synthetic coding sequence
  source 1..1086: mol_type = other DNA
atggcccccaccgagccctggagccccagccccggcagcgccccctgggactacagcggcctggacggcctggaggagctggagctgtgccccgccggcgacctgccctacggctacgtgtacatccccgccctgtacctggccgccttcgccgtgggcctgctgggcaacgccttcgtggtgtggctgctggccggcagaagaggccccagaagactggtggacaccttcgtgctgcacctggccgccgccgacctgggcttcgtgctgaccctgcccctgtgggccgccgccgccgccctgggcggcagatggcccttcggcgacggcctgtgcaagctgagcagcttcgccctggccggcaccagatgcgccggcgccctgctgctggccggcatgagcgtggacagatacctggccgtggtgaagctgctggaggccagacccctgagaacccccagatgcgccctggccagctgctgcggcgtgtgggccgtggccctgctggccggcctgcccagcctggtgtacagaggcctgcagcccctgcccggcggccaggacagccagtgcggcgaggagcccagccacgccttccagggcctgagcctgctgctgctgctgctgaccttcgtgctgcccctggtggtgaccctgttctgctactgcagaatcagcagaagactgagaagacccccccacgtgggcagagccagaagaaacagcctgagaatcatcttcgccatcgagagcaccttcgtgggcagctggctgcccttcagcgccctgagagccgtgttccacctggccagactgggcgccctgcccctgccctgccccctgctgctggccctgagatggggcctgaccatcgccacctgcctggccttcgtgaacagctgcgccaaccccctgatctacctgctgctggacagaagcttcagagccagagccctggacggcgcctgcggcagaaccggcagactggccagaagaatcagcagcgccagcagcctgagcagagacgacagcagcgtgttcagatgcagagcccaggccgccaacaccgccagcgccagctggtag

SEQ ID NO: 82438 - DNA, 1014 bp, synthetic construct
  misc_feature 1..1014: note = Description of Artificial Sequence: Synthetic coding sequence
  source 1..1014: mol_type = other DNA
atgaacagctgggacgccggcctggccggcctgctggtgggcaccatgggcgtgagcctgctgagcaacgccctggtgctgctgtgcctgctgcacagcgccgacatcagaagacaggcccccgccctgttcaccctgaacctgacctgcggcaacctgctgtgcaccgtggtgaacatgcccctgaccctggccggcgtggtggcccagagacagcccgccggcgacagactgtgcagactggccgccttcctggacaccttcctggccgccaacagcatgctgagcatggccgccctgagcatcgacagatgggtggccgtggtgttccccctgagctacagagccaagatgagactgagagacgccgccctgatggtggcctacacctggctgcacgccctgaccttccccgccgccgccctggccctgagctggctgggcttccaccagctgtacgccagctgcaccctgtgcagcagaagacccgacgagagactgagattcgccgtgttcaccggcgccttccacgccctgagcttcctgctgagcttcgtggtgctgtgctgcacctacctgaaggtgctgaaggtggccagattccactgcaagagaatcgacgtgatcaccatgcagaccctggtgctgctggtggacctgcaccccagcgtgagagagagatgcctggaggagcagaagagaagaagacagagagccaccaagaagatcagcaccttcatcggcaccttcctggtgtgcttcgccccctacgtgatcaccagactggtggagctgttcagcaccgtgcccatcggcagccactggggcgtgctgagcaagtgcctggcctacagcaaggccgccagcgaccccttcgtgtacagcctgctgagacaccagtacagaaagagctgcaaggagatcctgaacagactgctgcacagaagaagcatccacagcagcggcctgaccggcgacagccacagccagaacatcctgcccgtgagcgagtag

SEQ ID NO: 82439 - DNA, 1128 bp, synthetic construct
  misc_feature 1..1128: note = Description of Artificial Sequence: Synthetic coding sequence
  source 1..1128: mol_type = other DNA
atggccaacgccagcgagcccggcggcagcggcggcggcgaggccgccgccctgggcctgaagctggccaccctgagcctgctgctgtgcgtgagcctggccggcaacgtgctgttcgccctgctgatcgtgagagagagaagcctgcacagagccccctactacctgctgctggacctgtgcctggccgacggcctgagagccctggcctgcctgcccgccgtgatgctggccgccagaagagccgccgccgccgccggcgccccccccggcgccctgggctgcaagctgctggccttcctggccgccctgttctgcttccacgccgccttcctgctgctgggcgtgggcgtgaccagatacctggccatcgcccaccacagattctacgccgagagactggccggctggccctgcgccgccatgctggtgtgcgccgcctgggccctggccctggccgccgccttcccccccgtgctggacggcggcggcgacgacgaggacgccccctgcgccctggagcagagacccgacggcgcccccggcgccctgggcttcctgctgctgctggccgtggtggtgggcgccacccacctggtgtacctgagactgctgttcttcatccacgacagaagaaagatgagacccgccagactggtgcccgccgtgagccacgactggaccttccacggccccggcgccaccggccaggccgccgccaactggaccgccggcttcggcagaggccccaccccccccgccctggtgggcatcagacccgccggccccggcagaggcgccagaagactgctggtgctggaggagttcaagaccgagaagagactgtgcaagatgttctacgccgtgaccctgctgttcctgctgctgtggggcccctacgtggtggccagctacctgagagtgctggtgagacccggcgccgtgccccaggcctacctgaccgccagcgtgtggctgaccttcgcccaggccggcatcaaccccgtggtgtgcttcctgttcaacagagagctgagagactgcttcagagcccagttcccctgctgccagagccccagaaccacccaggccacccacccctgcgacctgaagggcatcggcctgtag

SEQ ID NO: 82440 - DNA, 993 bp, synthetic construct
  misc_feature 1..993: note = Description of Artificial Sequence: Synthetic coding sequence
  source 1..993: mol_type = other DNA
atgatgtggggcgccggcagccccctggcctggctgagcgccggcagcggcaacgtgaacgtgagcagcgtgggccccgccgagggccccaccggccccgccgcccccctgcccagccccaaggcctgggacgtggtgctgtgcatcagcggcaccctggtgagctgcgagaacgccctggtggtggccatcatcgtgggcacccccgccttcagagcccccatgttcctgctggtgggcagcctggccgtggccgacctgctggccggcctgggcctggtgctgcacttcgccgccgtgttctgcatcggcagcgccgagatgagcctggtgctggtgggcgtgctggccatggccttcaccgccagcatcggcagcctgctggccatcaccgtggacagatacctgagcctgtacaacgccctgacctactacagcgagaccaccgtgaccagaacctacgtgatgctggccctggtgtggggcggcgccctgggcctgggcctgctgcccgtgctggcctggaactgcctggacggcctgaccacctgcggcgtggtgtaccccctgagcaagaaccacctggtggtgctggccatcgccttcttcatggtgttcggcatcatgctgcagctgtacgcccagatctgcagaatcgtgtgcagacacgcccagcagatcgccctgcagagacacctgctgcccgccagccactacgtggccaccagaaagggcatcgccaccctggccgtggtgctgggcgccttcgccgcctgctggctgcccttcaccgtgtactgcctgctgggcgacgcccacagcccccccctgtacacctacctgaccctgctgcccgccacctacaacagcatgatcaaccccatcatctacgccttcagaaaccaggacgtgcagaaggtgctgtgggccgtgtgctgctgctgcagcagcagcaagatccccttcagaagcagaagccccagcgacgtgtag

SEQ ID NO: 82441 - DNA, 960 bp, synthetic construct
  misc_feature 1..960: note = Description of Artificial Sequence: Synthetic coding sequence
  source 1..960: mol_type = other DNA
atgcccttccccaactgcagcgcccccagcaccgtggtggccaccgccgtgggcgtgctgctgggcctggagtgcggcctgggcctgctgggcaacgccgtggccctgtggaccttcctgttcagagtgagagtgtggaagccctacgccgtgtacctgctgaacctggccctggccgacctgctgctggccgcctgcctgcccttcctggccgccttctacctgagcctgcaggcctggcacctgggcagagtgggctgctgggccctgcacttcctgctggacctgagcagaagcgtgggcatggccttcctggccgccgtggccctggacagatacctgagagtggtgcaccccagactgaaggtgaacctgctgagcccccaggccgccctgggcgtgagcggcctggtgtggctgctgatggtggccctgacctgccccggcctgctgatcagcgaggccgcccagaacagcaccagatgccacagcttctacagcagagccgacggcagcttcagcatcatctggcaggaggccctgagctgcctgcagttcgtgctgcccttcggcctgatcgtgttctgcaacgccggcatcatcagagccctgcagaagagactgagagagcccgagaagcagcccaagctgcagagagcccaggccctggtgaccctggtggtggtgctgttcgccctgtgcttcctgccctgcttcctggccagagtgctgatgcacatcttccagaacctgggcagctgcagagccctgtgcgccgtggcccacaccagcgacgtgaccggcagcctgacctacctgcacagcgtgctgaaccccgtggtgtactgcttcagcagccccaccttcagaagcagctacagaagagtgttccacaccctgagaggcaagggccaggccgccgagccccccgacttcaaccccagagacagctacagctag

SEQ ID NO: 82442 - DNA, 1071 bp, synthetic construct
  misc_feature 1..1071: note = Description of Artificial Sequence: Synthetic coding sequence
  source 1..1071: mol_type = other DNA
atgaacggcgtgagcgagggcaccagaggctgcagcgacagacagcccggcgtgctgaccagagacagaagctgcagcagaaagatgaacagcagcggctgcctgagcgaggaggtgggcagcctgagacccctgaccgtggtgatcctgagcgccagcatcgtggtgggcgtgctgggcaacggcctggtgctgtggatgaccgtgttcagaatggccagaaccgtgagcaccgtgtgcttcttccacctggccctggccgacttcatgctgagcctgagcctgcccatcgccatgtactacatcgtgagcagacagtggctgctgggcgagtgggcctgcaagctgtacatcaccttcgtgttcctgagctacttcgccagcaactgcctgctggtgttcatcagcgtggacagatgcatcagcgtgctgtaccccgtgtgggccctgaaccacagaaccgtgcagagagccagctggctggccttcggcgtgtggctgctggccgccgccctgtgcagcgcccacctgaagttcagaaccaccagaaagtggaacggctgcacccactgctacctggccttcaacagcgacaacgagaccgcccagatctggatcgagggcgtggtggagggccacatcatcggcaccatcggccacttcctgctgggcttcctgggccccctggccatcatcggcacctgcgcccacctgatcagagccaagctgctgagagagggctgggtgcacgccaacagacccaagagactgctgctggtgctggtgagcgccttcttcatcttctggagccccttcaacgtggtgctgctggtgcacctgtggagaagagtgatgctgaaggagatctaccaccccagaatgctgctgatcctgcaggccagcttcgccctgggctgcgtgaacagcagcctgaaccccttcctgtacgtgttcgtgggcagagacttccaggagaagttcttccagagcctgaccagcgccctggccagagccttcggcgaggaggagttcctgagcagctgccccagaggcaacgcccccagagagtag

SEQ ID NO: 82443 - DNA, 1146 bp, synthetic construct
  misc_feature 1..1146: note = Description of Artificial Sequence: Synthetic coding sequence
  source 1..1146: mol_type = other DNA
atgagaagccacaccatcaccatgaccaccaccagcgtgagcagctggccctacagcagccacagaatgagattcatcaccaaccacagcgaccagcccccccagaacttcagcgccacccccaacgtgaccacctgccccatggacgagaagctgctgagcaccgtgctgaccaccagctacagcgtgatcttcatcgtgggcctggtgggcaacatcatcgccctgtacgtgttcctgggcatccacagaaagagaaacagcatccagatctacctgctgaacgtggccatcgccgacctgctgctgatcttctgcctgcccttcagaatcatgtaccacatcaaccagaacaagtggaccctgggcgtgatcctgtgcaaggtggtgggcaccctgttctacatgaacatgtacatcagcatcatcctgctgggcttcatcagcctggacagatacatcaagatcaacagaagcatccagcagagaaaggccatcaccaccaagcagagcatctacgtgtgctgcatcgtgtggatgctggccctgggcggcttcctgaccatgatcatcctgaccctgaagaagggcggccacaacagcaccatgtgcttccactacagagacaagcacaacgccaagggcgaggccatcttcaacttcatcctggtggtgatgttctggctgatcttcctgctgatcatcctgagctacatcaagatcggcaagaacctgctgagaatcagcaagagaagaagcaagttccccaacagcggcaagtacgccaccaccgccagaaacagcttcatcgtgctgatcatcttcaccatctgcttcgtgccctaccacgccttcagattcatctacatcagcagccagctgaacgtgagcagctgctactggaaggagatcgtgcacaagaccaacgagatcatgctggtgctgagcagcttcaacagctgcctggaccccgtgatgtacttcctgatgagcagcaacatcagaaagatcatgtgccagctgctgttcagaagattccagggcgagcccagcagaagcgagagcaccagcgagttcaagcccggctacagcctgcacgacaccagcgtggccgtgaagatccagagcagcagcaagagcacctag

SEQ ID NO: 82444 - DNA, 1146 bp, synthetic construct; identical to SEQ ID NO: 82443
  misc_feature 1..1146: note = Description of Artificial Sequence: Synthetic coding sequence
  source 1..1146: mol_type = other DNA

SEQ ID NO: 82445 - DNA, 1005 bp, synthetic construct
  misc_feature 1..1005: note = Description of Artificial Sequence: Synthetic coding sequence
  source 1..1005: mol_type = other DNA
atggacgagaagctgctgagcaccgtgctgaccaccagctacagcgtgatcttcatcgtgggcctggtgggcaacatcatcgccctgtacgtgttcctgggcatccacagaaagagaaacagcatccagatctacctgctgaacgtggccatcgccgacctgctgctgatcttctgcctgcccttcagaatcatgtaccacatcaaccagaacaagtggaccctgggcgtgatcctgtgcaaggtggtgggcaccctgttctacatgaacatgtacatcagcatcatcctgctgggcttcatcagcctggacagatacatcaagatcaacagaagcatccagcagagaaaggccatcaccaccaagcagagcatctacgtgtgctgcatcgtgtggatgctggccctgggcggcttcctgaccatgatcatcctgaccctgaagaagggcggccacaacagcaccatgtgcttccactacagagacaagcacaacgccaagggcgaggccatcttcaacttcatcctggtggtgatgttctggctgatcttcctgctgatcatcctgagctacatcaagatcggcaagaacctgctgagaatcagcaagagaagaagcaagttccccaacagcggcaagtacgccaccaccgccagaaacagcttcatcgtgctgatcatcttcaccatctgcttcgtgccctaccacgccttcagattcatctacatcagcagccagctgaacgtgagcagctgctactggaaggagatcgtgcacaagaccaacgagatcatgctggtgctgagcagcttcaacagctgcctggaccccgtgatgtacttcctgatgagcagcaacatcagaaagatcatgtgccagctgctgttcagaagattccagggcgagcccagcagaagcgagagcaccagcgagttcaagcccggctacagcctgcacgacaccagcgtggccgtgaagatccagagcagcagcaagagcacctag

SEQ ID NO: 82446 - DNA, 930 bp, synthetic construct
  misc_feature 1..930: note = Description of Artificial Sequence: Synthetic coding sequence
  source 1..930: mol_type = other DNA
atgaacggcacctacaacacctgcggcagcagcgacctgacctggccccccgccatcaagctgggcttctacgcctacctgggcgtgctgctggtgctgggcctgctgctgaacagcctggccctgtgggtgttctgctgcagaatgcagcagtggaccgagaccagaatctacatgaccaacctggccgtggccgacctgtgcctgctgtgcaccctgcccttcgtgctgcacagcctgagagacaccagcgacacccccctgtgccagctgagccagggcatctacctgaccaacagatacatgagcatcagcctggtgaccgccatcgccgtggacagatacgtggccgtgagacaccccctgagagccagaggcctgagaagccccagacaggccgccgccgtgtgcgccgtgctgtgggtgctggtgatcggcagcctggtggccagatggctgctgggcatccaggagggcggcttctgcttcagaagcaccagacacaacttcaacagcatggccttccccctgctgggcttctacctgcccctggccgtggtggtgttctgcagcctgaaggtggtgaccgccctggcccagagaccccccaccgacgtgggccaggccgaggccaccagaaaggccgccagaatggtgtgggccaacctgctggtgttcgtggtgtgcttcctgcccctgcacgtgggcctgaccgtgagactggccgtgggctggaacgcctgcgccctgctggagaccatcagaagagccctgtacatcaccagcaagctgagcgacgccaactgctgcctggacgccatctgctactactacatggccaaggagttccaggaggccagcgccctggccgtggcccccagcgccaaggcccacaagagccaggacagcctgtgcgtgaccctggcctag

SEQ ID NO: 82447 - DNA, 930 bp, synthetic construct; identical to SEQ ID NO: 82446
  misc_feature 1..930: note = Description of Artificial Sequence: Synthetic coding sequence
  source 1..930: mol_type = other DNA

SEQ ID NO: 82448 - DNA, 930 bp, synthetic construct; identical to SEQ ID NO: 82446
  misc_feature 1..930: note = Description of Artificial Sequence: Synthetic coding sequence
  source 1..930: mol_type = other DNA

SEQ ID NO: 82449 - DNA, 930 bp, synthetic construct; identical to SEQ ID NO: 82446
  misc_feature 1..930: note = Description of Artificial Sequence: Synthetic coding sequence
  source 1..930: mol_type = other DNA

SEQ ID NO: 82450 - DNA, 1023 bp, synthetic construct
  misc_feature 1..1023: note = Description of Artificial Sequence: Synthetic coding sequence
  source 1..1023: mol_type = other DNA
atgctgagcggcagcagagccgtgcccaccccccacagaggcagcgaggagctgctgaagtacatgctgcacagcccctgcgtgagcctgaccatgaacggcacctacaacacctgcggcagcagcgacctgacctggccccccgccatcaagctgggcttctacgcctacctgggcgtgctgctggtgctgggcctgctgctgaacagcctggccctgtgggtgttctgctgcagaatgcagcagtggaccgagaccagaatctacatgaccaacctggccgtggccgacctgtgcctgctgtgcaccctgcccttcgtgctgcacagcctgagagacaccagcgacacccccctgtgccagctgagccagggcatctacctgaccaacagatacatgagcatcagcctggtgaccgccatcgccgtggacagatacgtggccgtgagacaccccctgagagccagaggcctgagaagccccagacaggccgccgccgtgtgcgccgtgctgtgggtgctggtgatcggcagcctggtggccagatggctgctgggcatccaggagggcggcttctgcttcagaagcaccagacacaacttcaacagcatggccttccccctgctgggcttctacctgcccctggccgtggtggtgttctgcagcctgaaggtggtgaccgccctggcccagagaccccccaccgacgtgggccaggccgaggccaccagaaaggccgccagaatggtgtgggccaacctgctggtgttcgtggtgtgcttcctgcccctgcacgtgggcctgaccgtgagactggccgtgggctggaacgcctgcgccctgctggagaccatcagaagagccctgtacatcaccagcaagctgagcgacgccaactgctgcctggacgccatctgctactactacatggccaaggagttccaggaggccagcgccctggccgtggcccccagcgccaaggcccacaagagccaggacagcctgtgcgtgaccctggcctag

SEQ ID NO: 82451 - DNA, 1842 bp, synthetic construct
  misc_feature 1..1842: note = Description of Artificial Sequence: Synthetic coding sequence
  source 1..1842: mol_type = other DNA
atgagagcccccggcgccctgctggccagaatgagcagactgctgctgctgctgctgctgaaggtgagcgccagcagcgccctgggcgtggcccccgccagcagaaacgagacctgcctgggcgagagctgcgcccccaccgtgatccagagaagaggcagagacgcctggggccccggcaacagcgccagagacgtgctgagagccagagcccccagagaggagcagggcgccgccttcctggccggccccagctgggacctgcccgccgcccccggcagagaccccgccgccggcagaggcgccgaggccagcgccgccggcccccccggcccccccaccagaccccccggcccctggagatggaagggcgccagaggccaggagcccagcgagaccctgggcagaggcaaccccaccgccctgcagctgttcctgcagatcagcgaggaggaggagaagggccccagaggcgccggcatcagcggcagaagccaggagcagagcgtgaagaccgtgcccggcgccagcgacctgttctactggcccagaagagccggcaagctgcagggcagccaccacaagcccctgagcaagaccgccaacggcctggccggccacgagggctggaccatcgccctgcccggcagagccctggcccagaacggcagcctgggcgagggcatccacgagcccggcggccccagaagaggcaacagcaccaacagaagagtgagactgaagaaccccttctaccccctgacccaggagagctacggcgcctacgccgtgatgtgcctgagcgtggtgatcttcggcaccggcatcatcggcaacctggccgtgatgtgcatcgtgtgccacaactactacatgagaagcatcagcaacagcctgctggccaacctggccttctgggacttcctgatcatcttcttctgcctgcccctggtgatcttccacgagctgaccaagaagtggctgctggaggacttcagctgcaagatcgtgccctacatcgaggtggccagcctgggcgtgaccaccttcaccctgtgcgccctgtgcatcgacagattcagagccgccaccaacgtgcagatgtactacgagatgatcgagaactgcagcagcaccaccgccaagctggccgtgatctgggtgggcgccctgctgctggccctgcccgaggtggtgctgagacagctgagcaaggaggacctgggcttcagcggcagagcccccgccgagagatgcatcatcaagatcagccccgacctgcccgacaccatctacgtgctggccctgacctacgacagcgccagactgtggtggtacttcggctgctacttctgcctgcccaccctgttcaccatcacctgcagcctggtgaccgccagaaagatcagaaaggccgagaaggcctgcaccagaggcaacaagagacagatccagctggagagccagatgaactgcaccgtggtggccctgaccatcctgtacggcttctgcatcatccccgagaacatctgcaacatcgtgaccgcctacatggccaccggcgtgagccagcagaccatggacctgctgaacatcatcagccagttcctgctgttcttcaagagctgcgtgacccccgtgctgctgttctgcctgtgcaagcccttcagcagagccttcatggagtgctgctgctgctgctgcgaggagtgcatccagaagagcagcaccgtgaccagcgacgacaacgacaacgagtacaccaccgagctggagctgagccccttcagcaccatcagaagagagatgagcaccttcgccagcgtgggcacccactgctag

SEQ ID NO: 82452 - DNA, 1362 bp, synthetic construct
  misc_feature 1..1362: note = Description of Artificial Sequence: Synthetic coding sequence
  source 1..1362: mol_type = other DNA
atggccagccccagcctgcccggcagcgactgcagccagatcatcgaccacagccacgtgcccgagttcgaggtggccacctggatcaagatcaccctgatcctggtgtacctgatcatcttcgtgatgggcctgctgggcaacagcgccaccatcagagtgacccaggtgctgcagaagaagggctacctgcagaaggaggtgaccgaccacatggtgagcctggcctgcagcgacatcctggtgttcctgatcggcatgcccatggagttctacagcatcatctggaaccccctgaccaccagcagctacaccctgagctgcaagctgcacaccttcctgttcgaggcctgcagctacgccaccctgctgcacgtgctgaccctgagcttcgagagatacatcgccatctgccaccccttcagatacaaggccgtgagcggcccctgccaggtgaagctgctgatcggcttcgtgtgggtgaccagcgccctggtggccctgcccctgctgttcgccatgggcaccgagtaccccctggtgaacgtgcccagccacagaggcctgacctgcaacagaagcagcaccagacaccacgagcagcccgagaccagcaacatgagcatctgcaccaacctgagcagcagatggaccgtgttccagagcagcatcttcggcgccttcgtggtgtacctggtggtgctgctgagcgtggccttcatgtgctggaacatgatgcaggtgctgatgaagagccagaagggcagcctggccggcggcaccagacccccccagctgagaaagagcgagagcgaggagagcagaaccgccagaagacagaccatcatcttcctgagactgatcgtggtgaccctggccgtgtgctggatgcccaaccagatcagaagaatcatggccgccgccaagcccaagcacgactggaccagaagctacttcagagcctacatgatcctgctgcccttcagcgagaccttcttctacctgagcagcgtgatcaaccccctgctgtacaccgtgagcagccagcagttcagaagagtgttcgtgcaggtgctgtgctgcagactgagcctgcagcacgccaaccacgagaagagactgagagtgcacgcccacagcaccaccgacagcgccagattcgtgcagagacccctgctgttcgccagcagaagacagagcagcgccagaagaaccgagaagatcttcctgagcaccttccagagcgaggccgagccccagagcaagagccagagcctgagcctggagagcctggagcccaacagcggcgccaagcccgccaacagcgccgccgagaacggcttccaggagcacgaggtgtag

SEQ ID NO: 82453 - DNA, 1089 bp, synthetic construct
  misc_feature 1..1089: note = Description of Artificial Sequence: Synthetic coding sequence
  source 1..1089: mol_type = other DNA
atgggcaaccacacctgggagggctgccacgtggacagcagagtggaccacctgttcccccccagcctgtacatcttcgtgatcggcgtgggcctgcccaccaactgcctggccctgtgggccgcctacagacaggtgcagcagagaaacgagctgggcgtgtacctgatgaacctgagcatcgccgacctgctgtacatctgcaccctgcccctgtgggtggactacttcctgcaccacgacaactggatccacggccccggcagctgcaagctgttcggcttcatcttctacaccaacatctacatcagcatcgccttcctgtgctgcatcagcgtggacagatacctggccgtggcccaccccctgagattcgccagactgagaagagtgaagaccgccgtggccgtgagcagcgtggtgtgggccaccgagctgggcgccaacagcgcccccctgttccacgacgagctgttcagagacagatacaaccacaccttctgcttcgagaagttccccatggagggctgggtggcctggatgaacctgtacagagtgttcgtgggcttcctgttcccctgggccctgatgctgctgagctacagaggcatcctgagagccgtgagaggcagcgtgagcaccgagagacaggagaaggccaagatcaagagactggccctgagcctgatcgccatcgtgctggtgtgcttcgccccctaccacgtgctgctgctgagcagaagcgccatctacctgggcagaccctgggactgcggcttcgaggagagagtgttcagcgcctaccacagcagcctggccttcaccagcctgaactgcgtggccgaccccatcctgtactgcctggtgaacgagggcgccagaagcgacgtggccaaggccctgcacaacctgctgagattcctggccagcgacaagccccaggagatggccaacgccagcctgaccctggagacccccctgaccagcaagagaaacagcaccgccaaggccatgaccggcagctgggccgccaccccccccagccagggcgaccaggtgcagctgaagatgctgccccccgcccagtag

SEQ ID NO: 82454 - DNA, 1041 bp, synthetic construct
  misc_feature 1..1041: note = Description of Artificial Sequence: Synthetic coding sequence
  source 1..1041: mol_type = other DNA
atggacaccggccccgaccagagctacttcagcggcaaccactggttcgtgttcagcgtgtacctgctgaccttcctggtgggcctgcccctgaacctgctggccctggtggtgttcgtgggcaagctgagatgcagacccgtggccgtggacgtgctgctgctgaacctgaccgccagcgacctgctgctgctgctgttcctgcccttcagaatggtggaggccgccaacggcatgcactggcccctgcccttcatcctgtgccccctgagcggcttcatcttcttcaccaccatctacctgaccgccctgttcctggccgccgtgagcatcgagagattcctgagcgtggcccaccccctgtggtacaagaccagacccagactgggccaggccggcctggtgagcgtggcctgctggctgctggccagcgcccactgcagcgtggtgtacgtgatcgagttcagcggcgacatcagccacagccagggcaccaacggcacctgctacctggagttctggaaggaccagctggccatcctgctgcccgtgagactggagatggccgtggtgctgttcgtggtgcccctgatcatcaccagctactgctacagcagactggtgtggatcctgggcagaggcggcagccacagaagacagagaagagtggccggcctggtggccgccaccctgctgaacttcctggtgtgcttcggcccctacaacgtgagccacgtggtgggctacatctgcggcgagagccccgtgtggagaatctacgtgaccctgctgagcaccctgaacagctgcgtggaccccttcgtgtactacttcagcagcagcggcttccaggccgacttccacgagctgctgagaagactgtgcggcctgtggggccagtggcagcaggagagcagcatggagctgaaggagcagaagggcggcgaggagcagagagccgacagacccgccgagagaaagaccagcgagcacagccagggctgcggcaccggcggccaggtggcctgcgccgagaactag

SEQ ID NO: 82455 - DNA, 1119 bp, synthetic construct
  misc_feature 1..1119: note = Description of Artificial Sequence: Synthetic coding sequence
  source 1..1119: mol_type = other DNA
atggcctgcaacagcaccagcctggaggcctacacctacctgctgctgaacaccagcaacgccagcgacagcggcagcacccagctgcccgcccccctgagaatcagcctggccatcgtgatgctgctgatgaccgtggtgggcttcctgggcaacaccgtggtgtgcatcatcgtgtaccagagacccgccatgagaagcgccatcaacctgctgctggccaccctggccttcagcgacatcatgctgagcctgtgctgcatgcccttcaccgccgtgaccctgatcaccgtgagatggcacttcggcgaccacttctgcagactgagcgccaccctgtactggttcttcgtgctggagggcgtggccatcctgctgatcatcagcgtggacagattcctgatcatcgtgcagagacaggacaagctgaaccccagaagagccaaggtgatcatcgccgtgagctgggtgctgagcttctgcatcgccggccccagcctgaccggctggaccctggtggaggtgcccgccagagccccccagtgcgtgctgggctacaccgagctgcccgccgacagagcctacgtggtgaccctggtggtggccgtgttcttcgcccccttcggcgtgatgctgtgcgcctacatgtgcatcctgaacaccgtgagaaagaacgccgtgagagtgcacaaccagagcgacagcctggacctgagacagctgaccagagccggcctgagaagactgcagagacagcagcaggtgagcgtggacctgagcttcaagaccaaggccttcaccaccatcctgatcctgttcgtgggcttcagcctgtgctggctgccccacagcgtgtacagcctgctgagcgtgttcagccagagattctactgcggcagcagcttctacgccaccagcacctgcgtgctgtggctgagctacctgaagagcgtgttcaaccccatcgtgtactgctggagaatcaagaagttcagagaggcctgcatcgagctgctgccccagaccttccagatcctgcccaaggtgcccgagagaatcagaagaagaatccagcccagcaccgtgtacgtgtgcaacgagaaccagagcgccgtgtag

SEQ ID NO: 82456 - DNA, 837 bp, synthetic construct
  misc_feature 1..837: note = Description of Artificial Sequence: Synthetic coding sequence
  source 1..837: mol_type = other DNA
atgagcgcccccggcagccccgaccaggcctacgacttcctgctgaagttcctgctggtgggcgacagagacgtgggcaagagcgagatcctggagagcctgcaggacggcaccgccgagagcccctacagccacctgggcggcatcgactacaagaccaccaccatcctgctggacggccagagagtgaagctgaagctgtgggacaccagcggccagggcagattctgcaccatcttcagaagctacagcagaggcgcccagggcgtgatcctggtgtacgacatcgccaacagatggagcttcgagggcatggacagatggatcaagaagatcgaggagcacgcccccggcgtgcccaagatcctggtgggcaacagactgcacctggccttcaagagacaggtgcccagagagcaggcccaggcctacgccgagagactgggcgtgaccttcttcgaggtgagccccctgtgcaacttcaacatcatcgagagcttcaccgagctggccagaatcgtgctgctgagacacagactgaactggctgggcagacccagcaaggtgctgagcctgcaggacctgtgctgcagaaccatcgtgagctgcacccccgtgcacctggtggacaagctgcccctgcccatcgccctgagaagccacctgaagagcttcagcatggccaagggcctgaacgccagaatgatgagaggcctgagctacagcctgaccaccagcagcacccacaagagaagcagcctgtgcaaggtgaagatcgtgtgccccccccagagcccccccaagaactgcaccagaaacagctgcaagatcagctag

SEQ ID NO: 82457 - DNA, 585 bp, synthetic construct
  misc_feature 1..585: note = Description of Artificial Sequence: Synthetic coding sequence
  source 1..585: mol_type = other DNA
atggtgatcctggccgtgaccaagaacaagaagctgagaaacagcggcaacatcttcgtggtgagcctgagcgtggccgacatgctggtggccatctacccctaccccctgatgctgcacgccatgagcatcggcggctgggacctgagccagctgcagtgccagatggtgggcttcatcaccggcctgagcgtggtgggcagcatcttcaacatcgtggccatcgccatcaacagatactgctacatctgccacagcctgcagtacgagagaatcttcagcgtgagaaacacctgcatctacctggtgatcacctggatcatgaccgtgctggccgtgctgcccaacatgtacatcggcaccatcgagtacgaccccagaacctacacctgcatcttcaactacctgaacaaccccgtgttcaccgtgaccatcgtgtgcatccacttcgtgctgcccctgctgatcgtgggcttctgctacgtgagaatctggaccaaggtgctggccgccagagaccccgccggccagaaccccgacaaccagctggccgagcccaccagcaccgccgccagcaccctgtag

SEQ ID NO: 82458 - DNA, 1086 bp, synthetic construct
  misc_feature 1..1086: note = Description of Artificial Sequence: Synthetic coding sequence
  source 1..1086: mol_type = other DNA
atgaacgagagcagatggaccgagtggagaatcctgaacatgagcagcggcatcgtgaacgtgagcgagagacacagctgccccctgggcttcggccactacagcgtggtggacgtgtgcatcttcgagaccgtggtgatcgtgctgctgaccttcctgatcatcgccggcaacctgaccgtgatcttcgtgttccactgcgcccccctgctgcaccactacaccaccagctacttcatccagaccatggcctacgccgacctgttcgtgggcgtgagctgcctggtgcccaccctgagcctgctgcactacagcaccggcgtgcacgagagcctgacctgccaggtgttcggctacatcatcagcgtgctgaagagcgtgagcatggcctgcctggcctgcatcagcgtggacagatacctggccatcaccaagcccctgagctacaaccagctggtgaccccctgcagactgagaatctgcatcatcctgatctggatctacagctgcctgatcttcctgcccagcttcttcggctggggcaagcccggctaccacggcgacatcttcgagtggtgcgccaccagctggctgaccagcgcctacttcaccggcttcatcgtgtgcctgctgtacgcccccgccgccttcgtggtgtgcttcacctacttccacatcttcaagatctgcagacagcacaccaaggagatcaacgacagaagagccagattccccagccacgaggtggacagcagcagagagaccggccacagccccgacagaagatacgccatggtgctgttcagaatcaccagcgtgttctacatgctgtggctgccctacatcatctacttcctgctggagagcagcagagtgctggacaaccccaccctgagcttcctgaccacctggctggccatcagcaacagcttctgcaactgcgtgatctacagcctgagcaacagcgtgttcagactgggcctgagaagactgagcgagaccatgtgcaccagctgcatgtgcgtgaaggaccaggaggcccaggagcccaagcccagaaagagagccaacagctgcagcatctag

SEQ ID NO: 82459 - DNA, 960 bp, synthetic construct
  misc_feature 1..960: note = Description of Artificial Sequence: Synthetic coding sequence
  source 1..960: mol_type = other DNA
atgagccagcagaacaccagcggcgactgcctgttcgacggcgtgaacgagctgatgaagaccctgcagttcgccgtgcacatccccaccttcgtgctgggcctgctgctgaacctgctggccatccacggcttcagcaccttcctgaagaacagatggcccgactacgccgccaccagcatctacatgatcaacctggccgtgttcgacctgctgctggtgctgagcctgcccttcaagatggtgctgagccaggtgcagagccccttccccagcctgtgcaccctggtggagtgcctgtacttcgtgagcatgtacggcagcgtgttcaccatctgcttcatcagcatggacagattcctggccatcagataccccctgctggtgagccacctgagaagccccagaaagatcttcggcatctgctgcaccatctgggtgctggtgtggaccggcagcatccccatctacagcttccacggcaaggtggagaagtacatgtgcttccacaacatgagcgacgacacctggagcgccaaggtgttcttccccctggaggtgttcggcttcctgctgcccatgggcatcatgggcttctgctgcagcagaagcatccacatcctgctgggcagaagagaccacacccaggactgggtgcagcagaaggcctgcatctacagcatcgccgccagcctggccgtgttcgtggtgagcttcctgcccgtgcacctgggcttcttcctgcagttcctggtgagaaacagcttcatcgtggagtgcagagccaagcagagcatcagcttcttcctgcagctgagcatgtgcttcagcaacgtgaactgctgcctggacgtgttctgctactacttcgtgatcaaggagttcagaatgaacatcagagcccacagacccagcagagtgcagctggtgctgcaggacaccaccatcagcagaggctag

SEQ ID NO: 82460 - DNA, 960 bp, synthetic construct; identical to SEQ ID NO: 82459
  misc_feature 1..960: note = Description of Artificial Sequence: Synthetic coding sequence
  source 1..960: mol_type = other DNA

SEQ ID NO: 82461 - DNA, 729 bp, synthetic construct
  misc_feature 1..729: note = Description of Artificial Sequence: Synthetic coding sequence
  source 1..729: mol_type = other DNA
atgagccagcagaacaccagcggcgactgcctgttcgacggcgtgaacgagctgatgaagaccctgcagttcgccgtgcacatccccaccttcgtgctgggcctgctgctgaacctgctggccatccacggcttcagcaccttcctgaagaacagatggcccgactacgccgccaccagcatctacatgatcaacctggccgtgttcgacctgctgctggtgctgagcctgcccttcaagatggtgctgagccaggtgcagagccccttccccagcctgtgcaccctggtggagtgcctgtacttcgtgagcatgtacggcagcgtgttcaccatctgcttcatcagcatggacagattcctggccatcagataccccctgctggtgagccacctgagaagccccagaaagatcttcggcatctgctgcaccatctgggtgctggtgtggaccggcagcatccccatctacagcttccacggcaaggtggagaagtacatgtgcttccacaacatgagcgacgacacctggagcgccaaggtgttcttccccctggaggtgttcggcttcctgctgcccatgggcatcatgggcttctgctgcagcagaagcatccacatcctgctgggcagaagagaccacacccaggactgggtgcagcagaaggcctgcatctacagcatcgccgccagcctggccgtgttcgtggtgagcttcctgcccgtgtag

SEQ ID NO: 82462 - DNA, 960 bp, synthetic construct; identical to SEQ ID NO: 82459
  misc_feature 1..960: note = Description of Artificial Sequence: Synthetic coding sequence
  source 1..960: mol_type = other DNA

SEQ ID NO: 82463 - DNA, 1572 bp, synthetic construct
  misc_feature 1..1572: note = Description of Artificial Sequence: Synthetic coding sequence
  source 1..1572: mol_type = other DNA
atgaccccccagagcctgctgcagaccaccctgttcctgctgagcctgctgttcctggtgcagggcgcccacggcagaggccacagagaggacttcagattctgcagccagcagctgcagagcctggagagcaagctgaccagcgtgagattcatgggcgacatggtgagcttcgaggaggacagaatcaacgccaccgtgtggaagctgcagcccaccgccggcctgcaggacctgcacatccacagcagacaggaggaggagcagagcgagatcatggagtacagcgtgctgctgcccagaaccctgttccagagaaccaagggcagaagcggcgaggccgagaagagactgctgctggtggacttcagcagccaggccctgttccaggacaagaacagcagccaggtgctgggcgagaaggtgctgggcatcgtggtgcagaacaccaaggtggccaacctgaccgagcccgtggtgctgaccttccagcaccagctgcagcccaagaacgtgaccctgcagtgcgtgttctgggtggaggaccccaccctgagcagccccggccactggagcagcgccggctgcgagaccgtgagaagagagacccagaccagctgcttctgcaaccacctgacctacttcgccgtgctgatggtgagcagcgtggaggtggacgccgtgcacaagcactacctgagcctgctgagctacgtgggctgcgtggtgagcgccctggcctgcctggtgaccatcgccgcctacctgtgcagcagagtgcccctgccctgcagaagaaagcccagagactacaccatcaaggtgcacatgaacctgctgctggccgtgttcctgctggacaccagcttcctgctgagcgagcccgtggccctgaccggcagcgaggccggctgcagagccagcgccatcttcctgcacttcagcctgctgacctgcctgagctggatgggcctggagggctacaacctgtacagactggtggtggaggtgttcggcacctacgtgcccggctacctgctgaagctgagcgccatgggctggggcttccccatcttcctggtgaccctggtggccctggtggacgtggacaactacggccccatcatcctggccgtgcacagaacccccgagggcgtgatctaccccagcatgtgctggatcagagacagcctggtgagctacatcaccaacctgggcctgttcagcctggtgttcctgttcaacatggccatgctggccaccatggtggtgcagatcctgagactgagaccccacacccagaagtggagccacgtgctgaccctgctgggcctgagcctggtgctgggcctgccctgggccctgatcttcttcagcttcgccagcggcaccttccagctggtggtgctgtacctgttcagcatcatcaccagcttccagggcttcctgatcttcatctggtactggagcatgagactgcaggccagaggcggccccagccccctgaagagcaacagcgacagcgccagactgcccatcagcagcggcagcaccagcagcagcagaatctag

SEQ ID NO: 82464 - DNA, 2082 bp, synthetic construct
  misc_feature 1..2082: note = Description of Artificial Sequence: Synthetic coding sequence
  source 1..2082: mol_type = other DNA
atgaccccccagagcctgctgcagaccaccctgttcctgctgagcctgctgttcctggtgcagggcgcccacggcagaggccacagagaggacttcagattctgcagccagagaaaccagacccacagaagcagcctgcactacaagcccacccccgacctgagaatcagcatcgagaacagcgaggaggccctgaccgtgcacgcccccttccccgccgcccaccccgccagcagaagcttccccgaccccagaggcctgtaccacttctgcctgtactggaacagacacgccggcagactgcacctgctgtacggcaagagagacttcctgctgagcgacaaggccagcagcctgctgtgcttccagcaccaggaggagagcctggcccagggcccccccctgctggccaccagcgtgaccagctggtggagcccccagaacatcagcctgcccagcgccgccagcttcaccttcagcttccacagccccccccacaccgccgcccacaacgccagcgtggacatgtgcgagctgaagagagacctgcagctgctgagccagttcctgaagcacccccagaaggccagcagaagacccagcgccgcccccgccagccagcagctgcagagcctggagagcaagctgaccagcgtgagattcatgggcgacatggtgagcttcgaggaggacagaatcaacgccaccgtgtggaagctgcagcccaccgccggcctgcaggacctgcacatccacagcagacaggaggaggagcagagcgagatcatggagtacagcgtgctgctgcccagaaccctgttccagagaaccaagggcagaagcggcgaggccgagaagagactgctgctggtggacttcagcagccaggccctgttccaggacaagaacagcagccaggtgctgggcgagaaggtgctgggcatcgtggtgcagaacaccaaggtggccaacctgaccgagcccgtggtgctgaccttccagcaccagctgcagcccaagaacgtgaccctgcagtgcgtgttctgggtggaggaccccaccctgagcagccccggccactggagcagcgccggctgcgagaccgtgagaagagagacccagaccagctgcttctgcaaccacctgacctacttcgccgtgctgatggtgagcagcgtggaggtggacgccgtgcacaagcactacctgagcctgctgagctacgtgggctgcgtggtgagcgccctggcctgcctggtgaccatcgccgcctacctgtgcagcagagtgcccctgccctgcagaagaaagcccagagactacaccatcaaggtgcacatgaacctgctgctggccgtgttcctgctggacaccagcttcctgctgagcgagcccgtggccctgaccggcagcgaggccggctgcagagccagcgccatcttcctgcacttcagcctgctgacctgcctgagctggatgggcctggagggctacaacctgtacagactggtggtggaggtgttcggcacctacgtgcccggctacctgctgaagctgagcgccatgggctggggcttccccatcttcctggtgaccctggtggccctggtggacgtggacaactacggccccatcatcctggccgtgcacagaacccccgagggcgtgatctaccccagcatgtgctggatcagagacagcctggtgagctacatcaccaacctgggcctgttcagcctggtgttcctgttcaacatggccatgctggccaccatggtggtgcagatcctgagactgagaccccacacccagaagtggagccacgtgctgaccctgctgggcctgagcctggtgctgggcctgccctgggccctgatcttcttcagcttcgccagcggcaccttccagctggtggtgctgtacctgttcagcatcatcaccagcttccagggcttcctgatcttcatctggtactggagcatgagactgcaggccagaggcggccccagccccctgaagagcaacagcgacagcgccagactgcccatcagcagcggcagcaccagcagcagcagaatctag

SEQ ID NO: 82465 - DNA, 2082 bp, synthetic construct; identical to SEQ ID NO: 82464
  misc_feature 1..2082: note = Description of Artificial Sequence: Synthetic coding sequence
  source 1..2082: mol_type = other DNA

SEQ ID NO: 82466 - DNA, 2064 bp, synthetic construct
  misc_feature 1..2064: note = Description of Artificial Sequence: Synthetic coding sequence
  source 1..2064: mol_type = other DNA
atgaccccccagagcctgctgcagaccaccctgttcctgctgagcctgctgttcctggtgcagggcgcccacggcagaggccacagagaggacttcagattctgcagccagagaaaccagacccacagaagcagcctgcactacaagcccacccccgacctgagaatcagcatcgagaacagcgaggaggccctgaccgtgcacgcccccttccccgccgcccaccccgccagcagaagcttccccgaccccagaggcctgtaccacttctgcctgtactggaacagacacgccggcagactgcacctgctgtacggcaagagagacttcctgctgagcgacaaggccagcagcctgctgtgcttccagcaccaggaggagagcctggcccagggcccccccctgctggccaccagcgtgaccagctggtggagcccccagaacatcagcctgcccagcgccgccagcttcaccttcagcttccacagccccccccacaccgccgcccacaacgccagcgtggacatgtgcgagctgaagagagacctgcagctgctgagccagttcctgaagcacccccagaaggccagcagaagacccagcgccgcccccgccagccagcagctgcagagcctggagagcaagctgaccagcgtgagattcatgggcgacatggtgagcttcgaggaggacagaatcaacgccaccgtgtggaagctgcagcccaccgccggcctgcaggacctgcacatccacagcagacaggaggaggagcagagcgagatcatggagtacagcgtgctgctgcccagaaccctgttccagagaaccaagggcagaagcggcgaggccgagaagagactgctgctggtggacttcagcagccaggccctgttccaggacaagaacagcagccaggtgctgggcgagaaggtgctgggcatcgtggtgcagaacaccaaggtggccaacctgaccgagcccgtggtgctgaccttccagcaccagctgcagcccaagaacgtgaccctgcagtgcgtgttctgggtggaggaccccaccctgagcagccccggccactggagcagcgccggctgcgagaccgtgagaagagagacccagaccagctgcttctgcaaccacctgacctacttcgccgtgctgatggtgagcagcgtggaggtggacgccgtgcacaagcactacctgagcctgctgagctacgtgggctgcgtggtgagcgccctggcctgcctggtgaccatcgccgcctacctgtgcagcagaagaaagcccagagactacaccatcaaggtgcacatgaacctgctgctggccgtgttcctgctggacaccagcttcctgctgagcgagcccgtggccctgaccggcagcgaggccggctgcagagccagcgccatcttcctgcacttcagcctgctgacctgcctgagctggatgggcctggagggctacaacctgtacagactggtggtggaggtgttcggcacctacgtgcccggctacctgctgaagctgagcgccatgggctggggcttccccatcttcctggtgaccctggtggccctggtggacgtggacaactacggccccatcatcctggccgtgcacagaacccccgagggcgtgatctaccccagcatgtgctggatcagagacagcctggtgagctacatcaccaacctgggcctgttcagcctggtgttcctgttcaacatggccatgctggccaccatggtggtgcagatcctgagactgagaccccacacccagaagtggagccacgtgctgaccctgctgggcctgagcctggtgctgggcctgccctgggccctgatcttcttcagcttcgccagcggcaccttccagctggtggtgctgtacctgttcagcatcatcaccagcttccagggcttcctgatcttcatctggtactggagcatgagactgcaggccagaggcggccccagccccctgaagagcaacagcgacagcgccagactgcccatcagcagcggcagcaccagcagcagcagaatctag

SEQ ID NO: 82467 - DNA, 2082 bp, synthetic construct; identical to SEQ ID NO: 82464
  misc_feature 1..2082: note = Description of Artificial Sequence: Synthetic coding sequence
  source 1..2082: mol_type = other DNA

SEQ ID NO: 82468 - DNA, 2064 bp, synthetic construct; identical to SEQ ID NO: 82466
  misc_feature 1..2064: note = Description of Artificial Sequence: Synthetic coding sequence
  source 1..2064: mol_type = other DNA

SEQ ID NO: 82469 - DNA, 2064 bp, synthetic construct; identical to SEQ ID NO: 82466
  misc_feature 1..2064: note = Description of Artificial Sequence: Synthetic coding sequence
  source 1..2064: mol_type = other DNA

SEQ ID NO: 82470 - DNA, 1539 bp, synthetic construct
  misc_feature 1..1539: note = Description of Artificial Sequence: Synthetic coding sequence
  source 1..1539: mol_type = other DNA
atgtgcgagctgaagagagacctgcagctgctgagccagttcctgaagcacccccagaaggccagcagaagacccagcgccgcccccgccagccagcagctgcagagcctggagagcaagctgaccagcgtgagattcatgggcgacatggtgagcttcgaggaggacagaatcaacgccaccgtgtggaagctgcagcccaccgccggcctgcaggacctgcacatccacagcagacaggaggaggagcagagcgagatcatggagtacagcgtgctgctgcccagaaccctgttccagagaaccaagggcagaagcggcgaggccgagaagagactgctgctggtggacttcagcagccaggccctgttccaggacaagaacagcagccaggtgctgggcgagaaggtgctgggcatcgtggtgcagaacaccaaggtggccaacctgaccgagcccgtggtgctgaccttccagcaccagctgcagcccaagaacgtgaccctgcagtgcgtgttctgggtggaggaccccaccctgagcagccccggccactggagcagcgccggctgcgagaccgtgagaagagagacccagaccagctgcttctgcaaccacctgacctacttcgccgtgctgatggtgagcagcgtggaggtggacgccgtgcacaagcactacctgagcctgctgagctacgtgggctgcgtggtgagcgccctggcctgcctggtgaccatcgccgcctacctgtgcagcagaagaaagcccagagactacaccatcaaggtgcacatgaacctgctgctggccgtgttcctgctggacaccagcttcctgctgagcgagcccgtggccctgaccggcagcgaggccggctgcagagccagcgccatcttcctgcacttcagcctgctgacctgcctgagctggatgggcctggagggctacaacctgtacagactggtggtggaggtgttcggcacctacgtgcccggctacctgctgaagctgagcgccatgggctggggcttccccatcttcctggtgaccctggtggccctggtggacgtggacaactacggccccatcatcctggccgtgcacagaacccccgagggcgtgatctaccccagcatgtgctggatcagagacagcctggtgagctacatcaccaacctgggcctgttcagcctggtgttcctgttcaacatggccatgctggccaccatggtggtgcagatcctgagactgagaccccacacccagaagtggagccacgtgctgaccctgctgggcctgagcctggtgctgggcctgccctgggccctgatcttcttcagcttcgccagcggcaccttccagctggtggtgctgtacctgttcagcatcatcaccagcttccagggcttcctgatcttcatctggtactggagcatgagactgcaggccagaggcggccccagccccctgaagagcaacagcgacagcgccagactgcccatcagcagcggcagcaccagcagcagcagaatctag

SEQ ID NO: 82471 - DNA, 2064 bp, synthetic construct; identical to SEQ ID NO: 82466
  misc_feature 1..2064: note = Description of Artificial Sequence: Synthetic coding sequence
  source 1..2064: mol_type = other DNA

SEQ ID NO: 82472 - DNA, 2064 bp, synthetic construct; identical to SEQ ID NO: 82466
  misc_feature 1..2064: note = Description of Artificial Sequence: Synthetic coding sequence
  source 1..2064: mol_type = other DNA

SEQ ID NO: 82473 - DNA, 1089 bp, synthetic construct
  misc_feature 1..1089: note = Description of Artificial Sequence: Synthetic coding sequence
  source 1..1089: mol_type = other DNA
atgaacgccagcgccgccagcctgaacgacagccaggtggtggtggtggccgccgagggcgccgccgccgccgccaccgccgccggcggccccgacaccggcgagtggggcccccccgccgccgccgccctgggcgccggcggcggcgccaacggcagcctggagctgagcagccagctgagcgccggcccccccggcctgctgctgcccgccgtgaacccctgggacgtgctgctgtgcgtgagcggcaccgtgatcgccggcgagaacgccctggtggtggccctgatcgccagcacccccgccctgagaacccccatgttcgtgctggtgggcagcctggccaccgccgacctgctggccggctgcggcctgatcctgcacttcgtgttccagtacctggtgcccagcgagaccgtgagcctgctgaccgtgggcttcctggtggccagcttcgccgccagcgtgagcagcctgctggccatcaccgtggacagatacctgagcctgtacaacgccctgacctactacagcagaagaaccctgctgggcgtgcacctgctgctggccgccacctggaccgtgagcctgggcctgggcctgctgcccgtgctgggctggaactgcctggccgagagagccgcctgcagcgtggtgagacccctggccagaagccacgtggccctgctgagcgccgccttcttcatggtgttcggcatcatgctgcacctgtacgtgagaatctgccaggtggtgtggagacacgcccaccagatcgccctgcagcagcactgcctggcccccccccacctggccgccaccagaaagggcgtgggcaccctggccgtggtgctgggcaccttcggcgccagctggctgcccttcgccatctactgcgtggtgggcagccacgaggaccccgccgtgtacacctacgccaccctgctgcccgccacctacaacagcatgatcaaccccatcatctacgccttcagaaaccaggagatccagagagccctgtggctgctgctgtgcggctgcttccagagcaaggtgcccttcagaagcagaagccccagcgaggtgtag

SEQ ID NO: 82474 - DNA, 1134 bp, synthetic construct
  misc_feature 1..1134: note = Description of Artificial Sequence: Synthetic coding sequence
  source 1..1134: mol_type = other DNA
atgaccctgctggcctggtgcaccagaggcgccaaccccgccgccatgaacgccagcgccgccagcctgaacgacagccaggtggtggtggtggccgccgagggcgccgccgccgccgccaccgccgccggcggccccgacaccggcgagtggggcccccccgccgccgccgccctgggcgccggcggcggcgccaacggcagcctggagctgagcagccagctgagcgccggcccccccggcctgctgctgcccgccgtgaacccctgggacgtgctgctgtgcgtgagcggcaccgtgatcgccggcgagaacgccctggtggtggccctgatcgccagcacccccgccctgagaacccccatgttcgtgctggtgggcagcctggccaccgccgacctgctggccggctgcggcctgatcctgcacttcgtgttccagtacctggtgcccagcgagaccgtgagcctgctgaccgtgggcttcctggtggccagcttcgccgccagcgtgagcagcctgctggccatcaccgtggacagatacctgagcctgtacaacgccctgacctactacagcagaagaaccctgctgggcgtgcacctgctgctggccgccacctggaccgtgagcctgggcctgggcctgctgcccgtgctgggctggaactgcctggccgagagagccgcctgcagcgtggtgagacccctggccagaagccacgtggccctgctgagcgccgccttcttcatggtgttcggcatcatgctgcacctgtacgtgagaatctgccaggtggtgtggagacacgcccaccagatcgccctgcagcagcactgcctggcccccccccacctggccgccaccagaaagggcgtgggcaccctggccgtggtgctgggcaccttcggcgccagctggctgcccttcgccatctactgcgtggtgggcagccacgaggaccccgccgtgtacacctacgccaccctgctgcccgccacctacaacagcatgatcaaccccatcatctacgccttcagaaaccaggagatccagagagccctgtggctgctgctgtgcggctgcttccagagcaaggtgcccttcagaagcagaagccccagcgaggtgtag

SEQ ID NO: 82475 - DNA, 1023 bp, synthetic construct
  misc_feature 1..1023: note = Description of Artificial Sequence: Synthetic coding sequence
  source 1..1023: mol_type = other DNA
atgaacgccagcgccgccagcctgaacgacagccaggtggtggtggtggccgccgagggcgccgccgccgccgccaccgccgccggcggccccgacaccggcgagtggggcccccccgccgccgccgccctgggcgccggcggcggcgccaacggcagcctggagctgagcagccagctgagcgccggcccccccggcctgctgctgcccgccgtgaacccctgggacgtgctgctgtgcgtgagcggcaccgtgatcgccggcgagaacgccctggtggtggccctgatcgccagcacccccgccctgagaacccccatgttcgtgctggtgggcagcctggccaccgccgacctgctggccggctgcggcctgatcctgcacttcgtgttccagtacctggtgcccagcgagaccgtgagcctgctgaccgtgggcttcctggtggccagcttcgccgccagcgtgagcagcctgctggccatcaccgtggacagatacctgagcctgtacaacgccctgacctactacagcagaagaaccctgctgggcgtgcacctgctgctggccgccacctggaccgtgagcctgggcctgggcctgctgcccgtgctgggctggaactgcctggccgagagagccgcctgcagcgtggtgagacccctggccagaagccacgtggccctgctgagcgccgccttcttcatggtgttcggcatcatgctgcacctgtacgtgagaatctgccaggtggtgtggagacacgcccaccagatcgccctgcagcagcactgcctggcccccccccacctggccgccaccagaaagggcgtgggcaccctggccgtggtgctgggcaccttcggcgccagctggctgcccttcgccacctacaacagcatgatcaaccccatcatctacgccttcagaaaccaggagatccagagagccctgtggctgctgctgtgcggctgcttccagagcaaggtgcccttcagaagcagaagccccagcgaggtgtag

SEQ ID NO: 82476 - DNA, 1740 bp, synthetic construct
  misc_feature 1..1740: note = Description of Artificial Sequence: Synthetic coding sequence
  source 1..1740: mol_type = other DNA
aaccccagactgaccgtgctggagagagtggagggctacggcgagcaggagtggcagaagggcgacggcaagggcagaggcgagggccacagcgagagcggcgtgctgagcggcagcggcagctgcaccagccacgtgagctgcttcctggccgtgaccaaggccgaccccgccgccaccagcggccagaagggcgacgagctgctgatcctgcagctgcccggcctggccctgtgcacccagaccaacctgcccaagagactgcagtgggaggtgccccccaccaagcccggcagcctgggcctgggcagccccagccagggcagatggaccagaatgggcgacggcccccaggaggtgccctgggtgcccagcttcggccccatggagagcagccccatcccccagagcagcggcaacagcagcaccctgggcagagtgccccagacccccggccccagcaccgccagcggcgtgcccgaggtgggcctgagagacgtggccagcgagagcgtggccctgttcttcatgctgctgctggacctgaccgccgtggccggcaacgccgccgtgatggccgtgatcgccaagacccccgccctgagaaagttcgtgttcgtgttccacctgtgcctggtggacctgctggccgccctgaccctgatgcccctggccatgctgagcagcagcgccctgttcgaccacgccctgttcggcgaggtggcctgcagactgtacctgttcctgagcgtgtgcttcgtgagcctggccatcctgagcgtgagcgccatcaacgtggagagatactactacgtggtgcaccccatgagatacgaggtgagaatgaccctgggcctggtggccagcgtgctggtgggcgtgtgggtgaaggccctggccatggccagcgtgcccgtgctgggcagagtgagctgggaggagggcgcccccagcgtgccccccggctgcagcctgcagtggagccacagcgcctactgccagctgttcgtggtggtgttcgccgtgctgtacttcctgctgcccctgctgctgatcctggtggtgtactgcagcatgttcagagtggccagagtggccgccatgcagcacggccccctgcccacctggatggagacccccagacagagaagcgagagcctgagcagcagaagcaccatggtgaccagcagcggcgccccccagaccaccccccacagaaccttcggcggcggcaaggccgccgtggtgctgctggccgtgggcggccagttcctgctgtgctggctgccctacttcagcttccacctgtacgtggccctgagcgcccagcccatcagcaccggccaggtggagagcgtggtgacctggatcggctacttctgcttcaccagcaaccccttcttctacggctgcctgaacagacagatcagaggcgagctgagcaagcagttcgtgtgcttcttcaagcccgcccccgaggaggagctgagactgcccagcagagagggcagcatcgaggagaacttcctgcagttcctgcagggcaccggctgccccagcgagagctgggtgagcagacccctgcccagccccaagcaggagccccccgccgtggacttcagaatccccggccagatcgccgaggagaccagcgagttcctggagcagcagctgaccagcgacatcatcatgagcgacagctacctgagacccgccgccagccccagactggagagctag

SEQ ID NO: 82477 - DNA, 1356 bp, synthetic construct
  misc_feature 1..1356: note = Description of Artificial Sequence: Synthetic coding sequence
  source 1..1356: mol_type = other DNA
atggagagcagccccatcccccagagcagcggcaacagcagcaccctgggcagagtgccccagacccccggccccagcaccgccagcggcgtgcccgaggtgggcctgagagacgtggccagcgagagcgtggccctgttcttcatgctgctgctggacctgaccgccgtggccggcaacgccgccgtgatggccgtgatcgccaagacccccgccctgagaaagttcgtgttcgtgttccacctgtgcctggtggacctgctggccgccctgaccctgatgcccctggccatgctgagcagcagcgccctgttcgaccacgccctgttcggcgaggtggcctgcagactgtacctgttcctgagcgtgtgcttcgtgagcctggccatcctgagcgtgagcgccatcaacgtggagagatactactacgtggtgcaccccatgagatacgaggtgagaatgaccctgggcctggtggccagcgtgctggtgggcgtgtgggtgaaggccctggccatggccagcgtgcccgtgctgggcagagtgagctgggaggagggcgcccccagcgtgccccccggctgcagcctgcagtggagccacagcgcctactgccagctgttcgtggtggtgttcgccgtgctgtacttcctgctgcccctgctgctgatcctggtggtgtactgcagcatgttcagagtggccagagtggccgccatgcagcacggccccctgcccacctggatggagacccccagacagagaagcgagagcctgagcagcagaagcaccatggtgaccagcagcggcgccccccagaccaccccccacagaaccttcggcggcggcaaggccgccgtggtgctgctggccgtgggcggccagttcctgctgtgctggctgccctacttcagcttccacctgtacgtggccctgagcgcccagcccatcagcaccggccaggtggagagcgtggtgacctggatcggctacttctgcttcaccagcaaccccttcttctacggctgcctgaacagacagatcagaggcgagctgagcaagcagttcgtgtgcttcttcaagcccgcccccgaggaggagctgagactgcccagcagagagggcagcatcgaggagaacttcctgcagttcctgcagggcaccggctgccccagcgagagctgggtgagcagacccctgcccagccccaagcaggagccccccgccgtggacttcagaatccccggccagatcgccgaggagaccagcgagttcctggagcagcagctgaccagcgacatcatcatgagcgacagctacctgagacccgccgccagccccagactggagagctag

SEQ ID NO: 82478 - DNA, 1356 bp, synthetic construct; identical to SEQ ID NO: 82477
  misc_feature 1..1356: note = Description of Artificial Sequence: Synthetic coding sequence
  source 1..1356: mol_type = other DNA

SEQ ID NO: 82479 - DNA, 1356 bp, synthetic construct; identical to SEQ ID NO: 82477
  misc_feature 1..1356: note = Description of Artificial Sequence: Synthetic coding sequence
  source 1..1356: mol_type = other DNA

SEQ ID NO: 82480 - DNA, 1107 bp, synthetic construct
  misc_feature 1..1107: note = Description of Artificial Sequence: Synthetic coding sequence
  source 1..1107: mol_type = other DNA
atggccaacagcaccggcctgaacgccagcgaggtggccggcagcctgggcctgatcctggccgccgtggtggaggtgggcgccctgctgggcaacggcgccctgctggtggtggtgctgagaacccccggcctgagagacgccctgtacctggcccacctgtgcgtggtggacctgctggccgccgccagcatcatgcccctgggcctgctggccgcccccccccccggcctgggcagagtgagactgggccccgccccctgcagagccgccagattcctgagcgccgccctgctgcccgcctgcaccctgggcgtggccgccctgggcctggccagatacagactgatcgtgcaccccctgagacccggcagcagacccccccccgtgctggtgctgaccgccgtgtgggccgccgccggcctgctgggcgccctgagcctgctgggcaccccccccgcccccccccccgcccccgccagatgcagcgtgctggccggcggcctgggccccttcagacccctgtgggccctgctggccttcgccctgcccgccctgctgctgctgggcgcctacggcggcatcttcgtggtggccagaagagccgccctgagaccccccagacccgccagaggcagcagactgcacagcgacagcctggacagcagactgagcatcctgccccccctgagacccagactgcccggcggcaaggccgccctggcccccgccctggccgtgggccagttcgccgcctgctggctgccctacggctgcgcctgcctggcccccgccgccagagccgccgaggccgaggccgccgtgacctgggtggcctacagcgccttcgccgcccaccccttcctgtacggcctgctgcagagacccgtgagactggccctgggcagactgagcagaagagccctgcccggccccgtgagagcctgcaccccccaggcctggcaccccagagccctgctgcagtgcctgcagagaccccccgagggccccgccgtgggccccagcgaggcccccgagcagacccccgagctggccggcggcagaagccccgcctaccagggcccccccgagagcagcctgagctag

SEQ ID NO: 82481 - DNA, 1434 bp, synthetic construct
  misc_feature 1..1434: note = Description of Artificial Sequence: Synthetic coding sequence
  source 1..1434: mol_type = other DNA
atggccaacatgcagggcctggtggagagactggagagagccgtgagcagactggagagcctgagcgccgagagccacagaccccccggcaactgcggcgaggtgaacggcgtgatcgccggcgtggcccccagcgtggaggccttcgacaagctgatggacagcatggtggccgagttcctgaagaacagcagaatcctggccggcgacgtggagacccacgccgagatggtgcacagcgccttccaggcccagagagccttcctgctgatggccagccagtaccagcagccccacgagaacgacgtggccgccctgctgaagcccatcagcgagaagatccaggagatccagaccttcagagagagaaacagaggcagcaacatgttcaaccacctgagcgccgtgagcgagagcatccccgccctgggctggatcgccgtgagccccaagcccggcccctacgtgaaggagatgaacgacgccgccaccttctacaccaacagagtgctgaaggactacaagcacagcgacctgagacacgtggactgggtgaagagctacctgaacatctggagcgagctgcaggcctacatcaaggagcaccacaccaccggcctgacctggagcaagaccggccccgtggccagcaccgtgagcgccttcagcgtgctgagcagcggccccggcctgccccccccccccccccccctgcccccccccggccccccccccctgttcgagaacgagggcaagaaggaggagagcagccccagcagaagcgccctgttcgcccagctgaaccagggcgaggccatcaccaagggcctgagacacgtgaccgacgaccagaagacctacaagaaccccagcctgagagcccagggcggccagacccagagccccaccaagagccacacccccagccccaccagccccaagagctaccccagccagaagcacgcccccgtgctggagctggagggcaagaagtggagagtggagtaccaggaggacagaaacgacctggtgatcagcgagaccgagctgaagcaggtggcctacatcttcaagtgcgagaagagcaccatccagatcaagggcaaggtgaacagcatcatcatcgacaactgcaagaagctgggcctggtgttcgacaacgtggtgggcatcgtggaggtgatcaacagccaggacatccagatccaggtgatgggcagagtgcccaccatcagcatcaacaagaccgagggctgccacatctacctgagcgaggacgccctggactgcgagatcgtgagcgccaagagcagcgagatgaacatcctgatcccccaggacggcgactacagagagttccccatccccgagcagttcaagaccgcctgggacggcagcaagctgatcaccgagcccgccgagatcatggcctag

SEQ ID NO: 82482 - DNA, 1260 bp, synthetic construct; identical to SEQ ID NO: 81358
  misc_feature 1..1260: note = Description of Artificial Sequence: Synthetic coding sequence
  source 1..1260: mol_type = other DNA

SEQ ID NO: 82483 - DNA, 1260 bp, synthetic construct; identical to SEQ ID NO: 81358
  misc_feature 1..1260: note = Description of Artificial Sequence: Synthetic coding sequence
  source 1..1260: mol_type = other DNA

SEQ ID NO: 82484 - DNA, 1332 bp, synthetic construct
  misc_feature 1..1332: note = Description of Artificial Sequence: Synthetic coding sequence
  source 1..1332: mol_type = other DNA
tactgctgcagcgtgctgaagtgcctgaagaacagctgcatcagcgcctgcatcttccaccccaccgagaccatggtgttcagcgccgtgctgaccgccttccacaccggcaccagcaacaccaccttcgtggtgtacgagaacacctacatgaacatcaccctgcccccccccttccagcaccccgacctgagccccctgctgagatacagcttcgagaccatggcccccaccggcctgagcagcctgaccgtgaacagcaccgccgtgcccaccacccccgccgccttcaagagcctgaacctgcccctgcagatcaccctgagcgccatcatgatcttcatcctgttcgtgagcttcctgggcaacctggtggtgtgcctgatggtgtaccagaaggccgccatgagaagcgccatcaacatcctgctggccagcctggccttcgccgacatgctgctggccgtgctgaacatgcccttcgccctggtgaccatcctgaccaccagatggatcttcggcaagttcttctgcagagtgagcgccatgttcttctggctgttcgtgatcgagggcgtggccatcctgctgatcatcagcatcgacagattcctgatcatcgtgcagagacaggacaagctgaacccctacagagccaaggtgctgatcgccgtgagctgggccaccagcttctgcgtggccttccccctggccgtgggcaaccccgacctgcagatccccagcagagccccccagtgcgtgttcggctacaccaccaaccccggctaccaggcctacgtgatcctgatcagcctgatcagcttcttcatccccttcctggtgatcctgtacagcttcatgggcatcctgaacaccctgagacacaacgccctgagaatccacagctaccccgagggcatctgcctgagccaggccagcaagctgggcctgatgagcctgcagagacccttccagatgagcatcgacatgggcttcaagaccagagccttcaccaccatcctgatcctgttcgccgtgttcatcgtgtgctgggcccccttcaccacctacagcctggtggccaccttcagcaagcacttctactaccagcacaacttcttcgagatcagcacctggctgctgtggctgtgctacctgaagagcgccctgaaccccctgatctactactggagaatcaagaagttccacgacgcctgcctggacatgatgcccaagagcttcaagttcctgccccagctgcccggccacaccaagagaagaatcagacccagcgccgtgtacgtgtgcggcgagcacagaaccgtggtgtag

SEQ ID NO: 82485 - DNA, 2697 bp, synthetic construct
  misc_feature 1..2697: note = Description of Artificial Sequence: Synthetic coding sequence
  source 1..2697: mol_type = other DNA
atggtgttcagcgtgagacagtgcggccacgtgggcagaaccgaggaggtgctgctgaccttcaagatcttcctggtgatcatctgcctgcacgtggtgctggtgaccagcctggaggaggacaccgacaacagcagcctgagccccccccccgaggtggagaccaccagcctgaacgacgtgaccctgagcctgctgcccagcaacgagaccggcgtgaagccccagagaaacatctgcaacctgagcagcatctgcaacgacagcgccttcttcagaggcgagatcatgttccagtacgacaaggagagcaccgtgccccagaaccagcacatcaccaacggcaccctgaccggcgtgctgagcctgagcgagctgaagagaagcgagctgaacaagaccctgcagaccctgagcgagacctacttcatcatgtgcgccaccgccgaggcccagagcaccctgaactgcaccttcaccatcaagctgaacaacaccatgaacgcctgcgccgtgatcgccgccctggagagagtgaagatcagacccatggagcactgctgctgcagcgtgagaatcccctgccccagcagccccgaggagctggagaagctgcagtgcgacctgcaggaccccatcgtgtgcctggccgaccaccccagaggcccccccttcagcagcagccagagcatccccgtggtgcccagagccaccgtgctgagccaggtgcccaaggccaccagcttcgccgagccccccgactacagccccgtgacccacaacgtgcccagccccatcggcgagatccagcccctgagcccccagcccagcgcccccatcgccagcagccccgccatcgacatgcccccccagagcgagaccatcagcagccccatgccccagacccacgtgagcggcacccccccccccgtgaaggccagcttcagcagccccaccgtgagcgcccccgccaacgtgaacaccaccagcgccccccccgtgcagaccgacatcgtgaacaccagcagcatcagcgacctggagaaccaggtgctgcagatggagaaggccctgagcctgggcagcctggagcccaacctggccggcgagatgatcaaccaggtgagcagactgctgcacagcccccccgacatgctggcccccctggcccagagactgctgaaggtggtggacgacatcggcctgcagctgaacttcagcaacaccaccatcagcctgaccagccccagcctggccctggccgtgatcagagtgaacgccagcagcttcaacaccaccaccttcgtggcccaggaccccgccaacctgcaggacgagctgaccgtgagatgcgtgttctgggacctgggcagaaacggcggcagaggcggctggagcgacaacggctgcagcgtgaaggacagaagactgaacgagaccatctgcacctgcagccacctgaccagcttcggcgtgctgctggacctgagcagaaccagcgtgctgcccgcccagatgatggccctgaccttcatcacctacatcggctgcggcctgagcagcatcttcctgagcgtgaccctggtgacctacatcgccttcgagaagatcagaagagactaccccagcaagatcctgatccagctgtgcgccgccctgctgctgctgaacctggtgttcctgctggacagctggatcgccctgtacaagatgcagggcctgtgcatcagcgtggccgtgttcctgcactacttcctgctggtgagcttcacctggatgggcctggaggccttccacatgtacctggccctggtgaaggtgttcaacacctacatcagaaagtacatcctgaagttctgcatcgtgggctggggcgtgcccgccgtggtggtgaccatcatcctgaccatcagccccgacaactacggcctgggcagctacggcaagttccccaacggcagccccgacgacttctgctggatcaacaacaacgccgtgttctacatcaccgtggtgggctacttctgcgtgatcttcctgctgaacgtgagcatgttcatcgtggtgctggtgcagctgtgcagaatcaagaagaagaagcagctgggcgcccagagaaagaccagcatccaggacctgagaagcatcgccggcctgaccttcctgctgggcatcacctggggcttcgccttcttcgcctggggccccgtgaacgtgaccttcatgtacctgttcgccatcttcaacaccctgcagggcttcttcatcttcatcttctactgcgtggccaaggagaacgtgagaaagcagtggagaagatacctgtgctgcggcaagctgagactggccgagaacagcgactggagcaagaccgccaccaacggcctgaagaagcagaccgtgaaccagggcgtgagcagcagcagcaacagcctgcagagcagcagcaacagcaccaacagcaccaccctgctggtgaacaacgactgcagcgtgcacgccagcggcaacggcaacgccagcaccgagagaaacggcgtgagcttcagcgtgcagaacggcgacgtgtgcctgcacgacttcaccggcaagcagcacatgttcaacgagaaggaggacagctgcaacggcaagggcagaatggccctgagaagaaccagcaagagaggcagcctgcacttcatcgagcagatgtag

SEQ ID NO: 82486 - DNA, 3006 bp, synthetic construct
  misc_feature 1..3006: note = Description of Artificial Sequence: Synthetic coding sequence
  source 1..3006: mol_type = other DNA
atggtgttcagcgtgagacagtgcggccacgtgggcagaaccgaggaggtgctgctgaccttcaagatcttcctggtgatcatctgcctgcacgtggtgctggtgaccagcctggaggaggacaccgacaacagcagcctgagccccccccccgacgaggagaccggcgcctgcagcgacgtgaccctgagcctgctgcccagcaacgagaccgagaagaccaagatcaccatcgtgaagaccttcaacgccagcggcgtgaagccccagagaaacatctgcaacctgagcagcatctgcaacgacagcgccttcttcagaggcgagatcatgttccagtacgacaaggagagcaccgtgccccagaaccagcacatcaccaacggcaccctgaccggcgtgctgagcctgagcgagctgaagagaagcgagctgaacaagaccctgcagaccctgagcgagacctacttcatcatgtgcgccaccgccgaggcccagagcaccctgaactgcaccttcaccatcaagctgaacaacaccatgaacgcctgcgccgtgatcgccgccctggagagagtgaagatcagacccatggagcactgctgctgcagcgtgagaatcccctgccccagcagccccgaggagctggagaagctgcagtgcgacctgcaggaccccatcgtgtgcctggccgaccaccccagaggcccccccttcagcagcagccagagcatccccgtggtgcccagagccaccgtgctgagccaggtgcccaaggccaccagcttcgccgagccccccgactacagccccgtgacccacaacgtgcccagccccatcggcgagatccagcccctgagcccccagcccagcgcccccatcgccagcagccccgccatcgacatgcccccccagagcgagaccatcagcagccccatgccccagacccacgtgagcggcacccccccccccgtgaaggccagcttcagcagccccaccgtgagcgcccccgccaacgtgaacaccaccagcgccccccccgtgcagaccgacatcgtgaacaccagcagcatcagcgacctggagaaccaggtgctgcagatggagaaggccctgagcctgggcagcctggagcccaacctggccggcgagatgatcaaccaggtgagcagactgctgcacagcccccccgacatgctggcccccctggcccagagactgctgaaggtggtggacgacatcggcctgcagctgaacttcagcaacaccaccatcagcctgaccagccccagcctggccctggccgtgatcagagtgaacgccagcagcttcaacaccaccaccttcgtggcccaggaccccgccaacctgcaggtgagcctggagacccaggcccccgagaacagcatcggcaccatcaccctgcccagcagcctgatgaacaacctgcccgcccacgacatggagctggccagcagagtgcagttcaacttcttcgagacccccgccctgttccaggaccccagcctggagaacctgagcctgatcagctacgtgatcagcagcagcgtggccaacctgaccgtgagaaacctgaccagaaacgtgaccgtgaccctgaagcacatcaaccccagccaggacgagctgaccgtgagatgcgtgttctgggacctgggcagaaacggcggcagaggcggctggagcgacaacggctgcagcgtgaaggacagaagactgaacgagaccatctgcacctgcagccacctgaccagcttcggcgtgctgctggacctgagcagaaccagcgtgctgcccgcccagatgatggccctgaccttcatcacctacatcggctgcggcctgagcagcatcttcctgagcgtgaccctggtgacctacatcgccttcgagaagatcagaagagactaccccagcaagatcctgatccagctgtgcgccgccctgctgctgctgaacctggtgttcctgctggacagctggatcgccctgtacaagatgcagggcctgtgcatcagcgtggccgtgttcctgcactacttcctgctggtgagcttcacctggatgggcctggaggccttccacatgtacctggccctggtgaaggtgttcaacacctacatcagaaagtacatcctgaagttctgcatcgtgggctggggcgtgcccgccgtggtggtgaccatcatcctgaccatcagccccgacaactacggcctgggcagctacggcaagttccccaacggcagccccgacgacttctgctggatcaacaacaacgccgtgttctacatcaccgtggtgggctacttctgcgtgatcttcctgctgaacgtgagcatgttcatcgtggtgctggtgcagctgtgcagaatcaagaagaagaagcagctgggcgcccagagaaagaccagcatccaggacctgagaagcatcgccggcctgaccttcctgctgggcatcacctggggcttcgccttcttcgcctggggccccgtgaacgtgaccttcatgtacctgttcgccatcttcaacaccctgcagggcttcttcatcttcatcttctactgcgtggccaaggagaacgtgagaaagcagtggagaagatacctgtgctgcggcaagctgagactggccgagaacagcgactggagcaagaccgccaccaacggcctgaagaagcagaccgtgaaccagggcgtgagcagcagcagcaacagcctgcagagcagcagcaacagcaccaacagcaccaccctgctggtgaacaacgactgcagcgtgcacgccagcggcaacggcaacgccagcaccgagagaaacggcgtgagcttcagcgtgcagaacggcgacgtgtgcctgcacgacttcaccggcaagcagcacatgttcaacgagaaggaggacagctgcaacggcaagggcagaatggccctgagaagaaccagcaagagaggcagcctgcacttcatcgagcagatgtag

SEQ ID NO: 82487 - DNA, 3012 bp, synthetic construct
  misc_feature 1..3012: note = Description of Artificial Sequence: Synthetic coding sequence
  source 1..3012: mol_type = other DNA
atggtgttcagcgtgagacagtgcggccacgtgggcagaaccgaggaggtgctgctgaccttcaagatcttcctggtgatcatctgcctgcacgtggtgctggtgaccagcctggaggaggacaccgacaacagcagcctgagccccccccccgccaagctgagcgtggtgagcttcgcccccagcagcaacggcacccccgaggtggagaccaccagcctgaacgacgtgaccctgagcctgctgcccagcaacgagaccggcgtgaagccccagagaaacatctgcaacctgagcagcatctgcaacgacagcgccttcttcagaggcgagatcatgttccagtacgacaaggagagcaccgtgccccagaaccagcacatcaccaacggcaccctgaccggcgtgctgagcctgagcgagctgaagagaagcgagctgaacaagaccctgcagaccctgagcgagacctacttcatcatgtgcgccaccgccgaggcccagagcaccctgaactgcaccttcaccatcaagctgaacaacaccatgaacgcctgcgccgtgatcgccgccctggagagagtgaagatcagacccatggagcactgctgctgcagcgtgagaatcccctgccccagcagccccgaggagctggagaagctgcagtgcgacctgcaggaccccatcgtgtgcctggccgaccaccccagaggcccccccttcagcagcagccagagcatccccgtggtgcccagagccaccgtgctgagccaggtgcccaaggccaccagcttcgccgagccccccgactacagccccgtgacccacaacgtgcccagccccatcggcgagatccagcccctgagcccccagcccagcgcccccatcgccagcagccccgccatcgacatgcccccccagagcgagaccatcagcagccccatgccccagacccacgtgagcggcacccccccccccgtgaaggccagcttcagcagccccaccgtgagcgcccccgccaacgtgaacaccaccagcgccccccccgtgcagaccgacatcgtgaacaccagcagcatcagcgacctggagaaccaggtgctgcagatggagaaggccctgagcctgggcagcctggagcccaacctggccggcgagatgatcaaccaggtgagcagactgctgcacagcccccccgacatgctggcccccctggcccagagactgctgaaggtggtggacgacatcggcctgcagctgaacttcagcaacaccaccatcagcctgaccagccccagcctggccctggccgtgatcagagtgaacgccagcagcttcaacaccaccaccttcgtggcccaggaccccgccaacctgcaggtgagcctggagacccaggcccccgagaacagcatcggcaccatcaccctgcccagcagcctgatgaacaacctgcccgcccacgacatggagctggccagcagagtgcagttcaacttcttcgagacccccgccctgttccaggaccccagcctggagaacctgagcctgatcagctacgtgatcagcagcagcgtggccaacctgaccgtgagaaacctgaccagaaacgtgaccgtgaccctgaagcacatcaaccccagccaggacgagctgaccgtgagatgcgtgttctgggacctgggcagaaacggcggcagaggcggctggagcgacaacggctgcagcgtgaaggacagaagactgaacgagaccatctgcacctgcagccacctgaccagcttcggcgtgctgctggacctgagcagaaccagcgtgctgcccgcccagatgatggccctgaccttcatcacctacatcggctgcggcctgagcagcatcttcctgagcgtgaccctggtgacctacatcgccttcgagaagatcagaagagactaccccagcaagatcctgatccagctgtgcgccgccctgctgctgctgaacctggtgttcctgctggacagctggatcgccctgtacaagatgcagggcctgtgcatcagcgtggccgtgttcctgcactacttcctgctggtgagcttcacctggatgggcctggaggccttccacatgtacctggccctggtgaaggtgttcaacacctacatcagaaagtacatcctgaagttctgcatcgtgggctggggcgtgcccgccgtggtggtgaccatcatcctgaccatcagccccgacaactacggcctgggcagctacggcaagttccccaacggcagccccgacgacttctgctggatcaacaacaacgccgtgttctacatcaccgtggtgggctacttctgcgtgatcttcctgctgaacgtgagcatgttcatcgtggtgctggtgcagctgtgcagaatcaagaagaagaagcagctgggcgcccagagaaagaccagcatccaggacctgagaagcatcgccggcctgaccttcctgctgggcatcacctggggcttcgccttcttcgcctggggccccgtgaacgtgaccttcatgtacctgttcgccatcttcaacaccctgcagggcttcttcatcttcatcttctactgcgtggccaaggagaacgtgagaaagcagtggagaagatacctgtgctgcggcaagctgagactggccgagaacagcgactggagcaagaccgccaccaacggcctgaagaagcagaccgtgaaccagggcgtgagcagcagcagcaacagcctgcagagcagcagcaacagcaccaacagcaccaccctgctggtgaacaacgactgcagcgtgcacgccagcggcaacggcaacgccagcaccgagagaaacggcgtgagcttcagcgtgcagaacggcgacgtgtgcctgcacgacttcaccggcaagcagcacatgttcaacgagaaggaggacagctgcaacggcaagggcagaatggccctgagaagaaccagcaagagaggcagcctgcacttcatcgagcagatgtag

SEQ ID NO: 82488 - DNA, 2964 bp, synthetic construct
  misc_feature 1..2964: note = Description of Artificial Sequence: Synthetic coding sequence
  source 1..2964: mol_type = other DNA
atggtgttcagcgtgagacagtgcggccacgtgggcagaaccgaggaggtgctgctgaccttcaagatcttcctggtgatcatctgcctgcacgtggtgctggtgaccagcctggaggaggacaccgacaacagcagcctgagccccccccccgaggtggagaccaccagcctgaacgacgtgaccctgagcctgctgcccagcaacgagaccggcgtgaagccccagagaaacatctgcaacctgagcagcatctgcaacgacagcgccttcttcagaggcgagatcatgttccagtacgacaaggagagcaccgtgccccagaaccagcacatcaccaacggcaccctgaccggcgtgctgagcctgagcgagctgaagagaagcgagctgaacaagaccctgcagaccctgagcgagacctacttcatcatgtgcgccaccgccgaggcccagagcaccctgaactgcaccttcaccatcaagctgaacaacaccatgaacgcctgcgccgtgatcgccgccctggagagagtgaagatcagacccatggagcactgctgctgcagcgtgagaatcccctgccccagcagccccgaggagctggagaagctgcagtgcgacctgcaggaccccatcgtgtgcctggccgaccaccccagaggcccccccttcagcagcagccagagcatccccgtggtgcccagagccaccgtgctgagccaggtgcccaaggccaccagcttcgccgagccccccgactacagccccgtgacccacaacgtgcccagccccatcggcgagatccagcccctgagcccccagcccagcgcccccatcgccagcagccccgccatcgacatgcccccccagagcgagaccatcagcagccccatgccccagacccacgtgagcggcacccccccccccgtgaaggccagcttcagcagccccaccgtgagcgcccccgccaacgtgaacaccaccagcgccccccccgtgcagaccgacatcgtgaacaccagcagcatcagcgacctggagaaccaggtgctgcagatggagaaggccctgagcctgggcagcctggagcccaacctggccggcgagatgatcaaccaggtgagcagactgctgcacagcccccccgacatgctggcccccctggcccagagactgctgaaggtggtggacgacatcggcctgcagctgaacttcagcaacaccaccatcagcctgaccagccccagcctggccctggccgtgatcagagtgaacgccagcagcttcaacaccaccaccttcgtggcccaggaccccgccaacctgcaggtgagcctggagacccaggcccccgagaacagcatcggcaccatcaccctgcccagcagcctgatgaacaacctgcccgcccacgacatggagctggccagcagagtgcagttcaacttcttcgagacccccgccctgttccaggaccccagcctggagaacctgagcctgatcagctacgtgatcagcagcagcgtggccaacctgaccgtgagaaacctgaccagaaacgtgaccgtgaccctgaagcacatcaaccccagccaggacgagctgaccgtgagatgcgtgttctgggacctgggcagaaacggcggcagaggcggctggagcgacaacggctgcagcgtgaaggacagaagactgaacgagaccatctgcacctgcagccacctgaccagcttcggcgtgctgctggacctgagcagaaccagcgtgctgcccgcccagatgatggccctgaccttcatcacctacatcggctgcggcctgagcagcatcttcctgagcgtgaccctggtgacctacatcgccttcgagaagatcagaagagactaccccagcaagatcctgatccagctgtgcgccgccctgctgctgctgaacctggtgttcctgctggacagctggatcgccctgtacaagatgcagggcctgtgcatcagcgtggccgtgttcctgcactacttcctgctggtgagcttcacctggatgggcctggaggccttccacatgtacctggccctggtgaaggtgttcaacacctacatcagaaagtacatcctgaagttctgcatcgtgggctggggcgtgcccgccgtggtggtgaccatcatcctgaccatcagccccgacaactacggcctgggcagctacggcaagttccccaacggcagccccgacgacttctgctggatcaacaacaacgccgtgttctacatcaccgtggtgggctacttctgcgtgatcttcctgctgaacgtgagcatgttcatcgtggtgctggtgcagctgtgcagaatcaagaagaagaagcagctgggcgcccagagaaagaccagcatccaggacctgagaagcatcgccggcctgaccttcctgctgggcatcacctggggcttcgccttcttcgcctggggccccgtgaacgtgaccttcatgtacctgttcgccatcttcaacaccctgcagggcttcttcatcttcatcttctactgcgtggccaaggagaacgtgagaaagcagtggagaagatacctgtgctgcggcaagctgagactggccgagaacagcgactggagcaagaccgccaccaacggcctgaagaagcagaccgtgaaccagggcgtgagcagcagcagcaacagcctgcagagcagcagcaacagcaccaacagcaccaccctgctggtgaacaacgactgcagcgtgcacgccagcggcaacggcaacgccagcaccgagagaaacggcgtgagcttcagcgtgcagaacggcgacgtgtgcctgcacgacttcaccggcaagcagcacatgttcaacgagaaggaggacagctgcaacggcaagggcagaatggccctgagaagaaccagcaagagaggcagcctgcacttcatcgagcagatgtag

SEQ ID NO: 82489 - DNA, 3045 bp, synthetic construct
  misc_feature 1..3045: note = Description of Artificial Sequence: Synthetic coding sequence
  source 1..3045: mol_type = other DNA
atggtgttcagcgtgagacagtgcggccacgtgggcagaaccgaggaggtgctgctgaccttcaagatcttcctggtgatcatctgcctgcacgtggtgctggtgaccagcctggaggaggacaccgacaacagcagcctgagccccccccccgccaagctgagcgtggtgagcttcgcccccagcagcaacgaggtggagaccaccagcctgaacgacgtgaccctgagcctgctgcccagcaacgagaccgagaagaccaagatcaccatcgtgaagaccttcaacgccagcggcgtgaagccccagagaaacatctgcaacctgagcagcatctgcaacgacagcgccttcttcagaggcgagatcatgttccagtacgacaaggagagcaccgtgccccagaaccagcacatcaccaacggcaccctgaccggcgtgctgagcctgagcgagctgaagagaagcgagctgaacaagaccctgcagaccctgagcgagacctacttcatcatgtgcgccaccgccgaggcccagagcaccctgaactgcaccttcaccatcaagctgaacaacaccatgaacgcctgcgccgtgatcgccgccctggagagagtgaagatcagacccatggagcactgctgctgcagcgtgagaatcccctgccccagcagccccgaggagctggagaagctgcagtgcgacctgcaggaccccatcgtgtgcctggccgaccaccccagaggcccccccttcagcagcagccagagcatccccgtggtgcccagagccaccgtgctgagccaggtgcccaaggccaccagcttcgccgagccccccgactacagccccgtgacccacaacgtgcccagccccatcggcgagatccagcccctgagcccccagcccagcgcccccatcgccagcagccccgccatcgacatgcccccccagagcgagaccatcagcagccccatgccccagacccacgtgagcggcacccccccccccgtgaaggccagcttcagcagccccaccgtgagcgcccccgccaacgtgaacaccaccagcgccccccccgtgcagaccgacatcgtgaacaccagcagcatcagcgacctggagaaccaggtgctgcagatggagaaggccctgagcctgggcagcctggagcccaacctggccggcgagatgatcaaccaggtgagcagactgctgcacagcccccccgacatgctggcccccctggcccagagactgctgaaggtggtggacgacatcggcctgcagctgaacttcagcaacaccaccatcagcctgaccagccccagcctggccctggccgtgatcagagtgaacgccagcagcttcaacaccaccaccttcgtggcccaggaccccgccaacctgcaggtgagcctggagacccaggcccccgagaacagcatcggcaccatcaccctgcccagcagcctgatgaacaacctgcccgcccacgacatggagctggccagcagagtgcagttcaacttcttcgagacccccgccctgttccaggaccccagcctggagaacctgagcctgatcagctacgtgatcagcagcagcgtggccaacctgaccgtgagaaacctgaccagaaacgtgaccgtgaccctgaagcacatcaaccccagccaggacgagctgaccgtgagatgcgtgttctgggacctgggcagaaacggcggcagaggcggctggagcgacaacggctgcagcgtgaaggacagaagactgaacgagaccatctgcacctgcagccacctgaccagcttcggcgtgctgctggacctgagcagaaccagcgtgctgcccgcccagatgatggccctgaccttcatcacctacatcggctgcggcctgagcagcatcttcctgagcgtgaccctggtgacctacatcgccttcgagaagatcagaagagactaccccagcaagatcctgatccagctgtgcgccgccctgctgctgctgaacctggtgttcctgctggacagctggatcgccctgtacaagatgcagggcctgtgcatcagcgtggccgtgttcctgcactacttcctgctggtgagcttcacctggatgggcctggaggccttccacatgtacctggccctggtgaaggtgttcaacacctacatcagaaagtacatcctgaagttctgcatcgtgggctggggcgtgcccgccgtggtggtgaccatcatcctgaccatcagccccgacaactacggcctgggcagctacggcaagttccccaacggcagccccgacgacttctgctggatcaacaacaacgccgtgttctacatcaccgtggtgggctacttctgcgtgatcttcctgctgaacgtgagcatgttcatcgtggtgctggtgcagctgtgcagaatcaagaagaagaagcagctgggcgcccagagaaagaccagcatccaggacctgagaagcatcgccggcctgaccttcctgctgggcatcacctggggcttcgccttcttcgcctggggccccgtgaacgtgaccttcatgtacctgttcgccatcttcaacaccctgcagggcttcttcatcttcatcttctactgcgtggccaaggagaacgtgagaaagcagtggagaagatacctgtgctgcggcaagctgagactggccgagaacagcgactggagcaagaccgccaccaacggcctgaagaagcagaccgtgaaccagggcgtgagcagcagcagcaacagcctgcagagcagcagcaacagcaccaacagcaccaccctgctggtgaacaacgactgcagcgtgcacgccagcggcaacggcaacgccagcaccgagagaaacggcgtgagcttcagcgtgcagaacggcgacgtgtgcctgcacgacttcaccggcaagcagcacatgttcaacgagaaggaggacagctgcaacggcaagggcagaatggccctgagaagaaccagcaagagaggcagcctgcacttcatcgagcagatgtag

SEQ ID NO: 82490 - DNA, 2988 bp, synthetic construct
  misc_feature 1..2988: note = Description of Artificial Sequence: Synthetic coding sequence
  source 1..2988: mol_type = other DNA
atggtgttcagcgtgagacagtgcggccacgtgggcagaaccgaggaggtgctgctgaccttcaagatcttcctggtgatcatctgcctgcacgtggtgctggtgaccagcctggaggaggacaccgacaacagcagcctgagccccccccccgccaagctgagcgtggtgagcttcgcccccagcagcaacggcacccccgacgtgaccctgagcctgctgcccagcaacgagaccggcgtgaagccccagagaaacatctgcaacctgagcagcatctgcaacgacagcgccttcttcagaggcgagatcatgttccagtacgacaaggagagcaccgtgccccagaaccagcacatcaccaacggcaccctgaccggcgtgctgagcctgagcgagctgaagagaagcgagctgaacaagaccctgcagaccctgagcgagacctacttcatcatgtgcgccaccgccgaggcccagagcaccctgaactgcaccttcaccatcaagctgaacaacaccatgaacgcctgcgccgtgatcgccgccctggagagagtgaagatcagacccatggagcactgctgctgcagcgtgagaatcccctgccccagcagccccgaggagctggagaagctgcagtgcgacctgcaggaccccatcgtgtgcctggccgaccaccccagaggcccccccttcagcagcagccagagcatccccgtggtgcccagagccaccgtgctgagccaggtgcccaaggccaccagcttcgccgagccccccgactacagccccgtgacccacaacgtgcccagccccatcggcgagatccagcccctgagcccccagcccagcgcccccatcgccagcagccccgccatcgacatgcccccccagagcgagaccatcagcagccccatgccccagacccacgtgagcggcacccccccccccgtgaaggccagcttcagcagccccaccgtgagcgcccccgccaacgtgaacaccaccagcgccccccccgtgcagaccgacatcgtgaacaccagcagcatcagcgacctggagaaccaggtgctgcagatggagaaggccctgagcctgggcagcctggagcccaacctggccggcgagatgatcaaccaggtgagcagactgctgcacagcccccccgacatgctggcccccctggcccagagactgctgaaggtggtggacgacatcggcctgcagctgaacttcagcaacaccaccatcagcctgaccagccccagcctggccctggccgtgatcagagtgaacgccagcagcttcaacaccaccaccttcgtggcccaggaccccgccaacctgcaggtgagcctggagacccaggcccccgagaacagcatcggcaccatcaccctgcccagcagcctgatgaacaacctgcccgcccacgacatggagctggccagcagagtgcagttcaacttcttcgagacccccgccctgttccaggaccccagcctggagaacctgagcctgatcagctacgtgatcagcagcagcgtggccaacctgaccgtgagaaacctgaccagaaacgtgaccgtgaccctgaagcacatcaaccccagccaggacgagctgaccgtgagatgcgtgttctgggacctgggcagaaacggcggcagaggcggctggagcgacaacggctgcagcgtgaaggacagaagactgaacgagaccatctgcacctgcagccacctgaccagcttcggcgtgctgctggacctgagcagaaccagcgtgctgcccgcccagatgatggccctgaccttcatcacctacatcggctgcggcctgagcagcatcttcctgagcgtgaccctggtgacctacatcgccttcgagaagatcagaagagactaccccagcaagatcctgatccagctgtgcgccgccctgctgctgctgaacctggtgttcctgctggacagctggatcgccctgtacaagatgcagggcctgtgcatcagcgtggccgtgttcctgcactacttcctgctggtgagcttcacctggatgggcctggaggccttccacatgtacctggccctggtgaaggtgttcaacacctacatcagaaagtacatcctgaagttctgcatcgtgggctggggcgtgcccgccgtggtggtgaccatcatcctgaccatcagccccgacaactacggcctgggcagctacggcaagttccccaacggcagccccgacgacttctgctggatcaacaacaacgccgtgttctacatcaccgtggtgggctacttctgcgtgatcttcctgctgaacgtgagcatgttcatcgtggtgctggtgcagctgtgcagaatcaagaagaagaagcagctgggcgcccagagaaagaccagcatccaggacctgagaagcatcgccggcctgaccttcctgctgggcatcacctggggcttcgccttcttcgcctggggccccgtgaacgtgaccttcatgtacctgttcgccatcttcaacaccctgcagggcttcttcatcttcatcttctactgcgtggccaaggagaacgtgagaaagcagtggagaagatacctgtgctgcggcaagctgagactggccgagaacagcgactggagcaagaccgccaccaacggcctgaagaagcagaccgtgaaccagggcgtgagcagcagcagcaacagcctgcagagcagcagcaacagcaccaacagcaccaccctgctggtgaacaacgactgcagcgtgcacgccagcggcaacggcaacgccagcaccgagagaaacggcgtgagcttcagcgtgcagaacggcgacgtgtgcctgcacgacttcaccggcaagcagcacatgttcaacgagaaggaggacagctgcaacggcaagggcagaatggccctgagaagaaccagcaagagaggcagcctgcacttcatcgagcagatgtag

SEQ ID NO: 82491 - DNA, 3054 bp, synthetic construct
  misc_feature 1..3054: note = Description of Artificial Sequence: Synthetic coding sequence
  source 1..3054: mol_type = other DNA
atggtgttcagcgtgagacagtgcggccacgtgggcagaaccgaggaggtgctgctgaccttcaagatcttcctggtgatcatctgcctgcacgtggtgctggtgaccagcctggaggaggacaccgacaacagcagcctgagccccccccccgccaagctgagcgtggtgagcttcgcccccagcagcaacggcacccccgaggtggagaccaccagcctgaacgacgtgaccctgagcctgctgcccagcaacgagaccgagaagaccaagatcaccatcgtgaagaccttcaacgccagcggcgtgaagccccagagaaacatctgcaacctgagcagcatctgcaacgacagcgccttcttcagaggcgagatcatgttccagtacgacaaggagagcaccgtgccccagaaccagcacatcaccaacggcaccctgaccggcgtgctgagcctgagcgagctgaagagaagcgagctgaacaagaccctgcagaccctgagcgagacctacttcatcatgtgcgccaccgccgaggcccagagcaccctgaactgcaccttcaccatcaagctgaacaacaccatgaacgcctgcgccgtgatcgccgccctggagagagtgaagatcagacccatggagcactgctgctgcagcgtgagaatcccctgccccagcagccccgaggagctggagaagctgcagtgcgacctgcaggaccccatcgtgtgcctggccgaccaccccagaggcccccccttcagcagcagccagagcatccccgtggtgcccagagccaccgtgctgagccaggtgcccaaggccaccagcttcgccgagccccccgactacagccccgtgacccacaacgtgcccagccccatcggcgagatccagcccctgagcccccagcccagcgcccccatcgccagcagccccgccatcgacatgcccccccagagcgagaccatcagcagccccatgccccagacccacgtgagcggcacccccccccccgtgaaggccagcttcagcagccccaccgtgagcgcccccgccaacgtgaacaccaccagcgccccccccgtgcagaccgacatcgtgaacaccagcagcatcagcgacctggagaaccaggtgctgcagatggagaaggccctgagcctgggcagcctggagcccaacctggccggcgagatgatcaaccaggtgagcagactgctgcacagcccccccgacatgctggcccccctggcccagagactgctgaaggtggtggacgacatcggcctgcagctgaacttcagcaacaccaccatcagcctgaccagccccagcctggccctggccgtgatcagagtgaacgccagcagcttcaacaccaccaccttcgtggcccaggaccccgccaacctgcaggtgagcctggagacccaggcccccgagaacagcatcggcaccatcaccctgcccagcagcctgatgaacaacctgcccgcccacgacatggagctggccagcagagtgcagttcaacttcttcgagacccccgccctgttccaggaccccagcctggagaacctgagcctgatcagctacgtgatcagcagcagcgtggccaacctgaccgtgagaaacctgaccagaaacgtgaccgtgaccctgaagcacatcaaccccagccaggacgagctgaccgtgagatgcgtgttctgggacctgggcagaaacggcggcagaggcggctggagcgacaacggctgcagcgtgaaggacagaagactgaacgagaccatctgcacctgcagccacctgaccagcttcggcgtgctgctggacctgagcagaaccagcgtgctgcccgcccagatgatggccctgaccttcatcacctacatcggctgcggcctgagcagcatcttcctgagcgtgaccctggtgacctacatcgccttcgagaagatcagaagagactaccccagcaagatcctgatccagctgtgcgccgccctgctgctgctgaacctggtgttcctgctggacagctggatcgccctgtacaagatgcagggcctgtgcatcagcgtggccgtgttcctgcactacttcctgctggtgagcttcacctggatgggcctggaggccttccacatgtacctggccctggtgaaggtgttcaacacctacatcagaaagtacatcctgaagttctgcatcgtgggctggggcgtgcccgccgtggtggtgaccatcatcctgaccatcagccccgacaactacggcctgggcagctacggcaagttccccaacggcagccccgacgacttctgctggatcaacaacaacgccgtgttctacatcaccgtggtgggctacttctgcgtgatcttcctgctgaacgtgagcatgttcatcgtggtgctggtgcagctgtgcagaatcaagaagaagaagcagctgggcgcccagagaaagaccagcatccaggacctgagaagcatcgccggcctgaccttcctgctgggcatcacctggggcttcgccttcttcgcctggggccccgtgaacgtgaccttcatgtacctgttcgccatcttcaacaccctgcagggcttcttcatcttcatcttctactgcgtggccaaggagaacgtgagaaagcagtggagaagatacctgtgctgcggcaagctgagactggccgagaacagcgactggagcaagaccgccaccaacggcctgaagaagcagaccgtgaaccagggcgtgagcagcagcagcaacagcctgcagagcagcagcaacagcaccaacagcaccaccctgctggtgaacaacgactgcagcgtgcacgccagcggcaacggcaacgccagcaccgagagaaacggcgtgagcttcagcgtgcagaacggcgacgtgtgcctgcacgacttcaccggcaagcagcacatgttcaacgagaaggaggacagctgcaacggcaagggcagaatggccctgagaagaaccagcaagagaggcagcctgcacttcatcgagcagatgtag

SEQ ID NO: 82492 - DNA, 2901 bp, synthetic construct
  misc_feature 1..2901: note = Description of Artificial Sequence: Synthetic coding sequence
  source 1..2901: mol_type = other DNA
atggtgttcagcgtgagacagtgcggccacgtgggcagaaccgaggaggtgctgctgaccttcaagatcttcctggtgatcatctgcctgcacgtggtgctggtgaccagcctggaggaggacaccgacaacagcagcctgagccccccccccgccaagctgagcgtggtgagcttcgcccccagcagcaacggcacccccgaggtggagaccaccagcctgaacgacgtgaccctgagcctgctgcccagcaacgagaccgagaagaccaagatcaccatcgtgaagaccttcaacgccagcggcgtgaagccccagagaaacatctgcaacctgagcagcatctgcaacgacagcgccttcttcagaggcgagatcatgttccagtacgacaaggagagcaccgtgccccagaaccagcacatcaccaacggcaccctgaccggcgtgctgagcctgagcgagctgaagagaagcgagctgaacaagaccctgcagaccctgagcgagacctacttcatcatgtgcgccaccgccgaggcccagagcaccctgaactgcaccttcaccatcaagctgaacaacaccatgaacgcctgcgccgtgatcgccgccctggagagagtgaagatcagacccatggagcactgctgctgcagcgtgagaatcccctgccccagcagccccgaggagctggagaagctgcagtgcgacctgcaggaccccatcgtgtgcctggccgaccaccccagaggcccccccttcagcagcagccagagcatccccgtggtgcccagagccaccgtgctgagccaggtgcccaaggccaccagcttcgccgagccccccgactacagccccgtgacccacaacgtgcccagccccatcggcgagatccagcccctgagcccccagcccagcgcccccatcgccagcagccccgccatcgacatgcccccccagagcgagaccatcagcagccccatgccccagacccacgtgagcggcacccccccccccgtgaaggccagcttcagcagccccaccgtgagcgcccccgccaacgtgaacaccaccagcgccccccccgtgcagaccgacatcgtgaacaccagcagcatcagcgacctggagaaccaggtgctgcagatggagaaggccctgagcctgggcagcctggagcccaacctggccggcgagatgatcaaccaggtgagcagactgctgcacagcccccccgacatgctggcccccctggcccagagactgctgaaggtggtggacgacatcggcctgcagctgaacttcagcaacaccaccatcagcctgaccagccccagcctggccctggccgtgatcagagtgaacgccagcagcttcaacaccaccaccttcgtggcccaggaccccgccaacctgcaggtgagcctggagacccaggcccccgagaacagcatcggcaccatcaccctgcccagcagcctgatgaacaacctgcccgcccacgacatggagctggccagcagagtgcagttcaacttcttcgagacccccgccctgttccaggaccccagcctggagaacctgagcctgatcagctacgtgatcagcagcagcgtggccaacctgaccgtgagaaacctgaccagaaacgtgaccgtgaccctgaagcacatcaaccccagccaggacgagctgaccgtgagatgcgtgttctgggacctgggcagaaacggcggcagaggcggctggagcgacaacggctgcagcgtgaaggacagaagactgaacgagaccatctgcacctgcagccacctgaccagcttcggcgtgctgctggacctgagcagaaccagcgtgctgcccgcccagatgatggccctgaccttcatcacctacatcggctgcggcctgagcagcatcttcctgagcgtgaccctggtgacctacatcgccttcgagaagatcagaagagactaccccagcaagatcctgatccagctgtgcgccgccctgctgctgctgaacctggtgttcctgctggacagctggatcgccctgtacaagatgcagggcctgtgcatcagcgtggccgtgttcctgcactacttcctgctggtgagcttcacctggatgggcctggaggccttccacatgtacctggccctggtgaaggtgttcaacacctacatcagaaagtacatcctgaagttctgcatcgtgggctggggcgtgcccgccgtggtggtgaccatcatcctgaccatcagccccgacaactacggcctgggcagctacggcaagttccccaacggcagccccgacgacttctgctggatcaacaacaacgccgtgttctacatcaccgtggtgggctacttctgcgtgatcttcctgctgaacgtgagcatgttcatcgtggtgctggtgcagctgtgcagaatcaagaagaagaagcagctgggcgcccagagaaagaccagcatccaggacctgagaagcatcgccggcctgaccttcctgctgggcatcacctggggcttcgccttcttcgcctggggccccgtgaacgtgaccttcatgtacctgttcgccatcttcaacaccctgcagggcttcttcatcttcatcttctactgcgtggccaaggagaacgtgagaaagcagtggagaagatacctgtgctgcggcaagctgagactggccgagaacagcggcaacgccagcaccgagagaaacggcgtgagcttcagcgtgcagaacggcgacgtgtgcctgcacgacttcaccggcaagcagcacatgttcaacgagaaggaggacagctgcaacggcaagggcagaatggccctgagaagaaccagcaagagaggcagcctgcacttcatcgagcagatgtag

SEQ ID NO: 82493 - DNA, 2982 bp, synthetic construct
  misc_feature 1..2982: note = Description of Artificial Sequence: Synthetic coding sequence
  source 1..2982: mol_type = other DNA
atggtgttcagcgtgagacagtgcggccacgtgggcagaaccgaggaggtgctgctgaccttcaagatcttcctggtgatcatctgcctgcacgtggtgctggtgaccagcctggaggaggacaccgacaacagcagcctgagccccccccccgacgtgaccctgagcctgctgcccagcaacgagaccgagaagaccaagatcaccatcgtgaagaccttcaacgccagcggcgtgaagccccagagaaacatctgcaacctgagcagcatctgcaacgacagcgccttcttcagaggcgagatcatgttccagtacgacaaggagagcaccgtgccccagaaccagcacatcaccaacggcaccctgaccggcgtgctgagcctgagcgagctgaagagaagcgagctgaacaagaccctgcagaccctgagcgagacctacttcatcatgtgcgccaccgccgaggcccagagcaccctgaactgcaccttcaccatcaagctgaacaacaccatgaacgcctgcgccgtgatcgccgccctggagagagtgaagatcagacccatggagcactgctgctgcagcgtgagaatcccctgccccagcagccccgaggagctggagaagctgcagtgcgacctgcaggaccccatcgtgtgcctggccgaccaccccagaggcccccccttcagcagcagccagagcatccccgtggtgcccagagccaccgtgctgagccaggtgcccaaggccaccagcttcgccgagccccccgactacagccccgtgacccacaacgtgcccagccccatcggcgagatccagcccctgagcccccagcccagcgcccccatcgccagcagccccgccatcgacatgcccccccagagcgagaccatcagcagccccatgccccagacccacgtgagcggcacccccccccccgtgaaggccagcttcagcagccccaccgtgagcgcccccgccaacgtgaacaccaccagcgccccccccgtgcagaccgacatcgtgaacaccagcagcatcagcgacctggagaaccaggtgctgcagatggagaaggccctgagcctgggcagcctggagcccaacctggccggcgagatgatcaaccaggtgagcagactgctgcacagcccccccgacatgctggcccccctggcccagagactgctgaaggtggtggacgacatcggcctgcagctgaacttcagcaacaccaccatcagcctgaccagccccagcctggccctggccgtgatcagagtgaacgccagcagcttcaacaccaccaccttcgtggcccaggaccccgccaacctgcaggtgagcctggagacccaggcccccgagaacagcatcggcaccatcaccctgcccagcagcctgatgaacaacctgcccgcccacgacatggagctggccagcagagtgcagttcaacttcttcgagacccccgccctgttccaggaccccagcctggagaacctgagcctgatcagctacgtgatcagcagcagcgtggccaacctgaccgtgagaaacctgaccagaaacgtgaccgtgaccctgaagcacatcaaccccagccaggacgagctgaccgtgagatgcgtgttctgggacctgggcagaaacggcggcagaggcggctggagcgacaacggctgcagcgtgaaggacagaagactgaacgagaccatctgcacctgcagccacctgaccagcttcggcgtgctgctggacctgagcagaaccagcgtgctgcccgcccagatgatggccctgaccttcatcacctacatcggctgcggcctgagcagcatcttcctgagcgtgaccctggtgacctacatcgccttcgagaagatcagaagagactaccccagcaagatcctgatccagctgtgcgccgccctgctgctgctgaacctggtgttcctgctggacagctggatcgccctgtacaagatgcagggcctgtgcatcagcgtggccgtgttcctgcactacttcctgctggtgagcttcacctggatgggcctggaggccttccacatgtacctggccctggtgaaggtgttcaacacctacatcagaaagtacatcctgaagttctgcatcgtgggctggggcgtgcccgccgtggtggtgaccatcatcctgaccatcagccccgacaactacggcctgggcagctacggcaagttccccaacggcagccccgacgacttctgctggatcaacaacaacgccgtgttctacatcaccgtggtgggctacttctgcgtgatcttcctgctgaacgtgagcatgttcatcgtggtgctggtgcagctgtgcagaatcaagaagaagaagcagctgggcgcccagagaaagaccagcatccaggacctgagaagcatcgccggcctgaccttcctgctgggcatcacctggggcttcgccttcttcgcctggggccccgtgaacgtgaccttcatgtacctgttcgccatcttcaacaccctgcagggcttcttcatcttcatcttctactgcgtggccaaggagaacgtgagaaagcagtggagaagatacctgtgctgcggcaagctgagactggccgagaacagcgactggagcaagaccgccaccaacggcctgaagaagcagaccgtgaaccagggcgtgagcagcagcagcaacagcctgcagagcagcagcaacagcaccaacagcaccaccctgctggtgaacaacgactgcagcgtgcacgccagcggcaacggcaacgccagcaccgagagaaacggcgtgagcttcagcgtgcagaacggcgacgtgtgcctgcacgacttcaccggcaagcagcacatgttcaacgagaaggaggacagctgcaacggcaagggcagaatggccctgagaagaaccagcaagagaggcagcctgcacttcatcgagcagatgtag

SEQ ID NO: 82494 - DNA, 3006 bp, synthetic construct
  misc_feature 1..3006: note = Description of Artificial Sequence: Synthetic coding sequence
  source 1..3006: mol_type = other DNA
atggtgttcagcgtgagacagtgcggccacgtgggcagaaccgaggaggtgctgctgaccttcaagatcttcctggtgatcatctgcctgcacgtggtgctggtgaccagcctggaggaggacaccgacaacagcagcctgagccccccccccgaggtggagaccaccagcctgaacgacgtgaccctgagcctgctgcccagcaacgagaccgagaagaccaagatcaccatcgtgaagaccttcaacgccagcggcgtgaagccccagagaaacatctgcaacctgagcagcatctgcaacgacagcgccttcttcagaggcgagatcatgttccagtacgacaaggagagcaccgtgccccagaaccagcacatcaccaacggcaccctgaccggcgtgctgagcctgagcgagctgaagagaagcgagctgaacaagaccctgcagaccctgagcgagacctacttcatcatgtgcgccaccgccgaggcccagagcaccctgaactgcaccttcaccatcaagctgaacaacaccatgaacgcctgcgccgtgatcgccgccctggagagagtgaagatcagacccatggagcactgctgctgcagcgtgagaatcccctgccccagcagccccgaggagctggagaagctgcagtgcgacctgcaggaccccatcgtgtgcctggccgaccaccccagaggcccccccttcagcagcagccagagcatccccgtggtgcccagagccaccgtgctgagccaggtgcccaaggccaccagcttcgccgagccccccgactacagccccgtgacccacaacgtgcccagccccatcggcgagatccagcccctgagcccccagcccagcgcccccatcgccagcagccccgccatcgacatgcccccccagagcgagaccatcagcagccccatgccccagacccacgtgagcggcacccccccccccgtgaaggccagcttcagcagccccaccgtgagcgcccccgccaacgtgaacaccaccagcgccccccccgtgcagaccgacatcgtgaacaccagcagcatcagcgacctggagaaccaggtgctgcagatggagaaggccctgagcctgggcagcctggagcccaacctggccggcgagatgatcaaccaggtgagcagactgctgcacagcccccccgacatgctggcccccctggcccagagactgctgaaggtggtggacgacatcggcctgcagctgaacttcagcaacaccaccatcagcctgaccagccccagcctggccctggccgtgatcagagtgaacgccagcagcttcaacaccaccaccttcgtggcccaggaccccgccaacctgcaggtgagcctggagacccaggcccccgagaacagcatcggcaccatcaccctgcccagcagcctgatgaacaacctgcccgcccacgacatggagctggccagcagagtgcagttcaacttcttcgagacccccgccctgttccaggaccccagcctggagaacctgagcctgatcagctacgtgatcagcagcagcgtggccaacctgaccgtgagaaacctgaccagaaacgtgaccgtgaccctgaagcacatcaaccccagccaggacgagctgaccgtgagatgcgtgttctgggacctgggcagaaacggcggcagaggcggctggagcgacaacggctgcagcgtgaaggacagaagactgaacgagaccatctgcacctgcagccacctgaccagcttcggcgtgctgctggacctgagcagaaccagcgtgctgcccgcccagatgatggccctgaccttcatcacctacatcggctgcggcctgagcagcatcttcctgagcgtgaccctggtgacctacatcgccttcgagaagatcagaagagactaccccagcaagatcctgatccagctgtgcgccgccctgctgctgctgaacctggtgttcctgctggacagctggatcgccctgtacaagatgcagggcctgtgcatcagcgtggccgtgttcctgcactacttcctgctggtgagcttcacctggatgggcctggaggccttccacatgtacctggccctggtgaaggtgttcaacacctacatcagaaagtacatcctgaagttctgcatcgtgggctggggcgtgcccgccgtggtggtgaccatcatcctgaccatcagccccgacaactacggcctgggcagctacggcaagttccccaacggcagccccgacgacttctgctggatcaacaacaacgccgtgttctacatcaccgtggtgggctacttctgcgtgatcttcctgctgaacgtgagcatgttcatcgtggtgctggtgcagctgtgcagaatcaagaagaagaagcagctgggcgcccagagaaagaccagcatccaggacctgagaagcatcgccggcctgaccttcctgctgggcatcacctggggcttcgccttcttcgcctggggccccgtgaacgtgaccttcatgtacctgttcgccatcttcaacaccctgcagggcttcttcatcttcatcttctactgcgtggccaaggagaacgtgagaaagcagtggagaagatacctgtgctgcggcaagctgagactggccgagaacagcgactggagcaagaccgccaccaacggcctgaagaagcagaccgtgaaccagggcgtgagcagcagcagcaacagcctgcagagcagcagcaacagcaccaacagcaccaccctgctggtgaacaacgactgcagcgtgcacgccagcggcaacggcaacgccagcaccgagagaaacggcgtgagcttcagcgtgcagaacggcgacgtgtgcctgcacgacttcaccggcaagcagcacatgttcaacgagaaggaggacagctgcaacggcaagggcagaatggccctgagaagaaccagcaagagaggcagcctgcacttcatcgagcagatgtag

SEQ ID NO: 82495 - DNA, 354 bp, synthetic construct
  misc_feature 1..354: note = Description of Artificial Sequence: Synthetic coding sequence
  source 1..354: mol_type = other DNA
atcctgctgaccatgcagcacatcaacaccggcatcgacatgctgaaccagctgggctgcgtgttcttcgccggcgtgaagccccagagaaacatctgcaacctgagcagcatctgcaacgacagcgccttcttcagaggcgagatcatgttccagtacgacaaggagagcaccgtgccccagaaccagcacatcaccaacggcaccctgaccggcgtgctgagcctgagcgagctgaagagaagcgagctgaacaagaccctgcagaccctgagcgagacctacttcatcatgtgcgccaccgccgaggcccagagacacatcaagctgtacatccacaacaagaccgagtag

SEQ ID NO: 82496 - DNA, 1014 bp, synthetic construct
  misc_feature 1..1014: note = Description of Artificial Sequence: Synthetic coding sequence
  source 1..1014: mol_type = other DNA
atgaacagcacctgcatcgaggagcagcacgacctggaccactacctgttccccatcgtgtacatcttcgtgatcatcgtgagcatccccgccaacatcggcagcctgtgcgtgagcttcctgcaggccaagaaggagagcgagctgggcatctacctgttcagcctgagcctgagcgacctgctgtacgccctgaccctgcccctgtggatcgactacacctggaacaaggacaactggaccttcagccccgccctgtgcaagggcagcgccttcctgatgtacatgaacttctacagcagcaccgccttcctgacctgcatcgccgtggacagatacctggccgtggtgtaccccctgaagttcttcttcctgagaaccagaagattcgccctgatggtgagcctgagcatctggatcctggagaccatcttcaacgccgtgatgctgtgggaggacgagaccgtggtggagtactgcgacgccgagaagagcaacttcaccctgtgctacgacaagtaccccctggagaagtggcagatcaacctgaacctgttcagaacctgcaccggctacgccatccccctggtgaccatcctgatctgcaacagaaaggtgtaccaggccgtgagacacaacaaggccaccgagaacaaggagaagaagagaatcatcaagctgctggtgagcatcaccgtgaccttcgtgctgtgcttcacccccttccacgtgatgctgctgatcagatgcatcctggagcacgccgtgaacttcgaggaccacagcaacagcggcaagagaacctacaccatgtacagaatcaccgtggccctgaccagcctgaactgcgtggccgaccccatcctgtactgcttcgtgaccgagaccggcagatacgacatgtggaacatcctgaagttctgcaccggcagatgcaacaccagccagagacagagaaagagaatcctgagcgtgagcaccaaggacaccatggagctggaggtgctggagtag

SEQ ID NO: 82497 - DNA, 1623 bp, synthetic construct
  misc_feature 1..1623: note = Description of Artificial Sequence: Synthetic coding sequence
  source 1..1623: mol_type = other DNA
atgaacagcaccggccacctgcaggacgcccccaacgccaccagcctgcacgtgccccacagccaggagggcaacagcaccagcctgcaggagggcctgcaggacctgatccacaccgccaccctggtgacctgcaccttcctgctggccgtgatcttctgcctgggcagctacggcaacttcatcgtgttcctgagcttcttcgaccccgccttcagaaagttcagaaccaacttcgacttcatgatcctgaacctgagcttctgcgacctgttcatctgcggcgtgaccgcccccatgttcaccttcgtgctgttcttcagcagcgccagcagcatccccgacgccttctgcttcaccttccacctgaccagcagcggcttcatcatcatgagcctgaagaccgtggccgtgatcgccctgcacagactgagaatggtgctgggcaagcagcccaacagaaccgccagcttcccctgcaccgtgctgctgaccctgctgctgtgggccaccagcttcaccctggccaccctggccaccctgaagaccagcaagagccacctgtgcctgcccatgagcagcctgatcgccggcaagggcaaggccatcctgagcctgtacgtggtggacttcaccttctgcgtggccgtggtgagcgtgagctacatcatgatcgcccagaccctgagaaagaacgcccaggtgagaaagtgcccccccgtgatcaccgtggacgccagcagaccccagcccttcatgggcgtgcccgtgcagggcggcggcgaccccatccagtgcgccatgcccgccctgtacagaaaccagaactacaacaagctgcagcacgtgcagaccagaggctacaccaagagccccaaccagctggtgacccccgccgccagcagactgcagctggtgagcgccatcaacctgagcaccgccaaggacagcaaggccgtggtgacctgcgtgatcatcgtgctgagcgtgctggtgtgctgcctgcccctgggcatcagcctggtgcaggtggtgctgagcagcaacggcagcttcatcctgtaccagttcgagctgttcggcttcaccctgatcttcttcaagagcggcctgaaccccttcatctacagcagaaacagcgccggcctgagaagaaaggtgctgtggtgcctgcagtacatcggcctgggcttcttctgctgcaagcagaagaccagactgagagccatgggcaagggcaacctggaggtgaacagaaacaagagcagccaccacgagaccaacagcgcctacatgctgagccccaagccccagaagaagttcgtggaccaggcctgcggccccagccacagcaaggagagcatggtgagccccaagatcagcgccggccaccagcactgcggccagagcagcagcacccccatcaacaccagaatcgagccctactacagcatctacaacagcagccccagccaggaggagagcagcccctgcaacctgcagcccgtgaacagcttcggcttcgccaacagctacatcgccatgcactaccacaccaccaacgacctggtgcaggagtacgacagcaccagcgccaagcagatccccgtgcccagcgtgtag

SEQ ID NO: 82498 - DNA, 1092 bp, synthetic construct
  misc_feature 1..1092: note = Description of Artificial Sequence: Synthetic coding sequence
  source 1..1092: mol_type = other DNA
atgggccccggcgaggccctgctggccggcctgctggtgatggtgctggccgtggccctgctgagcaacgccctggtgctgctgtgctgcgcctacagcgccgagctgagaaccagagccagcggcgtgctgctggtgaacctgagcctgggccacctgctgctggccgccctggacatgcccttcaccctgctgggcgtgatgagaggcagaacccccagcgcccccggcgcctgccaggtgatcggcttcctggacaccttcctggccagcaacgccgccctgagcgtggccgccctgagcgccgaccagtggctggccgtgggcttccccctgagatacgccggcagactgagacccagatacgccggcctgctgctgggctgcgcctggggccagagcctggccttcagcggcgccgccctgggctgcagctggctgggctacagcagcgccttcgccagctgcagcctgagactgccccccgagcccgagagacccagattcgccgccttcaccgccaccctgcacgccgtgggcttcgtgctgcccctggccgtgctgtgcctgaccagcctgcaggtgcacagagtggccagaagacactgccagagaatggacaccgtgaccatgaaggccctggccctgctggccgacctgcaccccagcgtgagacagagatgcctgatccagcagaagagaagaagacacagagccaccagaaagatcggcatcgccatcgccaccttcctgatctgcttcgccccctacgtgatgaccagactggccgagctggtgcccttcgtgaccgtgaacgcccagtggggcatcctgagcaagtgcctgacctacagcaaggccgtggccgaccccttcacctacagcctgctgagaagacccttcagacaggtgctggccggcatggtgcacagactgctgaagagaacccccagacccgccagcacccacgacagcagcctggacgtggccggcatggtgcaccagctgctgaagagaacccccagacccgccagcacccacaacggcagcgtggacaccgagaacgacagctgcctgcagcagacccactag

SEQ ID NO: 82499 - DNA, 1011 bp, synthetic construct
  misc_feature 1..1011: note = Description of Artificial Sequence: Synthetic coding sequence
  source 1..1011: mol_type = other DNA
atgaacaacaacaccacctgcatccagcccagcatgatcagcagcatggccctgcccatcatctacatcctgctgtgcatcgtgggcgtgttcggcaacaccctgagccagtggatcttcctgaccaagatcggcaagaagaccagcacccacatctacctgagccacctggtgaccgccaacctgctggtgtgcagcgccatgcccttcatgagcatctacttcctgaagggcttccagtgggagtaccagagcgcccagtgcagagtggtgaacttcctgggcaccctgagcatgcacgccagcatgttcgtgagcctgctgatcctgagctggatcgccatcagcagatacgccaccctgatgcagaaggacagcagccaggagaccaccagctgctacgagaagatcttctacggccacctgctgaagaagttcagacagcccaacttcgccagaaagctgtgcatctacatctggggcgtggtgctgggcatcatcatccccgtgaccgtgtactacagcgtgatcgaggccaccgagggcgaggagagcctgtgctacaacagacagatggagctgggcgccatgatcagccagatcgccggcctgatcggcaccaccttcatcggcttcagcttcctggtggtgctgaccagctactacagcttcgtgagccacctgagaaagatcagaacctgcaccagcatcatggagaaggacctgacctacagcagcgtgaagagacacctgctggtgatccagatcctgctgatcgtgtgcttcctgccctacagcatcttcaagcccatcttctacgtgctgcaccagagagacaactgccagcagctgaactacctgatcgagaccaagaacatcctgacctgcctggccagcgccagaagcagcaccgaccccatcatcttcctgctgctggacaagaccttcaagaagaccctgtacaacctgttcaccaagagcaacagcgcccacatgcagagctacggctag

SEQ ID NO: 82500 - DNA, 1272 bp, synthetic construct
  misc_feature 1..1272: note = Description of Artificial Sequence: Synthetic coding sequence
  source 1..1272: mol_type = other DNA
atggtgccccacctgctgctgctgtgcctgctgcccctggtgagagccaccgagccccacgagggcagagccgacgagcagagcgccgaggccgccctggccgtgcccaacgccagccacttcttcagctggaacaactacaccttcagcgactggcagaacttcgtgggcagaagaagatacggcgccgagagccagaaccccaccgtgaaggccctgctgatcgtggcctacagcttcatcatcgtgttcagcctgttcggcaacgtgctggtgtgccacgtgatcttcaagaaccagagaatgcacagcgccaccagcctgttcatcgtgaacctggccgtggccgacatcatgatcaccctgctgaacacccccttcaccctggtgagattcgtgaacagcacctggatcttcggcaagggcatgtgccacgtgagcagattcgcccagtactgcagcctgcacgtgagcgccctgaccctgaccgccatcgccgtggacagacaccaggtgatcatgcaccccctgaagcccagaatcagcatcaccaagggcgtgatctacatcgccgtgatctggaccatggccaccttcttcagcctgccccacgccatctgccagaagctgttcaccttcaagtacagcgaggacatcgtgagaagcctgtgcctgcccgacttccccgagcccgccgacctgttctggaagtacctggacctggccaccttcatcctgctgtacatcctgcccctgctgatcatcagcgtggcctacgccagagtggccaagaagctgtggctgtgcaacatgatcggcgacgtgaccaccgagcagtacttcgccctgagaagaaagaagaagaagaccatcaagatgctgatgctggtggtggtgctgttcgccctgtgctggttccccctgaactgctacgtgctgctgctgagcagcaaggtgatcagaaccaacaacgccctgtacttcgccttccactggttcgccatgagcagcacctgctacaaccccttcatctactgctggctgaacgagaacttcagaatcgagctgaaggccctgctgagcatgtgccagagaccccccaagccccaggaggacagaccccccagccccgtgcccagcttcagagtggcctggaccgagaagaacgacggccagagagcccccctggccaacaacctgctgcccaccagccagctgcagagcggcaagaccgacctgagcagcgtggagcccatcgtgaccatgagctag

SEQ ID NO: 82501 - DNA, 1191 bp, synthetic construct
  misc_feature 1..1191: note = Description of Artificial Sequence: Synthetic coding sequence
  source 1..1191: mol_type = other DNA
atgtggaacagcagcgacgccaacttcagctgctaccacgagagcgtgctgggctacagatacgtggccgtgagctggggcgtggtggtggccgtgaccggcaccgtgggcaacgtgctgaccctgctggccctggccatccagcccaagctgagaaccagattcaacctgctgatcgccaacctgaccctggccgacctgctgtactgcaccctgctgcagcccttcagcgtggacacctacctgcacctgcactggagaaccggcgccaccttctgcagagtgttcggcctgctgctgttcgccagcaacagcgtgagcatcctgaccctgtgcctgatcgccctgggcagatacctgctgatcgcccaccccaagctgttcccccaggtgttcagcgccaagggcatcgtgctggccctggtgagcacctgggtggtgggcgtggccagcttcgcccccctgtggcccatctacatcctggtgcccgtggtgtgcacctgcagcttcgacagaatcagaggcagaccctacaccaccatcctgatgggcatctacttcgtgctgggcctgagcagcgtgggcatcttctactgcctgatccacagacaggtgaagagagccgcccaggccctggaccagtacaagctgagacaggccagcatccacagcaaccacgtggccagaaccgacgaggccatgcccggcagattccaggagctggacagcagactggccagcggcggccccagcgagggcatcagcagcgagcccgtgagcgccgccaccacccagaccctggagggcgacagcagcgaggtgggcgaccagatcaacagcaagagagccaagcagatggccgagaagagcccccccgaggccagcgccaaggcccagcccatcaagggcgccagaagagcccccgacagcagcagcgagttcggcaaggtgaccagaatgtgcttcgccgtgttcctgtgcttcgccctgagctacatccccttcctgctgctgaacatcctggacgccagagtgcaggcccccagagtggtgcacatgctggccgccaacctgacctggctgaacggctgcatcaaccccgtgctgtacgccgccatgaacagacagttcagacaggcctacggcagcatcctgaagagaggccccagaagcttccacagactgcactag

SEQ ID NO: 82502 - DNA, 1191 bp, synthetic construct; identical to SEQ ID NO: 82501
  misc_feature 1..1191: note = Description of Artificial Sequence: Synthetic coding sequence
  source 1..1191: mol_type = other DNA

SEQ ID NO: 82503 - DNA, 1113 bp, synthetic construct
  misc_feature 1..1113: note = Description of Artificial Sequence: Synthetic coding sequence
  source 1..1113: mol_type = other DNA
atggccaactacagccacgccgccgacaacatcctgcagaacctgagccccctgaccgccttcctgaagctgaccagcctgggcttcatcatcggcgtgagcgtggtgggcaacctgctgatcagcatcctgctggtgaaggacaagaccctgcacagagccccctactacttcctgctggacctgtgctgcagcgacatcctgagaagcgccatctgcttccccttcgtgttcaacagcgtgaagaacggcagcacctggacctacggcaccctgacctgcaaggtgatcgccttcctgggcgtgctgagctgcttccacaccgccttcatgctgttctgcatcagcgtgaccagatacctggccatcgcccaccacagattctacaccaagagactgaccttctggacctgcctggccgtgatctgcatggtgtggaccctgagcgtggccatggccttcccccccgtgctggacgtgggcacctacagcttcatcagagaggaggaccagtgcaccttccagcacagaagcttcagagccaacgacagcctgggcttcatgctgctgctggccctgatcctgctggccacccagctggtgtacctgaagctgatcttcttcgtgcacgacagaagaaagatgaagcccgtgcagttcgtggccgccgtgagccagaactggaccttccacggccccggcgccagcggccaggccgccgccaactggctggccggcttcggcagaggccccaccccccccaccctgctgggcatcagacagaacgccaacaccaccggcagaagaagactgctggtgctggacgagttcaagatggagaagagaatcagcagaatgttctacatcatgaccttcctgttcctgaccctgtggggcccctacctggtggcctgctactggagagtgttcgccagaggccccgtggtgcccggcggcttcctgaccgccgccgtgtggatgagcttcgcccaggccggcatcaaccccttcgtgtgcatcttcagcaacagagagctgagaagatgcttcagcaccaccctgctgtactgcagaaagagcagactgcccagagagccctactgcgtgatctag

SEQ ID NO: 82504 - DNA, 1113 bp, synthetic construct; identical to SEQ ID NO: 82503
  misc_feature 1..1113: note = Description of Artificial Sequence: Synthetic coding sequence
  source 1..1113: mol_type = other DNA

SEQ ID NO: 82505 - DNA, 216 bp, synthetic construct
  misc_feature 1..216: note = Description of Artificial Sequence: Synthetic coding sequence
  source 1..216: mol_type = other DNA
atggccaactacagccacgccgccgacaacatcctgcagaacctgagccccctgaccgccttcctgaagctgaccagcctgggcttcatcatcggcgtgagcgtggtgggcaacctgctgatcagcatcctgctggtgaaggacaagaccctgcacagagccccctactacttcctgctggacctgtgctgcagcgacatcctgagaagcgcctag

SEQ ID NO: 82506 - DNA, 1113 bp, synthetic construct; identical to SEQ ID NO: 82503
  misc_feature 1..1113: note = Description of Artificial Sequence: Synthetic coding sequence
  source 1..1113: mol_type = other DNA

SEQ ID NO: 82507 - DNA, 366 bp, synthetic construct
  misc_feature 1..366: note = Description of Artificial Sequence: Synthetic coding sequence
  source 1..366: mol_type = other DNA
atggccaactacagccacgccgccgacaacatcctgcagaacctgagccccctgaccgccttcctgaagctgaccagcctgggcttcatcatcggcgtgagcgtggtgggcaacctgctgatcagcatcctgctggtgaaggacaagaccctgcacagagccccctactacttcctgctggacctgtgctgcagcgacatcctgagaagcgccatctgcttccccttcgtgttcaacagcgtgaagaacggcagcacctggacctacggcaccctgacctgcaaggtgatcgccttcctgggcgtgctgagctgcttccacaccgccttcatgctgttctgcatcagcgtgaccagatacctgtag

SEQ ID NO: 82508 - DNA, 1113 bp, synthetic construct; identical to SEQ ID NO: 82503
  misc_feature 1..1113: note = Description of Artificial Sequence: Synthetic coding sequence
  source 1..1113: mol_type = other DNA

SEQ ID NO: 82509 - DNA, 1077 bp, synthetic construct
  misc_feature 1..1077: note = Description of Artificial Sequence: Synthetic coding sequence
  source 1..1077: mol_type = other DNA
atgggcttcaacctgaccctggccaagctgcccaacaacgagctgcacggccaggagagccacaacagcggcaacagaagcgacggccccggcaagaacaccaccctgcacaacgagttcgacaccatcgtgctgcccgtgctgtacctgatcatcttcgtggccagcatcctgctgaacggcctggccgtgtggatcttcttccacatcagaaacaagaccagcttcatcttctacctgaagaacatcgtggtggccgacctgatcatgaccctgaccttccccttcagaatcgtgcacgacgccggcttcggcccctggtacttcaagttcatcctgtgcagatacaccagcgtgctgttctacgccaacatgtacaccagcatcgtgttcctgggcctgatcagcatcgacagatacctgaaggtggtgaagcccttcggcgacagcagaatgtacagcatcaccttcaccaaggtgctgagcgtgtgcgtgtgggtgatcatggccgtgctgagcctgcccaacatcatcctgaccaacggccagcccaccgaggacaacatccacgactgcagcaagctgaagagccccctgggcgtgaagtggcacaccgccgtgacctacgtgaacagctgcctgttcgtggccgtgctggtgatcctgatcggctgctacatcgccatcagcagatacatccacaagagcagcagacagttcatcagccagagcagcagaaagagaaagcacaaccagagcatcagagtggtggtggccgtgttcttcacctgcttcctgccctaccacctgtgcagaatccccttcaccttcagccacctggacagactgctggacgagagcgcccagaagatcctgtactactgcaaggagatcaccctgttcctgagcgcctgcaacgtgtgcctggaccccatcatctacttcttcatgtgcagaagcttcagcagaagactgttcaagaagagcaacatcagaaccagaagcgagagcatcagaagcctgcagagcgtgagaagaagcgaggtgagaatctactacgactacaccgacgtgtag

SEQ ID NO: 82510 - DNA, 1368 bp, synthetic construct
  misc_feature 1..1368: note = Description of Artificial Sequence: Synthetic coding sequence
  source 1..1368: mol_type = other DNA
atgagcttcctgatcgacagcagcatcatgatcaccagccagatcctgttcttcggcttcggctggctgttcttcatgagacagctgttcaaggactacgagatcagacagtacgtggtgcaggtgatcttcagcgtgaccttcgccttcagctgcaccatgttcgagctgatcatcttcgagatcctgggcgtgctgaacagcagcagcagatacttccactggaagatgaacctgtgcgtgatcctgctgatcctggtgttcatggtgcccttctacatcggctacttcatcgtgagcaacatcagactgctgcacaagcagagactgctgttcagctgcctgctgtggctgaccttcatgtacttcttctggaagctgggcgaccccttccccatcctgagccccaagcacggcatcctgagcatcgagcagctgatcagcagagtgggcgtgatcggcgtgaccctgatggccctgctgagcggcttcggcgccgtgaactgcccctacacctacatgagctacttcctgagaaacgtgaccgacaccgacatcctggccctggagagaagactgctgcagaccatggacatgatcatcagcaagaagaagagaatggccatggccagaagaaccatgttccagaagggcgaggtgcacaacaagcccagcggcttctggggcatgatcaagagcgtgaccaccagcgccagcggcagcgagaacctgaccctgatccagcaggaggtggacgccctggaggagctgagcagacagctgttcctggagaccgccgacctgtacgccaccaaggagagaatcgagtacagcaagaccttcaagggcaagtacttcaacttcctgggctacttcttcagcatctactgcgtgtggaagatcttcatggccaccatcaacatcgtgttcgacagagtgggcaagaccgaccccgtgaccagaggcatcgagatcaccgtgaactacctgggcatccagttcgacgtgaagttctggagccagcacatcagcttcatcctggtgggcatcatcatcgtgaccagcatcagaggcctgctgatcaccctgaccaagttcttctacgccatcagcagcagcaagagcagcaacgtgatcgtgctgctgctggcccagatcatgggcatgtacttcgtgagcagcgtgctgctgatcagaatgagcatgcccctggagtacagaaccatcatcaccgaggtgctgggcgagctgcagttcaacttctaccacagatggttcgacgtgatcttcctggtgagcgccctgagcagcatcctgttcctgtacctggcccacaagcaggcccccgagaagcagatggccccctag

SEQ ID NO: 82511 - DNA, 1008 bp, synthetic construct
  misc_feature 1..1008: note = Description of Artificial Sequence: Synthetic coding sequence
  source 1..1008: mol_type = other DNA
atgtacttcttctggaagctgggcgaccccttccccatcctgagccccaagcacggcatcctgagcatcgagcagctgatcagcagagtgggcgtgatcggcgtgaccctgatggccctgctgagcggcttcggcgccgtgaactgcccctacacctacatgagctacttcctgagaaacgtgaccgacaccgacatcctggccctggagagaagactgctgcagaccatggacatgatcatcagcaagaagaagagaatggccatggccagaagaaccatgttccagaagggcgaggtgcacaacaagcccagcggcttctggggcatgatcaagagcgtgaccaccagcgccagcggcagcgagaacctgaccctgatccagcaggaggtggacgccctggaggagctgagcagacagctgttcctggagaccgccgacctgtacgccaccaaggagagaatcgagtacagcaagaccttcaagggcaagtacttcaacttcctgggctacttcttcagcatctactgcgtgtggaagatcttcatggccaccatcaacatcgtgttcgacagagtgggcaagaccgaccccgtgaccagaggcatcgagatcaccgtgaactacctgggcatccagttcgacgtgaagttctggagccagcacatcagcttcatcctggtgggcatcatcatcgtgaccagcatcagaggcctgctgatcaccctgaccaagttcttctacgccatcagcagcagcaagagcagcaacgtgatcgtgctgctgctggcccagatcatgggcatgtacttcgtgagcagcgtgctgctgatcagaatgagcatgcccctggagtacagaaccatcatcaccgaggtgctgggcgagctgcagttcaacttctaccacagatggttcgacgtgatcttcctggtgagcgccctgagcagcatcctgttcctgtacctggcccacaagcaggcccccgagaagcagatggccccctag

SEQ ID NO: 82512 - DNA, 1368 bp, synthetic construct; identical to SEQ ID NO: 82510
  misc_feature 1..1368: note = Description of Artificial Sequence: Synthetic coding sequence
  source 1..1368: mol_type = other DNA

SEQ ID NO: 82513 - DNA, 18921 bp, synthetic construct
  misc_feature 1..18921: note = Description of Artificial Sequence: Synthetic coding sequence
  source 1..18921: mol_type = other DNA
atggacatcttcctggtgctgggcatgcccagcgccagcctgctggtgaacctgctgagcgccctgctgatcctgttcgtgttcggcgagaccgagatcagattcaccggccagaccgagttcgtggtgaacgagaccagcaccaccgtgatcagactgatcatcgagagaatcggcgagcccgccaacgtgaccgccatcgtgagcctgtacggcgaggacgccggcgacttcttcgacacctacgccgccgccttcatccccgccggcgagaccaacagaaccgtgtacatcgccgtgtgcgacgacgacctgcccgagcccgacgagaccttcatcttccacctgaccctgcagaagcccagcgccaacgtgaagctgggctggcccagaaccgtgaccgtgaccatcctgagcaacgacaacgccttcggcatcatcagcttcaacatgctgcccagcatcgccgtgagcgagcccaagggcagaaacgagagcatgcccctgaccctgatcagagagaagggcacctacggcatggtgatggtgaccttcgaggtggagggcggccccaacccccccgacgaggacctgagccccgtgaagggcaacatcaccttcccccccggcagagccaccgtgatctacaacctgaccgtgctggacgacgaggtgcccgagaacgacgagatcttcctgatccagctgaagagcgtggagggcggcgccgagatcaacaccagcagaaacagcatcgagatcatcatcaagaagaacgacagccccgtgagattcctgcagagcatctacctggtgcccgaggaggaccacatcctgatcatccccgtggtgagaggcaaggacaacaacggcaacctgatcggcagcgacgagtacgaggtgagcatcagctacgccgtgaccaccggcaacagcaccgcccacgcccagcagaacctggacttcatcgacctgcagcccaacaccaccgtggtgttcccccccttcatccacgagagccacctgaagttccagatcgtggacgacaccatccccgagatcgccgagagcttccacatcatgctgctgaaggacaccctgcagggcgacgccgtgctgatcagccccagcgtggtgcaggtgaccatcaagcccaacgacaagccctacggcgtgctgagcttcaacagcgtgctgttcgagagaaccgtgatcatcgacgaggacagaatcagcagatacgaggagatcaccgtggtgagaaacggcggcacccacggcaacgtgagcgccaactgggtgctgaccagaaacagcaccgaccccagccccgtgaccgccgacatcagacccagcagcggcgtgctgcacttcgcccagggccagatgctggccaccatccccctgaccgtggtggacgacgacctgcccgaggaggccgaggcctacctgctgcagatcctgccccacaccatcagaggcggcgccgaggtgagcgagcccgccgagctgctgttctacatccaggacagcgacgacgtgtacggcctgatcaccttcttccccatggagaaccagaagatcgagagcagccccggcgagagatacctgagcctgagcttcaccagactgggcggcaccaagggcgacgtgagactgctgtacagcgtgctgtacatccccgccggcgccgtggaccccctgcaggccaaggagggcatcctgaacatcagcagaagaaacgacctgatcttccccgagcagaagacccaggtgaccaccaagctgcccatcagaaacgacgccttcctgcagaacggcgcccacttcctggtgcagctggagaccgtggagctgctgaacatcatccccctgatcccccccatcagccccagattcggcgagatctgcaacatcagcctgctggtgacccccgccatcgccaacggcgagatcggcttcctgagcaacctgcccatcatcctgcacgagcccgaggacttcgccgccgaggtggtgtacatccccctgcacagagacggcaccgacggccaggccaccgtgtactggagcctgaagcccagcggcttcaacagcaaggccgtgacccccgacgacatcggccccttcaacggcagcgtgctgttcctgagcggccagagcgacaccaccatcaacatcaccatcaagggcgacgacatccccgagatgaacgagaccgtgaccctgagcctggacagagtgaacgtggagaaccaggtgctgaagagcggctacaccagcagagacctgatcatcctggagaacgacgaccccggcggcgtgttcgagttcagccccgccagcagaggcccctacgtgatcaaggagggcgagagcgtggagctgcacatcatcagaagcagaggcagcctggtgaagcagttcctgcactacagagtggagcccagagacagcaacgagttctacggcaacaccggcgtgctggagttcaagcccggcgagagagagatcgtgatcaccctgctggccagactggacggcatccccgagctggacgagcactactgggtggtgctgagcagccacggcgagagagagagcaagctgggcagcgccaccatcgtgaacatcaccatcctgaagaacgacgacccccacggcatcatcgagttcgtgagcgacggcctgatcgtgatgatcaacgagagcaagggcgacgccatctacagcgccgtgtacgacgtggtgagaaacagaggcaacttcggcgacgtgagcgtgagctgggtggtgagccccgacttcacccaggacgtgttccccgtgcagggcaccgtggtgttcggcgaccaggagttcagcaagaacatcaccatctacagcctgcccgacgagatccccgaggagatggaggagttcaccgtgatcctgctgaacggcaccggcggcgccaaggtgggcaacagaaccaccgccaccctgagaatcagaagaaacgacgaccccatctacttcgccgagcccagagtggtgagagtgcaggagggcgagaccgccaacttcaccgtgctgagaaacggcagcgtggacgtgacctgcatggtgcagtacgccaccaaggacggcaaggccaccgccagagagagagacttcatccccgtggagaagggcgagaccctgatcttcgaggtgggcagcagacagcagagcatcagcatcttcgtgaacgaggacggcatccccgagaccgacgagcccttctacatcatcctgctgaacagcaccggcgacaccgtggtgtaccagtacggcgtggccaccgtgatcatcgaggccaacgacgaccccaacggcatcttcagcctggagcccatcgacaaggccgtggaggagggcaagaccaacgccttctggatcctgagacacagaggctacttcggcagcgtgagcgtgagctggcagctgttccagaacgacagcgccctgcagcccggccaggagttctacgagaccagcggcaccgtgaacttcatggacggcgaggaggccaagcccatcatcctgcacgccttccccgacaagatccccgagttcaacgagttctacttcctgaagctggtgaacatcagcggcggcagccccggccccggcggccagctggccgagaccaacctgcaggtgaccgtgatggtgcccttcaacgacgaccccttcggcgtgttcatcctggaccccgagtgcctggagagagaggtggccgaggacgtgctgagcgaggacgacatgagctacatcaccaacttcaccatcctgagacagcagggcgtgttcggcgacgtgcagctgggctgggagatcctgagcagcgagttccccgccggcctgccccccatgatcgacttcctgctggtgggcatcttccccaccaccgtgcacctgcagcagcacatgagaagacaccacagcggcaccgacgccctgtacttcaccggcctggagggcgccttcggcaccgtgaaccccaagtaccaccccagcagaaacaacaccatcgccaacttcaccttcagcgcctgggtgatgcccaacgccaacaccaacggcttcatcatcgccaaggacgacggcaacggcagcatctactacggcgtgaagatccagaccaacgagagccacgtgaccctgagcctgcactacaagaccctgggcagcaacgccacctacatcgccaagaccaccgtgatgaagtacctggaggagagcgtgtggctgcacctgctgatcatcctggaggacggcatcatcgagttctacctggacggcaacgccatgcccagaggcatcaagagcctgaagggcgaggccatcaccgacggccccggcatcctgagaatcggcgccggcatcaacggcaacgacagattcaccggcctgatgcaggacgtgagaagctacgagagaaagctgaccctggaggagatctacgagctgcacgccatgcccgccaagagcgacctgcaccccatcagcggctacctggagttcagacagggcgagaccaacaagagcttcatcatcagcgccagagacgacaacgacgaggagggcgaggagctgttcatcctgaagctggtgagcgtgtacggcggcgccagaatcagcgaggagaacaccaccgccagactgaccatccagaagagcgacaacgccaacggcctgttcggcttcaccggcgcctgcatccccgagatcgccgaggagggcagcaccatcagctgcgtggtggagagaaccagaggcgccctggactacgtgcacgtgttctacaccatcagccagatcgagaccgacggcatcaactacctggtggacgacttcgccaacgccagcggcaccatcaccttcctgccctggcagagaagcgaggtgctgaacatctacgtgctggacgacgacatccccgagctgaacgagtacttcagagtgaccctggtgagcgccatccccggcgacggcaagctgggcagcacccccaccagcggcgccagcatcgaccccgagaaggagaccaccgacatcaccatcaaggccagcgaccacccctacggcctgctgcagttcagcaccggcctgcccccccagcccaaggacgccatgaccctgcccgccagcagcgtgccccacatcaccgtggaggaggaggacggcgagatcagactgctggtgatcagagcccagggcctgctgggcagagtgaccgccgagttcagaaccgtgagcctgaccgccttcagccccgaggactaccagaacgtggccggcaccctggagttccagcccggcgagagatacaagtacatcttcatcaacatcaccgacaacagcatccccgagctggagaagagcttcaaggtggagctgctgaacctggagggcggcgtggccgagctgttcagagtggacggcagcggcagcggcgacggcgacatggagttcttcctgcccaccatccacaagagagccagcctgggcgtggccagccagatcctggtgaccatcgccgccagcgaccacgcccacggcgtgttcgagttcagccccgagagcctgttcgtgagcggcaccgagcccgaggacggctacagcaccgtgaccctgaacgtgatcagacaccacggcaccctgagccccgtgaccctgcactggaacatcgacagcgaccccgacggcgacctggccttcaccagcggcaacatcaccttcgagatcggccagaccagcgccaacatcaccgtggagatcctgcccgacgaggaccccgagctggacaaggccttcagcgtgagcgtgctgagcgtgagcagcggcagcctgggcgcccacatcaacgccaccctgaccgtgctggccagcgacgacccctacggcatcttcatcttcagcgagaagaacagacccgtgaaggtggaggaggccacccagaacatcaccctgagcatcatcagactgaagggcctgatgggcaaggtgctggtgagctacgccaccctggacgacatggagaagcccccctacttcccccccaacctggccagagccacccagggcagagactacatccccgccagcggcttcgccctgttcggcgccaaccagagcgaggccaccatcgccatcagcatcctggacgacgacgagcccgagagaagcgagagcgtgttcatcgagctgctgaacagcaccctggtggccaaggtgcagagcagaagcatccccaacagccccagactgggccccaaggtggagaccatcgcccagctgatcatcatcgccaacgacgacgccttcggcaccctgcagctgagcgcccccatcgtgagagtggccgagaaccacgtgggccccatcatcaacgtgaccagaaccggcggcgccttcgccgacgtgagcgtgaagttcaaggccgtgcccatcaccgccatcgccggcgaggactacagcatcgccagcagcgacgtggtgctgctggagggcgagaccagcaaggccgtgcccatctacgtgatcaacgacatctaccccgagctggaggagagcttcctggtgcagctgatgaacgagaccaccggcggcgccagactgggcgccctgaccgaggccgtgatcatcatcgaggccagcgacgacccctacggcctgttcggcttccagatcaccaagctgatcgtggaggagcccgagttcaacagcgtgaaggtgaacctgcccatcatcagaaacagcggcaccctgggcaacgtgaccgtgcagtgggtggccaccatcaacggccagctggccaccggcgacctgagagtggtgagcggcaacgtgaccttcgcccccggcgagaccatccagaccctgctgctggaggtgctggccgacgacgtgcccgagatcgaggaggtgatccaggtgcagctgaccgacgccagcggcggcggcaccatcggcctggacagaatcgccaacatcatcatccccgccaacgacgacccctacggcaccgtggccttcgcccagatggtgtacagagtgcaggagcccctggagagaagcagctgcgccaacatcaccgtgagaagaagcggcggccacttcggcagactgctgctgttctacagcaccagcgacatcgacgtggtggccctggccatggaggagggccaggacctgctgagctactacgagagccccatccagggcgtgcccgaccccctgtggagaacctggatgaacgtgagcgccgtgggcgagcccctgtacacctgcgccaccctgtgcctgaaggagcaggcctgcagcgccttcagcttcttcagcgccagcgagggcccccagtgcttctggatgaccagctggatcagccccgccgtgaacaacagcgacttctggacctacagaaagaacatgaccagagtggccagcctgttcagcggccaggccgtggccggcagcgactacgagcccgtgaccagacagtgggccatcatgcaggagggcgacgagttcgccaacctgaccgtgagcatcctgcccgacgacttccccgagatggacgagagcttcctgatcagcctgctggaggtgcacctgatgaacatcagcgccagcctgaagaaccagcccaccatcggccagcccaacatcagcaccgtggtgatcgccctgaacggcgacgccttcggcgtgttcgtgatctacaacatcagccccaacaccagcgaggacggcctgttcgtggaggtgcaggagcagccccagaccctggtggagctgatgatccacagaaccggcggcagcctgggccaggtggccgtggagtggagagtggtgggcggcaccgccaccgagggcctggacttcatcggcgccggcgagatcctgaccttcgccgagggcgagaccaagaagaccgtgatcctgaccatcctggacgacagcgagcccgaggacgacgagagcatcatcgtgagcctggtgtacaccgagggcggcagcagaatcctgcccagcagcgacaccgtgagagtgaacatcctggccaacgacaacgtggccggcatcgtgagcttccagaccgccagcagaagcgtgatcggccacgagggcgagatcctgcagttccacgtgatcagaaccttccccggcagaggcaacgtgaccgtgaactggaagatcatcggccagaacctggagctgaacttcgccaacttcagcggccagctgttcttccccgagggcagcctgaacaccaccctgttcgtgcacctgctggacgacaacatccccgaggagaaggaggtgtaccaggtgatcctgtacgacgtgagaacccagggcgtgccccccgccggcatcgccctgctggacgcccagggctacgccgccgtgctgaccgtggaggccagcgacgagccccacggcgtgctgaacttcgccctgagcagcagattcgtgctgctgcaggaggccaacatcaccatccagctgttcatcaacagagagttcggcagcctgggcgccatcaacgtgacctacaccaccgtgcccggcatgctgagcctgaagaaccagaccgtgggcaacctggccgagcccgaggtggacttcgtgcccatcatcggcttcctgatcctggaggagggcgagaccgccgccgccatcaacatcaccatcctggaggacgacgtgcccgagctggaggagtacttcctggtgaacctgacctacgtgggcctgaccatggccgccagcaccagcttcccccccagactggacagcgagggcctgaccgcccaggtgatcatcgacgccaacgacggcgccagaggcgtgatcgagtggcagcagagcagattcgaggtgaacgagacccacggcagcctgaccctggtggcccagagaagcagagagcccctgggccacgtgagcctgttcgtgtacgcccagaacctggaggcccaggtgggcctggactacatcttcacccccatgatcctgcacttcgccgacggcgagagatacaagaacgtgaacatcatgatcctggacgacgacatccccgagggcgacgagaagttccagctgatcctgaccaaccccagccccggcctggagctgggcaagaacaccatcgccctgatcatcgtgctggccaacgacgacggccccggcgtgctgagcttcaacaacagcgagcacttcttcctgagagagcccaccgccctgtacgtgcaggagagcgtggccgtgctgtacatcgtgagagagcccgcccagggcctgttcggcaccgtgaccgtgcagttcatcgtgaccgaggtgaacagcagcaacgagagcaaggacctgacccccagcaagggctacatcgtgctggaggagggcgtgagattcaaggccctgcagatcagcgccatcctggacaccgagcccgagatggacgagtacttcgtgtgcaccctgttcaaccccaccggcggcgccagactgggcgtgcacgtgcagaccctgatcaccgtgctgcagaaccaggcccccctgggcctgttcagcatcagcgccgtggagaacagagccaccagcatcgacatcgaggaggccaacagaaccgtgtacctgaacgtgagcagaaccaacggcatcgacctggccgtgagcgtgcagtgggagaccgtgagcgagaccgccttcggcatgagaggcatggacgtggtgttcagcgtgttccagagcttcctggacgagagcgccagcggctggtgcttcttcaccctggagaacctgatctacggcatcatgctgagaaagagcagcgtgaccgtgtacagatggcagggcatcttcatccccgtggaggacctgaacatcgagaaccccaagacctgcgaggccttcaacatcggcttcagcccctacttcgtgatcacccacgaggagagaaacgaggagaagcccagcctgaacagcgtgttcaccttcaccagcggcttcaagctgttcctggtgcagaccatcatcatcctggagagcagccaggtgagatacttcaccagcgacagccaggactacctgatcatcgccagccagagagacgacagcgagctgacccaggtgttcagatggaacggcggcagcttcgtgctgcaccagaagctgcccgtgagaggcgtgctgaccgtggccctgttcaacaagggcggcagcgtgttcctggccatcagccaggccaacgccagactgaacagcctgctgttcagatggagcggcagcggcttcatcaacttccaggaggtgcccgtgagcggcaccaccgaggtggaggccctgagcagcgccaacgacatctacctgatcttcgccgagaacgtgttcctgggcgaccagaacagcatcgacatcttcatctgggagatgggccagagcagcttcagatacttccagagcgtggacttcgccgccgtgaacagaatccacagcttcacccccgccagcggcatcgcccacatcctgctgatcggccaggacatgagcgccctgtactgctggaacagcgagagaaaccagttcagcttcgtgctggaggtgcccagcgcctacgacgtggccagcgtgaccgtgaagagcctgaacagcagcaagaacctgatcgccctggtgggcgcccacagccacatctacgagctggcctacatcagcagccacagcgacttcatccccagcagcggcgagctgatcttcgagcccggcgagagagaggccaccatcgccgtgaacatcctggacgacaccgtgcccgagaaggaggagagcttcaaggtgcagctgaagaaccccaagggcggcgccgagatcggcatcaacgacagcgtgaccatcaccatcctgagcaacgacgacgcctacggcatcgtggccttcgcccagaacagcctgtacaagcaggtggaggagatggagcaggacagcctggtgaccctgaacgtggagagactgaagggcacctacggcagaatcaccatcgcctgggaggccgacggcagcatcagcgacatcttccccaccagcggcgtgatcctgttcaccgagggccaggtgctgagcaccatcaccctgaccatcctggccgacaacatccccgagctgagcgaggtggtgatcgtgaccctgaccagaatcaccaccgagggcgtggaggacagctacaagggcgccaccatcgaccaggacagaagcaagagcgtgatcaccaccctgcccaacgacagccccttcggcctggtgggctggagagccgccagcgtgttcatcagagtggccgagcccaaggagaacaccaccaccctgcagctgcagatcgccagagacaagggcctgctgggcgacatcgccatccacctgagagcccagcccaacttcctgctgcacgtggacaaccaggccaccgagaacgaggactacgtgctgcaggagaccatcatcatcatgaaggagaacatcaaggaggcccacgccgaggtgagcatcctgcccgacgacctgcccgagctggaggagggcttcatcgtgaccatcaccgaggtgaacctggtgaacagcgacttcagcaccggccagcccagcgtgagaagacccggcatggagatcgccgagatcatgatcgaggagaacgacgaccccagaggcatcttcatgttccacgtgaccagaggcgccggcgaggtgatcaccgcctacgaggtgcccccccccctgaacgtgctgcaggtgcccgtggtgagactggccggcagcttcggcgccgtgaacgtgtactggaaggccagccccgacagcgccggcctggaggacttcaagcccagccacggcatcctggagttcgccgacaagcaggtgaccgccatgatcgagatcaccatcatcgacgacgccgagttcgagctgaccgagaccttcaacatcagcctgatcagcgtggccggcggcggcagactgggcgacgacgtggtggtgaccgtggtgatcccccagaacgacagccccttcggcgtgttcggcttcgaggagaagaccgtgatgatcgacgagagcctgagcagcgacgaccccgacagctacgtgaccctgaccgtggtgagaagccccggcggcaagggcaccgtgagactggagtggaccatcgacgagaaggccaagcacaacctgagccccctgaacggcaccctgcacttcgacgagaccgagagccagaagaccatcgtgctgcacaccctgcaggacaccgtgctggaggaggacagaagattcaccatccagctgatcagcatcgacgaggtggagatcagccccgtgaagggcagcgccagcatcatcatcagaggcgacaagagagccagcggcgaggtgggcatcgcccccagcagcagacacatcctgatcggcgagcccagcgccaagtacaacggcaccgccatcatcagcctggtgagaggccccggcatcctgggcgaggtgaccgtgttctggagaatcttcccccccagcgtgggcgagttcgccgagaccagcggcaagctgaccatgagagacgagcagagcgccgtgatcgtggtgatccaggccctgaacgacgacatccccgaggagaagagcttctacgagttccagctgaccgccgtgagcgagggcggcgtgctgagcgagagcagcagcaccgccaacatcaccgtggtggccagcgacagcccctacggcagattcgccttcagccacgagcagctgagagtgagcgaggcccagagagtgaacatcaccatcatcagaagcagcggcgacttcggccacgtgagactgtggtacaagaccatgagcggcaccgccgaggccggcctggacttcgtgcccgccgccggcgagctgctgttcgaggccggcgagatgagaaagagcctgcacgtggagatcctggacgacgactaccccgagggccccgaggagttcagcctgaccatcaccaaggtggagctgcagggcagaggctacgacttcaccatccaggagaacggcctgcagatcgaccagccccccgagatcggcaacatcagcatcgtgagaatcatcatcatgaagaacgacaacgccgagggcatcatcgagttcgaccccaagtacaccgccttcgaggtggaggaggacgtgggcctgatcatgatccccgtggtgagactgcacggcacctacggctacgtgaccgccgacttcatcagccagagcagcagcgccagccccggcggcgtggactacatcctgcacggcagcaccgtgaccttccagcacggccagaacctgagcttcatcaacatcagcatcatcgacgacaacgagagcgagttcgaggagcccatcgagatcctgctgaccggcgccaccggcggcgccgtgctgggcagacacctggtgagcagaatcatcatcgccaagagcgacagccccttcggcgtgatcagattcctgaaccagagcaagatcagcatcgccaaccccaacagcaccatgatcctgagcctggtgctggagagaaccggcggcctgctgggcgagatccaggtgaactgggagaccgtgggccccaacagccaggaggccctgctgccccagaacagagacatcgccgaccccgtgagcggcctgttctacttcggcgagggcgagggcggcgtgagaaccatcatcctgaccatctacccccacgaggagatcgaggtggaggagaccttcatcatcaagctgcacctggtgaagggcgaggccaagctggacagcagagccaaggacgtgaccctgaccatccaggagttcggcgaccccaacggcgtggtgcagttcgcccccgagaccctgagcaagaagacctacagcgagcccctggccctggagggccccctgctgatcaccttcttcgtgagaagagtgaagggcaccttcggcgagatcatggtgtactgggagctgagcagcgagttcgacatcaccgaggacttcctgagcaccagcggcttcttcaccatcgccgacggcgagagcgaggccagcttcgacgtgcacctgctgcccgacgaggtgcccgagatcgaggaggactacgtgatccagctggtgagcgtggagggcggcgccgagctggacctggagaagagcatcacctggttcagcgtgtacgccaacgacgacccccacggcgtgttcgccctgtacagcgacagacagagcatcctgatcggccagaacctgatcagaagcatccagatcaacatcaccagactggccggcaccttcggcgacgtggccgtgggcctgagaatcagcagcgaccacaaggagcagcccatcgtgaccgagaacgccgagagacagctggtggtgaaggacggcgccacctacaaggtggacgtggtgcccatcaagaaccaggtgttcctgagcctgggcagcaacttcaccctgcagctggtgaccgtgatgctggtgggcggcagattctacggcatgcccaccatcctgcaggaggccaagagcgccgtgctgcccgtgagcgagaaggccgccaacagccaggtgggcttcgagagcaccgccttccagctgatgaacatcaccgccggcaccagccacgtgatgatcagcagaagaggcacctacggcgccctgagcgtggcctggaccaccggctacgcccccggcctggagatccccgagttcatcgtggtgggcaacatgacccccaccctgggcagcctgagcttcagccacggcgagcagagaaagggcgtgttcctgtggaccttccccagccccggctggcccgaggccttcgtgctgcacctgagcggcgtgcagagcagcgcccccggcggcgcccagctgagaagcggcttcatcgtggccgagatcgagcccatgggcgtgttccagttcagcaccagcagcagaaacatcatcgtgagcgaggacacccagatgatcagactgcacgtgcagagactgttcggcttccacagcgacctgatcaaggtgagctaccagaccaccgccggcagcgccaagcccctggaggacttcgagcccgtgcagaacggcgagctgttcttccagaagttccagaccgaggtggacttcgagatcaccatcatcaacgaccagctgagcgagatcgaggagttcttctacatcaacctgaccagcgtggagatcagaggcctgcagaagttcgacgtgaactggagccccagactgaacctggacttcagcgtggccgtgatcaccatcctggacaacgacgacctggccggcatggacatcagcttccccgagaccaccgtggccgtggccgtggacaccaccctgatccccgtggagaccgagagcaccacctacctgagcaccagcaagaccaccaccatcctgcagcccaccaacgtggtggccatcgtgaccgaggccaccggcgtgagcgccatccccgagaagctggtgaccctgcacggcacccccgccgtgagcgagaagcccgacgtggccaccgtgaccgccaacgtgagcatccacggcaccttcagcctgggccccagcatcgtgtacatcgaggaggagatgaagaacggcaccttcaacaccgccgaggtgctgatcagaagaaccggcggcttcaccggcaacgtgagcatcaccgtgaagaccttcggcgagagatgcgcccagatggagcccaacgccctgcccttcagaggcatctacggcatcagcaacctgacctgggccgtggaggaggaggacttcgaggagcagaccctgaccctgatcttcctggacggcgagagagagagaaaggtgagcgtgcagatcctggacgacgacgagcccgagggccaggagttcttctacgtgttcctgaccaacccccagggcggcgcccagatcgtggaggagaaggacgacaccggcttcgccgccttcgccatggtgatcatcaccggcagcgacctgcacaacggcatcatcggcttcagcgaggagagccagagcggcctggagctgagagagggcgccgtgatgagaagactgcacctgatcgtgaccagacagcccaacagagccttcgaggacgtgaaggtgttctggagagtgaccctgaacaagaccgtggtggtgctgcagaaggacggcgtgaacctggtggaggagctgcagagcgtgagcggcaccaccacctgcaccatgggccagaccaagtgcttcatcagcatcgagctgaagcccgagaaggtgccccaggtggaggtgtacttcttcgtggagctgtacgaggccaccgccggcgccgccatcaacaacagcgccagattcgcccagatcaagatcctggagagcgacgagagccagagcctggtgtacttcagcgtgggcagcagactggccgtggcccacaagaaggccaccctgatcagcctgcaggtggccagagacagcggcaccggcctgatgatgagcgtgaacttcagcacccaggagctgagaagcgccgagaccatcggcagaaccatcatcagccccgccatcagcggcaaggacttcgtgatcaccgagggcaccctggtgttcgagcccggccagagaagcaccgtgctggacgtgatcctgacccccgagaccggcagcctgaacagcttccccaagagattccagatcgtgctgttcgaccccaagggcggcgccagaatcgacaaggtgtacggcaccgccaacatcaccctggtgagcgacgccgacagccaggccatctggggcctggccgaccagctgcaccagcccgtgaacgacgacatcctgaacagagtgctgcacaccatcagcatgaaggtggccaccgagaacaccgacgagcagctgagcgccatgatgcacctgatcgagaagatcaccaccgagggcaagatccaggccttcagcgtggccagcagaaccctgttctacgagatcctgtgcagcctgatcaaccccaagagaaaggacaccagaggcttcagccacttcgccgaggtgaccgagaacttcgccttcagcctgctgaccaacgtgacctgcggcagccccggcgagaagagcaagaccatcctggacagctgcccctacctgagcatcctggccctgcactggtacccccagcagatcaacggccacaagttcgagggcaaggagggcgactacatcagaatccccgagagactgctggacgtgcaggacgccgagatcatggccggcaagagcacctgcaagctggtgcagttcaccgagtacagcagccagcagtggttcatcagcggcaacaacctgcccaccctgaagaacaaggtgctgagcctgagcgtgaagggccagagcagccagctgctgaccaacgacaacgaggtgctgtacagaatctacgccgccgagcccagaatcatcccccagaccagcctgtgcctgctgtggaaccaggccgccgccagctggctgagcgacagccagttctgcaaggtggtggaggagaccgccgactacgtggagtgcgcctgcagccacatgagcgtgtacgccgtgtacgccagaaccgacaacctgagcagctacaacgaggccttcttcaccagcggcttcatctgcatcagcggcctgtgcctggccgtgctgagccacatcttctgcgccagatacagcatgttcgccgccaagctgctgacccacatgatggccgccagcctgggcacccagatcctgttcctggccagcgcctacgccagcccccagctggccgaggagagctgcagcgccatggccgccgtgacccactacctgtacctgtgccagttcagctggatgctgatccagagcgtgaacttctggtacgtgctggtgatgaacgacgagcacaccgagagaagatacctgctgttcttcctgctgagctggggcctgcccgccttcgtggtgatcctgctgatcgtgatcctgaagggcatctaccaccagagcatgagccagatctacggcctgatccacggcgacctgtgcttcatccccaacgtgtacgccgccctgttcaccgccgccctggtgcccctgacctgcctggtggtggtgttcgtggtgttcatccacgcctaccaggtgaagccccagtggaaggcctacgacgacgtgttcagaggcagaaccaacgccgccgagatccccctgatcctgtacctgttcgccctgatcagcgtgacctggctgtggggcggcctgcacatggcctacagacacttctggatgctggtgctgttcgtgatcttcaacagcctgcagggcctgtacgtgttcatggtgtacttcatcctgcacaaccagatgtgctgccccatgaaggccagctacaccgtggagatgaacggccaccccggccccagcaccgccttcttcacccccggcagcggcatgccccccgccggcggcgagatcagcaagagcacccagaacctgatcggcgccatggaggaggtgccccccgactgggagagagccagcttccagcagggcagccaggccagccccgacctgaagcccagcccccagaacggcgccaccttccccagcagcggcggctacggccagggcagcctgatcgccgacgaggagagccaggagttcgacgacctgatcttcgccctgaagaccggcgccggcctgagcgtgagcgacaacgagagcggccagggcagccaggagggcggcaccctgaccgacagccagatcgtggagctgagaagaatccccatcgccgacacccacctgtag

SEQ ID NO: 82514 - DNA, 6921 bp, synthetic construct
  misc_feature 1..6921: note = Description of Artificial Sequence: Synthetic coding sequence
  source 1..6921: mol_type = other DNA
gtggacgtgttcatgttcctgggcatgcccagcgccagcctgctggtgaacctgctgagcgccctgctgatcctgttcgtgttcggcgagaccgagatcagattcaccggccagaccgagttcgtggtgaacgagaccagcaccaccgtgatcagactgatcatcgagagaatcggcgagcccgccaacgtgaccgccatcgtgagcctgtacggcgaggacgccggcgacttcttcgacacctacgccgccgccttcatccccgccggcgagaccaacagaaccgtgtacatcgccgtgtgcgacgacgacctgcccgagcccgacgagaccttcatcttccacctgaccctgcagaagcccagcgccaacgtgaagctgggctggcccagaaccgtgaccgtgaccatcctgagcaacgacaacgccttcggcatcatcagcttcaacatgctgcccagcatcgccgtgagcgagcccaagggcagaaacgagagcatgcccctgaccctgatcagagagaagggcacctacggcatggtgatggtgaccttcgaggtggagggcggccccaacccccccgacgaggacctgagccccgtgaagggcaacatcaccttcccccccggcagagccaccgtgatctacaacctgaccgtgctggacgacgaggtgcccgagaacgacgagatcttcctgatccagctgaagagcgtggagggcggcgccgagatcaacaccagcagaaacagcatcgagatcatcatcaagaagaacgacagccccgtgagattcctgcagagcatctacctggtgcccgaggaggaccacatcctgatcatccccgtggtgagaggcaaggacaacaacggcaacctgatcggcagcgacgagtacgaggtgagcatcagctacgccgtgaccaccggcaacagcaccgcccacgcccagcagaacctggacttcatcgacctgcagcccaacaccaccgtggtgttcccccccttcatccacgagagccacctgaagttccagatcgtggacgacaccatccccgagatcgccgagagcttccacatcatgctgctgaaggacaccctgcagggcgacgccgtgctgatcagccccagcgtggtgcaggtgaccatcaagcccaacgacaagccctacggcgtgctgagcttcaacagcgtgctgttcgagagaaccgtgatcatcgacgaggacagaatcagcagatacgaggagatcaccgtggtgagaaacggcggcacccacggcaacgtgagcgccaactgggtgctgaccagaaacagcaccgaccccagccccgtgaccgccgacatcagacccagcagcggcgtgctgcacttcgcccagggccagatgctggccaccatccccctgaccgtggtggacgacgacctgcccgaggaggccgaggcctacctgctgcagatcctgccccacaccatcagaggcggcgccgaggtgagcgagcccgccgagctgctgttctacatccaggacagcgacgacgtgtacggcctgatcaccttcttccccatggagaaccagaagatcgagagcagccccggcgagagatacctgagcctgagcttcaccagactgggcggcaccaagggcgacgtgagactgctgtacagcgtgctgtacatccccgccggcgccgtggaccccctgcaggccaaggagggcatcctgaacatcagcagaagaaacgacctgatcttccccgagcagaagacccaggtgaccaccaagctgcccatcagaaacgacgccttcctgcagaacggcgcccacttcctggtgcagctggagaccgtggagctgctgaacatcatccccctgatcccccccatcagccccagattcggcgagatctgcaacatcagcctgctggtgacccccgccatcgccaacggcgagatcggcttcctgagcaacctgcccatcatcctgcacgagcccgaggacttcgccgccgaggtggtgtacatccccctgcacagagacggcaccgacggccaggccaccgtgtactggagcctgaagcccagcggcttcaacagcaaggccgtgacccccgacgacatcggccccttcaacggcagcgtgctgttcctgagcggccagagcgacaccaccatcaacatcaccatcaagggcgacgacatccccgagatgaacgagaccgtgaccctgagcctggacagagtgaacgtggagaaccaggtgctgaagagcggctacaccagcagagacctgatcatcctggagaacgacgaccccggcggcgtgttcgagttcagccccgccagcagaggcccctacgtgatcaaggagggcgagagcgtggagctgcacatcatcagaagcagaggcagcctggtgaagcagttcctgcactacagagtggagcccagagacagcaacgagttctacggcaacaccggcgtgctggagttcaagcccggcgagagagagatcgtgatcaccctgctggccagactggacggcatccccgagctggacgagcactactgggtggtgctgagcagccacggcgagagagagagcaagctgggcagcgccaccatcgtgaacatcaccatcctgaagaacgacgacccccacggcatcatcgagttcgtgagcgacggcctgatcgtgatgatcaacgagagcaagggcgacgccatctacagcgccgtgtacgacgtggtgagaaacagaggcaacttcggcgacgtgagcgtgagctgggtggtgagccccgacttcacccaggacgtgttccccgtgcagggcaccgtggtgttcggcgaccaggagttcagcaagaacatcaccatctacagcctgcccgacgagatccccgaggagatggaggagttcaccgtgatcctgctgaacggcaccggcggcgccaaggtgggcaacagaaccaccgccaccctgagaatcagaagaaacgacgaccccatctacttcgccgagcccagagtggtgagagtgcaggagggcgagaccgccaacttcaccgtgctgagaaacggcagcgtggacgtgacctgcatggtgcagtacgccaccaaggacggcaaggccaccgccagagagagagacttcatccccgtggagaagggcgagaccctgatcttcgaggtgggcagcagacagcagagcatcagcatcttcgtgaacgaggacggcatccccgagaccgacgagcccttctacatcatcctgctgaacagcaccggcgacaccgtggtgtaccagtacggcgtggccaccgtgatcatcgaggccaacgacgaccccaacggcatcttcagcctggagcccatcgacaaggccgtggaggagggcaagaccaacgccttctggatcctgagacacagaggctacttcggcagcgtgagcgtgagctggcagctgttccagaacgacagcgccctgcagcccggccaggagttctacgagaccagcggcaccgtgaacttcatggacggcgaggaggccaagcccatcatcctgcacgccttccccgacaagatccccgagttcaacgagttctacttcctgaagctggtgaacatcagcggcggcagccccggccccggcggccagctggccgagaccaacctgcaggtgaccgtgatggtgcccttcaacgacgaccccttcggcgtgttcatcctggaccccgagtgcctggagagagaggtggccgaggacgtgctgagcgaggacgacatgagctacatcaccaacttcaccatcctgagacagcagggcgtgttcggcgacgtgcagctgggctgggagatcctgagcagcgagttccccgccggcctgccccccatgatcgacttcctgctggtgggcatcttccccaccaccgtgcacctgcagcagcacatgagaagacaccacagcggcaccgacgccctgtacttcaccggcctggagggcgccttcggcaccgtgaaccccaagtaccaccccagcagaaacaacaccatcgccaacttcaccttcagcgcctgggtgatgcccaacgccaacaccaacggcttcatcatcgccaaggacgacggcaacggcagcatctactacggcgtgaagatccagaccaacgagagccacgtgaccctgagcctgcactacaagaccctgggcagcaacgccacctacatcgccaagaccaccgtgatgaagtacctggaggagagcgtgtggctgcacctgctgatcatcctggaggacggcatcatcgagttctacctggacggcaacgccatgcccagaggcatcaagagcctgaagggcgaggccatcaccgacggccccggcatcctgagaatcggcgccggcatcaacggcaacgacagattcaccggcctgatgcaggacgtgagaagctacgagagaaagctgaccctggaggagatctacgagctgcacgccatgcccgccaagagcgacctgcaccccatcagcggctacctggagttcagacagggcgagaccaacaagagcttcatcatcagcgccagagacgacaacgacgaggagggcgaggagctgttcatcctgaagctggtgagcgtgtacggcggcgccagaatcagcgaggagaacaccaccgccagactgaccatccagaagagcgacaacgccaacggcctgttcggcttcaccggcgcctgcatccccgagatcgccgaggagggcagcaccatcagctgcgtggtggagagaaccagaggcgccctggactacgtgcacgtgttctacaccatcagccagatcgagaccgacggcatcaactacctggtggacgacttcgccaacgccagcggcaccatcaccttcctgccctggcagagaagcgaggtgctgaacatctacgtgctggacgacgacatccccgagctgaacgagtacttcagagtgaccctggtgagcgccatccccggcgacggcaagctgggcagcacccccaccagcggcgccagcatcgaccccgagaaggagaccaccgacatcaccatcaaggccagcgaccacccctacggcctgctgcagttcagcaccggcctgcccccccagcccaaggacgccatgaccctgcccgccagcagcgtgccccacatcaccgtggaggaggaggacggcgagatcagactgctggtgatcagagcccagggcctgctgggcagagtgaccgccgagttcagaaccgtgagcctgaccgccttcagccccgaggactaccagaacgtggccggcaccctggagttccagcccggcgagagatacaagtacatcttcatcaacatcaccgacaacagcatccccgagctggagaagagcttcaaggtggagctgctgaacctggagggcggcgtggccgagctgttcagagtggacggcagcggcagcggcgacggcgacatggagttcttcctgcccaccatccacaagagagccagcctgggcgtggccagccagatcctggtgaccatcgccgccagcgaccacgcccacggcgtgttcgagttcagccccgagagcctgttcgtgagcggcaccgagcccgaggacggctacagcaccgtgaccctgaacgtgatcagacaccacggcaccctgagccccgtgaccctgcactggaacatcgacagcgaccccgacggcgacctggccttcaccagcggcaacatcaccttcgagatcggccagaccagcgccaacatcaccgtggagatcctgcccgacgaggaccccgagctggacaaggccttcagcgtgagcgtgctgagcgtgagcagcggcagcctgggcgcccacatcaacgccaccctgaccgtgctggccagcgacgacccctacggcatcttcatcttcagcgagaagaacagacccgtgaaggtggaggaggccacccagaacatcaccctgagcatcatcagactgaagggcctgatgggcaaggtgctggtgagctacgccaccctggacgacatggagaagcccccctacttcccccccaacctggccagagccacccagggcagagactacatccccgccagcggcttcgccctgttcggcgccaaccagagcgaggccaccatcgccatcagcatcctggacgacgacgagcccgagagaagcgagagcgtgttcatcgagctgctgaacagcaccctggtggccaaggtgcagagcagaagcatccccaacagccccagactgggccccaaggtggagaccatcgcccagctgatcatcatcgccaacgacgacgccttcggcaccctgcagctgagcgcccccatcgtgagagtggccgagaaccacgtgggccccatcatcaacgtgaccagaaccggcggcgccttcgccgacgtgagcgtgaagttcaaggccgtgcccatcaccgccatcgccggcgaggactacagcatcgccagcagcgacgtggtgctgctggagggcgagaccagcaaggccgtgcccatctacgtgatcaacgacatctaccccgagctggaggagagcttcctggtgcagctgatgaacgagaccaccggcggcgccagactgggcgccctgaccgaggccgtgatcatcatcgaggccagcgacgacccctacggcctgttcggcttccagatcaccaagctgatcgtggaggagcccgagttcaacagcgtgaaggtgaacctgcccatcatcagaaacagcggcaccctgggcaacgtgaccgtgcagtgggtggccaccatcaacggccagctggccaccggcgacctgagagtggtgagcggcaacgtgaccttcgcccccggcatgagcagctaccccagcgccaccaactag

SEQ ID NO: 82515 - DNA, 18921 bp, synthetic construct
  misc_feature 1..18921: note = Description of Artificial Sequence: Synthetic coding sequence
  source 1..18921: mol_type = other DNA
atgagcgtgttcctgggccccggcatgcccagcgccagcctgctggtgaacctgctgagcgccctgctgatcctgttcgtgttcggcgagaccgagatcagattcaccggccagaccgagttcgtggtgaacgagaccagcaccaccgtgatcagactgatcatcgagagaatcggcgagcccgccaacgtgaccgccatcgtgagcctgtacggcgaggacgccggcgacttcttcgacacctacgccgccgccttcatccccgccggcgagaccaacagaaccgtgtacatcgccgtgtgcgacgacgacctgcccgagcccgacgagaccttcatcttccacctgaccctgcagaagcccagcgccaacgtgaagctgggctggcccagaaccgtgaccgtgaccatcctgagcaacgacaacgccttcggcatcatcagcttcaacatgctgcccagcatcgccgtgagcgagcccaagggcagaaacgagagcatgcccctgaccctgatcagagagaagggcacctacggcatggtgatggtgaccttcgaggtggagggcggccccaacccccccgacgaggacctgagccccgtgaagggcaacatcaccttcccccccggcagagccaccgtgatctacaacctgaccgtgctggacgacgaggtgcccgagaacgacgagatcttcctgatccagctgaagagcgtggagggcggcgccgagatcaacaccagcagaaacagcatcgagatcatcatcaagaagaacgacagccccgtgagattcctgcagagcatctacctggtgcccgaggaggaccacatcctgatcatccccgtggtgagaggcaaggacaacaacggcaacctgatcggcagcgacgagtacgaggtgagcatcagctacgccgtgaccaccggcaacagcaccgcccacgcccagcagaacctggacttcatcgacctgcagcccaacaccaccgtggtgttcccccccttcatccacgagagccacctgaagttccagatcgtggacgacaccatccccgagatcgccgagagcttccacatcatgctgctgaaggacaccctgcagggcgacgccgtgctgatcagccccagcgtggtgcaggtgaccatcaagcccaacgacaagccctacggcgtgctgagcttcaacagcgtgctgttcgagagaaccgtgatcatcgacgaggacagaatcagcagatacgaggagatcaccgtggtgagaaacggcggcacccacggcaacgtgagcgccaactgggtgctgaccagaaacagcaccgaccccagccccgtgaccgccgacatcagacccagcagcggcgtgctgcacttcgcccagggccagatgctggccaccatccccctgaccgtggtggacgacgacctgcccgaggaggccgaggcctacctgctgcagatcctgccccacaccatcagaggcggcgccgaggtgagcgagcccgccgagctgctgttctacatccaggacagcgacgacgtgtacggcctgatcaccttcttccccatggagaaccagaagatcgagagcagccccggcgagagatacctgagcctgagcttcaccagactgggcggcaccaagggcgacgtgagactgctgtacagcgtgctgtacatccccgccggcgccgtggaccccctgcaggccaaggagggcatcctgaacatcagcagaagaaacgacctgatcttccccgagcagaagacccaggtgaccaccaagctgcccatcagaaacgacgccttcctgcagaacggcgcccacttcctggtgcagctggagaccgtggagctgctgaacatcatccccctgatcccccccatcagccccagattcggcgagatctgcaacatcagcctgctggtgacccccgccatcgccaacggcgagatcggcttcctgagcaacctgcccatcatcctgcacgagcccgaggacttcgccgccgaggtggtgtacatccccctgcacagagacggcaccgacggccaggccaccgtgtactggagcctgaagcccagcggcttcaacagcaaggccgtgacccccgacgacatcggccccttcaacggcagcgtgctgttcctgagcggccagagcgacaccaccatcaacatcaccatcaagggcgacgacatccccgagatgaacgagaccgtgaccctgagcctggacagagtgaacgtggagaaccaggtgctgaagagcggctacaccagcagagacctgatcatcctggagaacgacgaccccggcggcgtgttcgagttcagccccgccagcagaggcccctacgtgatcaaggagggcgagagcgtggagctgcacatcatcagaagcagaggcagcctggtgaagcagttcctgcactacagagtggagcccagagacagcaacgagttctacggcaacaccggcgtgctggagttcaagcccggcgagagagagatcgtgatcaccctgctggccagactggacggcatccccgagctggacgagcactactgggtggtgctgagcagccacggcgagagagagagcaagctgggcagcgccaccatcgtgaacatcaccatcctgaagaacgacgacccccacggcatcatcgagttcgtgagcgacggcctgatcgtgatgatcaacgagagcaagggcgacgccatctacagcgccgtgtacgacgtggtgagaaacagaggcaacttcggcgacgtgagcgtgagctgggtggtgagccccgacttcacccaggacgtgttccccgtgcagggcaccgtggtgttcggcgaccaggagttcagcaagaacatcaccatctacagcctgcccgacgagatccccgaggagatggaggagttcaccgtgatcctgctgaacggcaccggcggcgccaaggtgggcaacagaaccaccgccaccctgagaatcagaagaaacgacgaccccatctacttcgccgagcccagagtggtgagagtgcaggagggcgagaccgccaacttcaccgtgctgagaaacggcagcgtggacgtgacctgcatggtgcagtacgccaccaaggacggcaaggccaccgccagagagagagacttcatccccgtggagaagggcgagaccctgatcttcgaggtgggcagcagacagcagagcatcagcatcttcgtgaacgaggacggcatccccgagaccgacgagcccttctacatcatcctgctgaacagcaccggcgacaccgtggtgtaccagtacggcgtggccaccgtgatcatcgaggccaacgacgaccccaacggcatcttcagcctggagcccatcgacaaggccgtggaggagggcaagaccaacgccttctggatcctgagacacagaggctacttcggcagcgtgagcgtgagctggcagctgttccagaacgacagcgccctgcagcccggccaggagttctacgagaccagcggcaccgtgaacttcatggacggcgaggaggccaagcccatcatcctgcacgccttccccgacaagatccccgagttcaacgagttctacttcctgaagctggtgaacatcagcggcggcagccccggccccggcggccagctggccgagaccaacctgcaggtgaccgtgatggtgcccttcaacgacgaccccttcggcgtgttcatcctggaccccgagtgcctggagagagaggtggccgaggacgtgctgagcgaggacgacatgagctacatcaccaacttcaccatcctgagacagcagggcgtgttcggcgacgtgcagctgggctgggagatcctgagcagcgagttccccgccggcctgccccccatgatcgacttcctgctggtgggcatcttccccaccaccgtgcacctgcagcagcacatgagaagacaccacagcggcaccgacgccctgtacttcaccggcctggagggcgccttcggcaccgtgaaccccaagtaccaccccagcagaaacaacaccatcgccaacttcaccttcagcgcctgggtgatgcccaacgccaacaccaacggcttcatcatcgccaaggacgacggcaacggcagcatctactacggcgtgaagatccagaccaacgagagccacgtgaccctgagcctgcactacaagaccctgggcagcaacgccacctacatcgccaagaccaccgtgatgaagtacctggaggagagcgtgtggctgcacctgctgatcatcctggaggacggcatcatcgagttctacctggacggcaacgccatgcccagaggcatcaagagcctgaagggcgaggccatcaccgacggccccggcatcctgagaatcggcgccggcatcaacggcaacgacagattcaccggcctgatgcaggacgtgagaagctacgagagaaagctgaccctggaggagatctacgagctgcacgccatgcccgccaagagcgacctgcaccccatcagcggctacctggagttcagacagggcgagaccaacaagagcttcatcatcagcgccagagacgacaacgacgaggagggcgaggagctgttcatcctgaagctggtgagcgtgtacggcggcgccagaatcagcgaggagaacaccaccgccagactgaccatccagaagagcgacaacgccaacggcctgttcggcttcaccggcgcctgcatccccgagatcgccgaggagggcagcaccatcagctgcgtggtggagagaaccagaggcgccctggactacgtgcacgtgttctacaccatcagccagatcgagaccgacggcatcaactacctggtggacgacttcgccaacgccagcggcaccatcaccttcctgccctggcagagaagcgaggtgctgaacatctacgtgctggacgacgacatccccgagctgaacgagtacttcagagtgaccctggtgagcgccatccccggcgacggcaagctgggcagcacccccaccagcggcgccagcatcgaccccgagaaggagaccaccgacatcaccatcaaggccagcgaccacccctacggcctgctgcagttcagcaccggcctgcccccccagcccaaggacgccatgaccctgcccgccagcagcgtgccccacatcaccgtggaggaggaggacggcgagatcagactgctggtgatcagagcccagggcctgctgggcagagtgaccgccgagttcagaaccgtgagcctgaccgccttcagccccgaggactaccagaacgtggccggcaccctggagttccagcccggcgagagatacaagtacatcttcatcaacatcaccgacaacagcatccccgagctggagaagagcttcaaggtggagctgctgaacctggagggcggcgtggccgagctgttcagagtggacggcagcggcagcggcgacggcgacatggagttcttcctgcccaccatccacaagagagccagcctgggcgtggccagccagatcctggtgaccatcgccgccagcgaccacgcccacggcgtgttcgagttcagccccgagagcctgttcgtgagcggcaccgagcccgaggacggctacagcaccgtgaccctgaacgtgatcagacaccacggcaccctgagccccgtgaccctgcactggaacatcgacagcgaccccgacggcgacctggccttcaccagcggcaacatcaccttcgagatcggccagaccagcgccaacatcaccgtggagatcctgcccgacgaggaccccgagctggacaaggccttcagcgtgagcgtgctgagcgtgagcagcggcagcctgggcgcccacatcaacgccaccctgaccgtgctggccagcgacgacccctacggcatcttcatcttcagcgagaagaacagacccgtgaaggtggaggaggccacccagaacatcaccctgagcatcatcagactgaagggcctgatgggcaaggtgctggtgagctacgccaccctggacgacatggagaagcccccctacttcccccccaacctggccagagccacccagggcagagactacatccccgccagcggcttcgccctgttcggcgccaaccagagcgaggccaccatcgccatcagcatcctggacgacgacgagcccgagagaagcgagagcgtgttcatcgagctgctgaacagcaccctggtggccaaggtgcagagcagaagcatccccaacagccccagactgggccccaaggtggagaccatcgcccagctgatcatcatcgccaacgacgacgccttcggcaccctgcagctgagcgcccccatcgtgagagtggccgagaaccacgtgggccccatcatcaacgtgaccagaaccggcggcgccttcgccgacgtgagcgtgaagttcaaggccgtgcccatcaccgccatcgccggcgaggactacagcatcgccagcagcgacgtggtgctgctggagggcgagaccagcaaggccgtgcccatctacgtgatcaacgacatctaccccgagctggaggagagcttcctggtgcagctgatgaacgagaccaccggcggcgccagactgggcgccctgaccgaggccgtgatcatcatcgaggccagcgacgacccctacggcctgttcggcttccagatcaccaagctgatcgtggaggagcccgagttcaacagcgtgaaggtgaacctgcccatcatcagaaacagcggcaccctgggcaacgtgaccgtgcagtgggtggccaccatcaacggccagctggccaccggcgacctgagagtggtgagcggcaacgtgaccttcgcccccggcgagaccatccagaccctgctgctggaggtgctggccgacgacgtgcccgagatcgaggaggtgatccaggtgcagctgaccgacgccagcggcggcggcaccatcggcctggacagaatcgccaacatcatcatccccgccaacgacgacccctacggcaccgtggccttcgcccagatggtgtacagagtgcaggagcccctggagagaagcagctgcgccaacatcaccgtgagaagaagcggcggccacttcggcagactgctgctgttctacagcaccagcgacatcgacgtggtggccctggccatggaggagggccaggacctgctgagctactacgagagccccatccagggcgtgcccgaccccctgtggagaacctggatgaacgtgagcgccgtgggcgagcccctgtacacctgcgccaccctgtgcctgaaggagcaggcctgcagcgccttcagcttcttcagcgccagcgagggcccccagtgcttctggatgaccagctggatcagccccgccgtgaacaacagcgacttctggacctacagaaagaacatgaccagagtggccagcctgttcagcggccaggccgtggccggcagcgactacgagcccgtgaccagacagtgggccatcatgcaggagggcgacgagttcgccaacctgaccgtgagcatcctgcccgacgacttccccgagatggacgagagcttcctgatcagcctgctggaggtgcacctgatgaacatcagcgccagcctgaagaaccagcccaccatcggccagcccaacatcagcaccgtggtgatcgccctgaacggcgacgccttcggcgtgttcgtgatctacaacatcagccccaacaccagcgaggacggcctgttcgtggaggtgcaggagcagccccagaccctggtggagctgatgatccacagaaccggcggcagcctgggccaggtggccgtggagtggagagtggtgggcggcaccgccaccgagggcctggacttcatcggcgccggcgagatcctgaccttcgccgagggcgagaccaagaagaccgtgatcctgaccatcctggacgacagcgagcccgaggacgacgagagcatcatcgtgagcctggtgtacaccgagggcggcagcagaatcctgcccagcagcgacaccgtgagagtgaacatcctggccaacgacaacgtggccggcatcgtgagcttccagaccgccagcagaagcgtgatcggccacgagggcgagatcctgcagttccacgtgatcagaaccttccccggcagaggcaacgtgaccgtgaactggaagatcatcggccagaacctggagctgaacttcgccaacttcagcggccagctgttcttccccgagggcagcctgaacaccaccctgttcgtgcacctgctggacgacaacatccccgaggagaaggaggtgtaccaggtgatcctgtacgacgtgagaacccagggcgtgccccccgccggcatcgccctgctggacgcccagggctacgccgccgtgctgaccgtggaggccagcgacgagccccacggcgtgctgaacttcgccctgagcagcagattcgtgctgctgcaggaggccaacatcaccatccagctgttcatcaacagagagttcggcagcctgggcgccatcaacgtgacctacaccaccgtgcccggcatgctgagcctgaagaaccagaccgtgggcaacctggccgagcccgaggtggacttcgtgcccatcatcggcttcctgatcctggaggagggcgagaccgccgccgccatcaacatcaccatcctggaggacgacgtgcccgagctggaggagtacttcctggtgaacctgacctacgtgggcctgaccatggccgccagcaccagcttcccccccagactggacagcgagggcctgaccgcccaggtgatcatcgacgccaacgacggcgccagaggcgtgatcgagtggcagcagagcagattcgaggtgaacgagacccacggcagcctgaccctggtggcccagagaagcagagagcccctgggccacgtgagcctgttcgtgtacgcccagaacctggaggcccaggtgggcctggactacatcttcacccccatgatcctgcacttcgccgacggcgagagatacaagaacgtgaacatcatgatcctggacgacgacatccccgagggcgacgagaagttccagctgatcctgaccaaccccagccccggcctggagctgggcaagaacaccatcgccctgatcatcgtgctggccaacgacgacggccccggcgtgctgagcttcaacaacagcgagcacttcttcctgagagagcccaccgccctgtacgtgcaggagagcgtggccgtgctgtacatcgtgagagagcccgcccagggcctgttcggcaccgtgaccgtgcagttcatcgtgaccgaggtgaacagcagcaacgagagcaaggacctgacccccagcaagggctacatcgtgctggaggagggcgtgagattcaaggccctgcagatcagcgccatcctggacaccgagcccgagatggacgagtacttcgtgtgcaccctgttcaaccccaccggcggcgccagactgggcgtgcacgtgcagaccctgatcaccgtgctgcagaaccaggcccccctgggcctgttcagcatcagcgccgtggagaacagagccaccagcatcgacatcgaggaggccaacagaaccgtgtacctgaacgtgagcagaaccaacggcatcgacctggccgtgagcgtgcagtgggagaccgtgagcgagaccgccttcggcatgagaggcatggacgtggtgttcagcgtgttccagagcttcctggacgagagcgccagcggctggtgcttcttcaccctggagaacctgatctacggcatcatgctgagaaagagcagcgtgaccgtgtacagatggcagggcatcttcatccccgtggaggacctgaacatcgagaaccccaagacctgcgaggccttcaacatcggcttcagcccctacttcgtgatcacccacgaggagagaaacgaggagaagcccagcctgaacagcgtgttcaccttcaccagcggcttcaagctgttcctggtgcagaccatcatcatcctggagagcagccaggtgagatacttcaccagcgacagccaggactacctgatcatcgccagccagagagacgacagcgagctgacccaggtgttcagatggaacggcggcagcttcgtgctgcaccagaagctgcccgtgagaggcgtgctgaccgtggccctgttcaacaagggcggcagcgtgttcctggccatcagccaggccaacgccagactgaacagcctgctgttcagatggagcggcagcggcttcatcaacttccaggaggtgcccgtgagcggcaccaccgaggtggaggccctgagcagcgccaacgacatctacctgatcttcgccgagaacgtgttcctgggcgaccagaacagcatcgacatcttcatctgggagatgggccagagcagcttcagatacttccagagcgtggacttcgccgccgtgaacagaatccacagcttcacccccgccagcggcatcgcccacatcctgctgatcggccaggacatgagcgccctgtactgctggaacagcgagagaaaccagttcagcttcgtgctggaggtgcccagcgcctacgacgtggccagcgtgaccgtgaagagcctgaacagcagcaagaacctgatcgccctggtgggcgcccacagccacatctacgagctggcctacatcagcagccacagcgacttcatccccagcagcggcgagctgatcttcgagcccggcgagagagaggccaccatcgccgtgaacatcctggacgacaccgtgcccgagaaggaggagagcttcaaggtgcagctgaagaaccccaagggcggcgccgagatcggcatcaacgacagcgtgaccatcaccatcctgagcaacgacgacgcctacggcatcgtggccttcgcccagaacagcctgtacaagcaggtggaggagatggagcaggacagcctggtgaccctgaacgtggagagactgaagggcacctacggcagaatcaccatcgcctgggaggccgacggcagcatcagcgacatcttccccaccagcggcgtgatcctgttcaccgagggccaggtgctgagcaccatcaccctgaccatcctggccgacaacatccccgagctgagcgaggtggtgatcgtgaccctgaccagaatcaccaccgagggcgtggaggacagctacaagggcgccaccatcgaccaggacagaagcaagagcgtgatcaccaccctgcccaacgacagccccttcggcctggtgggctggagagccgccagcgtgttcatcagagtggccgagcccaaggagaacaccaccaccctgcagctgcagatcgccagagacaagggcctgctgggcgacatcgccatccacctgagagcccagcccaacttcctgctgcacgtggacaaccaggccaccgagaacgaggactacgtgctgcaggagaccatcatcatcatgaaggagaacatcaaggaggcccacgccgaggtgagcatcctgcccgacgacctgcccgagctggaggagggcttcatcgtgaccatcaccgaggtgaacctggtgaacagcgacttcagcaccggccagcccagcgtgagaagacccggcatggagatcgccgagatcatgatcgaggagaacgacgaccccagaggcatcttcatgttccacgtgaccagaggcgccggcgaggtgatcaccgcctacgaggtgcccccccccctgaacgtgctgcaggtgcccgtggtgagactggccggcagcttcggcgccgtgaacgtgtactggaaggccagccccgacagcgccggcctggaggacttcaagcccagccacggcatcctggagttcgccgacaagcaggtgaccgccatgatcgagatcaccatcatcgacgacgccgagttcgagctgaccgagaccttcaacatcagcctgatcagcgtggccggcggcggcagactgggcgacgacgtggtggtgaccgtggtgatcccccagaacgacagccccttcggcgtgttcggcttcgaggagaagaccgtgatgatcgacgagagcctgagcagcgacgaccccgacagctacgtgaccctgaccgtggtgagaagccccggcggcaagggcaccgtgagactggagtggaccatcgacgagaaggccaagcacaacctgagccccctgaacggcaccctgcacttcgacgagaccgagagccagaagaccatcgtgctgcacaccctgcaggacaccgtgctggaggaggacagaagattcaccatccagctgatcagcatcgacgaggtggagatcagccccgtgaagggcagcgccagcatcatcatcagaggcgacaagagagccagcggcgaggtgggcatcgcccccagcagcagacacatcctgatcggcgagcccagcgccaagtacaacggcaccgccatcatcagcctggtgagaggccccggcatcctgggcgaggtgaccgtgttctggagaatcttcccccccagcgtgggcgagttcgccgagaccagcggcaagctgaccatgagagacgagcagagcgccgtgatcgtggtgatccaggccctgaacgacgacatccccgaggagaagagcttctacgagttccagctgaccgccgtgagcgagggcggcgtgctgagcgagagcagcagcaccgccaacatcaccgtggtggccagcgacagcccctacggcagattcgccttcagccacgagcagctgagagtgagcgaggcccagagagtgaacatcaccatcatcagaagcagcggcgacttcggccacgtgagactgtggtacaagaccatgagcggcaccgccgaggccggcctggacttcgtgcccgccgccggcgagctgctgttcgaggccggcgagatgagaaagagcctgcacgtggagatcctggacgacgactaccccgagggccccgaggagttcagcctgaccatcaccaaggtggagctgcagggcagaggctacgacttcaccatccaggagaacggcctgcagatcgaccagccccccgagatcggcaacatcagcatcgtgagaatcatcatcatgaagaacgacaacgccgagggcatcatcgagttcgaccccaagtacaccgccttcgaggtggaggaggacgtgggcctgatcatgatccccgtggtgagactgcacggcacctacggctacgtgaccgccgacttcatcagccagagcagcagcgccagccccggcggcgtggactacatcctgcacggcagcaccgtgaccttccagcacggccagaacctgagcttcatcaacatcagcatcatcgacgacaacgagagcgagttcgaggagcccatcgagatcctgctgaccggcgccaccggcggcgccgtgctgggcagacacctggtgagcagaatcatcatcgccaagagcgacagccccttcggcgtgatcagattcctgaaccagagcaagatcagcatcgccaaccccaacagcaccatgatcctgagcctggtgctggagagaaccggcggcctgctgggcgagatccaggtgaactgggagaccgtgggccccaacagccaggaggccctgctgccccagaacagagacatcgccgaccccgtgagcggcctgttctacttcggcgagggcgagggcggcgtgagaaccatcatcctgaccatctacccccacgaggagatcgaggtggaggagaccttcatcatcaagctgcacctggtgaagggcgaggccaagctggacagcagagccaaggacgtgaccctgaccatccaggagttcggcgaccccaacggcgtggtgcagttcgcccccgagaccctgagcaagaagacctacagcgagcccctggccctggagggccccctgctgatcaccttcttcgtgagaagagtgaagggcaccttcggcgagatcatggtgtactgggagctgagcagcgagttcgacatcaccgaggacttcctgagcaccagcggcttcttcaccatcgccgacggcgagagcgaggccagcttcgacgtgcacctgctgcccgacgaggtgcccgagatcgaggaggactacgtgatccagctggtgagcgtggagggcggcgccgagctggacctggagaagagcatcacctggttcagcgtgtacgccaacgacgacccccacggcgtgttcgccctgtacagcgacagacagagcatcctgatcggccagaacctgatcagaagcatccagatcaacatcaccagactggccggcaccttcggcgacgtggccgtgggcctgagaatcagcagcgaccacaaggagcagcccatcgtgaccgagaacgccgagagacagctggtggtgaaggacggcgccacctacaaggtggacgtggtgcccatcaagaaccaggtgttcctgagcctgggcagcaacttcaccctgcagctggtgaccgtgatgctggtgggcggcagattctacggcatgcccaccatcctgcaggaggccaagagcgccgtgctgcccgtgagcgagaaggccgccaacagccaggtgggcttcgagagcaccgccttccagctgatgaacatcaccgccggcaccagccacgtgatgatcagcagaagaggcacctacggcgccctgagcgtggcctggaccaccggctacgcccccggcctggagatccccgagttcatcgtggtgggcaacatgacccccaccctgggcagcctgagcttcagccacggcgagcagagaaagggcgtgttcctgtggaccttccccagccccggctggcccgaggccttcgtgctgcacctgagcggcgtgcagagcagcgcccccggcggcgcccagctgagaagcggcttcatcgtggccgagatcgagcccatgggcgtgttccagttcagcaccagcagcagaaacatcatcgtgagcgaggacacccagatgatcagactgcacgtgcagagactgttcggcttccacagcgacctgatcaaggtgagctaccagaccaccgccggcagcgccaagcccctggaggacttcgagcccgtgcagaacggcgagctgttcttccagaagttccagaccgaggtggacttcgagatcaccatcatcaacgaccagctgagcgagatcgaggagttcttctacatcaacctgaccagcgtggagatcagaggcctgcagaagttcgacgtgaactggagccccagactgaacctggacttcagcgtggccgtgatcaccatcctggacaacgacgacctggccggcatggacatcagcttccccgagaccaccgtggccgtggccgtggacaccaccctgatccccgtggagaccgagagcaccacctacctgagcaccagcaagaccaccaccatcctgcagcccaccaacgtggtggccatcgtgaccgaggccaccggcgtgagcgccatccccgagaagctggtgaccctgcacggcacccccgccgtgagcgagaagcccgacgtggccaccgtgaccgccaacgtgagcatccacggcaccttcagcctgggccccagcatcgtgtacatcgaggaggagatgaagaacggcaccttcaacaccgccgaggtgctgatcagaagaaccggcggcttcaccggcaacgtgagcatcaccgtgaagaccttcggcgagagatgcgcccagatggagcccaacgccctgcccttcagaggcatctacggcatcagcaacctgacctgggccgtggaggaggaggacttcgaggagcagaccctgaccctgatcttcctggacggcgagagagagagaaaggtgagcgtgcagatcctggacgacgacgagcccgagggccaggagttcttctacgtgttcctgaccaacccccagggcggcgcccagatcgtggaggagaaggacgacaccggcttcgccgccttcgccatggtgatcatcaccggcagcgacctgcacaacggcatcatcggcttcagcgaggagagccagagcggcctggagctgagagagggcgccgtgatgagaagactgcacctgatcgtgaccagacagcccaacagagccttcgaggacgtgaaggtgttctggagagtgaccctgaacaagaccgtggtggtgctgcagaaggacggcgtgaacctggtggaggagctgcagagcgtgagcggcaccaccacctgcaccatgggccagaccaagtgcttcatcagcatcgagctgaagcccgagaaggtgccccaggtggaggtgtacttcttcgtggagctgtacgaggccaccgccggcgccgccatcaacaacagcgccagattcgcccagatcaagatcctggagagcgacgagagccagagcctggtgtacttcagcgtgggcagcagactggccgtggcccacaagaaggccaccctgatcagcctgcaggtggccagagacagcggcaccggcctgatgatgagcgtgaacttcagcacccaggagctgagaagcgccgagaccatcggcagaaccatcatcagccccgccatcagcggcaaggacttcgtgatcaccgagggcaccctggtgttcgagcccggccagagaagcaccgtgctggacgtgatcctgacccccgagaccggcagcctgaacagcttccccaagagattccagatcgtgctgttcgaccccaagggcggcgccagaatcgacaaggtgtacggcaccgccaacatcaccctggtgagcgacgccgacagccaggccatctggggcctggccgaccagctgcaccagcccgtgaacgacgacatcctgaacagagtgctgcacaccatcagcatgaaggtggccaccgagaacaccgacgagcagctgagcgccatgatgcacctgatcgagaagatcaccaccgagggcaagatccaggccttcagcgtggccagcagaaccctgttctacgagatcctgtgcagcctgatcaaccccaagagaaaggacaccagaggcttcagccacttcgccgaggtgaccgagaacttcgccttcagcctgctgaccaacgtgacctgcggcagccccggcgagaagagcaagaccatcctggacagctgcccctacctgagcatcctggccctgcactggtacccccagcagatcaacggccacaagttcgagggcaaggagggcgactacatcagaatccccgagagactgctggacgtgcaggacgccgagatcatggccggcaagagcacctgcaagctggtgcagttcaccgagtacagcagccagcagtggttcatcagcggcaacaacctgcccaccctgaagaacaaggtgctgagcctgagcgtgaagggccagagcagccagctgctgaccaacgacaacgaggtgctgtacagaatctacgccgccgagcccagaatcatcccccagaccagcctgtgcctgctgtggaaccaggccgccgccagctggctgagcgacagccagttctgcaaggtggtggaggagaccgccgactacgtggagtgcgcctgcagccacatgagcgtgtacgccgtgtacgccagaaccgacaacctgagcagctacaacgaggccttcttcaccagcggcttcatctgcatcagcggcctgtgcctggccgtgctgagccacatcttctgcgccagatacagcatgttcgccgccaagctgctgacccacatgatggccgccagcctgggcacccagatcctgttcctggccagcgcctacgccagcccccagctggccgaggagagctgcagcgccatggccgccgtgacccactacctgtacctgtgccagttcagctggatgctgatccagagcgtgaacttctggtacgtgctggtgatgaacgacgagcacaccgagagaagatacctgctgttcttcctgctgagctggggcctgcccgccttcgtggtgatcctgctgatcgtgatcctgaagggcatctaccaccagagcatgagccagatctacggcctgatccacggcgacctgtgcttcatccccaacgtgtacgccgccctgttcaccgccgccctggtgcccctgacctgcctggtggtggtgttcgtggtgttcatccacgcctaccaggtgaagccccagtggaaggcctacgacgacgtgttcagaggcagaaccaacgccgccgagatccccctgatcctgtacctgttcgccctgatcagcgtgacctggctgtggggcggcctgcacatggcctacagacacttctggatgctggtgctgttcgtgatcttcaacagcctgcagggcctgtacgtgttcatggtgtacttcatcctgcacaaccagatgtgctgccccatgaaggccagctacaccgtggagatgaacggccaccccggccccagcaccgccttcttcacccccggcagcggcatgccccccgccggcggcgagatcagcaagagcacccagaacctgatcggcgccatggaggaggtgccccccgactgggagagagccagcttccagcagggcagccaggccagccccgacctgaagcccagcccccagaacggcgccaccttccccagcagcggcggctacggccagggcagcctgatcgccgacgaggagagccaggagttcgacgacctgatcttcgccctgaagaccggcgccggcctgagcgtgagcgacaacgagagcggccagggcagccaggagggcggcaccctgaccgacagccagatcgtggagctgagaagaatccccatcgccgacacccacctgtag

SEQ ID NO: 82516 - DNA, 4188 bp, synthetic construct
  misc_feature 1..4188: note = Description of Artificial Sequence: Synthetic coding sequence
  source 1..4188: mol_type = other DNA
atgaccggcgccgagatcgagagcggcgcccaggtgaagcccgagaagaagcccggcgaggaggtggtgggcggcgccgagatcgagaacgacgtgcccctggtggtgagacccaaggtgagaacccaggcccagatcatgcccggcgccagacccaagaacaagagcaaggtgatgcccggcgccagcaccaaggtggagaccagcgccgtgggcggcgccagacccaagagcaaggccaaggccatccccgtgagcagattcaaggaggaggcccagatgtgggcccagcccagattcggcgccgagagactgagcaagaccgagagaaacagccagaccaacatcatcgccagccccctggtgagcaccgacagcgtgctggtggccaagaccaagtacctgagcgaggacagagagctggtgaacaccgacaccgagagcttccccagaagaaaggcccactaccaggccggcttccagcccagcttcagaagcaaggaggagaccaacatgggcagctggtgctgccccagacccaccagcaagcaggaggccagccccaacagcgacttcaagtgggtggacaagagcgtgagcagcctgttctggagcggcgacgaggtgaccgccaagttccaccccggcaacagagtgaaggacagcaacagaagcatgcacatggccaaccaggaggccaacaccatgagcagaagccagaccaaccaggagctgtacatcgccagcagcagcggcagcgaggacgagagcgtgaagaccccctggttctgggccagagacaagaccaacacctggagcggccccagagaggaccccaacagcagaagcagattcagaagcaagaaggaggtgtacgtggagagcagcagcggcagcgagcacgaggaccacctggagagctggttcggcgccggcaaggaggccaagttcagaagcaagatgagagccggcaaggaggccaacaacagagccagacacagagccaagagagaggcctgcatcgacttcatgcccggcagcatcgacgtgatcaagaaggagagctgcttctggcccgaggagaacgccaacaccttcagcagacccatgatcaagaaggaggccagagccagagccatgaccaaggaggaggccaagaccaaggccagagccagagccaagcaggaggccagaagcgaggaggaggccctgatcggcacctggttctgggccaccgacgagagcagcatggccgacgaggccagcatcgagagcagcctgcaggtggaggacgagagcatcatcggcagctggttctggaccgaggaggaggccagcatgggcaccggcgccagcagcaagagcagacccagaaccgacggcgagagaatcggcgacagcctgttcggcgccagagagaagaccagcatgaagaccggcgccgaggccaccagcgagagcatcctggccgccgacgacgagcaggtgatcatcggcagctggttctgggccggcgaggaggtgaaccaggaggccgaggaggagaccatcttcggcagctggttctgggtgatcgacgccgccagcgtggagagcggcgtgggcgtgagctgcgagagcagaaccagaagcgaggaggaggaggtgatcggcccctggttctggagcggcgagcaggtggacatcgaggccggcatcggcgaggaggccagacccggcgccgaggaggagaccatcttcggcagctggttctgggccgagaaccagacctacatggactgcagagccgagaccagctgcgacaccatgcagggcgccgaggaggaggagcccatcatcggcagctggttctggaccagagtggaggcctgcgtggagggcgacgtgaacagcaagagcagcctggaggacaaggaggaggccatgatcccctgcttcggcgccaaggaggaggtgagcatgaagcacggcaccggcgtgagatgcagattcatggccggcgccgaggagaccaacaacaagagctgcttctgggccgagaaggagccctgcatgtaccccgccggcggcggcagctggaagagcagacccgaggaggaggaggacatcgtgaacagctggttctggagcagaaagtacaccaagcccgaggccatcatcggcagctggctgtgggccaccgaggagagcaacatcgacggcaccggcgagaaggccaagctgctgaccgaggaggagaccatcatcaacagctggttctggaaggaggacgaggccatcagcgaggccaccgacagagaggagagcagacccgaggccgaggagggcgacatcatcggcagctggttctgggccggcgaggaggacagactggagcccgccgccgagaccagagaggaggacagactggccgccgagaaggagggcatcgtgggcagctggttcggcgccagagaggagaccatcagaagagaggccggcagctgcagcaagagcagccccaaggccgaggaggaggaggtgatcatcggcagctggttctgggaggaggaggccagccccgaggccgtggccggcgtgggcttcgagagcaagcccggcaccgaggaggaggagatcaccgtgggcagctggttctggcccgaggaggaggccagcatccaggccggcagccaggccgtggaggagatggagagcgagaccgaggaggagaccatcttcggcagctggttctgggacggcaaggaggtgagcgaggaggccggcccctgctgcgtgagcaagcccgaggacgacgaggagatgatcgtggagagctggttctggagcagagacaaggccatcaaggagaccggcaccgtggccacctgcgagagcaagcccgagaacgaggagggcgccatcgtgggcagctggttcgaggccgaggacgaggtggacaacagaaccgacaacggcagcaactgcggcagcagaaccctggccgacgaggacgaggccatcgtgggcagctggttctgggccggcgacgaggcccacttcgagagcaaccccagccccgtgttcagagccatctgcagaagcacctgcagcgtggagcaggagcccgaccccagcagaagaccccagagctgggaggaggtgaccgtgcagttcaagcccggcccctggggcagagtgggcttccccagcatcagccccttcagattccccaaggaggccgccagcctgttctgcgagatgttcggcggcaagcccagaaacatggtgctgagccccgagggcgaggaccaggagagcctgctgcagcccgaccagcccagccccgagttccccttccagtacgaccccagctacagaagcgtgcaggagatcagagagcacctgagagccaaggagagcaccgagcccgagagcagcagctgcaactgcatccagtgcgagctgaagatcggcagcgaggagttcgaggagctgctgctgctgatggagaagatcagagaccccttcatccacgagatcagcaagatcgccatgggcatgagaagcgccagccagttcaccagagacttcatcagagacagcggcgtggtgagcctgatcgagaccctgctgaactaccccagcagcagagtgagaaccagcttcctggagaacatgatcagaatggcccccccctaccccaacctgaacatcatccagacctacatctgcaaggtgtgcgaggagaccctggcctacagcgtggacagccccgagcagctgagcggcatcagaatgatcagacacctgaccaccaccaccgactaccacaccctggtggccaactacatgagcggcttcctgagcctgctggccaccggcaacgccaagaccagattccacgtgctgaagatgctgctgaacctgagcgagaacctgttcatgaccaaggagctgctgagcgccgaggccgtgagcgagttcatcggcctgttcaacagagaggagaccaacgacaacatccagatcgtgctggccatcttcgagaacatcggcaacaacatcaagaaggagaccgtgttcagcgacgacgacttcaacatcgagcccctgatcagcgccttccacaaggtggagaagttcgccaaggagctgcagggcaagaccgacaaccagaacgaccccgagggcgaccaggagaactag

SEQ ID NO: 82517 - DNA, 4188 bp, synthetic construct; identical to SEQ ID NO: 82516
  misc_feature 1..4188: note = Description of Artificial Sequence: Synthetic coding sequence
  source 1..4188: mol_type = other DNA

SEQ ID NO: 82518 - DNA, 4188 bp, synthetic construct; identical to SEQ ID NO: 82516
  misc_feature 1..4188: note = Description of Artificial Sequence: Synthetic coding sequence
  source 1..4188: mol_type = other DNA

SEQ ID NO: 82519 - DNA, 4188 bp, synthetic construct; identical to SEQ ID NO: 82516
  misc_feature 1..4188: note = Description of Artificial Sequence: Synthetic coding sequence
  source 1..4188: mol_type = other DNA

SEQ ID NO: 82520 - DNA, 1692 bp, synthetic construct
  misc_feature 1..1692: note = Description of Artificial Sequence: Synthetic coding sequence
  source 1..1692: mol_type = other DNA
atggacttcggcagcctggagaccgtggtggccaacagcgccttcatcgccgccagaggcagcttcgacggcagcagcagccagcccagcagagacaagaagtacctggccaagctgaagctgccccccctgagcaagtgcgagagcctgagagacagcctgagcctggagttcgagagcgtgtgcctggagcagcccatcggcaagaagctgttccagcagttcctgcagagcgccgagaagcacctgcccgccctggagctgtggaaggacatcgaggactacgacaccgccgacaacgacctgcagccccagaaggcccagaccatcctggcccagtacctggacccccaggccaagctgttctgcagcttcctggacgagggcatcgtggccaagttcaaggagggccccgtggagatccaggacggcctgttccagcccctgctgcaggccaccctggcccacctgggccaggcccccttccaggagtacctgggcagcctgtacttcctgagattcctgcagtggaagtggctggaggcccagcccatgggcgaggactggttcctggacttcagagtgctgggcaagggcggcttcggcgaggtgagcgcctgccagatgaaggccaccggcaagctgtacgcctgcaagaagctgaacaagaagagactgaagaagagaaagggctaccagggcgccatggtggagaagaagatcctgatgaaggtgcacagcagattcatcgtgagcctggcctacgccttcgagaccaaggccgacctgtgcctggtgatgaccatcatgaacggcggcgacatcagataccacatctacaacgtgaacgaggagaaccccggcttccccgagcccagagccctgttctacaccgcccagatcatctgcggcctggagcacctgcaccagagaagaatcgtgtacagagacctgaagcccgagaacgtgctgctggacaacgacggcaacgtgagaatcagcgacctgggcctggccgtggagctgctggacggccagagcaagaccaagggctacgccggcacccccggcttcatggcccccgagctgctgcagggcgaggagtacgacttcagcgtggactacttcgccctgggcgtgaccctgtacgagatgatcgccgccagaggccccttcagagccagaggcgagaaggtggagaacaaggagctgaagcacagaatcatcagcgagcccgtgaagtaccccgacaagttcagccaggccagcaaggacttctgcgaggccctgctggagaaggaccccgagaagagactgggcttcagagacgagacctgcgacaagctgagagcccaccccctgttcaaggacctgaactggagacagctggaggccggcatgctgatgccccccttcatccccgacagcaagaccgtgtacgccaaggacatccaggacgtgggcgccttcagcaccgtgaagggcgtggccttcgacaagaccgacaccgagttcttccaggagttcgccaccggcaactgccccatcccctggcaggaggagatgatcgagaccggcatcttcggcgagctgaacgtgtggagaagcgacggccagatgcccgacgacatgaagggcatcagcggcggcagcagcagcagcagcaagagcggcatgtgcctggtgagctag

SEQ ID NO: 82521 - DNA, 285 bp, synthetic construct
  misc_feature 1..285: note = Description of Artificial Sequence: Synthetic coding sequence
  source 1..285: mol_type = other DNA
atgatcgccgccagaggccccttcagagccagaggcgagaaggtggagaacaaggagctgaagcacagaatcatcagcgagcccgtgaagtaccccgacaagttcagccaggccagcaaggacttctgcgaggccctgctggagaaggaccccgagaagagactgggcttcagagacgagacctgcgacaagctgagagcccaccccctgttcaaggacctgaactggagacagctggaggccggcatgctgatgccccccttcatccccgacagcaagacctag

SEQ ID NO: 82522 - DNA, 228 bp, synthetic construct
  misc_feature 1..228: note = Description of Artificial Sequence: Synthetic coding sequence
  source 1..228: mol_type = other DNA
atggagctggagaacatcgtggccaacaccgtgctgctgaaggccagagagggcggcggcggcaagagaaagggcaagagcaagaagtggaaggagatcctgaagttcccccacatcagccagtgcgaggacctgagaagaaccatcggcgagctgagcggcagcctgatcagctggagcagcagcaccaaggagcacggcagacccaccgagatcaagatgagatag

SEQ ID NO: 82523 - DNA, 1458 bp, synthetic construct
  misc_feature 1..1458: note = Description of Artificial Sequence: Synthetic coding sequence
  source 1..1458: mol_type = other DNA
atgaccaagtacctgacccccaagagccccgtgttcatcgcccaggtgggccaggacctggtgagccagaccgaggagaagctgctgcagaagccctgcaaggagctgttcagcgcctgcgcccagagcgtgcacgagtacctgagaggcgagcccttccacgagtacctggacagcatgttcttcgacagattcctgcagtggaagtggctggagagacagcccgtgaccaagaacaccttcagacagtacagagtgctgggcaagggcggcttcggcgaggtgtgcgcctgccaggtgagagccaccggcaagatgtacgcctgcaagagactggagaagaagagaatcaagaagagaaagggcgagagcatggccctgaacgagaagcagatcctggagaaggtgaacagccagttcgtggtgaacctggcctacgcctacgagaccaaggacgccctgtgcctggtgctgaccatcatgaacggcggcgacctgaagttccacatctacaacatgggcaaccccggcttcgaggaggagagagccctgttctacgccgccgagatcctgtgcggcctggaggacctgcacagagagaacaccgtgtacagagacctgaagcccgagaacatcctgctggacgactacggccacatcagaatcagcgacctgggcctggccgtgaagatccccgagggcgacctgatcagaggcagagtgggcaccgtgggctacatggcccccgaggtgctgaacaaccagagatacggcctgagccccgactactggggcctgggctgcctgatctacgagatgatcgagggccagagccccttcagaggcagaaaggagaaggtgaagagagaggaggtggacagaagagtgctggagaccgaggaggtgtacagccacaagttcagcgaggaggccaagagcatctgcaagatgctgctgaccaaggacgccaagcagagactgggctgccaggaggagggcgccgccgaggtgaagagacaccccttcttcagaaacatgaacttcaagagactggaggccggcatgctggacccccccttcgtgcccgaccccagagccgtgtactgcaaggacgtgctggacatcgagcagttcagcaccgtgaagggcgtgaacctggaccacaccgacgacgacttctacagcaagttcagcaccggcagcgtgagcatcccctggcagaacgagatgatcgagaccgagtgcttcaaggagctgaacgtgttcggccccaacggcaccctgccccccgacctgaacagaaaccacccccccgagccccccaagaagggcctgctgcagagactgttcaagagacagcaccagaacaacagcaagagcagccccagcagcaagaccagcttcaaccaccacatcaacagcaaccacgtgagcagcaacagcaccggcagcagctag

SEQ ID NO: 82524 - DNA, 1773 bp, synthetic construct
  misc_feature 1..1773: note = Description of Artificial Sequence: Synthetic coding sequence
  source 1..1773: mol_type = other DNA
atggagctggagaacatcgtggccaacaccgtgctgctgaaggccagagagggcggcggcggcaagagaaagggcaagagcaagaagtggaaggagatcctgaagttcccccacatcagccagtgcgaggacctgagaagaaccatcgacagagactactgcagcctgtgcgacaagcagcccatcggcagactgctgttcagacagttctgcgagaccagacccggcctggagtgctacatccagttcctggacagcgtggccgagtacgaggtgacccccgacgagaagctgggcgagaagggcaaggagatcatgaccaagtacctgacccccaagagccccgtgttcatcgcccaggtgggccaggacctggtgagccagaccgaggagaagctgctgcagaagccctgcaaggagctgttcagcgcctgcgcccagagcgtgcacgagtacctgagaggcgagcccttccacgagtacctggacagcatgttcttcgacagattcctgcagtggaagtggctggagagacagcccgtgaccaagaacaccttcagacagtacagagtgctgggcaagggcggcttcggcgaggtgtgcgcctgccaggtgagagccaccggcaagatgtacgcctgcaagagactggagaagaagagaatcaagaagagaaagggcgagagcatggccctgaacgagaagcagatcctggagaaggtgaacagccagttcgtggtgaacctggcctacgcctacgagaccaaggacgccctgtgcctggtgctgaccatcatgaacggcggcgacctgaagttccacatctacaacatgggcaaccccggcttcgaggaggagagagccctgttctacgccgccgagatcctgtgcggcctggaggacctgcacagagagaacaccgtgtacagagacctgaagcccgagaacatcctgctggacgactacggccacatcagaatcagcgacctgggcctggccgtgaagatccccgagggcgacctgatcagaggcagagtgggcaccgtgggctacatggcccccgaggtgctgaacaaccagagatacggcctgagccccgactactggggcctgggctgcctgatctacgagatgatcgagggccagagccccttcagaggcagaaaggagaaggtgaagagagaggaggtggacagaagagtgctggagaccgaggaggtgtacagccacaagttcagcgaggaggccaagagcatctgcaagatgctgctgaccaaggacgccaagcagagactgggctgccaggaggagggcgccgccgaggtgaagagacaccccttcttcagaaacatgaacttcaagagactggaggccggcatgctggacccccccttcgtgcccgaccccagagccgtgtactgcaaggacgtgctggacatcgagcagttcagcaccgtgaagggcgtgaacctggaccacaccgacgacgacttctacagcaagttcagcaccggcagcgtgagcatcccctggcagaacgagatgatcgagaccgagtgcttcaaggagctgaacgtgttcggccccaacggcaccctgccccccgacctgaacagaaaccacccccccgagccccccaagaagggcctgctgcagagactgttcaagagacagcaccagaacaacagcaagagcagccccagcagcaagaccagcttcaaccaccacatcaacagcaaccacgtgagcagcaacagcaccggcagcagctag

SEQ ID NO: 82525 - DNA, 1200 bp, synthetic construct
  misc_feature 1..1200: note = Description of Artificial Sequence: Synthetic coding sequence
  source 1..1200: mol_type = other DNA
atgaccaagtacctgacccccaagagccccgtgttcatcgcccaggtgggccaggacctggtgagccagaccgaggagaagctgctgcagaagccctgcaaggagctgttcagcgcctgcgcccagagcgtgcacgagtacctgagaggcgagcccttccacgagtacctggacagcatgttcttcgacagattcctgcagtggaagtggctggagagacagcccgtgaccaagaacaccttcagacagtacagagtgctgggcaagggcggcttcggcgaggtgtgcgcctgccaggtgagagccaccggcaagatgtacgcctgcaagagactggagaagaagagaatcaagaagagaaagggcgagagcatggccctgaacgagaagcagatcctggagaaggtgaacagccagttcgtggtgaacctggcctacgcctacgagaccaaggacgccctgtgcctggtgctgaccatcatgaacggcggcgacctgaagttccacatctacaacatgggcaaccccggcttcgaggagggcgccgccgaggtgaagagacaccccttcttcagaaacatgaacttcaagagactggaggccggcatgctggacccccccttcgtgcccgaccccagagccgtgtactgcaaggacgtgctggacatcgagcagttcagcaccgtgaagggcgtgaacctggaccacaccgacgacgacttctacagcaagttcagcaccggcagcgtgagcatcccctggcagaacgagatgatcgagaccgagtgcttcaaggagctgaacgtgttcggccccaacggcaccctgccccccgacctgaacagaaaccacccccccgagccccccaagaagggcctgctgcagagactgttcaagagacagcaccagaacaacagcaagagcagccccagcagcaagagcaccgtggagcccgcccagaccctgctgctgagaagcggcagcagcggcgcccccgccctggtgggcctgcccggcgagacccccggcgccggcgagggcggcagacccagcagaagaagaagaaccagcagattcctgaaggagatcagcacccaggtgtgcttccccagaagacccagacccggctggatcggcttcgtgttcggcgagcactgcaacagaaaccccatcggctacgacaacctgcacgtgttctag

SEQ ID NO: 82526 - DNA, 1731 bp, synthetic construct
  misc_feature 1..1731: note = Description of Artificial Sequence: Synthetic coding sequence
  source 1..1731: mol_type = other DNA
atggagctggagaacatcgtggccaacaccgtgctgctgaaggccagagagggcggcggcggcaacagaaagggcaagagcaagaagtggagacagatgctgcagttcccccacatcagccagtgcgaggagctgagactgagcctggagagagactaccacagcctgtgcgagagacagcccatcggcagactgctgttcagagagttctgcgccaccagacccgagctgagcagatgcgtggccttcctggacggcgtggccgagtacgaggtgacccccgacgacaagagaaaggcctgcggcagacagctgacccagaacttcctgagccacaccggccccgacctgatccccgaggtgcccagacagctggtgaccaactgcacccagagactggagcagggcccctgcaaggacctgttccaggagctgaccagactgacccacgagtacctgagcgtggcccccttcgccgactacctggacagcatctacttcaacagattcctgcagtggaagtggctggagagacagcccgtgaccaagaacaccttcagacagtacagagtgctgggcaagggcggcttcggcgaggtgtgcgcctgccaggtgagagccaccggcaagatgtacgcctgcaagaagctggagaagaagagaatcaagaagagaaagggcgaggccatggccctgaacgagaagcagatcctggagaaggtgaacagcagattcgtggtgagcctggcctacgcctacgagaccaaggacgccctgtgcctggtgctgaccctgatgaacggcggcgacctgaagttccacatctaccacatgggccaggccggcttccccgaggccagagccgtgttctacgccgccgagatctgctgcggcctggaggacctgcacagagagagaatcgtgtacagagacctgaagcccgagaacatcctgctggacgaccacggccacatcagaatcagcgacctgggcctggccgtgcacgtgcccgagggccagaccatcaagggcagagtgggcaccgtgggctacatggcccccgaggtggtgaagaacgagagatacaccttcagccccgactggtgggccctgggctgcctgctgtacgagatgatcgccggccagagccccttccagcagagaaagaagaagatcaagagagaggaggtggagagactggtgaaggaggtgcccgaggagtacagcgagagattcagcccccaggccagaagcctgtgcagccagctgctgtgcaaggaccccgccgagagactgggctgcagaggcggcagcgccagagaggtgaaggagcaccccctgttcaagaagctgaacttcaagagactgggcgccggcatgctggagccccccttcaagcccgacccccaggccatctactgcaaggacgtgctggacatcgagcagttcagcaccgtgaagggcgtggagctggagcccaccgaccaggacttctaccagaagttcgccaccggcagcgtgcccatcccctggcagaacgagatggtggagaccgagtgcttccaggagctgaacgtgttcggcctggacggcagcgtgccccccgacctggactggaagggccagccccccgccccccccaagaagggcctgctgcagagactgttcagcagacaggactgctgcggcaactgcagcgacagcgaggaggagctgcccaccagactgtag

SEQ ID NO: 82527 - DNA, 1683 bp, synthetic construct
  misc_feature 1..1683: note = Description of Artificial Sequence: Synthetic coding sequence
  source 1..1683: mol_type = other DNA
atggagctggagaacatcgtggccaacaccgtgctgctgaaggccagagagggcggcggcggcaacagaaagggcaagagcaagaagtggagacagatgctgcagttcccccacatcagccagtgcgaggagctgagactgagcctggagagagactaccacagcctgtgcgagagacagcccatcggcagactgctgttcagagagttctgcgccaccagacccgagctgagcagatgcgtggccttcctggacggcgtggccgagtacgaggtgacccccgacgacaagagaaaggcctgcggcagacagctgacccagaacttcctgagccacaccggccccgacctgatccccgaggtgcccagacagctggtgaccaactgcacccagagactggagcagggcccctgcaaggacctgttccaggagctgaccagactgacccacgagtacctgagcgtggcccccttcgccgactacctggacagcatctacttcaacagattcctgcagtggaagtggctggagagacagcccgtgaccaagaacaccttcagacagtacagagtgctgggcaagggcggcttcggcgaggtgtgcgcctgccaggtgagagccaccggcaagatgtacgcctgcaagaagctggagaagaagagaatcaagaagagaaagggcgaggccatggccctgaacgagaagcagatcctggagaaggtgaacagcagattcgtggtgagcctggcctacgcctacgagaccaaggacgccctgtgcctggtgctgaccctgatgaacggcggcgacctgaagttccacatctaccacatgggccaggccggcttccccgaggccagagccgtgttctacgccgccgagatctgctgcggcctggaggacctgcacagagagagaatcgtgtacagagacctgaagcccgagaacatcctgctggacgaccacggccacatcagaatcagcgacctgggcctggccgtgcacgtgcccgagggccagaccatcaagggcagagtgggcaccgtgggctacatggcccccgaggtggtgaagaacgagagatacaccttcagccccgactggtgggccctgggctgcctgctgtacgagatgatcgccggccagagccccttccagcagagaaagaagaagatcaagagagaggaggtggagagactggtgaaggaggtgcccgaggagtacagcgagagattcagcccccaggccagaagcctgtgcagccagctgctgtgcaaggaccccgccgagagactgggctgcagaggcggcagcgccagagaggtgaaggagcaccccctgttcaagaagctgaacttcaagagactgggcgccggcatgctggagccccccttcaagcccgacccccaggccatctactgcaaggacgtgctggacatcgagcagttcagcaccgtgaagggcgtggagctggagcccaccgaccaggacttctaccagaagttcgccaccggcagcgtgcccatcccctggcagaacgagatggtggagaccgagtgcttccaggagctgaacgtgttcggcctggacggcagcgtgccccccgacctggactggaagggccagccccccgccccccccaagaagggcctgctgcagagactgttcagcagacagagatag

SEQ ID NO: 82528 - DNA, 1770 bp, synthetic construct
  misc_feature 1..1770: note = Description of Artificial Sequence: Synthetic coding sequence
  source 1..1770: mol_type = other DNA
atggagctggagaacatcgtggccaacaccgtgctgctgaaggccagagagggcggcggcggcaacagaaagggcaagagcaagaagtggagacagatgctgcagttcccccacatcagccagtgcgaggagctgagactgagcctggagagagactaccacagcctgtgcgagagacagcccatcggcagactgctgttcagagagttctgcgccaccagacccgagctgagcagatgcgtggccttcctggacggcgtggccgagtacgaggtgacccccgacgacaagagaaaggcctgcggcagacagctgacccagaacttcctgagccacaccggccccgacctgatccccgaggtgcccagacagctggtgaccaactgcacccagagactggagcagggcccctgcaaggacctgttccaggagctgaccagactgacccacgagtacctgagcgtggcccccttcgccgactacctggacagcatctacttcaacagattcctgcagtggaagtggctggagagacagcccgtgaccaagaacaccttcagacagtacagagtgctgggcaagggcggcttcggcgaggtgtgcgcctgccaggtgagagccaccggcaagatgtacgcctgcaagaagctggagaagaagagaatcaagaagagaaagggcgaggccatggccctgaacgagaagcagatcctggagaaggtgaacagcagattcgtggtgagcctggcctacgcctacgagaccaaggacgccctgtgcctggtgctgaccctgatgaacggcggcgacctgaagttccacatctaccacatgggccaggccggcttccccgaggccagagccgtgttctacgccgccgagatctgctgcggcctggaggacctgcacagagagagaatcgtgtacagagacctgaagcccgagaacatcctgctggacgaccacggccacatcagaatcagcgacctgggcctggccgtgcacgtgcccgagggccagaccatcaagggcagagtgggcaccgtgggctacatggcccccgaggtggtgaagaacgagagatacaccttcagccccgactggtgggccctgggctgcctgctgtacgagatgatcgccggccagagccccttccagcagagaaagaagaagatcaagagagaggaggtggagagactggtgaaggaggtgcccgaggagtacagcgagagattcagcccccaggccagaagcctgtgcagccagctgctgtgcaaggaccccgccgagagactgggctgcagaggcggcagcgccagagaggtgaaggagcaccccctgttcaagaagctgaacttcaagagactgggcgccggcatgctggagccccccttcaagcccgacccccaggccatctactgcaaggacgtgctggacatcgagcagttcagcaccgtgaagggcgtggagctggagcccaccgaccaggacttctaccagaagttcgccaccggcagcgtgcccatcccctggcagaacgagatggtggagaccgagtgcttccaggagctgaacgtgttcggcctggacggcagcgtgccccccgacctggactggaagggccagccccccgccccccccaagaagggcctgctgcagagactgttcagcagacagagaatcgccgtggagaccgccgccaccgccagaaagagcagcccccccgccagcagcccccagcccgaggcccccaccagcagctggagatag

SEQ ID NO: 82529 - DNA, 1662 bp, synthetic construct
  misc_feature 1..1662: note = Description of Artificial Sequence: Synthetic coding sequence
  source 1..1662: mol_type = other DNA
atggtggacatgggcgccctggacaacctgatcgccaacaccgcctacctgcaggccagaaagcccagcgactgcgacagcaaggagctgcagagaagaagaagaagcctggccctgcccggcctgcagggctgcgccgagctgagacagaagctgagcctgaacttccacagcctgtgcgagcagcagcccatcggcagaagactgttcagagacttcctggccaccgtgcccaccttcagaaaggccgccaccttcctggaggacgtgcagaactgggagctggccgaggagggccccaccaaggacagcgccctgcagggcctggtggccacctgcgccagcgcccccgcccccggcaacccccagcccttcctgagccaggccgtggccaccaagtgccaggccgccaccaccgaggaggagagagtggccgccgtgaccctggccaaggccgaggccatggccttcctgcaggagcagcccttcaaggacttcgtgaccagcgccttctacgacaagttcctgcagtggaagctgttcgagatgcagcccgtgagcgacaagtacttcaccgagttcagagtgctgggcaagggcggcttcggcgaggtgtgcgccgtgcaggtgaagaacaccggcaagatgtacgcctgcaagaagctggacaagaagagactgaagaagaagggcggcgagaagatggccctgctggagaaggagatcctggagaaggtgagcagccccttcatcgtgagcctggcctacgccttcgagagcaagacccacctgtgcctggtgatgagcctgatgaacggcggcgacctgaagttccacatctacaacgtgggcaccagaggcctggacatgagcagagtgatcttctacagcgcccagatcgcctgcggcatgctgcacctgcacgagctgggcatcgtgtacagagacatgaagcccgagaacgtgctgctggacgacctgggcaactgcagactgagcgacctgggcctggccgtggagatgaagggcggcaagcccatcacccagagagccggcaccaacggctacatggcccccgagatcctgatggagaaggtgagctacagctaccccgtggactggttcgccatgggctgcagcatctacgagatggtggccggcagaacccccttcaaggactacaaggagaaggtgagcaaggaggacctgaagcagagaaccctgcaggacgaggtgaagttccagcacgacaacttcaccgaggaggccaaggacatctgcagactgttcctggccaagaagcccgagcagagactgggcagcagagagaagagcgacgaccccagaaagcaccacttcttcaagaccatcaacttccccagactggaggccggcctgatcgagccccccttcgtgcccgaccccagcgtggtgtacgccaaggacatcgccgagatcgacgacttcagcgaggtgagaggcgtggagttcgacgacaaggacaagcagttcttcaagaacttcgccaccggcgccgtgcccatcgcctggcaggaggagatcatcgagaccggcctgttcgaggagctgaacgaccccaacagacccaccggctgcgaggagggcaacagcagcaagagcggcgtgtgcctgctgctgtag

SEQ ID NO: 82530 - DNA, 2088 bp, synthetic construct
  misc_feature 1..2088: note = Description of Artificial Sequence: Synthetic coding sequence
  source 1..2088: mol_type = other DNA
atggaggagaagcccggccagccccagccccagcaccaccacagccaccaccacccccaccaccacccccagcagcagcagcagcagccccaccaccaccaccactactacttctacaaccacagccacaaccaccaccaccaccaccaccaccagcagccccaccagtacctgcagcacggcgccgagggcagccccaaggcccagcccaagcccctgaagcacgagcagaagcacaccctgcagcagcaccaggagacccccaagaagaagaccggctacggcgagctgaacggcaacgccggcgagagagagatcagcctgaagaacctgagcagcgacgaggccaccaaccccatcagcagagtgctgaacggcaaccagcaggtggtggacaccagcctgaagcagaccgtgaaggccaacaccttcggcaaggccggcatcaagaccaagaacttcatccagaagaacagcatggacaagaagaacggcaagagctacgagaacaagagcggcgagaaccagagcgtggacaagagcgacaccatccccatccccaacggcgtggtgaccaacaacagcggctacatcaccaacggctacatgggcaagggcgccgacaacgacggcagcggcagcgagagcggctacaccacccccaagaagagaaaggccagaagaaacagcgccaagggctgcgagaacctgaacatcgtgcaggacaagatcatgcagcaggagaccagcgtgcccaccctgaagcagggcctggagaccttcaagcccgactacagcgagcagaagggcaacagagtggacggcagcaagcccatctggaagtacgagaccggccccggcggcaccagcagaggcaagcccgccgtgggcgacatgctgagaaagagcagcgacagcaagcccggcgtgagcagcaagaagttcgacgacagacccaagggcaagcacgccagcgccgtggccagcaaggaggacagctggaccctgttcaagcccccccccgtgttccccgtggacaacagcagcgccaagatcgtgcccaagatcagctacgccagcaaggtgaaggagaacctgaacaagaccatccagaacagcagcgtgagccccaccagcagcagcagcagcagcagcagcaccggcgagacccagacccagagcagcagcagactgagccaggtgcccatgagcgccctgaagagcgtgaccagcgccaacttcagcaacggccccgtgctggccggcaccgacggcaacgtgtacccccccggcggccagcccctgctgaccaccgccgccaacaccctgacccccatcagcagcggcaccgacagcgtgctgcaggacatgagcctgaccagcgccgccgtggagcagatcaagaccagcctgttcatctaccccagcaacatgcagaccatgctgctgagcaccgcccaggtggacctgcccagccagaccgaccagcagaacctgggcgacatcttccagaaccagtggggcctgagcttcatcaacgagcccagcgccggccccgagaccgtgaccggcaagagcagcgagcacaaggtgatggaggtgaccttccagggcgagtaccccgccaccctggtgagccagggcgccgagatcatccccagcggcaccgagcaccccgtgttccccaaggcctacgagctggagaagagaaccagcccccaggtgctgggcagcatcctgaagagcggcaccaccagcgagagcggcgccctgagcctggagcccagccacatcggcgacctgcagaaggccgacaccagcagccagggcgccctggtgttcctgagcaaggactacgagatcgagagccagaaccccctggccagccccaccaacaccctgctgggcagcgccaaggagcagagataccagagaggcctggagagaaacgacagctggggcagcttcgacctgagagccgccatcgtgtaccacaccaaggagatggagagcatctggaacctgcagaagcaggaccccaagagaatcatcacctacaacgaggccatggacagccccgaccagtag

SEQ ID NO: 82531 - DNA, 534 bp, synthetic construct
  misc_feature 1..534: note = Description of Artificial Sequence: Synthetic coding sequence
  source 1..534: mol_type = other DNA
atgagcagaaagggccccagagccgaggtgtgcgccgactgcagcgcccccgaccccggctgggccagcatcagcagaggcgtgctggtgtgcgacgagtgctgcagcgtgcacagaagcctgggcagacacatcagcatcgtgaagcacctgagacacagcgcctggccccccaccctgctgcagatggtgcacaccctggccagcaacggcgccaacagcatctgggagcacagcctgctggaccccgcccaggtgcagagcggcagaagaaaggccaacccccaggacaaggtgcaccccatcaagagcgagttcatcagagccaagtaccagatgctggccttcgtgcacaagctgccctgcagagacgacgacggcgtgaccgccaaggacgacctgaccggccacagaagctgggccacccccgacatcaacccccaccccaacagagccaccggcaccagcgccctgagcgccgccaccctgcccggcagccaggtgccctggtgcccccccctgagcagcccctag

SEQ ID NO: 82532 - DNA, 2313 bp, synthetic construct
  misc_feature 1..2313: note = Description of Artificial Sequence: Synthetic coding sequence
  source 1..2313: mol_type = other DNA
atgagcagaaagggccccagagccgaggtgtgcgccgactgcagcgcccccgaccccggctgggccagcatcagcagaggcgtgctggtgtgcgacgagtgctgcagcgtgcacagaagcctgggcagacacatcagcatcgtgaagcacctgagacacagcgcctggccccccaccctgctgcagatggtgcacaccctggccagcaacggcgccaacagcatctgggagcacagcctgctggaccccgcccaggtgcagagcggcagaagaaaggccaacccccaggacaaggtgcaccccatcaagagcgagttcatcagagccaagtaccagatgctggccttcgtgcacaagctgccctgcagagacgacgacggcgtgaccgccaaggacctgagcaagcagctgcacagcagcgtgagaaccggcaacctggagacctgcctgagactgctgagcctgggcgcccaggccaacttcttccaccccgagaagggcaccacccccctgcacgtggccgccaaggccggccagaccctgcaggccgagctgctggtggtgtacggcgccgaccccggcagccccgacgtgaacggcagaacccccatcgactacgccagacaggccggccaccacgagctggccgagagactggtggagtgccagtacgagctgaccgacagactggccttctacctgtgcggcagaaagcccgaccacaagaacggccactacatcatcccccagatggccgacagaagcagacagaagtgcatgagccagagcctggacctgagcgagctggccaaggccgccaagaagaagctgcaggccctgagcaacagactgttcgaggagctggccatggacgtgtacgacgaggtggacagaagagagaacgacgccgtgtggctggccacccagaaccacagcaccctggtgaccgagagaagcgccgtgcccttcctgcccgtgaaccccgagtacagcgccaccagaaaccagggcagacagaagctggccagattcaacgccagagagttcgccaccctgatcatcgacatcctgagcgaggccaagagaagacagcagggcaagagcctgagcagccccaccgacaacctggagctgagcctgagaagccagagcgacctggacgaccagcacgactacgacagcgtggccagcgacgaggacaccgaccaggagcccctgagaagcaccggcgccaccagaagcaacagagccagaagcatggacagcagcgacctgagcgacggcgccgtgaccctgcaggagtacctggagctgaagaaggccctggccaccagcgaggccaaggtgcagcagctgatgaaggtgaacagcagcctgagcgacgagctgagaagactgcagagagagatccacaagctgcaggccgagaacctgcagctgagacagccccccggccccgtgcccaccccccccctgcccagcgagagagccgagcacacccccatggcccccggcggcagcacccacagaagagacagacaggccttcagcatgtacgagcccggcagcgccctgaagcccttcggcggcccccccggcgacgagctgaccaccagactgcagcccttccacagcaccgagctggaggacgacgccatctacagcgtgcacgtgcccgccggcctgtacagaatcagaaagggcgtgagcgccagcgccgtgcccttcacccccagcagccccctgctgagctgcagccaggagggcagcagacacaccagcaagctgagcagacacggcagcggcgccgacagcgactacgagaacacccagagcggcgaccccctgctgggcctggagggcaagagattcctggagctgggcaaggaggaggacttccaccccgagctggagagcctggacggcgacctggaccccggcctgcccagcaccgaggacgtgatcctgaagaccgagcaggtgaccaagaacatccaggagctgctgagagccgcccaggagttcaagcacgacagcttcgtgccctgcagcgagaagatccacctggccgtgaccgagatggccagcctgttccccaagagacccgccctggagcccgtgagaagcagcctgagactgctgaacgccagcgcctacagactgcagagcgagtgcagaaagaccgtgccccccgagcccggcgcccccgtggacttccagctgctgacccagcaggtgatccagtgcgcctacgacatcgccaaggccgccaagcagctggtgaccatcaccaccagagagaagaagcagtag

SEQ ID NO: 82533 - DNA, 1212 bp, synthetic construct
  misc_feature 1..1212: note = Description of Artificial Sequence: Synthetic coding sequence
  source 1..1212: mol_type = other DNA
atgttcgtggccagcgagagaaagatgagagcccaccaggtgctgaccttcctgctgctgttcgtgatcaccagcgtggccagcgagaacgccagcaccagcagaggctgcggcctggacctgctgccccagtacgtgagcctgtgcgacctggacgccatctggggcatcgtggtggaggccgtggccggcgccggcgccctgatcaccctgctgctgatgctgatcctgctggtgagactgcccttcatcaaggagaaggagaagaagagccccgtgggcctgcacttcctgttcctgctgggcaccctgggcctgttcggcctgaccttcgccttcatcatccaggaggacgagaccatctgcagcgtgagaagattcctgtggggcgtgctgttcgccctgtgcttcagctgcctgctgagccaggcctggagagtgagaagactggtgagacacggcaccggccccgccggctggcagctggtgggcctggccctgtgcctgatgctggtgcaggtgatcatcgccgtggagtggctggtgctgaccgtgctgagagacaccagacccgcctgcgcctacgagcccatggacttcgtgatggccctgatctacgacatggtgctgctggtggtgaccctgggcctggccctgttcaccctgtgcggcaagttcaagagatggaagctgaacggcgccttcctgctgatcaccgccttcctgagcgtgctgatctgggtggcctggatgaccatgtacctgttcggcaacgtgaagctgcagcagggcgacgcctggaacgaccccaccctggccatcaccctggccgccagcggctgggtgttcgtgatcttccacgccatccccgagatccactgcaccctgctgcccgccctgcaggagaacacccccaactacttcgacaccagccagcccagaatgagagagaccgccttcgaggaggacgtgcagctgcccagagcctacatggagaacaaggccttcagcatggacgagcacaacgccgccctgagaaccgccggcttccccaacggcagcctgggcaagagacccagcggcagcctgggcaagagacccagcgcccccttcagaagcaacgtgtaccagcccaccgagatggccgtggtgctgaacggcggcaccatccccaccgccccccccagccacaccggcagacacctgtggtag

SEQ ID NO: 82534 - DNA, 1215 bp, synthetic construct
  misc_feature 1..1215: note = Description of Artificial Sequence: Synthetic coding sequence
  source 1..1215: mol_type = other DNA
atgttcgtggccagcgagagaaagatgagagcccaccaggtgctgaccttcctgctgctgttcgtgatcaccagcgtggccagcgagaacgccagcaccagcagaggctgcggcctggacctgctgccccagtacgtgagcctgtgcgacctggacgccatctggggcatcgtggtggaggccgtggccggcgccggcgccctgatcaccctgctgctgatgctgatcctgctggtgagactgcccttcatcaaggagaaggagaagaagagccccgtgggcctgcacttcctgttcctgctgggcaccctgggcctgttcggcctgaccttcgccttcatcatccaggaggacgagaccatctgcagcgtgagaagattcctgtggggcgtgctgttcgccctgtgcttcagctgcctgctgagccaggcctggagagtgagaagactggtgagacacggcaccggccccgccggctggcagctggtgggcctggccctgtgcctgatgctggtgcaggtgatcatcgccgtggagtggctggtgctgaccgtgctgagagacaccagacccgcctgcgcctacgagcccatggacttcgtgatggccctgatctacgacatggtgctgctggtggtgaccctgggcctggccctgttcaccctgtgcggcaagttcaagagatggaagctgaacggcgccttcctgctgatcaccgccttcctgagcgtgctgatctgggtggcctggatgaccatgtacctgttcggcaacgtgaagctgcagcagggcgacgcctggaacgaccccaccctggccatcaccctggccgccagcggctgggtgttcgtgatcttccacgccatccccgagatccactgcaccctgctgcccgccctgcaggagaacacccccaactacttcgacaccagccagcccagaatgagagagaccgccttcgaggaggacgtgcagctgcccagagcctacatggagaacaaggccttcagcatggacgagcacaacgccgccctgagaaccgccggcttccccaacggcagcctgggcaagagacccagcggcagcctgggcaagagacccagcgcccccttcagaagcaacgtgtaccagcccaccgagatggccgtggtgctgaacggcggcaccgagatggtgacccaccccagaagcctggagagcttcggcgccttctag

SEQ ID NO: 82535 - DNA, 1290 bp, synthetic construct
  misc_feature 1..1290: note = Description of Artificial Sequence: Synthetic coding sequence
  source 1..1290: mol_type = other DNA
atgaaccccccctggagcgtggcctggggccaggagggcttcagagccggcacccccggcagcagatacctgcccagaatgttcgtggccagcgagagaaagatgagagcccaccaggtgctgaccttcctgctgctgttcgtgatcaccagcgtggccagcgagaacgccagcaccagcagaggctgcggcctggacctgctgccccagtacgtgagcctgtgcgacctggacgccatctggggcatcgtggtggaggccgtggccggcgccggcgccctgatcaccctgctgctgatgctgatcctgctggtgagactgcccttcatcaaggagaaggagaagaagagccccgtgggcctgcacttcctgttcctgctgggcaccctgggcctgttcggcctgaccttcgccttcatcatccaggaggacgagaccatctgcagcgtgagaagattcctgtggggcgtgctgttcgccctgtgcttcagctgcctgctgagccaggcctggagagtgagaagactggtgagacacggcaccggccccgccggctggcagctggtgggcctggccctgtgcctgatgctggtgcaggtgatcatcgccgtggagtggctggtgctgaccgtgctgagagacaccagacccgcctgcgcctacgagcccatggacttcgtgatggccctgatctacgacatggtgctgctggtggtgaccctgggcctggccctgttcaccctgtgcggcaagttcaagagatggaagctgaacggcgccttcctgctgatcaccgccttcctgagcgtgctgatctgggtggcctggatgaccatgtacctgttcggcaacgtgaagctgcagcagggcgacgcctggaacgaccccaccctggccatcaccctggccgccagcggctgggtgttcgtgatcttccacgccatccccgagatccactgcaccctgctgcccgccctgcaggagaacacccccaactacttcgacaccagccagcccagaatgagagagaccgccttcgaggaggacgtgcagctgcccagagcctacatggagaacaaggccttcagcatggacgagcacaacgccgccctgagaaccgccggcttccccaacggcagcctgggcaagagacccagcggcagcctgggcaagagacccagcgcccccttcagaagcaacgtgtaccagcccaccgagatggccgtggtgctgaacggcggcaccatccccaccgccccccccagccacaccggcagacacctgtggtag

SEQ ID NO: 82536 - DNA, 759 bp, synthetic construct
  misc_feature 1..759: note = Description of Artificial Sequence: Synthetic coding sequence
  source 1..759: mol_type = other DNA
atgttcgtggccagcgagagaaagatgagagcccaccaggtgctgaccttcctgctgctgttcgtgatcaccagcgtggccagcgagaacgccagcaccagcagaggctgcggcctggacctgctgccccagtacgtgagcctgtgcgacctggacgccatctggggcatcgtggtggaggccgtggccggcgccggcgccctgatcaccctgctgctgatgctgatcctgctggtgagactgcccttcttcctgctgatcaccgccttcctgagcgtgctgatctgggtggcctggatgaccatgtacctgttcggcaacgtgaagctgcagcagggcgacgcctggaacgaccccaccctggccatcaccctggccgccagcggctgggtgttcgtgatcttccacgccatccccgagatccactgcaccctgctgcccgccctgcaggagaacacccccaactacttcgacaccagccagcccagaatgagagagaccgccttcgaggaggacgtgcagctgcccagagcctacatggagaacaaggccttcagcatggacgagcacaacgccgccctgagaaccgccggcttccccaacggcagcctgggcaagagacccagcggcagcctgggcaagagacccagcgcccccttcagaagcaacgtgtaccagcccaccgagatggccgtggtgctgaacggcggcaccatccccaccgccccccccagccacaccggcagacacctgtggtag

SEQ ID NO: 82537 - DNA, 489 bp, synthetic construct
  misc_feature 1..489: note = Description of Artificial Sequence: Synthetic coding sequence
  source 1..489: mol_type = other DNA
atggccatccacaaggccctggtgatgtgcctgggcctgcccctgttcctgttccccgagcagagctaccagggcgacatgtaccccaccagaggcgtgggctacgagaccatcctgaaggagcagaagggccagagcatgttcgtggagaacaaggccttcagcatggacgagcccgtggccgccaagagacccgtgagcccctacagcggctacaacggccagctgctgaccagcgtgtaccagcccaccgagatggccctgatgcacaaggtgcccagcgagggcgcctacgacatcatcctgcccagagccaccgccaacagccaggtgatgggcagcgccaacagcaccctgagagccgaggacatgtacagcgcccagagccaccaggccgccaccccccccaaggacggcaagaacagccaggtgagcgagctgacccagagaggccaggccaacaccaaccaggtgttcctgagactgtag

SEQ ID NO: 82538 - DNA, 1461 bp, synthetic construct
  misc_feature 1..1461: note = Description of Artificial Sequence: Synthetic coding sequence
  source 1..1461: mol_type = other DNA
atgagaggcagaggcagccagcagcagcagcccaccagaagacagggccagaagctgcccagccccagccccgccggcaagtacgagagcgcccagcccggcggcacccagcccgagcccggcctgggcgccagaatggccatccacaaggccctggtgatgtgcctgggcctgcccctgttcctgttccccggcgcctgggcccagggccacgtgccccccggctgcagccagggcctgaaccccctgtactacaacctgtgcgacagaagcggcgcctggggcatcgtgctggaggccgtggccggcgccggcatcgtgaccaccttcgtgctgaccatcatcctggtggccagcctgcccttcgtgcaggacaccaagaagagaagcctgctgggcacccaggtgttcttcctgctgggcaccctgggcctgttctgcctggtgttcgcctgcgtggtgaagcccgacttcagcacctgcgccagcagaagattcctgttcggcgtgctgttcgccatctgcttcagctgcctggccgcccacgtgttcgccctgaacttcctggccagaaagaaccacggccccagaggctgggtgatcttcaccgtggccctgctgctgaccctggtggaggtgatcatcaacaccgagtggctgatcatcaccctggtgagaggcagcggcgagggcggcccccagggcaacagcagcgccggctgggccgtggccagcccctgcgccatcgccaacatggacttcgtgatggccctgatctacgtgatgctgctgctgctgggcgccttcctgggcgcctggcccgccctgtgcggcagatacaagagatggagaaagcacggcgtgttcgtgctgctgaccaccgccaccagcgtggccatctgggtggtgtggatcgtgatgtacacctacggcaacaagcagcacaacagccccacctgggacgaccccaccctggccatcgccctggccgccaacgcctgggccttcgtgctgttctacgtgatccccgaggtgagccaggtgaccaagagcagccccgagcagagctaccagggcgacatgtaccccaccagaggcgtgggctacgagaccatcctgaaggagcagaagggccagagcatgttcgtggagaacaaggccttcagcatggacgagcccgtggccgccaagagacccgtgagcccctacagcggctacaacggccagctgctgaccagcgtgtaccagcccaccgagatggccctgatgcacaaggtgcccagcgagggcgcctacgacatcatcctgcccagagccaccgccaacagccaggtgatgggcagcgccaacagcaccctgagagccgaggacatgtacagcgcccagagccaccaggccgccaccccccccaaggacggcaagaacagccaggtgttcagaaacccctacgtgtgggactag

SEQ ID NO: 82539 - DNA, 1326 bp, synthetic construct
  misc_feature 1..1326: note = Description of Artificial Sequence: Synthetic coding sequence
  source 1..1326: mol_type = other DNA
atggccatccacaaggccctggtgatgtgcctgggcctgcccctgttcctgttccccggcgcctgggcccagggccacgtgccccccggctgcagccagggcctgaaccccctgtactacaacctgtgcgacagaagcggcgcctggggcatcgtgctggaggccgtggccggcgccggcatcgtgaccaccttcgtgctgaccatcatcctggtggccagcctgcccttcgtgcaggacaccaagaagagaagcctgctgggcacccaggtgttcttcctgctgggcaccctgggcctgttctgcctggtgttcgcctgcgtggtgaagcccgacttcagcacctgcgccagcagaagattcctgttcggcgtgctgttcgccatctgcttcagctgcctggccgcccacgtgttcgccctgaacttcctggccagaaagaaccacggccccagaggctgggtgatcttcaccgtggccctgctgctgaccctggtggaggtgatcatcaacaccgagtggctgatcatcaccctggtgagaggcagcggcgagggcggcccccagggcaacagcagcgccggctgggccgtggccagcccctgcgccatcgccaacatggacttcgtgatggccctgatctacgtgatgctgctgctgctgggcgccttcctgggcgcctggcccgccctgtgcggcagatacaagagatggagaaagcacggcgtgttcgtgctgctgaccaccgccaccagcgtggccatctgggtggtgtggatcgtgatgtacacctacggcaacaagcagcacaacagccccacctgggacgaccccaccctggccatcgccctggccgccaacgcctgggccttcgtgctgttctacgtgatccccgaggtgagccaggtgaccaagagcagccccgagcagagctaccagggcgacatgtaccccaccagaggcgtgggctacgagaccatcctgaaggagcagaagggccagagcatgttcgtggagaacaaggccttcagcatggacgagcccgtggccgccaagagacccgtgagcccctacagcggctacaacggccagctgctgaccagcgtgtaccagcccaccgagatggccctgatgcacaaggtgcccagcgagggcgcctacgacatcatcctgcccagagccaccgccaacagccaggtgatgggcagcgccaacagcaccctgagagccgaggacatgtacagcgcccagagccaccaggccgccaccccccccaaggacggcaagaacagccaggtgttcagaaacccctacgtgtgggactag

SEQ ID NO: 82540 - DNA, 1329 bp, synthetic construct
  misc_feature 1..1329: note = Description of Artificial Sequence: Synthetic coding sequence
  source 1..1329: mol_type = other DNA
atggccatccacaaggccctggtgatgtgcctgggcctgcccctgttcctgttccccggcgcctgggcccagggccacgtgccccccggctgcagccagggcctgaaccccctgtactacaacctgtgcgacagaagcggcgcctggggcatcgtgctggaggccgtggccggcgccggcatcgtgaccaccttcgtgctgaccatcatcctggtggccagcctgcccttcgtgcaggacaccaagaagagaagcctgctgggcacccaggtgttcttcctgctgggcaccctgggcctgttctgcctggtgttcgcctgcgtggtgaagcccgacttcagcacctgcgccagcagaagattcctgttcggcgtgctgttcgccatctgcttcagctgcctggccgcccacgtgttcgccctgaacttcctggccagaaagaaccacggccccagaggctgggtgatcttcaccgtggccctgctgctgaccctggtggaggtgatcatcaacaccgagtggctgatcatcaccctggtgagaggcagcggcgagggcggcccccagggcaacagcagcgccggctgggccgtggccagcccctgcgccatcgccaacatggacttcgtgatggccctgatctacgtgatgctgctgctgctgggcgccttcctgggcgcctggcccgccctgtgcggcagatacaagagatggagaaagcacggcgtgttcgtgctgctgaccaccgccaccagcgtggccatctgggtggtgtggatcgtgatgtacacctacggcaacaagcagcacaacagccccacctgggacgaccccaccctggccatcgccctggccgccaacgcctgggccttcgtgctgttctacgtgatccccgaggtgagccaggtgaccaagagcagccccgagcagagctaccagggcgacatgtaccccaccagaggcgtgggctacgagaccatcctgaaggagcagaagggccagagcatgttcgtggagaacaaggccttcagcatggacgagcccgtggccgccaagagacccgtgagcccctacagcggctacaacggccagctgctgaccagcgtgtaccagcccaccgagatggccctgatgcacaaggtgcccagcgagggcgcctacgacatcatcctgcccagagccaccgccaacagccaggtgatgggcagcgccaacagcaccctgagagccgaggacatgtacagcgcccagagccaccaggccgccaccccccccaaggacggcaagaacagccaggcccagagcccccagagcaagaccagatggtag

SEQ ID NO: 82541 - DNA, 1362 bp, synthetic construct
  misc_feature 1..1362: note = Description of Artificial Sequence: Synthetic coding sequence
  source 1..1362: mol_type = other DNA
atgggcacccagcccgagcccggcctgggcgccagaatggccatccacaaggccctggtgatgtgcctgggcctgcccctgttcctgttccccggcgcctgggcccagggccacgtgccccccggctgcagccagggcctgaaccccctgtactacaacctgtgcgacagaagcggcgcctggggcatcgtgctggaggccgtggccggcgccggcatcgtgaccaccttcgtgctgaccatcatcctggtggccagcctgcccttcgtgcaggacaccaagaagagaagcctgctgggcacccaggtgttcttcctgctgggcaccctgggcctgttctgcctggtgttcgcctgcgtggtgaagcccgacttcagcacctgcgccagcagaagattcctgttcggcgtgctgttcgccatctgcttcagctgcctggccgcccacgtgttcgccctgaacttcctggccagaaagaaccacggccccagaggctgggtgatcttcaccgtggccctgctgctgaccctggtggaggtgatcatcaacaccgagtggctgatcatcaccctggtgagaggcagcggcgagggcggcccccagggcaacagcagcgccggctgggccgtggccagcccctgcgccatcgccaacatggacttcgtgatggccctgatctacgtgatgctgctgctgctgggcgccttcctgggcgcctggcccgccctgtgcggcagatacaagagatggagaaagcacggcgtgttcgtgctgctgaccaccgccaccagcgtggccatctgggtggtgtggatcgtgatgtacacctacggcaacaagcagcacaacagccccacctgggacgaccccaccctggccatcgccctggccgccaacgcctgggccttcgtgctgttctacgtgatccccgaggtgagccaggtgaccaagagcagccccgagcagagctaccagggcgacatgtaccccaccagaggcgtgggctacgagaccatcctgaaggagcagaagggccagagcatgttcgtggagaacaaggccttcagcatggacgagcccgtggccgccaagagacccgtgagcccctacagcggctacaacggccagctgctgaccagcgtgtaccagcccaccgagatggccctgatgcacaaggtgcccagcgagggcgcctacgacatcatcctgcccagagccaccgccaacagccaggtgatgggcagcgccaacagcaccctgagagccgaggacatgtacagcgcccagagccaccaggccgccaccccccccaaggacggcaagaacagccaggtgttcagaaacccctacgtgtgggactag

SEQ ID NO: 82542 - DNA, 597 bp, synthetic construct
  misc_feature 1..597: note = Description of Artificial Sequence: Synthetic coding sequence
  source 1..597: mol_type = other DNA
atgagcaacgtgagagtgagcaacggcagccccagcctggagagaatggacgccagacaggccgagcaccccaagcccagcgcctgcagaaacctgttcggccccgtggaccacgaggagctgaccagagacctggagaagcactgcagagacatggaggaggccagccagagaaagtggaacttcgacttccagaaccacaagcccctggagggcaagtacgagtggcaggaggtggagaagggcagcctgcccgagttctactacagaccccccagaccccccaagggcgcctgcaaggtgcccgcccaggagagccaggacgtgagcggcagcagacccgccgcccccctgatcggcgcccccgccaacagcgaggacacccacctggtggaccccaagaccgaccccagcgacagccagaccggcctggccgagcagtgcgccggcatcagaaagagacccgccaccgacgacagcagcacccagaacaagagagccaacagaaccgaggagaacgtgagcgacggcagccccaacgccggcagcgtggagcagacccccaagaagcccggcctgagaagaagacagacctag

SEQ ID NO: 82543 - DNA, 903 bp, synthetic construct
  misc_feature 1..903: note = Description of Artificial Sequence: Synthetic coding sequence
  source 1..903: mol_type = other DNA
atgtacaaggactgcatcgagagcaccggcgactacttcctgctgtgcgacgccgagggcccctggggcatcatcctggagagcctggccatcctgggcatcgtggtgaccatcctgctgctgctggccttcctgttcctgatgagaaagatccaggactgcagccagtggaacgtgctgcccacccagctgctgttcctgctgagcgtgctgggcctgttcggcctggccttcgccttcatcatcgagctgaaccagcagaccgcccccgtgagatacttcctgttcggcgtgctgttcgccctgtgcttcagctgcctgctggcccacgccagcaacctggtgaagctggtgagaggctgcgtgagcttcagctggaccaccatcctgtgcatcgccatcggctgcagcctgctgcagatcatcatcgccaccgagtacgtgaccctgatcatgaccagaggcatgatgttcgtgaacatgaccccctgccagctgaacgtggacttcgtggtgctgctggtgtacgtgctgttcctgatggccctgaccttcttcgtgagcaaggccaccttctgcggcccctgcgagaactggaagcagcacggcagactgatcttcatcaccgtgctgttcagcatcatcatctgggtggtgtggatcagcatgctgctgagaggcaacccccagttccagagacagccccagtgggacgaccccgtggtgtgcatcgccctggtgaccaacgcctgggtgttcctgctgctgtacatcgtgcccgagctgtgcatcctgtacagaagctgcagacaggagtgccccctgcagggcaacgcctgccccgtgaccgcctaccagcacagcttccaggtggagaaccaggagctgagcagagactgctag

SEQ ID NO: 82544 - DNA, 363 bp, synthetic construct
  misc_feature 1..363: note = Description of Artificial Sequence: Synthetic coding sequence
  source 1..363: mol_type = other DNA
atgtacaaggactgcatcgagagcaccggcgactacttcctgctgtgcgacgccgagggcccctggggcatcatcctggagagcctggccatcctgggcatcgtggtgaccatcctgctgctgctggccttcctgttcctgatgagaaagatccaggactgcagccagtggaacgtgctgcccacccagctgctgttcctgctgagcgtgctgggcctgttcggcctggccttcgccttcatcatcgagctgaaccagcagaccgcccccgtgagatacttcctgttcggcgtgctgttcgccctgtgcttcagctgcctgctggcccacgccagcaacctggtgaagctggtgagaggctag

SEQ ID NO: 82545 - DNA, 312 bp, synthetic construct
  misc_feature 1..312: note = Description of Artificial Sequence: Synthetic coding sequence
  source 1..312: mol_type = other DNA
atggagaccgtgcaggagctgatccccctggccaaggagatgatggcccagaagagaaagggcaagatggtgaagctgtacgtgctgggcagcgtgctggccctgttcggcgtggtgctgggcctgatggagaccgtgtgcagccccttcaccgccgccagaagactgagagaccaggaggccgccgtggccgagctgcaggccgccctggagagacaggccctgcagaagcaggccctgcaggagaagggcaagcagcaggacaccgtgctgggcggcagagccctgagcaacagacagcacgccagctag

SEQ ID NO: 82546 - DNA, 1500 bp, synthetic construct
  misc_feature 1..1500: note = Description of Artificial Sequence: Synthetic coding sequence
  source 1..1500: mol_type = other DNA
atggagctgagcgagcccatcgtggagaacggcgagaccgagatgagccccgaggagagctgggagcacaaggaggagatcagcgaggccgagcccggcggcggcagcctgggcgacggcagaccccccgaggagagcgcccacgagatgatggaggaggaggaggagatccccaagcccaagagcgtggtggccccccccggcgcccccaagaaggagcacgtgaacgtggtgttcatcggccacgtggacgccggcaagagcaccatcggcggccagatcatgtacctgaccggcatggtggacaagagaaccctggagaagtacgagagagaggccaaggagaagaacagagagacctggtacctgagctgggccctggacaccaaccaggaggagagagacaagggcaagaccgtggaggtgggcagagcctacttcgagaccgagaagaagcacttcaccatcctggacgcccccggccacaagagcttcgtgcccaacatgatcggcggcgccagccaggccgacctggccgtgctggtgatcagcgccagaaagggcgagttcgagaccggcttcgagaagggcggccagaccagagagcacgccatgctggccaagaccgccggcgtgaagcacctgatcgtgctgatcaacaagatggacgaccccaccgtgaactggagcaacgagagatacgaggagtgcaaggagaagctggtgcccttcctgaagaaggtgggcttcaaccccaagaaggacatccacttcatgccctgcagcggcctgaccggcgccaacctgaaggagcagagcgacttctgcccctggtacatcggcctgcccttcatcccctacctggacaacctgcccaacttcaacagaagcgtggacggccccatcagactgcccatcgtggacaagtacaaggacatgggcaccgtggtgctgggcaagctggagagcggcagcatctgcaagggccagcagctggtgatgatgcccaacaagcacaacgtggaggtgctgggcatcctgagcgacgacgtggagaccgacaccgtggcccccggcgagaacctgaagatcagactgaagggcatcgaggaggaggagatcctgcccggcttcatcctgtgcgaccccaacaacctgtgccacagcggcagaaccttcgacgcccagatcgtgatcatcgagcacaagagcatcatctgccccggctacaacgccgtgctgcacatccacacctgcatcgaggaggtggagatcaccgccctgatctgcctggtggacaagaagagcggcgagaagagcaagaccagacccagattcgtgaagcaggaccaggtgtgcatcgccagactgagaaccgccggcaccatctgcctggagaccttcaaggacttcccccagatgggcagattcaccctgagagacgagggcaagaccatcgccatcggcaaggtgctgaagctggtgcccgagaaggactag

SEQ ID NO: 82547 - DNA, 1914 bp, synthetic construct
  misc_feature 1..1914: note = Description of Artificial Sequence: Synthetic coding sequence
  source 1..1914: mol_type = other DNA
atggaccccggcagcggcggcggcggcggcggcggcggcggcggcggcagcagcagcggcagcagcagcagcgacagcgcccccgactgctgggaccaggccgacatggaggcccccggccccggcccctgcggcggcggcggcagcctggccgccgccgccgaggcccagagagagaacctgagcgccgccttcagcagacagctgaacgtgaacgccaagcccttcgtgcccaacgtgcacgccgccgagttcgtgcccagcttcctgagaggccccgccgccccccccccccccgtgggcggcgccgccaacaaccacggcgccggcagcggcgccggcggcagagccgcccccgtggagagcagccaggaggagcagagcctgtgcgagggcagcaacagcgccgtgagcatggagctgagcgagcccatcgtggagaacggcgagaccgagatgagccccgaggagagctgggagcacaaggaggagatcagcgaggccgagcccggcggcggcagcctgggcgacggcagaccccccgaggagagcgcccacgagatgatggaggaggaggaggagatccccaagcccaagagcgtggtggccccccccggcgcccccaagaaggagcacgtgaacgtggtgttcatcggccacgtggacgccggcaagagcaccatcggcggccagatcatgtacctgaccggcatggtggacaagagaaccctggagaagtacgagagagaggccaaggagaagaacagagagacctggtacctgagctgggccctggacaccaaccaggaggagagagacaagggcaagaccgtggaggtgggcagagcctacttcgagaccgagaagaagcacttcaccatcctggacgcccccggccacaagagcttcgtgcccaacatgatcggcggcgccagccaggccgacctggccgtgctggtgatcagcgccagaaagggcgagttcgagaccggcttcgagaagggcggccagaccagagagcacgccatgctggccaagaccgccggcgtgaagcacctgatcgtgctgatcaacaagatggacgaccccaccgtgaactggagcaacgagagatacgaggagtgcaaggagaagctggtgcccttcctgaagaaggtgggcttcaaccccaagaaggacatccacttcatgccctgcagcggcctgaccggcgccaacctgaaggagcagagcgacttctgcccctggtacatcggcctgcccttcatcccctacctggacaacctgcccaacttcaacagaagcgtggacggccccatcagactgcccatcgtggacaagtacaaggacatgggcaccgtggtgctgggcaagctggagagcggcagcatctgcaagggccagcagctggtgatgatgcccaacaagcacaacgtggaggtgctgggcatcctgagcgacgacgtggagaccgacaccgtggcccccggcgagaacctgaagatcagactgaagggcatcgaggaggaggagatcctgcccggcttcatcctgtgcgaccccaacaacctgtgccacagcggcagaaccttcgacgcccagatcgtgatcatcgagcacaagagcatcatctgccccggctacaacgccgtgctgcacatccacacctgcatcgaggaggtggagatcaccgccctgatctgcctggtggacaagaagagcggcgagaagagcaagaccagacccagattcgtgaagcaggaccaggtgtgcatcgccagactgagaaccgccggcaccatctgcctggagaccttcaaggacttcccccagatgggcagattcaccctgagagacgagggcaagaccatcgccatcggcaaggtgctgaagctggtgcccgagaaggactag

SEQ ID NO: 82548 - DNA, 1911 bp, synthetic construct
  misc_feature 1..1911: note = Description of Artificial Sequence: Synthetic coding sequence
  source 1..1911: mol_type = other DNA
atggaccccggcagcggcggcggcggcggcggcggcggcggcggcggcagcagcagcggcagcagcagcagcgacagcgcccccgactgctgggaccaggccgacatggaggcccccggccccggcccctgcggcggcggcggcagcctggccgccgccgccgaggcccagagagagaacctgagcgccgccttcagcagacagctgaacgtgaacgccaagcccttcgtgcccaacgtgcacgccgccgagttcgtgcccagcttcctgagaggccccgccgccccccccccccccgtgggcggcgccgccaacaaccacggcgccggcagcggcgccggcggcagagccgcccccgtggagagcagccaggaggagcagagcctgtgcgagggcagcaacagcgccgtgagcatggagctgagcgagcccatcgagaacggcgagaccgagatgagccccgaggagagctgggagcacaaggaggagatcagcgaggccgagcccggcggcggcagcctgggcgacggcagaccccccgaggagagcgcccacgagatgatggaggaggaggaggagatccccaagcccaagagcgtggtggccccccccggcgcccccaagaaggagcacgtgaacgtggtgttcatcggccacgtggacgccggcaagagcaccatcggcggccagatcatgtacctgaccggcatggtggacaagagaaccctggagaagtacgagagagaggccaaggagaagaacagagagacctggtacctgagctgggccctggacaccaaccaggaggagagagacaagggcaagaccgtggaggtgggcagagcctacttcgagaccgagaagaagcacttcaccatcctggacgcccccggccacaagagcttcgtgcccaacatgatcggcggcgccagccaggccgacctggccgtgctggtgatcagcgccagaaagggcgagttcgagaccggcttcgagaagggcggccagaccagagagcacgccatgctggccaagaccgccggcgtgaagcacctgatcgtgctgatcaacaagatggacgaccccaccgtgaactggagcaacgagagatacgaggagtgcaaggagaagctggtgcccttcctgaagaaggtgggcttcaaccccaagaaggacatccacttcatgccctgcagcggcctgaccggcgccaacctgaaggagcagagcgacttctgcccctggtacatcggcctgcccttcatcccctacctggacaacctgcccaacttcaacagaagcgtggacggccccatcagactgcccatcgtggacaagtacaaggacatgggcaccgtggtgctgggcaagctggagagcggcagcatctgcaagggccagcagctggtgatgatgcccaacaagcacaacgtggaggtgctgggcatcctgagcgacgacgtggagaccgacaccgtggcccccggcgagaacctgaagatcagactgaagggcatcgaggaggaggagatcctgcccggcttcatcctgtgcgaccccaacaacctgtgccacagcggcagaaccttcgacgcccagatcgtgatcatcgagcacaagagcatcatctgccccggctacaacgccgtgctgcacatccacacctgcatcgaggaggtggagatcaccgccctgatctgcctggtggacaagaagagcggcgagaagagcaagaccagacccagattcgtgaagcaggaccaggtgtgcatcgccagactgagaaccgccggcaccatctgcctggagaccttcaaggacttcccccagatgggcagattcaccctgagagacgagggcaagaccatcgccatcggcaaggtgctgaagctggtgcccgagaaggactag

SEQ ID NO: 82549 - DNA, 1887 bp, synthetic construct
  misc_feature 1..1887: note = Description of Artificial Sequence: Synthetic coding sequence
  source 1..1887: mol_type = other DNA
atggacagcggcagcagcagcagcgacagcgcccccgactgctgggaccaggtggacatggagagccccggcagcgcccccagcggcgacggcgtgagcagcgccgtggccgaggcccagagagagcccctgagcagcgccttcagcagaaagctgaacgtgaacgccaagcccttcgtgcccaacgtgcacgccgccgagttcgtgcccagcttcctgagaggccccacccagccccccaccctgcccgccggcagcggcagcaacgacgagacctgcaccggcgccggctacccccagggcaagagaatgggcagaggcgcccccgtggagcccagcagagaggagcccctggtgagcctggagggcagcaacagcgccgtgaccatggagctgagcgagcccgtggtggagaacggcgaggtggagatggccctggaggagagctgggagcacagcaaggaggtgagcgaggccgagcccggcggcggcagcagcggcgacagcggcccccccgaggagagcggccaggagatgatggaggagaaggaggagatcagaaagagcaagagcgtgatcgtgcccagcggcgcccccaagaaggagcacgtgaacgtggtgttcatcggccacgtggacgccggcaagagcaccatcggcggccagatcatgttcctgaccggcatggtggacaagagaaccctggagaagtacgagagagaggccaaggagaagaacagagagacctggtacctgagctgggccctggacaccaaccaggaggagagagacaagggcaagaccgtggaggtgggcagagcctacttcgagaccgagagaaagcacttcaccatcctggacgcccccggccacaagagcttcgtgcccaacatgatcggcggcgccagccaggccgacctggccgtgctggtgatcagcgccagaaagggcgagttcgagaccggcttcgagaagggcggccagaccagagagcacgccatgctggccaagaccgccggcgtgaagcacctgatcgtgctgatcaacaagatggacgaccccaccgtgaactggagcatcgagagatacgaggagtgcaaggagaagctggtgcccttcctgaagaaggtgggcttcagccccaagaaggacatccacttcatgccctgcagcggcctgaccggcgccaacatcaaggagcagagcgacttctgcccctggtacaccggcctgcccttcatcccctacctggacaacctgcccaacttcaacagaagcatcgacggccccatcagactgcccatcgtggacaagtacaaggacatgggcaccgtggtgctgggcaagctggagagcggcagcatcttcaagggccagcagctggtgatgatgcccaacaagcacaacgtggaggtgctgggcatcctgagcgacgacaccgagaccgacttcgtggcccccggcgagaacctgaagatcagactgaagggcatcgaggaggaggagatcctgcccggcttcatcctgtgcgaccccagcaacctgtgccacagcggcagaaccttcgacgtgcagatcgtgatcatcgagcacaagagcatcatctgccccggctacaacgccgtgctgcacatccacacctgcatcgaggaggtggagatcaccgccctgatcagcctggtggacaagaagagcggcgagaagagcaagaccagacccagattcgtgaagcaggaccaggtgtgcatcgccagactgagaaccgccggcaccatctgcctggagaccttcaaggacttcccccagatgggcagattcaccctgagagacgagggcaagaccatcgccatcggcaaggtgctgaagctggtgcccgagaaggactag

SEQ ID NO: 82550 - DNA, 1638 bp, synthetic construct
  misc_feature 1..1638: note = Description of Artificial Sequence: Synthetic coding sequence
  source 1..1638: mol_type = other DNA
atggacagcggcagcaacgacgagacctgcaccggcgccggctacccccagggcaagagaatgggcagaggcgcccccgtggagcccagcagagaggagcccctggtgagcctggagggcagcaacagcgccgtgaccatggagctgagcgagcccgtggtggagaacggcgaggtggagatggccctggaggagagctgggagcacagcaaggaggtgagcgaggccgagcccggcggcggcagcagcggcgacagcggcccccccgaggagagcggccaggagatgatggaggagaaggaggagatcagaaagagcaagagcgtgatcgtgcccagcggcgcccccaagaaggagcacgtgaacgtggtgttcatcggccacgtggacgccggcaagagcaccatcggcggccagatcatgttcctgaccggcatggtggacaagagaaccctggagaagtacgagagagaggccaaggagaagaacagagagacctggtacctgagctgggccctggacaccaaccaggaggagagagacaagggcaagaccgtggaggtgggcagagcctacttcgagaccgagagaaagcacttcaccatcctggacgcccccggccacaagagcttcgtgcccaacatgatcggcggcgccagccaggccgacctggccgtgctggtgatcagcgccagaaagggcgagttcgagaccggcttcgagaagggcggccagaccagagagcacgccatgctggccaagaccgccggcgtgaagcacctgatcgtgctgatcaacaagatggacgaccccaccgtgaactggagcatcgagagatacgaggagtgcaaggagaagctggtgcccttcctgaagaaggtgggcttcagccccaagaaggacatccacttcatgccctgcagcggcctgaccggcgccaacatcaaggagcagagcgacttctgcccctggtacaccggcctgcccttcatcccctacctggacaacctgcccaacttcaacagaagcatcgacggccccatcagactgcccatcgtggacaagtacaaggacatgggcaccgtggtgctgggcaagctggagagcggcagcatcttcaagggccagcagctggtgatgatgcccaacaagcacaacgtggaggtgctgggcatcctgagcgacgacaccgagaccgacttcgtggcccccggcgagaacctgaagatcagactgaagggcatcgaggaggaggagatcctgcccggcttcatcctgtgcgaccccagcaacctgtgccacagcggcagaaccttcgacgtgcagatcgtgatcatcgagcacaagagcatcatctgccccggctacaacgccgtgctgcacatccacacctgcatcgaggaggtggagatcaccgccctgatcagcctggtggacaagaagagcggcgagaagagcaagaccagacccagattcgtgaagcaggaccaggtgtgcatcgccagactgagaaccgccggcaccatctgcctggagaccttcaaggacttcccccagatgggcagattcaccctgagagacgagggcaagaccatcgccatcggcaaggtgctgaagctggtgcccgagaaggactag

SEQ ID NO: 82551 - DNA, 1365 bp, synthetic construct
  misc_feature 1..1365: note = Description of Artificial Sequence: Synthetic coding sequence
  source 1..1365: mol_type = other DNA
atgaccaagagagaggccgaggagctgatcgagatcgagatcgacggcaccgagaaggccgagtgcaccgaggagagcatcgtggagcagacctacgcccccgccgagtgcgtgagccaggccatcgacatcaacgagcccatcggcaacctgaagaagctgctggagcccagactgcagtgcagcctggacgcccacgagatctgcctgcaggacatccagctggaccccgagagaagcctgttcgaccagggcgtgaagaccgacggcaccgtgcagctgagcgtgcaggtgatcagctaccagggcatcgagcccaagctgaacatcctggagatcgtgaagcccgccgacaccgtggaggtggtgatcgaccccgacgcccaccacgccgagagcgaggcccacctggtggaggaggcccaggtgatcaccctggacggcaccaagcacatcaccaccatcagcgacgagaccagcgagcaggtgaccagatgggccgccgccctggagggctacagaaaggagcaggagagactgggcatcccctacgaccccatccagtggagcaccgaccaggtgctgcactgggtggtgtgggtgatgaaggagttcagcatgaccgacatcgacctgaccaccctgaacatcagcggcagagagctgtgcagcctgaaccaggaggacttcttccagagagtgcccagaggcgagatcctgtggagccacctggagctgctgagaaagtacgtgctggccagccaggagcagcagatgaacgagatcgtgaccatcgaccagcccgtgcagatcatccccgccagcgtgcagagcgccacccccaccaccatcaaggtgatcaacagcagcgccaaggccgccaaggtgcagagagcccccagaatcagcggcgaggacagaagcagccccggcaacagaaccggcaacaacggccagatccagctgtggcagttcctgctggagctgctgaccgacaaggacgccagagactgcatcagctgggtgggcgacgagggcgagttcaagctgaaccagcccgagctggtggcccagaagtggggccagagaaagaacaagcccaccatgaactacgagaagctgagcagagccctgagatactactacgacggcgacatgatctgcaaggtgcagggcaagagattcgtgtacaagttcgtgtgcgacctgaagaccctgatcggctacagcgccgccgagctgaacagactggtgaccgagtgcgagcagaagaagctggccaagatgcagctgcacggcatcgcccagcccgtgaccgccgtggccctggccaccgccagcctgcagaccgagaaggacaactag

SEQ ID NO: 82552 - DNA, 1365 bp, synthetic construct; identical to SEQ ID NO: 82551
  misc_feature 1..1365: note = Description of Artificial Sequence: Synthetic coding sequence
  source 1..1365: mol_type = other DNA

SEQ ID NO: 82553 - DNA, 2163 bp, synthetic construct
  misc_feature 1..2163: note = Description of Artificial Sequence: Synthetic coding sequence
  source 1..2163: mol_type = other DNA
atggcccagggcctggaggtggccctgaccgacctgcagagcagcagaaacaacgtgagacaccacaccgaggagatcaccgtggaccacctgctggtgagaagaggccaggccttcaacctgaccctgtacttcagaaacagaagcttccagcccggcctggacaacatcatcttcgtggtggagaccggccccctgcccgacctggccctgggcaccagagccgtgttcagcctggccagacaccacagccccagcccctggatcgcctggctggagaccaacggcgccaccagcaccgaggtgagcctgtgcgccccccccaccgccgccgtgggcagatacctgctgaagatccacatcgacagcttccagggcagcgtgaccgcctaccagctgggcgagttcatcctgctgttcaacccctggtgccccgaggacgccgtgtacctggacagcgagccccagagacaggagtacgtgatgaacgactacggcttcatctaccagggcagcaagaactggatcagaccctgcccctggaactacggccagttcgaggacaagatcatcgacatctgcctgaagctgctggacaagagcctgcacttccagaccgaccccgccaccgactgcgccctgagaggcagccccgtgtacgtgagcagagtggtgtgcgccatgatcaacagcaacgacgacaacggcgtgctgaacggcaactggagcgagaactacaccgacggcgccaaccccgccgagtggaccggcagcgtggccatcctgaagcagtggaacgccaccggctgccagcccgtgagatacggccagtgctgggtgttcgccgccgtgatgtgcaccgtgatgagatgcctgggcatccccaccagagtgatcaccaacttcgacagcggccacgacaccgacggcaacctgatcatcgacgagtactacgacaacaccggcagaatcctgggcaacaagaagaaggacaccatctggaacttccacgtgtggaacgagtgctggatggccagaaaggacctgccccccgcctacggcggctggcaggtgctggacgccaccccccaggagatgagcaacggcgtgtactgctgcggccccgccagcgtgagagccatcaaggagggcgaggtggacctgaactacgacacccccttcgtgttcagcatggtgaacgccgactgcatgagctggctggtgcagggcggcaaggagcagaagctgcaccaggacaccagcagcgtgggcaacttcatcagcaccaagagcatccagagcgacgagagagacgacatcaccgagaactacaagtacgaggagggcagcctgcaggagagacaggtgttcctgaaggccctgcagaagctgaaggccagaagcttccacggcagccagagaggcgccgagctgcagcccagcagacccaccagcctgagccaggacagccccagaagcctgcacacccccagcctgagacccagcgacgtggtgcaggtgagcctgaagttcaagctgctggacccccccaacatgggccaggacatctgcttcgtgctgctggccctgaacatgagcagccagttcaaggacctgaaggtgaacctgagcgcccagagcctgctgcacgacggcagccccctgagccccttctggcaggacaccgccttcatcaccctgagccccaaggaggccaagacctacccctgcaagatcagctacagccagtacagccagtacctgagcaccgacaagctgatcagaatcagcgccctgggcgaggagaagagcagccccgagaagatcctggtgaacaagatcatcaccctgagctaccccagcatcaccatcaacgtgctgggcgccgccgtggtgaaccagcccctgagcatccaggtgatcttcagcaaccccctgagcgagcaggtggaggactgcgtgctgaccgtggagggcagcggcctgttcaagaagcagcagaaggtgttcctgggcgtgctgaagccccagcaccaggccagcatcatcctggagaccgtgcccttcaagagcggccagagacagatccaggccaacatgagaagcaacaagttcaaggacatcaagggctacagaaacgtgtacgtggacttcgccctgtag

SEQ ID NO: 82554 - DNA, 1047 bp, synthetic construct
  misc_feature 1..1047: note = Description of Artificial Sequence: Synthetic coding sequence
  source 1..1047: mol_type = other DNA
atgagcctggtggacctgggcaagaagctgctggaggccgccagagccggccaggacgacgaggtgagaatcctgatggccaacggcgcccccttcaccaccgactggctgggcaccagccccctgcacctggccgcccagtacggccactacagcaccaccgaggtgctgctgagagccggcgtgagcagagacgccagaaccaaggtggacagaacccccctgcacatggccgccagcgagggccacgccagcatcgtggaggtgctgctgaagcacggcgccgacgtgaacgccaaggacatgctgaagatgaccgccctgcactgggccaccgagcacaaccaccaggaggtggtggagctgctgatcaagtacggcgccgacgtgcacacccagagcaagttctgcaagaccgccttcgacatcagcatcgacaacggcaacgaggacctggccgagatcctgcagatcgccatgcagaaccagatcaacaccaaccccgagagccccgacaccgtgaccatccacgccgccaccccccagttcatcatcggccccggcggcgtggtgaacctgaccgacgagaccggcgtgagcgccgtgcagttcggcaacagcagcaccagcgtgctggccaccctggccgccctggccgaggccagcgcccccctgagcaacagcagcgagacccccgtggtggccaccgaggaggtggtgaccgccgagagcgtggacggcgccatccagcaggtggtgagcagcggcggccagcaggtgatcaccatcgtgaccgacggcatccagctgggcaacctgcacagcatccccaccagcggcatcggccagcccatcatcgtgaccatgcccgacggccagcaggtgctgaccgtgcccgccaccgacatcgccgaggagaccgtgatcagcgaggagccccccgccaagagacagtgcatcgagatcatcgagaacagagtggagagcgccgagatcgaggtgagaagcctgctgcccggcgtgctgtgcagaagccaccccaagtag

SEQ ID NO: 82555 - DNA, 1152 bp, synthetic construct
  misc_feature 1..1152: note = Description of Artificial Sequence: Synthetic coding sequence
  source 1..1152: mol_type = other DNA
atgagcctggtggacctgggcaagaagctgctggaggccgccagagccggccaggacgacgaggtgagaatcctgatggccaacggcgcccccttcaccaccgactggctgggcaccagccccctgcacctggccgcccagtacggccactacagcaccaccgaggtgctgctgagagccggcgtgagcagagacgccagaaccaaggtggacagaacccccctgcacatggccgccagcgagggccacgccagcatcgtggaggtgctgctgaagcacggcgccgacgtgaacgccaaggacatgctgaagatgaccgccctgcactgggccaccgagcacaaccaccaggaggtggtggagctgctgatcaagtacggcgccgacgtgcacacccagagcaagttctgcaagaccgccttcgacatcagcatcgacaacggcaacgaggacctggccgagatcctgcagatcgccatgcagaaccagatcaacaccaaccccgagagccccgacaccgtgaccatccacgccgccaccccccagttcatcatcggccccggcggcgtggtgaacctgaccgacgagaccggcgtgagcgccgtgcagttcggcaacagcagcaccagcgtgctggccaccctggccgccctggccgaggccagcgcccccctgagcaacagcagcgagacccccgtggtggccaccgaggaggtggtgaccgccgagagcgtggacggcgccatccagcaggtggtgagcagcggcggccagcaggtgatcaccatcgtgaccgacggcatccagctgggcaacctgcacagcatccccaccagcggcatcggccagcccatcatcgtgaccatgcccgacggccagcaggtgctgaccgtgcccgccaccgacatcgccgaggagaccgtgatcagcgaggagccccccgccaagagacagtgcatcgagatcatcgagaacagagtggagagcgccgagatcgaggagagagaggccctgcagaagcagctggacgaggccaacagagaggcccagaagtacagacagcagctgctgaagaaggagcaggaggccgaggcctacagacagaagctggaggccatgaccagactgcagaccaacaaggaggccgtgtag

SEQ ID NO: 82556 - DNA, 1047 bp, synthetic construct; identical to SEQ ID NO: 82554
  misc_feature 1..1047: note = Description of Artificial Sequence: Synthetic coding sequence
  source 1..1047: mol_type = other DNA

SEQ ID NO: 82557 - DNA, 1083 bp, synthetic construct
  misc_feature 1..1083: note = Description of Artificial Sequence: Synthetic coding sequence
  source 1..1083: mol_type = other DNA
atgagcctggtggacctgggcaagaagctgctggaggccgccagagccggccaggacgacgaggtgagaatcctgatggccaacggcgcccccttcaccaccgactggctgggcaccagccccctgcacctggccgcccagtacggccactacagcaccaccgaggtgctgctgagagccggcgtgagcagagacgccagaaccaaggtggacagaacccccctgcacatggccgccagcgagggccacgccagcatcgtggaggtgctgctgaagcacggcgccgacgtgaacgccaaggacatgctgaagatgaccgccctgcactgggccaccgagcacaaccaccaggaggtggtggagctgctgatcaagtacggcgccgacgtgcacacccagagcaagttctgcaagaccgccttcgacatcagcatcgacaacggcaacgaggacctggccgagatcctgcagatcgccatgcagaaccagatcaacaccaaccccgagagccccgacaccgtgaccatccacgccgccaccccccagttcatcatcggccccggcggcgtggtgaacctgaccggcctggtgagcagcgagaacagcagcaaggccaccgacgagaccggcgtgagcgccgtgcagttcggcaacagcagcaccagcgtgctggccaccctggccgccctggccgaggccagcgcccccctgagcaacagcagcgagacccccgtggtggccaccgaggaggtggtgaccgccgagagcgtggacggcgccatccagcaggtggtgagcagcggcggccagcaggtgatcaccatcgtgaccgacggcatccagctgggcaacctgcacagcatccccaccagcggcatcggccagcccatcatcgtgaccatgcccgacggccagcaggtgctgaccgtgcccgccaccgacatcgccgaggagaccgtgatcagcgaggagccccccgccaagagacagtgcatcgagatcatcgagaacagagtggagagcgccgagatcgaggtgagaagcctgctgcccggcgtgctgtgcagaagccaccccaagtag

SEQ ID NO: 82558 - DNA, 270 bp, synthetic construct
  misc_feature 1..270: note = Description of Artificial Sequence: Synthetic coding sequence
  source 1..270: mol_type = other DNA
atgagcctggtggacctgggcaagaagctgctggaggccgccagagccggccaggacgacgaggtgagaatcctgatggccaacggcgcccccttcaccaccgactggctgggcaccagccccctgcacctggccgcccagtacggccactacagcaccaccgaggtgctgctgagagccggcgtgagcagagacgccagaaccaaggtggacagaacccccctgcacatggccgccagcgagggccacgccagcatcgtggaggtgtag

SEQ ID NO: 82559 - DNA, 270 bp, synthetic construct; identical to SEQ ID NO: 82558
  misc_feature 1..270: note = Description of Artificial Sequence: Synthetic coding sequence
  source 1..270: mol_type = other DNA

SEQ ID NO: 82560 - DNA, 354 bp, synthetic construct
  misc_feature 1..354: note = Description of Artificial Sequence: Synthetic coding sequence
  source 1..354: mol_type = other DNA
atgaagttcgtgtacaaggaggagcaccccttcgagaagagaagaagcgagggcgagaagatcagaaagaagtaccccgacagagtgcccgtgatcgtggagaaggcccccaaggccagaatcggcgacctggacaagaagaagtacctggtgcccagcgacctgaccgtgggccagttctacttcctgatcagaaagagaatccacctgagagccgaggacgccctgttcttcttcgtgaacaacgtgatcccccccaccagcgccaccatgggccagctgtaccaggagcaccacgaggaggacttcttcctgtacatcgcctacagcgacgagagcgtgtacggcctgtag

SEQ ID NO: 82561 - DNA, 354 bp, synthetic construct
  misc_feature 1..354: note = Description of Artificial Sequence: Synthetic coding sequence
  source 1..354: mol_type = other DNA
atgaagttccagtacaaggaggaccaccccttcgagtacagaaagaaggagggcgagaagatcagaaagaagtaccccgacagagtgcccgtgatcgtggagaaggcccccaaggccagagtgcccgacctggacaagagaaagtacctggtgcccagcgacctgaccgtgggccagttctacttcctgatcagaaagagaatccacctgagacccgaggacgccctgttcttcttcgtgaacaacaccatcccccccaccagcgccaccatgggccagctgtacgaggacaaccacgaggaggactacttcctgtacgtggcctacagcgacgagagcgtgtacggcaagtag

SEQ ID NO: 82562 - DNA, 441 bp, synthetic construct
  misc_feature 1..441: note = Description of Artificial Sequence: Synthetic coding sequence
  source 1..441: mol_type = other DNA
atgaagttccagtacaaggaggaccaccccttcgagtacagaaagaaggagggcgagaagatcagaaagaagtaccccgacagagtgcccgtgatcgtggagaaggcccccaaggccagagtgcccgacctggacaagagaaagtacctggtgcccagcgacctgaccgtgggccagttctacttcctgatcagaaagagaatccacctgagacccgaggacgccctgttcttcttcgtgaacaacaccatcccccccaccagcgccaccatgggccagctgtacgaggtgatggtgctggtggcccagtactggatgcccagcagcgccgtgtggcaccccctggccctggtgctggacgccctgatcacccacctgagaagcggcgccgagggcgtgatctaccccgaccccctgacctacggcagcgtgagactgtag

SEQ ID NO: 82563 - DNA, 441 bp, synthetic construct; identical to SEQ ID NO: 82562
  misc_feature 1..441: note = Description of Artificial Sequence: Synthetic coding sequence
  source 1..441: mol_type = other DNA

SEQ ID NO: 82564 - DNA, 213 bp, synthetic construct
  misc_feature 1..213: note = Description of Artificial Sequence: Synthetic coding sequence
  source 1..213: mol_type = other DNA
atgaagttccagtacaaggaggaccaccccttcgagtacagaaagaaggagggcgagaagatcagaaagaagtaccccgacagagtgcccgtgatcgtggagaaggcccccaaggccagagtgcccgacctggacaagagaaagtacctggtgcccagcgacctgaccgtgggccagttctacttcctgatcagaaagagaatccacctgtag

SEQ ID NO: 82565 - DNA, 354 bp, synthetic construct; identical to SEQ ID NO: 82561
  misc_feature 1..354: note = Description of Artificial Sequence: Synthetic coding sequence
  source 1..354: mol_type = other DNA

SEQ ID NO: 82566 - DNA, 354 bp, synthetic construct
  misc_feature 1..354: note = Description of Artificial Sequence: Synthetic coding sequence
  source 1..354: mol_type = other DNA
atgaagtggatgttcaaggaggaccacagcctggagcacagatgcgtggagagcgccaagatcagagccaagtaccccgacagagtgcccgtgatcgtggagaaggtgagcggcagccagatcgtggacatcgacaagagaaagtacctggtgcccagcgacatcaccgtggcccagttcatgtggatcatcagaaagagaatccagctgcccagcgagaaggccatcttcctgttcgtggacaagaccgtgccccagagcagcctgaccatgggccagctgtacgagaaggagaaggacgaggacggcttcctgtacgtggcctacagcggcgagaacaccttcggcttctag

SEQ ID NO: 82567 - DNA, 1344 bp, synthetic construct
  misc_feature 1..1344: note = Description of Artificial Sequence: Synthetic coding sequence
  source 1..1344: mol_type = other DNA
atgcccgtgctgtacgacagactgctgaagctgaaggagatgttcaacagcaagttcggcagcatccccaagttctacgtgagagcccccggcagagtgaacatcatcggcgagcacatcgactactgcggctacagcgtgctgcccatggccgtggagcaggacgtgctgatcgccgtggagcccgtgaagacctacgccctgcagctggccaacaccaaccccctgtaccccgacttcagcaccagcgccaacaacatccagatcgacaagaccaagcccctgtggcacaactacttcctgtgcggcctgaagggcatccaggagcacttcggcctgagcaacctgaccggcatgaactgcctggtggacggcaacatcccccccagcagcggcctgagcagcagcagcgccctggtgtgctgcgccggcctggtgaccctgaccgtgctgggcagaaacctgagcaaggtggagctggccgagatctgcgccaagagcgagagatacatcggcaccgagggcggcggcatggaccagagcatcagcttcctggccgaggagggcaccgccaagctgatcgagttcagccccctgagagccaccgacgtgaagctgcccagcggcgccgtgttcgtgatcgccaacagctgcgtggagatgaacaaggccgccaccagccacttcaacatcagagtgatggagtgcagactggccgccaagctgctggccaagtacaagagcctgcagtgggacaaggtgctgagactggaggaggtgcaggccaagctgggcatcagcctggaggagatgctgctggtgaccgaggacgccctgcaccccgagccctacaaccccgaggagatctgcagatgcctgggcatcagcctggaggagctgagaacccagatcctgagccccaacacccaggacgtgctgatcttcaagctgtaccagagagccaagcacgtgtacagcgaggccgccagagtgctgcagttcaagaagatctgcgaggaggcccccgagaacatggtgcagctgctgggcgagctgatgaaccagagccacatgagctgcagagacatgtacgagtgcagctgccccgagctggaccagctggtggacatctgcagaaagttcggcgcccagggcagcagactgaccggcgccggctggggcggctgcaccgtgagcatggtgcccgccgacaagctgcccagcttcctggccaacgtgcacaaggcctactaccagagaagcgacggcagcctggcccccgagaagcagagcctgttcgccaccaagcccggcggcggcgccctggtgctgctggaggcctag

SEQ ID NO: 82568 - DNA, 1305 bp, synthetic construct
  misc_feature 1..1305: note = Description of Artificial Sequence: Synthetic coding sequence
  source 1..1305: mol_type = other DNA
atgttcaacagcaagttcggcagcatccccaagttctacgtgagagcccccggcagagtgaacatcatcggcgagcacatcgactactgcggctacagcgtgctgcccatggccgtggagcaggacgtgctgatcgccgtggagcccgtgaagacctacgccctgcagctggccaacaccaaccccctgtaccccgacttcagcaccagcgccaacaacatccagatcgacaagaccaagcccctgtggcacaactacttcctgtgcggcctgaagggcatccaggagcacttcggcctgagcaacctgaccggcatgaactgcctggtggacggcaacatcccccccagcagcggcctgagcagcagcagcgccctggtgtgctgcgccggcctggtgaccctgaccgtgctgggcagaaacctgagcaaggtggagctggccgagatctgcgccaagagcgagagatacatcggcaccgagggcggcggcatggaccagagcatcagcttcctggccgaggagggcaccgccaagctgatcgagttcagccccctgagagccaccgacgtgaagctgcccagcggcgccgtgttcgtgatcgccaacagctgcgtggagatgaacaaggccgccaccagccacttcaacatcagagtgatggagtgcagactggccgccaagctgctggccaagtacaagagcctgcagtgggacaaggtgctgagactggaggaggtgcaggccaagctgggcatcagcctggaggagatgctgctggtgaccgaggacgccctgcaccccgagccctacaaccccgaggagatctgcagatgcctgggcatcagcctggaggagctgagaacccagatcctgagccccaacacccaggacgtgctgatcttcaagctgtaccagagagccaagcacgtgtacagcgaggccgccagagtgctgcagttcaagaagatctgcgaggaggcccccgagaacatggtgcagctgctgggcgagctgatgaaccagagccacatgagctgcagagacatgtacgagtgcagctgccccgagctggaccagctggtggacatctgcagaaagttcggcgcccagggcagcagactgaccggcgccggctggggcggctgcaccgtgagcatggtgcccgccgacaagctgcccagcttcctggccaacgtgcacaaggcctactaccagagaagcgacggcagcctggcccccgagaagcagagcctgttcgccaccaagcccggcggcggcgccctggtgctgctggaggcctag

SEQ ID NO: 82569 - DNA, 624 bp, synthetic construct
  misc_feature 1..624: note = Description of Artificial Sequence: Synthetic coding sequence
  source 1..624: mol_type = other DNA
atgaactgcctggtggacggcaacatcccccccagcagcggcctgagcagcagcagcgccctggtgtgctgcgccggcctggtgaccctgaccgtgctgggcagaaacctgagcaaggtggagctggccgagatctgcgccaagagcgagagatacatcggcaccgagggcggcggcatggaccagagcatcagcttcctggccgaggagggcaccgccaagctgatcgagttcagccccctgagagccaccgacgtgaagctgcccagcggcgccgtgttcgtgatcgccaacagctgcgtggagatgaacaaggccgccaccagccacttcaacatcagagtgatggagtgcagactggccgccaagctgctggccaagtacaagagcctgcagtgggacaaggtgctgagactggaggaggtgcaggccaagctgggcatcagcctggaggagatgctgctggtgaccgaggacgccctgcaccccgagccctacaaccccgaggagatctgcagatgcctgggcatcagcctggaggagctgagaacccagatcctgagccccaacacccaggacgacggcgtggtgctgtacagacccggctggagcgccaccgcctag

SEQ ID NO: 82570 - DNA, 1305 bp, synthetic construct; identical to SEQ ID NO: 82568
  misc_feature 1..1305: note = Description of Artificial Sequence: Synthetic coding sequence
  source 1..1305: mol_type = other DNA

SEQ ID NO: 82571 - DNA, 1305 bp, synthetic construct; identical to SEQ ID NO: 82568
  misc_feature 1..1305: note = Description of Artificial Sequence: Synthetic coding sequence
  source 1..1305: mol_type = other DNA

SEQ ID NO: 82572 - DNA, 1377 bp, synthetic construct
  misc_feature 1..1377: note = Description of Artificial Sequence: Synthetic coding sequence
  source 1..1377: mol_type = other DNA
atggccaccgagagccccgccaccagaagagtgcaggtggccgagcaccccagactgctgaagctgaaggagatgttcaacagcaagttcggcagcatccccaagttctacgtgagagcccccggcagagtgaacatcatcggcgagcacatcgactactgcggctacagcgtgctgcccatggccgtggagcaggacgtgctgatcgccgtggagcccgtgaagacctacgccctgcagctggccaacaccaaccccctgtaccccgacttcagcaccagcgccaacaacatccagatcgacaagaccaagcccctgtggcacaactacttcctgtgcggcctgaagggcatccaggagcacttcggcctgagcaacctgaccggcatgaactgcctggtggacggcaacatcccccccagcagcggcctgagcagcagcagcgccctggtgtgctgcgccggcctggtgaccctgaccgtgctgggcagaaacctgagcaaggtggagctggccgagatctgcgccaagagcgagagatacatcggcaccgagggcggcggcatggaccagagcatcagcttcctggccgaggagggcaccgccaagctgatcgagttcagccccctgagagccaccgacgtgaagctgcccagcggcgccgtgttcgtgatcgccaacagctgcgtggagatgaacaaggccgccaccagccacttcaacatcagagtgatggagtgcagactggccgccaagctgctggccaagtacaagagcctgcagtgggacaaggtgctgagactggaggaggtgcaggccaagctgggcatcagcctggaggagatgctgctggtgaccgaggacgccctgcaccccgagccctacaaccccgaggagatctgcagatgcctgggcatcagcctggaggagctgagaacccagatcctgagccccaacacccaggacgtgctgatcttcaagctgtaccagagagccaagcacgtgtacagcgaggccgccagagtgctgcagttcaagaagatctgcgaggaggcccccgagaacatggtgcagctgctgggcgagctgatgaaccagagccacatgagctgcagagacatgtacgagtgcagctgccccgagctggaccagctggtggacatctgcagaaagttcggcgcccagggcagcagactgaccggcgccggctggggcggctgcaccgtgagcatggtgcccgccgacaagctgcccagcttcctggccaacgtgcacaaggcctactaccagagaagcgacggcagcctggcccccgagaagcagagcctgttcgccaccaagcccggcggcggcgccctggtgctgctggaggcctag

SEQ ID NO: 82573 - DNA, 1272 bp, synthetic construct
  misc_feature 1..1272: note = Description of Artificial Sequence: Synthetic coding sequence
  source 1..1272: mol_type = other DNA
atgctgcccccccagaagaagccctgggagagcatggccaagggcctggtgctgggcgccctgttcaccagcttcctgctgctggtgtacagctacgccgtgccccccctgcacgccggcctggccagcaccacccccgaggccgccgccagctgcagcccccccgccctggagcccgaggccgtgatcagagccaacggcagcgccggcgagtgccagcccagaagaaacatcgtgttcctgaagacccacaagaccgccagcagcaccctgctgaacatcctgttcagattcggccagaagcacagactgaagttcgccttccccaacggcagaaacgacttcgactaccccaccttcttcgccagaagcctggtgcaggactacagacccggcgcctgcttcaacatcatctgcaaccacatgagattccactacgacgaggtgagaggcctggtgcccaccaacgccatcttcatcaccgtgctgagagaccccgccagactgttcgagagcagcttccactacttcggccccgtggtgcccctgacctggaagctgagcgccggcgacaagctgaccgagttcctgcaggaccccgacagatactacgaccccaacggcttcaacgcccactacctgagaaacctgctgttcttcgacctgggctacgacaacagcctggaccccagcagcccccaggtgcaggagcacatcctggaggtggagagaagattccacctggtgctgctgcaggagtacttcgacgagagcctggtgctgctgaaggacctgctgtgctgggagctggaggacgtgctgtacttcaagctgaacgccagaagagacagccccgtgcccagactgagcggcgagctgtacggcagagccaccgcctggaacatgctggacagccacctgtacagacacttcaacgccagcttctggagaaaggtggaggccttcggcagagagagaatggccagagaggtggccgccctgagacacgccaacgagagaatgagaaccatctgcatcgacggcggccacgccgtggacgccgccgccatccaggacgaggccatgcagccctggcagcccctgggcaccaagagcatcctgggctacaacctgaagaagagcatcggccagagacacgcccagctgtgcagaagaatgctgacccccgagatccagtacctgatggacctgggcgccaacctgtgggtgaccaagctgtggaagttcatcagagacttcctgagatggtag

SEQ ID NO: 82574 - DNA, 1272 bp, synthetic construct; identical to SEQ ID NO: 82573
  misc_feature 1..1272: note = Description of Artificial Sequence: Synthetic coding sequence
  source 1..1272: mol_type = other DNA

SEQ ID NO: 82575 - DNA, 1272 bp, synthetic construct; identical to SEQ ID NO: 82573
  misc_feature 1..1272: note = Description of Artificial Sequence: Synthetic coding sequence
  source 1..1272: mol_type = other DNA

SEQ ID NO: 82576 - DNA, 1272 bp, synthetic construct; identical to SEQ ID NO: 82573
  misc_feature 1..1272: note = Description of Artificial Sequence: Synthetic coding sequence
  source 1..1272: mol_type = other DNA

SEQ ID NO: 82577 - DNA, 1272 bp, synthetic construct; identical to SEQ ID NO: 82573
  misc_feature 1..1272: note = Description of Artificial Sequence: Synthetic coding sequence
  source 1..1272: mol_type = other DNA

SEQ ID NO: 82578 - DNA, 1272 bp, synthetic construct; identical to SEQ ID NO: 82573
  misc_feature 1..1272: note = Description of Artificial Sequence: Synthetic coding sequence
  source 1..1272: mol_type = other DNA

SEQ ID NO: 82579 - DNA, 258 bp, synthetic construct
  misc_feature 1..258: note = Description of Artificial Sequence: Synthetic coding sequence
  source 1..258: mol_type = other DNA
atgctgcccccccagaagaagccctgggagagcatggccaagggcctggtgctgggcgccctgttcaccagcttcctgctgctggtgtacagctacgccgtgccccccctgcacgccggcctggccagcaccacccccgaggccgccgccagctgcagcccccccgccctggagcccgaggccgtgatcagagccaacggcagcgccggcgagtgccagcccagaagaaacatcgtgttcctgaagacccacaagtag

SEQ ID NO: 82580 - DNA, 513 bp, synthetic construct
  misc_feature 1..513: note = Description of Artificial Sequence: Synthetic coding sequence
  source 1..513: mol_type = other DNA
atgctgcccccccagaagaagccctgggagagcatggccaagggcctggtgctgggcgccctgttcaccagcttcctgctgctggtgtacagctacgccgtgccccccctgcacgccggcctggccagcaccacccccgaggccgccgccagctgcagcccccccgccctggagcccgaggccgtgatcagagccaacggcagcgccggcgagtgccagcccagaagaaacatcgtgttcctgaagacccacaagaccgccagcagcaccctgctgaacatcctgttcagattcggccagaagcacagactgaagttcgccttccccaacggcagaaacgacttcgactaccccaccttcttcgccagaagcctggtgcaggactacagacccggcgcctgcttcaacatcatctgcaaccacatgagattccactacgacgaggtgagaggcctggtgcccaccaacgccatcttcatcaccgtgctgagagaccccgccagactgttctag

SEQ ID NO: 82581 - DNA, 450 bp, synthetic construct
  misc_feature 1..450: note = Description of Artificial Sequence: Synthetic coding sequence
  source 1..450: mol_type = other DNA
atgctgcccccccagaagaagccctgggagagcatggccaagggcctggtgctgggcgccctgttcaccagcttcctgctgctggtgtacagctacgccgtgccccccctgcacgccggcctggccagcaccacccccgaggccgccgccagctgcagcccccccgccctggagcccgaggccgtgatcagagccaacggcagcgccggcgagtgccagcccagaagaaacatcgtgttcctgaagacccacaagaccgccagcagcaccctgctgaacatcctgttcagattcggccagaagcacagactgaagttcgccttccccaacggcagaaacgacttcgactaccccaccttcttcgccagaagcctggtgcaggactacagacccggcgcctgcttcaacatcatctgcaaccacatgagattccactacgacgaggtgtag

SEQ ID NO: 82582 - DNA, 300 bp, synthetic construct
  misc_feature 1..300: note = Description of Artificial Sequence: Synthetic coding sequence
  source 1..300: mol_type = other DNA
atgctgcccccccagaagaagccctgggagagcatggccaagggcctggtgctgggcgccctgttcaccagcttcctgctgctggtgtacagctacgccgtgccccccctgcacgccggcctggccagcaccacccccgaggccgccgccagctgcagcccccccgccctggagcccgaggccgtgatcagagccaacggcagcgccggcgagtgccagcccagaagaaacatcgtgttcctgaagacccacaagaccgccagcagcaccctgctgaacatcctgttcagattcggctag

SEQ ID NO: 82583 - DNA, 312 bp, synthetic construct
  misc_feature 1..312: note = Description of Artificial Sequence: Synthetic coding sequence
  source 1..312: mol_type = other DNA
atgctgcccccccagaagaagccctgggagagcatggccaagggcctggtgctgggcgccctgttcaccagcttcctgctgctggtgtacagctacgccgtgccccccctgcacgccggcctggccagcaccacccccgaggccgccgccagctgcagcccccccgccctggagcccgaggccgtgatcagagccaacggcagcgccggcgagtgccagcccagaagaaacatcgtgttcctgaagacccacaagaccgccagcagcaccctgctgaacatcctgttcagattcggccagaagcacagatag

SEQ ID NO: 82584 - DNA, 600 bp, synthetic construct
  misc_feature 1..600: note = Description of Artificial Sequence: Synthetic coding sequence
  source 1..600: mol_type = other DNA
atgctgcccccccagaagaagccctgggagagcatggccaagggcctggtgctgggcgccctgttcaccagcttcctgctgctggtgtacagctacgccgtgccccccctgcacgccggcctggccagcaccacccccgaggccgccgccagctgcagcccccccgccctggagcccgaggccgtgatcagagccaacggcagcgccggcgagtgccagcccagaagaaacatcgtgttcctgaagacccacaagaccgccagcagcaccctgctgaacatcctgttcagattcggccagaagcacagactgaagttcgccttccccaacggcagaaacgacttcgactaccccaccttcttcgccagaagcctggtgcaggactacagacccggcgcctgcttcaacatcatctgcaaccacatgagattccactacgacgaggtgagaggcctggtgcccaccaacgccatcttcatcaccgtgctgagagaccccgccagactgttcgagagcagcttccactacttcggccccgtggtgcccctgacctggaagctgagcgccggcgacaagctgaccgagttcctgcaggactag

SEQ ID NO: 82585 - DNA, 840 bp, synthetic construct
  misc_feature 1..840: note = Description of Artificial Sequence: Synthetic coding sequence
  source 1..840: mol_type = other DNA
atgctgcccccccagaagaagccctgggagagcatggccaagggcctggtgctgggcgccctgttcaccagcttcctgctgctggtgtacagctacgccgtgccccccctgcacgccggcctggccagcaccacccccgaggccgccgccagctgcagcccccccgccctggagcccgaggccgtgatcagagccaacggcagcgccggcgagtgccagcccagaagaaacatcgtgttcctgaagacccacaagaccgccagcagcaccctgctgaacatcctgttcagattcggccagaagcacagactgaagttcgccttccccaacggcagaaacgacttcgactaccccaccttcttcgccagaagcctggtgcaggactacagacccggcgcctgcttcaacatcatctgcaaccacatgagattccactacgacgaggtgagaggcctggtgcccaccaacgccatcttcatcaccgtgctgagagaccccgccagactgttcgagagcagcttccactacttcggccccgtggtgcccctgacctggaagctgagcgccggcgacaagctgaccgagttcctgcaggaccccgacagatactacgaccccaacggcttcaacgcccactacctgagaaacctgctgttcttcgacctgggctacgacaacagcctggaccccagcagcccccaggtgcaggagcacatcctggaggtggagagaagattccacctggtgctgctgcaggagtacttcgacgagagcctggtgctgctgaaggacctgctgtgctgggagctggaggacgtgctgtacttcaagctgaactag

SEQ ID NO: 82586 - DNA, 1272 bp, synthetic construct; identical to SEQ ID NO: 82573
  misc_feature 1..1272: note = Description of Artificial Sequence: Synthetic coding sequence
  source 1..1272: mol_type = other DNA

SEQ ID NO: 82587 - DNA, 432 bp, synthetic construct
  misc_feature 1..432: note = Description of Artificial Sequence: Synthetic coding sequence
  source 1..432: mol_type = other DNA
atgctgcccccccagaagaagccctgggagagcatggccaagggcctggtgctgggcgccctgttcaccagcttcctgctgctggtgtacagctacgccgtgccccccctgcacgccggcctggccagcaccacccccgaggccgccgccagctgcagcccccccgccctggagcccgaggccgtgatcagagccaacggcagcgccggcgagtgccagcccagaagaaacatcgtgttcctgaagacccacaagaccgccagcagcaccctgctgaacatcctgttcagattcggccagaagcacagactgaagttcgccttccccaacggcagaaacgacttcgactaccccaccttcttcgccagaagcctggtgcaggactacagacccggcgcctgcttcaacatcatctgcaaccacatgagatag

SEQ ID NO: 82588 - DNA, 231 bp, synthetic construct
  misc_feature 1..231: note = Description of Artificial Sequence: Synthetic coding sequence
  source 1..231: mol_type = other DNA
atgctgcccccccagaagaagccctgggagagcatggccaagggcctggtgctgggcgccctgttcaccagcttcctgctgctggtgtacagctacgccgtgccccccctgcacgccggcctggccagcaccacccccgaggccgccgccagctgcagcccccccgccctggagcccgaggccgtgatcagagccaacggcagcgccggcgagtgccagcccagaagatag

SEQ ID NO: 82589 - DNA, 288 bp, synthetic construct
  misc_feature 1..288: note = Description of Artificial Sequence: Synthetic coding sequence
  source 1..288: mol_type = other DNA
atgctgcccccccagaagaagccctgggagagcatggccaagggcctggtgctgggcgccctgttcaccagcttcctgctgctggtgtacagctacgccgtgccccccctgcacgccggcctggccagcaccacccccgaggccgccgccagctgcagcccccccgccctggagcccgaggccgtgatcagagccaacggcagcgccggcgagtgccagcccagaagaaacatcgtgttcctgaagacccacaagaccgccagcagcaccctgctgaacatcctgtag

SEQ ID NO: 82590 - DNA, 216 bp, synthetic construct
  misc_feature 1..216: note = Description of Artificial Sequence: Synthetic coding sequence
  source 1..216: mol_type = other DNA
atgctgcccccccagaagaagccctgggagagcatggccaagggcctggtgctgggcgccctgttcaccagcttcctgctgctggtgtacagctacgccgtgccccccctgcacgccggcctggccagcaccacccccgaggccgccgccagctgcagcccccccgccctggagcccgaggccgtgatcagagccaacggcagcgccggcgagtag

SEQ ID NO: 82591 - DNA, 729 bp, synthetic construct
  misc_feature 1..729: note = Description of Artificial Sequence: Synthetic coding sequence
  source 1..729: mol_type = other DNA
atgctgcccccccagaagaagccctgggagagcatggccaagggcctggtgctgggcgccctgttcaccagcttcctgctgctggtgtacagctacgccgtgccccccctgcacgccggcctggccagcaccacccccgaggccgccgccagctgcagcccccccgccctggagcccgaggccgtgatcagagccaacggcagcgccggcgagtgccagcccagaagaaacatcgtgttcctgaagacccacaagaccgccagcagcaccctgctgaacatcctgttcagattcggccagaagcacagactgaagttcgccttccccaacggcagaaacgacttcgactaccccaccttcttcgccagaagcctggtgcaggactacagacccggcgcctgcttcaacatcatctgcaaccacatgagattccactacgacgaggtgagaggcctggtgcccaccaacgccatcttcatcaccgtgctgagagaccccgccagactgttcgagagcagcttccactacttcggccccgtggtgcccctgacctggaagctgagcgccggcgacaagctgaccgagttcctgcaggaccccgacagatactacgaccccaacggcttcaacgcccactacctgagaaacctgctgttcttcgacctgggctacgacaacagcctggaccccagcagcccccaggtgcaggagcacatcctggaggtgtag

SEQ ID NO: 82592 - DNA, 303 bp, synthetic construct
  misc_feature 1..303: note = Description of Artificial Sequence: Synthetic coding sequence
  source 1..303: mol_type = other DNA
atgctgcccccccagaagaagccctgggagagcatggccaagggcctggtgctgggcgccctgttcaccagcttcctgctgctggtgtacagctacgccgtgccccccctgcacgccggcctggccagcaccacccccgaggccgccgccagctgcagcccccccgccctggagcccgaggccgtgatcagagccaacggcagcgccggcgagtgccagcccagaagaaacatcgtgttcctgaagacccacaagaccgccagcagcaccctgctgaacatcctgttcagattcggccagtag

SEQ ID NO: 82593 - DNA, 1197 bp, synthetic construct
  misc_feature 1..1197: note = Description of Artificial Sequence: Synthetic coding sequence
  source 1..1197: mol_type = other DNA
atgatgagcatgctgggcggcctgcagagatacttcagagtgatcctgctgctgctgctggccctgaccctgctgctgctggccggcttcctgcacagcgacctggagctggacacccccctgttcggcggccaggccgagggcccccccgtgaccaacatcatgttcctgaagacccacaagaccgccagcagcaccgtgctgaacatcctgtacagattcgccgagacccacaacctgagcgtggccctgcccgccggcagcagagtgcacctgggctacccctggctgttcctggccagatacgtggagggcgtgggcagccagcagagattcaacatcatgtgcaaccacctgagattcaacctgccccaggtgcagaaggtgatgcccaacgacaccttctacttcagcatcctgagaaaccccgtgttccagctggagagcagcttcatctactacaagacctacgcccccgccttcagaggcgcccccagcctggacgccttcctggccagccccagaaccttctacaacgacagcagacacctgagaaacgtgtacgccaagaacaacatgtggttcgacttcggcttcgaccccaacgcccagtgcgaggagggctacgtgagagccagaatcgccgaggtggagagaagattcagactggtgctgatcgccgagcacctggacgagagcctggtgctgctgagaagaagactgagatgggccctggacgacgtggtggccttcagactgaacagcagaagcgccagaagcgtggccagactgagccccgagaccagagagagagccagaagctggtgcgccctggactggagactgtacgagcacttcaacagaaccctgtgggcccagctgagagccgagctgggccccagaagactgagaggcgaggtggagagactgagagccagaagaagagagctggccagcctgtgcctgcaggacggcggcgccctgaagaaccacacccagatcagagaccccagactgagaccctaccagagcggcaaggccgacatcctgggctacaacctgagacccggcctggacaaccagaccctgggcgtgtgccagagactggtgatgcccgagctgcagtacatggccagactgtacgccctgcagttccccgagaagcccctgaagaacatccccttcctgggcgcctag

SEQ ID NO: 82594 - DNA, 1296 bp, synthetic construct
  misc_feature 1..1296: note = Description of Artificial Sequence: Synthetic coding sequence
  source 1..1296: mol_type = other DNA
atgccccccatcctgcagagactgcagcaggccaccaagatgatgagcagaagaaagatcctgctgctggtgctgggctgcagcaccgtgagcctgctgatccaccagggcgcccagctgagctggtaccccaagctgttccccctgagctgcccccccctgagaaacagcccccccagacccaagcacatgaccgtggccttcctgaagacccacaagaccgccggcaccaccgtgcagaacatcctgttcagattcgccgagagacacaacctgaccgtggccctgccccaccccagctgcgagcaccagttctgctaccccagaaacttcagcgcccacttcgtgcaccccgccaccagacccccccacgtgctggccagccacctgagattcgacagagccgagctggagagactgatgccccccagcaccgtgtacgtgaccatcctgagagagcccgccgccatgttcgagagcctgttcagctactacaaccagtactgccccgccttcagaagagtgcccaacgccagcctggaggccttcctgagagcccccgaggcctactacagagccggcgagcacttcgccatgttcgcccacaacaccctggcctacgacctgggcggcgacaacgagagaagccccagagacgacgccgcctacctggccggcctgatcagacaggtggaggaggtgttcagcctggtgatgatcgccgagtacttcgacgagagcctggtgctgctgagaagactgctggcctgggacctggacgacgtgctgtacgccaagctgaacgccagagccgccagcagcagactggccgccatccccgccgccctggccagagccgccagaacctggaacgccctggacgccggcctgtacgaccacttcaacgccaccttctggagacacgtggccagagccggcagagcctgcgtggagagagaggccagagagctgagagaggccagacagagactgctgagaagatgcttcggcgacgagcccctgctgagacccgccgcccagatcagaaccaagcagctgcagccctggcagcccagcagaaaggtggacatcatgggctacgacctgcccggcggcggcgccggccccgccaccgaggcctgcctgaagctggccatgcccgaggtgcagtacagcaactacctgctgagaaagcagaagagaagaggcggcgccagagccagacccgagcccgtgctggacaaccccccccccagacccatcagagtgctgcccagaggcccccagggcccctag

SEQ ID NO: 82595 - DNA, 1296 bp, synthetic construct; identical to SEQ ID NO: 82594
  misc_feature 1..1296: note = Description of Artificial Sequence: Synthetic coding sequence
  source 1..1296: mol_type = other DNA

SEQ ID NO: 82596 - DNA, 1461 bp, synthetic construct
  misc_feature 1..1461: note = Description of Artificial Sequence: Synthetic coding sequence
  source 1..1461: mol_type = other DNA
atgggccccctgagccccgccagaaccctgagactgtggggccccagaagcctgggcgtggccctgggcgtgttcatgaccatcggcttcgccctgcagctgctgggcggccccttccagagaagactgcccggcctgcagctgagacagcccagcgcccccagcctgagacccgccctgcccagctgcccccccagacagagactggtgttcctgaagacccacaagagcggcagcagcagcgtgctgagcctgctgcacagatacggcgaccagcacggcctgagattcgccctgcccgccagataccagttcggctaccccaagctgttccaggccagcagagtgaagggctacagaccccagggcggcggcacccagctgcccttccacatcctgtgccaccacatgagattcaacctgaaggaggtgctgcaggtgatgcccagcgacagcttcttcttcagcatcgtgagagaccccgccgccctggccagaagcgccttcagctactacaagagcaccagcagcgccttcagaaagagccccagcctggccgccttcctggccaaccccagaggcttctacagacccggcgccagaggcgaccactacgccagaaacctgctgtggttcgacttcggcctgcccttcccccccgagaagagagccaagagaggcaacatccacccccccagagaccccaaccccccccagctgcaggtgctgcccagcggcgccggccccagagcccagaccctgaaccccaacgccctgatccaccccgtgagcaccgtgaccgaccacagaagccagatcagcagccccgccagcttcgacctgggcagcagcagcttcatccagtggggcctggcctggctggacagcgtgttcgacctggtgatggtggccgagtacttcgacgagagcctggtgctgctggccgacgccctgtgctggggcctggacgacgtggtgggcttcatgcacaacgcccaggccggccacaagcagggcctgagcaccgtgagcaacagcggcctgaccgccgaggacagacagctgaccgccagagccagagcctggaacaacctggactgggccctgtacgtgcacttcaacagaagcctgtgggccagaatcgagaagtacggccagggcagactgcagaccgccgtggccgagctgagagccagaagagaggccctggccaagcactgcctggtgggcggcgaggccagcgaccccaagtacatcaccgacagaagattcagacccttccagttcggcagcgccaaggtgctgggctacatcctgagaagcggcctgagcccccaggaccaggaggagtgcgagagactggccacccccgagctgcagtacaaggacaagctggacgccaagcagttcccccccaccgtgagcctgcccctgaagaccagcagacccctgagcccctag

SEQ ID NO: 82597 - DNA, 1461 bp, synthetic construct; identical to SEQ ID NO: 82596
  misc_feature 1..1461: note = Description of Artificial Sequence: Synthetic coding sequence
  source 1..1461: mol_type = other DNA

SEQ ID NO: 82598 - DNA, 1275 bp, synthetic construct
  misc_feature 1..1275: note = Description of Artificial Sequence: Synthetic coding sequence
  source 1..1275: mol_type = other DNA
atgacccccagaagccccaccagcgccttcagaagctgcaccgccgtgagcagctgcctgtgccccagcagctggccctggctgcacctgagcgtgaccagccccttccccgtgccccacggccccagcctgagctgccaggacgccgccgccctgggcaccagcgagcccggcggcggcagcggcagcctgcacgaccactggctgtgcacccccgccctgggcagagccctgcccgaggaggtgctgcaggtgatgcccagcgacagcttcttcttcagcatcgtgagagaccccgccgccctggccagaagcgccttcagctactacaagagcaccagcagcgccttcagaaagagccccagcctggccgccttcctggccaaccccagaggcttctacagacccggcgccagaggcgaccactacgccagaaacctgctgtggttcgacttcggcctgcccttcccccccgagaagagagccaagagaggcaacatccacccccccagagaccccaaccccccccagctgcaggtgctgcccagcggcgccggccccagagcccagaccctgaaccccaacgccctgatccaccccgtgagcaccgtgaccgaccacagaagccagatcagcagccccgccagcttcgacctgggcagcagcagcttcatccagtggggcctggcctggctggacagcgtgttcgacctggtgatggtggccgagtacttcgacgagagcctggtgctgctggccgacgccctgtgctggggcctggacgacgtggtgggcttcatgcacaacgcccaggccggccacaagcagggcctgagcaccgtgagcaacagcggcctgaccgccgaggacagacagctgaccgccagagccagagcctggaacaacctggactgggccctgtacgtgcacttcaacagaagcctgtgggccagaatcgagaagtacggccagggcagactgcagaccgccgtggccgagctgagagccagaagagaggccctggccaagcactgcctggtgggcggcgaggccagcgaccccaagtacatcaccgacagaagattcagacccttccagttcggcagcgccaaggtgctgggctacatcctgagaagcggcctgagcccccaggaccaggaggagtgcgagagactggccacccccgagctgcagtacaaggacaagctggacgccaagcagttcccccccaccgtgagcctgcccctgaagaccagcagacccctgagcccctag

SEQ ID NO: 82599 - DNA, 1641 bp, synthetic construct
  misc_feature 1..1641: note = Description of Artificial Sequence: Synthetic coding sequence
  source 1..1641: mol_type = other DNA
atgcccggcttcctggtgagaatcctgcccctgctgctggtgctgctgctgctgggccccaccagaggcctgagaaacgccacccagagaatgttcgagatcgactacagcagagacagcttcctgaaggacggccagcccttcagatacatcagcggcagcatccactacagcagagtgcccagattctactggaaggacagactgctgaagatgaagatggccggcctgaacgccatccagaccctgcccggcagctgcggccaggtggtgggcagccccagcgcccaggacgaggccagccccctgagcgagtggagagccagctacaacagcgccggcagcaacatcaccgacgccttcctgagccagagaaagtgcgagcccaagggccccctgatcaacagcgagttctacaccggctggctggaccactggggccagccccacagcaccatcaagaccgaggccgtggccagcagcctgtacgacatcctggccagaggcgccagcgtgaacctgtacatgttcatcggcggcaccaacttcgcctactggaacggcgccaacagcccctacgccgcccagcccaccagctacgactacgacgcccccctgagcgaggccggcgacctgaccgagaagtacttcgccctgagaaacatcatccagaagttcgagaaggtgcccgagggccccatcccccccagcacccccaagttcgcctacggcaaggtgaccctggagaagctgaagaccgtgggcgccgccctggacatcctgtgccccagcggccccatcaagagcctgtaccccctgaccttcatccaggtgaagcagcactacggcttcgtgctgtacagaaccaccctgccccaggactgcagcaaccccgcccccctgagcagccccctgaacggcgtgcacgacagagcctacgtggccgtggacggcatcccccagggcgtgctggagagaaacaacgtgatcaccctgaacatcaccggcaaggccggcgccaccctggacctgctggtggagaacatgggcagagtgaactacggcgcctacatcaacgacttcaagggcctggtgagcaacctgaccctgagcagcaacatcctgaccgactggaccatcttccccctggacaccgaggacgccgtgtgcagccacctgggcggctggggccacagagacagcggccaccacgacgaggcctgggcccacaacagcagcaactacaccctgcccgccttctacatgggcaacttcagcatccccagcggcatccccgacctgccccaggacaccttcatccagttccccggctggaccaagggccaggtgtggatcaacggcttcaacctgggcagatactggcccgccagaggcccccagctgaccctgttcgtgccccagcacatcctgatgaccagcgcccccaacaccatcaccgtgctggagctggagtgggccccctgcagcagcgacgaccccgagctgtgcgccgtgaccttcgtggacagacccgtgatcggcagcagcgtgacctacgaccaccccagcaagcccgtggagaagagactgatgcccccccccccccagaagaacaaggacagctggctggaccacgtgtag

SEQ ID NO: 82600 - DNA, 1944 bp, synthetic construct
  misc_feature 1..1944: note = Description of Artificial Sequence: Synthetic coding sequence
  source 1..1944: mol_type = other DNA
atgttcgagatcgactacagcagagacagcttcctgaaggacggccagcccttcagatacatcagcggcagcatccactacagcagagtgcccagattctactggaaggacagactgctgaagatgaagatggccggcctgaacgccatccagacctacgtgccctggaacttccacgagccctggcccggccagtaccagttcagcgaggaccacgacgtggagtacttcctgagactggcccacgagctgggcctgctggtgatcctgagacccggcccctacatctgcgccgagtgggagatgggcggcctgcccgcctggctgctggagaaggagagcatcctgctgagaagcagcgaccccgactacctggccgccgtggacaagtggctgggcgtgctgctgcccaagatgaagcccctgctgtaccagaacggcggccccgtgatcaccgtgcaggtggagaacgagtacggcagctacttcgcctgcgacttcgactacctgagattcctgcagaagagattcagacaccacctgggcgacgacgtggtgctgttcaccaccgacggcgcccacaagaccttcctgaagtgcggcgccctgcagggcctgtacaccaccgtggacttcggcaccggcagcaacatcaccgacgccttcctgagccagagaaagtgcgagcccaagggccccctgatcaacagcgagttctacaccggctggctggaccactggggccagccccacagcaccatcaagaccgaggccgtggccagcagcctgtacgacatcctggccagaggcgccagcgtgaacctgtacatgttcatcggcggcaccaacttcgcctactggaacggcgccaacagcccctacgccgcccagcccaccagctacgactacgacgcccccctgagcgaggccggcgacctgaccgagaagtacttcgccctgagaaacatcatccagaagttcgagaaggtgcccgagggccccatcccccccagcacccccaagttcgcctacggcaaggtgaccctggagaagctgaagaccgtgggcgccgccctggacatcctgtgccccagcggccccatcaagagcctgtaccccctgaccttcatccaggtgaagcagcactacggcttcgtgctgtacagaaccaccctgccccaggactgcagcaaccccgcccccctgagcagccccctgaacggcgtgcacgacagagcctacgtggccgtggacggcatcccccagggcgtgctggagagaaacaacgtgatcaccctgaacatcaccggcaaggccggcgccaccctggacctgctggtggagaacatgggcagagtgaactacggcgcctacatcaacgacttcaagggcctggtgagcaacctgaccctgagcagcaacatcctgaccgactggaccatcttccccctggacaccgaggacgccgtgtgcagccacctgggcggctggggccacagagacagcggccaccacgacgaggcctgggcccacaacagcagcaactacaccctgcccgccttctacatgggcaacttcagcatccccagcggcatccccgacctgccccaggacaccttcatccagttccccggctggaccaagggccaggtgtggatcaacggcttcaacctgggcagatactggcccgccagaggcccccagctgaccctgttcgtgccccagcacatcctgatgaccagcgcccccaacaccatcaccgtgctggagctggagtgggccccctgcagcagcgacgaccccgagctgtgcgccgtgaccttcgtggacagacccgtgatcggcagcagcgtgacctacgaccaccccagcaagcccgtggagaagagactgatgcccccccccccccagaagaacaaggacagctggctggaccacgtgtag

SEQ ID NO: 82601 - DNA, 2034 bp, synthetic construct
  misc_feature 1..2034: note = Description of Artificial Sequence: Synthetic coding sequence
  source 1..2034: mol_type = other DNA
atgcccggcttcctggtgagaatcctgcccctgctgctggtgctgctgctgctgggccccaccagaggcctgagaaacgccacccagagaatgttcgagatcgactacagcagagacagcttcctgaaggacggccagcccttcagatacatcagcggcagcatccactacagcagagtgcccagattctactggaaggacagactgctgaagatgaagatggccggcctgaacgccatccagacctacgtgccctggaacttccacgagccctggcccggccagtaccagttcagcgaggaccacgacgtggagtacttcctgagactggcccacgagctgggcctgctggtgatcctgagacccggcccctacatctgcgccgagtgggagatgggcggcctgcccgcctggctgctggagaaggagagcatcctgctgagaagcagcgaccccgactacctggccgccgtggacaagtggctgggcgtgctgctgcccaagatgaagcccctgctgtaccagaacggcggccccgtgatcaccgtgcaggtggagaacgagtacggcagctacttcgcctgcgacttcgactacctgagattcctgcagaagagattcagacaccacctgggcgacgacgtggtgctgttcaccaccgacggcgcccacaagaccttcctgaagtgcggcgccctgcagggcctgtacaccaccgtggacttcggcaccggcagcaacatcaccgacgccttcctgagccagagaaagtgcgagcccaagggccccctgatcaacagcgagttctacaccggctggctggaccactggggccagccccacagcaccatcaagaccgaggccgtggccagcagcctgtacgacatcctggccagaggcgccagcgtgaacctgtacatgttcatcggcggcaccaacttcgcctactggaacggcgccaacagcccctacgccgcccagcccaccagctacgactacgacgcccccctgagcgaggccggcgacctgaccgagaagtacttcgccctgagaaacatcatccagaagttcgagaaggtgcccgagggccccatcccccccagcacccccaagttcgcctacggcaaggtgaccctggagaagctgaagaccgtgggcgccgccctggacatcctgtgccccagcggccccatcaagagcctgtaccccctgaccttcatccaggtgaagcagcactacggcttcgtgctgtacagaaccaccctgccccaggactgcagcaaccccgcccccctgagcagccccctgaacggcgtgcacgacagagcctacgtggccgtggacggcatcccccagggcgtgctggagagaaacaacgtgatcaccctgaacatcaccggcaaggccggcgccaccctggacctgctggtggagaacatgggcagagtgaactacggcgcctacatcaacgacttcaagggcctggtgagcaacctgaccctgagcagcaacatcctgaccgactggaccatcttccccctggacaccgaggacgccgtgtgcagccacctgggcggctggggccacagagacagcggccaccacgacgaggcctgggcccacaacagcagcaactacaccctgcccgccttctacatgggcaacttcagcatccccagcggcatccccgacctgccccaggacaccttcatccagttccccggctggaccaagggccaggtgtggatcaacggcttcaacctgggcagatactggcccgccagaggcccccagctgaccctgttcgtgccccagcacatcctgatgaccagcgcccccaacaccatcaccgtgctggagctggagtgggccccctgcagcagcgacgaccccgagctgtgcgccgtgaccttcgtggacagacccgtgatcggcagcagcgtgacctacgaccaccccagcaagcccgtggagaagagactgatgcccccccccccccagaagaacaaggacagctggctggaccacgtgtag

SEQ ID NO: 82602 - DNA, 2178 bp, synthetic construct
  misc_feature 1..2178: note = Description of Artificial Sequence: Synthetic coding sequence
  source 1..2178: mol_type = other DNA
atgcccggcttcctggtgagaatcctgcccctgctgctggtgctgctgctgctgggccccaccagaggcctgagaagcagattcctgccctgggccttccacctgcccagacaggcccccaagagccagctgcccctgcacaagagaggcaccaagaccgcccccaacgagcacgccagcagcaacagaagcggcagaagaagaagaagacagcagtggaacgccacccagagaatgttcgagatcgactacagcagagacagcttcctgaaggacggccagcccttcagatacatcagcggcagcatccactacagcagagtgcccagattctactggaaggacagactgctgaagatgaagatggccggcctgaacgccatccagacctacgtgccctggaacttccacgagccctggcccggccagtaccagttcagcgaggaccacgacgtggagtacttcctgagactggcccacgagctgggcctgctggtgatcctgagacccggcccctacatctgcgccgagtgggagatgggcggcctgcccgcctggctgctggagaaggagagcatcctgctgagaagcagcgaccccgactacctggccgccgtggacaagtggctgggcgtgctgctgcccaagatgaagcccctgctgtaccagaacggcggccccgtgatcaccgtgcaggtggagaacgagtacggcagctacttcgcctgcgacttcgactacctgagattcctgcagaagagattcagacaccacctgggcgacgacgtggtgctgttcaccaccgacggcgcccacaagaccttcctgaagtgcggcgccctgcagggcctgtacaccaccgtggacttcggcaccggcagcaacatcaccgacgccttcctgagccagagaaagtgcgagcccaagggccccctgatcaacagcgagttctacaccggctggctggaccactggggccagccccacagcaccatcaagaccgaggccgtggccagcagcctgtacgacatcctggccagaggcgccagcgtgaacctgtacatgttcatcggcggcaccaacttcgcctactggaacggcgccaacagcccctacgccgcccagcccaccagctacgactacgacgcccccctgagcgaggccggcgacctgaccgagaagtacttcgccctgagaaacatcatccagaagttcgagaaggtgcccgagggccccatcccccccagcacccccaagttcgcctacggcaaggtgaccctggagaagctgaagaccgtgggcgccgccctggacatcctgtgccccagcggccccatcaagagcctgtaccccctgaccttcatccaggtgaagcagcactacggcttcgtgctgtacagaaccaccctgccccaggactgcagcaaccccgcccccctgagcagccccctgaacggcgtgcacgacagagcctacgtggccgtggacggcatcccccagggcgtgctggagagaaacaacgtgatcaccctgaacatcaccggcaaggccggcgccaccctggacctgctggtggagaacatgggcagagtgaactacggcgcctacatcaacgacttcaagggcctggtgagcaacctgaccctgagcagcaacatcctgaccgactggaccatcttccccctggacaccgaggacgccgtgtgcagccacctgggcggctggggccacagagacagcggccaccacgacgaggcctgggcccacaacagcagcaactacaccctgcccgccttctacatgggcaacttcagcatccccagcggcatccccgacctgccccaggacaccttcatccagttccccggctggaccaagggccaggtgtggatcaacggcttcaacctgggcagatactggcccgccagaggcccccagctgaccctgttcgtgccccagcacatcctgatgaccagcgcccccaacaccatcaccgtgctggagctggagtgggccccctgcagcagcgacgaccccgagctgtgcgccgtgaccttcgtggacagacccgtgatcggcagcagcgtgacctacgaccaccccagcaagcccgtggagaagagactgatgcccccccccccccagaagaacaaggacagctggctggaccacgtgtag

SEQ ID NO: 82603 - DNA, 2058 bp, synthetic construct
  misc_feature 1..2058: note = Description of Artificial Sequence: Synthetic coding sequence
  source 1..2058: mol_type = other DNA
atggccgagtggctgctgagcgccagctggcagagaagagccaaggccatgaccgccgccgccggcagcgccggcagagccgccgtgcccctgctgctgtgcgccctgctggcccccggcggcgcctacgtgctggacgacagcgacggcctgggcagagagttcgacggcatcggcgccgtgagcggcggcggcgccaccagcagactgctggtgaactaccccgagccctacagaagccagatcctggactacctgttcaagcccaacttcggcgccagcctgcacatcctgaaggtggagatcggcggcgacggccagaccaccgacggcaccgagcccagccacatgcactacgccctggacgagaactacttcagaggctacgagtggtggctgatgaaggaggccaagaagagaaaccccaacatcaccctgatcggcctgccctggagcttccccggctggctgggcaagggcttcgactggccctacgtgaacctgcagctgaccgcctactacgtggtgacctggatcgtgggcgccaagagataccacgacctggacatcgactacatcggcatctggaacgagagaagctacaacgccaactacatcaagatcctgagaaagatgctgaactaccagggcctgcagagagtgaagatcatcgccagcgacaacctgtgggagagcatcagcgccagcatgctgctggacgccgagctgttcaaggtggtggacgtgatcggcgcccactaccccggcacccacagcgccaaggacgccaagctgaccggcaagaagctgtggagcagcgaggacttcagcaccctgaacagcgacatgggcgccggctgctggggcagaatcctgaaccagaactacatcaacggctacatgaccagcaccatcgcctggaacctggtggccagctactacgagcagctgccctacggcagatgcggcctgatgaccgcccaggagccctggagcggccactacgtggtggagagccccgtgtgggtgagcgcccacaccacccagttcacccagcccggctggtactacctgaagaccgtgggccacctggagaagggcggcagctacgtggccctgaccgacggcctgggcaacctgaccatcatcatcgagaccatgagccacaagcacagcaagtgcatcagacccttcctgccctacttcaacgtgagccagcagttcgccaccttcgtgctgaagggcagcttcagcgagatccccgagctgcaggtgtggtacaccaagctgggcaagaccagcgagagattcctgttcaagcagctggacagcctgtggctgctggacagcgacggcagcttcaccctgagcctgcacgaggacgagctgttcaccctgaccaccctgaccaccggcagaaagggcagctaccccctgccccccaagagccagcccttccccagcacctacaaggacgacttcaacgtggactaccccttcttcagcgaggcccccaacttcgccgaccagaccggcgtgttcgagtacttcaccaacatcgaggaccccggcgagcaccacttcaccctgagacaggtgctgaaccagagacccatcacctgggccgccgacgccagcaacaccatcagcatcatcggcgactacaactggaccaacctgaccatcaagtgcgacgtgtacatcgagacccccgacaccggcggcgtgttcatcgccggcagagtgaacaagggcggcatcctgatcagaagcgccagaggcatcttcttctggatcttcgccaacggcagctacagagtgaccggcgacctggccggctggatcatctacgccctgggcagagtggaggtgaccgccaagaagtggtacaccctgaccctgaccatcaagggccacttcaccagcggcatgctgaacgacaagagcctgtggaccgacatccccgtgaacttccccaagaacggctgggccgccatcggcacccacagcttcgagttcgcccagttcgacaacttcctggtggaggccaccagatag

SEQ ID NO: 82604 - DNA, 1989 bp, synthetic construct
  misc_feature 1..1989: note = Description of Artificial Sequence: Synthetic coding sequence
  source 1..1989: mol_type = other DNA
atggccgagtggctgctgagcgccagctggcagagaagagccaaggccatgaccgccgccgccggcagcgccggcagagccgccgtgcccctgctgctgtgcgccctgctggcccccggcggcgcctacgtgctggacgacagcgacggcctgggcagagagttcgacggcatcggcgccgtgagcggcggcggccccaacttcggcgccagcctgcacatcctgaaggtggagatcggcggcgacggccagaccaccgacggcaccgagcccagccacatgcactacgccctggacgagaactacttcagaggctacgagtggtggctgatgaaggaggccaagaagagaaaccccaacatcaccctgatcggcctgccctggagcttccccggctggctgggcaagggcttcgactggccctacgtgaacctgcagctgaccgcctactacgtggtgacctggatcgtgggcgccaagagataccacgacctggacatcgactacatcggcatctggaacgagagaagctacaacgccaactacatcaagatcctgagaaagatgctgaactaccagggcctgcagagagtgaagatcatcgccagcgacaacctgtgggagagcatcagcgccagcatgctgctggacgccgagctgttcaaggtggtggacgtgatcggcgcccactaccccggcacccacagcgccaaggacgccaagctgaccggcaagaagctgtggagcagcgaggacttcagcaccctgaacagcgacatgggcgccggctgctggggcagaatcctgaaccagaactacatcaacggctacatgaccagcaccatcgcctggaacctggtggccagctactacgagcagctgccctacggcagatgcggcctgatgaccgcccaggagccctggagcggccactacgtggtggagagccccgtgtgggtgagcgcccacaccacccagttcacccagcccggctggtactacctgaagaccgtgggccacctggagaagggcggcagctacgtggccctgaccgacggcctgggcaacctgaccatcatcatcgagaccatgagccacaagcacagcaagtgcatcagacccttcctgccctacttcaacgtgagccagcagttcgccaccttcgtgctgaagggcagcttcagcgagatccccgagctgcaggtgtggtacaccaagctgggcaagaccagcgagagattcctgttcaagcagctggacagcctgtggctgctggacagcgacggcagcttcaccctgagcctgcacgaggacgagctgttcaccctgaccaccctgaccaccggcagaaagggcagctaccccctgccccccaagagccagcccttccccagcacctacaaggacgacttcaacgtggactaccccttcttcagcgaggcccccaacttcgccgaccagaccggcgtgttcgagtacttcaccaacatcgaggaccccggcgagcaccacttcaccctgagacaggtgctgaaccagagacccatcacctgggccgccgacgccagcaacaccatcagcatcatcggcgactacaactggaccaacctgaccatcaagtgcgacgtgtacatcgagacccccgacaccggcggcgtgttcatcgccggcagagtgaacaagggcggcatcctgatcagaagcgccagaggcatcttcttctggatcttcgccaacggcagctacagagtgaccggcgacctggccggctggatcatctacgccctgggcagagtggaggtgaccgccaagaagtggtacaccctgaccctgaccatcaagggccacttcaccagcggcatgctgaacgacaagagcctgtggaccgacatccccgtgaacttccccaagaacggctgggccgccatcggcacccacagcttcgagttcgcccagttcgacaacttcctggtggaggccaccagatag

SEQ ID NO: 82605 - DNA, 1980 bp, synthetic construct
  misc_feature 1..1980: note = Description of Artificial Sequence: Synthetic coding sequence
  source 1..1980: mol_type = other DNA
atgctgggcaagagccacggcagagccacccacggccccctgcccctggccgacctgggcatccacctgccctgcgtgaaggtgctgcaccaggtgacccccgaggagaagcccgccgccaccagcagactgctggtgaactaccccgagccctacagaagccagatcctggactacctgttcaagcccaacttcggcgccagcctgcacatcctgaaggtggagatcggcggcgacggccagaccaccgacggcaccgagcccagccacatgcactacgccctggacgagaactacttcagaggctacgagtggtggctgatgaaggaggccaagaagagaaaccccaacatcaccctgatcggcctgccctggagcttccccggctggctgggcaagggcttcgactggccctacgtgaacctgcagctgaccgcctactacgtggtgacctggatcgtgggcgccaagagataccacgacctggacatcgactacatcggcatctggaacgagagaagctacaacgccaactacatcaagatcctgagaaagatgctgaactaccagggcctgcagagagtgaagatcatcgccagcgacaacctgtgggagagcatcagcgccagcatgctgctggacgccgagctgttcaaggtggtggacgtgatcggcgcccactaccccggcacccacagcgccaaggacgccaagctgaccggcaagaagctgtggagcagcgaggacttcagcaccctgaacagcgacatgggcgccggctgctggggcagaatcctgaaccagaactacatcaacggctacatgaccagcaccatcgcctggaacctggtggccagctactacgagcagctgccctacggcagatgcggcctgatgaccgcccaggagccctggagcggccactacgtggtggagagccccgtgtgggtgagcgcccacaccacccagttcacccagcccggctggtactacctgaagaccgtgggccacctggagaagggcggcagctacgtggccctgaccgacggcctgggcaacctgaccatcatcatcgagaccatgagccacaagcacagcaagtgcatcagacccttcctgccctacttcaacgtgagccagcagttcgccaccttcgtgctgaagggcagcttcagcgagatccccgagctgcaggtgtggtacaccaagctgggcaagaccagcgagagattcctgttcaagcagctggacagcctgtggctgctggacagcgacggcagcttcaccctgagcctgcacgaggacgagctgttcaccctgaccaccctgaccaccggcagaaagggcagctaccccctgccccccaagagccagcccttccccagcacctacaaggacgacttcaacgtggactaccccttcttcagcgaggcccccaacttcgccgaccagaccggcgtgttcgagtacttcaccaacatcgaggaccccggcgagcaccacttcaccctgagacaggtgctgaaccagagacccatcacctgggccgccgacgccagcaacaccatcagcatcatcggcgactacaactggaccaacctgaccatcaagtgcgacgtgtacatcgagacccccgacaccggcggcgtgttcatcgccggcagagtgaacaagggcggcatcctgatcagaagcgccagaggcatcttcttctggatcttcgccaacggcagctacagagtgaccggcgacctggccggctggatcatctacgccctgggcagagtggaggtgaccgccaagaagtggtacaccctgaccctgaccatcaagggccacttcaccagcggcatgctgaacgacaagagcctgtggaccgacatccccgtgaacttccccaagaacggctgggccgccatcggcacccacagcttcgagttcgcccagttcgacaacttcctggtggaggccaccagatag

SEQ ID NO: 82606 - DNA, 1425 bp, synthetic construct
  misc_feature 1..1425: note = Description of Artificial Sequence: Synthetic coding sequence
  source 1..1425: mol_type = other DNA
atgctgaactaccagggcctgcagagagtgaagatcatcgccagcgacaacctgtgggagagcatcagcgccagcatgctgctggacgccgagctgttcaaggtggtggacgtgatcggcgcccactaccccggcacccacagcgccaaggacgccaagctgaccggcaagaagctgtggagcagcgaggacttcagcaccctgaacagcgacatgggcgccggctgctggggcagaatcctgaaccagaactacatcaacggctacatgaccagcaccatcgcctggaacctggtggccagctactacgagcagctgccctacggcagatgcggcctgatgaccgcccaggagccctggagcggccactacgtggtggagagccccgtgtgggtgagcgcccacaccacccagttcacccagcccggctggtactacctgaagaccgtgggccacctggagaagggcggcagctacgtggccctgaccgacggcctgggcaacctgaccatcatcatcgagaccatgagccacaagcacagcaagtgcatcagacccttcctgccctacttcaacgtgagccagcagttcgccaccttcgtgctgaagggcagcttcagcgagatccccgagctgcaggtgtggtacaccaagctgggcaagaccagcgagagattcctgttcaagcagctggacagcctgtggctgctggacagcgacggcagcttcaccctgagcctgcacgaggacgagctgttcaccctgaccaccctgaccaccggcagaaagggcagctaccccctgccccccaagagccagcccttccccagcacctacaaggacgacttcaacgtggactaccccttcttcagcgaggcccccaacttcgccgaccagaccggcgtgttcgagtacttcaccaacatcgaggaccccggcgagcaccacttcaccctgagacaggtgctgaaccagagacccatcacctgggccgccgacgccagcaacaccatcagcatcatcggcgactacaactggaccaacctgaccatcaagtgcgacgtgtacatcgagacccccgacaccggcggcgtgttcatcgccggcagagtgaacaagggcggcatcctgatcagaagcgccagaggcatcttcttctggatcttcgccaacggcagctacagagtgaccggcgacctggccggctggatcatctacgccctgggcagagtggaggtgaccgccaagaagtggtacaccctgaccctgaccatcaagggccacttcaccagcggcatgctgaacgacaagagcctgtggaccgacatccccgtgaacttccccaagaacggctgggccgccatcggcacccacagcttcgagttcgcccagttcgacaacttcctggtggaggccaccagatag

SEQ ID NO: 82607 - DNA, 1770 bp, synthetic construct
  misc_feature 1..1770: note = Description of Artificial Sequence: Synthetic coding sequence
  source 1..1770: mol_type = other DNA
atgggcttcatggtggccgacctgtgggccaccagcagactgctggtgaactaccccgagccctacagaagccagatcctggactacctgttcaagcccaacttcggcgccagcctgcacatcctgaaggtggagatcggcggcgacggccagaccaccgacggcaccgagcccagccacatgcactacgccctggacgagaactacttcagaggctacgagtggtggctgatgaaggaggccaagaagagaaaccccaacatcaccctgatcggcctgccctggagcttccccggctggctgggcaagggcttcgactggccctacgtgaacctgcagctgaccgcctactacgtggtgacctggatcgtgggcgccaagagataccacgacctggacatcgactacatcggcatctggaacgagagaagctacaacgccaactacatcaagatcctgagaaagatgctgaactaccagggcctgcagagagtgaagatcatcgccagcgacaacctgtgggagagcatcagcgccagcatgctgctggacgccgagctgttcaaggtggtggacgtgatcggcgcccactaccccggcacccacagcgccaaggacgccaagctgaccggcaagaagctgtggagcagcgaggacttcagcaccctgaacagcgacatgggcgccggctgctggggcagaatcctgaaccagaactacatcaacggctacatgaccagcaccatcgcctggaacctggtggccagctactacgagcagctgccctacggcagatgcggcctgatgaccgcccaggagccctggagcggccactacgtggtggagagccccgtgtgggtgagcgcccacaccacccagttcacccagcccggctggtactacctgaagaccgtgggccacctggagaagggcggcagctacgtggccctgaccgacggcctgggcaacctgaccatcatcatcgagaccatgagccacaagcacagcaagtgcatcagacccttcctgccctacttcaacgtgagccagcagttcgccaccttcgtgctgaagggcagcttcagcgagatccccgagctgcaggtgtggtacaccaagctgggcaagaccagcgagagattcctgttcaagcagctggacagcctgtggctgctggacagcgacggcagcttcaccctgagcctgcacgaggacgagctgttcaccctgaccaccctgaccaccggcagaaagggcagctaccccctgccccccaagagccagcccttccccagcacctacaaggacgacttcaacgtggactaccccttcttcagcgaggcccccaacttcgccgaccagaccggcgtgttcgagtacttcaccaacatcgaggaccccggcgagcaccacttcaccctgagacaggtgctgaaccagagacccatcacctgggccgccgacgccagcaacaccatcagcatcatcggcgactacaactggaccaacctgaccatcaagtgcgacgtgtacatcgagacccccgacaccggcggcgtgttcatcgccggcagagtgaacaagggcggcatcctgatcagaagcgccagaggcatcttcttctggatcttcgccaacggcagctacagagtgaccggcgacctggccggctggatcatctacgccctgggcagagtggaggtgaccgccaagaagtggtacaccctgaccctgaccatcaaggtggccggcagaagaaagaagacctag

SEQ ID NO: 82608 - DNA, 372 bp, synthetic construct
  misc_feature 1..372: note = Description of Artificial Sequence: Synthetic coding sequence
  source 1..372: mol_type = other DNA
atggccagaggcagcgccctgctgctggccagcctgctgctggccgccgccctgagcgccagcgccggcctgtggagccccgccaaggagaagagaggctggaccctgaacagcgccggctacctgctgggcccccacgccgtgggcaaccacagaagcttcagcgacaagaacggcctgaccagcaagagagagctgagacccgaggacgacatgaagcccggcagcttcgacagaagcatccccgagaacaacatcatgagaaccatcatcgagttcctgagcttcctgcacctgaaggaggccggcgccctggacagactgctggacctgcccgccgccgccagcagcgaggacatcgagagaagctag

SEQ ID NO: 82609 - DNA, 1050 bp, synthetic construct
  misc_feature 1..1050: note = Description of Artificial Sequence: Synthetic coding sequence
  source 1..1050: mol_type = other DNA
atggagctggccgtgggcaacctgagcgagggcaacgccagctggcccgagccccccgcccccgagcccggccccctgttcggcatcggcgtggagaacttcgtgaccctggtggtgttcggcctgatcttcgccctgggcgtgctgggcaacagcctggtgatcaccgtgctggccagaagcaagcccggcaagcccagaagcaccaccaacctgttcatcctgaacctgagcatcgccgacctggcctacctgctgttctgcatccccttccaggccaccgtgtacgccctgcccacctgggtgctgggcgccttcatctgcaagttcatccactacttcttcaccgtgagcatgctggtgagcatcttcaccctggccgccatgagcgtggacagatacgtggccatcgtgcacagcagaagaagcagcagcctgagagtgagcagaaacgccctgctgggcgtgggctgcatctgggccctgagcatcgccatggccagccccgtggcctaccaccagggcctgttccaccccagagccagcaaccagaccttctgctgggagcagtggcccgaccccagacacaagaaggcctacgtggtgtgcaccttcgtgttcggctacctgctgcccctgctgctgatctgcttctgctacgccaaggtgctgaaccacctgcacaagaagctgaagaacatgagcaagaagagcgaggccagcaagaagaagaccgcccagaccgtgctggtggtggtggtggtgttcggcatcagctggctgccccaccacatcatccacctgtgggccgagttcggcgtgttccccctgacccccgccagcttcctgttcagaatcaccgcccactgcctggcctacagcaacagcagcgtgaaccccatcatctacgccttcctgagcgagaacttcagaaaggcctacaagcaggtgttcaagtgccacatcagaaaggacagccacctgagcgacaccaaggagagcaagagcagaatcgacaccccccccagcaccaactgcacccacgtgtag

SEQ ID NO: 82610 - DNA, 1164 bp, synthetic construct
  misc_feature 1..1164: note = Description of Artificial Sequence: Synthetic coding sequence
  source 1..1164: mol_type = other DNA
atgaacgtgagcggctgccccggcgccggcaacgccagccaggccggcggcggcggcggctggcaccccgaggccgtgatcgtgcccctgctgttcgccctgatcttcctggtgggcaccgtgggcaacaccctggtgctggccgtgctgctgagaggcggccaggccgtgagcaccaccaacctgttcatcctgaacctgggcgtggccgacctgtgcttcatcctgtgctgcgtgcccttccaggccaccatctacaccctggacggctgggtgttcggcagcctgctgtgcaaggccgtgcacttcctgatcttcctgaccatgcacgccagcagcttcaccctggccgccgtgagcctggacagatacctggccatcagataccccctgcacagcagagagctgagaacccccagaaacgccctggccgccatcggcctgatctggggcctgagcctgctgttcagcggcccctacctgagctactacagacagagccagctggccaacctgaccgtgtgccaccccgcctggagcgcccccagaagaagagccatggacatctgcaccttcgtgttcagctacctgctgcccgtgctggtgctgggcctgacctacgccagaaccctgagatacctgtggagagccgtggaccccgtggccgccggcagcggcgccagaagagccaagagaaaggtgaccagaatgatcctgatcgtggccgccctgttctgcctgtgctggatgccccaccacgccctgatcctgtgcgtgtggttcggccagttccccctgaccagagccacctacgccctgagaatcctgagccacctggtgagctacgccaacagctgcgtgaaccccatcgtgtacgccctggtgagcaagcacttcagaaagggcttcagaaccatctgcgccggcctgctgggcagagcccccggcagagccagcggcagagtgtgcgccgccgccagaggcacccacagcggcagcgtgctggagagagagagcagcgacctgctgcacatgagcgaggccgccggcgccctgagaccctgccccggcgccagccagccctgcatcctggagccctgccccggccccagctggcagggccccaaggccggcgacagcatcctgaccgtggacgtggcctag

SEQ ID NO: 82611 - DNA, 1107 bp, synthetic construct
  misc_feature 1..1107: note = Description of Artificial Sequence: Synthetic coding sequence
  source 1..1107: mol_type = other DNA
atggccgacgcccagaacatcagcctggacagccccggcagcgtgggcgccgtggccgtgcccgtggtgttcgccctgatcttcctgctgggcaccgtgggcaacggcctggtgctggccgtgctgctgcagcccggccccagcgcctggcaggagcccggcagcaccaccgacctgttcatcctgaacctggccgtggccgacctgtgcttcatcctgtgctgcgtgcccttccaggccaccatctacaccctggacgcctggctgttcggcgccctggtgtgcaaggccgtgcacctgctgatctacctgaccatgtacgccagcagcttcaccctggccgccgtgagcgtggacagatacctggccgtgagacaccccctgagaagcagagccctgagaacccccagaaacgccagagccgccgtgggcctggtgtggctgctggccgccctgttcagcgccccctacctgagctactacggcaccgtgagatacggcgccctggagctgtgcgtgcccgcctgggaggacgccagaagaagagccctggacgtggccaccttcgccgccggctacctgctgcccgtggccgtggtgagcctggcctacggcagaaccctgagattcctgtgggccgccgtgggccccgccggcgccgccgccgccgaggccagaagaagagccaccggcagagccggcagagccatgctggccgtggccgccctgtacgccctgtgctggggcccccaccacgccctgatcctgtgcttctggtacggcagattcgccttcagccccgccacctacgcctgcagactggccagccactgcctggcctacgccaacagctgcctgaaccccctggtgtacgccctggccagcagacacttcagagccagattcagaagactgtggccctgcggcagaagaagaagacacagagccagaagagccctgagaagagtgagacccgccagcagcggcccccccggctgccccggcgacgccagacccagcggcagactgctggccggcggcggccagggccccgagcccagagagggccccgtgcacggcggcgaggccgccagaggccccgagtag

SEQ ID NO: 82612 - DNA, 1959 bp, synthetic construct
  misc_feature 1..1959: note = Description of Artificial Sequence: Synthetic coding sequence
  source 1..1959: mol_type = other DNA
atgggcaacctgcagagcgagcccagcgccggcggcggcagcagaaaggtgcagcccagcgacagagcccccgacagcagaagaaccagcctggtggagcccgagatgaccagccaggccatgagactgaccagaggcctgggcgtgtggttccccggcagcgccaccccccccggcctgatggtgcccagagagccccaggccagccccagcaccctgcccctgaccctggagagacccagccccgtgatgcccccccccgaggaggccgccgccgtgagcgcccccccccccgcccccgccggcaccctgctgcccggccccagcaagtggcagaagcccgccggcacccccgtgcccagaatcagaagactgctggaggccagccacagaggccagggcgacccccccagcctgagacccctgaagcccccccccccccccagacagctgagcgtgaaggacaccgtgcccagagcccccagccagttccccccccccctggagacctggaagccccccccccccctgcccagcgagagacagcccgccgacagaagaatcacccccgccctggccacccccgccagcccccccaccgagagccaggccggccccagaaaccagggccagaccgccggcagagccagaggcggcgcccccccccacgccggcgagggcgagatggcccagcccgccgacagcgagagcggcctgagcctgctgtgcaagatcaccttcaagagcagacccagcctggccccccccgccgccagcagcagcctggccgccaaggccagcctgggcggcggcggcggcggcggcctgttcgccgccagcggcgccatcagctacgccgaggtgctgaagcagggccccctgccccccggcgccgccagacccctgggcgaggtgagcagaggcgcccaggaggccgagggcggcgacggcgacggcgagggctgcagcggcccccccagcgcccccgccagccaggccagagccctgcccccccccccctacaccaccttccccggcagcaagcccaagttcgactgggtgagcgcccccgacggccccgagagacacttcagattcaacggcgccggcggcggcatcggcgcccccagaagaagagccgccgccctgagcggcccctggggcagccccccccccccccccgagcagatccacagcgcccccggccccagaagacccgcccccgccctgctggccccccccaccttcatcttccccgcccccaccaacggcgagcccatgagacccggcccccccggcctgcaggagctgccccccctgcccccccccacccccccccccaccctgcagccccccgccctgcagcccacccccctgcccgtggccccccccctgacccccggcctgggccacaaggagagcgccctggcccccaccgccgcccccgccctgccccccgccctggccgccgaccaggcccccgcccccagccccgcccccgcccccaccgtggccgagcccagcccccccgtgagcgcccccgcccccgccgccgcccccatcaagaccagaaccagaagaaacaagggcagcagagccgccagaggcgccaccagaaaggacggcctgcacggcgacggccccagagagagagccaccgccaccgtgcccgacagcagcggcggcggcggcggcggcagcggcgccagccagaccggcgccgccaacaccagagccgccagacactggctgcccttccaggtgctgaacagctgcccctgcaagtgctactgccaccaccagcccagacacagaagactgcccagaaacgtgagcgcctggctgagcaccagcaccaaccacctgggcgagcccccctgggtggccaccatcaagctgagcggcagcctggtggccaagctggagcactacgacctgcaggccacccacagcaactag

SEQ ID NO: 82613 - DNA, 675 bp, synthetic construct
  misc_feature 1..675: note = Description of Artificial Sequence: Synthetic coding sequence
  source 1..675: mol_type = other DNA
atgggcaacctgcagagcgagcccagcgccggcggcggcagcagaaaggtgcagcccagcgacagagcccccgacagcagaagaaccagcctggtggagcccgagatgaccagccaggccatgagactgaccagaggcctgggcgtgtggttccccggcagcgccaccccccccggcctgatggtgcccagagagccccaggccagccccagcaccctgcccctgaccctggagagacccagccccgtgatgcccccccccgaggaggccgccgccgtgagcgcccccccccccgcccccgccggcaccctgctgcccggccccagcaagtggcagaagcccgccggcacccccgtgcccagaatcagaagactgctggaggccagccacagaggccagggcgacccccccagcctgagacccctgaagcccccccccccccccagacagctgagcgtgaaggacaccgtgcccagagcccccagccagttccccccccccctggagacctggaagccccccccccccctgcccagcgagagacagcccgccgacagaagaatcacccccgccctggccacccccgcctgcgtgagagccagaaccagaggctgcgcccaccaggacccccacgcccaggagcagggcttcccctgcagccccggcagagactag

SEQ ID NO: 82614 - DNA, 2094 bp, synthetic construct
  misc_feature 1..2094: note = Description of Artificial Sequence: Synthetic coding sequence
  source 1..2094: mol_type = other DNA
atggccagactggtggccgtgtgcagagacggcgaggaggagttccccttcgagagaagacagatccccctgtacatcgacgacaccctgaccatggtgatggagttccccgacaacgtgctgaacctggacggccaccagaacaacggcgcccagctgaagcagttcatccagagacacggcatgctgaagcagcaggacctgagcatcgccatggtggtgaccagcagagaggtgctgagcgccctgagccagctggtgccctgcgtgggctgcagaagaagcgtggagagactgttcagccagctggtggagagcggcaaccccgccctggagcccctgaccgtgggccccaagggcgtgctgagcgtgaccagaagctgcatgaccgacgccaagaagctgtacaccctgttctacgtgcacggcagcaagctgaacgacatgatcgacgccatccccaagagcaagaagaacaagagatgccagctgcacagcctggacacccacaagcccaagcccctgggcggctgctggatggacgtgtgggagctgatgagccaggagtgcagagacgaggtggtgctgatcgacagcagctgcctgctggagaccctggagacctacctgagaaagcacagattctgcaccgactgcaagaacaaggtgctgagagcctacaacatcctgatcggcgagctggactgcagcaaggagaagggctactgcgccgccctgtacgagggcctgagatgctgcccccacgagagacacatccacgtgtgctgcgagaccgacttcatcgcccacctgctgggcagagccgagcccgagttcgccggcggcagaagagagagacacgccaagaccatcgacatcgcccaggaggaggtgctgacctgcctgggcatccacctgtacgagagactgcacagaatctggcagaagctgagagccgaggagcagacctggcagatgctgttctacctgggcgtggacgccctgagaaagagcttcgagatgaccgtggagaaggtgcagggcatcagcagactggagcagctgtgcgaggagttcagcgaggaggagagagtgagagagctgaagcaggagaagaagagacagaagagaaagaacagaagaaagaacaagtgcgtgtgcgacatccccacccccctgcagaccgccgacgagaaggaggtgagccaggagaaggagaccgacttcatcgagaacagcagctgcaaggcctgcggcagcaccgaggacggcaacacctgcgtggaggtgatcgtgaccaacgagaacaccagctgcacctgccccagcagcggcaacctgctgggcagccccaagatcaagaagggcctgagcccccactgcaacggcagcgactgcggctacagcagcagcatggagggcagcgagaccggcagcagagagggcagcgacgtggcctgcaccgagggcatctgcaaccacgacgagcacggcgacgacagctgcgtgcaccactgcgaggacaaggaggacgacggcgacagctgcgtggagtgctgggccaacagcgaggagaacgacaccaagggcaagaacaagaagaagaagaagaagagcaagatcctgaagtgcgacgagcacatccagaagctgggcagctgcatcaccgaccccggcaacagagagaccagcggcaacaccatgcacaccgtgttccacagagacaagaccaaggacacccaccccgagagctgctgcagcagcgagaagggcggccagcccctgccctggttcgagcacagaaagaacgtgccccagttcgccgagcccaccgagaccctgttcggccccgacagcggcaagggcgccaagagcctggtggagctgctggacgagagcgagtgcaccagcgacgaggagatcttcatcagccaggacgagatccagagcttcatggccaacaaccagagcttctacagcaacagagagcagtacagacagcacctgaaggagaagttcaacaagtactgcagactgaacgaccacaagagacccatctgcagcggctggctgaccaccgccggcgccaactag

SEQ ID NO: 82615 - DNA, 1548 bp, synthetic construct
  misc_feature 1..1548: note = Description of Artificial Sequence: Synthetic coding sequence
  source 1..1548: mol_type = other DNA
atgagcagccccaacatctggagcaccggcagcagcgtgtacagcacccccgtgttcagccagaagatgaccgtgtggatcctgctgctgctgagcctgtaccccggcttcaccagccagaagagcgacgacgactacgaggactacgccagcaacaagacctgggtgctgacccccaaggtgcccgagggcgacgtgaccgtgatcctgaacaacctgctggagggctacgacaacaagctgagacccgacatcggcgtgaagcccaccctgatccacaccgacatgtacgtgaacagcatcggccccgtgaacgccatcaacatggagtacaccatcgacatcttcttcgcccagacctggtacgacagaagactgaagttcaacagcaccatcaaggtgctgagactgaacagcaacatggtgggcaagatctggatccccgacaccttcttcagaaacagcaagaaggccgacgcccactggatcaccacccccaacagaatgctgagaatctggaacgacggcagagtgctgtacaccctgagactgaccatcgacgccgagtgccagctgcagctgcacaacttccccatggacgagcacagctgccccctggagttcagcagctggagcagaagcatcgcccaggccggcatgtgcagcggcgtgatcagcgcccactacagcctgagattctggggcagcaccgacccccccaccctggccagcagagtggccggcatcagcgacggctaccccagagaggagatcgtgtaccagtggaagagaagcagcgtggaggtgggcgacaccagaagctggagactgtaccagttcagcttcgtgggcctgagaaacaccaccgaggtggtgaagaccaccagcggcgactacgtggtgatgagcgtgtacttcgacctgagcagaagaatgggctacttcaccatccagacctacatcccctgcaccctgatcgtggtgctgagctgggtgagcttctggatcaacaaggacgccgtgcccgccagaaccagcctgggcatcaccaccgtgctgaccatgaccaccctgagcaccatcgccagaaagagcctgcccaaggtgagctacgtgaccgccatggacctgttcgtgagcgtgtgcttcatcttcgtgttcagcgccctggtggagtacggcaccctgcactacttcgtgagcaacagaaagcccagcaaggacaaggacaagaagaagaagaaccccctgctgagaatgttcagcttcaaggcccccaccatcgacatcagacccagaagcgccaccatccagatgaacaacgccacccacctgcaggagagagacgaggagtacggctacgagtgcctggacggcaaggactgcgccagcttcttctgctgcttcgaggactgcagaaccggcgcctggagacacggcagaatccacatcagaatcgccaagatggacagctacgccagaatcttcttccccaccgccttctgcctgttcaacctggtgtactgggtgagctacctgtacctgtag

SEQ ID NO: 82616 - DNA, 762 bp, synthetic construct
  misc_feature 1..762: note = Description of Artificial Sequence: Synthetic coding sequence
  source 1..762: mol_type = other DNA
atggcccccaagctgctgctgctgctgtgcctgttcagcggcctgcacgccagaagcagaaaggtggaggaggacgagtacgaggacagcagcagcaaccagaagtgggtgctggcccccaagagccaggacaccgacgtgaccctgatcctgaacaagctgctgagagagtacgacaagaagctgagacccgacatcggcatcaagcccaccgtgatcgacgtggacatctacgtgaacagcatcggccccgtgagcagcatcaacatggagtaccagatcgacatcttcttcgcccagacctggaccgacagcagactgagattcaacagcaccatgaagatcctgaccctgaacagcaacatggtgggcctgatctggatccccgacaccatcttcagaaacagcaagaccgccgaggcccactggatcaccacccccaaccagctgctgagaatctggaacgacggcaagatcctgtacaccctgagactgaccatcaacgccgagtgccagctgcagctgcacaacttccccatggacgagcacagctgccccctgatcttcagcagctacggctaccccaaggaggagatgatctacagatggagaaagaacagcgtggaggccgccgaccagaagagctggagactgtaccagttcgacttcatgggcctgagaaacaccaccgagatcgtgaccaccagcgccggcagaaacctgctgaaggaggcccagctgagcaaggccagagaggcctag

SEQ ID NO: 82617 - DNA, 1371 bp, synthetic construct
  misc_feature 1..1371: note = Description of Artificial Sequence: Synthetic coding sequence
  source 1..1371: mol_type = other DNA
atgagaaagagccccggcctgagcgactgcctgtgggcctggatcctgctgctgagcaccctgaccggcagaagctacggccagcccagcctgcaggacgagctgaaggacaacaccaccgtgttcaccagaatcctggacagactgctggacggctacgacaacagactgagacccggcctgggcgagagagtgaccgaggtgaagaccgacatcttcgtgaccagcttcggccccgtgagcgaccacgacatggagtacaccatcgacgtgttcttcagacagagctggaaggacgagagactgaagttcaagggccccatgaccgtgctgagactgaacaacctgatggccagcaagatctggacccccgacaccttcttccacaacggcaagaagagcgtggcccacaacatgaccatgcccaacaagctgctgagaatcaccgaggacggcaccctgctgtacaccatgagactgaccgtgagagccgagtgccccatgcacctggaggacttccccatggacgcccacgcctgccccctgaagttcggcagctacgcctacaccagagccgaggtggtgtacgagtggaccagagagcccgccagaagcgtggtggtggccgaggacggcagcagactgaaccagtacgacctgctgggccagaccgtggacagcggcatcgtgcagagcagcaccggcgagtacgtggtgatgaccacccacttccacctgaagagaaagatcggctacttcgtgatccagacctacctgccctgcatcatgaccgtgatcctgagccaggtgagcttctggctgaacagagagagcgtgcccgccagaaccgtgttcggcgtgaccaccgtgctgaccatgaccaccctgagcatcagcgccagaaacagcctgcccaaggtggcctacgccaccgccatggactggttcatcgccgtgtgctacgccttcgtgttcagcgccctgatcgagttcgccaccgtgaactacttcaccaagagaggctacgcctgggacggcaagagcgtggtgcccgagaagcccaagaaggtgaaggaccccctgatcaagaagaacaacacctacgcccccaccgccaccagctacacccccaacctggccagaggcgaccccggcctggccaccatcgccaagagcgccaccatcgagcccaaggaggtgaagcccgagaccaagccccccgagcccaagaagaccttcaacagcgtgagcaagatcgacagactgagcagaatcgccttccccctgctgttcggcatcttcaacctggtgtactgggccacctacctgaacagagagccccagctgaaggcccccaccccccaccagtag

SEQ ID NO: 82618 - DNA, 1371 bp, synthetic construct; identical to SEQ ID NO: 82617
  misc_feature 1..1371: note = Description of Artificial Sequence: Synthetic coding sequence
  source 1..1371: mol_type = other DNA

SEQ ID NO: 82619 - DNA, 1371 bp, synthetic construct; identical to SEQ ID NO: 82617
  misc_feature 1..1371: note = Description of Artificial Sequence: Synthetic coding sequence
  source 1..1371: mol_type = other DNA

SEQ ID NO: 82620 - DNA, 1371 bp, synthetic construct; identical to SEQ ID NO: 82617
  misc_feature 1..1371: note = Description of Artificial Sequence: Synthetic coding sequence
  source 1..1371: mol_type = other DNA

SEQ ID NO: 82621 - DNA, 1371 bp, synthetic construct; identical to SEQ ID NO: 82617
  misc_feature 1..1371: note = Description of Artificial Sequence: Synthetic coding sequence
  source 1..1371: mol_type = other DNA

SEQ ID NO: 82622 - DNA, 1371 bp, synthetic construct; identical to SEQ ID NO: 82617
  misc_feature 1..1371: note = Description of Artificial Sequence: Synthetic coding sequence
  source 1..1371: mol_type = other DNA

SEQ ID NO: 82623 - DNA, 372 bp, synthetic construct
  misc_feature 1..372: note = Description of Artificial Sequence: Synthetic coding sequence
  source 1..372: mol_type = other DNA
atgagaaagagccccggcctgagcgactgcctgtgggcctggatcctgctgctgagcaccctgaccggcagaagctacggccagcccagcctgcaggacgagctgaaggacaacaccaccgtgttcaccagaatcctggacagactgctggacggctacgacaacagactgagacccggcctgggcgagagagtgaccgaggtgaagaccgacatcttcgtgaccagcttcggccccgtgagcgaccacgacatggagtacaccatcgacgtgttcttcagacagagctggaaggacgagagactgaagttcaagggccccatgaccgtgctgagactgaacaacctgatggccagcaagatctggacctag

SEQ ID NO: 82624 - DNA, 1356 bp, synthetic construct
  misc_feature 1..1356: note = Description of Artificial Sequence: Synthetic coding sequence
  source 1..1356: mol_type = other DNA
atgaagaccaagctgaacatctacaacatgcagttcctgctgttcgtgttcctggtgtgggaccccgccagactggtgctggccaacatccaggaggacgaggccaagaacaacatcaccatcttcaccagaatcctggacagactgctggacggctacgacaacagactgagacccggcctgggcgacagcatcaccgaggtgttcaccaacatctacgtgaccagcttcggccccgtgagcgacaccgacatggagtacaccatcgacgtgttcttcagacagaagtggaaggacgagagactgaagttcaagggccccatgaacatcctgagactgaacaacctgatggccagcaagatctggacccccgacaccttcttccacaacggcaagaagagcgtggcccacaacatgaccatgcccaacaagctgctgagaatccaggacgacggcaccctgctgtacaccatgagactgaccgtgcaggccgagtgccccatgcacctggaggacttccccatggacgcccacagctgccccctgaagttcggcagctacgcctacaccaccagcgaggtgacctacatctggacctacaacgccagcgacagcgtgcaggtggcccccgacggcagcagactgaaccagtacgacctgctgggccagagcatcggcaaggagaccatcaagagcagcaccggcgagtacaccgtgatgaccgcccacttccacctgaagagaaagatcggctacttcgtgatccagacctacctgccctgcatcatgaccgtgatcctgagccaggtgagcttctggctgaacagagagagcgtgcccgccagaaccgtgttcggcgtgaccaccgtgctgaccatgaccaccctgagcatcagcgccagaaacagcctgcccaaggtggcctacgccaccgccatggactggttcatcgccgtgtgctacgccttcgtgttcagcgccctgatcgagttcgccaccgtgaactacttcaccaagagaggctgggcctgggacggcaagagcgtggtgaacgacaagaagaaggagaaggccagcgtgatgatccagaacaacgcctacgccgtggccgtggccaactacgcccccaacctgagcaaggaccccgtgctgagcaccatcagcaagagcgccaccacccccgagcccaacaagaagcccgagaacaagcccgccgaggccaagaagaccttcaacagcgtgagcaagatcgacagaatgagcagaatcgtgttccccgtgctgttcggcaccttcaacctggtgtactgggccacctacctgaacagagagcccgtgctgggcgtgagcccctag

SEQ ID NO: 82625 - DNA, 1356 bp, synthetic construct; identical to SEQ ID NO: 82624
  misc_feature 1..1356: note = Description of Artificial Sequence: Synthetic coding sequence
  source 1..1356: mol_type = other DNA

SEQ ID NO: 82626 - DNA, 459 bp, synthetic construct
  misc_feature 1..459: note = Description of Artificial Sequence: Synthetic coding sequence
  source 1..459: mol_type = other DNA
atgaagaccaagctgaacatctacaacatgcagttcctgctgttcgtgttcctggtgtgggaccccgccagactggtgctggccaacatccaggaggacgaggccaagaacaacatcaccatcttcaccagaatcctggacagactgctggacggctacgacaacagactgagacccggcctgggcgacagcatcaccgaggtgttcaccaacatctacgtgaccagcttcggccccgtgagcgacaccgacatggagtacaccatcgacgtgttcttcagacagaagtggaaggacgagagactgaagttcaagggccccatgaacatcctgagactgaacaacctgatggccagcaagatctggacccccgacaccttcttccacaacggcaagaagagcgtggcccacaacatgaccatgcccaacaagctgctgagaatccaggacgacggctag

SEQ ID NO: 82627 - DNA, 414 bp, synthetic construct
  misc_feature 1..414: note = Description of Artificial Sequence: Synthetic coding sequence
  source 1..414: mol_type = other DNA
atgaagaccaagctgaacatctacaacatgcagttcctgctgttcgtgttcctggtgtgggaccccgccagactggtgctggccaacatccaggaggacgaggccaagaacaacatcaccatcttcaccagaatcctggacagactgctggacggctacgacaacagactgagacccggcctgggcgacagcatcaccgaggtgttcaccaacatctacgtgaccagcttcggccccgtgagcgacaccgacatggagtacaccatcgacgtgttcttcagacagaagtggaaggacgagagactgaagttcaagggccccatgaacatcctgagactgaacaacctgatggccagcaagatctggacccccgacaccttcttccacaacggcaagaagagcgtggcccactag

SEQ ID NO: 82628 - DNA, 1536 bp, synthetic construct
  misc_feature 1..1536: note = Description of Artificial Sequence: Synthetic coding sequence
  source 1..1536: mol_type = other DNA
atgaagaccaagctgaacatctacaacatgcagttcctgctgttcgtgttcctggtgtgggaccccgccagactggtgctggccaacatccaggaggacgaggccaagaacaacatcaccatcttcaccagaatcctggacagactgctggacggctacgacaacagactgagacccggcctgggcgacagcatcaccgaggtgttcaccaacatctacgtgaccagcttcggccccgtgagcgacaccgacatggagtacaccatcgacgtgttcttcagacagaagtggaaggacgagagactgaagttcaagggccccatgaacatcctgagactgaacaacctgatggccagcaagatctggacccccgacaccttcttccacaacggcaagaagagcgtggcccacaacatgaccatgcccaacaagctgctgagaatccaggacgacggcaccctgctgtacaccatgagactgaccgtgcaggccgagtgccccatgcacctggaggacttccccatggacgcccacagctgccccctgaagttcggcagctacgcctacaccaccagcgaggtgacctacatctggacctacaacgccagcgacagcgtgcaggtggcccccgacggcagcagactgaaccagtacgacctgctgggccagagcatcggcaaggagaccatcaagagcagcaccggcgagtacaccgtgatgaccgcccacttccacctgaagagaaagatcggctacttcgtgatccagacctacctgccctgcatcatgaccgtgatcctgagccaggtgagcttctggctgaacagagagagcgtgcccgccagaaccgtgttcggcgtgaccaccgtgctgaccatgaccaccctgagcatcagcgccagaaacagcctgcccaaggtggcctacgccaccgccatggactggttcatcgccgtgtgctacgccttcgtgttcagcgccctgatcgagttcgccaccgtgaactacttcaccaagagaggctgggcctgggacggcaagagcgtggtgaacgacaagagccccagcatcaaggccgagggcatcaccctgacctacaacagcgtgaaggccatcctgcagggcgccaagctgatctggagcaagtacatcgccttcagctggcccagcctgttccaggagaagaccctggagtacctggagaagtggatggactgcctgaccttcaagcagagcagcaagaaggagaaggccagcgtgatgatccagaacaacgcctacgccgtggccgtggccaactacgcccccaacctgagcaaggaccccgtgctgagcaccatcagcaagagcgccaccacccccgagcccaacaagaagcccgagaacaagcccgccgaggccaagaagaccttcaacagcgtgagcaagatcgacagaatgagcagaatcgtgttccccgtgctgttcggcaccttcaacctggtgtactgggccacctacctgaacagagagcccgtgctgggcgtgagcccctag

SEQ ID NO: 82629 - DNA, 1356 bp, synthetic construct; identical to SEQ ID NO: 82624
  misc_feature 1..1356: note = Description of Artificial Sequence: Synthetic coding sequence
  source 1..1356: mol_type = other DNA

SEQ ID NO: 82630 - DNA, 1356 bp, synthetic construct; identical to SEQ ID NO: 82624
  misc_feature 1..1356: note = Description of Artificial Sequence: Synthetic coding sequence
  source 1..1356: mol_type = other DNA

SEQ ID NO: 82631 - DNA, 1104 bp, synthetic construct
  misc_feature 1..1104: note = Description of Artificial Sequence: Synthetic coding sequence
  source 1..1104: mol_type = other DNA
atgaagaccaagctgaacatctacaacatgcagttcctgctgttcgtgttcctggtgtgggaccccgccagactggtgctggccaacatccaggaggacgaggccaagaacaacatcaccatcttcaccagaatcctggacagactgctggacggctacgacaacagactgagacccggcctgggcgacagcatcaccgaggtgttcaccaacatctacgtgaccagcttcggccccgtgagcgacaccgacatggagtacaccatcgacgtgttcttcagacagaagtggaaggacgagagactgaagttcaagggccccatgaacatcctgagactgaacaacctgatggccagcaagatctggacccccgacaccttcttccacaacggcaagaagagcgtggcccacaacatgaccatgcccaacaagctgctgagaatccaggacgacggcaccctgctgtacaccatgagactgaccgtgcaggccgagtgccccatgcacctggaggacttccccatggacgcccacagctgccccctgaagttcggcagctacgcctacaccaccagcgaggtgacctacatctggacctacaacgccagcgacagcgtgcaggtggcccccgacggcagcagactgaaccagtacgacctgctgggccagagcatcggcaaggagaccatcaagagcagcaccggcgagtacaccgtgatgaccgcccacttccacctgaagagaaagatcggctacttcgtgatccagacctacctgccctgcatcatgaccgtgatcctgagccaggtgagcttctggctgaacagagagagcgtgcccgccagaaccgtgttcggcgtgaccaccgtgctgaccatgaccaccctgagcatcagcgccagaaacagcctgcccaaggtggcctacgccaccgccatggactggttcatcgccgtgtgctacgccttcgtgttcagcgccctgatcgagttcgccaccgtgaactacttcaccaagagaggctgggcctgggacggcaagagcgtggtgaacgacaaggtgagcgagagcttcagagtgatcatcatcaagaagatcccctag

SEQ ID NO: 82632 - DNA, 1371 bp, synthetic construct
  misc_feature 1..1371: note = Description of Artificial Sequence: Synthetic coding sequence
  source 1..1371: mol_type = other DNA
atgagactgaagatcaccctgcccagcctgagagagttcctgaccgacttctggatggtgaccatcatcggcctggaccaggactgggaggagtacaccatcgacgtgttcttcagacagaagtggaaggacgagagactgaagttcaagggccccatgaacatcctgagactgaacaacctgatggccagcaagatctggacccccgacaccttcttccacaacggcaagaagagcgtggcccacaacatgaccatgcccaacaagctgctgagaatccaggacgacggcaccctgctgtacaccatgagactgaccgtgcaggccgagtgccccatgcacctggaggacttccccatggacgcccacagctgccccctgaagttcggcagctacgcctacaccaccagcgaggtgacctacatctggacctacaacgccagcgacagcgtgcaggtggcccccgacggcagcagactgaaccagtacgacctgctgggccagagcatcggcaaggagaccatcaagagcagcaccggcgagtacaccgtgatgaccgcccacttccacctgaagagaaagatcggctacttcgtgatccagacctacctgccctgcatcatgaccgtgatcctgagccaggtgagcttctggctgaacagagagagcgtgcccgccagaaccgtgttcggcgtgaccaccgtgctgaccatgaccaccctgagcatcagcgccagaaacagcctgcccaaggtggcctacgccaccgccatggactggttcatcgccgtgtgctacgccttcgtgttcagcgccctgatcgagttcgccaccgtgaactacttcaccaagagaggctgggcctgggacggcaagagcgtggtgaacgacaagagccccagcatcaaggccgagggcatcaccctgacctacaacagcgtgaaggccatcctgcagggcgccaagctgatctggagcaagtacatcgccttcagctggcccagcctgttccaggagaagaccctggagtacctggagaagtggatggactgcctgaccttcaagcagagcagcaagaaggagaaggccagcgtgatgatccagaacaacgcctacgccgtggccgtggccaactacgcccccaacctgagcaaggaccccgtgctgagcaccatcagcaagagcgccaccacccccgagcccaacaagaagcccgagaacaagcccgccgaggccaagaagaccttcaacagcgtgagcaagatcgacagaatgagcagaatcgtgttccccgtgctgttcggcaccttcaacctggtgtactgggccacctacctgaacagagagcccgtgctgggcgtgagcccctag

SEQ ID NO: 82633 - DNA, 1479 bp, synthetic construct
  misc_feature 1..1479: note = Description of Artificial Sequence: Synthetic coding sequence
  source 1..1479: mol_type = other DNA
atgatcatcacccagaccagccactgctacatgaccagcctgggcatcctgttcctgatcaacatcctgcccggcaccaccggccagggcgagagcagaagacaggagcccggcgacttcgtgaagcaggacatcggcggcctgagccccaagcacgcccccgacatccccgacgacagcaccgacaacatcaccatcttcaccagaatcctggacagactgctggacggctacgacaacagactgagacccggcctgggcgacgccgtgaccgaggtgaagaccgacatctacgtgaccagcttcggccccgtgagcgacaccgacatggagtacaccatcgacgtgttcttcagacagacctggcacgacgagagactgaagttcgacggccccatgaagatcctgcccctgaacaacctgctggccagcaagatctggacccccgacaccttcttccacaacggcaagaagagcgtggcccacaacatgaccacccccaacaagctgctgagactggtggacaacggcaccctgctgtacaccatgagactgaccatccacgccgagtgccccatgcacctggaggacttccccatggacgtgcacgcctgccccctgaagttcggcagctacgcctacaccaccgccgaggtggtgtacagctggaccctgggcaagaacaagagcgtggaggtggcccaggacggcagcagactgaaccagtacgacctgctgggccacgtggtgggcaccgagatcatcagaagcagcaccggcgagtacgtggtgatgaccacccacttccacctgaagagaaagatcggctacttcgtgatccagacctacctgccctgcatcatgaccgtgatcctgagccaggtgagcttctggctgaacagagagagcgtgcccgccagaaccgtgttcggcgtgaccaccgtgctgaccatgaccaccctgagcatcagcgccagaaacagcctgcccaaggtggcctacgccaccgccatggactggttcatcgccgtgtgctacgccttcgtgttcagcgccctgatcgagttcgccaccgtgaactacttcaccaagagaagctgggcctgggagggcaagaaggtgcccgaggccctggagatgaagaagaagacccccgccgcccccgccaagaagaccagcaccaccttcaacatcgtgggcaccacctaccccatcaacctggccaaggacaccgagttcagcaccatcagcaagggcgccgcccccagcgccagcagcacccccaccatcatcgccagccccaaggccacctacgtgcaggacagccccaccgagaccaagacctacaacagcgtgagcaaggtggacaagatcagcagaatcatcttccccgtgctgttcgccatcttcaacctggtgtactgggccacctacgtgaacagagagagcgccatcaagggcatgatcagaaagcagtag

SEQ ID NO: 82634 - DNA, 1479 bp, synthetic construct; identical to SEQ ID NO: 82633
  misc_feature 1..1479: note = Description of Artificial Sequence: Synthetic coding sequence
  source 1..1479: mol_type = other DNA

SEQ ID NO: 82635 - DNA, 339 bp, synthetic construct
  misc_feature 1..339: note = Description of Artificial Sequence: Synthetic coding sequence
  source 1..339: mol_type = other DNA
gagtacaccatcgacgtgttcttcagacagacctggcacgacgagagactgaagttcgacggccccatgaagatcctgcccctgaacaacctgctggccagcaagatctggacccccgacaccttcttccacaacggcaagaagagcgtggcccacaacatgaccacccccaacaagctgctgagactggtggacaacggcaccctgctgtacaccatgagaatcgaggaggtgcagaagcacagaagcatgatgaagcccagcgtgagctacaccgtggccccctggatccaggagggcggccccggcggcagacacagactgaagatggagaagtag

SEQ ID NO: 82636 - DNA, 1479 bp, synthetic construct; identical to SEQ ID NO: 82633
  misc_feature 1..1479: note = Description of Artificial Sequence: Synthetic coding sequence
  source 1..1479: mol_type = other DNA

SEQ ID NO: 82637 - DNA, 1665 bp, synthetic construct
  misc_feature 1..1665: note = Description of Artificial Sequence: Synthetic coding sequence
  source 1..1665: mol_type = other DNA
atggtgagcgccaagaaggtgcccgccatcgccctgagcgccggcgtgagcttcgccctgctgagattcctgtgcctggccgtgtgcctgaacgagagccccggccagaaccagaaggaggagaagctgtgcaccgagaacttcaccagaatcctggacagcctgctggacggctacgacaacagactgagacccggcttcggcggccccgtgaccgaggtgaagaccgacatctacgtgaccagcttcggccccgtgagcgacgtggagatggagtacaccatggacgtgttcttcagacagacctggatcgacaagagactgaagtacgacggccccatcgagatcctgagactgaacaacatgatggtgaccaaggtgtggacccccgacaccttcttcagaaacggcaagaagagcgtgagccacaacatgaccgcccccaacaagctgttcagaatcatgagaaacggcaccatcctgtacaccatgagactgaccatcagcgccgagtgccccatgagactggtggacttccccatggacggccacgcctgccccctgaagttcggcagctacgcctaccccaagagcgagatgatctacacctggaccaagggccccgagaagagcgtggaggtgcccaaggagagcagcagcctggtgcagtacgacctgatcggccagaccgtgagcagcgagaccatcaagagcatcaccggcgagtacatcgtgatgaccgtgtacttccacctgagaagaaagatgggctacttcatgatccagacctacatcccctgcatcatgaccgtgatcctgagccaggtgagcttctggatcaacaaggagagcgtgcccgccagaaccgtgttcggcatcaccaccgtgctgaccatgaccaccctgagcatcagcgccagacacagcctgcccaaggtgagctacgccaccgccatggactggttcatcgccgtgtgcttcgccttcgtgttcagcgccctgatcgagttcgccgccgtgaactacttcaccaacatccagatggagaaggccaagagaaagaccagcaagcccccccaggaggtgcccgccgcccccgtgcagagagagaagcaccccgaggcccccctgcagaacaccaacgccaacctgaacatgagaaagagaaccaacgccctggtgcacagcgagagcgacgtgggcaacagaaccgaggtgggcaaccacagcagcaagagcagcaccgtggtgcaggagagcagcaagggcacccccagaagctacctggccagcagccccaaccccttcagcagagccaacgccgccgagaccatcagcgccgccagagccctgcccagcgccagccccaccagcatcagaaccggctacatgcccagaaaggccagcgtgggcagcgccagcaccagacacgtgttcggcagcagactgcagagaatcaagaccaccgtgaacaccatcggcgccaccggcaagctgagcgccacccccccccccagcgcccccccccccagcggcagcggcaccagcaagatcgacaagtacgccagaatcctgttccccgtgaccttcggcgccttcaacatggtgtactgggtggtgtacctgagcaaggacaccatggagaagagcgagagcctgatgtag

SEQ ID NO: 82638 - DNA, 1389 bp, synthetic construct
  misc_feature 1..1389: note = Description of Artificial Sequence: Synthetic coding sequence
  source 1..1389: mol_type = other DNA
atggacaacggcatgttcagcggcttcatcatgatcaagaacctgctgctgttctgcatcagcatgaacctgagcagccacttcggcttcagccagatgcccaccagcagcgtgaaggacgagaccaacgacaacatcaccatcttcaccagaatcctggacggcctgctggacggctacgacaacagactgagacccggcctgggcgagagaatcacccaggtgagaaccgacatctacgtgaccagcttcggccccgtgagcgacaccgagatggagtacaccatcgacgtgttcttcagacagagctggaaggacgagagactgagattcaagggccccatgcagagactgcccctgaacaacctgctggccagcaagatctggacccccgacaccttcttccacaacggcaagaagagcatcgcccacaacatgaccacccccaacaagctgctgagactggaggacgacggcaccctgctgtacaccatgagactgaccatcagcgccgagtgccccatgcagctggaggacttccccatggacgcccacgcctgccccctgaagttcggcagctacgcctaccccaacagcgaggtggtgtacgtgtggaccaacggcagcaccaagagcgtggtggtggccgaggacggcagcagactgaaccagtaccacctgatgggccagaccgtgggcaccgagaacatcagcaccagcaccggcgagtacaccatcatgaccgcccacttccacctgaagagaaagatcggctacttcgtgatccagacctacctgccctgcatcatgaccgtgatcctgagccaggtgagcttctggctgaacagagagagcgtgcccgccagaaccgtgttcggcgtgaccaccgtgctgaccatgaccaccctgagcatcagcgccagaaacagcctgcccaaggtggcctacgccaccgccatggactggttcatcgccgtgtgctacgccttcgtgttcagcgccctgatcgagttcgccaccgtgaactacttcaccaagagaggctgggcctgggacggcaagaaggccctggaggccgccaagatcaagaagaagagagaggtgatcctgaacaagagcaccaacgccttcaccaccggcaagatgagccacccccccaacatccccaaggagcagacccccgccggcaccagcaacaccaccagcgtgagcgtgaagcccagcgaggagaagaccagcgagagcaagaagacctacaacagcatcagcaagatcgacaagatgagcagaatcgtgttccccgtgctgttcggcaccttcaacctggtgtactgggccacctacctgaacagagagcccgtgatcaagggcgccgccagccccaagtag

SEQ ID NO: 82639 - DNA, 1389 bp, synthetic construct; identical to SEQ ID NO: 82638
  misc_feature 1..1389: note = Description of Artificial Sequence: Synthetic coding sequence
  source 1..1389: mol_type = other DNA

SEQ ID NO: 82640 - DNA, 1389 bp, synthetic construct; identical to SEQ ID NO: 82638
  misc_feature 1..1389: note = Description of Artificial Sequence: Synthetic coding sequence
  source 1..1389: mol_type = other DNA

SEQ ID NO: 82641 - DNA, 261 bp, synthetic construct
  misc_feature 1..261: note = Description of Artificial Sequence: Synthetic coding sequence
  source 1..261: mol_type = other DNA
atggacaacggcatgttcagcggcttcatcatgatcaagaacctgctgctgttctgcatcagcatgaacctgagcagccacttcggcttcagccagatgcccaccagcagcgtgaaggacgagaccaacgacaacatcaccatcttcaccagaatcctggacggcctgctggacggctacgacaacagactgagacccggcctgggcgagagaatcacccaggtgagaaccgacatctacgtgaccagcttcggcccctag

SEQ ID NO: 82642 - DNA, 450 bp, synthetic construct
  misc_feature 1..450: note = Description of Artificial Sequence: Synthetic coding sequence
  source 1..450: mol_type = other DNA
atggacaacggcatgttcagcggcttcatcatgatcaagaacctgctgctgttctgcatcagcatgaacctgagcagccacttcggcttcagccagatgcccaccagcagcgtgaaggacgagaccaacgacaacatcaccatcttcaccagaatcctggacggcctgctggacggctacgacaacagactgagacccggcctgggcgagagaatcacccaggtgagaaccgacatctacgtgaccagcttcggccccgtgagcgacaccgagatggagtacaccatcgacgtgttcttcagacagagctggaaggacgagagactgagattcaagggccccatgcagagactgcccctgaacaacctgctggccagcaagatctggacccccgacaccttcttccacaacggcaagaagagcatcgcccacaacatgaccaccccctag

SEQ ID NO: 82643 - DNA, 501 bp, synthetic construct
  misc_feature 1..501: note = Description of Artificial Sequence: Synthetic coding sequence
  source 1..501: mol_type = other DNA
atggacaacggcatgttcagcggcttcatcatgatcaagaacctgctgctgttctgcatcagcatgaacctgagcagccacttcggcttcagccagatgcccaccagcagcgtgaaggacgagaccaacgacaacatcaccatcttcaccagaatcctggacggcctgctggacggctacgacaacagactgagacccggcctgggcgagagaatcacccaggtgagaaccgacatctacgtgaccagcttcggccccgtgagcgacaccgagatggagtacaccatcgacgtgttcttcagacagagctggaaggacgagagactgagattcaagggccccatgcagagactgcccctgaacaacctgctggccagcaagatctggacccccgacaccttcttccacaacggcaagaagagcatcgcccacaacatgaccacccccaacaagctgctgagactggaggacgacggcaccctgctgtacaccatgagatag

SEQ ID NO: 82644 - DNA, 51 bp, synthetic construct
  misc_feature 1..51: note = Description of Artificial Sequence: Synthetic coding sequence
  source 1..51: mol_type = other DNA
atggacaacggcatgttcagcggcttcatcatgatcaagaacctgctgtag

SEQ ID NO: 82645 - DNA, 1362 bp, synthetic construct
  misc_feature 1..1362: note = Description of Artificial Sequence: Synthetic coding sequence
  source 1..1362: mol_type = other DNA
atggccagcagcctgccctggctgtgcatcatcctgtggctggagaacgccctgggcaagctggaggtggagggcaacttctacagcgagaacgtgagcagaatcctggacaacctgctggagggctacgacaacagactgagacccggcttcggcggcgccgtgaccgaggtgaagaccgacatctacgtgaccagcttcggccccgtgagcgacgtggagatggagtacaccatggacgtgttcttcagacagacctggaccgacgagagactgaagttcggcggccccaccgagatcctgagcctgaacaacctgatggtgagcaagatctggacccccgacaccttcttcagaaacggcaagaagagcatcgcccacaacatgaccacccccaacaagctgttcagaatcatgcagaacggcaccatcctgtacaccatgagactgaccatcaacgccgactgccccatgagactggtgaacttccccatggacggccacgcctgccccctgaagttcggcagctacgcctaccccaagagcgagatcatctacacctggaagaagggccccctgtacagcgtggaggtgcccgaggagagcagcagcctgctgcagtacgacctgatcggccagaccgtgagcagcgagaccatcaagagcaacaccggcgagtacgtgatcatgaccgtgtacttccacctgcagagaaagatgggctacttcatgatccagatctacaccccctgcatcatgaccgtgatcctgagccaggtgagcttctggatcaacaaggagagcgtgcccgccagaaccgtgttcggcatcaccaccgtgctgaccatgaccaccctgagcatcagcgccagacacagcctgcccaaggtgagctacgccaccgccatggactggttcatcgccgtgtgcttcgccttcgtgttcagcgccctgatcgagttcgccgccgtgaactacttcaccaacctgcagacccagaaggccaagagaaaggcccagttcgccgccccccccaccgtgaccatcagcaaggccaccgagcccctggaggccgagatcgtgctgcaccccgacagcaagtaccacctgaagaagagaatcaccagcctgagcctgcccatcgtgagcagcagcgaggccaacaaggtgctgaccagagcccccatcctgcagagcacccccgtgacccccccccccctgagccccgccttcggcggcaccagcaagatcgaccagtacagcagaatcctgttccccgtggccttcgccggcttcaacctggtgtactgggtggtgtacctgagcaaggacaccatggaggtgagcagcagcgtggagtag

SEQ ID NO: 82646 - DNA, 1332 bp, synthetic construct
  misc_feature 1..1332: note = Description of Artificial Sequence: Synthetic coding sequence
  source 1..1332: mol_type = other DNA
atggccagcagcctgccctggctgtgcatcatcctgtggctggagaacgccctgggcaagctggaggtggagggcaacttctacagcgagaacgtgagcagaatcctggacaacctgctggagggctacgacaacagactgagacccggcttcggcggcgccgtgaccgaggtgaagaccgacatctacgtgaccagcttcggccccgtgagcgacgtggagatgacctggaccgacgagagactgaagttcggcggccccaccgagatcctgagcctgaacaacctgatggtgagcaagatctggacccccgacaccttcttcagaaacggcaagaagagcatcgcccacaacatgaccacccccaacaagctgttcagaatcatgcagaacggcaccatcctgtacaccatgagactgaccatcaacgccgactgccccatgagactggtgaacttccccatggacggccacgcctgccccctgaagttcggcagctacgcctaccccaagagcgagatcatctacacctggaagaagggccccctgtacagcgtggaggtgcccgaggagagcagcagcctgctgcagtacgacctgatcggccagaccgtgagcagcgagaccatcaagagcaacaccggcgagtacgtgatcatgaccgtgtacttccacctgcagagaaagatgggctacttcatgatccagatctacaccccctgcatcatgaccgtgatcctgagccaggtgagcttctggatcaacaaggagagcgtgcccgccagaaccgtgttcggcatcaccaccgtgctgaccatgaccaccctgagcatcagcgccagacacagcctgcccaaggtgagctacgccaccgccatggactggttcatcgccgtgtgcttcgccttcgtgttcagcgccctgatcgagttcgccgccgtgaactacttcaccaacctgcagacccagaaggccaagagaaaggcccagttcgccgccccccccaccgtgaccatcagcaaggccaccgagcccctggaggccgagatcgtgctgcaccccgacagcaagtaccacctgaagaagagaatcaccagcctgagcctgcccatcgtgagcagcagcgaggccaacaaggtgctgaccagagcccccatcctgcagagcacccccgtgacccccccccccctgagccccgccttcggcggcaccagcaagatcgaccagtacagcagaatcctgttccccgtggccttcgccggcttcaacctggtgtactgggtggtgtacctgagcaaggacaccatggaggtgagcagcagcgtggagtag

SEQ ID NO: 82647 - DNA, 1425 bp, synthetic construct
  misc_feature 1..1425: note = Description of Artificial Sequence: Synthetic coding sequence
  source 1..1425: mol_type = other DNA
atgtggaccgtgcagaacagagagagcctgggcctgctgagcttccccgtgatgatcaccatggtgtgctgcgcccacagcaccaacgagcccagcaacatgagctacgtgaaggagaccgtggacagactgctgaagggctacgacatcagactgagacccgacttcggcggcccccccgtggacgtgggcatgagaatcgacgtggccagcatcgacatggtgagcgaggtgaacatggactacaccctgaccatgtacttccagcagagctggaaggacaagagactgagctacagcggcatccccctgaacctgaccctggacaacagagtggccgaccagctgtgggtgcccgacacctacttcctgaacgacaagaagagcttcgtgcacggcgtgaccgtgaagaacagaatgatcagactgcaccccgacggcaccgtgctgtacggcctgagaatcaccaccaccgccgcctgcatgatggacctgagaagataccccctggacgagcagaactgcaccctggagatcgagagctacggctacaccaccgacgacatcgagttctactggaacggcggcgagggcgccgtgaccggcgtgaacaagatcgagctgccccagttcagcatcgtggactacaagatggtgagcaagaaggtggagttcaccaccggcgcctaccccagactgagcctgagcttcagactgaagagaaacatcggctacttcatcctgcagacctacatgcccagcaccctgatcaccatcctgagctgggtgagcttctggatcaactacgacgccagcgccgccagagtggccctgggcatcaccaccgtgctgaccatgaccaccatcagcacccacctgagagagaccctgcccaagatcccctacgtgaaggccatcgacatctacctgatgggctgcttcgtgttcgtgttcctggccctgctggagtacgccttcgtgaactacatcttcttcggcaagggcccccagaagaagggcgccagcaagcaggaccagagcgccaacgagaagaacaagctggagatgaacaaggtgcaggtggacgcccacggcaacatcctgctgagcaccctggagatcagaaacgagaccagcggcagcgaggtgctgaccagcgtgagcgaccccaaggccaccatgtacagctacgacagcgccagcatccagtacagaaagcccctgagcagcagagaggcctacggcagagccctggacagacacggcgtgcccagcaagggcagaatcagaagaagagccagccagctgaaggtgaagatccccgacctgaccgacgtgaacagcatcgacaagtggagcagaatgttcttccccatcaccttcagcctgttcaacgtggtgtactggctgtactacgtgcactag

SEQ ID NO: 82648 - DNA, 1215 bp, synthetic construct
  misc_feature 1..1215: note = Description of Artificial Sequence: Synthetic coding sequence
  source 1..1215: mol_type = other DNA
atgaccttcgcctgcggcagaaccagcgaggactacaccctgaccatgtacttccagcagagctggaaggacaagagactgagctacagcggcatccccctgaacctgaccctggacaacagagtggccgaccagctgtgggtgcccgacacctacttcctgaacgacaagaagagcttcgtgcacggcgtgaccgtgaagaacagaatgatcagactgcaccccgacggcaccgtgctgtacggcctgagaatcaccaccaccgccgcctgcatgatggacctgagaagataccccctggacgagcagaactgcaccctggagatcgagagctacggctacaccaccgacgacatcgagttctactggaacggcggcgagggcgccgtgaccggcgtgaacaagatcgagctgccccagttcagcatcgtggactacaagatggtgagcaagaaggtggagttcaccaccggcgcctaccccagactgagcctgagcttcagactgaagagaaacatcggctacttcatcctgcagacctacatgcccagcaccctgatcaccatcctgagctgggtgagcttctggatcaactacgacgccagcgccgccagagtggccctgggcatcaccaccgtgctgaccatgaccaccatcagcacccacctgagagagaccctgcccaagatcccctacgtgaaggccatcgacatctacctgatgggctgcttcgtgttcgtgttcctggccctgctggagtacgccttcgtgaactacatcttcttcggcaagggcccccagaagaagggcgccagcaagcaggaccagagcgccaacgagaagaacaagctggagatgaacaaggtgcaggtggacgcccacggcaacatcctgctgagcaccctggagatcagaaacgagaccagcggcagcgaggtgctgaccagcgtgagcgaccccaaggccaccatgtacagctacgacagcgccagcatccagtacagaaagcccctgagcagcagagaggcctacggcagagccctggacagacacggcgtgcccagcaagggcagaatcagaagaagagccagccagctgaaggtgaagatccccgacctgaccgacgtgaacagcatcgacaagtggagcagaatgttcttccccatcaccttcagcctgttcaacgtggtgtactggctgtactacgtgcactag

SEQ ID NO: 82649 - DNA, 1539 bp, synthetic construct
  misc_feature 1..1539: note = Description of Artificial Sequence: Synthetic coding sequence
  source 1..1539: mol_type = other DNA
atgtggagagtgagaaagagaggctacttcggcatctggagcttccccctgatcatcgccgccgtgtgcgcccagagcgtgaacgaccccagcaacatgagcctggtgaaggagaccgtggacagactgctgaagggctacgacatcagactgagacccgacttcggcggcccccccgtggccgtgggcatgaacatcgacatcgccagcatcgacatggtgagcgaggtgaacatggactacaccctgaccatgtacttccagcaggcctggagagacaagagactgagctacaacgtgatccccctgaacctgaccctggacaacagagtggccgaccagctgtgggtgcccgacacctacttcctgaacgacaagaagagcttcgtgcacggcgtgaccgtgaagaacagaatgatcagactgcaccccgacggcaccgtgctgtacggcctgagaatcaccaccaccgccgcctgcatgatggacctgagaagataccccctggacgagcagaactgcaccctggagatcgagagctacggctacaccaccgacgacatcgagttctactggagaggcgacgacaacgccgtgaccggcgtgaccaagatcgagctgccccagttcagcatcgtggactacaagctgatcaccaagaaggtggtgttcagcaccggcagctaccccagactgagcctgagcttcaagctgaagagaaacatcggctacttcatcctgcagacctacatgcccagcatcctgatcaccatcctgagctgggtgagcttctggatcaactacgacgccagcgccgccagagtggccctgggcatcaccaccgtgctgaccatgaccaccatcaacacccacctgagagagaccctgcccaagatcccctacgtgaaggccatcgacatgtacctgatgggctgcttcgtgttcgtgttcatggccctgctggagtacgccctggtgaactacatcttcttcggcagaggcccccagagacagaagaaggccgccgagaaggccgccagcgccaacaacgagaagatgagactggacgtgaacaagatcttctacaaggacatcaagcagaacggcacccagtacagaagcctgtgggaccccaccggcaacctgagccccaccagaagaaccaccaactacgacttcagcctgtacaccatggacccccacgagaacatcctgctgagcaccctggagatcaagaacgagatggccaccagcgaggccgtgatgggcctgggcgaccccagaagcaccatgctggcctacgacgccagcagcatccagtacagaaaggccggcctgcccagacacagcttcggcagaaacgccctggagagacacgtggcccagaagaagagcagactgagaagaagagccagccagctgaagatcaccatccccgacctgaccgacgtgaacgccatcgacagatggagcagaatcttcttccccgtggtgttcagcttcttcaacatcgtgtactggctgtactacgtgaactag

SEQ ID NO: 82650 - DNA, 1425 bp, synthetic construct
  misc_feature 1..1425: note = Description of Artificial Sequence: Synthetic coding sequence
  source 1..1425: mol_type = other DNA
atgtggagagtgagaaagagaggctacttcggcatctggagcttccccctgatcatcgccgccgtgtgcgcccagagcgtgaacgaccccagcaacatgagcctggtgaaggagaccgtggacagactgctgaagggctacgacatcagactgagacccgacttcggcggcccccccgtggccgtgggcatgaacatcgacatcgccagcatcgacatggtgagcgaggtgaacatggactacaccctgaccatgtacttccagcaggcctggagagacaagagactgagctacaacgtgatccccctgaacctgaccctggacaacagagtggccgaccagctgtgggtgcccgacacctacttcctgaacgacaagaagagcttcgtgcacggcgtgaccgtgaagaacagaatgatcagactgcaccccgacggcaccgtgctgtacggcctgagaatcaccaccaccgccgcctgcatgatggacctgagaagataccccctggacgagcagaactgcaccctggagatcgagagctacggctacaccaccgacgacatcgagttctactggagaggcgacgacaacgccgtgaccggcgtgaccaagatcgagctgccccagttcagcatcgtggactacaagctgatcaccaagaaggtggtgttcagcaccggcagctaccccagactgagcctgagcttcaagctgaagagaaacatcggctacttcatcctgcagacctacatgcccagcatcctgatcaccatcctgagctgggtgagcttctggatcaactacgacgccagcgccgccagagtggccctgggcatcaccaccgtgctgaccatgaccaccatcaacacccacctgagagagaccctgcccaagatcccctacgtgaaggccatcgacatgtacctgatgggctgcttcgtgttcgtgttcatggccctgctggagtacgccctggtgaactacatcttcttcggcagaggcccccagagacagaagaaggccgccgagaaggccgccagcgccaacaacgagaagatgagactggacgtgaacaagatggacccccacgagaacatcctgctgagcaccctggagatcaagaacgagatggccaccagcgaggccgtgatgggcctgggcgaccccagaagcaccatgctggcctacgacgccagcagcatccagtacagaaaggccggcctgcccagacacagcttcggcagaaacgccctggagagacacgtggcccagaagaagagcagactgagaagaagagccagccagctgaagatcaccatccccgacctgaccgacgtgaacgccatcgacagatggagcagaatcttcttccccgtggtgttcagcttcttcaacatcgtgtactggctgtactacgtgaactag

SEQ ID NO: 82651 - DNA, 1539 bp, synthetic construct; identical to SEQ ID NO: 82649
  misc_feature 1..1539: note = Description of Artificial Sequence: Synthetic coding sequence
  source 1..1539: mol_type = other DNA

SEQ ID NO: 82652 - DNA, 945 bp, synthetic construct
  misc_feature 1..945: note = Description of Artificial Sequence: Synthetic coding sequence
  source 1..945: mol_type = other DNA
atgatggacctgagaagataccccctggacgagcagaactgcaccctggagatcgagagctacggctacaccaccgacgacatcgagttctactggagaggcgacgacaacgccgtgaccggcgtgaccaagatcgagctgccccagttcagcatcgtggactacaagctgatcaccaagaaggtggtgttcagcaccggcagctaccccagactgagcctgagcttcaagctgaagagaaacatcggctacttcatcctgcagacctacatgcccagcatcctgatcaccatcctgagctgggtgagcttctggatcaactacgacgccagcgccgccagagtggccctgggcatcaccaccgtgctgaccatgaccaccatcaacacccacctgagagagaccctgcccaagatcccctacgtgaaggccatcgacatgtacctgatgggctgcttcgtgttcgtgttcatggccctgctggagtacgccctggtgaactacatcttcttcggcagaggcccccagagacagaagaaggccgccgagaaggccgccagcgccaacaacgagaagatgagactggacgtgaacaagatggacccccacgagaacatcctgctgagcaccctggagatcaagaacgagatggccaccagcgaggccgtgatgggcctgggcgaccccagaagcaccatgctggcctacgacgccagcagcatccagtacagaaaggccggcctgcccagacacagcttcggcagaaacgccctggagagacacgtggcccagaagaagagcagactgagaagaagagccagccagctgaagatcaccatccccgacctgaccgacgtgaacgccatcgacagatggagcagaatcttcttccccgtggtgttcagcttcttcaacatcgtgtactggctgtactacgtgaactag

SEQ ID NO: 82653 - DNA, 1236 bp, synthetic construct
  misc_feature 1..1236: note = Description of Artificial Sequence: Synthetic coding sequence
  source 1..1236: mol_type = other DNA
atgaacatcgacatcgccagcatcgacatggtgagcgaggtgaacatggactacaccctgaccatgtacttccagcaggcctggagagacaagagactgagctacaacgtgatccccctgaacctgaccctggacaacagagtggccgaccagctgtgggtgcccgacacctacttcctgaacgacaagaagagcttcgtgcacggcgtgaccgtgaagaacagaatgatcagactgcaccccgacggcaccgtgctgtacggcctgagaatcaccaccaccgccgcctgcatgatggacctgagaagataccccctggacgagcagaactgcaccctggagatcgagagctacggctacaccaccgacgacatcgagttctactggagaggcgacgacaacgccgtgaccggcgtgaccaagatcgagctgccccagttcagcatcgtggactacaagctgatcaccaagaaggtggtgttcagcaccggcagctaccccagactgagcctgagcttcaagctgaagagaaacatcggctacttcatcctgcagacctacatgcccagcatcctgatcaccatcctgagctgggtgagcttctggatcaactacgacgccagcgccgccagagtggccctgggcatcaccaccgtgctgaccatgaccaccatcaacacccacctgagagagaccctgcccaagatcccctacgtgaaggccatcgacatgtacctgatgggctgcttcgtgttcgtgttcatggccctgctggagtacgccctggtgaactacatcttcttcggcagaggcccccagagacagaagaaggccgccgagaaggccgccagcgccaacaacgagaagatgagactggacgtgaacaagatggacccccacgagaacatcctgctgagcaccctggagatcaagaacgagatggccaccagcgaggccgtgatgggcctgggcgaccccagaagcaccatgctggcctacgacgccagcagcatccagtacagaaaggccggcctgcccagacacagcttcggcagaaacgccctggagagacacgtggcccagaagaagagcagactgagaagaagagccagccagctgaagatcaccatccccgacctgaccgacgtgaacgccatcgacagatggagcagaatcttcttccccgtggtgttcagcttcttcaacatcgtgtactggctgtactacgtgaactag

SEQ ID NO: 82654 - DNA, 1425 bp, synthetic construct; identical to SEQ ID NO: 82650
  misc_feature 1..1425: note = Description of Artificial Sequence: Synthetic coding sequence
  source 1..1425: mol_type = other DNA

SEQ ID NO: 82655 - DNA, 1422 bp, synthetic construct
  misc_feature 1..1422: note = Description of Artificial Sequence: Synthetic coding sequence
  source 1..1422: mol_type = other DNA
atgtgcagcggcctgctggagctgctgctgcccatctggctgagctggaccctgggcaccagaggcagcgagcccagaagcgtgaacgaccccggcaacatgagcttcgtgaaggagaccgtggacaagctgctgaagggctacgacatcagactgagacccgacttcggcggcccccccgtgtgcgtgggcatgaacatcgacatcgccagcatcgacatggtgagcgaggtgaacatggactacaccctgaccatgtacttccagcagtactggagagacaagagactggcctacagcggcatccccctgaacctgaccctggacaacagagtggccgaccagctgtgggtgcccgacacctacttcctgaacgacaagaagagcttcgtgcacggcgtgaccgtgaagaacagaatgatcagactgcaccccgacggcaccgtgctgtacggcctgagaatcaccaccaccgccgcctgcatgatggacctgagaagataccccctggacgagcagaactgcaccctggagatcgagagctacggctacaccaccgacgacatcgagttctactggagaggcggcgacaaggccgtgaccggcgtggagagaatcgagctgccccagttcagcatcgtggagcacagactggtgagcagaaacgtggtgttcgccaccggcgcctaccccagactgagcctgagcttcagactgaagagaaacatcggctacttcatcctgcagacctacatgcccagcatcctgatcaccatcctgagctgggtgagcttctggatcaactacgacgccagcgccgccagagtggccctgggcatcaccaccgtgctgaccatgaccaccatcaacacccacctgagagagaccctgcccaagatcccctacgtgaaggccatcgacatgtacctgatgggctgcttcgtgttcgtgttcctggccctgctggagtacgccttcgtgaactacatcttcttcggcagaggcccccagagacagaagaagctggccgagaagaccgccaaggccaagaacgacagaagcaagagcgagagcaacagagtggacgcccacggcaacatcctgctgaccagcctggaggtgcacaacgagatgaacgaggtgagcggcggcatcggcgacaccagaaacagcgccatcagcttcgacaacagcggcatccagtacagaaagcagagcatgcccagagagggccacggcagattcctgggcgacagaagcctgccccacaagaagacccacctgagaagaagaagcagccagctgaagatcaagatccccgacctgaccgacgtgaacgccatcgacagatggagcagaatcgtgttccccttcaccttcagcctgttcaacctggtgtactggctgtactacgtgaactag

SEQ ID NO: 82656 - DNA, 1422 bp, synthetic construct
  misc_feature 1..1422: note = Description of Artificial Sequence: Synthetic coding sequence
  source 1..1422: mol_type = other DNA
atgtggggcctggccggcggcagactgttcggcatcttcagcgcccccgtgctggtggccgtggtgtgctgcgcccagagcgtgaacgaccccggcaacatgagcttcgtgaaggagaccgtggacaagctgctgaagggctacgacatcagactgagacccgacttcggcggcccccccgtgtgcgtgggcatgaacatcgacatcgccagcatcgacatggtgagcgaggtgaacatggactacaccctgaccatgtacttccagcagtactggagagacaagagactggcctacagcggcatccccctgaacctgaccctggacaacagagtggccgaccagctgtgggtgcccgacacctacttcctgaacgacaagaagagcttcgtgcacggcgtgaccgtgaagaacagaatgatcagactgcaccccgacggcaccgtgctgtacggcctgagaatcaccaccaccgccgcctgcatgatggacctgagaagataccccctggacgagcagaactgcaccctggagatcgagagctacggctacaccaccgacgacatcgagttctactggagaggcggcgacaaggccgtgaccggcgtggagagaatcgagctgccccagttcagcatcgtggagcacagactggtgagcagaaacgtggtgttcgccaccggcgcctaccccagactgagcctgagcttcagactgaagagaaacatcggctacttcatcctgcagacctacatgcccagcatcctgatcaccatcctgagctgggtgagcttctggatcaactacgacgccagcgccgccagagtggccctgggcatcaccaccgtgctgaccatgaccaccatcaacacccacctgagagagaccctgcccaagatcccctacgtgaaggccatcgacatgtacctgatgggctgcttcgtgttcgtgttcctggccctgctggagtacgccttcgtgaactacatcttcttcggcagaggcccccagagacagaagaagctggccgagaagaccgccaaggccaagaacgacagaagcaagagcgagagcaacagagtggacgcccacggcaacatcctgctgaccagcctggaggtgcacaacgagatgaacgaggtgagcggcggcatcggcgacaccagaaacagcgccatcagcttcgacaacagcggcatccagtacagaaagcagagcatgcccagagagggccacggcagattcctgggcgacagaagcctgccccacaagaagacccacctgagaagaagaagcagccagctgaagatcaagatccccgacctgaccgacgtgaacgccatcgacagatggagcagaatcgtgttccccttcaccttcagcctgttcaacctggtgtactggctgtactacgtgaactag

SEQ ID NO: 82657 - DNA, 1209 bp, synthetic construct
  misc_feature 1..1209: note = Description of Artificial Sequence: Synthetic coding sequence
  source 1..1209: mol_type = other DNA
atgtgggccacctaccagaccgaggaggactacaccctgaccatgtacttccagcagtactggagagacaagagactggcctacagcggcatccccctgaacctgaccctggacaacagagtggccgaccagctgtgggtgcccgacacctacttcctgaacgacaagaagagcttcgtgcacggcgtgaccgtgaagaacagaatgatcagactgcaccccgacggcaccgtgctgtacggcctgagaatcaccaccaccgccgcctgcatgatggacctgagaagataccccctggacgagcagaactgcaccctggagatcgagagctacggctacaccaccgacgacatcgagttctactggagaggcggcgacaaggccgtgaccggcgtggagagaatcgagctgccccagttcagcatcgtggagcacagactggtgagcagaaacgtggtgttcgccaccggcgcctaccccagactgagcctgagcttcagactgaagagaaacatcggctacttcatcctgcagacctacatgcccagcatcctgatcaccatcctgagctgggtgagcttctggatcaactacgacgccagcgccgccagagtggccctgggcatcaccaccgtgctgaccatgaccaccatcaacacccacctgagagagaccctgcccaagatcccctacgtgaaggccatcgacatgtacctgatgggctgcttcgtgttcgtgttcctggccctgctggagtacgccttcgtgaactacatcttcttcggcagaggcccccagagacagaagaagctggccgagaagaccgccaaggccaagaacgacagaagcaagagcgagagcaacagagtggacgcccacggcaacatcctgctgaccagcctggaggtgcacaacgagatgaacgaggtgagcggcggcatcggcgacaccagaaacagcgccatcagcttcgacaacagcggcatccagtacagaaagcagagcatgcccagagagggccacggcagattcctgggcgacagaagcctgccccacaagaagacccacctgagaagaagaagcagccagctgaagatcaagatccccgacctgaccgacgtgaacgccatcgacagatggagcagaatcgtgttccccttcaccttcagcctgttcaacctggtgtactggctgtactacgtgaactag

SEQ ID NO: 82658 - DNA, 1167 bp, synthetic construct
  misc_feature 1..1167: note = Description of Artificial Sequence: Synthetic coding sequence
  source 1..1167: mol_type = other DNA
atgtacttccagcagtactggagagacaagagactggcctacagcggcatccccctgaacctgaccctggacaacagagtggccgaccagctgtgggtgcccgacacctacttcctgaacgacaagaagagcttcgtgcacggcgtgaccgtgaagaacagaatgatcagactgcaccccgacggcaccgtgctgtacggcctgagaatcaccaccaccgccgcctgcatgatggacctgagaagataccccctggacgagcagaactgcaccctggagatcgagagctacggctacaccaccgacgacatcgagttctactggagaggcggcgacaaggccgtgaccggcgtggagagaatcgagctgccccagttcagcatcgtggagcacagactggtgagcagaaacgtggtgttcgccaccggcgcctaccccagactgagcctgagcttcagactgaagagaaacatcggctacttcatcctgcagacctacatgcccagcatcctgatcaccatcctgagctgggtgagcttctggatcaactacgacgccagcgccgccagagtggccctgggcatcaccaccgtgctgaccatgaccaccatcaacacccacctgagagagaccctgcccaagatcccctacgtgaaggccatcgacatgtacctgatgggctgcttcgtgttcgtgttcctggccctgctggagtacgccttcgtgaactacatcttcttcggcagaggcccccagagacagaagaagctggccgagaagaccgccaaggccaagaacgacagaagcaagagcgagagcaacagagtggacgcccacggcaacatcctgctgaccagcctggaggtgcacaacgagatgaacgaggtgagcggcggcatcggcgacaccagaaacagcgccatcagcttcgacaacagcggcatccagtacagaaagcagagcatgcccagagagggccacggcagattcctgggcgacagaagcctgccccacaagaagacccacctgagaagaagaagcagccagctgaagatcaagatccccgacctgaccgacgtgaacgccatcgacagatggagcagaatcgtgttccccttcaccttcagcctgttcaacctggtgtactggctgtactacgtgaactag

SEQ ID NO: 82659 - DNA, 417 bp, synthetic construct
  misc_feature 1..417: note = Description of Artificial Sequence: Synthetic coding sequence
  source 1..417: mol_type = other DNA
atgtacttccagcagtactggagagacaagagactggcctacagcggcatccccctgaacctgaccctggacaacagagtggccgaccagctgtgggtgcccgacacctacttcctgaacgacaagaagagcttcgtgcacggcgtgaccgtgaagaacagaatgatcagactgcaccccgacggcaccgtgctgtacggcctgagaatcaccaccaccgccgcctgcatgatggacctgagaagataccccctggacgagcagaactgcaccctggagatcgagagctacggctacaccaccgacgacatcgagttctactggagaggcggcgacaaggccgtgaccggcgtggagagaatcgagctgccccagttcagcatcgtggagcacagactggtgagcagaaacgtgtag

SEQ ID NO: 82660 - DNA, 1359 bp, synthetic construct
  misc_feature 1..1359: note = Description of Artificial Sequence: Synthetic coding sequence
  source 1..1359: mol_type = other DNA
atggacgcccccgccagactgctggcccccctgctgctgctgtgcgcccagcagctgagaggcaccagagccatgaacgacatcggcgactacgtgggcagcaacctggagatcagctggctgcccaacctggacggcctgatcgccggctacgccagaaacttcagacccggcatcggcggcccccccgtgaacgtggccctggccctggaggtggccagcatcgaccacatcagcgaggccaacatggagtacaccatgaccgtgttcctgcaccagagctggagagacagcagactgagctacaaccacaccaacgagaccctgggcctggacagcagattcgtggacaagctgtggctgcccgacaccttcatcgtgaacgccaagagcgcctggttccacgacgtgaccgtggagaacaagctgatcagactgcagcccgacggcgtgatcctgtacagcatcagaatcaccagcaccgtggcctgcgacatggacctggccaagtaccccatggacgagcaggagtgcatgctggacctggagagctacggctacagcagcgaggacatcgtgtactactggagcgagagccaggagcacatccacggcctggacaagctgcagctggcccagttcaccatcaccagctacagattcaccaccgagctgatgaacttcaagagcgccggccagttccccagactgagcctgcacttccacctgagaagaaacagaggcgtgtacatcatccagagctacatgcccagcgtgctgctggtggccatgagctgggtgagcttctggatcagccaggccgccgtgcccgccagagtgagcctgggcatcaccaccgtgctgaccatgaccaccctgatggtgagcgccagaagcagcctgcccagagccagcgccatcaaggccctggacgtgtacttctggatctgctacgtgttcgtgttcgccgccctggtggagtacgccttcgcccacttcaacgccgactacagaaagaagcagaaggccaaggtgaaggtgagcagacccagagccgagatggacgtgagaaacgccatcgtgctgttcagcctgagcgccgccggcgtgacccaggagctggccatcagcagaagacagagaagagtgcccggcaacctgatgggcagctacagaagcgtgggcgtggagaccggcgagaccaagaaggagggcgccgccagaagcggcggccagggcggcatcagagccagactgagacccatcgacgccgacaccatcgacatctacgccagagccgtgttccccgccgccttcgccgccgtgaacgtgatctactgggccgcctacgccatgtag

SEQ ID NO: 82661 - DNA, 1521 bp, synthetic construct
  misc_feature 1..1521: note = Description of Artificial Sequence: Synthetic coding sequence
  source 1..1521: mol_type = other DNA
atgctgagcaaggtgctgcccgtgctgctgggcatcctgctgatcctgcagagcagagtggagggcccccagaccgagagcaagaacgaggccagcagcagagacgtggtgtacggcccccagccccagcccctggagaaccagctgctgagcgaggagaccaagagcaccgagaccgagaccggcagcagagtgggcaagctgcccgaggccagcagaatcctgaacaccatcctgagcaactacgaccacaagctgagacccggcatcggcgagaagcccaccgtggtgaccgtggagatcagcgtgaacagcctgggccccctgagcatcctggacatggagtacaccatcgacatcatcttcagccagacctggtacgacgagagactgtgctacaacgacaccttcgagagcctggtgctgaacggcaacgtggtgagccagctgtggatccccgacaccttcttcagaaacagcaagagaacccacgagcacgagatcaccatgcccaaccagatggtgagaatctacaaggacggcaaggtgctgtacaccatcagaatgaccatcgacgccggctgcagcctgcacatgctgagattccccatggacagccacagctgccccctgagcttcagcagcttcagctaccccgagaacgagatgatctacaagtgggagaacttcaagctggagatcaacgagaagaacagctggaagctgttccagttcgacttcaccggcgtgagcaacaagaccgagatcatcaccacccccgtgggcgacttcatggtgatgaccatcttcttcaacgtgagcagaagattcggctacgtggccttccagaactacgtgcccagcagcgtgaccaccatgctgagctgggtgagcttctggatcaagaccgagagcgcccccgccagaaccagcctgggcatcaccagcgtgctgaccatgaccaccctgggcaccttcagcagaaagaacttccccagagtgagctacatcaccgccctggacttctacatcgccatctgcttcgtgttctgcttctgcgccctgctggagttcgccgtgctgaacttcctgatctacaaccagaccaaggcccacgccagccccaagctgagacaccccagaatcaacagcagagcccacgccagaaccagagccagaagcagagcctgcgccagacagcaccaggaggccttcgtgtgccagatcgtgaccaccgagggcagcgacggcgaggagagacccagctgcagcgcccagcagccccccagccccggcagccccgagggccccagaagcctgtgcagcaagctggcctgctgcgagtggtgcaagagattcaagaagtacttctgcatggtgcccgactgcgagggcagcacctggcagcagggcagactgtgcatccacgtgtacagactggacaactacagcagagtggtgttccccgtgaccttcttcttcttcaacgtgctgtactggctggtgtgcctgaacctgtag

SEQ ID NO: 82662 - DNA, 420 bp, synthetic construct
  misc_feature 1..420: note = Description of Artificial Sequence: Synthetic coding sequence
  source 1..420: mol_type = other DNA
atgagaagcccctgccccaccagatggagcgccagcaccagaatggccagatgctgcacccagctggtgagctaccccgagaacgagatgatctacaagtgggagaacttcaagctggagatcaacgagaagaacagctggaagctgttccagttcgacttcaccggcgtgagcaacaagaccgagatcatcaccacccccgtgggcgacctgaacgaggagcccagagacctgcccagagtggcccccagagccaccctggagaccctgttcacccaccccgaccaggtgcagggcagcgagggcaccgccctgatcgtgagcagaatgtggatggagcccgtgacccagcccgccatctgcagagagagacacctggtgctgctgcccttcaagatccccagacaggaggacttctag

SEQ ID NO: 82663 - DNA, 1398 bp, synthetic construct
  misc_feature 1..1398: note = Description of Artificial Sequence: Synthetic coding sequence
  source 1..1398: mol_type = other DNA
atgggccccctgaaggccttcctgttcagccccttcctgctgagaagccagagcagaggcgtgagactggtgttcctgctgctgaccctgcacctgggcaactgcgtggacaaggccgacgacgaggacgacgaggacctgaccgtgaacaagacctgggtgctggcccccaagatccacgagggcgacatcacccagatcctgaacagcctgctgcagggctacgacaacaagctgagacccgacatcggcgtgagacccaccgtgatcgagaccgacgtgtacgtgaacagcatcggccccgtggaccccatcaacatggagtacaccatcgacatcatcttcgcccagacctggttcgacagcagactgaagttcaacagcaccatgaaggtgctgatgctgaacagcaacatggtgggcaagatctggatccccgacaccttcttcagaaacagcagaaagagcgacgcccactggatcaccacccccaacagactgctgagaatctggaacgacggcagagtgctgtacaccctgagactgaccatcaacgccgagtgctacctgcagctgcacaacttccccatggacgagcacagctgccccctggagttcagcagctacggctaccccaagaacgagatcgagtacaagtggaagaagcccagcgtggaggtggccgaccccaagtactggagactgtaccagttcgccttcgtgggcctgagaaacagcaccgagatcacccacaccatcagcggcgactacgtgatcatgaccatcttcttcgacctgagcagaagaatgggctacttcaccatccagacctacatcccctgcatcctgaccgtggtgctgagctgggtgagcttctggatcaacaaggacgccgtgcccgccagaaccagcctgggcatcaccaccgtgctgaccatgaccaccctgagcaccatcgccagaaagagcctgcccaaggtgagctacgtgaccgccatggacctgttcgtgagcgtgtgcttcatcttcgtgttcgccgccctgatggagtacggcaccctgcactacttcaccagcaaccagaagggcaagaccgccaccaaggacagaaagctgaagaacaaggccagcatgacccccggcctgcaccccggcagcaccctgatccccatgaacaacatcagcgtgccccaggaggacgactacggctaccagtgcctggagggcaaggactgcgccagcttcttctgctgcttcgaggactgcagaaccggcagctggagagagggcagaatccacatcagaatcgccaagatcgacagctacagcagaatcttcttccccaccgccttcgccctgttcaacctggtgtactgggtgggctacctgtacctgtag

SEQ ID NO: 82664 - DNA, 1260 bp, synthetic construct
  misc_feature 1..1260: note = Description of Artificial Sequence: Synthetic coding sequence
  source 1..1260: mol_type = other DNA
atgggccccctgaaggccttcctgttcagccccttcctgctgagaagccagagcagaggcgtgagactggtgttcctgctgctgaccctgcacctgggcaactgcgtggacaaggccgacgacgaggacgacgaggacctgaccgtgaacaagacctgggtgctggcccccaagatccacgagggcgacatcacccagatcctgaacagcctgctgcagggctacgacaacaagctgagacccgacatcggcgtgagacccaccgtgatcgagaccgacgtgtacgtgaacagcatcggccccgtggaccccatcaacatggagtacaccatcgacatcatcttcgcccagacctggttcgacagcagactgaagttcaacagcaccatgaaggtgctgatgctgaacagcaacatggtgggcaagatctggatccccgacaccttcttcagaaacagcagaaagagcgacgcccactggatcaccacccccaacagactgctgagaatctggaacgacggcagagtgctgtacaccctgagactgaccatcaacgccgagtgctacctgcagctgcacaacttccccatggacgagcacagctgccccctggagttcagcagctacggctaccccaagaacgagatcgagtacaagtggaagaagcccagcgtggaggtggccgaccccaagtactggagactgtaccagttcgccttcgtgggcctgagaaacagcaccgagatcacccacaccatcagcggcgactacgtgatcatgaccatcttcttcgacctgagcagaagaatgggctacttcaccatccagacctacatcccctgcatcctgaccgtggtgctgagctgggtgagcttctggatcaacaaggacgccgtgcccgccagaaccagcctgggcatcaccaccgtgctgaccatgaccaccctgagcaccatcgccagaaagagcctgcccaaggtgagctacgtgaccgccatggacctgttcgtgagcgtgtgcttcatcttcgtgttcgccgccctgatggagtacggcaccctgcactacttcaccagcaaccagaagggcaagaccgccaccaaggacagaaagctgaagaacaaggccagcatgacccccggcctgcaccccggcagcaccctgatccccatgaacaacatcagcgtgccccaggaggacgactacggctaccagtgcctggagggcagaaaggacacccacacccactgccagaactag

SEQ ID NO: 82665 - DNA, 1428 bp, synthetic construct
  misc_feature 1..1428: note = Description of Artificial Sequence: Synthetic coding sequence
  source 1..1428: mol_type = other DNA
atgagcagccccaacatctggagcaccggcagcagcgtgtacagcacccccgtgttcagccagaagatgaccgtgtggatcctgctgctgctgagcctgtaccccggcttcaccagccagaagagcgacgacgactacgaggactacgccagcaacaagacctgggtgctgacccccaaggtgcccgagggcgacgtgaccgtgatcctgaacaacctgctggagggctacgacaacaagctgagacccgacatcggcgtgaagcccaccctgatccacaccgacatgtacgtgaacagcatcggccccgtgaacgccatcaacatggagtacaccatcgacatcttcttcgcccagacctggtacgacagaagactgaagttcaacagcaccatcaaggtgctgagactgaacagcaacatggtgggcaagatctggatccccgacaccttcttcagaaacagcaagaaggccgacgcccactggatcaccacccccaacagaatgctgagaatctggaacgacggcagagtgctgtacaccctgagactgaccatcgacgccgagtgccagctgcagctgcacaacttccccatggacgagcacagctgccccctggagttcagcagctacggctaccccagagaggagatcgtgtaccagtggaagagaagcagcgtggaggtgggcgacaccagaagctggagactgtaccagttcagcttcgtgggcctgagaaacaccaccgaggtggtgaagaccaccagcggcgactacgtggtgatgagcgtgtacttcgacctgagcagaagaatgggctacttcaccatccagacctacatcccctgcaccctgatcgtggtgctgagctgggtgagcttctggatcaacaaggacgccgtgcccgccagaaccagcctgggcatcaccaccgtgctgaccatgaccaccctgagcaccatcgccagaaagagcctgcccaaggtgagctacgtgaccgccatggacctgttcgtgagcgtgtgcttcatcttcgtgttcagcgccctggtggagtacggcaccctgcactacttcgtgagcaacagaaagcccagcaaggacaaggacaagaagaagaagaaccccctgctgagaatgttcagcttcaaggcccccaccatcgacatcagacccagaagcgccaccatccagatgaacaacgccacccacctgcaggagagagacgaggagtacggctacgagtgcctggacggcaaggactgcgccagcttcttctgctgcttcgaggactgcagaaccggcgcctggagacacggcagaatccacatcagaatcgccaagatggacagctacgccagaatcttcttccccaccgccttctgcctgttcaacctggtgtactgggtgagctacctgtacctgtag

SEQ ID NO: 82666 - DNA, 1404 bp, synthetic construct
  misc_feature 1..1404: note = Description of Artificial Sequence: Synthetic coding sequence
  source 1..1404: mol_type = other DNA
atgagcagccccaacatctggagcaccggcagcagcgtgtacagcacccccgtgttcagccagaagatgaccgtgtggatcctgctgctgctgagcctgtaccccggcttcaccagccagaagagcgacgacgactacgaggactacgccagcaacaagacctgggtgctgacccccaaggtgcccgagggcgacgtgaccgtgatcctgaacaacctgctggagggctacgacaacaagctgagacccgacatcggcgtgaagcccaccctgatccacaccgacatgtacgtgaacagcatcggccccgtgaacgccatcaacatggagtacaccatcgacatcttcttcgcccagacctggtacgacagaagactgaagttcaacagcaccatcaaggtgctgagactgaacagcaacatggtgggcaagatctggatccccgacaccttcttcagaaacagcaagaaggccgacgcccactggatcaccacccccaacagaatgctgagaatctggaacgacggcagagtgctgtacaccctgagactgaccatcgacgccgagtgccagctgcagctgcacaacttccccatggacgagcacagctgccccctggagttcagcagctacggctaccccagagaggagatcgtgtaccagtggaagagaagcagcgtggaggtgggcgacaccagaagctggagactgtaccagttcagcttcgtgggcctgagaaacaccaccgaggtggtgaagaccaccagcggcgactacgtggtgatgagcgtgtacttcgacctgagcagaagaatgggctacttcaccatccagacctacatcccctgcaccctgatcgtggtgctgagctgggtgagcttctggatcaacaaggacgccgtgcccgccagaaccagcctgggcatcaccaccgtgctgaccatgaccaccctgagcaccatcgccagaaagagcctgcccaaggtgagctacgtgaccgccatggacctgttcgtgagcgtgtgcttcatcttcgtgttcagcgccctggtggagtacggcaccctgcactacttcgtgagcaacagaaagcccagcaaggacaaggacaagaagaagaagaaccccgcccccaccatcgacatcagacccagaagcgccaccatccagatgaacaacgccacccacctgcaggagagagacgaggagtacggctacgagtgcctggacggcaaggactgcgccagcttcttctgctgcttcgaggactgcagaaccggcgcctggagacacggcagaatccacatcagaatcgccaagatggacagctacgccagaatcttcttccccaccgccttctgcctgttcaacctggtgtactgggtgagctacctgtacctgtag

SEQ ID NO: 82667 - DNA, 1119 bp, synthetic construct
  misc_feature 1..1119: note = Description of Artificial Sequence: Synthetic coding sequence
  source 1..1119: mol_type = other DNA
atgtacgtgaacagcatcggccccgtgaacgccatcaacatggagtacaccatcgacatcttcttcgcccagacctggtacgacagaagactgaagttcaacagcaccatcaaggtgctgagactgaacagcaacatggtgggcaagatctggatccccgacaccttcttcagaaacagcaagaaggccgacgcccactggatcaccacccccaacagaatgctgagaatctggaacgacggcagagtgctgtacaccctgagactgaccatcgacgccgagtgccagctgcagctgcacaacttccccatggacgagcacagctgccccctggagttcagcagctacggctaccccagagaggagatcgtgtaccagtggaagagaagcagcgtggaggtgggcgacaccagaagctggagactgtaccagttcagcttcgtgggcctgagaaacaccaccgaggtggtgaagaccaccagcggcgactacgtggtgatgagcgtgtacttcgacctgagcagaagaatgggctacttcaccatccagacctacatcccctgcaccctgatcgtggtgctgagctgggtgagcttctggatcaacaaggacgccgtgcccgccagaaccagcctgggcatcaccaccgtgctgaccatgaccaccctgagcaccatcgccagaaagagcctgcccaaggtgagctacgtgaccgccatggacctgttcgtgagcgtgtgcttcatcttcgtgttcagcgccctggtggagtacggcaccctgcactacttcgtgagcaacagaaagcccagcaaggacaaggacaagaagaagaagaaccccgcccccaccatcgacatcagacccagaagcgccaccatccagatgaacaacgccacccacctgcaggagagagacgaggagtacggctacgagtgcctggacggcaaggactgcgccagcttcttctgctgcttcgaggactgcagaaccggcgcctggagacacggcagaatccacatcagaatcgccaagatggacagctacgccagaatcttcttccccaccgccttctgcctgttcaacctggtgtactgggtgagctacctgtacctgtag

SEQ ID NO: 82668 - DNA, 1404 bp, synthetic construct
  misc_feature 1..1404: note = Description of Artificial Sequence: Synthetic coding sequence
  source 1..1404: mol_type = other DNA
atggcccccaagctgctgctgctgctgtgcctgttcagcggcctgcacgccagaagcagaaaggtggaggaggacgagtacgaggacagcagcagcaaccagaagtgggtgctggcccccaagagccaggacaccgacgtgaccctgatcctgaacaagctgctgagagagtacgacaagaagctgagacccgacatcggcatcaagcccaccgtgatcgacgtggacatctacgtgaacagcatcggccccgtgagcagcatcaacatggagtaccagatcgacatcttcttcgcccagacctggaccgacagcagactgagattcaacagcaccatgaagatcctgaccctgaacagcaacatggtgggcctgatctggatccccgacaccatcttcagaaacagcaagaccgccgaggcccactggatcaccacccccaaccagctgctgagaatctggaacgacggcaagatcctgtacaccctgagactgaccatcaacgccgagtgccagctgcagctgcacaacttccccatggacgagcacagctgccccctgatcttcagcagctacggctaccccaaggaggagatgatctacagatggagaaagaacagcgtggaggccgccgaccagaagagctggagactgtaccagttcgacttcatgggcctgagaaacaccaccgagatcgtgaccaccagcgccggcgactacgtggtgatgaccatctacttcgagctgagcagaagaatgggctacttcaccatccagacctacatcccctgcatcctgaccgtggtgctgagctgggtgagcttctggatcaagaaggacgccacccccgccagaaccgccctgggcatcaccaccgtgctgaccatgaccaccctgagcaccatcgccagaaagagcctgcccagagtgagctacgtgaccgccatggacctgttcgtgaccgtgtgcttcctgttcgtgttcgccgccctgatggagtacgccaccctgaactactacagcagctgcagaaagcccaccaccaccaagaagaccaccagcctgctgcaccccgacagcagcagatggatccccgagagaatcagcctgcaggcccccagcaactacagcctgctggacatgagacccccccccaccgccatgatcaccctgaacaacagcgtgtactggcaggagttcgaggacacctgcgtgtacgagtgcctggacggcaaggactgccagagcttcttctgctgctacgaggagtgcaagagcggcagctggagaaagggcagaatccacatcgacatcctggagctggacagctacagcagagtgttcttccccaccagcttcctgctgttcaacctggtgtactgggtgggctacctgtacctgtag

SEQ ID NO: 82669 - DNA, 1323 bp, synthetic construct
  misc_feature 1..1323: note = Description of Artificial Sequence: Synthetic coding sequence
  source 1..1323: mol_type = other DNA
atgaactacagcctgcacctggccttcgtgtgcctgagcctgttcaccgagagaatgtgcatccagggcagccagttcaacgtggaggtgggcagaagcgacaagctgagcctgcccggcttcgagaacctgaccgccggctacaacaagttcctgagacccaacttcggcggcgagcccgtgcagatcgccctgaccctggacatcgccagcatcagcagcatcagcgagagcaacatggactacaccgccaccatctacctgagacagagatggatggaccagagactggtgttcgagggcaacaagagcttcaccctggacgccagactggtggagttcctgtgggtgcccgacacctacatcgtggagagcaagaagagcttcctgcacgaggtgaccgtgggcaacagactgatcagactgttcagcaacggcaccgtgctgtacgccctgagaatcaccaccaccgtggcctgcaacatggacctgagcaagtaccccatggacacccagacctgcaagctgcagctggagagctggggctacgacggcaacgacgtggagttcacctggctgagaggcaacgacagcgtgagaggcctggagcacctgagactggcccagtacaccatcgagagatacttcaccctggtgaccagaagccagcaggagaccggcaactacaccagactggtgctgcagttcgagctgagaagaaacgtgctgtacttcatcctggagacctacgtgcccagcaccttcctggtggtgctgagctgggtgagcttctggatcagcctggacagcgtgcccgccagaacctgcatcggcgtgaccaccgtgctgagcatgaccaccctgatgatcggcagcagaaccagcctgcccaacaccaactgcttcatcaaggccatcgacgtgtacctgggcatctgcttcagcttcgtgttcggcgccctgctggagtacgccgtggcccactacagcagcctgcagcagatggccgccaaggacagaggcaccaccaaggaggtggaggaggtgagcatcaccaacatcatcaacagcagcatcagcagcttcaagagaaagatcagcttcgccagcatcgagatcagcagcgacaacgtggactacagcgacctgaccatgaagaccagcgacaagttcaagttcgtgttcagagagaagatgggcagaatcgtggactacttcaccatccagaaccccagcaacgtggaccactacagcaagctgctgttccccctgatcttcatgctggccaacgtgttctactgggcctactacatgtacttctag

SEQ ID NO: 82670 - DNA, 159 bp, synthetic construct
  misc_feature 1..159: note = Description of Artificial Sequence: Synthetic coding sequence
  source 1..159: mol_type = other DNA
atgaactacagcctgcacctggccttcgtgtgcctgagcctgttcaccgagagaatgtgcatccagggcagccagttcaacgtggaggtgggcagaagcgacaagctgagcctgcccggcttcgagaacctgaccgccggctacaacaagttcctgtag

SEQ ID NO: 82671 - DNA, 1323 bp, synthetic construct; identical to SEQ ID NO: 82669
  misc_feature 1..1323: note = Description of Artificial Sequence: Synthetic coding sequence
  source 1..1323: mol_type = other DNA

SEQ ID NO: 82672 - DNA, 180 bp, synthetic construct
  misc_feature 1..180: note = Description of Artificial Sequence: Synthetic coding sequence
  source 1..180: mol_type = other DNA
atgaactacagcctgcacctggccttcgtgtgcctgagcctgttcaccgagagaatgtgcatccagggcagccagttcaacgtggaggtgggcagaagcgacaagctgagcctgcccggcttcgagaacctgaccgccggctacaacaagttcctgagacccaacttcggcggcgagtag

SEQ ID NO: 82673 - DNA, 279 bp, synthetic construct
  misc_feature 1..279: note = Description of Artificial Sequence: Synthetic coding sequence
  source 1..279: mol_type = other DNA
atgaactacagcctgcacctggccttcgtgtgcctgagcctgttcaccgagagaatgtgcatccagggcagccagttcaacgtggaggtgggcagaagcgacaagctgagcctgcccggcttcgagaacctgaccgccggctacaacaagttcctgagacccaacttcggcggcgagcccgtgcagatcgccctgaccctggacatcgccagcatcagcagcatcagcgagagcaacatggactacaccgccaccatctacctgagacagagatggtag

SEQ ID NO: 82674 - DNA, 516 bp, synthetic construct
  misc_feature 1..516: note = Description of Artificial Sequence: Synthetic coding sequence
  source 1..516: mol_type = other DNA
atgaactacagcctgcacctggccttcgtgtgcctgagcctgttcaccgagagaatgtgcatccagggcagccagttcaacgtggaggtgggcagaagcgacaagctgagcctgcccggcttcgagaacctgaccgccggctacaacaagttcctgagacccaacttcggcggcgagcccgtgcagatcgccctgaccctggacatcgccagcatcagcagcatcagcgagagcaacatggactacaccgccaccatctacctgagacagagatggatggaccagagactggtgttcgagggcaacaagagcttcaccctggacgccagactggtggagttcctgtgggtgcccgacacctacatcgtggagagcaagaagagcttcctgcacgaggtgaccgtgggcaacagactgatcagactgttcagcaacggcaccgtgctgtacgccctgagaatcaccaccaccgtggcctgcaacatggacctgagcaagtaccccatggacacctag

SEQ ID NO: 82675 - DNA, 570 bp, synthetic construct
  misc_feature 1..570: note = Description of Artificial Sequence: Synthetic coding sequence
  source 1..570: mol_type = other DNA
atgaactacagcctgcacctggccttcgtgtgcctgagcctgttcaccgagagaatgtgcatccagggcagccagttcaacgtggaggtgggcagaagcgacaagctgagcctgcccggcttcgagaacctgaccgccggctacaacaagttcctgagacccaacttcggcggcgagcccgtgcagatcgccctgaccctggacatcgccagcatcagcagcatcagcgagagcaacatggactacaccgccaccatctacctgagacagagatggatggaccagagactggtgttcgagggcaacaagagcttcaccctggacgccagactggtggagttcctgtgggtgcccgacacctacatcgtggagagcaagaagagcttcctgcacgaggtgaccgtgggcaacagactgatcagactgttcagcaacggcaccgtgctgtacgccctgagaatcaccaccaccgtggcctgcaacatggacctgagcaagtaccccatggacacccagacctgcaagctgcagctggagagctggggctacgacggcaacgacgtggagtag

SEQ ID NO: 82676 - DNA, 564 bp, synthetic construct
  misc_feature 1..564: note = Description of Artificial Sequence: Synthetic coding sequence
  source 1..564: mol_type = other DNA
atggactacaccgccaccatctacctgagacagagatggatggaccagagactggtgttcgagggcaacaagagcttcaccctggacgaggtgaccgtgggcaacagactgatcagactgttcagcaacggcaccgtgctgtacgccctgagaatcaccaccaccgtggcctgcaacatggacctgagcaagtaccccatggacacccagacctgcaagctgcagctggagagctggggctacgacggcaacgacgtggagttcacctggctgagaggcaacgacagcgtgagaggcctggagcacctgagactggcccagtacaccatcgagagatacttcaccctggtgaccagaagccagcaggagaccggcaactacaccagactggtgctgcagttcgagctgagaagaaacgtgctgtacttcatcctggagacctacgtgcccagcaccttcctggtggtgctgagctgggtgagcttctggatcagcctggacagcgtgcccgccagaacctgcatcggcgacaacaagggcagcagaagaagccagtactactag

SEQ ID NO: 82677 - DNA, 2826 bp, synthetic construct
  misc_feature 1..2826: note = Description of Artificial Sequence: Synthetic coding sequence
  source 1..2826: mol_type = other DNA
atggccagccccagaagcagcggccagcccggccccccccccccccccccccccccccccgccagactgctgctgctgctgctgctgcccctgctgctgcccctggcccccggcgcctggggctgggccagaggcgcccccagacccccccccagcagcccccccctgagcatcatgggcctgatgcccctgaccaaggaggtggccaagggcagcatcggcagaggcgtgctgcccgccgtggagctggccatcgagcagatcagaaacgagagcctgctgagaccctacttcctggacctgagactgtacgacaccgagtgcgacaacgccaagggcctgaaggccttctacgacgccatcaagtacggccccaaccacctgatggtgttcggcggcgtgtgccccagcgtgaccagcatcatcgccgagagcctgcagggctggaacctggtgcagctgagcttcgccgccaccacccccgtgctggccgacaagaagaagtacccctacttcttcagaaccgtgcccagcgacaacgccgtgaaccccgccatcctgaagctgctgaagcactaccagtggaagagagtgggcaccctgacccaggacgtgcagagattcagcgaggtgagaaacgacctgaccggcgtgctgtacggcgaggacatcgagatcagcgacaccgagagcttcagcaacgacccctgcaccagcgtgaagaagctgaagggcaacgacgtgagaatcatcctgggccagttcgaccagaacatggccgccaaggtgttctgctgcgcctacgaggagaacatgtacggcagcaagtaccagtggatcatccccggctggtacgagcccagctggtgggagcaggtgcacaccgaggccaacagcagcagatgcctgagaaagaacctgctggccgccatggagggctacatcggcgtggacttcgagcccctgagcagcaagcagatcaagaccatcagcggcaagaccccccagcagtacgagagagagtacaacaacaagagaagcggcgtgggccccagcaagttccacggctacgcctacgacggcatctgggtgatcgccaagaccctgcagagagccatggagaccctgcacgccagcagcagacaccagagaatccaggacttcaactacaccgaccacaccctgggcagaatcatcctgaacgccatgaacgagaccaacttcttcggcgtgaccggccaggtggtgttcagaaacggcgagagaatgggcaccatcaagttcacccagttccaggacagcagagaggtgaaggtgggcgagtacaacgccgtggccgacaccctggagatcatcaacgacaccatcagattccagggcagcgagccccccaaggacaagaccatcatcctggagcagctgagaaagatcagcctgcccctgtacagcatcctgagcgccctgaccatcctgggcatgatcatggccagcgccttcctgttcttcaacatcaagaacagaaaccagaagctgatcaagatgagcagcccctacatgaacaacctgatcatcctgggcggcatgctgagctacgccagcatcttcctgttcggcctggacggcagcttcgtgagcgagaagaccttcgagaccctgtgcaccgtgagaacctggatcctgaccgtgggctacaccaccgccttcggcgccatgttcgccaagacctggagagtgcacgccatcttcaagaacgtgaagatgaagaagaagatcatcaaggaccagaagctgctggtgatcgtgggcggcatgctgctgatcgacctgtgcatcctgatctgctggcaggccgtggaccccctgagaagaaccgtggagaagtacagcatggagcccgaccccgccggcagagacatcagcatcagacccctgctggagcactgcgagaacacccacatgaccatctggctgggcatcgtgtacgcctacaagggcctgctgatgctgttcggctgcttcctggcctgggagaccagaaacgtgagcatccccgccctgaacgacagcaagtacatcggcatgagcgtgtacaacgtgggcatcatgtgcatcatcggcgccgccgtgagcttcctgaccagagaccagcccaacgtgcagttctgcatcgtggccctggtgatcatcttctgcagcaccatcaccctgtgcctggtgttcgtgcccaagctgatcaccctgagaaccaaccccgacgccgccacccagaacagaagattccagttcacccagaaccagaagaaggaggacagcaagaccagcaccagcgtgaccagcgtgaaccaggccagcaccagcagactggagggcctgcagagcgagaaccacagactgagaatgaagatcaccgagctggacaaggacctggaggaggtgaccatgcagctgcaggacacccccgagaagaccacctacatcaagcagaaccactaccaggagctgaacgacatcctgaacctgggcaacttcaccgagagcaccgacggcggcaaggccatcctgaagaaccacctggaccagaacccccagctgcagtggaacaccaccgagcccagcagaacctgcaaggaccccatcgaggacatcaacagccccgagcacatccagagaagactgagcctgcagctgcccatcctgcaccacgcctacctgcccagcatcggcggcgtggacgccagctgcgtgagcccctgcgtgagccccaccgccagccccagacacagacacgtgccccccagcttcagagtgatggtgagcggcctgtag

SEQ ID NO: 82678 - DNA, 1179 bp, synthetic construct
  misc_feature 1..1179: note = Description of Artificial Sequence: Synthetic coding sequence
  source 1..1179: mol_type = other DNA
atgagacccggcttcggcggccccgccatccccgtgggcgtggacgtgcaggtggagagcctggacagcatcagcgaggtggacatggacttcaccatgaccctgtacctgagacactactggaaggacgagagactgagcttccccagcaccaacaacctgagcatgaccttcgacggcagactggtgaagaagatctgggtgcccgacatgttcttcgtgcacagcaagagaagcttcatccacgacaccaccaccgacaacgtgatgctgagagtgcagcccgacggcaaggtgctgtacagcctgagagtgaccgtgaccgccatgtgcaacatggacttcagcagattccccctggacacccagacctgcagcctggagatcgagagctacgcctacaccgaggacgacctgatgctgtactggaagaagggcaacgacagcctgaagaccgacgagagaatcagcctgagccagttcctgatccaggagttccacaccaccaccaagctggccttctacagcagcaccggctggtacaacagactgtacatcaacttcaccctgagaagacacatcttcttcttcctgctgcagacctacttccccgccaccctgatggtgatgctgagctgggtgagcttctggatcgacagaagagccgtgcccgccagagtgcccctgggcatcaccaccgtgctgaccatgagcaccatcatcaccggcgtgaacgccagcatgcccagagtgagctacatcaaggccgtggacatctacctgtgggtgagcttcgtgttcgtgttcctgagcgtgctggagtacgccgccgtgaactacctgaccaccgtgcaggagagaaaggagcagaagctgagagagaagctgccctgcaccagcggcctgcccccccccagaaccgccatgctggacggcaactacagcgacggcgaggtgaacgacctggacaactacatgcccgagaacggcgagaagcccgacagaatgatggtgcagctgaccctggccagcgagagaagcagcccccagagaaagagccagagaagcagctacgtgagcatgagaatcgacacccacgccatcgacaagtacagcagaatcatcttccccgccgcctacatcctgttcaacctgatctactggagcatcttcagctag

SEQ ID NO: 82679 - DNA, 1389 bp, synthetic construct
  misc_feature 1..1389: note = Description of Artificial Sequence: Synthetic coding sequence
  source 1..1389: mol_type = other DNA
atgctggccgtgcccaacatgagattcggcatcttcctgctgtggtggggctgggtgctggccaccgagagcagaatgcactggcccggcagagaggtgcacgagatgagcaagaagggcagccccatcctgagaagaagccccgacatcaccaagagccccctgaccaagagcgagcagctgctgagaatcgacgaccacgacttcagcatgagacccggcttcggcggccccgccatccccgtgggcgtggacgtgcaggtggagagcctggacagcatcagcgaggtggacatggacttcaccatgaccctgtacctgagacactactggaaggacgagagactgagcttccccagcaccaacaacctgagcatgaccttcgacggcagactggtgaagaagatctgggtgcccgacatgttcttcgtgcacagcaagagaagcttcatccacgacaccaccaccgacaacgtgatgctgagagtgcagcccgacggcaaggtgctgtacagcctgagagtgaccgtgaccgccatgtgcaacatggacttcagcagattccccctggacacccagacctgcagcctggagatcgagagctacgcctacaccgaggacgacctgatgctgtactggaagaagggcaacgacagcctgaagaccgacgagagaatcagcctgagccagttcctgatccaggagttccacaccaccaccaagctggccttctacagcagcaccggctggtacaacagactgtacatcaacttcaccctgagaagacacatcttcttcttcctgctgcagacctacttccccgccaccctgatggtgatgctgagctgggtgagcttctggatcgacagaagagccgtgcccgccagagtgcccctgggcatcaccaccgtgctgaccatgagcaccatcatcaccggcgtgaacgccagcatgcccagagtgagctacatcaaggccgtggacatctacctgtgggtgagcttcgtgttcgtgttcctgagcgtgctggagtacgccgccgtgaactacctgaccaccgtgcaggagagaaaggagcagaagctgagagagaagctgccctgcaccagcggcctgcccccccccagaaccgccatgctggacggcaactacagcgacggcgaggtgaacgacctggacaactacatgcccgagaacggcgagaagcccgacagaatgatggtgcagctgaccctggccagcgagagaagcagcccccagagaaagagccagagaagcagctacgtgagcatgagaatcgacacccacgccatcgacaagtacagcagaatcatcttccccgccgcctacatcctgttcaacctgatctactggagcatcttcagctag

SEQ ID NO: 82680 - DNA, 1179 bp, synthetic construct; identical to SEQ ID NO: 82678
  misc_feature 1..1179: note = Description of Artificial Sequence: Synthetic coding sequence
  source 1..1179: mol_type = other DNA

SEQ ID NO: 82681 - DNA, 1440 bp, synthetic construct
  misc_feature 1..1440: note = Description of Artificial Sequence: Synthetic coding sequence
  source 1..1440: mol_type = other DNA
atgctggccgtgcccaacatgagattcggcatcttcctgctgtggtggggctgggtgctggccaccgagagcagaatgcactggcccggcagagaggtgcacgagatgagcaagaagggcagaccccagagacagagaagagaggtgcacgaggacgcccacaagcaggtgagccccatcctgagaagaagccccgacatcaccaagagccccctgaccaagagcgagcagctgctgagaatcgacgaccacgacttcagcatgagacccggcttcggcggccccgccatccccgtgggcgtggacgtgcaggtggagagcctggacagcatcagcgaggtggacatggacttcaccatgaccctgtacctgagacactactggaaggacgagagactgagcttccccagcaccaacaacctgagcatgaccttcgacggcagactggtgaagaagatctgggtgcccgacatgttcttcgtgcacagcaagagaagcttcatccacgacaccaccaccgacaacgtgatgctgagagtgcagcccgacggcaaggtgctgtacagcctgagagtgaccgtgaccgccatgtgcaacatggacttcagcagattccccctggacacccagacctgcagcctggagatcgagagctacgcctacaccgaggacgacctgatgctgtactggaagaagggcaacgacagcctgaagaccgacgagagaatcagcctgagccagttcctgatccaggagttccacaccaccaccaagctggccttctacagcagcaccggctggtacaacagactgtacatcaacttcaccctgagaagacacatcttcttcttcctgctgcagacctacttccccgccaccctgatggtgatgctgagctgggtgagcttctggatcgacagaagagccgtgcccgccagagtgcccctgggcatcaccaccgtgctgaccatgagcaccatcatcaccggcgtgaacgccagcatgcccagagtgagctacatcaaggccgtggacatctacctgtgggtgagcttcgtgttcgtgttcctgagcgtgctggagtacgccgccgtgaactacctgaccaccgtgcaggagagaaaggagcagaagctgagagagaagctgccctgcaccagcggcctgcccccccccagaaccgccatgctggacggcaactacagcgacggcgaggtgaacgacctggacaactacatgcccgagaacggcgagaagcccgacagaatgatggtgcagctgaccctggccagcgagagaagcagcccccagagaaagagccagagaagcagctacgtgagcatgagaatcgacacccacgccatcgacaagtacagcagaatcatcttccccgccgcctacatcctgttcaacctgatctactggagcatcttcagctag

SEQ ID NO: 82682 - DNA, 1473 bp, synthetic construct
  misc_feature 1..1473: note = Description of Artificial Sequence: Synthetic coding sequence
  source 1..1473: mol_type = other DNA
atggtgaagcccggcggcatctgcagcgccaccggctactggaaggccgccttctgcctgaccgacgtgcacaagatgccctacttcaccagactgatcctgttcctgttctgcctgatggtgctggtggagagcagaaagcccaagagaaagagatggaccggccaggtggagatgcccaagcccagccacctgtacaagaagaacctggacgtgaccaagatcagaaagggcaagccccagcagctgctgagagtggacgagcacgacttcagcatgagacccgccttcggcggccccgccatccccgtgggcgtggacgtgcaggtggagagcctggacagcatcagcgaggtggacatggacttcaccatgaccctgtacctgagacactactggaaggacgagagactggccttcagcagcgccagcaacaagagcatgaccttcgacggcagactggtgaagaagatctgggtgcccgacgtgttcttcgtgcacagcaagagaagcttcacccacgacaccaccaccgacaacatcatgctgagagtgttccccgacggccacgtgctgtacagcatgagaatcaccgtgaccgccatgtgcaacatggacttcagccacttccccctggacagccagacctgcagcctggagctggagagctacgcctacaccgacgaggacctgatgctgtactggaagaacggcgacgagagcctgaagaccgacgagaagatcagcctgagccagttcctgatccagaagttccacaccaccagcagactggccttctacagcagcaccggctggtacaacagactgtacatcaacttcaccctgagaagacacatcttcttcttcctgctgcagacctacttccccgccaccctgatggtgatgctgagctgggtgagcttctggatcgacagaagagccgtgcccgccagagtgagcctgggcatcaccaccgtgctgaccatgaccaccatcatcaccggcgtgaacgccagcatgcccagagtgagctacgtgaaggccgtggacatctacctgtgggtgagcttcgtgttcgtgttcctgagcgtgctggagtacgccgccgtgaactacctgaccaccgtgcaggagagaaaggagagaaagctgagagagaagttcccctgcatgtgcggcatgctgcacagcaagaccatgatgctggacggcagctacagcgagagcgaggccaacagcctggccggctaccccagaagccacatcctgaccgaggaggagagacaggacaagatcgtggtgcacctgggcctgagcggcgaggccaacgccgccagaaagaagggcctgctgaagggccagaccggcttcagaatcttccagaacacccacgccatcgacaagtacagcagactgatcttccccgccagctacatcttcttcaacctgatctactggagcgtgttcagctag

SEQ ID NO: 82683 - DNA, 453 bp, synthetic construct
  misc_feature 1..453: note = Description of Artificial Sequence: Synthetic coding sequence
  source 1..453: mol_type = other DNA
atgctgagagccgccgtgatcctgctgctgatcagaacctggctggccgagggcaactaccccagccccatccccaagttccacttcgagttcagcagcgccgtgcccgaggtggtgctgaacctgttcaactgcaagaactgcgccaacgaggccgtggtgcagaagatcctggacagagtgctgagcagatacgacgtgagactgagacccaacttcggcggcgtgctggagaccaacagcacctggggcctgaacgacgacgagctgatggcccacggccaggagaaggacagcagcagcgagagcgaggacagctgcccccccagccccggctgcagcttcaccgagggcttcagcttcgacctgttcaaccccgactacgtgcccaaggtggacaagtggagcagattcctgttccccctggccttcggcctgttcaacatcgtgtag

SEQ ID NO: 82684 - DNA, 1899 bp, synthetic construct
  misc_feature 1..1899: note = Description of Artificial Sequence: Synthetic coding sequence
  source 1..1899: mol_type = other DNA
atgggcatcagaggcatgctgagagccgccgtgatcctgctgctgatcagaacctggctggccgagggcaactaccccagccccatccccaagttccacttcgagttcagcagcgccgtgcccgaggtggtgctgaacctgttcaactgcaagaactgcgccaacgaggccgtggtgcagaagatcctggacagagtgctgagcagatacgacgtgagactgagacccaacttcggcggcgcccccgtgcccgtgagaatcagcatctacgtgaccagcatcgagcagatcagcgagatgaacatggactacaccatcaccatgttcttccaccagacctggaaggacagcagactggcctactacgagaccaccctgaacctgaccctggactacagaatgcacgagaagctgtgggtgcccgactgctacttcctgaacagcaaggacgccttcgtgcacgacgtgaccgtggagaacagagtgttccagctgcaccccgacggcaccgtgagatacggcatcagactgaccaccaccgccgcctgcagcctggacctgcacaagttccccatggacaagcaggcctgcaacctggtggtggagagctacggctacaccgtggaggacatcatcctgttctgggacgacaacggcaacgccatccacatgaccgaggagctgcacatcccccagttcaccttcctgggcagaaccatcaccagcaaggaggtgtacttctacaccggcagctacatcagactgatcctgaagttccaggtgcagagagaggtgaacagctacctggtgcaggtgtactggcccaccgtgctgaccaccatcaccagctggatcagcttctggatgaactacgacagcagcgccgccagagtgaccatcggcctgaccagcatgctgatcctgaccaccatcgacagccacctgagagacaagctgcccaacatcagctgcatcaaggccatcgacatctacatcctggtgtgcctgttcttcgtgttcctgagcctgctggagtacgtgtacatcaactacctgttctacagcagaggccccagaagacagcccagaagacacagaagacccagaagagtgatcgccagatacagataccagcaggtggtggtgggcaacgtgcaggacggcctgatcaacgtggaggacggcgtgagcagcctgcccatcacccccgcccaggcccccctggccagccccgagagcctgggcagcctgaccagcaccagcgagcaggcccagctggccaccagcgagagcctgagccccctgaccagcctgagcggccaggcccccctggccaccggcgagagcctgagcgacctgcccagcaccagcgagcaggccagacacagctacggcgtgagattcaacggcttccaggccgacgacagcatcttccccaccgagatcagaaacagagtggaggcccacggccacggcgtgacccacgaccacgaggacagcaacgagagcctgagcagcgacgagagacacggccacggccccagcggcaagcccatgctgcaccacggcgagaagggcgtgcaggaggccggctgggacctggacgacaacaacgacaagagcgactgcctggccatcaaggagcagttcaagtgcgacaccaacagcacctggggcctgaacgacgacgagctgatggcccacggccaggagaaggacagcagcagcgagagcgaggacagctgcccccccagccccggctgcagcttcaccgagggcttcagcttcgacctgttcaaccccgactacgtgcccaaggtggacaagtggagcagattcctgttccccctggccttcggcctgttcaacatcgtgtactgggtgtaccacatgtactag

SEQ ID NO: 82685 - DNA, 1083 bp, synthetic construct
  misc_feature 1..1083: note = Description of Artificial Sequence: Synthetic coding sequence
  source 1..1083: mol_type = other DNA
atggacagcagcaactgcaaggtgatcgcccccctgctgagccagagatacagaagaatggtgaccaaggacggccacagcaccctgcagatggacggcgcccagagaggcctggcctacctgagagacgcctggggcatcctgatggacatgagatggagatggatgatgctggtgttcagcgccagcttcgtggtgcactggctggtgttcgccgtgctgtggtacgtgctggccgagatgaacggcgacctggagctggaccacgacgccccccccgagaaccacaccatctgcgtgaagtacatcaccagcttcaccgccgccttcagcttcagcctggagacccagctgaccatcggctacggcaccatgttccccagcggcgactgccccagcgccatcgccctgctggccatccagatgctgctgggcctgatgctggaggccttcatcaccggcgccttcgtggccaagatcgccagacccaagaacagagccttcagcatcagattcaccgacaccgccgtggtggcccacatggacggcaagcccaacctgatcttccaggtggccaacaccagacccagccccctgaccagcgtgagagtgagcgccgtgctgtaccaggagagagagaacggcaagctgtaccagaccagcgtggacttccacctggacggcatcagcagcgacgagtgccccttcttcatcttccccctgacctactaccacagcatcacccccagcagccccctggccaccctgctgcagcacgagaaccccagccacttcgagctggtggtgttcctgagcgccatgcaggagggcaccggcgagatctgccagagaagaaccagctacctgcccagcgagatcatgctgcaccactgcttcgccagcctgctgaccagaggcagcaagggcgagtaccagatcaagatggagaacttcgacaagaccgtgcccgagttccccacccccctggtgagcaagagccccaacagaaccgacctggacatccacatcaacggccagagcatcgacaacttccagatcagcgagaccggcctgaccgagtag

SEQ ID NO: 82686 - DNA, 2106 bp, synthetic construct
  misc_feature 1..2106: note = Description of Artificial Sequence: Synthetic coding sequence
  source 1..2106: mol_type = other DNA
atggccgtgagcgccggcagcgccagaaccagccccagcagcggcttcctgatggtgctggacatcccccaggagagaggcctgagcagcctggacagaaagtacctggacggcctggacgtgtgcagattccccctgctggacgccctgagacccctgcccctggactggatgtacctggtgtacaccatcatgttcctgggcgccctgggcatgatgctgggcctgtgctacagaatcagctgcgtgctgttcctgctgccctactggtacgtgttcctgctggacaagaccagctggaacaaccacagctacctgtacggcctgctggccttccagctgaccttcatggacgccaaccactactggagcgtggacggcctgctgaacgcccacagaagaaacgcccacgtgcccctgtggaactacgccgtgctgagaggccagatcttcatcgtgtacttcatcgccggcgtgaagaagctggacgccgactgggtggagggctacagcatggagtacctgagcagacactggctgttcagccccttcaagctgctgctgagcgaggagctgaccagcctgctggtggtgcactggggcggcctgctgctggacctgagcgccggcttcctgctgttcttcgacgtgagcagaagcatcggcctgttcttcgtgagctacttccactgcatgaacagccagctgttcagcatcggcatgttcagctacgtgatgctggccagcagccccctgttctgcagccccgagtggcccagaaagctggtgagctactgccccagaagactgcagcagctgctgcccctgaaggccgccccccagcccagcgtgagctgcgtgtacaagagaagcagaggcaagagcggccagaagcccggcctgagacaccagctgggcgccgccttcaccctgctgtacctgctggagcagctgttcctgccctacagccacttcctgacccagggctacaacaactggaccaacggcctgtacggctacagctgggacatgatggtgcacagcagaagccaccagcacgtgaagatcacctacagagacggcagaaccggcgagctgggctacctgaaccccggcgtgttcacccagagcagaagatggaaggaccacgccgacatgctgaagcagtacgccacctgcctgagcagactgctgcccaagtacaacgtgaccgagccccagatctacttcgacatctgggtgagcatcaacgacagattccagcagagaatcttcgaccccagagtggacatcgtgcaggccgcctggagccccttccagagaaccagctgggtgcagcccctgctgatggacctgagcccctggagagccaagctgcaggagatcaagagcagcctggacaaccacaccgaggtggtgttcatcgccgacttccccggcctgcacctggagaacttcgtgagcgaggacctgggcaacaccagcatccagctgctgcagggcgaggtgaccgtggagctggtggccgagcagaagaaccagaccctgagagagggcgagaagatgcagctgcccgccggcgagtaccacaaggtgtacaccaccagccccagccccagctgctacatgtacgtgtacgtgaacaccaccgagctggccctggagcaggacctggcctacctgcaggagctgaaggagaaggtggagaacggcagcgagaccggccccctgccccccgagctgcagcccctgctggagggcgaggtgaagggcggccccgagcccacccccctggtgcagaccttcctgagaagacagcagagactgcaggagatcgagagaagaagaaacacccccttccacgagagattcttcagattcctgctgagaaagctgtacgtgttcagaagaagcttcctgatgacctgcatcagcctgagaaacctgatcctgggcagacccagcctggagcagctggcccaggaggtgacctacgccaacctgagacccttcgaggccgtgggcgagctgaaccccagcaacaccgacagcagccacagcaacccccccgagagcaaccccgaccccgtgcacagcgagttctag

SEQ ID NO: 82687 - DNA, 957 bp, synthetic construct
  misc_feature 1..957: note = Description of Artificial Sequence: Synthetic coding sequence
  source 1..957: mol_type = other DNA
atggccagccccggctgcctgctgtgcgtgctgggcctgctgctgtgcggcgccgccagcctggagctgagcagaccccacggcgacaccgccaagaagcccatcatcggcatcctgatgcagaagtgcagaaacaaggtgatgaagaactacggcagatactacatcgccgccagctacgtgaagtacctggagagcgccggcgccagagtggtgcccgtgagactggacctgaccgagaaggactacgagatcctgttcaagagcatcaacggcatcctgttccccggcggcagcgtggacctgagaagaagcgactacgccaaggtggccaagatcttctacaacctgagcatccagagcttcgacgacggcgactacttccccgtgtggggcacctgcctgggcttcgaggagctgagcctgctgatcagcggcgagtgcctgctgaccgccaccgacaccgtggacgtggccatgcccctgaacttcaccggcggccagctgcacagcagaatgttccagaacttccccaccgagctgctgctgagcctggccgtggagcccctgaccgccaacttccacaagtggagcctgagcgtgaagaacttcaccatgaacgagaagctgaagaagttcttcaacgtgctgaccaccaacaccgacggcaagatcgagttcatcagcaccatggagggctacaagtaccccgtgtacggcgtgcagtggcaccccgagaaggccccctacgagtggaagaacctggacggcatcagccacgcccccaacgccgtgaagaccgccttctacctggccgagttcttcgtgaacgaggccagaaagaacaaccaccacttcaagagcgagagcgaggaggagaaggccctgatctaccagttcagccccatctacaccggcaacatcagcagcttccagcagtgctacatcttcgactag

SEQ ID NO: 82688 - DNA, 345 bp, synthetic construct
  misc_feature 1..345: note = Description of Artificial Sequence: Synthetic coding sequence
  source 1..345: mol_type = other DNA
atggccaacagcggctgcaaggacgtgaccggccccgacgaggagagcttcctgtacttcgcctacggcagcaacctgctgaccgagagaatccacctgagaaaccccagcgccgccttcttctgcgtggccagactgcaggacttcaagctggacttcggcaacagccagggcaagaccagccagacctggcacggcggcatcgccaccatcttccagagccccggcgacgaggtgtggggcgtggtgtggaagatgaacaagagcaacctgaacagcctggacgagctgttcgcctgggtgcagaagaagatggtgtgcagatggagcatcaagagaagctag

SEQ ID NO: 82689 - DNA, 567 bp, synthetic construct
  misc_feature 1..567: note = Description of Artificial Sequence: Synthetic coding sequence
  source 1..567: mol_type = other DNA
atggccaacagcggctgcaaggacgtgaccggccccgacgaggagagcttcctgtacttcgcctacggcagcaacctgctgaccgagagaatccacctgagaaaccccagcgccgccttcttctgcgtggccagactgcaggacttcaagctggacttcggcaacagccagggcaagaccagccagacctggcacggcggcatcgccaccatcttccagagccccggcgacgaggtgtggggcgtggtgtggaagatgaacaagagcaacctgaacagcctggacgagcaggagggcgtgaagagcggcatgtacgtggtgatcgaggtgaaggtggccacccaggagggcaaggagatcacctgcagaagctacctgatgaccaactacgagagcgccccccccagcccccagtacaagaagatcatctgcatgggcgccaaggagaacggcctgcccctggagtaccaggagaagctgaaggccatcgagcccaacgactacaccggcaaggtgagcgaggagatcgaggacatcatcaagaagggcgagacccagaccctgtag

SEQ ID NO: 82690 - DNA, 384 bp, synthetic construct
  misc_feature 1..384: note = Description of Artificial Sequence: Synthetic coding sequence
  source 1..384: mol_type = other DNA
atgttcaaccccatccaccacctggactactacaagaagaccctgcccagcgagctgaactggctgggccagatgtggctgaagttcggctgcagcggcttcagacaggagggcgtgaagagcggcatgtacgtggtgatcgaggtgaaggtggccacccaggagggcaaggagatcacctgcagaagctacctgatgaccaactacgagagcgccccccccagcccccagtacaagaagatcatctgcatgggcgccaaggagaacggcctgcccctggagtaccaggagaagctgaaggccatcgagcccaacgactacaccggcaaggtgagcgaggagatcgaggacatcatcaagaagggcgagacccagaccctgtag

SEQ ID NO: 82691 - DNA, 285 bp, synthetic construct
  misc_feature 1..285: note = Description of Artificial Sequence: Synthetic coding sequence
  source 1..285: mol_type = other DNA
atggccaacagcggctgcaaggacgtgaccggccccgacgaggagagcttcctgtacttcgcctacggcagcaacctgctgaccgagagaatccacctgagaaaccccagcgccgccttcttctgcgtggccagactgcagatcatctgcatgggcgccaaggagaacggcctgcccctggagtaccaggagaagctgaaggccatcgagcccaacgactacaccggcaaggtgagcgaggagatcgaggacatcatcaagaagggcgagacccagaccctgtag

SEQ ID NO: 82692 - DNA, 501 bp, synthetic construct
  misc_feature 1..501: note = Description of Artificial Sequence: Synthetic coding sequence
  source 1..501: mol_type = other DNA
atggccaacagcggctgcaaggacgtgaccggccccgacgaggagagcttcctgtacttcgcctacggcagcaacctgctgaccgagagaatccacctgagaaaccccagcgccgccttcttctgcgtggccagactgcaggacttcaagctggacttcggcaacagccagggcaagaccagccagacctggcacggcggcatcgccaccatcttccagagccccggcgacgaggtgtggggcgtggtgtggaagatgaacaagagcaacctgaacagcctggacgagtggagaaagaagagacacaccgccttccagaaccagggcaaccacccctgcaagcacaagaccagaatgtgggacagagaccccaagatccccgtgcagaacctgagcctggccctgtgctggcaggcccagagcggccacggcacctgcaacagactgttcgcctgggtgcagaagaagatggtgtgcagatggagcatcaagagaagctag

SEQ ID NO: 82693 - DNA, 1710 bp, synthetic construct
  misc_feature 1..1710: note = Description of Artificial Sequence: Synthetic coding sequence
  source 1..1710: mol_type = other DNA
atgaagaagaagctggtggtgctgggcctgctggccgtggtgctggtgctggtgatcgtgggcctgtgcctgtggctgcccagcgccagcaaggagcccgacaaccacgtgtacaccagagccgccgtggccgccgacgccaagcagtgcagcaagatcggcagagacgccctgagagacggcggcagcgccgtggacgccgccatcgccgccctgctgtgcgtgggcctgatgaacgcccacagcatgggcatcggcggcggcctgttcctgaccatctacaacagcaccaccagaaaggccgaggtgatcaacgccagagaggtggcccccagactggccttcgccaccatgttcaacagcagcgagcagagccagaagggcggcctgagcgtggccgtgcccggcgagatcagaggctacgagctggcccaccagagacacggcagactgccctgggccagactgttccagcccagcatccagctggccagacagggcttccccgtgggcaagggcctggccgccgccctggagaacaagagaaccgtgatcgagcagcagcccgtgctgtgcgaggtgttctgcagagacagaaaggtgctgagagagggcgagagactgaccctgccccagctggccgacacctacgagaccctggccatcgagggcgcccaggccttctacaacggcagcctgaccgcccagatcgtgaaggacatccaggccgccggcggcatcgtgaccgccgaggacctgaacaactacagagccgagctgatcgagcaccccctgaacatcagcctgggcgacgtggtgctgtacatgcccagcgcccccctgagcggccccgtgctggccctgatcctgaacatcctgaagggctacaacttcagcagagagagcgtggagagccccgagcagaagggcctgacctaccacagaatcgtggaggccttcagattcgcctacgccaagagaaccctgctgggcgaccccaagttcgtggacgtgaccgaggtggtgagaaacatgaccagcgagttcttcgccgcccagctgagagcccagatcagcgacgacaccacccaccccatcagctactacaagcccgagttctacacccccgacgacggcggcaccgcccacctgagcgtggtggccgaggacggcagcgccgtgagcgccaccagcaccatcaacctgtacttcggcagcaaggtgagaagccccgtgagcggcatcctgttcaacaacgagatggacgacttcagcagccccagcatcaccaacgagttcggcgtgccccccagccccgccaacttcatccagcccggcaagcagcccctgagcagcatgtgccccaccatcatggtgggccaggacggccaggtgagaatggtggtgggcgccgccggcggcacccagatcaccaccgccaccgccctggccatcatctacaacctgtggttcggctacgacgtgaagagagccgtggaggagcccagactgcacaaccagctgctgcccaacgtgaccaccgtggagagaaacatcgaccaggccgtgaccgccgccctggagaccagacaccaccacacccagatcgccagcaccttcatcgccgtggtgcaggccatcgtgagaaccgccggcggctgggccgccgccagcgacagcagaaagggcggcgagcccgccggctactag

SEQ ID NO: 82694 - DNA, 1710 bp, synthetic construct; identical to SEQ ID NO: 82693
  misc_feature 1..1710: note = Description of Artificial Sequence: Synthetic coding sequence
  source 1..1710: mol_type = other DNA

SEQ ID NO: 82695 - DNA, 1710 bp, synthetic construct; identical to SEQ ID NO: 82693
  misc_feature 1..1710: note = Description of Artificial Sequence: Synthetic coding sequence
  source 1..1710: mol_type = other DNA

SEQ ID NO: 82696 - DNA, 1710 bp, synthetic construct; identical to SEQ ID NO: 82693
  misc_feature 1..1710: note = Description of Artificial Sequence: Synthetic coding sequence
  source 1..1710: mol_type = other DNA

SEQ ID NO: 82697 - DNA, 678 bp, synthetic construct
  misc_feature 1..678: note = Description of Artificial Sequence: Synthetic coding sequence
  source 1..678: mol_type = other DNA
atgaccagcgagttcttcgccgcccagctgagagcccagatcagcgacgacaccacccaccccatcagctactacaagcccgagttctacacccccgacgacggcggcaccgcccacctgagcgtggtggccgaggacggcagcgccgtgagcgccaccagcaccatcaacctgtacttcggcagcaaggtgagaagccccgtgagcggcatcctgttcaacaacgagatggacgacttcagcagccccagcatcaccaacgagttcggcgtgccccccagccccgccaacttcatccagcccggcaagcagcccctgagcagcatgtgccccaccatcatggtgggccaggacggccaggtgagaatggtggtgggcgccgccggcggcacccagatcaccaccgccaccgccctggccatcatctacaacctgtggttcggctacgacgtgaagagagccgtggaggagcccagactgcacaaccagctgctgcccaacgtgaccaccgtggagagaaacatcgaccaggccgtgaccgccgccctggagaccagacaccaccacacccagatcgccagcaccttcatcgccgtggtgcaggccatcgtgagaaccgccggcggctgggccgccgccagcgacagcagaaagggcggcgagcccgccggctactag

SEQ ID NO: 82698 - DNA, 678 bp, synthetic construct; identical to SEQ ID NO: 82697
  misc_feature 1..678: note = Description of Artificial Sequence: Synthetic coding sequence
  source 1..678: mol_type = other DNA

SEQ ID NO: 82699 - DNA, 678 bp, synthetic construct; identical to SEQ ID NO: 82697
  misc_feature 1..678: note = Description of Artificial Sequence: Synthetic coding sequence
  source 1..678: mol_type = other DNA

SEQ ID NO: 82700 - DNA, 1710 bp, synthetic construct; identical to SEQ ID NO: 82693
  misc_feature 1..1710: note = Description of Artificial Sequence: Synthetic coding sequence
  source 1..1710: mol_type = other DNA

SEQ ID NO: 82701 - DNA, 363 bp, synthetic construct
  misc_feature 1..363: note = Description of Artificial Sequence: Synthetic coding sequence
  source 1..363: mol_type = other DNA
atgaagaagaagctggtggtgctgggcctgctggccgtggtgctggtgctggtgatcgtgggcctgtgcctgtggctgcccagcgccagcaaggagcccgacaaccacgtgtacaccagagccgccgtggccgccgacgccaagcagtgcagcaagatcggcagagacgccctgagagacggcggcagcgccgtggacgccgccatcgccgccctgctgtgcgtgggcctgatgaacgcccacagcatgggcatcggcggcggcctgttcctgaccatctacaacagcaccaccagaaaggccgaggtgatcaacgccagagaggtggcccccagactggccttcgccaccatgttcaactag

SEQ ID NO: 82702 - DNA, 1392 bp, synthetic construct
  misc_feature 1..1392: note = Description of Artificial Sequence: Synthetic coding sequence
  source 1..1392: mol_type = other DNA
atgaagaagaagctggtggtgctgggcctgctggccgtggtgctggtgctggtgatcgtgggcctgtgcctgtggctgcccagcgccagcaaggagcccgacaaccacgtgtacaccagagccgccgtggccgccgacgccaagcagtgcagcaagatcggcagagacgccctgagagacggcggcagcgccgtggacgccgccatcgccgccctgctgtgcgtgggcctgatgaacgcccacagcatgggcatcggcggcggcctgttcctgaccatctacaacagcaccaccagaaaggccgaggtgatcaacgccagagaggtggcccccagactggccttcgccaccatgttcaacagcagcgagcagagccagaagggcggcctgagcgtggccgtgcccggcgagatcagaggctacgagctggcccaccagagacacggcagactgccctgggccagactgttccagcccagcatccagctggccagacagggcttccccgtgggcaagggcctggccgccgccctggagaacaagagaaccgtgatcgagcagcagcccgtgctgtgcgaggtgttctgcagagacagaaaggtgctgagagagggcgagagactgaccctgccccagctggccgacacctacgagaccctggccatcgagggcgcccaggccttctacaacggcagcctgaccgcccagatcgtgaaggacatccaggccgccggcggcatcgtgaccgccgaggacctgaacaactacagagccgagctgatcgagcaccccctgaacatcagcctgggcgacgtggtgctgtacatgcccagcgcccccctgagcggccccgtgctggccctgatcctgaacatcctgaagggctacaacttcagcagagagagcgtggagagccccgagcagaagggcctgacctaccacagaatcgtggaggccttcagattcgcctacgccaagagaaccctgctgggcgaccccaagttcgtggacgtgaccgaggtggtgagaaacatgaccagcgagttcttcgccgcccagctgagagcccagatcagcgacgacaccacccaccccatcagctactacaagcccgagttctacacccccgacgacggcggcaccgcccacctgagcgtggtggccgaggacggcagcgccgtgagcgccaccagcaccatcaacctgtacttcggcagcaaggtgagaagccccgtgagcggcatcctgttcaacaacgagatggacgacttcagcagccccagcatcaccaacgagttcggcgtgccccccagccccgccaacttcatccagcccggcaagcagcccctgagcagcatgtgccccaccatcatggtgggccaggacggctag

SEQ ID NO: 82703 - DNA, 243 bp, synthetic construct
  misc_feature 1..243: note = Description of Artificial Sequence: Synthetic coding sequence
  source 1..243: mol_type = other DNA
atgaagaagaagctggtggtgctgggcctgctggccgtggtgctggtgctggtgatcgtgggcctgtgcctgtggctgcccagcgccagcaaggagcccgacaaccacgtgtacaccagagccgccgtggccgccgacgccaagcagtgcagcaagatcggcagagacgccctgagagacggcggcagcgccgtggacgccgccatcgccgccctgctgtgcgtgggcctgatgaacgcctag

SEQ ID NO: 82704 - DNA, 525 bp, synthetic construct
  misc_feature 1..525: note = Description of Artificial Sequence: Synthetic coding sequence
  source 1..525: mol_type = other DNA
atgaagaagaagctggtggtgctgggcctgctggccgtggtgctggtgctggtgatcgtgggcctgtgcctgtggctgcccagcgccagcaaggagcccgacaaccacgtgtacaccagagccgccgtggccgccgacgccaagcagtgcagcaagatcggcagagacgccctgagagacggcggcagcgccgtggacgccgccatcgccgccctgctgtgcgtgggcctgatgaacgcccacagcatgggcatcggcggcggcctgttcctgaccatctacaacagcaccaccagaaaggccgaggtgatcaacgccagagaggtggcccccagactggccttcgccaccatgttcaacagcagcgagcagagccagaagggcggcctgagcgtggccgtgcccggcgagatcagaggctacgagctggcccaccagagacacggcagactgccctgggccagactgttccagcccagcatccagctggccagacagggcttccccgtgggcaagggcctgtag

SEQ ID NO: 82705 - DNA, 381 bp, synthetic construct
  misc_feature 1..381: note = Description of Artificial Sequence: Synthetic coding sequence
  source 1..381: mol_type = other DNA
atgaagaagaagctggtggtgctgggcctgctggccgtggtgctggtgctggtgatcgtgggcctgtgcctgtggctgcccagcgccagcaaggagcccgacaaccacgtgtacaccagagccgccgtggccgccgacgccaagcagtgcagcaagatcggcagagacgccctgagagacggcggcagcgccgtggacgccgccatcgccgccctgctgtgcgtgggcctgatgaacgcccacagcatgggcatcggcggcggcctgttcctgaccatctacaacagcaccaccagaaaggccgaggtgatcaacgccagagaggtggcccccagactggccttcgccaccatgttcaacagcagcgagcagagccagtag

SEQ ID NO: 82706 - DNA, 330 bp, synthetic construct
  misc_feature 1..330: note = Description of Artificial Sequence: Synthetic coding sequence
  source 1..330: mol_type = other DNA
atgaagaagaagctggtggtgctgggcctgctggccgtggtgctggtgctggtgatcgtgggcctgtgcctgtggctgcccagcgccagcaaggagcccgacaaccacgtgtacaccagagccgccgtggccgccgacgccaagcagtgcagcaagatcggcagagacgccctgagagacggcggcagcgccgtggacgccgccatcgccgccctgctgtgcgtgggcctgatgaacgcccacagcatgggcatcggcggcggcctgttcctgaccatctacaacagcaccaccagaaaggccgaggtgatcaacgccagagaggtgtag

SEQ ID NO: 82707 - DNA, 336 bp, synthetic construct
  misc_feature 1..336: note = Description of Artificial Sequence: Synthetic coding sequence
  source 1..336: mol_type = other DNA
atgaagaagaagctggtggtgctgggcctgctggccgtggtgctggtgctggtgatcgtgggcctgtgcctgtggctgcccagcgccagcaaggagcccgacaaccacgtgtacaccagagccgccgtggccgccgacgccaagcagtgcagcaagatcggcagagacgccctgagagacggcggcagcgccgtggacgccgccatcgccgccctgctgtgcgtgggcctgatgaacgcccacagcatgggcatcggcggcggcctgttcctgaccatctacaacagcaccaccagaaaggccgaggtgatcaacgccagagaggtggccccctag

SEQ ID NO: 82708 - DNA, 114 bp, synthetic construct
  misc_feature 1..114: note = Description of Artificial Sequence: Synthetic coding sequence
  source 1..114: mol_type = other DNA
atgaagaagaagctggtggtgctgggcctgctggccgtggtgctggtgctggtgatcgtgggcctgtgcctgtggctgcccagcgccagcaaggagcccgacaaccacgtgtag

SEQ ID NO: 82709 - DNA, 207 bp, synthetic construct
  misc_feature 1..207: note = Description of Artificial Sequence: Synthetic coding sequence
  source 1..207: mol_type = other DNA
atgaagaagaagctggtggtgctgggcctgctggccgtggtgctggtgctggtgatcgtgggcctgtgcctgtggctgcccagcgccagcaaggagcccgacaaccacgtgtacaccagagccgccgtggccgccgacgccaagcagtgcagcaagatcggcagagacgccctgagagacggcggcagcgccgtggacgccgcctag

SEQ ID NO: 82710 - DNA, 381 bp, synthetic construct; identical to SEQ ID NO: 82705
  misc_feature 1..381: note = Description of Artificial Sequence: Synthetic coding sequence
  source 1..381: mol_type = other DNA

SEQ ID NO: 82711 - DNA, 351 bp, synthetic construct
  misc_feature 1..351: note = Description of Artificial Sequence: Synthetic coding sequence
  source 1..351: mol_type = other DNA
atgaagaagaagctggtggtgctgggcctgctggccgtggtgctggtgctggtgatcgtgggcctgtgcctgtggctgcccagcgccagcaaggagcccgacaaccacgtgtacaccagagccgccgtggccgccgacgccaagcagtgcagcaagatcggcagagacgccctgagagacggcggcagcgccgtggacgccgccatcgccgccctgctgtgcgtgggcctgatgaacgcccacagcatgggcatcggcggcggcctgttcctgaccatctacaacagcaccaccagaaaggccgaggtgatcaacgccagagaggtggcccccagactggccttcgcctag

SEQ ID NO: 82712 - DNA, 384 bp, synthetic construct
  misc_feature 1..384: note = Description of Artificial Sequence: Synthetic coding sequence
  source 1..384: mol_type = other DNA
atgaagaagaagctggtggtgctgggcctgctggccgtggtgctggtgctggtgatcgtgggcctgtgcctgtggctgcccagcgccagcaaggagcccgacaaccacgtgtacaccagagccgccgtggccgccgacgccaagcagtgcagcaagatcggcagagacgccctgagagacggcggcagcgccgtggacgccgccatcgccgccctgctgtgcgtgggcctgatgaacgcccacagcatgggcatcggcggcggcctgttcctgaccatctacaacagcaccaccagaaaggccgaggtgatcaacgccagagaggtggcccccagactggccttcgccaccatgttcaacagcagcgagcagagccagaagtag

SEQ ID NO: 82713 - DNA, 297 bp, synthetic construct
  misc_feature 1..297: note = Description of Artificial Sequence: Synthetic coding sequence
  source 1..297: mol_type = other DNA
atgaagaagaagctggtggtgctgggcctgctggccgtggtgctggtgctggtgatcgtgggcctgtgcctgtggctgcccagcgccagcaaggagcccgacaaccacgtgtacaccagagccgccgtggccgccgacgccaagcagtgcagcaagatcggcagagacgccctgagagacggcggcagcgccgtggacgccgccatcgccgccctgctgtgcgtgggcctgatgaacgcccacagcatgggcatcggcggcggcctgttcctgaccatctacaacagcaccacctag

SEQ ID NO: 82714 - DNA, 93 bp, synthetic construct
  misc_feature 1..93: note = Description of Artificial Sequence: Synthetic coding sequence
  source 1..93: mol_type = other DNA
atgaagaagaagctggtggtgctgggcctgctggccgtggtgctggtgctggtgatcgtgggcctgtgcctgtggctgcccagcgccagctag

SEQ ID NO: 82715 - DNA, 1710 bp, synthetic construct
  misc_feature 1..1710: note = Description of Artificial Sequence: Synthetic coding sequence
  source 1..1710: mol_type = other DNA
atgaagaagaagctggtggtgctgggcctgctggccgtggtgctggtgctggtgatcgtgggcctgtgcctgtggctgcccagcgccagcaaggagcccgacaaccacgtgtacaccagagccgccatggccgccgacgccaagcagtgcctggagatcggcagagacaccctgagagacggcggcagcgccgtggacgccgccatcgccgccctgctgtgcgtgggcctgatgaacgcccacagcatgggcatcggcgtgggcctgttcctgaccatctacaacagcaccaccagaaaggccgaggtgatcaacgccagagaggtggcccccagactggccttcgccagcatgttcaacagcagcgagcagagccagaagggcggcctgagcgtggccgtgcccggcgagatcagaggctacgagctggcccaccagagacacggcagactgccctgggccagactgttccagcccagcatccagctggccagacagggcttccccgtgggcaagggcctggccgccgtgctggagaacaagagaaccgtgatcgagcagcagcccgtgctgtggtacgtgttctgcagagacagaaaggtgctgagagagggcgagagactgaccctgcccagactggccgacacctacgagatgctggccatcgagggcgcccaggccttctacaacggcagcctgatggcccagatcgtgaaggacatccaggccgccggcggcatcgtgaccgccgaggacctgaacaactacagagccgagctgatcgagcaccccctgaacatcagcctgggcgacgccgtgctgtacatgcccagcgccagactgagcggccccgtgctggccctgatcctgaacatcctgaagggctacaacttcagcagagagagcgtggagacccccgagcagaagggcctgacctaccacagaatcgtggaggccttcagattcgcctacgccaagagaaccctgctgggcgaccccaagttcgtggacgtgaccgaggtggtgagaaacatgaccagcgagttcttcgccgcccagctgagaagccagatcagcgaccacaccacccaccccatcagctactacaagcccgagttctacacccccgacgacggcggcaccgcccacctgagcgtggtggccgaggacggcagcgccgtgagcgccaccagcaccatcaacctgtacttcggcagcaaggtgtgcagccccgtgagcggcatcctgttcaacaacgagtggaccaccagcgccctgcccgccttcaccaacgagttcggcgccccccccagccccgccaacttcatccagcccggcaagcagcccctgctgagcatgtgcctgaccatcatggtgggccaggacggccaggtgagaatggtggtgggcgccgccggcggcacccagatcaccaccgacaccgccctggccatcatctacaacctgtggttcggctacgacgtgaagagagccgtggaggagcccagactgcacaacaagctgctgcccaacgtgaccaccgtggagagaaacatcgaccaggccgtgaccgccgccctggagaccagacaccaccacacccagatcgccagcaccttcatcgccgtggtgcaggccatcgtgagaaccgccggcggctgggccgccgccagcgacagcagaaagggcggcgagcccgccggctactag

SEQ ID NO: 82716 - DNA, 1680 bp, synthetic construct
  misc_feature 1..1680: note = Description of Artificial Sequence: Synthetic coding sequence
  source 1..1680: mol_type = other DNA
atgaagaagaagctggtggtgctgggcctgctggccgtggtgctggtgctggtgatcgtgggcctgtgcctgtggctgcccagcgccagcaaggagcccgacaaccacgtgtacaccagagccgccatggccgccgacgccaagcagtgcctggagatcggcagagacaccctgagagacggcggcagcgccgtggacgccgccatcgccgccctgctgtgcgtgggcctgatgaacgcccacagcatgggcatcggcgtgggcctgttcctgaccatctacaacagcaccaccagaaaggccgaggtgatcaacgccagagaggtggcccccagactggccttcgccagcatgttcaacagcagcgagcagagccagaagggcggcctgagcgtggccgtgcccggcgagatcagaggctacgagctggcccaccagagacacggcagactgccctgggccagactgttccagcccagcatccagctggccagacagggcttccccgtgggcaagggcctggccgccgtgctggagaacaagagaaccgtgatcgagcagcagcccgtgctgtggtacgtgttctgcagagacagaaaggtgctgagagagggcgagagactgaccctgcccagactggccgacacctacgagatgctggccatcgagggcgcccaggccttctacaacggcagcctgatggcccagatcgtgaaggacatccaggccgccggcggcatcgtgaccgccgaggacctgaacaactacagagccgagctgatcgagcaccccctgaacatcagcctgggcgacgccgtgctgtacatgcccagcgccagactgagcggccccgtgctggccctgatcctgaacatcctgaagggctacaacttcagcagagagagcgtggagacccccgagcagaagggcctgacctaccacagaatcgtggaggccttcagattcgcctacgccaagagaaccctgctgggcgaccccaagttcgtggacgtgaccgaggtggtgagaaacatgaccagcgagttcttcgccgcccagctgagaagccagatcagcgaccacaccacccaccccatcagctactacaagcccgagttctacacccccgacgacggcggcaccgcccacctgagcgtggtggccgaggacggcagcgccgtgagcgccaccagcaccatcaacctgtacggcatcctgttcaacaacgagtggaccaccagcgccctgcccgccttcaccaacgagttcggcgccccccccagccccgccaacttcatccagcccggcaagcagcccctgctgagcatgtgcctgaccatcatggtgggccaggacggccaggtgagaatggtggtgggcgccgccggcggcacccagatcaccaccgacaccgccctggccatcatctacaacctgtggttcggctacgacgtgaagagagccgtggaggagcccagactgcacaacaagctgctgcccaacgtgaccaccgtggagagaaacatcgaccaggccgtgaccgccgccctggagaccagacaccaccacacccagatcgccagcaccttcatcgccgtggtgcaggccatcgtgagaaccgccggcggctgggccgccgccagcgacagcagaaagggcggcgagcccgccggctactag

SEQ ID NO: 82717 - DNA, 1710 bp, synthetic construct; identical to SEQ ID NO: 82715
  misc_feature 1..1710: note = Description of Artificial Sequence: Synthetic coding sequence
  source 1..1710: mol_type = other DNA

SEQ ID NO: 82718 - DNA, 1665 bp, synthetic construct
  misc_feature 1..1665: note = Description of Artificial Sequence: Synthetic coding sequence
  source 1..1665: mol_type = other DNA
atggccagaggctacggcgccaccgtgagcctggtgctgctgggcctgggcctggccctggccgtgatcgtgctggccgtggtgctgagcagacaccaggccccctgcggcccccaggccttcgcccacgccgccgtggccgccgacagcaaggtgtgcagcgacatcggcagagccatcctgcagcagcagggcagccccgtggacgccaccatcgccgccctggtgtgcaccagcgtggtgaacccccagagcatgggcctgggcggcggcgtgatcttcaccatctacaacgtgaccaccggcgcccagtggatcggcgtgcccggcgagctgagaggctacgccgaggcccacagaagacacggcagactgccctgggcccagctgttccagcccaccatcgccctgctgagaggcggccacgtggtggcccccgtgctgagcagattcctgcacaacagcatcctgagacccagcctgcaggccagcaccctgagacagctgttcttcaacggcaccgagcccctgagaccccaggaccccctgccctggcccgccctggccaccaccctggagaccgtggccaccgagggcgtggaggtgttctacaccggcagactgggccagatgctggtggaggacatcgccaaggagggcagccagctgaccctgcaggacctggccaagttccagcccgaggtggtggacgccctggaggtgcccctgggcgactacaccctgtacagcccccccccccccgccggcggcgccatcctgagcttcatcctgaacgtgctgagaggcttcaacttcagcaccgagagcatggccagacccgagggcagagtgaacgtgtaccaccacctggtggagaccctgaagttcgccaagggccagagatggagactgggcgaccccagaagccaccccaagctgcagaacgccagcagagacctgctgggcgagaccctggcccagctgatcagacagcagatcgacggcagaggcgaccaccagctgagccactacagcctggccgaggcctggggccacggcaccggcaccagccacgtgagcgtgctgggcgaggacggcagcgccgtggccgccaccagcaccatcaacacccccttcggcgccatggtgtacagccccagaaccggcatcatcctgaacaacgagctgctggacctgtgcgagagatgccccagaggcagcggcaccacccccagccccgtgagcggcgacagagtgggcggcgcccccggcagatgctggccccccgtgcccggcgagagaagccccagcagcatggtgcccagcatcctgatcaacaaggcccagggcagcaagctggtgatcggcggcgccggcggcgagctgatcatcagcgccgtggcccaggccatcatgagcaagctgtggctgggcttcgacctgagagccgccatcgccgcccccatcctgcacgtgaacagcaagggctgcgtggagtacgagcccaacttcagccaggaggtgcagagaggcctgcaggacagaggccagaaccagacccagagacccttcttcctgaacgtggtgcaggccgtgagccaggagggcgcctgcgtgtacgccgtgagcgacctgagaaagagcggcgaggccgccggctactag

SEQ ID NO: 82719 - DNA, 1761 bp, synthetic construct
  misc_feature 1..1761: note = Description of Artificial Sequence: Synthetic coding sequence
  source 1..1761: mol_type = other DNA
atggccagaggctacggcgccaccgtgagcctggtgctgctgggcctgggcctggccctggccgtgatcgtgctggccgtggtgctgagcagacaccaggccccctgcggcccccaggccttcgcccacgccgccgtggccgccgacagcaaggtgtgcagcgacatcggcagagccatcctgcagcagcagggcagccccgtggacgccaccatcgccgccctggtgtgcaccagcgtggtgaacccccagagcatgggcctgggcggcggcgtgatcttcaccatctacaacgtgaccaccggcaaggtggaggtgatcaacgccagagagaccgtgcccgccagccacgcccccagcctgctggaccagtgcgcccaggccctgcccctgggcaccggcgcccagtggatcggcgtgcccggcgagctgagaggctacgccgaggcccacagaagacacggcagactgccctgggcccagctgttccagcccaccatcgccctgctgagaggcggccacgtggtggcccccgtgctgagcagattcctgcacaacagcatcctgagacccagcctgcaggccagcaccctgagacagctgttcttcaacggcaccgagcccctgagaccccaggaccccctgccctggcccgccctggccaccaccctggagaccgtggccaccgagggcgtggaggtgttctacaccggcagactgggccagatgctggtggaggacatcgccaaggagggcagccagctgaccctgcaggacctggccaagttccagcccgaggtggtggacgccctggaggtgcccctgggcgactacaccctgtacagcccccccccccccgccggcggcgccatcctgagcttcatcctgaacgtgctgagaggcttcaacttcagcaccgagagcatggccagacccgagggcagagtgaacgtgtaccaccacctggtggagaccctgaagttcgccaagggccagagatggagactgggcgaccccagaagccaccccaagctgcagaacgccagcagagacctgctgggcgagaccctggcccagctgatcagacagcagatcgacggcagaggcgaccaccagctgagccactacagcctggccgaggcctggggccacggcaccggcaccagccacgtgagcgtgctgggcgaggacggcagcgccgtggccgccaccagcaccatcaacacccccttcggcgccatggtgtacagccccagaaccggcatcatcctgaacaacgagctgctggacctgtgcgagagatgccccagaggcagcggcaccacccccagccccgtgagcggcgacagagtgggcggcgcccccggcagatgctggccccccgtgcccggcgagagaagccccagcagcatggtgcccagcatcctgatcaacaaggcccagggcagcaagctggtgatcggcggcgccggcggcgagctgatcatcagcgccgtggcccaggccatcatgagcaagctgtggctgggcttcgacctgagagccgccatcgccgcccccatcctgcacgtgaacagcaagggctgcgtggagtacgagcccaacttcagccaggaggtgcagagaggcctgcaggacagaggccagaaccagacccagagacccttcttcctgaacgtggtgcaggccgtgagccaggagggcgcctgcgtgtacgccgtgagcgacctgagaaagagcggcgaggccgccggctactag

SEQ ID NO: 82720 - DNA, 1764 bp, synthetic construct
  misc_feature 1..1764: note = Description of Artificial Sequence: Synthetic coding sequence
  source 1..1764: mol_type = other DNA
atggccagaggctacggcgccaccgtgagcctggtgctgctgggcctgggcctggccctggccgtgatcgtgctggccgtggtgctgagcagacaccaggccccctgcggcccccaggccttcgcccacgccgccgtggccgccgacagcaaggtgtgcagcgacatcggcagagccatcctgcagcagcagggcagccccgtggacgccaccatcgccgccctggtgtgcaccagcgtggtgaacccccagagcatgggcctgggcggcggcgtgatcttcaccatctacaacgtgaccaccggcaaggtggaggtgatcaacgccagagagaccgtgcccgccagccacgcccccagcctgctggaccagtgcgcccaggccctgcccctgggcaccggcgcccagtggatcggcgtgcccggcgagctgagaggctacgccgaggcccacagaagacacggcagactgccctgggcccagctgttccagcccaccatcgccctgctgagaggcggccacgtggtggcccccgtgctgagcagattcctgcacaacagcatcctgagacccagcctgcaggccagcaccctgagacagctgttcttcaacggcaccgagcccctgagaccccaggaccccctgccctggcccgccctggccaccaccctggagaccgtggccaccgagggcgtggaggtgttctacaccggcagactgggccagatgctggtggaggacatcgccaaggagggcagccagctgaccctgcaggacctggccaagttccagcccgaggtggtggacgccctggaggtgcccctgggcgactacaccctgtacagcccccccccccccgccggcggcgccatcctgagcttcatcctgaacgtgctgagaggcttcaacttcagcaccgagagcatggccagacccgagggcagagtgaacgtgtaccaccacctggtggagaccctgaagttcgccaagggccagagatggagactgggcgaccccagaagccaccccaagctgcagaacgccagcagagacctgctgggcgagaccctggcccagctgatcagacagcagatcgacggcagaggcgaccaccagctgagccactacagcctggccgaggcctggggccacggcaccggcaccagccacgtgagcgtgctgggcgaggacggcagcgccgtggccgccaccagcaccatcaacacccccttcggcgccatggtgtacagccccagaaccggcatcatcctgaacaacgagctgctggacctgtgcgagagatgccccagaggcagcggcaccacccccagccccgccgtgagcggcgacagagtgggcggcgcccccggcagatgctggccccccgtgcccggcgagagaagccccagcagcatggtgcccagcatcctgatcaacaaggcccagggcagcaagctggtgatcggcggcgccggcggcgagctgatcatcagcgccgtggcccaggccatcatgagcaagctgtggctgggcttcgacctgagagccgccatcgccgcccccatcctgcacgtgaacagcaagggctgcgtggagtacgagcccaacttcagccaggaggtgcagagaggcctgcaggacagaggccagaaccagacccagagacccttcttcctgaacgtggtgcaggccgtgagccaggagggcgcctgcgtgtacgccgtgagcgacctgagaaagagcggcgaggccgccggctactag

SEQ ID NO: 82721 - DNA, 1533 bp, synthetic construct
  misc_feature 1..1533: note = Description of Artificial Sequence: Synthetic coding sequence
  source 1..1533: mol_type = other DNA
atggccagaggctacggcgccaccgtgagcctggtgctgctgggcctgggcctggccctggccgtgatcgtgctggccgtggtgctgagcagacaccaggccccctgcggcccccaggccttcgcccacgccgccgtggccgccgacagcaaggtgtgcagcgacatcggcagaggccccgtggacagaggcgccagaggcgccccctggctgtgcagaggccccccccccccctggccccccgccctgggcgccgccgtgcccgcccaccacagagccgcccccagaggcgcctgcggcggcccctgcccccagcccttccccgcccagcagcaccccgccgccttcctggccggcgtgaaccccgccctgttcttcaacggcaccgagcccctgagaccccaggaccccctgccctggcccgccctggccaccaccctggagaccgtggccaccgagggcgtggaggtgttctacaccggcagactgggccagatgctggtggaggacatcgccaaggagggcagccagctgaccctgcaggacctggccaagttccagcccgaggtggtggacgccctggaggtgcccctgggcgactacaccctgtacagcccccccccccccgccggcggcgccatcctgagcttcatcctgaacgtgctgagaggcttcaacttcagcaccgagagcatggccagacccgagggcagagtgaacgtgtaccaccacctggtggagaccctgaagttcgccaagggccagagatggagactgggcgaccccagaagccaccccaagctgcagaacgccagcagagacctgctgggcgagaccctggcccagctgatcagacagcagatcgacggcagaggcgaccaccagctgagccactacagcctggccgaggcctggggccacggcaccggcaccagccacgtgagcgtgctgggcgaggacggcagcgccgtggccgccaccagcaccatcaacacccccttcggcgccatggtgtacagccccagaaccggcatcatcctgaacaacgagctgctggacctgtgcgagagatgccccagaggcagcggcaccacccccagccccgccgtgagcggcgacagagtgggcggcgcccccggcagatgctggccccccgtgcccggcgagagaagccccagcagcatggtgcccagcatcctgatcaacaaggcccagggcagcaagctggtgatcggcggcgccggcggcgagctgatcatcagcgccgtggcccaggccatcatgagcaagctgtggctgggcttcgacctgagagccgccatcgccgcccccatcctgcacgtgaacagcaagggctgcgtggagtacgagcccaacttcagccaggaggtgcagagaggcctgcaggacagaggccagaaccagacccagagacccttcttcctgaacgtggtgcaggccgtgagccaggagggcgcctgcgtgtacgccgtgagcgacctgagaaagagcggcgaggccgccggctactag

SEQ ID NO: 82722 - DNA, 1506 bp, synthetic construct
  misc_feature 1..1506: note = Description of Artificial Sequence: Synthetic coding sequence
  source 1..1506: mol_type = other DNA
atgggcctgggcggcggcgtgatcttcaccatctacaacgtgaccaccggcaaggtggaggtgatcaacgccagagagaccgtgcccgccagccacgcccccagcctgctggaccagtgcgcccaggccctgcccctgggcaccggcgcccagtggatcggcgtgcccggcgagctgagaggctacgccgaggcccacagaagacacggcagactgccctgggcccagctgttccagcccaccatcgccctgctgagaggcggccacgtggtggcccccgtgctgagcagattcctgcacaacagcatcctgagacccagcctgcaggccagcaccctgagacagctgttcttcaacggcaccgagcccctgagaccccaggaccccctgccctggcccgccctggccaccaccctggagaccgtggccaccgagggcgtggaggtgttctacaccggcagactgggccagatgctggtggaggacatcgccaaggagggcagccagctgaccctgcaggacctggccaagttccagcccgaggtggtggacgccctggaggtgcccctgggcgactacaccctgtacagcccccccccccccgccggcggcgccatcctgagcttcatcctgaacgtgctgagaggcttcaacttcagcaccgagagcatggccagacccgagggcagagtgaacgtgtaccaccacctggtggagaccctgaagttcgccaagggccagagatggagactgggcgaccccagaagccaccccaagctgcagaacgccagcagagacctgctgggcgagaccctggcccagctgatcagacagcagatcgacggcagaggcgaccaccagctgagccactacagcctggccgaggcctggggccacggcaccggcaccagccacgtgagcgtgctgggcgaggacggcagcgccgtggccgccaccagcaccatcaacacccccttcggcgccatggtgtacagccccagaaccggcatcatcctgaacaacgagctgctggacctgtgcgagagatgccccagaggcagcggcaccacccccagccccgtgagcggcgacagagtgggcggcgcccccggcagatgctggccccccgtgcccggcgagagaagccccagcagcatggtgcccagcatcctgatcaacaaggcccagggcagcaagctggtgatcggcggcgccggcggcgagctgatcatcagcgccgtggcccaggccatcatgagcaagctgtggctgggcttcgacctgagagccgccatcgccgcccccatcctgcacgtgaacagcaagggctgcgtggagtacgagcccaacttcagccaggaggtgcagagaggcctgcaggacagaggccagaaccagacccagagacccttcttcctgaacgtggtgcaggccgtgagccaggagggcgcctgcgtgtacgccgtgagcgacctgagaaagagcggcgaggccgccggctactag

SEQ ID NO: 82723 - DNA, 1386 bp, synthetic construct
  misc_feature 1..1386: note = Description of Artificial Sequence: Synthetic coding sequence
  source 1..1386: mol_type = other DNA
atggagagagccgaggagcccgtggtgtaccagaagctgctgccctgggagcccagcctggagagcgaggaggaggtggaggaggaggagaccagcgaggccctggtgctgaaccccagaagacaccaggacagcagcagaaacaaggccggcggcctgcccggcacctgggccagagtggtggccgccctgctgctgctggccgtgggctgcagcctggccgtgagacagctgcagaaccagggcagaagcaccggcagcctgggcagcgtggcccccccccccggcggccacagccacggccccggcgtgtaccaccacggcgccatcatcagccccgccggcgccatgttctggggcctgttccacgacagcagcagcggcaacagcaccgccctgaccagcggccccgcccagaccctggcccccggcctgggcctgcccgccgccctgcccaccctgcacctgctgcacgccagattcggcagactgccctggcccagactgctggtgggccccaccaccctggcccaggagggcttcctggtggacacccccctggccagagccctggtggccagaggcaccgagggcctgtgccccctgctgtgccacgccgacggcacccccctgggcgccggcgccagagccaccaacccccagctggccgccgtgctgagaagcgccgccctggcccccaccagcgacctggccggcgacgccctgctgagcctgctggccggcgacctgggcgtggaggtgcccagcgccgtgcccagacccaccctggagcccgccgagcagctgcccgtgccccagggcatcctgttcaccacccccagccccagcgccggccccgagctgctggccctgctggaggccgccctgagaagcggcgcccccatccccgacccctgcccccccttcctgcagaccgccgtgagccccgagagcagcgccctggccgccgtggacagcagcggcagcgtgctgctgctgaccagcagcctgaactgcagcttcggcagcgcccacctgagccccagcaccggcgtgctgctgagcaacctggtggccaagagcaccaccagcgcctgggcctgccccctgatcctgagaggcagcctggacgacaccgaggccgacgtgctgggcctggtggccagcggcacccccgacgtggccagagccatgacccacaccctgctgagacacctggccgccagaccccccacccaggcccagcaccagcaccagggccagcaggagcccaccgagcaccccagcacctgcggccagggcaccctgctgcaggtggccgcccacaccgagcacgcccacgtgagcagcgtgccccacgcctgctgccccttccagggcttctag

SEQ ID NO: 82724 - DNA, 1482 bp, synthetic construct
  misc_feature 1..1482: note = Description of Artificial Sequence: Synthetic coding sequence
  source 1..1482: mol_type = other DNA
atggagagagccgaggagcccgtggtgtaccagaagctgctgccctgggagcccagcctggagagcgaggaggaggtggaggaggaggagaccagcgaggccctggtgctgaaccccagaagacaccaggacagcagcagaaacaaggccggcggcctgcccggcacctgggccagagtggtggccgccctgctgctgctggccgtgggctgcagcctggccgtgagacagctgcagaaccagggcagaagcaccggcagcctgggcagcgtggcccccccccccggcggccacagccacggccccggcgtgtaccaccacggcgccatcatcagccccgccggcagagagctgctggtggccggcggcaacgtggtggacgccggcgtgggcgccgccctgtgcctggccgtggtgcacccccacgccaccggcctgggcgccatgttctggggcctgttccacgacagcagcagcggcaacagcaccgccctgaccagcggccccgcccagaccctggcccccggcctgggcctgcccgccgccctgcccaccctgcacctgctgcacgccagattcggcagactgccctggcccagactgctggtgggccccaccaccctggcccaggagggcttcctggtggacacccccctggccagagccctggtggccagaggcaccgagggcctgtgccccctgctgtgccacgccgacggcacccccctgggcgccggcgccagagccaccaacccccagctggccgccgtgctgagaagcgccgccctggcccccaccagcgacctggccggcgacgccctgctgagcctgctggccggcgacctgggcgtggaggtgcccagcgccgtgcccagacccaccctggagcccgccgagcagctgcccgtgccccagggcatcctgttcaccacccccagccccagcgccggccccgagctgctggccctgctggaggccgccctgagaagcggcgcccccatccccgacccctgcccccccttcctgcagaccgccgtgagccccgagagcagcgccctggccgccgtggacagcagcggcagcgtgctgctgctgaccagcagcctgaactgcagcttcggcagcgcccacctgagccccagcaccggcgtgctgctgagcaacctggtggccaagagcaccaccagcgcctgggcctgccccctgatcctgagaggcagcctggacgacaccgaggccgacgtgctgggcctggtggccagcggcacccccgacgtggccagagccatgacccacaccctgctgagacacctggccgccagaccccccacccaggcccagcaccagcaccagggccagcaggagcccaccgagcaccccagcacctgcggccagggcaccctgctgcaggtggccgcccacaccgagcacgcccacgtgagcagcgtgccccacgcctgctgccccttccagggcttctag

SEQ ID NO: 82725 - DNA, 1038 bp, synthetic construct
  misc_feature 1..1038: note = Description of Artificial Sequence: Synthetic coding sequence
  source 1..1038: mol_type = other DNA
atgttctggggcctgttccacgacagcagcagcggcaacagcaccgccctgaccagcggccccgcccagaccctggcccccggcctgggcctgcccgccgccctgcccaccctgcacctgctgcacgccagattcggcagactgccctggcccagactgctggtgggccccaccaccctggcccaggagggcttcctggtggacacccccctggccagagccctggtggccagaggcaccgagggcctgtgccccctgctgtgccacgccgacggcacccccctgggcgccggcgccagagccaccaacccccagctggccgccgtgctgagaagcgccgccctggcccccaccagcgacctggccggcgacgccctgctgagcctgctggccggcgacctgggcgtggaggtgcccagcgccgtgcccagacccaccctggagcccgccgagcagctgcccgtgccccagggcatcctgttcaccacccccagccccagcgccggccccgagctgctggccctgctggaggccgccctgagaagcggcgcccccatccccgacccctgcccccccttcctgcagaccgccgtgagccccgagagcagcgccctggccgccgtggacagcagcggcagcgtgctgctgctgaccagcagcctgaactgcagcttcggcagcgcccacctgagccccagcaccggcgtgctgctgagcaacctggtggccaagagcaccaccagcgcctgggcctgccccctgatcctgagaggcagcctggacgacaccgaggccgacgtgctgggcctggtggccagcggcacccccgacgtggccagagccatgacccacaccctgctgagacacctggccgccagaccccccacccaggcccagcaccagcaccagggccagcaggagcccaccgagcaccccagcacctgcggccagggcaccctgctgcaggtggccgcccacaccgagcacgcccacgtgagcagcgtgccccacgcctgctgccccttccagggcttctag

SEQ ID NO: 82726 - DNA, 1482 bp, synthetic construct; identical to SEQ ID NO: 82724
  misc_feature 1..1482: note = Description of Artificial Sequence: Synthetic coding sequence
  source 1..1482: mol_type = other DNA

SEQ ID NO: 82727 - DNA, 678 bp, synthetic construct
  misc_feature 1..678: note = Description of Artificial Sequence: Synthetic coding sequence
  source 1..678: mol_type = other DNA
atgaccagcgagttcttcagcgcccagctgagagcccagatcagcgacgacaccacccaccccatcagctactacaagcccgagttctacatgcccgacgacggcggcaccgcccacctgagcgtggtggccgaggacggcagcgccgtgagcgccaccagcaccatcaacctgtacttcggcagcaaggtgagaagccccgtgagcggcatcctgctgaacaacgagatggacgacttcagcagcaccagcatcaccaacgagttcggcgtgccccccagccccgccaacttcatccagcccggcaagcagcccctgagcagcatgtgccccaccatcatggtgggccaggacggccaggtgagaatggtggtgggcgccgccggcggcacccagatcaccatggccaccgccctggccatcatctacaacctgtggttcggctacgacgtgaagtgggccgtggaggagcccagactgcacaaccagctgctgcccaacgtgaccaccgtggagagaaacatcgaccaggaggtgaccgccgccctggagaccagacaccaccacacccagatcaccagcaccttcatcgccgtggtgcaggccatcgtgagaatggccggcggctgggccgccgccagcgacagcagaaagggcggcgagcccgccggctactag

SEQ ID NO: 82728 - DNA, 678 bp, synthetic construct; identical to SEQ ID NO: 82727
  misc_feature 1..678: note = Description of Artificial Sequence: Synthetic coding sequence
  source 1..678: mol_type = other DNA

SEQ ID NO: 82729 - DNA, 678 bp, synthetic construct; identical to SEQ ID NO: 82727
  misc_feature 1..678: note = Description of Artificial Sequence: Synthetic coding sequence
  source 1..678: mol_type = other DNA

SEQ ID NO: 82730 - DNA, 678 bp, synthetic construct
  misc_feature 1..678: note = Description of Artificial Sequence: Synthetic coding sequence
  source 1..678: mol_type = other DNA
atgaccagcgagttcttcgccgcccagctgagagcccagatcagcgacgacaccacccaccccatcagctactacaagcccgagttctacacccccgtggacggcggcaccgcccacctgagcgtggtggccgaggacggcagcgccgtgagcgccaccagcaccatcaacctgtacttcggcagcaaggtgagaagccccgtgagcgagatcctgttcaacgacgagatggacgacttcagcagccccaacatcaccaacgagttcggcgtgccccccagccccgccaacttcatccagcccggcaagcagcccctgagcagcatgtgccccaccatcatggtgggccaggacggccaggtgagaatggtggtgggcgccgccggcggcacccagatcaccaccgccaccgccctggccatcatctacaacctgtggttcggctacgacgtgaagagagccgtggaggagcccagactgcacaaccagctgctgcccaacgtgaccaccgtggagagaaacatcgaccaggccgtgaccgccgccctggagaccagacaccaccacacccagatcgccagcaccttcatcgccgtggtgcaggccatcgtgagaaccgccggcggctgggccgccgccagcgacagcagaaagggcggcgagcccgccggctactag

SEQ ID NO: 82731 - DNA, 657 bp, synthetic construct
  misc_feature 1..657: note = Description of Artificial Sequence: Synthetic coding sequence
  source 1..657: mol_type = other DNA
atgaccagcgagttcttcgccgcccagctgagagcccagatcagcgacgacaccacccaccccatcagctactacaagcccgagttctacacccccgtggacggcggcaccgcccacctgagcgtggtggccgaggacggcagcgccgtgagcgccaccagcaccatcaacctgtacttcggcagcaaggtgagaagccccgtgagcgagatcctgttcaacgacgagatggacgacttcagcagccccaacatcaccaacgagttcggcgtgccccccagccccgccaacttcatccagcccggcaagcagcccctgagcagcatgtgccccaccatcatggtgggccaggacggccagccccccagccacgccgaccacacccccatgccccaggccatcatctacaacctgtggttcggctacgacgtgaagagagccgtggaggagcccagactgcacaaccagctgctgcccaacgtgaccaccgtggagagaaacatcgaccaggccgtgaccgccgccctggagaccagacaccaccacacccagatcgccagcaccttcatcgccgtggtgcaggccatcgtgagaaccgccggcggctgggccgccgccagcgacagcagaaagggcggcgagcccgccggctactag

SEQ ID NO: 82732 - DNA, 678 bp, synthetic construct
  misc_feature 1..678: note = Description of Artificial Sequence: Synthetic coding sequence
  source 1..678: mol_type = other DNA
atgaccagcgagttcttcgccgcccagctgagaagccagatcagcgaccacaccacccaccccatcagctactacaagcccgagttctacacccccgacgacggcggcaccgcccacctgagcgtggtggccgaggacggcagcgccgtgagcgccaccagcaccatcaacctgtacttcggcagcaaggtgtgcagccccgtgagcggcatcctgttcaacaacgagtggaccaccagcgccctgcccgccttcaccaacgagttcggcgccccccccagccccgccaacttcatccagcccggcaagcagcccctgctgagcatgtgccccaccatcatggtgggccaggacggccaggtgagaatggtggtgggcgccgccggcggcacccagatcaccaccgacaccgccctggccatcatctacaacctgtggttcggctacgacgtgaagagagccgtggaggagcccagactgcacaacaagctgctgcccaacgtgaccaccgtggagagaaacatcgaccaggccgtgaccgccgccctggagaccagacaccaccacacccagatcgccagcaccttcatcgccgtggtgcaggccatcgtgagaaccgccggcggctgggccgccgccagcgacagcagaaagggcggcgagcccgccggctactag

SEQ ID NO: 82733 - DNA, 711 bp, synthetic construct
  misc_feature 1..711: note = Description of Artificial Sequence: Synthetic coding sequence
  source 1..711: mol_type = other DNA
cccgccctgggcagccagcaggtggtgagaaacatgaccagcgagttcttcgccgcccagctgagaagccagatcagcgaccacaccacccaccccatcagctactacaagcccgagttctacacccccgacgacggcggcaccgcccacctgagcgtggtggccgaggacggcagcgccgtgagcgccaccagcaccatcaacctgtacttcggcagcaaggtgtgcagccccgtgagcggcatcctgttcaacaacgagtggaccaccagcgccctgcccgccttcaccaacgagttcggcgccccccccagccccgccaacttcatccagcccggcaagcagcccctgctgagcatgtgccccaccatcatggtgggccaggacggccaggtgagaatggtggtgggcgccgccggcggcacccagatcaccaccgacaccgccctggccatcatctacaacctgtggttcggctacgacgtgaagagagccgtggaggagcccagactgcacaacaagctgctgcccaacgtgaccaccgtggagagaaacatcgaccaggccgtgaccgccgccctggagaccagacaccaccacacccagatcgccagcaccttcatcgccgtggtgcaggccatcgtgagaaccgccggcggctgggccgccgccagcgacagcagaaagggcggcgagcccgccggctactag

SEQ ID NO: 82734 - DNA, 675 bp, synthetic construct
  misc_feature 1..675: note = Description of Artificial Sequence: Synthetic coding sequence
  source 1..675: mol_type = other DNA
atggtggccgccgtgctgctgggcctgagctggctgtgcagccccctgggcgccctggtgctggacttcaacaacatcagaagcagcgccgacctgcacggcgccagaaagggcagccagtgcctgagcgacaccgactgcaacaccagaaagttctgcctgcagcccagagacgagaagcccttctgcgccacctgcagaggcctgagaagaagatgccagagagacgccatgtgctgccccggcaccctgtgcgtgaacgacgtgtgcaccaccatggaggacgccacccccatcctggagagacagctggacgagcaggacggcacccacgccgagggcaccaccggccaccccgtgcaggagaaccagcccaagagaaagcccagcatcaagaagagccagggcagaaagggccaggagggcgagagctgcctgagaaccttcgactgcggccccggcctgtgctgcgccagacacttctggaccaagatctgcaagcccgtgctgctggagggccaggtgtgcagcagaagaggccacaaggacaccgcccaggcccccgagatcttccagagatgcgactgcggccccggcctgctgtgcagaagccagctgaccagcaacagacagcacgccagactgagagtgtgccagaagatcgagaagctgtag

SEQ ID NO: 82735 - DNA, 873 bp, synthetic construct
  misc_feature 1..873: note = Description of Artificial Sequence: Synthetic coding sequence
  source 1..873: mol_type = other DNA
atgagactgaacagcaccggcgaggtgcccgtgctgatccacggcgagaacatcatctgcgaggccacccagatcatcgactacctggagcagaccttcctggacgagagaacccccagactgatgcccgacaaggagagcatgtactaccccagagtgcagcactacagagagctgctggacagcctgcccatggacgcctacacccacggctgcatcctgcaccccgagctgaccgtggacagcatgatccccgcctacgccaccaccagaatcagaagccagatcggcaacaccgagagcgagctgaagaagctggccgaggagaaccccgacctgcaggaggcctacatcgccaagcagaagagactgaagagcaagctgctggaccacgacaacgtgaagtacctgaagaagatcctggacgagctggagaaggtgctggaccaggtggagaccgagctgcagagaagaaacgaggagacccccgaggagggccagcagccctggctgtgcggcgagagcttcaccctggccgacgtgagcctggccgtgaccctgcacagactgaagttcctgggcttcgccagaagaaactggggcaacggcaagagacccaacctggagacctactacgagagagtgctgaagagaaagaccttcaacaaggtgctgggccacgtgaacaacatcctgatcagcgccgtgctgcccaccgccttcagagtggccaagaagagagcccccaaggtgctgggcaccaccctggtggtgggcctgctggccggcgtgggctacttcgccttcatgctgttcagaaagagactgggcagcatgatcctggccttcagacccagacccaactacttctag

SEQ ID NO: 82736 - DNA, 1632 bp, synthetic construct
  misc_feature 1..1632: note = Description of Artificial Sequence: Synthetic coding sequence
  source 1..1632: mol_type = other DNA
atgggcgactggaacctgctgggcggcatcctggaggaggtgcacagccacagcaccatcgtgggcaagatctggctgaccatcctgttcatcttcagaatgctggtgctgagagtggccgccgaggacgtgtgggacgacgagcagagcgccttcgcctgcaacaccagacagcccggctgcaacaacatctgctacgacgacgccttccccatcagcctgatcagattctgggtgctgcagatcatcttcgtgagcagccccagcctggtgtacatgggccacgccctgtacagactgagagccttcgagaaggacagacagagaaagaagagccacctgagagcccagatggagaaccccgacctggacctggaggagcagcagagaatcgacagagagctgagaagactggaggagcagaagagaatccacaaggtgcccctgaagggctgcctgctgagaacctacgtgctgcacatcctgaccagaagcgtgctggaggtgggcttcatgatcggccagtacatcctgtacggcttccagatgcaccccctgtacaagtgcacccagcccccctgccccaacgccgtggactgcttcgtgagcagacccaccgagaagaccatcttcatgctgttcatgcacagcatcgccgccatcagcctgctgctgaacatcctggagatcttccacctgggcatcagaaagatcatgagaaccctgtacaagaagagcagcagcgagggcatcgaggacgagaccggcccccccttccacctgaagaagtacagcgtggcccagcagtgcatgatctgcagcagcctgcccgagagaatcagccccctgcaggccaacaaccagcagcaggtgatcagagtgaacgtgcccaagagcaagaccatgtggcagatcccccagcccagacagctggaggtggaccccagcaacggcaagaaggactggagcgagaaggaccagcacagcggccagctgcacgtgcacagcccctgcccctgggccggcagcgccggcaaccagcacctgggccagcagagcgaccacagcagcttcggcctgcagaacaccatgagccagagctggctgggcaccaccaccgcccccagaaactgccccagcttcgccgtgggcacctgggagcagagccaggaccccgagcccagcggcgagcccctgaccgacctgcacagccactgcagagacagcgagggcagcatgagagagagcggcgtgtggatcgacagaagcagacccggcagcagaaaggccagcttcctgagcagactgctgagcgagaagagacacctgcacagcgacagcggcagcagcggcagcagaaacagcagctgcctggacttcccccactgggagaacagccccagccccctgcccagcgtgaccggccacagaaccagcatggtgagacaggccgccctgcccatcatggagctgagccaggagctgttccacagcggctgcttcctgttccccttcttcctgcccggcgtgtgcatgtacgtgtgcgtggacagagaggccgacggcggcggcgactacctgtggagagacaagatcatccacagcatccacagcgtgaagttcaacagctag

SEQ ID NO: 82737 - DNA, 1308 bp, synthetic construct
  misc_feature 1..1308: note = Description of Artificial Sequence: Synthetic coding sequence
  source 1..1308: mol_type = other DNA
atgggcgactggagcttcctgggcagactgctggagaacgcccaggagcacagcaccgtgatcggcaaggtgtggctgaccgtgctgttcatcttcagaatcctggtgctgggcgccgccgccgaggacgtgtggggcgacgagcagagcgacttcacctgcaacacccagcagcccggctgcgagaacgtgtgctacgacagagccttccccatcagccacatcagattctgggccctgcagatcatcttcgtgagcacccccaccctgatctacctgggccacgtgctgcacatcgtgagaatggaggagaagaagaaggagagagaggaggaggagcagctgaagagagagagccccagccccaaggagcccccccaggacaaccccagcagcagagacgacagaggcagagtgagaatggccggcgccctgctgagaacctacgtgttcaacatcatcttcaagaccctgttcgaggtgggcttcatcgccggccagtacttcctgtacggcttcgagctgaagcccctgtacagatgcgacagatggccctgccccaacaccgtggactgcttcatcagcagacccaccgagaagaccatcttcatcatcttcatgctggccgtggcctgcgccagcctgctgctgaacatgctggagatctaccacctgggctggaagaagctgaagcagggcgtgaccagcagactgggccccgacgccagcgaggcccccctgggcaccgccgaccccccccccctgccccccagcagcagaccccccgccgtggccatcggcttccccccctactacgcccacaccgccgcccccctgggccaggccagagccgtgggctaccccggcgcccccccccccgccgccgacttcaagctgctggccctgaccgaggccagaggcaagggccagagcgccaagctgtacaacggccaccaccacctgctgatgaccgagcagaactgggccaaccaggccgccgagagacagccccccgccctgaaggcctaccccgccgccagcacccccgccgcccccagccccgtgggcagcagcagcccccccctggcccacgaggccgaggccggcgccgcccccctgctgctggacggcagcggcagcagcctggagggcagcgccctggccggcacccccgaggaggaggagcaggccgtgaccaccgccgcccagatgcaccagccccccctgcccctgggcgaccccggcagagccagcaaggccagcagagccagcagcggcagagccagacccgaggacctggccatctag

SEQ ID NO: 82738 - DNA, 1002 bp, synthetic construct
  misc_feature 1..1002: note = Description of Artificial Sequence: Synthetic coding sequence
  source 1..1002: mol_type = other DNA
atgggcgactggggcttcctggagaagctgctggaccaggtgcaggagcacagcaccgtggtgggcaagatctggctgaccgtgctgttcatcttcagaatcctgatcctgggcctggccggcgagagcgtgtggggcgacgagcagagcgacttcgagtgcaacaccgcccagcccggctgcaccaacgtgtgctacgaccaggccttccccatcagccacatcagatactgggtgctgcagttcctgttcgtgagcacccccaccctggtgtacctgggccacgtgatctacctgagcagaagagaggagagactgagacagaaggagggcgagctgagagccctgcccgccaaggacccccaggtggagagagccctggccgccgtggagagacagatggccaagatcagcgtggccgaggacggcagactgagaatcagaggcgccctgatgggcacctacgtggccagcgtgctgtgcaagagcgtgctggaggccggcttcctgtacggccagtggagactgtacggctggaccatggagcccgtgttcgtgtgccagagagccccctgcccctacctggtggactgcttcgtgagcagacccaccgagaagaccatcttcatcatcttcatgctggtggtgggcctgatcagcctggtgctgaacctgctggagctggtgcacctgctgtgcagatgcctgagcagaggcatgagagccagacagggccaggacgccccccccacccagggcaccagcagcgacccctacaccgaccaggtgttcttctacctgcccgtgggccagggccccagcagccccccctgccccacctacaacggcctgagcagcagcgagcagaactgggccaacctgaccaccgaggagagactggccagcagcagaccccccctgttcctggacccccccccccagaacggccagaagccccccagcagacccagcagcagcgccagcaagaagcagtacgtgtag

SEQ ID NO: 82739 - DNA, 879 bp, synthetic construct
  misc_feature 1..879: note = Description of Artificial Sequence: Synthetic coding sequence
  source 1..879: mol_type = other DNA
atgggcgactggggcttcctggagaagctgctggaccaggtgcaggagcacagcaccgtggtgggcaagatctggctgaccgtgctgttcatcttcagaatcctgatcctgggcctggccggcgagagcgtgtggggcgacgagcagagcgacttcgagtgcaacaccgcccagcccggctgcaccaacgtgtgctacgaccaggccttccccatcagccacatcagatactgggtgctgcagttcctgttcgtgagcacccccaccctggtgtacctgggccacgtgatctacctgagcagaagagaggagagactgagacagaaggagggcgagctgagagccctgcccgccaaggacccccaggtggagagagccctggccgccgtggagagacagatggccaagatcagcgtggccgaggacggcagactgagaatcagaggcgccctgatgggcacctacgtggccagcgtgctgtgcaagagcgtgctggaggccggcttcctgtacggccagtggagactgtacggctggaccatggagcccgtgttcgtgtgccagagagccccctgcccctacctggtggactgcttcgtgagcagacccaccgagaagaccatcttcatcatcttcatgctggtggtgggcctgatcagcctggtgctgaacctgctggagctggtgcacctgctgtgcagatgcctgagcagaggcatgagagccagacagggccaggacgccccccccacccagggcaccagcagcgacccctacaccgaccaggtgttcttctacctgcccgtgggccagggccccagcagccccccctgccccacctacaacggcctgagcagcagcgagcagaactgggcctag

SEQ ID NO: 82740 - DNA, 882 bp, synthetic construct
  misc_feature 1..882: note = Description of Artificial Sequence: Synthetic coding sequence
  source 1..882: mol_type = other DNA
atgggcgactggggcttcctggagaagctgctggaccaggtgcaggagcacagcaccgtggtgggcaagatctggctgaccgtgctgttcatcttcagaatcctgatcctgggcctggccggcgagagcgtgtggggcgacgagcagagcgacttcgagtgcaacaccgcccagcccggctgcaccaacgtgtgctacgaccaggccttccccatcagccacatcagatactgggtgctgcagttcctgttcgtgagcacccccaccctggtgtacctgggccacgtgatctacctgagcagaagagaggagagactgagacagaaggagggcgagctgagagccctgcccgccaaggacccccaggtggagagagccctggccgccgtggagagacagatggccaagatcagcgtggccgaggacggcagactgagaatcagaggcgccctgatgggcacctacgtggccagcgtgctgtgcaagagcgtgctggaggccggcttcctgtacggccagtggagactgtacggctggaccatggagcccgtgttcgtgtgccagagagccccctgcccctacctggtggactgcttcgtgagcagacccaccgagaagaccatcttcatcatcttcatgctggtggtgggcctgatcagcctggtgctgaacctgctggagctggtgcacctgctgtgcagatgcctgagcagaggcatgagagccagacagggccaggacgccccccccacccagggcaccccccagaccctgaccagaaccagaagcagcagcaccagcccctgggccagaggcccccacccccaccacgccccccccaccatgggcagccaccccgtgagcagaaccggccccacctag

SEQ ID NO: 82741 - DNA, 1077 bp, synthetic construct
  misc_feature 1..1077: note = Description of Artificial Sequence: Synthetic coding sequence
  source 1..1077: mol_type = other DNA
atgggcgactggagcttcctgggcaacttcctggaggaggtgcacaagcacagcaccgtggtgggcaaggtgtggctgaccgtgctgttcatcttcagaatgctggtgctgggcaccgccgccgagagcagctggggcgacgagcaggccgacttcagatgcgacaccatccagcccggctgccagaacgtgtgctacgaccaggccttccccatcagccacatcagatactgggtgctgcagatcatcttcgtgagcacccccagcctggtgtacatgggccacgccatgcacaccgtgagaatgcaggagaagagaaagctgagagaggccgagagagccaaggaggtgagaggcagcggcagctacgagtaccccgtggccgagaaggccgagctgagctgctgggaggagggcaacggcagaatcgccctgcagggcaccctgctgaacacctacgtgtgcagcatcctgatcagaaccaccatggaggtgggcttcatcgtgggccagtacttcatctacggcatcttcctgaccaccctgcacgtgtgcagaagaagcccctgcccccaccccgtgaactgctacgtgagcagacccaccgagaagaacgtgttcatcgtgttcatgctggccgtggccgccctgagcctgctgctgagcctggccgagctgtaccacctgggctggaagaagatcagacagagattcgtgaagcccagacagcacatggccaagtgccagctgagcggccccagcgtgggcatcgtgcagagctgcacccccccccccgacttcaaccagtgcctggagaacggccccggcggcaagttcttcaaccccttcagcaacaacatggccagccagcagaacaccgacaacctggtgaccgagcaggtgagaggccaggagcagacccccggcgagggcttcatccaggtgagatacggccagaagcccgaggtgcccaacggcgtgagccccggccacagactgccccacggctaccacagcgacaagagaagactgagcaaggccagcagcaaggccagaagcgacgacctgagcgtgtag

SEQ ID NO: 82742 - DNA, 1077 bp, synthetic construct; identical to SEQ ID NO: 82741
  misc_feature 1..1077: note = Description of Artificial Sequence: Synthetic coding sequence
  source 1..1077: mol_type = other DNA

SEQ ID NO: 82743 - DNA, 759 bp, synthetic construct
  misc_feature 1..759: note = Description of Artificial Sequence: Synthetic coding sequence
  source 1..759: mol_type = other DNA
atgggcgactggagcttcctgggcaacttcctggaggaggtgcacaagcacagcaccgtggtgggcaaggtgtggctgaccgtgctgttcatcttcagaatgctggtgctgggcaccgccgccgagagcagctggggcgacgagcaggccgacttcagatgcgacaccatccagcccggctgccagaacgtgtgctacgaccaggccttccccatcagccacatcagatactgggtgctgcagatcatcttcgtgagcacccccagcctggtgtacatgggccacgccatgcacaccgtgagaatgcaggagaagagaaagctgagagaggccgagagagccaaggaggtgagaggcagcggcagctacgagtaccccgtggccgagaaggccgagctgagctgctgggaggagggcaacggcagaatcgccctgcagggcaccctgctgaacacctacgtgtgcagcatcctgatcagaaccaccatggaggtgggcttcatcgtgggccagtacttcatctacggcatcttcctgaccaccctgcacgtgtgcagaagaagcccctgcccccaccccgtgaactgctacgtgagcagacccaccgagaagaacgtgttcatcgtgttcatgctggccgtggccgccctgagcctgctgctgagcctggccgagctgtaccacctgggctggaagaagatcagacagagattcgtgaagcccagacagcacatggccaagtgccagctgagcggctag

SEQ ID NO: 82744 - DNA, 1302 bp, synthetic construct
  misc_feature 1..1302: note = Description of Artificial Sequence: Synthetic coding sequence
  source 1..1302: mol_type = other DNA
atgggcgactggagcttcctgggcaacatcctggaggaggtgaacgagcacagcaccgtgatcggcagagtgtggctgaccgtgctgttcatcttcagaatcctgatcctgggcaccgccgccgagttcgtgtggggcgacgagcagagcgacttcgtgtgcaacacccagcagcccggctgcgagaacgtgtgctacgacgaggccttccccatcagccacatcagactgtgggtgctgcagatcatcttcgtgagcacccccagcctgatgtacgtgggccacgccgtgcactacgtgagaatggaggagaagagaaagagcagagaggccgaggagctgggccagcaggccggcaccaacggcggccccgaccagggcagcgtgaagaagagcagcggcagcaagggcaccaagaagttcagactggagggcaccctgctgagaacctacatctgccacatcatcttcaagaccctgttcgaggtgggcttcatcgtgggccactacttcctgtacggcttcagaatcctgcccctgtacagatgcagcagatggccctgccccaacgtggtggactgcttcgtgagcagacccaccgagaagaccatcttcatcctgttcatgctgagcgtggccagcgtgagcctgttcctgaacgtgatggagctgggccacctgggcctgaagggcatcagaagcgccctgaagagacccgtggagcagcccctgggcgagatccccgagaagagcctgcacagcatcgccgtgagcagcatccagaaggccaagggctaccagctgctggaggaggagaagatcgtgagccactacttccccctgaccgaggtgggcatggtggagaccagccccctgcccgccaagcccttcaaccagttcgaggagaagatcagcaccggccccctgggcgacctgagcagaggctaccaggagaccctgcccagctacgcccaggtgggcgcccaggaggtggagggcgagggcccccccgccgaggagggcgccgagcccgaggtgggcgagaagaaggaggaggccgagagactgaccaccgaggagcaggagaaggtggccgtgcccgagggcgagaaggtggagacccccggcgtggacaaggagggcgagaaggaggagccccagagcgagaaggtgagcaagcagggcctgcccgccgagaagacccccagcctgtgccccgagctgaccaccgacgacgccagacccctgagcagactgagcaaggccagcagcagagccagaagcgacgacctgaccgtgtag

SEQ ID NO: 82745 - DNA, 1302 bp, synthetic construct; identical to SEQ ID NO: 82744
  misc_feature 1..1302: note = Description of Artificial Sequence: Synthetic coding sequence
  source 1..1302: mol_type = other DNA

SEQ ID NO: 82746 - DNA, 1548 bp, synthetic construct
  misc_feature 1..1548: note = Description of Artificial Sequence: Synthetic coding sequence
  source 1..1548: mol_type = other DNA
atgggcgactggaacctgctgggcgacaccctggaggaggtgcacatccacagcaccatgatcggcaagatctggctgaccatcctgttcatcttcagaatgctggtgctgggcgtggccgccgaggacgtgtggaacgacgagcagagcggcttcatctgcaacaccgagcagcccggctgcagaaacgtgtgctacgaccaggccttccccatcagcctgatcagatactgggtgctgcaggtgatcttcgtgagcagccccagcctggtgtacatgggccacgccctgtacagactgagagtgctggaggaggagagacagagaatgaaggcccagctgagagtggagctggaggaggtggagttcgagatgcccagagacagaagaagactggagcaggagctgtgccagctggagaagagaaagctgaacaaggcccccctgagaggcaccctgctgtgcacctacgtgatccacatcttcaccagaagcgtggtggaggtgggcttcatgatcggccagtacctgctgtacggcttccacctggagcccctgttcaagtgccacggccacccctgccccaacatcatcgactgcttcgtgagcagacccaccgagaagaccatcttcctgctgttcatgcagagcatcgccaccatcagcctgttcctgaacatcctggagatcttccacctgggcttcaagaagatcaagagaggcctgtggggcaagtacaagctgaagaaggagcacaacgagttccacgccaacaaggccaagcagaacgtggccaagtaccagagcaccagcgccaacagcctgaagagactgcccagcgcccccgactacaacctgctggtggagaagcagacccacaccgccgtgtaccccagcctgaacagcagcagcgtgttccagcccaaccccgacaaccacagcgtgaacgacgagaagtgcatcctggacgagcaggagaccgtgctgagcaacgagatcagcaccctgagcaccagctgcagccacttccagcacatcagcagcaacaacaacaaggacacccacaagatcttcggcaaggagctgaacggcaaccagctgatggagaagagagagaccgagggcaaggacagcaagagaaactactacagcagaggccacagaagcatccccggcgtggccatcgacggcgagaacaacatgagacagagcccccagaccgtgttcagcctgcccgccaactgcgactggaagcccagatggctgagagccacctggggcagcagcaccgagcacgagaacagaggcagcccccccaagggcaacctgaagggccagttcagaaagggcaccgtgagaaccctgccccccagccagggcgacagccagagcctggacatccccaacaccgccgacagcctgggcggcctgagcttcgagcccggcctggtgagaacctgcaacaaccccgtgtgcccccccaaccacgtggtgagcctgaccaacaacctgatcggcagaagagtgcccaccgacctgcagatctag

SEQ ID NO: 82747 - DNA, 1548 bp, synthetic construct; identical to SEQ ID NO: 82746
  misc_feature 1..1548: note = Description of Artificial Sequence: Synthetic coding sequence
  source 1..1548: mol_type = other DNA

SEQ ID NO: 82748 - DNA, 1545 bp, synthetic construct
  misc_feature 1..1545: note = Description of Artificial Sequence: Synthetic coding sequence
  source 1..1545: mol_type = other DNA
atgggcgactggaacctgctgggcgacaccctggaggaggtgcacatccacagcaccatgatcggcaagatctggctgaccatcctgttcatcttcagaatgctggtgctgggcgtggccgccgaggacgtgtggaacgacgagcagagcggcttcatctgcaacaccgagcagcccggctgcagaaacgtgtgctacgaccaggccttccccatcagcctgatcagatactgggtgctgcaggtgatcttcgtgagcagccccagcctggtgtacatgggccacgccctgtacagactgagagtgctggaggaggagagacagagaatgaaggcccagctgagagtggagctggaggaggtggagttcgagatgcccagagacagaagaagactggagcaggagctgtgccagctggagaagagaaagctgaacaaggcccccctgagaggcaccctgctgtgcacctacgtgatccacatcttcaccagaagcgtggtggaggtgggcttcatgatcggccagtacctgctgtacggcttccacctggagcccctgttcaagtgccacggccacccctgccccaacatcatcgactgcttcgtgagcagacccaccgagaagaccatcttcctgctgttcatgcagagcatcgccaccatcagcctgttcctgaacatcctggagatcttccacctgggcttcaagaagatcaagagaggcctgtggggcaagtacaagctgaagaaggagcacaacgagttccacgccaacaaggccaagcagaacgtggccaagtaccagagcaccagcgccaacagcctgaagagactgcccagcgcccccgactacaacctgctggtggagaagcagacccacaccgccgtgtaccccagcctgaacagcagcagcgtgttccagcccaaccccgacaaccacagcgtgaacgacgagaagtgcatcctggacgagcaggagaccgtgctgagcaacgagatcagcaccctgagcaccagctgcagccacttccagcacatcagcagcaacaacaacaaggacacccacaagatcttcggcaaggagctgaacggcaaccagctgatggagaagagagagaccgagggcaaggacagcaagagaaactactacagcagaggccacagaagcatccccggcgtggccatcgacggcgagaacaacatgagacagagcccccagaccgtgttcagcctgcccgccaactgcgactggaagcccagatggctgagagccacctggggcagcagcaccgagcacgagaacagaggcagcccccccaaggtgcccggcagcaaggccaccgccagcagcctgctgctgatcctgcagagacccaccagcagccagcccagactgaaggagacccccaagatcaaggccgaggccaagatctacgacagcaagcacccccccagactgctgcagagcaccgtgagcaccttcagcggcagagagcccagaagccccgcccccatgggccaccacagcttcagaggccccagatag

SEQ ID NO: 82749 - DNA, 852 bp, synthetic construct
  misc_feature 1..852: note = Description of Artificial Sequence: Synthetic coding sequence
  source 1..852: mol_type = other DNA
atgaactggaccggcctgtacaccctgctgagcggcgtgaacagacacagcaccgccatcggcagagtgtggctgagcgtgatcttcatcttcagaatcatggtgctggtggtggccgccgagagcgtgtggggcgacgagaagagcagcttcatctgcaacaccctgcagcccggctgcaacagcgtgtgctacgaccagttcttccccatcagccacgtgagactgtggagcctgcagctgatcctggtgagcacccccgccctgctggtggccatgcacgtggcccaccagcagcacatcgagaagaagatgctgagactggagggccacggcgaccccctgcacctggaggaggtgaagagacacaaggtgcacatcagcggcaccctgtggtggacctacgtgatcagcgtggtgttcagactgctgttcgaggccgtgttcatgtacgtgttctacctgctgtaccccggctacgccatggtgagactggtgaagtgcgacgtgtacccctgccccaacaccgtggactgcttcgtgagcagacccaccgagaagaccgtgttcaccgtgttcatgctggccgccagcggcatctgcatcatcctgaacgtggccgaggtggtgtacctgatcatcagagcctgcgccagaagagcccagagaagaagcaacccccccagcagaaagggcagcggcttcggccacagactgagccccgagtacaagcagaacgagatcaacaagctgctgagcgagcaggacggcagcctgaaggacatcctgagaagaagccccggcaccggcgccggcctggccgagaagagcgacagatgcagcgcctgctag

SEQ ID NO: 82750 - DNA, 852 bp, synthetic construct; identical to SEQ ID NO: 82749
  misc_feature 1..852: note = Description of Artificial Sequence: Synthetic coding sequence
  source 1..852: mol_type = other DNA

SEQ ID NO: 82751 - DNA, 852 bp, synthetic construct; identical to SEQ ID NO: 82749
  misc_feature 1..852: note = Description of Artificial Sequence: Synthetic coding sequence
  source 1..852: mol_type = other DNA

SEQ ID NO: 82752 - DNA, 255 bp, synthetic construct
  misc_feature 1..255: note = Description of Artificial Sequence: Synthetic coding sequence
  source 1..255: mol_type = other DNA
atgaactggaccggcctgtacaccctgctgagcggcgtgaacagacacagcaccgccatcggcagagtgtggctgagcgtgatcttcatcttcagaatcatggtgctggtggtggccgccgagagcgtgtggggcgacgagaagagcagcttcatctgcaacaccctgcagcccggctgcaacagcgtgtgctacgaccagttcttccccatcagccacgtgagactgtggagcctgcagctgatcctggtgtag

SEQ ID NO: 82753 - DNA, 681 bp, synthetic construct
  misc_feature 1..681: note = Description of Artificial Sequence: Synthetic coding sequence
  source 1..681: mol_type = other DNA
atggactggggcaccctgcagaccatcctgggcggcgtgaacaagcacagcaccagcatcggcaagatctggctgaccgtgctgttcatcttcagaatcatgatcctggtggtggccgccaaggaggtgtggggcgacgagcaggccgacttcgtgtgcaacaccctgcagcccggctgcaagaacgtgtgctacgaccactacttccccatcagccacatcagactgtgggccctgcagctgatcttcgtgagcacccccgccctgctggtggccatgcacgtggcctacagaagacacgagaagaagagaaagttcatcaagggcgagatcaagagcgagttcaaggacatcgaggagatcaagacccagaaggtgagaatcgagggcagcctgtggtggacctacaccagcagcatcttcttcagagtgatcttcgaggccgccttcatgtacgtgttctacgtgatgtacgacggcttcagcatgcagagactggtgaagtgcaacgcctggccctgccccaacaccgtggactgcttcgtgagcagacccaccgagaagaccgtgttcaccgtgttcatgatcgccgtgagcggcatctgcatcctgctgaacgtgaccgagctgtgctacctgctgatcagatactgcagcggcaagagcaagaagcccgtgtag

SEQ ID NO: 82754 - DNA, 681 bp, synthetic construct; identical to SEQ ID NO: 82753
  misc_feature 1..681: note = Description of Artificial Sequence: Synthetic coding sequence
  source 1..681: mol_type = other DNA

SEQ ID NO: 82755 - DNA, 813 bp, synthetic construct
  misc_feature 1..813: note = Description of Artificial Sequence: Synthetic coding sequence
  source 1..813: mol_type = other DNA
atggactggaagaccctgcaggccctgctgagcggcgtgaacaagtacagcaccgccttcggcagaatctggctgagcgtggtgttcgtgttcagagtgctggtgtacgtggtggccgccgagagagtgtggggcgacgagcagaaggacttcgactgcaacaccaagcagcccggctgcaccaacgtgtgctacgacaactacttccccatcagcaacatcagactgtgggccctgcagctgatcttcgtgacctgccccagcctgctggtgatcctgcacgtggcctacagagaggagagagagagaagacacagacagaagcacggcgaccagtgcgccaagctgtacgacaacgccggcaagaagcacggcggcctgtggtggacctacctgttcagcctgatcttcaagctgatcatcgagttcctgttcctgtacctgctgcacaccctgtggcacggcttcaacatgcccagactggtgcagtgcgccaacgtggccccctgccccaacatcgtggactgctacatcgccagacccaccgagaagaagatcttcacctacttcatggtgggcgccagcgccgtgtgcatcgtgctgaccatctgcgagctgtgctacctgatctgccacagagtgctgagaggcctgcacaaggacaagcccagaggcggctgcagccccagcagcagcgccagcagagccagcacctgcagatgccaccacaagctggtggaggccggcgaggtggaccccgaccccggcaacaacaagctgcaggccagcgcccccaacctgacccccatctag

SEQ ID NO: 82756 - DNA, 813 bp, synthetic construct; identical to SEQ ID NO: 82755
  misc_feature 1..813: note = Description of Artificial Sequence: Synthetic coding sequence
  source 1..813: mol_type = other DNA

SEQ ID NO: 82757 - DNA, 765 bp, synthetic construct
  misc_feature 1..765: note = Description of Artificial Sequence: Synthetic coding sequence
  source 1..765: mol_type = other DNA
atggactggaagaccctgcaggccctgctgagcggcgtgaacaagtacagcaccgccttcggcagaatctggctgagcgtggtgttcgtgttcagagtgctggtgtacgtggtggccgccgagagagtgtggggcgacgagcagaaggacttcgactgcaacaccaagcagcccggctgcaccaacgtgtgctacgacaactacttccccatcagcaacatcagactgtgggccctgcagctgatcttcgtgacctgccccagcctgctggtgatcctgcacgtggcctacagagaggagagagagagaagacacagacagaagcacggcgaccagtgcgccaagctgtacgacaacgccggcaagaagcacggcggcctgtggtggacctacctgctgcacaccctgtggcacggcttcaacatgcccagactggtgcagtgcgccaacgtggccccctgccccaacatcgtggactgctacatcgccagacccaccgagaagaagatcttcacctacttcatggtgggcgccagcgccgtgtgcatcgtgctgaccatctgcgagctgtgctacctgatctgccacagagtgctgagaggcctgcacaaggacaagcccagaggcggctgcagccccagcagcagcgccagcagagccagcacctgcagatgccaccacaagctggtggaggccggcgaggtggaccccgaccccggcaacaacaagctgcaggccagcgcccccaacctgacccccatctag

SEQ ID NO: 82758 - DNA, 801 bp, synthetic construct
  misc_feature 1..801: note = Description of Artificial Sequence: Synthetic coding sequence
  source 1..801: mol_type = other DNA
atgaactgggccttcctgcagggcctgctgagcggcgtgaacaagtacagcaccgtgctgagcagaatctggctgagcgtggtgttcatcttcagagtgctggtgtacgtggtggccgccgaggaggtgtgggacgacgagcagaaggacttcgtgtgcaacaccaagcagcccggctgccccaacgtgtgctacgacgagttcttccccgtgagccacgtgagactgtgggccctgcagctgatcctggtgacctgccccagcctgctggtggtgatgcacgtggcctacagagaggagagagagagaaagcaccacctgaagcacggccccaacgcccccagcctgtacgacaacctgagcaagaagagaggcggcctgtggtggacctacctgctgagcctgatcttcaaggccgccgtggacgccggcttcctgtacatcttccacagactgtacaaggactacgacatgcccagagtggtggcctgcagcgtggagccctgcccccacaccgtggactgctacatcagcagacccaccgagaagaaggtgttcacctacttcatggtgaccaccgccgccatctgcatcctgctgaacctgagcgaggtgttctacctggtgggcaagagatgcatggagatcttcggccccagacacagaagacccagatgcagagagtgcctgcccgacacctgccccccctacgtgctgagccagggcggccaccccgaggacggcaacagcgtgctgatgaaggccggcagcgcccccgtggacgccggcggctacccctag

SEQ ID NO: 82759 - DNA, 822 bp, synthetic construct
  misc_feature 1..822: note = Description of Artificial Sequence: Synthetic coding sequence
  source 1..822: mol_type = other DNA
atgaactggagcatcttcgagggcctgctgagcggcgtgaacaagtacagcaccgccttcggcagaatctggctgagcctggtgttcatcttcagagtgctggtgtacctggtgaccgccgagagagtgtggagcgacgaccacaaggacttcgactgcaacaccagacagcccggctgcagcaacgtgtgcttcgacgagttcttccccgtgagccacgtgagactgtgggccctgcagctgatcctggtgacctgccccagcctgctggtggtgatgcacgtggcctacagagaggtgcaggagaagagacacagagaggcccacggcgagaacagcggcagactgtacctgaaccccggcaagaagagaggcggcctgtggtggacctacgtgtgcagcctggtgttcaaggccagcgtggacatcgccttcctgtacgtgttccacagcttctaccccaagtacatcctgccccccgtggtgaagtgccacgccgacccctgccccaacatcgtggactgcttcatcagcaagcccagcgagaagaacatcttcaccctgttcatggtggccaccgccgccatctgcatcctgctgaacctggtggagctgatctacctggtgagcaagagatgccacgagtgcctggccgccagaaaggcccaggccatgtgcaccggccaccacccccacggcaccaccagcagctgcaagcaggacgacctgctgagcggcgacctgatcttcctgggcagcgacagccacccccccctgctgcccgacagacccagagaccacgtgaagaagaccatcctgtag

SEQ ID NO: 82760 - DNA, 786 bp, synthetic construct
  misc_feature 1..786: note = Description of Artificial Sequence: Synthetic coding sequence
  source 1..786: mol_type = other DNA
atggactggggcaccctgcacaccttcatcggcggcgtgaacaagcacagcaccagcatcggcaaggtgtggatcaccgtgatcttcatcttcagagtgatgatcctggtggtggccgcccaggaggtgtggggcgacgagcaggaggacttcgtgtgcaacaccctgcagcccggctgcaagaacgtgtgctacgaccacttcttccccgtgagccacatcagactgtgggccctgcagctgatcttcgtgagcacccccgccctgctggtggccatgcacgtggcctactacagacacgagaccaccagaaagttcagaagaggcgagaagagaaacgacttcaaggacatcgaggacatcaagaagcagaaggtgagaatcgagggcagcctgtggtggacctacaccagcagcatcttcttcagaatcatcttcgaggccgccttcatgtacgtgttctacttcctgtacaacggctaccacctgccctgggtgctgaagtgcggcatcgacccctgccccaacctggtggactgcttcatcagcagacccaccgagaagaccgtgttcaccatcttcatgatcagcgccagcgtgatctgcatgctgctgaacgtggccgagctgtgctacctgctgctgaaggtgtgcttcagaagaagcaagagagcccagacccagaagaaccaccccaaccacgccctgaaggagagcaagcagaacgagatgaacgagctgatcagcgacagcggccagaacgccatcaccggcttccccagctag

SEQ ID NO: 82761 - DNA, 786 bp, synthetic construct; identical to SEQ ID NO: 82760
  misc_feature 1..786: note = Description of Artificial Sequence: Synthetic coding sequence
  source 1..786: mol_type = other DNA

SEQ ID NO: 82762 - DNA, 786 bp, synthetic construct; identical to SEQ ID NO: 82760
  misc_feature 1..786: note = Description of Artificial Sequence: Synthetic coding sequence
  source 1..786: mol_type = other DNA

SEQ ID NO: 82763 - DNA, 786 bp, synthetic construct; identical to SEQ ID NO: 82760
  misc_feature 1..786: note = Description of Artificial Sequence: Synthetic coding sequence
  source 1..786: mol_type = other DNA

SEQ ID NO: 82764 - DNA, 672 bp, synthetic construct
  misc_feature 1..672: note = Description of Artificial Sequence: Synthetic coding sequence
  source 1..672: mol_type = other DNA
atgagctggatgttcctgagagacctgctgagcggcgtgaacaagtacagcaccggcaccggctggatctggctggccgtggtgttcgtgttcagactgctggtgtacatggtggccgccgagcacgtgtggaaggacgagcagaaggagttcgagtgcaacagcagacagcccggctgcaagaacgtgtgcttcgacgacttcttccccatcagccaggtgagactgtgggccctgcagctgatcatggtgagcacccccagcctgctggtggtgctgcacgtggcctaccacgagggcagagagaagagacacagaaagaagctgtacgtgagccccggcaccatggacggcggcctgtggtacgcctacctgatcagcctgatcgtgaagaccggcttcgagatcggcttcctggtgctgttctacaagctgtacgacggcttcagcgtgccctacctgatcaagtgcgacctgaagccctgccccaacaccgtggactgcttcatcagcaagcccaccgagaagaccatcttcatcctgttcctggtgatcaccagctgcctgtgcatcgtgctgaacttcatcgagctgagcttcctggtgctgaagtgcttcatcaagtgctgcctgcagaagtacctgaagaagccccaggtgctgagcgtgtag

SEQ ID NO: 82765 - DNA, 492 bp, synthetic construct
  misc_feature 1..492: note = Description of Artificial Sequence: Synthetic coding sequence
  source 1..492: mol_type = other DNA
atgagctggatgttcctgagagacctgctgagcggcgtgaacaagtacagcaccggcaccggctggatctggctggccgtggtgttcgtgttcagactgctggtgtacatggtggccgccgagcacgtgtggaaggacgagcagaaggagttcgagtgcaacagcagacagcccggctgcaagaacgtgtgcttcgacgacttcttccccatcagccaggtgagactgtgggccctgcagctgatcatggtgagcacccccagcctgctggtggtgctgcacgtggcctaccacgagggcagagagaagagacacagaaagaagctgtacgtgagccccggcaccatggacggcggcctgtggtacgcctacctgatcagcctgatcgtgaagaccggcttcgagatcggcttcctggtgctgttctacaagctgtacgacggcttcagcgtgccctacctgatcaagtgcgacctgaagccctgcccctag

SEQ ID NO: 82766 - DNA, 672 bp, synthetic construct; identical to SEQ ID NO: 82764
  misc_feature 1..672: note = Description of Artificial Sequence: Synthetic coding sequence
  source 1..672: mol_type = other DNA

SEQ ID NO: 82767 - DNA, 966 bp, synthetic construct
  misc_feature 1..966: note = Description of Artificial Sequence: Synthetic coding sequence
  source 1..966: mol_type = other DNA
atgggcgagtggaccatcctggagagactgctggaggccgccgtgcagcagcacagcaccatgatcggcagaatcctgctgaccgtggtggtgatcttcagaatcctgatcgtggccatcgtgggcgagaccgtgtacgacgacgagcagaccatgttcgtgtgcaacaccctgcagcccggctgcaaccaggcctgctacgacagagccttccccatcagccacatcagatactgggtgttccagatcatcatggtgtgcacccccagcctgtgcttcatcacctacagcgtgcaccagagcgccaagcagagagagagaagatacagcaccgtgttcctggccctggacagagacccccccgagagcatcggcggccccggcggcaccggcggcggcggcagcggcggcggcaagagagaggacaagaagctgcagaacgccatcgtgaacggcgtgctgcagaacaccgagaacaccagcaaggagaccgagcccgactgcctggaggtgaaggagctgaccccccaccccagcggcctgagaaccgccagcaagagcaagctgagaagacaggagggcatcagcagattctacatcatccaggtggtgttcagaaacgccctggagatcggcttcctggtgggccagtacttcctgtacggcttcagcgtgcccggcctgtacgagtgcaacagatacccctgcatcaaggaggtggagtgctacgtgagcagacccaccgagaagaccgtgttcctggtgttcatgttcgccgtgagcggcatctgcgtggtgctgaacctggccgagctgaaccacctgggctggagaaagatcaagctggccgtgagaggcgcccaggccaagagaaagagcatctacgagatcagaaacaaggacctgcccagagtgagcgtgcccaacttcggcagaacccagagcagcgacagcgcctacgtgtag

SEQ ID NO: 82768 - DNA, 891 bp, synthetic construct
  misc_feature 1..891: note = Description of Artificial Sequence: Synthetic coding sequence
  source 1..891: mol_type = other DNA
atgggcgagtgggccttcctgggcagcctgctggacgccgtgcagctgcagagccccctggtgggcagactgtggctggtggtgatgctgatcttcagaatcctggtgctggccaccgtgggcggcgccgtgttcgaggacgagcaggaggagttcgtgtgcaacaccctgcagcccggctgcagacagacctgctacgacagagccttccccgtgagccactacagattctggctgttccacatcctgctgctgagcgccccccccgtgctgttcgtggtgtacagcatgcacagagccggcaaggaggccggcggcgccgaggccgccgcccagtgcgcccccggcctgcccgaggcccagtgcgccccctgcgccctgagagccagaagagccagaagatgctacctgctgagcgtggccctgagactgctggccgagctgaccttcctgggcggccaggccctgctgtacggcttcagagtggccccccacttcgcctgcgccggccccccctgcccccacaccgtggactgcttcgtgagcagacccaccgagaagaccgtgttcgtgctgttctacttcgccgtgggcctgctgagcgccctgctgagcgtggccgagctgggccacctgctgtggaagggcagacccagagccggcgagagagacaacagatgcaacagagcccacgaggaggcccagaagctgctgccccccccccccccccccccccccatcgtggtgacctgggaggagaacagacacctgcagggcgagggcagccccggcagcccccaccccaagaccgagctggacgcccccagattcagaagagagagcaccagccccgccggctggcactgcagcctgcccttccacggcacctag

SEQ ID NO: 82769 - DNA, 1113 bp, synthetic construct
  misc_feature 1..1113: note = Description of Artificial Sequence: Synthetic coding sequence
  source 1..1113: mol_type = other DNA
atggagggcgtggacctgctgggcttcctgatcatcaccctgaactgcaacgtgaccatggtgggcaagctgtggttcgtgctgaccatgctgctgagaatgctggtgatcgtgctggccggcagacccgtgtaccaggacgagcaggagagattcgtgtgcaacaccctgcagcccggctgcgccaacgtgtgctacgacgtgttcagccccgtgagccacctgagattctggctgatccagggcgtgtgcgtgctgctgcccagcgccgtgttcagcgtgtacgtgctgcacagaggcgccaccctggccgccctgggccccagaagatgccccgaccccagagagcccgccagcggccagagaagatgccccagacccttcggcgagagaggcggcctgcaggtgcccgacttcagcgccggctacatcatccacctgctgctgagaaccctgctggaggccgccttcggcgccctgcactacttcctgttcggcttcctggcccccaagaagttcccctgcaccagacccccctgcaccggcgtggtggactgctacgtgagcagacccaccgagaagagcctgctgatgctgttcctgtgggccgtgagcgccctgagcttcctgctgggcctggccgacctggtgtgcagcctgagaagaagaatgagaagaagacccggcccccccaccagccccagcatcagaaagcagagcggcgccagcggccacgccgagggcagaagaaccgacgaggagggcggcagagaggaggagggcgcccccgccccccccggcgccagagccggcggcgagggcgccggcagccccagaagaaccagcagagtgagcggccacaccaagatccccgacgaggacgagagcgaggtgaccagcagcgccagcgagaagctgggcagacagcccagaggcagaccccacagagaggccgcccaggaccccagaggcagcggcagcgaggagcagcccagcgccgcccccagcagactggccgccccccccagctgcagcagcctgcagccccccgacccccccgccagcagcagcggcgccccccacctgagagccagaaagagcgagtgggtgtag

SEQ ID NO: 82770 - DNA, 1191 bp, synthetic construct
  misc_feature 1..1191: note = Description of Artificial Sequence: Synthetic coding sequence
  source 1..1191: mol_type = other DNA
atgagctggagcttcctgaccagactgctggaggagatccacaaccacagcaccttcgtgggcaagatctggctgaccgtgctgatcgtgttcagaatcgtgctgaccgccgtgggcggcgagagcatctactacgacgagcagagcaagttcgtgtgcaacaccgagcagcccggctgcgagaacgtgtgctacgacgccttcgcccccctgagccacgtgagattctgggtgttccagatcatcctggtggccacccccagcgtgatgtacctgggctacgccatccacaagatcgccaagatggagcacggcgaggccgacaagaaggccgccagaagcaagccctacgccatgagatggaagcagcacagagccctggaggagaccgaggaggacaacgaggaggaccccatgatgtaccccgagatggagctggagagcgacaaggagaacaaggagcagagccagcccaagcccaagcacgacggcagaagaagaatcagagaggacggcctgatgaagatctacgtgctgcagctgctggccagaaccgtgttcgaggtgggcttcctgatcggccagtacttcctgtacggcttccaggtgcaccccttctacgtgtgcagcagactgccctgcccccacaagatcgactgcttcatcagcagacccaccgagaagaccatcttcctgctgatcatgtacggcgtgaccggcctgtgcctgctgctgaacatctgggagatgctgcacctgggcttcggcaccatcagagacagcctgaacagcaagagaagagagctggaggaccccggcgcctacaactaccccttcacctggaacacccccagcgccccccccggctacaacatcgccgtgaagcccgaccagatccagtacaccgagctgagcaacgccaagatcgcctacaagcagaacaaggccaacaccgcccaggagcagcagtacggcagccacgaggagaacctgcccgccgacctggaggccctgcagagagagatcagaatggcccaggagagactggacctggccgtgcaggcctacagccaccagaacaacccccacggccccagagagaagaaggccaaggtgggcagcaaggccggcagcaacaagagcaccgccagcagcaagagcggcgacggcaagaccagcgtgtggatctag

SEQ ID NO: 82771 - DNA, 1191 bp, synthetic construct; identical to SEQ ID NO: 82770
  misc_feature 1..1191: note = Description of Artificial Sequence: Synthetic coding sequence
  source 1..1191: mol_type = other DNA

SEQ ID NO: 82772 - DNA, 1320 bp, synthetic construct
  misc_feature 1..1320: note = Description of Artificial Sequence: Synthetic coding sequence
  source 1..1320: mol_type = other DNA
atgaccaacatgagctggagcttcctgaccagactgctggaggagatccacaaccacagcaccttcgtgggcaaggtgtggctgaccgtgctggtggtgttcagaatcgtgctgaccgccgtgggcggcgaggccatctacagcgacgagcaggccaagttcacctgcaacaccagacagcccggctgcgacaacgtgtgctacgacgccttcgcccccctgagccacgtgagattctgggtgttccagatcgtggtgatcagcacccccagcgtgatgtacctgggctacgccgtgcacagactggccagagccagcgagcaggagagaagaagagccctgagaagaagacccggccccagaagagcccccagagcccacctgccccccccccacgccggctggcccgagcccgccgacctgggcgaggaggagcccatgctgggcctgggcgaggaggaggaggaggaggagaccggcgccgccgagggcgccggcgaggaggccgaggaggccggcgccgaggaggcctgcaccaaggccgtgggcgccgacggcaaggccgccggcacccccggccccaccggccagcacgacggcagaagaagaatccagagagagggcctgatgagagtgtacgtggcccagctggtggccagagccgccttcgaggtggccttcctggtgggccagtacctgctgtacggcttcgaggtgagacccttcttcccctgcagcagacagccctgcccccacgtggtggactgcttcgtgagcagacccaccgagaagaccgtgttcctgctggtgatgtacgtggtgagctgcctgtgcctgctgctgaacctgtgcgagatggcccacctgggcctgggcagcgcccaggacgccgtgagaggcagaagaggcccccccgccagcgcccccgcccccgcccccagaccccccccctgcgccttccccgccgccgccgccggcctggcctgcccccccgactacagcctggtggtgagagccgccgagagagccagagcccacgaccagaacctggccaacctggccctgcaggccctgagagacggcgccgccgccggcgacagagacagagacagcagcccctgcgtgggcctgcccgccgccagcagaggcccccccagagccggcgcccccgccagcagaaccggcagcgccaccagcgccggcaccgtgggcgagcagggcagacccggcacccacgagagacccggcgccaagcccagagccggcagcgagaagggcagcgccagcagcagagacggcaagaccaccgtgtggatctag

SEQ ID NO: 82773 - DNA, 840 bp, synthetic construct
  misc_feature 1..840: note = Description of Artificial Sequence: Synthetic coding sequence
  source 1..840: mol_type = other DNA
atgtgcggcagattcctgagaagactgctggccgaggagagcagaagaagcacccccgtgggcagactgctgctgcccgtgctgctgggcttcagactggtgctgctggccgccagcggccccggcgtgtacggcgacgagcagagcgagttcgtgtgccacacccagcagcccggctgcaaggccgcctgcttcgacgccttccaccccctgagccccctgagattctgggtgttccaggtgatcctggtggccgtgcccagcgccctgtacatgggcttcaccctgtaccacgtgatctggcactgggagctgagcggcaagggcaaggaggaggagaccctgatccagggcagagagggcaacaccgacgtgcccggcgccggcagcctgagactgctgtgggcctacgtggcccagctgggcgccagactggtgctggagggcgccgccctgggcctgcagtaccacctgtacggcttccagatgcccagcagcttcgcctgcagaagagagccctgcctgggcagcatcacctgcaacctgagcagacccagcgagaagaccatcttcctgaagaccatgttcggcgtgagcggcttctgcctgctgttcaccttcctggagctggtgctgctgggcctgggcagatggtggagaacctggaagcacaagagcagcagcagcaagtacttcctgaccagcgagagcaccagaagacacaagaaggccaccgacagcctgcccgtggtggagaccaaggagcagttccaggaggccgtgcccggcagaagcctggcccaggagaagcagagacccgtgggccccagagacgcctag

SEQ ID NO: 82774 - DNA, 1338 bp, synthetic construct
  misc_feature 1..1338: note = Description of Artificial Sequence: Synthetic coding sequence
  source 1..1338: mol_type = other DNA
atgaccatgttcgagaacgtgaccagagccctggccagacagctgaaccccagaggcgacctgacccccctggacagcctgatcgacttcaagagattccaccccttctgcctggtgctgagaaagagaaagagcaccctgttctggggcgccagatacgtgagaaccgactacaccctgctggacgtgctggagcccggcagcagccccagcgaccccaccgacaccggcaacttcggcttcaagaacatgctggacaccagagtggagggcgacgtggacgtgcccaagaccgtgaaggtgaagggcaccgccggcctgagccagaacagcaccctggaggtgcagaccctgagcgtggcccccaaggccctggagaccgtgcaggagagaaagctggccgccgaccaccccttcctgaaggagatgcaggaccagggcgagaacctgtacgtggtgatggaggtggtggagaccgtgcaggaggtgaccctggagagagccggcaaggccgaggcctgcttcagcctgcccttcttcgcccccctgggcctgcagggcagcatcaaccacaaggaggccgtgaccatccccaagggctgcgtgctggccttcagagtgagacagctgatggtgaagggcaaggacgagtgggacatcccccacatctgcaacgacaacatgcagaccttcccccccggcgagaagagcggcgaggagaaggtgatcctgatccaggccagcgacgtgggcgacgtgcacgagggcttcagaaccctgaaggaggaggtgcagagagagacccagcaggtggagaagctgagcagagtgggccagagcagcctgctgagcagcctgagcaagctgctgggcaagaagaaggagctgcaggacctggagctggccctggagggcgccctggacaagggccacgaggtgaccctggaggccctgcccaaggacgtgctgctgagcaaggaggccgtgggcgccatcctgtacttcgtgggcgccctgaccgagctgagcgaggcccagcagaagctgctggtgaagagcatggagaagaagatcctgcccgtgcagctgaagctggtggagagcaccatggagcagaacttcctgctggacaaggagggcgtgttccccctgcagcccgagctgctgagcagcctgggcgacgaggagctgaccctgaccgaggccctggtgggcctgagcggcctggaggtgcagagaagcggcccccagtacatgtgggaccccgacaccctgcccagactgtgcgccctgtacgccggcctgagcctgctgcagcagctgaccaaggccagctag

SEQ ID NO: 82775 - DNA, 1212 bp, synthetic construct
  misc_feature 1..1212: note = Description of Artificial Sequence: Synthetic coding sequence
  source 1..1212: mol_type = other DNA
atgttcagcgtgttcgaggagatcaccagaatcgtggtgaaggagatggacgccggcggcgacatgatcgccgtgagaagcctggtggacgccgacagattcagatgcttccacctggtgggcgagaagagaaccttcttcggctgcagacactacaccaccggcctgaccctgatggacatcctggacaccgacggcgacaagtggctggacgagctggacagcggcctgcagggccagaaggccgagttccagatcctggacaacgtggacagcaccggcgagctgatcgtgagactgcccaaggagatcaccatcagcggcagcttccagggcttccaccaccagaagatcaagatcagcgagaacagaatcagccagcagtacctggccaccctggagaacagaaagctgaagagagagctgcccttcagcttcagaagcatcaacaccagagagaacctgtacctggtgaccgagaccctggagaccgtgaaggaggagaccctgaagagcgacagacagtacaagttctggagccagatcagccagggccacctgagctacaagcacaagggccagagagaggtgaccatcccccccaacagagtgctgagctacagagtgaagcagctggtgttccccaacaaggagaccatgaagaaggacggcgccagcagctgcctgggcaagagcctgggcagcgaggacagcagaaacatgaaggagaagctggaggacatggagagcgtgctgaaggacctgaccgaggagaagagaaaggacgtgctgaacagcctggccaagtgcctgggcaaggaggacatcagacaggacctggagcagagagtgagcgaggtgctgatcagcggcgagctgcacatggaggaccccgacaagcccctgctgagcagcctgttcaacgccgccggcgtgctggtggaggccagagccaaggccatcctggacttcctggacgccctgctggagctgagcgaggagcagcagttcgtggccgaggccctggagaagggcaccctgcccctgctgaaggaccaggtgaagagcgtgatggagcagaactgggacgagctggccagcagcccccccgacatggactacgaccccgaggccagaatcctgtgcgccctgtacgtggtggtgagcatcctgctggagctggccgagggccccaccagcgtgagcagctag

SEQ ID NO: 82776 - DNA, 1236 bp, synthetic construct
  misc_feature 1..1236: note = Description of Artificial Sequence: Synthetic coding sequence
  source 1..1236: mol_type = other DNA
atgttcagcgtgttcgaggagatcaccagaatcgtggtgaaggagatggacgccggcggcgacatgatcgccgtgagaagcctggtggacgccgacagattcagatgcttccacctggtgggcgagaagagaaccttcttcggctgcagacactacaccaccggcctgaccctgatggacatcctggacaccgacggcgacaagtggctggacgagctggacagcggcctgcagggccagaaggccgagttccagatcctggacaacgtggacagcaccggcgagctgatcgtgagactgcccaaggagatcaccatcagcggcagcttccagggcttccaccaccagaagatcaagatcagcgagaacagaatcagccagcagtacctggccaccctggagaacagaaagctgaagagagagctgcccttcagcttcagaagcatcaacaccagagagaacctgtacctggtgaccgagaccctggagaccgtgaaggaggagaccctgaagagcgacagacagtacaagttctggagccagatcagccagggccacctgagctacaagcacaagggccagagagaggtgaccatcccccccaacagagtgctgagctacagagtgaagcagctggtgttccccaacaaggagaccatgagcgccggcctggacatccacttcagaggcaagaccaagagcttccccgagggcaagagcctgggcagcgaggacagcagaaacatgaaggagaagctggaggacatggagagcgtgctgaaggacctgaccgaggagaagagaaaggacgtgctgaacagcctggccaagtgcctgggcaaggaggacatcagacaggacctggagcagagagtgagcgaggtgctgatcagcggcgagctgcacatggaggaccccgacaagcccctgctgagcagcctgttcaacgccgccggcgtgctggtggaggccagagccaaggccatcctggacttcctggacgccctgctggagctgagcgaggagcagcagttcgtggccgaggccctggagaagggcaccctgcccctgctgaaggaccaggtgaagagcgtgatggagcagaactgggacgagctggccagcagcccccccgacatggactacgaccccgaggccagaatcctgtgcgccctgtacgtggtggtgagcatcctgctggagctggccgagggccccaccagcgtgagcagctag

SEQ ID NO: 82777 - DNA, 1185 bp, synthetic construct
  misc_feature 1..1185: note = Description of Artificial Sequence: Synthetic coding sequence
  source 1..1185: mol_type = other DNA
atgttcagcgtgttcgaggagatcaccagaatcgtggtgaaggagatggacgccggcggcgacatgatcgccgtgagaagcctggtggacgccgacagattcagatgcttccacctggtgggcgagaagagaaccttcttcggctgcagacactacaccaccggcctgaccctgatggacatcctggacaccgacggcgacaagtggctggacgagctggacagcggcctgcagggccagaaggccgagttccagatcctggacaacgtggacagcaccggcgagctgatcgtgagactgcccaaggagatcaccatcagcggcagcttccagggcttccaccaccagaagatcaagatcagcgagaacagaatcagccagcagtacctggccaccctggagaacagaaagctgaagagagagctgcccttcagcttcagaagcatcaacaccagagagaacctgtacctggtgaccgagaccctggagaccgtgaaggaggagaccctgaagagcgacagacagtacaagttctggagccagatcagccagggccacctgagctacaagcacaagggccagagagaggtgaccatcccccccaacagagtgctgagctacagagtgaagcagctggtgttccccaacaaggagaccatgagaaagagcctgggcagcgaggacagcagaaacatgaaggagaagctggaggacatggagagcgtgctgaaggacctgaccgaggagaagagaaaggacgtgctgaacagcctggccaagtgcctgggcaaggaggacatcagacaggacctggagcagagagtgagcgaggtgctgatcagcggcgagctgcacatggaggaccccgacaagcccctgctgagcagcctgttcaacgccgccggcgtgctggtggaggccagagccaaggccatcctggacttcctggacgccctgctggagctgagcgaggagcagcagttcgtggccgaggccctggagaagggcaccctgcccctgctgaaggaccaggtgaagagcgtgatggagcagaactgggacgagctggccagcagcccccccgacatggactacgaccccgaggccagaatcctgtgcgccctgtacgtggtggtgagcatcctgctggagctggccgagggccccaccagcgtgagcagctag

SEQ ID NO: 82778 - DNA, 1236 bp, synthetic construct; identical to SEQ ID NO: 82776
  misc_feature 1..1236: note = Description of Artificial Sequence: Synthetic coding sequence
  source 1..1236: mol_type = other DNA

SEQ ID NO: 82779 - DNA, 1251 bp, synthetic construct
  misc_feature 1..1251: note = Description of Artificial Sequence: Synthetic coding sequence
  source 1..1251: mol_type = other DNA
atgttcagcgtgttcgaggagatcaccagaatcgtggtgaaggagatggacgccggcggcgacatgatcgccgtgagaagcctggtggacgccgacagattcagatgcttccacctggtgggcgagaagagaaccttcttcggctgcagacactacaccaccggcctgaccctgatggacatcctggacaccgacggcgacaagtggctggacgagctggacagcggcctgcagggccagaaggccgagttccagatcctggacaacgtggacagcaccggcgagctgatcgtgagactgcccaaggagatcaccatcagcggcagcttccagggcttccaccaccagaagatcaagatcagcgagaacagaatcagccagcagtacctggccaccctggagaacagaaagctgaagagagagctgcccttcagcttcagaagcatcaacaccagagagaacctgtacctggtgaccgagaccctggagaccgtgaaggaggagaccctgaagagcgacagacagtacaagttctggagccagatcagccagggccacctgagctacaagcacaagggccagagagaggtgaccatcccccccaacagagtgctgagctacagagtgaagcagctggtgttccccaacaaggagaccatgaacatccacttcagaggcaagaccaagagcttccccgaggagaaggacggcgccagcagctgcctgggcaagagcctgggcagcgaggacagcagaaacatgaaggagaagctggaggacatggagagcgtgctgaaggacctgaccgaggagaagagaaaggacgtgctgaacagcctggccaagtgcctgggcaaggaggacatcagacaggacctggagcagagagtgagcgaggtgctgatcagcggcgagctgcacatggaggaccccgacaagcccctgctgagcagcctgttcaacgccgccggcgtgctggtggaggccagagccaaggccatcctggacttcctggacgccctgctggagctgagcgaggagcagcagttcgtggccgaggccctggagaagggcaccctgcccctgctgaaggaccaggtgaagagcgtgatggagcagaactgggacgagctggccagcagcccccccgacatggactacgaccccgaggccagaatcctgtgcgccctgtacgtggtggtgagcatcctgctggagctggccgagggccccaccagcgtgagcagctag

SEQ ID NO: 82780 - DNA, 1047 bp, synthetic construct
  misc_feature 1..1047: note = Description of Artificial Sequence: Synthetic coding sequence
  source 1..1047: mol_type = other DNA
tgactggacgagctggacagcggcctgcagggccagaaggccgagttccagatcctggacaacgtggacagcaccggcgagctgatcgtgagactgcccaaggagatcaccatcagcggcagcttccagggcttccaccaccagaagatcaagatcagcgagaacagaatcagccagcagtacctggccaccctggagaacagaaagctgaagagagagctgcccttcagcttcagaagcatcaacaccagagagaacctgtacctggtgaccgagaccctggagaccgtgaaggaggagaccctgaagagcgacagacagtacaagttctggagccagatcagccagggccacctgagctacaagcacaagggccagagagaggtgaccatcccccccaacagagtgctgagctacagagtgaagcagctggtgttccccaacaaggagaccatgaacatccacttcagaggcaagaccaagagcttccccgaggagaaggacggcgccagcagctgcctgggcaagagcctgggcagcgaggacagcagaaacatgaaggagaagctggaggacatggagagcgtgctgaaggacctgaccgaggagaagagaaaggacgtgctgaacagcctggccaagtgcctgggcaaggaggacatcagacaggacctggagcagagagtgagcgaggtgctgatcagcggcgagctgcacatggaggaccccgacaagcccctgctgagcagcctgttcaacgccgccggcgtgctggtggaggccagagccaaggccatcctggacttcctggacgccctgctggagctgagcgaggagcagcagttcgtggccgaggccctggagaagggcaccctgcccctgctgaaggaccaggtgaagagcgtgatggagcagaactgggacgagctggccagcagcccccccgacatggactacgaccccgaggccagaatcctgtgcgccctgtacgtggtggtgagcatcctgctggagctggccgagggccccaccagcgtgagcagctag

SEQ ID NO: 82781 - DNA, 1224 bp, synthetic construct
  misc_feature 1..1224: note = Description of Artificial Sequence: Synthetic coding sequence
  source 1..1224: mol_type = other DNA
atgttcagcgtgttcgaggagatcaccagaatcgtggtgaaggagatggacgccggcggcgacatgatcgccgtgagaagcctggtggacgccgacagattcagatgcttccacctggtgggcgagaagagaaccttcttcggctgcagacactacaccaccggcctgaccctgatggacatcctggacaccgacggcgacaagtggctggacgagctggacagcggcctgcagggccagaaggccgagttccagatcctggacaacgtggacagcaccggcgagctgatcgtgagactgcccaaggagatcaccatcagcggcagcttccagggcttccaccaccagaagatcaagatcagcgagaacagaatcagccagcagtacctggccaccctggagaacagaaagctgaagagagagctgcccttcagcttcagaagcatcaacaccagagagaacctgtacctggtgaccgagaccctggagaccgtgaaggaggagaccctgaagagcgacagacagtacaagttctggagccagatcagccagggccacctgagctacaagcacaagggccagagagaggtgaccatcccccccaacagagtgctgagctacagagtgaagcagctggtgttccccaacaaggagaccatgaacatccacttcagaggcaagaccaagagcttccccgagggcaagagcctgggcagcgaggacagcagaaacatgaaggagaagctggaggacatggagagcgtgctgaaggacctgaccgaggagaagagaaaggacgtgctgaacagcctggccaagtgcctgggcaaggaggacatcagacaggacctggagcagagagtgagcgaggtgctgatcagcggcgagctgcacatggaggaccccgacaagcccctgctgagcagcctgttcaacgccgccggcgtgctggtggaggccagagccaaggccatcctggacttcctggacgccctgctggagctgagcgaggagcagcagttcgtggccgaggccctggagaagggcaccctgcccctgctgaaggaccaggtgaagagcgtgatggagcagaactgggacgagctggccagcagcccccccgacatggactacgaccccgaggccagaatcctgtgcgccctgtacgtggtggtgagcatcctgctggagctggccgagggccccaccagcgtgagcagctag

SEQ ID NO: 82782 - DNA, 1527 bp, synthetic construct
  misc_feature 1..1527: note = Description of Artificial Sequence: Synthetic coding sequence
  source 1..1527: mol_type = other DNA
atgcccagcatgctggagagaatcagcaagaacctggtgaaggagatcggcagcaaggacctgacccccgtgaagtacctgctgagcgccaccaagctgagacagttcgtgatcctgagaaagaagaaggacagcagaagcagcttctgggagcagagcgactacgtgcccgtggagttcagcctgaacgacatcctggagcccagcagcagcgtgctggagaccgtggtgaccggccccttccacttcagcgacatcatgatccagaagcacaaggccgacatgggcgtgaacgtgggcatcgaggtgagcgtgagcggcgaggccagcgtggaccacggctgcagcctggagttccagatcgtgaccatccccagccccaacctggaggacttccagaagagaaagctgctggaccccgagcccagcttcctgaaggagtgcagaagaagaggcgacaacctgtacgtggtgaccgaggccgtggagctgatcaacaacaccgtgctgtacgacagcagcagcgtgaacatcctgggcaagatcgccctgtggatcacctacggcaagggccagggccagggcgagagcctgagagtgaagaagaaggccctgaccctgcagaagggcatggtgatggcctacaagagaaagcagctggtgatcaaggagaaggccatcctgatcagcgacgacgacgagcagagaaccttccaggacgagtacgagatcagcgagatggtgggctactgcgccgccagaagcgagggcctgctgcccagcttccacaccatcagccccaccctgttcaacgccagcagcaacgacatgaagctgaagcccgagctgttcctgacccagcagttcctgagcggccacctgcccaagtacgagcaggtgcacatcctgcccgtgggcagaatcgaggagcccttctggcagaacttcaagcacctgcaggaggaggtgttccagaagatcaagaccctggcccagctgagcaaggacgtgcaggacgtgatgttctacagcatcctggccatgctgagagacagaggcgccctgcaggacctgatgaacatgctggagctggacagcagcggccacctggacggccccggcggcgccatcctgaagaagctgcagcaggacagcaaccacgcctggttcaaccccaaggaccccatcctgtacctgctggaggccatcatggtgctgagcgacttccagcacgacctgctggcctgcagcatggagaagagaatcctgctgcagcagcaggagctggtgagaagcatcctggagcccaacttcagatacccctggagcatccccttcaccctgaagcccgagctgctggcccccctgcagagcgagggcctggccatcacctacggcctgctggaggagtgcggcctgagaatggagctggacaaccccagaagcacctgggacgtggaggccaagatgcccctgagcgccctgtacggcaccctgagcctgctgcagcagctggccgaggcctag

SEQ ID NO: 82783 - DNA, 462 bp, synthetic construct
  misc_feature 1..462: note = Description of Artificial Sequence: Synthetic coding sequence
  source 1..462: mol_type = other DNA
atggtggccaccaagaccttcgccctgctgctgctgagcctgttcctggccgtgggcctgggcgagaagaaggagggccacttcagcgccctgcccagcctgcccgtgggcagccacgccaaggtgagcagcccccagcccagaggccccagatacgccgagggcaccttcatcagcgactacagcatcgccatggacaagatccaccagcaggacttcgtgaactggctgctggcccagaagggcaagaagaacgactggaagcacaacatcacccagagagaggccagagccctggagctggccagccaggccaacagaaaggaggaggaggccgtggagccccagagcagccccgccaagaaccccagcgacgaggacctgctgagagacctgctgatccaggagctgctggcctgcctgctggaccagaccaacctgtgcagactgagaagcagatag

SEQ ID NO: 82784 - DNA, 1401 bp, synthetic construct
  misc_feature 1..1401: note = Description of Artificial Sequence: Synthetic coding sequence
  source 1..1401: mol_type = other DNA
atgaccaccagccccatcctgcagctgctgctgagactgagcctgtgcggcctgctgctgcagagagccgagaccggcagcaagggccagaccgccggcgagctgtaccagagatgggagagatacagaagagagtgccaggagaccctggccgccgccgagccccccagcggcctggcctgcaacggcagcttcgacatgtacgtgtgctgggactacgccgcccccaacgccaccgccagagccagctgcccctggtacctgccctggcaccaccacgtggccgccggcttcgtgctgagacagtgcggcagcgacggccagtggggcctgtggagagaccacacccagtgcgagaaccccgagaagaacgaggccttcctggaccagagactgatcctggagagactgcaggtgatgtacaccgtgggctacagcctgagcctggccaccctgctgctggccctgctgatcctgagcctgttcagaagactgcactgcaccagaaactacatccacatcaacctgttcaccagcttcatgctgagagccgccgccatcctgagcagagacagactgctgcccagacccggcccctacctgggcgaccaggccctggccctgtggaaccaggccctggccgcctgcagaaccgcccagatcgtgacccagtactgcgtgggcgccaactacacctggctgctggtggagggcgtgtacctgcacagcctgctggtgctggtgggcggcagcgaggagggccacttcagatactacctgctgctgggctggggcgcccccgccctgttcgtgatcccctgggtgatcgtgagatacctgtacgagaacacccagtgctgggagagaaacgaggtgaaggccatctggtggatcatcagaacccccatcctgatgaccatcctgatcaacttcctgatcttcatcagaatcctgggcatcctgctgagcaagctgagaaccagacagatgagatgcagagactacagactgagactggccagaagcaccctgaccctggtgcccctgctgggcgtgcacgaggtggtgttcgcccccgtgaccgaggagcaggccagaggcgccctgagattcgccaagctgggcttcgagatcttcctgagcagcttccagggcttcctggtgagcgtgctgtactgcttcatcaacaaggaggtgcagagcgagatcagaagaggctggcaccactgcagactgagaagaagcctgggcgaggagcagagacagctgcccgagagagccttcagagccctgcccagcggcagcggccccggcgaggtgcccaccagcagaggcctgagcagcggcaccctgcccggccccggcaacgaggccagcagagagctggagagctactgctag

SEQ ID NO: 82785 - DNA, 1293 bp, synthetic construct
  misc_feature 1..1293: note = Description of Artificial Sequence: Synthetic coding sequence
  source 1..1293: mol_type = other DNA
atgaccaccagccccatcctgcagctgctgctgagactgagcctgtgcggcctgctgctgcagagagccgagaccggcagcaagggccagaccgccggcgagctgtaccagagatgggagagatacagaagagagtgccaggagaccctggccgccgccgagccccccagcgtggccgccggcttcgtgctgagacagtgcggcagcgacggccagtggggcctgtggagagaccacacccagtgcgagaaccccgagaagaacgaggccttcctggaccagagactgatcctggagagactgcaggtgatgtacaccgtgggctacagcctgagcctggccaccctgctgctggccctgctgatcctgagcctgttcagaagactgcactgcaccagaaactacatccacatcaacctgttcaccagcttcatgctgagagccgccgccatcctgagcagagacagactgctgcccagacccggcccctacctgggcgaccaggccctggccctgtggaaccaggccctggccgcctgcagaaccgcccagatcgtgacccagtactgcgtgggcgccaactacacctggctgctggtggagggcgtgtacctgcacagcctgctggtgctggtgggcggcagcgaggagggccacttcagatactacctgctgctgggctggggcgcccccgccctgttcgtgatcccctgggtgatcgtgagatacctgtacgagaacacccagtgctgggagagaaacgaggtgaaggccatctggtggatcatcagaacccccatcctgatgaccatcctgatcaacttcctgatcttcatcagaatcctgggcatcctgctgagcaagctgagaaccagacagatgagatgcagagactacagactgagactggccagaagcaccctgaccctggtgcccctgctgggcgtgcacgaggtggtgttcgcccccgtgaccgaggagcaggccagaggcgccctgagattcgccaagctgggcttcgagatcttcctgagcagcttccagggcttcctggtgagcgtgctgtactgcttcatcaacaaggaggtgcagagcgagatcagaagaggctggcaccactgcagactgagaagaagcctgggcgaggagcagagacagctgcccgagagagccttcagagccctgcccagcggcagcggccccggcgaggtgcccaccagcagaggcctgagcagcggcaccctgcccggccccggcaacgaggccagcagagagctggagagctactgctag

SEQ ID NO: 82786 - DNA, 1401 bp, synthetic construct; identical to SEQ ID NO: 82784
  misc_feature 1..1401: note = Description of Artificial Sequence: Synthetic coding sequence
  source 1..1401: mol_type = other DNA

SEQ ID NO: 82787 - DNA, 1254 bp, synthetic construct
  misc_feature 1..1254: note = Description of Artificial Sequence: Synthetic coding sequence
  source 1..1254: mol_type = other DNA
atggcctggttcgccctgtacctgctgagcctgctgtgggccaccgccggcaccagcacccagacccagagcagctgcagcgtgcccagcgcccaggagcccctggtgaacggcatccaggtgctgatggagaacagcgtgaccagcagcgcctaccccaaccccagcatcctgatcgccatgaacctggccggcgcctacaacctgaaggcccagaagctgctgacctaccagctgatgagcagcgacaacaacgacctgaccatcggccagctgggcctgaccatcatggccctgaccagcagctgcagagaccccggcgacaaggtgagcatcctgcagagacagatggagaactgggcccccagcagccccaacgccgaggccagcgccttctacggccccagcctggccatcctggccctgtgccagaagaacagcgaggccaccctgcccatcgccgtgagattcgccaagaccctgctggccaacagcagccccttcaacgtggacaccggcgccatggccaccctggccctgacctgcatgtacaacaagatccccgtgggcagcgaggagggctacagaagcctgttcggccaggtgctgaaggacatcgtggagaagatcagcatgaagatcaaggacaacggcatcatcggcgacatctacagcaccggcctggccatgcaggccctgagcgtgacccccgagcccagcaagaaggagtggaactgcaagaagaccaccgacatgatcctgaacgagatcaagcagggcaagttccacaaccccatgagcatcgcccagatcctgcccagcctgaagggcaagacctacctggacgtgccccaggtgacctgcagccccgaccacgaggtgcagcccaccctgcccagcaaccccggccccggccccaccagcgccagcaacatcaccgtgatctacaccatcaacaaccagctgagaggcgtggagctgctgttcaacgagaccatcaacgtgagcgtgaagagcggcagcgtgctgctggtggtgctggaggaggcccagagaaagaaccccatgttcaagttcgagaccaccatgaccagctggggcctggtggtgagcagcatcaacaacatcgccgagaacgtgaaccacaagacctactggcagttcctgagcggcgtgacccccctgaacgagggcgtggccgactacatccccttcaaccacgagcacatcaccgccaacttcacccagtactag

SEQ ID NO: 82788 - DNA, 1179 bp, synthetic construct
  misc_feature 1..1179: note = Description of Artificial Sequence: Synthetic coding sequence
  source 1..1179: mol_type = other DNA
atggccgtgcccagcgcccaggagcccctggtgaacggcatccaggtgctgatggagaacagcgtgaccagcagcgcctaccccaaccccagcatcctgatcgccatgaacctggccggcgcctacaacctgaaggcccagaagctgctgacctaccagctgatgagcagcgacaacaacgacctgaccatcggccagctgggcctgaccatcatggccctgaccagcagctgcagagaccccggcgacaaggtgagcatcctgcagagacagatggagaactgggcccccagcagccccaacgccgaggccagcgccttctacggccccagcctggccatcctggccctgtgccagaagaacagcgaggccaccctgcccatcgccgtgagattcgccaagaccctgctggccaacagcagccccttcaacgtggacaccggcgccatggccaccctggccctgacctgcatgtacaacaagatccccgtgggcagcgaggagggctacagaagcctgttcggccaggtgctgaaggacatcgtggagaagatcagcatgaagatcaaggacaacggcatcatcggcgacatctacagcaccggcctggccatgcaggccctgagcgtgacccccgagcccagcaagaaggagtggaactgcaagaagaccaccgacatgatcctgaacgagatcaagcagggcaagttccacaaccccatgagcatcgcccagatcctgcccagcctgaagggcaagacctacctggacgtgccccaggtgacctgcagccccgaccacgaggtgcagcccaccctgcccagcaaccccggccccggccccaccagcgccagcaacatcaccgtgatctacaccatcaacaaccagctgagaggcgtggagctgctgttcaacgagaccatcaacgtgagcgtgaagagcggcagcgtgctgctggtggtgctggaggaggcccagagaaagaaccccatgttcaagttcgagaccaccatgaccagctggggcctggtggtgagcagcatcaacaacatcgccgagaacgtgaaccacaagacctactggcagttcctgagcggcgtgacccccctgaacgagggcgtggccgactacatccccttcaaccacgagcacatcaccgccaacttcacccagtactag

SEQ ID NO: 82789 - DNA, 306 bp, synthetic construct
  misc_feature 1..306: note = Description of Artificial Sequence: Synthetic coding sequence
  source 1..306: mol_type = other DNA
atgcagagactgtgcgtgtacgtgctgatcttcgccctggccctggccgccttcagcgaggccagctggaagcccagaagccagcagcccgacgcccccctgggcaccggcgccaacagagacctggagctgccctggctggagcagcagggccccgccagccaccacagaagacagctgggcccccagggccccccccacctggtggccgaccccagcaagaagcagggcccctggctggaggaggaggaggaggcctacggctggatggacttcggcagaagaagcgccgaggacgagaactag

SEQ ID NO: 82790 - DNA, 447 bp, synthetic construct
  misc_feature 1..447: note = Description of Artificial Sequence: Synthetic coding sequence
  source 1..447: mol_type = other DNA
atgagaggcagagagctgcccctggtgctgctggccctggtgctgtgcctggcccccagaggcagagccgtgcccctgcccgccggcggcggcaccgtgctgaccaagatgtaccccagaggcaaccactgggccgtgggccacctgatgggcaagaagagcaccggcgagagcagcagcgtgagcgagagaggcagcctgaagcagcagctgagagagtacatcagatgggaggaggccgccagaaacctgctgggcctgatcgaggccaaggagaacagaaaccaccagcccccccagcccaaggccctgggcaaccagcagcccagctgggacagcgaggacagcagcaacttcaaggacgtgggcagcaagggcaaggtgggcagactgagcgcccccggcagccagagagagggcagaaacccccagctgaaccagcagtag

SEQ ID NO: 82791 - DNA, 426 bp, synthetic construct
  misc_feature 1..426: note = Description of Artificial Sequence: Synthetic coding sequence
  source 1..426: mol_type = other DNA
atgagaggcagagagctgcccctggtgctgctggccctggtgctgtgcctggcccccagaggcagagccgtgcccctgcccgccggcggcggcaccgtgctgaccaagatgtaccccagaggcaaccactgggccgtgggccacctgatgggcaagaagagcaccggcgagagcagcagcgtgagcgagagaggcagcctgaagcagcagctgagagagtacatcagatgggaggaggccgccagaaacctgctgggcctgatcgaggccaaggagaacagaaaccaccagcccccccagcccaaggccctgggcaaccagcagcccagctgggacagcgaggacagcagcaacttcaaggacgtgggcagcaagggcaagggcagccagagagagggcagaaacccccagctgaaccagcagtag

SEQ ID NO: 82792 - DNA, 417 bp, synthetic construct
  misc_feature 1..417: note = Description of Artificial Sequence: Synthetic coding sequence
  source 1..417: mol_type = other DNA
atgagaggcagagagctgcccctggtgctgctggccctggtgctgtgcctggcccccagaggcagagccgtgcccctgcccgccggcggcggcaccgtgctgaccaagatgtaccccagaggcaaccactgggccgtgggccacctgatgggcaagaagagcaccggcgagagcagcagcgtgagcgagagaggcagcctgaagcagcagctgagagagtacatcagatgggaggaggccgccagaaacctgctgggcctgatcgaggccaaggagaacagaaaccaccagcccccccagcccaaggccctgggcaaccagcagcccagctgggacagcgaggacagcagcaacttcaaggacctggtggacagcctgctgcaggtgctgaacgtgaaggagggcacccccagctag

SEQ ID NO: 82793 - DNA, 1155 bp, synthetic construct
  misc_feature 1..1155: note = Description of Artificial Sequence: Synthetic coding sequence
  source 1..1155: mol_type = other DNA
atggccctgaacgactgcttcctgctgaacctggaggtggaccacttcatgcactgcaacatcagcagccacagcgccgacctgcccgtgaacgacgactggagccaccccggcatcctgtacgtgatccccgccgtgtacggcgtgatcatcctgatcggcctgatcggcaacatcaccctgatcaagatcttctgcaccgtgaagagcatgagaaacgtgcccaacctgttcatcagcagcctggccctgggcgacctgctgctgctgatcacctgcgcccccgtggacgccagcagatacctggccgacagatggctgttcggcagaatcggctgcaagctgatccccttcatccagctgaccagcgtgggcgtgagcgtgttcaccctgaccgccctgagcgccgacagatacaaggccatcgtgagacccatggacatccaggccagccacgccctgatgaagatctgcctgaaggccgccttcatctggatcatcagcatgctgctggccatccccgaggccgtgttcagcgacctgcaccccttccacgaggagagcaccaaccagaccttcatcagctgcgccccctacccccacagcaacgagctgcaccccaagatccacagcatggccagcttcctggtgttctacgtgatccccctgagcatcatcagcgtgtactactacttcatcgccaagaacctgatccagagcgcctacaacctgcccgtggagggcaacatccacgtgaagaagcagatcgagagcagaaagagactggccaagaccgtgctggtgttcgtgggcctgttcgccttctgctggctgcccaaccacgtgatctacctgtacagaagctaccactacagcgaggtggacaccagcatgctgcacttcgtgaccagcatctgcgccagactgctggccttcaccaacagctgcgtgaaccccttcgccctgtacctgctgagcaagagcttcagaaagcagttcaacacccagctgctgtgctgccagcccggcctgatcatcagaagccacagcaccggcagaagcaccacctgcatgaccagcctgaagagcaccaaccccagcgtggccaccttcagcctgatcaacggcaacatctgccacgagagatacgtgtag

SEQ ID NO: 82794 - DNA, 480 bp, synthetic construct
  misc_feature 1..480: note = Description of Artificial Sequence: Synthetic coding sequence
  source 1..480: mol_type = other DNA
atggccagcttcctggtgttctacgtgatccccctgagcatcatcagcgtgtactactacttcatcgccaagaacctgatccagagcgcctacaacctgcccgtggagggcaacatccacgtgaagaagcagatcgagagcagaaagagactggccaagaccgtgctggtgttcgtgggcctgttcgccttctgctggctgcccaaccacgtgatctacctgtacagaagctaccactacagcgaggtggacaccagcatgctgcacttcgtgaccagcatctgcgccagactgctggccttcaccaacagctgcgtgaaccccttcgccctgtacctgctgagcgagttccaggagaccgtgcagcacagcgccgccctgctgcccgcctggcccgaccaccccgtgagccagcactggaaggagtacaacctgcacgacctgccccaggagtaccagcccctgagaggccacctgtag

SEQ ID NO: 82795 - DNA, 600 bp, synthetic construct
  misc_feature 1..600: note = Description of Artificial Sequence: Synthetic coding sequence
  source 1..600: mol_type = other DNA
atgctggcctacagcagcgtgcactgcttcagagaggacaagatgaagttcaccatcgtgttcgccggcctgctgggcgtgttcctggcccccgccctggccaactacaacatcaacgtgaacgacgacaacaacaacgccggcagcggccagcagagcgtgagcgtgaacaacgagcacaacgtggccaacgtggacaacaacaacggctgggacagctggaacagcatctgggactacggcaacggcttcgccgccaccagactgttccagaagaagacctgcatcgtgcacaagatgaacaaggaggtgatgcccagcatccagagcctggacgccctggtgaaggagaagaagctgcagggcaagggccccggcggccccccccccaagggcctgatgtacagcgtgaaccccaacaaggtggacgacctgagcaagttcggcaagaacatcgccaacatgtgcagaggcatccccacctacatggccgaggagatgcaggaggccagcctgttcttctacagcggcacctgctacaccaccagcgtgctgtggatcgtggacatcagcttctgcggcgacaccgtggagaactag

SEQ ID NO: 82796 - DNA, 1092 bp, synthetic construct
  misc_feature 1..1092: note = Description of Artificial Sequence: Synthetic coding sequence
  source 1..1092: mol_type = other DNA
atgcagagagccggcggcggcagcgcccccggcggcaacggcggcggcggcggcggcggccccggcaccgccttcagcatcgacagcctgatcggcccccccccccccagaagcggccacctgctgtacaccggctaccccatgttcatgccctacagacccctggtgctgccccaggccctggcccccgcccccctgcccgccggcctgccccccctggcccccctggccagcttcgccggcagactgaccaacaccttctgcgccggcctgggccaggccgtgcccagcatggtggccctgaccaccgccctgcccagcttcgccgagccccccgacgccttctacggcccccaggagctggccgccgccgccgccgccgccgccgccaccgccgccagaaacaaccccgagcccggcggcagaagacccgagggcggcctggaggccgacgagctgctgcccgccagagagaaggtggccgagccccccccccccccccccccccacttcagcgagaccttccccagcctgcccgccgagggcaaggtgtacagcagcgacgaggagaagctggaggccagcgccggcgaccccgccggcagcgagcaggaggaggagggcagcggcggcgacagcgaggacgacggcttcctggacagcagcgccggcggccccggcgccctgctgggccccaagcccaagctgaagggcagcctgggcaccggcgccgaggagggcgcccccgtgaccgccggcgtgaccgcccccggcggcaagagcagaagaagaagaaccgccttcaccagcgagcagctgctggagctggagaaggagttccactgcaagaagtacctgagcctgaccgagagaagccagatcgcccacgccctgaagctgagcgaggtgcaggtgaagatctggttccagaacagaagagccaagtggaagagaatcaaggccggcaacgtgagcagcagaagcggcgagcccgtgagaaaccccaagatcgtggtgcccatccccgtgcacgtgaacagattcgccgtgagaagccagcaccagcagatggagcagggcgccagaccctag

SEQ ID NO: 82797 - DNA, 1047 bp, synthetic construct
  misc_feature 1..1047: note = Description of Artificial Sequence: Synthetic coding sequence
  source 1..1047: mol_type = other DNA
atgagcgccgccttcccccccagcctgatgatgatgcagagacccctgggcagcagcaccgccttcagcatcgacagcctgatcggcagccccccccagcccagccccggccacttcgtgtacaccggctaccccatgttcatgccctacagacccgtggtgctgccccccccccccccccccccccccgccctgccccaggccgccctgcagcccgccctgccccccgcccacccccaccaccagatccccagcctgcccaccggcttctgcagcagcctggcccagggcatggccctgaccagcaccctgatggccaccctgcccggcggcttcagcgccagcccccagcaccaggaggccgccgccgccagaaagttcgccccccagcccctgcccggcggcggcaacttcgacaaggccgaggccctgcaggccgacgccgaggacggcaagggcttcctggccaaggagggcagcctgctggccttcagcgccgccgagaccgtgcaggccagcctggtgggcgccgtgagaggccagggcaaggacgagagcaaggtggaggacgaccccaagggcaaggaggagagcttcagcctggagagcgacgtggactacagcagcgacgacaacctgaccggccaggccgcccacaaggaggaggaccccggccacgccctggaggagaccccccccagcagcggcgccgccggcagcaccaccagcaccggcaagaacagaagaagaagaaccgccttcaccagcgagcagctgctggagctggagaaggagttccactgcaagaagtacctgagcctgaccgagagaagccagatcgcccacgccctgaagctgagcgaggtgcaggtgaagatctggttccagaacagaagagccaagtggaagagagtgaaggccggcaacgccaacagcaagaccggcgagcccagcagaaaccccaagatcgtggtgcccatccccgtgcacgtgagcagattcgccatcagaagccagcaccagcagctggagcaggccagaccctag

SEQ ID NO: 82798 - DNA, 1443 bp, synthetic construct
  misc_feature 1..1443: note = Description of Artificial Sequence: Synthetic coding sequence
  source 1..1443: mol_type = other DNA
atggaggtggcccccgagcagcccagatggatggcccaccccgccgtgctgaacgcccagcaccccgacagccaccaccccggcctggcccacaactacatggagcccgcccagctgctgccccccgacgaggtggacgtgttcttcaaccacctggacagccagggcaacccctactacgccaaccccgcccacgccagagccagagtgagctacagccccgcccacgccagactgaccggcggccagatgtgcagaccccacctgctgcacagccccggcctgccctggctggacggcggcaaggccgccctgagcgccgccgccgcccaccaccacaacccctggaccgtgagccccttcagcaagacccccctgcaccccagcgccgccggcggccccggcggccccctgagcgtgtaccccggcgccggcggcggcagcggcggcggcagcggcagcagcgtggccagcctgacccccaccgccgcccacagcggcagccacctgttcggcttcccccccaccccccccaaggaggtgagccccgaccccagcaccaccggcgccgccagccccgccagcagcagcgccggcggcagcgccgccagaggcgaggacaaggacggcgtgaagtaccaggtgagcctgaccgagagcatgaagatggagagcggcagccccctgagacccggcctggccaccatgggcacccagcccgccacccaccaccccatccccacctaccccagctacgtgcccgccgccgcccacgactacagcagcggcctgttccaccccggcggcttcctgggcggccccgccagcagcttcacccccaagcagagaagcaaggccagaagctgcagcgagggcagagagtgcgtgaactgcggcgccaccgccacccccctgtggagaagagacggcaccggccactacctgtgcaacgcctgcggcctgtaccacaagatgaacggccagaacagacccctgatcaagcccaagagaagactgagcgccgccagaagagccggcacctgctgcgccaactgccagaccaccaccaccaccctgtggagaagaaacgccaacggcgaccccgtgtgcaacgcctgcggcctgtactacaagctgcacaacgtgaacagacccctgaccatgaagaaggagggcatccagaccagaaacagaaagatgagcaacaagagcaagaagagcaagaagggcgccgagtgcttcgaggagctgagcaagtgcatgcaggagaagagcagccccttcagcgccgccgccctggccggccacatggcccccgtgggccacctgccccccttcagccacagcggccacatcctgcccacccccacccccatccaccccagcagcagcctgagcttcggccacccccaccccagcagcatggtgaccgccatgggctag

SEQ ID NO: 82799 - DNA, 1401 bp, synthetic construct
  misc_feature 1..1401: note = Description of Artificial Sequence: Synthetic coding sequence
  source 1..1401: mol_type = other DNA
atggaggtggcccccgagcagcccagatggatggcccaccccgccgtgctgaacgcccagcaccccgacagccaccaccccggcctggcccacaactacatggagcccgcccagctgctgccccccgacgaggtggacgtgttcttcaaccacctggacagccagggcaacccctactacgccaaccccgcccacgccagagccagagtgagctacagccccgcccacgccagactgaccggcggccagatgtgcagaccccacctgctgcacagccccggcctgccctggctggacggcggcaaggccgccctgagcgccgccgccgcccaccaccacaacccctggaccgtgagccccttcagcaagacccccctgcaccccagcgccgccggcggccccggcggccccctgagcgtgtaccccggcgccggcggcggcagcggcggcggcagcggcagcagcgtggccagcctgacccccaccgccgcccacagcggcagccacctgttcggcttcccccccaccccccccaaggaggtgagccccgaccccagcaccaccggcgccgccagccccgccagcagcagcgccggcggcagcgccgccagaggcgaggacaaggacggcgtgaagtaccaggtgagcctgaccgagagcatgaagatggagagcggcagccccctgagacccggcctggccaccatgggcacccagcccgccacccaccaccccatccccacctaccccagctacgtgcccgccgccgcccacgactacagcagcggcctgttccaccccggcggcttcctgggcggccccgccagcagcttcacccccaagcagagaagcaaggccagaagctgcagcgagggcagagagtgcgtgaactgcggcgccaccgccacccccctgtggagaagagacggcaccggccactacctgtgcaacgcctgcggcctgtaccacaagatgaacggccagaacagacccctgatcaagcccaagagaagactgaccaccaccaccaccctgtggagaagaaacgccaacggcgaccccgtgtgcaacgcctgcggcctgtactacaagctgcacaacgtgaacagacccctgaccatgaagaaggagggcatccagaccagaaacagaaagatgagcaacaagagcaagaagagcaagaagggcgccgagtgcttcgaggagctgagcaagtgcatgcaggagaagagcagccccttcagcgccgccgccctggccggccacatggcccccgtgggccacctgccccccttcagccacagcggccacatcctgcccacccccacccccatccaccccagcagcagcctgagcttcggccacccccaccccagcagcatggtgaccgccatgggctag

SEQ ID NO: 82800 - DNA, 1443 bp, synthetic construct; identical to SEQ ID NO: 82798
  misc_feature 1..1443: note = Description of Artificial Sequence: Synthetic coding sequence
  source 1..1443: mol_type = other DNA

SEQ ID NO: 82801 - DNA, 453 bp, synthetic construct
  misc_feature 1..453: note = Description of Artificial Sequence: Synthetic coding sequence
  source 1..453: mol_type = other DNA
atggaggtggcccccgagcagcccagatggatggcccaccccgccgtgctgaacgcccagcaccccgacagccaccaccccggcctggcccacaactacatggagcccgcccagctgctgccccccgacgaggtggacgtgttcttcaaccacctggacagccagggcaacccctactacgccaaccccgcccacgccagagccagagtgagctacagccccgcccacgccagactgaccggcggccagatgtgcagaccccacctgctgcacagccccggcctgccctggctggacggcggcaaggccgccctgagcgccgccgccgcccaccaccacaacccctggaccgtgagccccttcagcaagacccccctgcaccccagcgccgccggcggccccggcggccccctgagcgtgtaccccggcgccggcggcggcagcggcggctag

SEQ ID NO: 82802 - DNA, 27 bp, synthetic construct
  misc_feature 1..27: note = Description of Artificial Sequence: Synthetic coding sequence
  source 1..27: mol_type = other DNA
atggaggtggcccccgagcagccctag

SEQ ID NO: 82803 - DNA, 1326 bp, synthetic construct
  misc_feature 1..1326: note = Description of Artificial Sequence: Synthetic coding sequence
  source 1..1326: mol_type = other DNA
atgtaccagagcctgccctggccccccaccaccggcagaccccccgtgcccaccagaagagccgcccccgcccccagctgcaccgccagagcccccagacccagacagagcacctgcccccacagaggcgccctgctgagagccggccccgtgctgccccccggcagaagaagaggcctgtgcgtgagaagagccagcggcggcagcagcggcggcgccgccagcggcgccggccccggcacccagcagggcagccccggctggagccaggccggcgccgacggcgccgcctacacccccccccccgtgagccccagattcagcttccccggcaccaccggcagcctggccgccgccgccgccgccgccgccgccagagaggccgccgcctacagcagcggcggcggcgccgccggcgccggcctggccggcagagagcagtacggcagagccggcttcgccggcagctacagcagcccctaccccgcctacatggccgacgtgggcgccagctgggccgccgccgccgccgccagcgccggccccttcgacagccccgtgctgcacagcctgcccggcagagccaaccccgccgccagacaccccaacctggacatgttcgacgacttcagcgagggcagagagtgcgtgaactgcggcgccatgagcacccccctgtggagaagagacggcaccggccactacctgtgcaacgcctgcggcctgtaccacaagatgaacggcatcaacagacccctgatcaagccccagagaagactgagcgccagcagaagagtgggcctgagctgcgccaactgccagaccaccaccaccaccctgtggagaagaaacgccgagggcgagcccgtgtgcaacgcctgcggcctgtacatgaagctgcacggcgtgcccagacccctggccatgagaaaggagggcatccagaccagaaagagaaagcccaagaacctgaacaagagcaagacccccgccgcccccagcggcagcgagagcctgccccccgccagcggcgccagcagcaacagcagcaacgccaccaccagcagcagcgaggagatgagacccatcaagaccgagcccggcctgagcagccactacggccacagcagcagcgtgagccagaccttcagcgtgagcgccatgagcggccacggccccagcatccaccccgtgctgagcgccctgaagctgagcccccagggctacgccagccccgtgagccagagcccccagaccagcagcaagcaggacagctggaacagcctggtgctggccgacagccacggcgacatcatcaccgcctag

SEQ ID NO: 82804 - DNA, 1329 bp, synthetic construct
  misc_feature 1..1329: note = Description of Artificial Sequence: Synthetic coding sequence
  source 1..1329: mol_type = other DNA
atgtaccagagcctggccatggccgccaaccacggccccccccccggcgcctacgaggccggcggccccggcgccttcatgcacggcgccggcgccgccagcagccccgtgtacgtgcccacccccagagtgcccagcagcgtgctgggcctgagctacctgcagggcggcggcgccggcagcgccagcggcggcgccagcggcggcagcagcggcggcgccgccagcggcgccggccccggcacccagcagggcagccccggctggagccaggccggcgccgacggcgccgcctacacccccccccccgtgagccccagattcagcttccccggcaccaccggcagcctggccgccgccgccgccgccgccgccgccagagaggccgccgcctacagcagcggcggcggcgccgccggcgccggcctggccggcagagagcagtacggcagagccggcttcgccggcagctacagcagcccctaccccgcctacatggccgacgtgggcgccagctgggccgccgccgccgccgccagcgccggccccttcgacagccccgtgctgcacagcctgcccggcagagccaaccccgccgccagacaccccaacctggacatgttcgacgacttcagcgagggcagagagtgcgtgaactgcggcgccatgagcacccccctgtggagaagagacggcaccggccactacctgtgcaacgcctgcggcctgtaccacaagatgaacggcatcaacagacccctgatcaagccccagagaagactgagcgccagcagaagagtgggcctgagctgcgccaactgccagaccaccaccaccaccctgtggagaagaaacgccgagggcgagcccgtgtgcaacgcctgcggcctgtacatgaagctgcacggcgtgcccagacccctggccatgagaaaggagggcatccagaccagaaagagaaagcccaagaacctgaacaagagcaagacccccgccgcccccagcggcagcgagagcctgccccccgccagcggcgccagcagcaacagcagcaacgccaccaccagcagcagcgaggagatgagacccatcaagaccgagcccggcctgagcagccactacggccacagcagcagcgtgagccagaccttcagcgtgagcgccatgagcggccacggccccagcatccaccccgtgctgagcgccctgaagctgagcccccagggctacgccagccccgtgagccagagcccccagaccagcagcaagcaggacagctggaacagcctggtgctggccgacagccacggcgacatcatcaccgcctag

SEQ ID NO: 82805 - DNA, 528 bp, synthetic construct
  misc_feature 1..528: note = Description of Artificial Sequence: Synthetic coding sequence
  source 1..528: mol_type = other DNA
atgttcgacgacttcagcgagggcagagagtgcgtgaactgcggcgccatgagcacccccctgtggagaagagacggcaccggccactacctgtgcaacgcctgcggcctgtaccacaagatgaacggcatcaacagacccctgatcaagccccagagaagactgagcgccagcagaagagtgggcctgagctgcgccaactgccagaccaccaccaccaccctgtggagaagaaacgccgagggcgagcccgtgtgcaacgcctgcggcctgtacatgaagctgcacggcgtgcccagacccctggccatgagaaaggagggcatccagaccagaaagagaaagcccaagaacctgaacaagagcaagacccccgccgcccccagcggcagcgagagcctgccccccgccagcggcgccagcagcaacagcagcaacgccaccaccagcagcagcgaggagatgagacccatcaagaccgagcccggcctgagcagccactacggccacagcagcagcgtgagctag

SEQ ID NO: 82806 - DNA, 354 bp, synthetic construct
  misc_feature 1..354: note = Description of Artificial Sequence: Synthetic coding sequence
  source 1..354: mol_type = other DNA
atgtaccagagcctggccatggccgccaaccacggccccccccccggcgcctacgaggccggcggccccggcgccttcatgcacggcgccggcgccgccagcagccccgtgtacgtgcccacccccagagtgcccagcagcgtgctgggcctgagctacctgcagggcggcggcgccggcagcgccagcggcggcgccagcggcggcagcagcggcggcgccgccagcggcgccggccccggcacccagcagggcagccccggctggagccaggccggcgccgacggcgccgcctacacccccccccccgtgagccccagattcagcttccccggcaccaccggcagcctgtag

SEQ ID NO: 82807 - DNA, 711 bp, synthetic construct
  misc_feature 1..711: note = Description of Artificial Sequence: Synthetic coding sequence
  source 1..711: mol_type = other DNA
atgttcgacgacttcagcgagggcagagagtgcgtgaactgcggcgccatgagcacccccctgtggagaagagacggcaccggccactacctgtgcaacgcctgcggcctgtaccacaagatgaacggcatcaacagacccctgatcaagccccagagaagactgagcgccagcagaagagtgggcctgagctgcgccaactgccagaccaccaccaccaccctgtggagaagaaacgccgagggcgagcccgtgtgcaacgcctgcggcctgtacatgaagctgcacggcgtgcccagacccctggccatgagaaaggagggcatccagaccagaaagagaaagcccaagaacctgaacaagagcaagacccccgccgcccccagcggcagcgagagcctgccccccgccagcggcgccagcagcaacagcagcaacgccaccaccagcagcagcgaggagatgagacccatcaagaccgagcccggcctgagcagccactacggccacagcagcagcgtgagccagaccttcagcgtgagcgccatgagcggccacggccccagcatccaccccgtgctgagcgccctgaagctgagcccccagggctacgccagccccgtgagccagagcccccagaccagcagcaagcaggacagctggaacagcctggtgctggccgacagccacggcgacatcatcaccgcctag

SEQ ID NO: 82808 - DNA, 1332 bp, synthetic construct
  misc_feature 1..1332: note = Description of Artificial Sequence: Synthetic coding sequence
  source 1..1332: mol_type = other DNA
atgtaccagagcctggccatggccgccaaccacggccccccccccggcgcctacgaggccggcggccccggcgccttcatgcacggcgccggcgccgccagcagccccgtgtacgtgcccacccccagagtgcccagcagcgtgctgggcctgagctacctgcagggcggcggcgccggcagcgccagcggcggcgccagcggcggcagcagcggcggcgccgccagcggcgccggccccggcacccagcagggcagccccggctggagccaggccggcgccgacggcgccgcctacacccccccccccgtgagccccagattcagcttccccggcaccaccggcagcctggccgccgccgccgccgccgccgccgccagagaggccgccgcctacagcagcggcggcggcgccgccggcgccggcctggccggcagagagcagtacggcagagccggcttcgccggcagctacagcagcccctaccccgcctacatggccgacgtgggcgccagctgggccgccgccgccgccgccagcgccggccccttcgacagccccgtgctgcacagcctgcccggcagagccaaccccgccgccagacaccccaacctggtggacatgttcgacgacttcagcgagggcagagagtgcgtgaactgcggcgccatgagcacccccctgtggagaagagacggcaccggccactacctgtgcaacgcctgcggcctgtaccacaagatgaacggcatcaacagacccctgatcaagccccagagaagactgagcgccagcagaagagtgggcctgagctgcgccaactgccagaccaccaccaccaccctgtggagaagaaacgccgagggcgagcccgtgtgcaacgcctgcggcctgtacatgaagctgcacggcgtgcccagacccctggccatgagaaaggagggcatccagaccagaaagagaaagcccaagaacctgaacaagagcaagacccccgccgcccccagcggcagcgagagcctgccccccgccagcggcgccagcagcaacagcagcaacgccaccaccagcagcagcgaggagatgagacccatcaagaccgagcccggcctgagcagccactacggccacagcagcagcgtgagccagaccttcagcgtgagcgccatgagcggccacggccccagcatccaccccgtgctgagcgccctgaagctgagcccccagggctacgccagccccgtgagccagagcccccagaccagcagcaagcaggacagctggaacagcctggtgctggccgacagccacggcgacatcatcaccgcctag

SEQ ID NO: 82809 - DNA, 1194 bp, synthetic construct
  misc_feature 1..1194: note = Description of Artificial Sequence: Synthetic coding sequence
  source 1..1194: mol_type = other DNA
atgtaccagagcctggccctggccgccagccccagacaggccgcctacgccgacagcggcagcttcctgcacgcccccggcgccggcagccccatgttcgtgccccccgccagagtgcccagcatgctgagctacctgagcggctgcgagcccagcccccagccccccgagctggccgccagacccggctgggcccagaccgccaccgccgacagcagcgccttcggccccggcagcccccacccccccgccgcccacccccccggcgccaccgccttccccttcgcccacagccccagcggccccggcagcggcggcagcgccggcggcagagacggcagcgcctaccagggcgccctgctgcccagagagcagttcgccgcccccctgggcagacccgtgggcaccagctacagcgccacctaccccgcctacgtgagccccgacgtggcccagagctggaccgccggccccttcgacggcagcgtgctgcacggcctgcccggcagaagacccaccttcgtgagcgacttcctggaggagttccccggcgagggcagagagtgcgtgaactgcggcgccctgagcacccccctgtggagaagagacggcaccggccactacctgtgcaacgcctgcggcctgtaccacaagatgaacggcgtgaacagacccctggtgagaccccagaagagactgagcagcagcagaagagccggcctgtgctgcaccaactgccacaccaccaacaccaccctgtggagaagaaacagcgagggcgagcccgtgtgcaacgcctgcggcctgtacatgaagctgcacggcgtgcccagacccctggccatgaagaaggagagcatccagaccagaaagagaaagcccaagaccatcgccaaggccagaggcagcagcggcagcaccagaaacgccagcgccagccccagcgccgtggccagcaccgacagcagcgccgccaccagcaaggccaagcccagcctggccagccccgtgtgccccggccccagcatggccccccaggccagcggccaggaggacgacagcctggcccccggccacctggagttcaagttcgagcccgaggacttcgccttccccagcaccgcccccagcccccaggccggcctgagaggcgccctgagacaggaggcctggtgcgccctggccctggcctag

SEQ ID NO: 82810 - DNA, 1194 bp, synthetic construct; identical to SEQ ID NO: 82809
  misc_feature 1..1194: note = Description of Artificial Sequence: Synthetic coding sequence
  source 1..1194: mol_type = other DNA

SEQ ID NO: 82811 - DNA, 1254 bp, synthetic construct
  misc_feature 1..1254: note = Description of Artificial Sequence: Synthetic coding sequence
  source 1..1254: mol_type = other DNA
accgccaccgccgtgccctgcagacccccctgccccctggtgaagaccacccccggcagaatgtaccagagcctggccctggccgccagccccagacaggccgcctacgccgacagcggcagcttcctgcacgcccccggcgccggcagccccatgttcgtgccccccgccagagtgcccagcatgctgagctacctgagcggctgcgagcccagcccccagccccccgagctggccgccagacccggctgggcccagaccgccaccgccgacagcagcgccttcggccccggcagcccccacccccccgccgcccacccccccggcgccaccgccttccccttcgcccacagccccagcggccccggcagcggcggcagcgccggcggcagagacggcagcgcctaccagggcgccctgctgcccagagagcagttcgccgcccccctgggcagacccgtgggcaccagctacagcgccacctaccccgcctacgtgagccccgacgtggcccagagctggaccgccggccccttcgacggcagcgtgctgcacggcctgcccggcagaagacccaccttcgtgagcgacttcctggaggagttccccggcgagggcagagagtgcgtgaactgcggcgccctgagcacccccctgtggagaagagacggcaccggccactacctgtgcaacgcctgcggcctgtaccacaagatgaacggcgtgaacagacccctggtgagaccccagaagagactgagcagcagcagaagagccggcctgtgctgcaccaactgccacaccaccaacaccaccctgtggagaagaaacagcgagggcgagcccgtgtgcaacgcctgcggcctgtacatgaagctgcacggcgtgcccagacccctggccatgaagaaggagagcatccagaccagaaagagaaagcccaagaccatcgccaaggccagaggcagcagcggcagcaccagaaacgccagcgccagccccagcgccgtggccagcaccgacagcagcgccgccaccagcaaggccaagcccagcctggccagccccgtgtgccccggccccagcatggccccccaggccagcggccaggaggacgacagcctggcccccggccacctggagttcaagttcgagcccgaggacttcgccttccccagcaccgcccccagcccccaggccggcctgagaggcgccctgagacaggaggcctggtgcgccctggccctggcctag

SEQ ID NO: 82812 - DNA, 1788 bp, synthetic construct
  misc_feature 1..1788: note = Description of Artificial Sequence: Synthetic coding sequence
  source 1..1788: mol_type = other DNA
atggccctgaccgacggcggctggtgcctgcccaagagattcggcgccgccggcgccgacgccagcgacagcagagccttccccgccagagagcccagcaccccccccagccccatcagcagcagcagcagcagctgcagcagaggcggcgagagaggccccggcggcgccagcaactgcggcaccccccagctggacaccgaggccgccgccggcccccccgccagaagcctgctgctgagcagctacgccagccaccccttcggcgccccccacggccccagcgcccccggcgtggccggccccggcggcaacctgagcagctgggaggacctgctgctgttcaccgacctggaccaggccgccaccgccagcaagctgctgtggagcagcagaggcgccaagctgagccccttcgcccccgagcagcccgaggagatgtaccagaccctggccgccctgagcagccagggccccgccgcctacgacggcgcccccggcggcttcgtgcacagcgccgccgccgccgccgccgccgccgccgccgccagcagccccgtgtacgtgcccaccaccagagtgggcagcatgctgcccggcctgccctaccacctgcagggcagcggcagcggccccgccaaccacgccggcggcgccggcgcccaccccggctggccccaggccagcgccgacagccccccctacggcagcggcggcggcgccgccggcggcggcgccgccggccccggcggcgccggcagcgccgccgcccacgtgagcgccagattcccctacagccccagcccccccatggccaacggcgccgccagagagcccggcggctacgccgccgccggcagcggcggcgccggcggcgtgagcggcggcggcagcagcctggccgccatgggcggcagagagccccagtacagcagcctgagcgccgccagacccctgaacggcacctaccaccaccaccaccaccaccaccaccaccaccccagcccctacagcccctacgtgggcgcccccctgacccccgcctggcccgccggccccttcgagacccccgtgctgcacagcctgcagagcagagccggcgcccccctgcccgtgcccagaggccccagcgccgacctgctggaggacctgagcgagagcagagagtgcgtgaactgcggcagcatccagacccccctgtggagaagagacggcaccggccactacctgtgcaacgcctgcggcctgtacagcaagatgaacggcctgagcagacccctgatcaagccccagaagagagtgcccagcagcagaagactgggcctgagctgcgccaactgccacaccaccaccaccaccctgtggagaagaaacgccgagggcgagcccgtgtgcaacgcctgcggcctgtacatgaagctgcacggcgtgcccagacccctggccatgaagaaggagggcatccagaccagaaagagaaagcccaagaacatcaacaagagcaagacctgcagcggcaacagcaacaacagcatccccatgacccccaccagcaccagcagcaacagcgacgactgcagcaagaacaccagccccaccacccagcccaccgccagcggcgccggcgcccccgtgatgaccggcgccggcgagagcaccaaccccgagaacagcgagctgaagtacagcggccaggacggcctgtacatcggcgtgagcctggccagccccgccgaggtgaccagcagcgtgagacccgacagctggtgcgccctggccctggcctag

SEQ ID NO: 82813 - DNA, 8016 bp, synthetic construct
  misc_feature 1..8016: note = Description of Artificial Sequence: Synthetic coding sequence
  source 1..8016: mol_type = other DNA
atggccgccgacacccaggtgagcgagaccctgaagagattcgccggcaaggtgaccaccgccagcgtgaaggagagaagagagatcctgagcgagctgggcaagtgcgtggccggcaaggacctgcccgagggcgccgtgaagggcctgtgcaagctgttctgcctgaccctgcacagatacagagacgccgccagcagaagagccctgcaggccgccatccagcagctggccgaggcccagcccgaggccaccgccaagaacctgctgcacagcctgcagagcagcggcatcggcagcaaggccggcgtgcccagcaagagcagcggcagcgccgccctgctggccctgacctggacctgcctgctggtgagaatcgtgttccccagcagagccaagagacagggcgacatctggaacaagctggtggaggtgcagtgcctgctgctgctggaggtgctgggcggcagccacaagcacgccgtggacggcgccgtgaagaagctgaccaagctgtggaaggagaaccccggcctggtggagcagtacctgagcgccatcctgagcctggagcccaaccagaactacgccggcatgctgggcctgctggtgcagttctgcaccagccacaaggagatggacgtggtgagccagcacaagagcgccctgctggacttctacatgaagaacatcctgatgagcaaggtgaagccccccaagtacctgctggacagctgcgcccccctgctgagatacctgagccacagcgagttcaaggacctgatcctgcccaccatccagaagagcctgctgagaagccccgagaacgtgatcgagaccatcagcagcctgctggccagcgtgaccctggacctgagccagtacgccatggacatcgtgaagggcctggccggccacctgaagagcaacagccccagactgatggacgaggccgtgctggccctgagaaacctggccagacagtgcagcgacagcagcgccatggagagcctgaccaagcacctgttcgccatcctgggcggcagcgagggcaagctgaccgtggtggcccagaagatgagcgtgctgagcggcatcggcagcgtgagccaccacgtggtgagcggccccagcagccaggtgctgaacggcatcgtggccgagctgttcatccccttcctgcagcaggaggtgcacgagggcaccctggtgcacgccgtgagcgtgctggccctgtggtgcaacagattcaccatggaggtgcccaagaagctgaccgagtggttcaagaaggccttcagcctgaagaccagcaccagcgccgtgagacacgcctacctgcagtgcatgctggccagctacagaggcgacaccctgctgcaggccctggacctgctgcccctgctgatccagaccgtggagaaggccgccagccagagcacccaggtgcccaccatcaccgagggcgtggccgccgccctgctgctgctgaagctgagcgtggccgacagccaggccgaggccaagctgagcagcttctggcagctgatcgtggacgagaagaagcaggtgttcaccagcgagaagttcctggtgatggccagcgaggacgccctgtgcaccgtgctgcacctgaccgagagactgttcctggaccacccccacagactgaccggcaacaaggtgcagcagtaccacagagccctggtggccgtgctgctgagcagaacctggcacgtgagaagacaggcccagcagaccgtgagaaagctgctgagcagcctgggcggcttcaagctggcccacggcctgctggaggagctgaagaccgtgctgagcagccacaaggtgctgcccctggaggccctggtgaccgacgccggcgaggtgaccgaggccggcaaggcctacgtgccccccagagtgctgcaggaggccctgtgcgtgatcagcggcgtgcccggcctgaagggcgacgtgaccgacaccgagcagctggcccaggagatgctgatcatcagccaccaccccagcctggtggccgtgcagagcggcctgtggcccgccctgctggccagaatgaagatcgaccccgaggccttcatcaccagacacctggaccagatcatccccagaatgaccacccagagccccctgaaccagagcagcatgaacgccatgggcagcctgagcgtgctgagccccgacagagtgctgccccagctgatcagcaccatcaccgccagcgtgcagaaccccgccctgagactggtgaccagagaggagttcgccatcatgcagacccccgccggcgagctgtacgacaagagcatcatccagagcgcccagcaggacagcatcaagaaggccaacatgaagagagagaacaaggcctacagcttcaaggagcagatcatcgagctggagctgaaggaggagatcaagaagaagaagggcatcaaggaggaggtgcagctgaccagcaagcagaaggagatgctgcaggcccagctggacagagaggcccaggtgagaagaagactgcaggagctggacggcgagctggaggccgccctgggcctgctggacatcatcctggccaagaaccccagcggcctgacccagtacatccccgtgctggtggacagcttcctgcccctgctgaagagccccctggccgcccccagaatcaagaaccccttcctgagcctggccgcctgcgtgatgcccagcagactgaaggccctgggcaccctggtgagccacgtgaccctgagactgctgaagcccgagtgcgtgctggacaagagctggtgccaggaggagctgagcgtggccgtgaagagagccgtgatgctgctgcacacccacaccatcaccagcagagtgggcaagggcgagcccggcgccgcccccctgagcgcccccgccttcagcctggtgttccccttcctgaagatggtgctgaccgagatgccccaccacagcgaggaggaggaggagtggatggcccagatcctgcagatcctgaccgtgcaggcccagctgagagccagccccaacaccccccccggcagagtggacgagaacggccccgagctgctgcccagagtggccatgctgagactgctgacctgggtgatcggcaccggcagccccagactgcaggtgctggccagcgacaccctgaccaccctgtgcgccagcagcagcggcgacgacggctgcgccttcgccgagcaggaggaggtggacgtgctgctgtgcgccctgcagagcccctgcgccagcgtgagagagaccgtgctgagaggcctgatggagctgcacatggtgctgcccgcccccgacaccgacgagaagaacggcctgaacctgctgagaagactgtgggtggtgaagttcgacaaggaggaggagatcagaaagctggccgagagactgtggagcatgatgggcctggacctgcagcccgacctgtgcagcctgctgatcgacgacgtgatctaccacgaggccgccgtgagacaggccggcgccgaggccctgagccaggccgtggccagataccagagacaggccgccgaggtgatgggcagactgatggagatctaccaggagaagctgtacagacccccccccgtgctggacgccctgggcagagtgatcagcgagagcccccccgaccagtgggaggccagatgcggcctggccctggccctgaacaagctgagccagtacctggacagcagccaggtgaagcccctgttccagttcttcgtgcccgacgccctgaacgacagacaccccgacgtgagaaagtgcatgctggacgccgccctggccaccctgaacacccacggcaaggagaacgtgaacagcctgctgcccgtgttcgaggagttcctgaagaacgcccccaacgacgccagctacgacgccgtgagacagagcgtggtggtgctgatgggcagcctggccaagcacctggacaagagcgaccccaaggtgaagcccatcgtggccaagctgatcgccgccctgagcacccccagccagcaggtgcaggagagcgtggccagctgcctgccccccctggtgcccgccatcaaggaggacgccggcggcatgatccagagactgatgcagcagctgctggagagcgacaagtacgccgagagaaagggcgccgcctacggcctggccggcctggtgaagggcctgggcatcctgagcctgaagcagcaggagatgatggccgccctgaccgacgccatccaggacaagaagaacttcagaagaagagagggcgccctgttcgccttcgagatgctgtgcaccatgctgggcaagctgttcgagccctacgtggtgcacgtgctgccccacctgctgctgtgcttcggcgacggcaaccagtacgtgagagaggccgccgacgactgcgccaaggccgtgatgagcaacctgagcgcccacggcgtgaagctggtgctgcccagcctgctggccgccctggaggaggagagctggagaaccaaggccggcagcgtggagctgctgggcgccatggcctactgcgcccccaagcagctgagcagctgcctgcccaacatcgtgcccaagctgaccgaggtgctgaccgacagccacgtgaaggtgcagaaggccggccagcaggccctgagacagatcggcagcgtgatcagaaaccccgagatcctggccatcgcccccgtgctgctggacgccctgaccgaccccagcagaaagacccagaagtgcctgcagaccctgctggacaccaagttcgtgcacttcatcgacgcccccagcctggccctgatcatgcccatcgtgcagagagccttccaggacagaagcaccgacaccagaaagatggccgcccagatcatcggcaacatgtacagcctgaccgaccagaaggacctggccccctacctgcccagcgtgacccccggcctgaaggccagcctgctggaccccgtgcccgaggtgagaaccgtgagcgccaaggccctgggcgccatggtgaagggcatgggcgagagctgcttcgaggacctgctgccctggctgatggagaccctgacctacgagcagagcagcgtggacagaagcggcgccgcccagggcctggccgaggtgatggccggcctgggcgtggagaagctggagaagctgatgcccgagatcgtggccaccgccagcaaggtggacatcgccccccacgtgagagacggctacatcatgatgttcaactacctgcccatcaccttcggcgacaagttcaccccctacgtgggccccatcatcccctgcatcctgaaggccctggccgacgagaacgagttcgtgagagacaccgccctgagagccggccagagagtgatcagcatgtacgccgagaccgccatcgccctgctgctgccccagctggagcagggcctgttcgacgacctgtggagaatcagattcagcagcgtgcagctgctgggcgacctgctgttccacatcagcggcgtgaccggcaagatgaccaccgagaccgccagcgaggacgacaacttcggcaccgcccagagcaacaaggccatcatcaccgccctgggcgtggagagaagaaacagagtgctggccggcctgtacatgggcagaagcgacacccagctggtggtgagacaggccagcctgcacgtgtggaagatcgtggtgagcaacacccccagaaccctgagagagatcctgcccaccctgttcggcctgctgctgggcttcctggccagcacctgcgccgacaagagaaccatcgccgccagaaccctgggcgacctggtgagaaagctgggcgagaagatcctgcccgagatcatccccatcctggaggagggcctgagaagccagaagagcgacgagagacagggcgtgtgcatcggcctgagcgagatcatgaagagcaccagcagagacgccgtgctgtacttcagcgagagcctggtgcccaccgccagaaaggccctgtgcgaccccctggaggaggtgagagaggccgccgccaagaccttcgagcagctgcacagcaccatcggccaccaggccctggaggacatcctgcccttcctgctgaagcagctggacgacgaggaggtgagcgagttcgccctggacggcctgaagcaggtgatggccatcaagagcagagtggtgctgccctacctggtgcccaagctgaccaccccccccgtgaacaccagagtgctggccttcctgagcagcgtggccggcgacgccctgaccagacacctgggcgtgatcctgcccgccgtgatgctggccctgaaggagaagctgggcacccccgacgagcagctggagatggccaactgccaggccgtgatcctgagcgtggaggacgacaccggccacagaatcatcatcgagtacctgctggaggccaccagaagccccgaggtgggcatgagacaggccgccgccatcatcctgaacatctactgcagcagaagcaaggccgactacaccagccacctgagaagcctggtgagcggcctgatcagactgttcaacgacagcagccccgtggtgctggaggagagctgggacgccctgaacgccatcaccaagaagctggacgccggcaaccagctggccctgatcgaggagctgcacaaggagatcagactgatcggcaacgagagcaagggcgagcacgtgcccggcttctgcctgcccaagaagggcgtgaccagcatcctgcccgtgctgagagagggcgtgctgaccggcagccccgagcagaaggaggaggccgccaaggccctgggcctggtgatcagactgaccagcgccgacgccctgagacccagcgtggtgagcatcaccggccccctgatcagaatcctgggcgacagattcagctggaacgtgaaggccgccctgctggagaccctgagcctgctgctggccaaggtgggcatcgccctgaagcccttcctgccccagctgcagaccaccttcaccaaggccctgcaggacagcaacagaggcgtgagactgaaggccgccgacgccctgggcaagctgatcagcatccacatcaaggtggaccccctgttcaccgagctgctgaacggcatcagagccatggaggaccccggcgtgagagacaccatgctgcaggccctgagattcgtgatccagggcgccggcgccaaggtggacgccgtgatcagaaagaacatcgtgagcctgctgctgagcatgctgggccacgacgaggacaacaccagaatcagcagcgccggctgcctgggcgagctgtgcgccttcctgaccgaggaggagctgagcgccgtgctgcagcagtgcctgctggccgacgtgagcggcatcgactggatggtgagacacggcagaagcctggccctgagcgtggccgtgaacgtggcccccggcagactgtgcgccggcagatacagcagcgacgtgcaggagatgatcctgagcagcgccaccgccgacagaatccccatcgccgtgagcggcgtgagaggcatgggcttcctgatgagacaccacatcgagaccggcggcggccagctgcccgccaagctgagcagcctgttcgtgaagtgcctgcagaaccccagcagcgacatcagactggtggccgagaagatgatctggtgggccaacaaggaccccctgccccccctggacccccaggccatcaagcccatcctgaaggccctgctggacaacaccaaggacaagaacaccgtggtgagagcctacagcgaccaggccatcgtgaacctgctgaagatgagacagggcgaggaggtgttccagagcctgagcaagatcctggacgtggccagcctggaggtgctgaacgaggtgaacagaagaagcctgaagaagctggccagccaggccgacagcaccgagcaggtggacgacaccatcctgacctag

SEQ ID NO: 82814 - DNA, 1443 bp, synthetic construct
  misc_feature 1..1443: note = Description of Artificial Sequence: Synthetic coding sequence
  source 1..1443: mol_type = other DNA
atggcccagcacgacttcgcccccgcctggctgaacttccccaccccccccagcagcaccaaggtgctgaccagcagcctgaagagcagcctgaacttcgagaagcacagcgagaacttcgcctggaccgagaacagatacgacgtgaacagaagaagacacaacagcagcgacggcttcgacagcgccatcggcagacccaacggcggcaacttcggcagaaaggagaagaacggctggagaacccacggcagaaacggcaccgagaacatcaaccacagaggcggctaccacggcggcagcagcagaagcagaagcagcatcttccacgccggcaagagccagggcctgcacgagaacaacatccccgacaacgagaccggcagaaaggaggacaagagagagagaaagcagttcgaggccgaggacttccccagcctgaaccccgagtacgagagagagcccaaccacaacaagagcctggccgccggcgtgtgggagtacccccccaaccccaagagcagagcccccagaatgctggtgatcaagaagggcaacaccaaggacctgcagctgagcggcttccccgtggtgggcaacctgcccagccagcccgtgaagaacggcaccggccccagcgtgtacaagggcctggtgcccaagcccgccgccccccccaccaagcccacccagtggaagagccagaccaaggagaacaaggtgggcaccagcttcccccacgagagcaccttcggcgtgggcaacttcaacgccttcaagagcaccgccaagaacttcagccccagcaccaacagcgtgaaggagtgcaacagaagcaacagcagcagccccgtggacaagctgaaccagcagcccagactgaccaagctgaccagaatgagaaccgacaagaagagcgagttcctgaaggccctgaagagagacagagtggaggaggagcacgaggacgagagcagagccggcagcgagaaggacgacgacagcttcaacctgcacaacagcaacagcacccaccaggagagagacatcaacagaaacttcgacgagaacgagatcccccaggagaacggcaacgccagcgtgatcagccagcagatcatcagaagcagcaccttcccccagaccgacgtgctgagcagcagcctggaggccgagcacagactgctgaaggagatgggctggcaggaggacagcgagaacgacgagacctgcgcccccctgaccgaggacgagatgagagagttccaggtgatcagcgagcagctgcagaagaacggcctgagaaagaacggcatcctgaagaacggcctgatctgcgacttcaagttcggcccctggaagaacagcaccttcaagcccaccaccgagaacgacgacaccgagaccagcagcagcgacaccagcgacgacgacgacgtgtag

SEQ ID NO: 82815 - DNA, 1482 bp, synthetic construct
  misc_feature 1..1482: note = Description of Artificial Sequence: Synthetic coding sequence
  source 1..1482: mol_type = other DNA
atggcccagcacgacttcgcccccgcctggctgaacttccccaccccccccagcagcaccaagagcagcctgaacttcgagaagcacagcgagaacttcgcctggaccgagaacagatacgacgtgaacagaagaagacacaacagcagcgacggcttcgacagcgccatcggcagacccaacggcggcaacttcggcagaaaggagaagaacggctggagaacccacggcagaaacggcaccgagaacatcaaccacagaggcggctaccacggcggcagcagcagaagcagaagcagcatcttccacgccggcaagagccagggcctgcacgagaacaacatccccgacaacgagaccggcagaaaggaggacaagagagagagaaagcagttcgaggccgaggacttccccagcctgaaccccgagtacgagagagagcccaaccacaacaagagcctggccgccggcgtgtggggcctgcacgcccagacccacacctaccccaccaagaagatcagccaggcccccctgctggagtacccccccaaccccaagagcagagcccccagaatgctggtgatcaagaagggcaacaccaaggacctgcagctgagcggcttccccgtggtgggcaacctgcccagccagcccgtgaagaacggcaccggccccagcgtgtacaagggcctggtgcccaagcccgccgccccccccaccaagcccacccagtggaagagccagaccaaggagaacaaggtgggcaccagcttcccccacgagagcaccttcggcgtgggcaacttcaacgccttcaagagcaccgccaagaacttcagccccagcaccaacagcgtgaaggagtgcaacagaagcaacagcagcagccccgtggacaagctgaaccagcagcccagactgaccaagctgaccagaatgagaaccgacaagaagagcgagttcctgaaggccctgaagagagacagagtggaggaggagcacgaggacgagagcagagccggcagcgagaaggacgacgacagcttcaacctgcacaacagcaacagcacccaccaggagagagacatcaacagaaacttcgacgagaacgagatcccccaggagaacggcaacgccagcgtgatcagccagcagatcatcagaagcagcaccttcccccagaccgacgtgctgagcagcagcctggaggccgagcacagactgctgaaggagatgggctggcaggaggacagcgagaacgacgagacctgcgcccccctgaccgaggacgagatgagagagttccaggtgatcagcgagcagctgcagaagaacggcctgagaaagaacggcatcctgaagaacggcctgatctgcgacttcaagttcggcccctggaagaacagcaccttcaagcccaccaccgagaacgacgacaccgagaccagcagcagcgacaccagcgacgacgacgacgtgtag

SEQ ID NO: 82816 - DNA, 1482 bp, synthetic construct; identical to SEQ ID NO: 82815
  misc_feature 1..1482: note = Description of Artificial Sequence: Synthetic coding sequence
  source 1..1482: mol_type = other DNA

SEQ ID NO: 82817 - DNA, 1422 bp, synthetic construct
  misc_feature 1..1422: note = Description of Artificial Sequence: Synthetic coding sequence
  source 1..1422: mol_type = other DNA
atggcccagcacgacttcgcccccgcctggctgaacttccccaccccccccagcagcaccaagagcagcctgaacttcgagaagcacagcgagaacttcgcctggaccgagaacagatacgacgtgaacagaagaagacacaacagcagcgacggcttcgacagcgccatcggcagacccaacggcggcaacttcggcagaaaggagaagaacggctggagaacccacggcagaaacggcaccgagaacatcaaccacagaggcggctaccacggcggcagcagcagaagcagaagcagcatcttccacgccggcaagagccagggcctgcacgagaacaacatccccgacaacgagaccggcagaaaggaggacaagagagagagaaagcagttcgaggccgaggacttccccagcctgaaccccgagtacgagagagagcccaaccacaacaagagcctggccgccggcgtgtgggagtacccccccaaccccaagagcagagcccccagaatgctggtgatcaagaagggcaacaccaaggacctgcagctgagcggcttccccgtggtgggcaacctgcccagccagcccgtgaagaacggcaccggccccagcgtgtacaagggcctggtgcccaagcccgccgccccccccaccaagcccacccagtggaagagccagaccaaggagaacaaggtgggcaccagcttcccccacgagagcaccttcggcgtgggcaacttcaacgccttcaagagcaccgccaagaacttcagccccagcaccaacagcgtgaaggagtgcaacagaagcaacagcagcagccccgtggacaagctgaaccagcagcccagactgaccaagctgaccagaatgagaaccgacaagaagagcgagttcctgaaggccctgaagagagacagagtggaggaggagcacgaggacgagagcagagccggcagcgagaaggacgacgacagcttcaacctgcacaacagcaacagcacccaccaggagagagacatcaacagaaacttcgacgagaacgagatcccccaggagaacggcaacgccagcgtgatcagccagcagatcatcagaagcagcaccttcccccagaccgacgtgctgagcagcagcctggaggccgagcacagactgctgaaggagatgggctggcaggaggacagcgagaacgacgagacctgcgcccccctgaccgaggacgagatgagagagttccaggtgatcagcgagcagctgcagaagaacggcctgagaaagaacggcatcctgaagaacggcctgatctgcgacttcaagttcggcccctggaagaacagcaccttcaagcccaccaccgagaacgacgacaccgagaccagcagcagcgacaccagcgacgacgacgacgtgtag

SEQ ID NO: 82818 - DNA, 1398 bp, synthetic construct
  misc_feature 1..1398: note = Description of Artificial Sequence: Synthetic coding sequence
  source 1..1398: mol_type = other DNA
atggcccagcacgacttcgcccccgcctggctgaacttccccaccccccccagcagcaccaaggtgctgaccagcagcctgaagagcagcctgaacttcgagaagcacagcgagaacttcgcctggaccgagaacagatacgacgtgaacagaagaagacacaacagcagcgacggcttcgacagcgccatcggcagacccaacggcggcaacttcggcagaaaggagaagaacggctggagaacccacggcagaaacggcaccgagaacatcaaccacagaggcggctaccacggcggcagcagcagaagcagaagcagcatcttccacgccggcaagagccagggcctgcacgagaacaacatccccgacaacgagaccggcagaaaggaggacaagagagagagaaagcagttcgaggccgaggacttccccagcctgaaccccgagtacgagagagagcccaaccacaacaagagcctggccgccggcgtgtgggagtacccccccaaccccaagagcagagcccccagaatgctggtgatcaagaagggcaacaccaaggacctgcagctgagcggcttccccgtggtgggcaacctgcccagccagcccgtgaagaacggcaccggccccagcgtgtacaagggcctggtgcccaagcccgccgccccccccaccaagcccacccagtggaagagccagaccaaggagaacaaggtgggcaccagcttcccccacgagagcaccttcggcgtgggcaacttcaacgccttcaagagcaccgccaagaacttcagccccagcaccaacagcgtgaaggagcagcccagactgaccaagctgaccagaatgagaaccgacaagaagagcgagttcctgaaggccctgaagagagacagagtggaggaggagcacgaggacgagagcagagccggcagcgagaaggacgacgacagcttcaacctgcacaacagcaacagcacccaccaggagagagacatcaacagaaacttcgacgagaacgagatcccccaggagaacggcaacgccagcgtgatcagccagcagatcatcagaagcagcaccttcccccagaccgacgtgctgagcagcagcctggaggccgagcacagactgctgaaggagatgggctggcaggaggacagcgagaacgacgagacctgcgcccccctgaccgaggacgagatgagagagttccaggtgatcagcgagcagctgcagaagaacggcctgagaaagaacggcatcctgaagaacggcctgatctgcgacttcaagttcggcccctggaagaacagcaccttcaagcccaccaccgagaacgacgacaccgagaccagcagcagcgacaccagcgacgacgacgacgtgtag

SEQ ID NO: 82819 - DNA, 909 bp, synthetic construct
  misc_feature 1..909: note = Description of Artificial Sequence: Synthetic coding sequence
  source 1..909: mol_type = other DNA
atgctggtgatcaagaagggcaacaccaaggacctgcagctgagcggcttccccgtggtgggcaacctgcccagccagcccgtgaagaacggcaccggccccagcgtgtacaagggcctggtgcccaagcccgccgccccccccaccaagcccacccagtggaagagccagaccaaggagaacaaggtgggcaccagcttcccccacgagagcaccttcggcgtgggcaacttcaacgccttcaagagcaccgccaagaacttcagccccagcaccaacagcgtgaaggagtgcaacagaagcaacagcagcagccccgtggacaagctgaaccagcagcccagactgaccaagctgaccagaatgagaaccgacaagaagagcgagttcctgaaggccctgaagagagacagagtggaggaggagcacgaggacgagagcagagccggcagcgagaaggacgacgacagcttcaacctgcacaacagcaacagcacccaccaggagagagacatcaacagaaacttcgacgagaacgagatcccccaggagaacggcaacgccagcgtgatcagccagcagatcatcagaagcagcaccttcccccagaccgacgtgctgagcagcagcctggaggccgagcacagactgctgaaggagatgggctggcaggaggacagcgagaacgacgagacctgcgcccccctgaccgaggacgagatgagagagttccaggtgatcagcgagcagctgcagaagaacggcctgagaaagaacggcatcctgaagaacggcctgatctgcgacttcaagttcggcccctggaagaacagcaccttcaagcccaccaccgagaacgacgacaccgagaccagcagcagcgacaccagcgacgacgacgacgtgtag

SEQ ID NO: 82820 - DNA, 1443 bp, synthetic construct
  misc_feature 1..1443: note = Description of Artificial Sequence: Synthetic coding sequence
  source 1..1443: mol_type = other DNA
atggcccagcacgacttcgcccccgcctggctgaacttccccaccccccccagcagcaccaaggtgctgagcaacaccctgaagagcagcctgaacttcgagaagcacagcgagaacttcgcctggaccgagaacagatacgacgtgaacagaagaagacacaacagcagcgacggcttcgacagcgccatcggcagacccaacggcggcaacttcggcagaaaggagaagaacggctggagaacccacggcagaaacggcaccgagaacatcaaccacagaggcggctaccacggcggcagcagcagaagcagaagcagcatcttccacgccggcaagagccagggcctgcacgagaacaacatccccgacaacgagaccggcagaaaggaggacaagagagagagaaagcagttcgaggccgaggacttccccagcctgaaccccgagtacgagagagagcccaaccacaacaagagcctggccgccggcgtgtgggagtacccccccaaccccaagagcagagcccccagaatgctggtgatcaagaagggcaacaccaaggacctgcagctgagcggcttccccgtggtgggcaacctgcccagccagcccgtgaagaacggcaccggccccagcgtgtacaagggcctggtgcccaagcccgccgccccccccaccaagcccacccagtggaagagccagaccaaggagaacaaggtgggcaccagcttcccccacgagagcaccttcggcgtgggcaacttcaacgccttcaagagcaccgccaagaacttcagccccagcaccaacagcgtgaaggagtgcaacagaagcaacagcagcagccccgtggacaagctgaaccagcagcccagactgaccaagctgaccagaatgagaaccgacaagaagagcgagttcctgaaggccctgaagagagacagagtggaggaggagcacgaggacgagagcagagccggcagcgagaaggacgacgacagcttcaacctgcacaacagcaacagcacccaccaggagagagacatcaacagaaacttcgacgagaacgagatcccccaggagaacggcaacgccagcgtgatcagccagcagatcatcagaagcagcaccttcccccagaccgacgtgctgagcagcagcctggaggccgagcacagactgctgaaggagatgggctggcaggaggacagcgagaacgacgagacctgcgcccccctgaccgaggacgagatgagagagttccaggtgatcagcgagcagctgcagaagaacggcctgagaaagaacggcatcctgaagaacggcctgatctgcgacttcaagttcggcccctggaagaacagcaccttcaagcccaccaccgagaacgacgacaccgagaccagcagcagcgacaccagcgacgacgacgacgtgtag

SEQ ID NO: 82821 - DNA, 1383 bp, synthetic construct
  misc_feature 1..1383: note = Description of Artificial Sequence: Synthetic coding sequence
  source 1..1383: mol_type = other DNA
atgttcctggccaccctgtacttcgccctgcccctgctggacctgctgctgagcgccgaggtgagcggcggcgacagactggactgcgtgaaggccagcgaccagtgcctgaaggagcagagctgcagcaccaagtacagaaccctgagacagtgcgtggccggcaaggagaccaacttcagcctggccagcggcctggaggccaaggacgagtgcagaagcgccatggaggccctgaagcagaagagcctgtacaactgcagatgcaagagaggcatgaagaaggagaagaactgcctgagaatctactggagcatgtaccagagcctgcagggcaacgacctgctggaggacagcccctacgagcccgtgaacagcagactgagcgacatcttcagagtggtgcccttcatcagcgtggagcacatccccaagggcaacaactgcctggacgccgccaaggcctgcaacctggacgacatctgcaagaagtacagaagcgcctacatcaccccctgcaccaccagcgtgagcaacgacgtgtgcaacagaagaaagtgccacaaggccctgagacagttcttcgacaaggtgcccgccaagcacagctacggcatgctgttctgcagctgcagagacatcgcctgcaccgagagaagaagacagaccatcgtgcccgtgtgcagctacgaggagagagagaagcccaactgcctgaacctgcaggacagctgcaagaccaactacatctgcagaagcagactggccgacttcttcaccaactgccagcccgagagcagaagcgtgagcagctgcctgaaggagaactacgccgactgcctgctggcctacagcggcctgatcggcaccgtgatgacccccaactacatcgacagcagcagcctgagcgtggccccctggtgcgactgcagcaacagcggcaacgacctggaggagtgcctgaagttcctgaacttcttcaaggacaacacctgcctgaagaacgccatccaggccttcggcaacggcagcgacgtgaccgtgtggcagcccgccttccccgtgcagaccaccaccgccaccaccaccaccgccctgagagtgaagaacaagcccctgggccccgccggcagcgagaacgagatccccacccacgtgctgcccccctgcgccaacctgcaggcccagaagctgaagagcaacgtgagcggcaacacccacctgtgcatcagcaacggcaactacgagaaggagggcctgggcgccagcagccacatcaccaccaagagcatggccgccccccccagctgcggcctgagccccctgctggtgctggtggtgaccgccctgagcaccctgctgagcctgaccgagaccagctag

SEQ ID NO: 82822 - DNA, 1383 bp, synthetic construct; identical to SEQ ID NO: 82821
  misc_feature 1..1383: note = Description of Artificial Sequence: Synthetic coding sequence
  source 1..1383: mol_type = other DNA

SEQ ID NO: 82823 - DNA, 1383 bp, synthetic construct; identical to SEQ ID NO: 82821
  misc_feature 1..1383: note = Description of Artificial Sequence: Synthetic coding sequence
  source 1..1383: mol_type = other DNA

SEQ ID NO: 82824 - DNA, 1398 bp, synthetic construct
  misc_feature 1..1398: note = Description of Artificial Sequence: Synthetic coding sequence
  source 1..1398: mol_type = other DNA
atgttcctggccaccctgtacttcgccctgcccctgctggacctgctgctgagcgccgaggtgagcggcggcgacagactggactgcgtgaaggccagcgaccagtgcctgaaggagcagagctgcagcaccaagtacagaaccctgagacagtgcgtggccggcaaggagaccaacttcagcctggccagcggcctggaggccaaggacgagtgcagaagcgccatggaggccctgaagcagaagagcctgtacaactgcagatgcaagagaggcatgaagaaggagaagaactgcctgagaatctactggagcatgtaccagagcctgcagggcaacgacctgctggaggacagcccctacgagcccgtgaacagcagactgagcgacatcttcagagtggtgcccttcatcagcgacgtgttccagcaggtggagcacatccccaagggcaacaactgcctggacgccgccaaggcctgcaacctggacgacatctgcaagaagtacagaagcgcctacatcaccccctgcaccaccagcgtgagcaacgacgtgtgcaacagaagaaagtgccacaaggccctgagacagttcttcgacaaggtgcccgccaagcacagctacggcatgctgttctgcagctgcagagacatcgcctgcaccgagagaagaagacagaccatcgtgcccgtgtgcagctacgaggagagagagaagcccaactgcctgaacctgcaggacagctgcaagaccaactacatctgcagaagcagactggccgacttcttcaccaactgccagcccgagagcagaagcgtgagcagctgcctgaaggagaactacgccgactgcctgctggcctacagcggcctgatcggcaccgtgatgacccccaactacatcgacagcagcagcctgagcgtggccccctggtgcgactgcagcaacagcggcaacgacctggaggagtgcctgaagttcctgaacttcttcaaggacaacacctgcctgaagaacgccatccaggccttcggcaacggcagcgacgtgaccgtgtggcagcccgccttccccgtgcagaccaccaccgccaccaccaccaccgccctgagagtgaagaacaagcccctgggccccgccggcagcgagaacgagatccccacccacgtgctgcccccctgcgccaacctgcaggcccagaagctgaagagcaacgtgagcggcaacacccacctgtgcatcagcaacggcaactacgagaaggagggcctgggcgccagcagccacatcaccaccaagagcatggccgccccccccagctgcggcctgagccccctgctggtgctggtggtgaccgccctgagcaccctgctgagcctgaccgagaccagctag

SEQ ID NO: 82825 - DNA, 1035 bp, synthetic construct
  misc_feature 1..1035: note = Description of Artificial Sequence: Synthetic coding sequence
  source 1..1035: mol_type = other DNA
atgcaggagggcaagttctggaagggcatggccgagaccggcatgtggggctgcggcgagtggatccccgtggagcacatccccaagggcaacaactgcctggacgccgccaaggcctgcaacctggacgacatctgcaagaagtacagaagcgcctacatcaccccctgcaccaccagcgtgagcaacgacgtgtgcaacagaagaaagtgccacaaggccctgagacagttcttcgacaaggtgcccgccaagcacagctacggcatgctgttctgcagctgcagagacatcgcctgcaccgagagaagaagacagaccatcgtgcccgtgtgcagctacgaggagagagagaagcccaactgcctgaacctgcaggacagctgcaagaccaactacatctgcagaagcagactggccgacttcttcaccaactgccagcccgagagcagaagcgtgagcagctgcctgaaggagaactacgccgactgcctgctggcctacagcggcctgatcggcaccgtgatgacccccaactacatcgacagcagcagcctgagcgtggccccctggtgcgactgcagcaacagcggcaacgacctggaggagtgcctgaagttcctgaacttcttcaaggacaacacctgcctgaagaacgccatccaggccttcggcaacggcagcgacgtgaccgtgtggcagcccgccttccccgtgcagaccaccaccgccaccaccaccaccgccctgagagtgaagaacaagcccctgggccccgccggcagcgagaacgagatccccacccacgtgctgcccccctgcgccaacctgcaggcccagaagctgaagagcaacgtgagcggcaacacccacctgtgcatcagcaacggcaactacgagaaggagggcctgggcgccagcagccacatcaccaccaagagcatggccgccccccccagctgcggcctgagccccctgctggtgctggtggtgaccgccctgagcaccctgctgagcctgaccgagaccagctag

SEQ ID NO: 82826 - DNA, 1080 bp, synthetic construct
  misc_feature 1..1080: note = Description of Artificial Sequence: Synthetic coding sequence
  source 1..1080: mol_type = other DNA
atgatcctggccaacgtgttctgcctgttcttcttcctgggcgaggagttctacgaggccagcccctacgagcccgtgaccagcagactgagcgacatcttcagactggccagcatcttcagcggcaccggcgccgaccccgtggtgagcgccaagagcaaccactgcctggacgccgccaaggcctgcaacctgaacgacaactgcaagaagctgagaagcagctacatcagcatctgcaacagagagatcagccccaccgagagatgcaacagaagaaagtgccacaaggccctgagacagttcttcgacagagtgcccagcgagtacacctacagaatgctgttctgcagctgccaggaccaggcctgcgccgagagaagaagacagaccatcctgcccagctgcagctacgaggacaaggagaagcccaactgcctggacctgagaggcgtgtgcagaaccgaccacctgtgcagaagcagactggccgacttccacgccaactgcagagccagctaccagaccgtgaccagctgccccgccgacaactaccaggcctgcctgggcagctacgccggcatgatcggcttcgacatgacccccaactacgtggacagcagccccaccggcatcgtggtgagcccctggtgcagctgcagaggcagcggcaacatggaggaggagtgcgagaagttcctgagagacttcaccgagaacccctgcctgagaaacgccatccaggccttcggcaacggcaccgacgtgaacgtgagccccaagggccccagcttccaggccacccaggcccccagagtggagaagacccccagcctgcccgacgacctgagcgacagcaccagcctgggcaccagcgtgatcaccacctgcaccagcgtgcaggagcagggcctgaaggccaacaacagcaaggagctgagcatgtgcttcaccgagctgaccaccaacatcatccccggcagcaacaaggtgatcaagcccaacagcggccccagcagagccagacccagcgccgccctgaccgtgctgagcgtgctgatgctgaagctggccctgtag

SEQ ID NO: 82827 - DNA, 1395 bp, synthetic construct
  misc_feature 1..1395: note = Description of Artificial Sequence: Synthetic coding sequence
  source 1..1395: mol_type = other DNA
atgatcctggccaacgtgttctgcctgttcttcttcctggacgagaccctgagaagcctggccagccccagcagcctgcagggccccgagctgcacggctggagaccccccgtggactgcgtgagagccaacgagctgtgcgccgccgagagcaactgcagcagcagatacagaaccctgagacagtgcctggccggcagagacagaaacaccatgctggccaacaaggagtgccaggccgccctggaggtgctgcaggagagccccctgtacgactgcagatgcaagagaggcatgaagaaggagctgcagtgcctgcagatctactggagcatccacctgggcctgaccgagggcgaggagttctacgaggccagcccctacgagcccgtgaccagcagactgagcgacatcttcagactggccagcatcttcagcggcaccggcgccgaccccgtggtgagcgccaagagcaaccactgcctggacgccgccaaggcctgcaacctgaacgacaactgcaagaagctgagaagcagctacatcagcatctgcaacagagagatcagccccaccgagagatgcaacagaagaaagtgccacaaggccctgagacagttcttcgacagagtgcccagcgagtacacctacagaatgctgttctgcagctgccaggaccaggcctgcgccgagagaagaagacagaccatcctgcccagctgcagctacgaggacaaggagaagcccaactgcctggacctgagaggcgtgtgcagaaccgaccacctgtgcagaagcagactggccgacttccacgccaactgcagagccagctaccagaccgtgaccagctgccccgccgacaactaccaggcctgcctgggcagctacgccggcatgatcggcttcgacatgacccccaactacgtggacagcagccccaccggcatcgtggtgagcccctggtgcagctgcagaggcagcggcaacatggaggaggagtgcgagaagttcctgagagacttcaccgagaacccctgcctgagaaacgccatccaggccttcggcaacggcaccgacgtgaacgtgagccccaagggccccagcttccaggccacccaggcccccagagtggagaagacccccagcctgcccgacgacctgagcgacagcaccagcctgggcaccagcgtgatcaccacctgcaccagcgtgcaggagcagggcctgaaggccaacaacagcaaggagctgagcatgtgcttcaccgagctgaccaccaacatcatccccggcagcaacaaggtgatcaagcccaacagcggccccagcagagccagacccagcgccgccctgaccgtgctgagcgtgctgatgctgaagctggccctgtag

SEQ ID NO: 82828 - DNA, 996 bp, synthetic construct
  misc_feature 1..996: note = Description of Artificial Sequence: Synthetic coding sequence
  source 1..996: mol_type = other DNA
atgatcctggccaacgtgttctgcctgttcttcttcctgggcaccggcgccgaccccgtggtgagcgccaagagcaaccactgcctggacgccgccaaggcctgcaacctgaacgacaactgcaagaagctgagaagcagctacatcagcatctgcaacagagagatcagccccaccgagagatgcaacagaagaaagtgccacaaggccctgagacagttcttcgacagagtgcccagcgagtacacctacagaatgctgttctgcagctgccaggaccaggcctgcgccgagagaagaagacagaccatcctgcccagctgcagctacgaggacaaggagaagcccaactgcctggacctgagaggcgtgtgcagaaccgaccacctgtgcagaagcagactggccgacttccacgccaactgcagagccagctaccagaccgtgaccagctgccccgccgacaactaccaggcctgcctgggcagctacgccggcatgatcggcttcgacatgacccccaactacgtggacagcagccccaccggcatcgtggtgagcccctggtgcagctgcagaggcagcggcaacatggaggaggagtgcgagaagttcctgagagacttcaccgagaacccctgcctgagaaacgccatccaggccttcggcaacggcaccgacgtgaacgtgagccccaagggccccagcttccaggccacccaggcccccagagtggagaagacccccagcctgcccgacgacctgagcgacagcaccagcctgggcaccagcgtgatcaccacctgcaccagcgtgcaggagcagggcctgaaggccaacaacagcaaggagctgagcatgtgcttcaccgagctgaccaccaacatcatccccggcagcaacaaggtgatcaagcccaacagcggccccagcagagccagacccagcgccgccctgaccgtgctgagcgtgctgatgctgaagctggccctgtag

SEQ ID NO: 82829 - DNA, 798 bp, synthetic construct
  misc_feature 1..798: note = Description of Artificial Sequence: Synthetic coding sequence
  source 1..798: mol_type = other DNA
atgatcctggccaacgtgttctgcctgttcttcttcctggacgagaccctgagaagcctggccagccccagcagcctgcagggccccgagctgcacggctggagaccccccgtggactgcgtgagagccaacgagctgtgcgccgccgagagcaactgcagcagcagatacagaaccctgagacagtgcctggccggcagagacagaaacaccatgctggccaacaaggagtgccaggccgccctggaggtgctgcaggagagccccctgtacgactgcagatgcaagagaggcatgaagaaggagctgcagtgcctgcagatctactggagcatccacctgggcctgaccgagggcgaggagttctacgaggccagcccctacgagcccgtgaccagcagactgagcgacatcttcagactggccagcatcttcagcggcaccggcgccgaccccgtggtgagcgccaagagcaaccactgcctggacgccgccaaggcctgcaacctgaacgacaactgcaagaagctgagaagcagctacatcagcatctgcaacagagagatcagccccaccgagagatgcaacagaagaaagtgccacaaggccctgagacagttcttcgacagagtgcccagcgagtacacctacagaatgctgttctgcagctgccaggaccaggcctgcgccgagagaagaagacagaccatcctgcccagctgcagctacgaggacaaggagaagcccaactgcctggacctgagaggcgtgtgcagaaccgaccacctgtgcagatag

SEQ ID NO: 82830 - DNA, 1395 bp, synthetic construct; identical to SEQ ID NO: 82827
  misc_feature 1..1395: note = Description of Artificial Sequence: Synthetic coding sequence
  source 1..1395: mol_type = other DNA

SEQ ID NO: 82831 - DNA, 1203 bp, synthetic construct
  misc_feature 1..1203: note = Description of Artificial Sequence: Synthetic coding sequence
  source 1..1203: mol_type = other DNA
atggtgagacccctgaaccccagacccctgccccccgtggtgctgatgctgctgctgctgctgccccccagccccctgcccctggccgccggcgaccccctgcccaccgagagcagactgatgaacagctgcctgcaggccagaagaaagtgccaggccgaccccacctgcagcgccgcctaccaccacctggacagctgcaccagcagcatcagcacccccctgcccagcgaggagcccagcgtgcccgccgactgcctggaggccgcccagcagctgagaaacagcagcctgatcggctgcatgtgccacagaagaatgaagaaccaggtggcctgcctggacatctactggaccgtgcacagagccagaagcctgggcaactacgagctggacgtgagcccctacgaggacaccgtgaccagcaagccctggaagatgaacctgagcaagctgaacatgctgaagcccgacagcgacctgtgcctgaagttcgccatgctgtgcaccctgaacgacaagtgcgacagactgagaaaggcctacggcgaggcctgcagcggcccccactgccagagacacgtgtgcctgagacagctgctgaccttcttcgagaaggccgccgagccccacgcccagggcctgctgctgtgcccctgcgcccccaacgacagaggctgcggcgagagaagaagaaacaccatcgcccccaactgcgccctgccccccgtggcccccaactgcctggagctgagaagactgtgcttcagcgaccccctgtgcagaagcagactggtggacttccagacccactgccaccccatggacatcctgggcacctgcgccaccgagcagagcagatgcctgagagcctacctgggcctgatcggcaccgccatgacccccaacttcgtgagcaacgtgaacaccagcgtggccctgagctgcacctgcagaggcagcggcaacctgcaggaggagtgcgagatgctggagggcttcttcagccacaacccctgcctgaccgaggccatcgccgccaagatgagattccacagccagctgttcagccaggactggccccaccccaccttcgccgtgatggcccaccagaacgagaaccccgccgtgagaccccagccctgggtgcccagcctgttcagctgcaccctgcccctgatcctgctgctgagcctgtggtag

SEQ ID NO: 82832 - DNA, 1110 bp, synthetic construct
  misc_feature 1..1110: note = Description of Artificial Sequence: Synthetic coding sequence
  source 1..1110: mol_type = other DNA
atggtgagacccctgaaccccagacccctgccccccgtggtgctgatgctgctgctgctgctgccccccagccccctgcccctggccgccggcgaccccctgcccaccgagagcagactgatgaacagctgcctgcaggccagaagaaagtgccaggccgaccccacctgcagcgccgcctaccaccacctggacagctgcaccagcagcatcagcacccccctgcccagcgaggagcccagcgtgcccgccgactgcctggaggccgcccagcagctgagaaacagcagcctgatcggctgcatgtgccacagaagaatgaagaaccaggtggcctgcctggacatctactggaccgtgcacagagccagaagcctggacagcgacctgtgcctgaagttcgccatgctgtgcaccctgaacgacaagtgcgacagactgagaaaggcctacggcgaggcctgcagcggcccccactgccagagacacgtgtgcctgagacagctgctgaccttcttcgagaaggccgccgagccccacgcccagggcctgctgctgtgcccctgcgcccccaacgacagaggctgcggcgagagaagaagaaacaccatcgcccccaactgcgccctgccccccgtggcccccaactgcctggagctgagaagactgtgcttcagcgaccccctgtgcagaagcagactggtggacttccagacccactgccaccccatggacatcctgggcacctgcgccaccgagcagagcagatgcctgagagcctacctgggcctgatcggcaccgccatgacccccaacttcgtgagcaacgtgaacaccagcgtggccctgagctgcacctgcagaggcagcggcaacctgcaggaggagtgcgagatgctggagggcttcttcagccacaacccctgcctgaccgaggccatcgccgccaagatgagattccacagccagctgttcagccaggactggccccaccccaccttcgccgtgatggcccaccagaacgagaaccccgccgtgagaccccagccctgggtgcccagcctgttcagctgcaccctgcccctgatcctgctgctgagcctgtggtag

SEQ ID NO: 82833 - DNA, 2136 bp, synthetic construct
  misc_feature 1..2136: note = Description of Artificial Sequence: Synthetic coding sequence
  source 1..2136: mol_type = other DNA
atggagagcggcgccgtgctgctggagagcaagagcagccccttcaacctgctgcacgagatgcacgagctgagactgctgggccacctgtgcgacgtgaccgtgagcgtggagtaccagggcgtgagaaaggacttcatggcccacaaggccgtgctggccgccaccagcaagttcttcaaggaggtgttcctgaacgagaagagcgtggacggcaccagaaccaacgtgtacctgaacgaggtgcaggtggccgacttcgccagcttcctggagttcgtgtacaccgccaaggtgcaggtggaggaggacagagtgcagagaatgctggaggtggccgagaagctgaagtgcctggacctgagcgagacctgcttccagctgaagaagcagatgctggagagcgtgctgctggagctgcagaacttcagcgagagccaggaggtggaggtgagcagcggcagccaggtgagcgccgcccccgcccccagagccagcgtggccaccgacggcccccaccccagcggcctgaccgacagcctggactaccccggcgagagagccagcaacggcatgagcagcgacctgccccccaagaagagcaaggacaagctggacaagaagaaggaggtggtgaagcccccctaccccaagatcagaagagccagcggcagactggccggcagaaaggtgttcgtggagatccccaagaagaagtacaccagaagactgagagagcagcagaagaccgccgagggcgacgtgggcgactacagatgcccccaggaccagagccccgacagagtgggcaccgagatggagcaggtgagcaagaacgagggctgccaggccggcgccgagctggaggagctgagcaagaaggccggccccgaggaggaggaggaggaggaggaggaggacgaggagggcgagaagaagaagagcaacttcaagtgcagcatctgcgagaaggccttcctgtacgagaagagcttcctgaagcacagcaagcacagacacggcgtggccaccgaggtggtgtacagatgcgacacctgcggccagaccttcgccaacagatgcaacctgaagagccaccagagacacgtgcacagcagcgagagacacttcccctgcgagctgtgcggcaagaagttcaagagaaagaaggacgtgaagagacacgtgctgcaggtgcacgagggcggcggcgagagacacagatgcggccagtgcggcaagggcctgagcagcaagaccgccctgagactgcacgagagaacccacaccggcgacagaccctacggctgcaccgagtgcggcgccagattcagccagcccagcgccctgaagacccacatgagaatccacaccggcgagaagcccttcgtgtgcgacgagtgcggcgccagattcacccagaaccacatgctgatctaccacaagagatgccacaccggcgagagacccttcatgtgcgagacctgcggcaagagcttcgccagcaaggagtacctgaagcaccacaacagaatccacaccggcagcaagcccttcaagtgcgaggtgtgcttcagaaccttcgcccagagaaacagcctgtaccagcacatcaaggtgcacaccggcgagagaccctactgctgcgaccagtgcggcaagcagttcacccagctgaacgccctgcagagacacagaagaatccacaccggcgagagacccttcatgtgcaacgcctgcggcagaaccttcaccgacaagagcaccctgagaagacacaccagcatccacgacaagaacaccccctggaagagcttcctggtgatcgtggacggcagccccaagaacgacgacggccacaagaccgagcagcccgacgaggagtacgtgagcagcaagctgagcgacaagctgctgagcttcgccgagaacggccacttccacaacctggccgccgtgcaggacaccgtgcccaccatgcaggagaacagcagcgccgacaccgcctgcaaggccgacgacagcgtggtgagccaggacaccctgctggccaccaccatcagcgagctgagcgagctgaccccccagaccgacagcatgcccacccagctgcacagcctgagcaacatggagtag

SEQ ID NO: 82834 - DNA, 2136 bp, synthetic construct; identical to SEQ ID NO: 82833
  misc_feature 1..2136: note = Description of Artificial Sequence: Synthetic coding sequence
  source 1..2136: mol_type = other DNA

SEQ ID NO: 82835 - DNA, 147 bp, synthetic construct
  misc_feature 1..147: note = Description of Artificial Sequence: Synthetic coding sequence
  source 1..147: mol_type = other DNA
atggagagcggcgccgtgctgctggagagcaagagcagccccttcaacctgctgcacgagatgcacgagctgagactgctgggccacctgtgcgacgtgaccgtgagcgtggagtaccagggcgtgagaaaggacttcatggcctag

SEQ ID NO: 82836 - DNA, 663 bp, synthetic construct
  misc_feature 1..663: note = Description of Artificial Sequence: Synthetic coding sequence
  source 1..663: mol_type = other DNA
atgtgcgagacctgcggcaagagcttcgccagcaaggagtacctgaagcaccacaacagaatccacaccggcagcaagcccttcaagtgcgaggtgtgcttcagaaccttcgcccagagaaacagcctgtaccagcacatcaaggtgcacaccggcgagagaccctactgctgcgaccagtgcggcaagcagttcacccagctgaacgccctgcagagacacagaagaatccacaccggcgagagacccttcatgtgcaacgcctgcggcagaaccttcaccgacaagagcaccctgagaagacacaccagcatccacgacaagaacaccccctggaagagcttcctggtgatcgtggacggcagccccaagaacgacgacggccacaagaccgagcagcccgacgaggagtacgtgagcagcaagctgagcgacaagctgctgagcttcgccgagaacggccacttccacaacctggccgccgtgcaggacaccgtgcccaccatgcaggagaacagcagcgccgacaccgcctgcaaggccgacgacagcgtggtgagccaggacaccctgctggccaccaccatcagcgagctgagcgagctgaccccccagaccgacagcatgcccacccagctgcacagcctgagcaacatggagtag

SEQ ID NO: 82837 - DNA, 708 bp, synthetic construct
  misc_feature 1..708: note = Description of Artificial Sequence: Synthetic coding sequence
  source 1..708: mol_type = other DNA
atgctgatctaccacaagagatgccacaccggcgagagacccttcatgtgcgagacctgcggcaagagcttcgccagcaaggagtacctgaagcaccacaacagaatccacaccggcagcaagcccttcaagtgcgaggtgtgcttcagaaccttcgcccagagaaacagcctgtaccagcacatcaaggtgcacaccggcgagagaccctactgctgcgaccagtgcggcaagcagttcacccagctgaacgccctgcagagacacagaagaatccacaccggcgagagacccttcatgtgcaacgcctgcggcagaaccttcaccgacaagagcaccctgagaagacacaccagcatccacgacaagaacaccccctggaagagcttcctggtgatcgtggacggcagccccaagaacgacgacggccacaagaccgagcagcccgacgaggagtacgtgagcagcaagctgagcgacaagctgctgagcttcgccgagaacggccacttccacaacctggccgccgtgcaggacaccgtgcccaccatgcaggagaacagcagcgccgacaccgcctgcaaggccgacgacagcgtggtgagccaggacaccctgctggccaccaccatcagcgagctgagcgagctgaccccccagaccgacagcatgcccacccagctgcacagcctgagcaacatggagtag

SEQ ID NO: 82838 - DNA, 1254 bp, synthetic construct
  misc_feature 1..1254: note = Description of Artificial Sequence: Synthetic coding sequence
  source 1..1254: mol_type = other DNA
atggacgaggagtacgacgtgatcgtgctgggcaccggcctgaccgagtgcatcctgagcggcatcatgagcgtgaacggcaagaaggtgctgcacatggacagaaacccctactacggcggcgagagcagcagcatcacccccctggaggagctgtacaagagattccagctgctggagggcccccccgagagcatgggcagaggcagagactggaacgtggacctgatccccaagttcctgatggccaacggccagctggtgaagatgctgctgtacaccgaggtgaccagatacctggacttcaaggtggtggagggcagcttcgtgtacaagggcggcaagatctacaaggtgcccagcaccgagaccgaggccctggccagcaacctgatgggcatgttcgagaacgaccccaagaccttcgagggcgtggacccccagaccaccagcatgagagacgtgtacagaaagttcgacctgggccaggacgtgatcgacttcaccggccacgccctggccctgtacagaaccgacgactacctggaccagccctgcctggagaccgtgaacagaatcaagctgtacagcgagagcctggccagatacggcaagagcccctacctgtaccccctgtacggcctgggcgagctgccccagggcttcgccagactgagcgccatctacggcggcacctacatgctgaacaagcccgtggacgacatcatcatggagaacggcaaggtggtgggcgtgaagagcgagggcgaggtggccagatgcaagcagctgatctgcgaccccagctacatccccgacagagtgagaaaggccggccaggtgatcagaatcatctgcatcctgagccaccccatcaagaacaccaacgacgccaacagctgccagatcatcatcccccagaaccaggtgaacagaaagagcgacatctacgtgtgcatgatcagctacgcccacaacgtggccgcccagggcaagtacatcgccatcgccagcaccaccgtggagaccaccgaccccgagaaggaggtggagcccgccctggagctgctggagcccatcgacgacggctgcgagagccaggtgttctgcagctgcagctacgacgccaccacccacttcgagaccacctgcaacgacatcaaggacatctacaagagaatggccggcaccgccttcgacttcgagaacatgaagagaaagcagaacgacgtgttcggcgaggccgagcagtag

SEQ ID NO: 82839 - DNA, 1344 bp, synthetic construct
  misc_feature 1..1344: note = Description of Artificial Sequence: Synthetic coding sequence
  source 1..1344: mol_type = other DNA
atggacgaggagtacgacgtgatcgtgctgggcaccggcctgaccgagtgcatcctgagcggcatcatgagcgtgaacggcaagaaggtgctgcacatggacagaaacccctactacggcggcgagagcagcagcatcacccccctggaggagctgtacaagagattccagctgctggagggcccccccgagagcatgggcagaggcagagactggaacgtggacctgatccccaagttcctgatggccaacggccagctggtgaagatgctgctgtacaccgaggtgaccagatacctggacttcaaggtggtggagggcagcttcgtgtacaagggcggcaagatctacaaggtgcccagcaccgagaccgaggccctggccagcaacctgatgggcatgttcgagaagagaagattcagaaagttcctggtgttcgtggccaacttcgacgagaacgaccccaagaccttcgagggcgtggacccccagaccaccagcatgagagacgtgtacagaaagttcgacctgggccaggacgtgatcgacttcaccggccacgccctggccctgtacagaaccgacgactacctggaccagccctgcctggagaccgtgaacagaatcaagctgtacagcgagagcctggccagatacggcaagagcccctacctgtaccccctgtacggcctgggcgagctgccccagggcttcgccagactgagcgccatctacggcggcacctacatgctgaacaagcccgtggacgacatcatcatggagaacggcaaggtggtgggcgtgaagagcgagggcgaggtggccagatgcaagcagctgatctgcgaccccagctacatccccgacagagtgagaaaggccggccaggtgatcagaatcatctgcatcctgagccaccccatcaagaacaccaacgacgccaacagctgccagatcatcatcccccagaaccaggtgaacagaaagagcgacatctacgtgtgcatgatcagctacgcccacaacgtggccgcccagggcaagtacatcgccatcgccagcaccaccgtggagaccaccgaccccgagaaggaggtggagcccgccctggagctgctggagcccatcgaccagaagttcgtggccatcagcgacctgtacgagcccatcgacgacggctgcgagagccaggtgttctgcagctgcagctacgacgccaccacccacttcgagaccacctgcaacgacatcaaggacatctacaagagaatggccggcaccgccttcgacttcgagaacatgaagagaaagcagaacgacgtgttcggcgaggccgagcagtag

SEQ ID NO: 82840 - DNA, 447 bp, synthetic construct
  misc_feature 1..447: note = Description of Artificial Sequence: Synthetic coding sequence
  source 1..447: mol_type = other DNA
atgagcctgggcaagagaaagcccagcaacttctacctggccaacttcctgggcaaggagtgcatcctgagcggcatcatgagcgtgaacggcaagaaggtgctgcacatggacagaaacccctactacggcggcgagagcgccagcatcacccccctggaggacctgtacaagagattcaagatccccggcagcccccccgagagcatgggcagaggcagagactggaacgtggacctgatccccaagttcctgatggccaacggccagctggtgaagatgctgctgtacaccgaggtgaccagatacctggacttcaaggtgaccgagggcagcttcgtgtacaagggcggcaagatctacaaggtgcccagcaccgaggccgaggccctggccagcagcctgatgggcctgttcgagaagagaagattcagaaagttcctgtag

SEQ ID NO: 82841 - DNA, 1350 bp, synthetic construct
  misc_feature 1..1350: note = Description of Artificial Sequence: Synthetic coding sequence
  source 1..1350: mol_type = other DNA
atgagcctgggcaagagaaagcccagcaacttctacctggccaacttcctgggcaaggagtgcatcctgagcggcatcatgagcgtgaacggcaagaaggtgctgcacatggacagaaacccctactacggcggcgagagcgccagcatcacccccctggaggacctgtacaagagattcaagatccccggcagcccccccgagagcatgggcagaggcagagactggaacgtggacctgatccccaagttcctgatggccaacggccagctggtgaagatgctgctgtacaccgaggtgaccagatacctggacttcaaggtgaccgagggcagcttcgtgtacaagggcggcaagatctacaaggtgcccagcaccgaggccgaggccctggccagcagcctgatgggcctgttcgagaagagaagattcagaaagttcctggtgtacgtggccaacttcgacgagaaggaccccagaaccttcgagggcatcgaccccaagaagaccaccatgagagacgtgtacaagaagttcgacctgggccaggacgtgatcgacttcaccggccacgccctggccctgtacagaaccgacgactacctggaccagccctgctacgagaccatcaacagaatcaagctgtacagcgagagcctggccagatacggcaagagcccctacctgtaccccctgtacggcctgggcgagctgccccagggcttcgccagactgagcgccatctacggcggcacctacatgctgaacaagcccatcgaggagatcatcgtgcagaacggcaaggtgatcggcgtgaagagcgagggcgagatcgccagatgcaagcagctgatctgcgaccccagctacgtgaaggacagagtggagaaggtgggccaggtgatcagagtgatctgcatcctgagccaccccatcaagaacaccaacgacgccaacagctgccagatcatcatcccccagaaccaggtgaacagaaagagcgacatctacgtgtgcatgatcagcttcgcccacaacgtggccgcccagggcaagtacatcgccatcgtgagcaccaccgtggagaccaaggagcccgagaaggagatcagacccgccctggagctgctggagcccatcgagcagaagttcgtgagcatcagcgacctgctggtgcccaaggacctgggcaccgagagccagatcttcatcagcagaacctacgacgccaccacccacttcgagaccacctgcgacgacatcaagaacatctacaagagaatgaccggcagcgagttcgacttcgaggagatgaagagaaagaagaacgacatctacggcgaggactag

SEQ ID NO: 82842 - DNA, 627 bp, synthetic construct
  misc_feature 1..627: note = Description of Artificial Sequence: Synthetic coding sequence
  source 1..627: mol_type = other DNA
atgagagacgtgtacaagaagttcgacctgggccaggacgtgatcgacttcaccggccacgccctggccctgtacagaaccgacgactacctggaccagccctgctacgagaccatcaacagaatcaagctgtacagcgagagcctggccagatacggcaagagcccctacctgtaccccctgtacggcctgggcgagctgccccagggcttcgccagactgagcgccatctacggcggcacctacatgctgaacaagcccatcgaggagatcatcgtgcagaacggcaaggtgatcggcgtgaagagcgagggcgagatcgccagatgcaagcagctgatctgcgaccccagctacgtgaaggacagagtggagaaggtgggccaggtgatcagagtgatctgcatcctgagccaccccatcaagaacaccaacgacgccaacagctgccagatcatcatcccccagaaccaggtgaacagaaagagcgacctgctggccagcgtgaccagctggtaccagaagacctgggagcagaaggccagaagcctgttccccgcccacatgatgccccccctgatcctgagacagagagtgatgaccctgaagaccagcatcagaggctag

SEQ ID NO: 82843 - DNA, 1203 bp, synthetic construct
  misc_feature 1..1203: note = Description of Artificial Sequence: Synthetic coding sequence
  source 1..1203: mol_type = other DNA
atgaacgaggagtacgacgtgatcgtgctgggcaccggcctgaccgagtgcatcctgagcggcatcatgagcgtgaacggcaagaaggtgctgcacatggacagaaacccctactacggcggcgagagcgccagcatcacccccctggaggacctgtacaagagattcaagatccccggcagcccccccgagagcatgggcagaggcagagactggaacgtggacctgatccccaagttcctgatggccaacggcctgatgggcctgttcgagaagagaagattcagaaagttcctggtgtacgtggccaacttcgacgagaaggaccccagaaccttcgagggcatcgaccccaagaagaccaccatgagagacgtgtacaagaagttcgacctgggccaggacgtgatcgacttcaccggccacgccctggccctgtacagaaccgacgactacctggaccagccctgctacgagaccatcaacagaatcaagctgtacagcgagagcctggccagatacggcaagagcccctacctgtaccccctgtacggcctgggcgagctgccccagggcttcgccagactgagcgccatctacggcggcacctacatgctgaacaagcccatcgaggagatcatcgtgcagaacggcaaggtgatcggcgtgaagagcgagggcgagatcgccagatgcaagcagctgatctgcgaccccagctacgtgaaggacagagtggagaaggtgggccaggtgatcagagtgatctgcatcctgagccaccccatcaagaacaccaacgacgccaacagctgccagatcatcatcccccagaaccaggtgaacagaaagagcgacatctacgtgtgcatgatcagcttcgcccacaacgtggccgcccagggcaagtacatcgccatcgtgagcaccaccgtggagaccaaggagcccgagaaggagatcagacccgccctggagctgctggagcccatcgagcagaagttcgtgagcatcagcgacctgctggtgcccaaggacctgggcaccgagagccagatcttcatcagcagaacctacgacgccaccacccacttcgagaccacctgcgacgacatcaagaacatctacaagagaatgaccggcagcgagttcgacttcgaggagatgaagagaaagaagaacgacatctacggcgaggactag

SEQ ID NO: 82844 - DNA, 1338 bp, synthetic construct
  misc_feature 1..1338: note = Description of Artificial Sequence: Synthetic coding sequence
  source 1..1338: mol_type = other DNA
atgaacgaggagtacgacgtgatcgtgctgggcaccggcctgaccgagtgcatcctgagcggcatcatgagcgtgaacggcaagaaggtgctgcacatggacagaaacccctactacggcggcgagagcgccagcatcacccccctggaggacctgtacaagagattcaagatccccggcagcccccccgagagcatgggcagaggcagagactggaacgtggacctgatccccaagttcctgatggccaacggccagctggtgaagatgctgctgtacaccgaggtgaccagatacctggacttcaaggtgaccgagggcagcttcgtgtacaagggcggcaagatctacaaggtgcccagcaccgaggccgaggccctggccagcagcctgatgggcctgttcgagaagagaagattcagaaagttcctggtgtacgtggccaacttcgacgagaaggaccccagaaccttcgagggcatcgaccccaagaagaccaccatgagagacgtgtacaagaagttcgacctgggccaggacgtgatcgacttcaccggccacgccctggccctgtacagaaccgacgactacctggaccagccctgctacgagaccatcaacagaatcaagctgtacagcgagagcctggccagatacggcaagagcccctacctgtaccccctgtacggcctgggcgagctgccccagggcttcgccagactgagcgccatctacggcggcacctacatgctgaacaagcccatcgaggagatcatcgtgcagaacggcaaggtgatcggcgtgaagagcgagggcgagatcgccagatgcaagcagctgatctgcgaccccagctacgtgaaggacagagtggagaaggtgggccaggtgatcagagtgatctgcatcctgagccaccccatcaagaacaccaacgacgccaacagctgccagatcatcatcccccagaaccaggtgaacagaaagagcgacatctacgtgtgcatgatcagcttcgcccacaacgtggccgcccagggcaagtacatcgccatcgtgagcaccaccgtggagaccaaggagcccgagaaggagatcagacccgccctggagctgctggagcccatcgagcagaagttcgtgagcatcagcgacctgctggtgcccaaggacctgggcaccgagagccagatcttcatcagcagaacctacgacgccaccacccacttcgagaccacctgcgacgacatcaagaacatctacaagagaatgaccggcagcgagttcgacttcgaggagatgaagagaaagaagaacgacatctacggcgaggactag

SEQ ID NO: 82845 - DNA, 468 bp, synthetic construct
  misc_feature 1..468: note = Description of Artificial Sequence: Synthetic coding sequence
  source 1..468: mol_type = other DNA
atgaacgaggagtacgacgtgatcgtgctgggcaccggcctgaccctgtacaagagattcaagatccccggcagcccccccgagagcatgggcagaggcagagactggaacgtggacctgatccccaagttcctgatggccaacggccagctggtgaagatgctgctgtacaccgaggtgaccagatacctggacttcaaggtgaccgagggcagcttcgtgtacaagggcggcaagatctacaaggtgcccagcaccgaggccgaggccctggccagcagcctgatgggcctgttcgagaagagaagattcagaaagttcctggtgtacgtggccaacttcgacgagaaggaccccagaaccttcgagggcatcgaccccaagaagaccaccatgagagacgtgtacaagaagttcgacctgggccaggacgtgatcgacttcaccggccacgccctggccctgtag

SEQ ID NO: 82846 - DNA, 612 bp, synthetic construct
  misc_feature 1..612: note = Description of Artificial Sequence: Synthetic coding sequence
  source 1..612: mol_type = other DNA
aagaagttcgacctgggccaggacgtgatcgacttcaccggccacgccctggccctgtacagaaccgacgactacctggaccagccctgctacgagaccatcaacagaatcaagctgtacagcgagagcctggccagatacggcaagagcccctacctgtaccccctgtacggcctgggcgagctgccccagggcttcgccagactgagcgccatctacggcggcacctacatgctgaacaagcccatcgaggagatcatcgtgcagaacggcaaggtgatcggcgtgaagagcgagggcgagatcgccagatgcaagcagctgatctgcgaccccagctacgtgaaggacagagtggagaaggtgggccaggtgatcagagtgatctgcatcctgagccaccccatcaagaacaccaacgacgccaacagctgccagatcatcatcccccagaaccaggtgaacagaaagagcgacctgctggccagcgtgaccagctggtaccagaagacctgggagcagaaggccagaagcctgttccccgcccacatgatgccccccctgatcctgagacagagagtgatgaccctgaagaccagcatcagaggctag

SEQ ID NO: 82847 - DNA, 792 bp, synthetic construct
  misc_feature 1..792: note = Description of Artificial Sequence: Synthetic coding sequence
  source 1..792: mol_type = other DNA
atgaacgaggagtacgacgtgatcgtgctgggcaccggcctgaccgagtgcatcctgagcggcatcatgagcgtgaacggcaagaaggtgctgcacatggacagaaacccctactacggcggcgagagcgccagcatcacccccctggaggacctgtacaagagattcaagatccccggcagcccccccgagagcatgggcagaggcagagactggaacgtggacctgatccccaagttcctgatggccaacgaggtgaccagatacctggacttcaaggtgaccgagggcagcttcgtgtacaagggcggcaagatctacaaggtgcccagcaccgaggccgaggccctggccagcagcctgatgggcctgttcgagaagagaagattcagaaagttcctggtgtacgtggccaacttcgacgagaaggaccccagaaccttcgagggcatcgaccccaagaagaccaccatgagagacgtgtacaagaagttcgacctgggccaggacgtgatcgacttcaccggccacgccctggccctgtacagaaccgacgactacctggaccagccctgctacgagaccatcaacagaatcaagctgtacagcgagagcctggccagatacggcaagagcccctacctgtaccccctgtacggcctgggcgagctgccccagggcttcgccagactgagcgccatctacggcggcacctacatgctgaacaagcccatcgaggagatcatcgtgcagaacggcaaggtgatcggcgtgaagagcgagggcgagtag

SEQ ID NO: 82848 - DNA, 1119 bp, synthetic construct
  misc_feature 1..1119: note = Description of Artificial Sequence: Synthetic coding sequence
  source 1..1119: mol_type = other DNA
atggcccacgcccccgccagatgccccagcgccagaggcagcggcgacggcgagatgggcaagcccagaaacgtggccctgatcaccggcatcaccggccaggacggcagctacctggccgagttcctgctggagaagggctacgaggtgcacggcatcgtgagaagaagcagcagcttcaacaccggcagaatcgagcacctgtacaagaacccccaggcccacatcgagggcaacatgaagctgcactacggcgacctgaccgacagcacctgcctggtgaagatcatcaacgaggtgaagcccaccgagatctacaacctgggcgcccagagccacgtgaagatcagcttcgacctggccgagtacaccgccgacgtggacggcgtgggcaccctgagactgctggacgccgtgaagacctgcggcctgatcaacagcgtgaagttctaccaggccagcaccagcgagctgtacggcaaggtgcaggagatcccccagaaggagaccacccccttctaccccagaagcccctacggcgccgccaagctgtacgcctactggatcgtggtgaacttcagagaggcctacaacctgttcgccgtgaacggcatcctgttcaaccacgagagccccagaagaggcgccaacttcgtgaccagaaagatcagcagaagcgtggccaagatctacctgggccagctggagtgcttcagcctgggcaacctggacgccaagagagactggggccacgccaaggactacgtggaggccatgtggctgatgctgcagaacgacgagcccgaggacttcgtgatcgccaccggcgaggtgcacagcgtgagagagttcgtggagaagagcttcctgcacatcggcaagaccatcgtgtgggagggcaagaacgagaacgaggtgggcagatgcaaggagaccggcaaggtgcacgtgaccgtggacctgaagtactacagacccaccgaggtggacttcctgcagggcgactgcaccaaggccaagcagaagctgaactggaagcccagagtggccttcgacgagctggtgagagagatggtgcacgccgacgtggagctgatgagaaccaaccccaacgcctag

SEQ ID NO: 82849 - DNA, 1029 bp, synthetic construct
  misc_feature 1..1029: note = Description of Artificial Sequence: Synthetic coding sequence
  source 1..1029: mol_type = other DNA
atgtgcaagatggacggcagctacctggccgagttcctgctggagaagggctacgaggtgcacggcatcgtgagaagaagcagcagcttcaacaccggcagaatcgagcacctgtacaagaacccccaggcccacatcgagggcaacatgaagctgcactacggcgacctgaccgacagcacctgcctggtgaagatcatcaacgaggtgaagcccaccgagatctacaacctgggcgcccagagccacgtgaagatcagcttcgacctggccgagtacaccgccgacgtggacggcgtgggcaccctgagactgctggacgccgtgaagacctgcggcctgatcaacagcgtgaagttctaccaggccagcaccagcgagctgtacggcaaggtgcaggagatcccccagaaggagaccacccccttctaccccagaagcccctacggcgccgccaagctgtacgcctactggatcgtggtgaacttcagagaggcctacaacctgttcgccgtgaacggcatcctgttcaaccacgagagccccagaagaggcgccaacttcgtgaccagaaagatcagcagaagcgtggccaagatctacctgggccagctggagtgcttcagcctgggcaacctggacgccaagagagactggggccacgccaaggactacgtggaggccatgtggctgatgctgcagaacgacgagcccgaggacttcgtgatcgccaccggcgaggtgcacagcgtgagagagttcgtggagaagagcttcctgcacatcggcaagaccatcgtgtgggagggcaagaacgagaacgaggtgggcagatgcaaggagaccggcaaggtgcacgtgaccgtggacctgaagtactacagacccaccgaggtggacttcctgcagggcgactgcaccaaggccaagcagaagctgaactggaagcccagagtggccttcgacgagctggtgagagagatggtgcacgccgacgtggagctgatgagaaccaaccccaacgcctag

SEQ ID NO: 82850 - DNA, 2196 bp, synthetic construct
  misc_feature 1..2196: note = Description of Artificial Sequence: Synthetic coding sequence
  source 1..2196: mol_type = other DNA
atggtggtggagcaccccgagttcctgaaggccggcaaggagcccggcctgcagatctggagagtggagaagttcgacctggtgcccgtgcccaccaacctgtacggcgacttcttcaccggcgacgcctacgtgatcctgaagaccgtgcagctgagaaacggcaacctgcagtacgacctgcactactggctgggcaacgagtgcagccaggacgagagcggcgccgccgccatcttcaccgtgcagctggacgactacctgaacggcagagccgtgcagcacagagaggtgcagggcttcgagagcgccaccttcctgggctacttcaagagcggcctgaagtacaagaagggcggcgtggccagcggcttcaagcacgtggtgcccaacgaggtggtggtgcagagactgttccaggtgaagggcagaagagtggtgagagccaccgaggtgcccgtgagctgggagagcttcaacaacggcgactgcttcatcctggacctgggcaacaacatccaccagtggtgcggcagcaacagcaacagatacgagagactgaaggccacccaggtgagcaagggcatcagagacaacgagagaagcggcagagccagagtgcacgtgagcgaggagggcaccgagcccgaggccatgctgcaggtgctgggccccaagcccgccctgcccgccggcaccgaggacaccgccaaggaggacgccgccaacagaaagctggccaagctgtacaaggtgagcaacggcgccggcaccatgagcgtgagcctggtggccgacgagaaccccttcgcccagggcgccctgaagagcgaggactgcttcatcctggaccacggcaaggacggcaagatcttcgtgtggaagggcaagcaggccaacaccgaggagagaaaggccgccctgaagaccgccagcgacttcatcaccaagatggactaccccaagcagacccaggtgagcgtgctgcccgagggcggcgagacccccctgttcaagcagttcttcaagaactggagagaccccgaccagaccgacggcctgggcctgagctacctgagcagccacatcgccaacgtggagagagtgcccttcgacgccgccaccctgcacaccagcaccgccatggccgcccagcacggcatggacgacgacggcaccggccagaagcagatctggagaatcgagggcagcaacaaggtgcccgtggaccccgccacctacggccagttctacggcggcgacagctacatcatcctgtacaactacagacacggcggcagacagggccagatcatctacaactggcagggcgcccagagcacccaggacgaggtggccgccagcgccatcctgaccgcccagctggacgaggagctgggcggcacccccgtgcagagcagagtggtgcagggcaaggagcccgcccacctgatgagcctgttcggcggcaagcccatgatcatctacaagggcggcaccagcagagagggcggccagaccgcccccgccagcaccagactgttccaggtgagagccaacagcgccggcgccaccagagccgtggaggtgctgcccaaggccggcgccctgaacagcaacgacgccttcgtgctgaagacccccagcgccgcctacctgtgggtgggcaccggcgccagcgaggccgagaagaccggcgcccaggagctgctgagagtgctgagagcccagcccgtgcaggtggccgagggcagcgagcccgacggcttctgggaggccctgggcggcaaggccgcctacagaaccagccccagactgaaggacaagaagatggacgcccacccccccagactgttcgcctgcagcaacaagatcggcagattcgtgatcgaggaggtgcccggcgagctgatgcaggaggacctggccaccgacgacgtgatgctgctggacacctgggaccaggtgttcgtgtgggtgggcaaggacagccaggaggaggagaagaccgaggccctgaccagcgccaagagatacatcgagaccgaccccgccaacagagacagaagaacccccatcaccgtggtgaagcagggcttcgagccccccagcttcgtgggctggttcctgggctgggacgacgactactggagcgtggaccccctggacagagccatggccgagctggccgcctag

SEQ ID NO: 82851 - DNA, 2196 bp, synthetic construct; identical to SEQ ID NO: 82850
  misc_feature 1..2196: note = Description of Artificial Sequence: Synthetic coding sequence
  source 1..2196: mol_type = other DNA

SEQ ID NO: 82852 - DNA, 2349 bp, synthetic construct
  misc_feature 1..2349: note = Description of Artificial Sequence: Synthetic coding sequence
  source 1..2349: mol_type = other DNA
atggccccccacagacccgcccccgccctgctgtgcgccctgagcctggccctgtgcgccctgagcctgcccgtgagagccgccaccgccagcagaggcgccagccaggccggcgccccccagggcagagtgcccgaggccagacccaacagcatggtggtggagcaccccgagttcctgaaggccggcaaggagcccggcctgcagatctggagagtggagaagttcgacctggtgcccgtgcccaccaacctgtacggcgacttcttcaccggcgacgcctacgtgatcctgaagaccgtgcagctgagaaacggcaacctgcagtacgacctgcactactggctgggcaacgagtgcagccaggacgagagcggcgccgccgccatcttcaccgtgcagctggacgactacctgaacggcagagccgtgcagcacagagaggtgcagggcttcgagagcgccaccttcctgggctacttcaagagcggcctgaagtacaagaagggcggcgtggccagcggcttcaagcacgtggtgcccaacgaggtggtggtgcagagactgttccaggtgaagggcagaagagtggtgagagccaccgaggtgcccgtgagctgggagagcttcaacaacggcgactgcttcatcctggacctgggcaacaacatccaccagtggtgcggcagcaacagcaacagatacgagagactgaaggccacccaggtgagcaagggcatcagagacaacgagagaagcggcagagccagagtgcacgtgagcgaggagggcaccgagcccgaggccatgctgcaggtgctgggccccaagcccgccctgcccgccggcaccgaggacaccgccaaggaggacgccgccaacagaaagctggccaagctgtacaaggtgagcaacggcgccggcaccatgagcgtgagcctggtggccgacgagaaccccttcgcccagggcgccctgaagagcgaggactgcttcatcctggaccacggcaaggacggcaagatcttcgtgtggaagggcaagcaggccaacaccgaggagagaaaggccgccctgaagaccgccagcgacttcatcaccaagatggactaccccaagcagacccaggtgagcgtgctgcccgagggcggcgagacccccctgttcaagcagttcttcaagaactggagagaccccgaccagaccgacggcctgggcctgagctacctgagcagccacatcgccaacgtggagagagtgcccttcgacgccgccaccctgcacaccagcaccgccatggccgcccagcacggcatggacgacgacggcaccggccagaagcagatctggagaatcgagggcagcaacaaggtgcccgtggaccccgccacctacggccagttctacggcggcgacagctacatcatcctgtacaactacagacacggcggcagacagggccagatcatctacaactggcagggcgcccagagcacccaggacgaggtggccgccagcgccatcctgaccgcccagctggacgaggagctgggcggcacccccgtgcagagcagagtggtgcagggcaaggagcccgcccacctgatgagcctgttcggcggcaagcccatgatcatctacaagggcggcaccagcagagagggcggccagaccgcccccgccagcaccagactgttccaggtgagagccaacagcgccggcgccaccagagccgtggaggtgctgcccaaggccggcgccctgaacagcaacgacgccttcgtgctgaagacccccagcgccgcctacctgtgggtgggcaccggcgccagcgaggccgagaagaccggcgcccaggagctgctgagagtgctgagagcccagcccgtgcaggtggccgagggcagcgagcccgacggcttctgggaggccctgggcggcaaggccgcctacagaaccagccccagactgaaggacaagaagatggacgcccacccccccagactgttcgcctgcagcaacaagatcggcagattcgtgatcgaggaggtgcccggcgagctgatgcaggaggacctggccaccgacgacgtgatgctgctggacacctgggaccaggtgttcgtgtgggtgggcaaggacagccaggaggaggagaagaccgaggccctgaccagcgccaagagatacatcgagaccgaccccgccaacagagacagaagaacccccatcaccgtggtgaagcagggcttcgagccccccagcttcgtgggctggttcctgggctgggacgacgactactggagcgtggaccccctggacagagccatggccgagctggccgcctag

SEQ ID NO: 82853 - DNA, 2196 bp, synthetic construct; identical to SEQ ID NO: 82850
  misc_feature 1..2196: note = Description of Artificial Sequence: Synthetic coding sequence
  source 1..2196: mol_type = other DNA

SEQ ID NO: 82854 - DNA, 2148 bp, synthetic construct
  misc_feature 1..2148: note = Description of Artificial Sequence: Synthetic coding sequence
  source 1..2148: mol_type = other DNA
atggtggtggagcaccccgagttcctgaaggccggcaaggagcccggcctgcagatctggagagtggagaagttcgacgcctacgtgatcctgaagaccgtgcagctgagaaacggcaacctgcagtacgacctgcactactggctgggcaacgagtgcagccaggacgagagcggcgccgccgccatcttcaccgtgcagctggacgactacctgaacggcagagccgtgcagcacagagaggtgcagggcttcgagagcgccaccttcctgggctacttcaagagcggcctgaagtacaagaagggcggcgtggccagcggcttcaagcacgtggtgcccaacgaggtggtggtgcagagactgttccaggtgaagggcagaagagtggtgagagccaccgaggtgcccgtgagctgggagagcttcaacaacggcgactgcttcatcctggacctgggcaacaacatccaccagtggtgcggcagcaacagcaacagatacgagagactgaaggccacccaggtgagcaagggcatcagagacaacgagagaagcggcagagccagagtgcacgtgagcgaggagggcaccgagcccgaggccatgctgcaggtgctgggccccaagcccgccctgcccgccggcaccgaggacaccgccaaggaggacgccgccaacagaaagctggccaagctgtacaaggtgagcaacggcgccggcaccatgagcgtgagcctggtggccgacgagaaccccttcgcccagggcgccctgaagagcgaggactgcttcatcctggaccacggcaaggacggcaagatcttcgtgtggaagggcaagcaggccaacaccgaggagagaaaggccgccctgaagaccgccagcgacttcatcaccaagatggactaccccaagcagacccaggtgagcgtgctgcccgagggcggcgagacccccctgttcaagcagttcttcaagaactggagagaccccgaccagaccgacggcctgggcctgagctacctgagcagccacatcgccaacgtggagagagtgcccttcgacgccgccaccctgcacaccagcaccgccatggccgcccagcacggcatggacgacgacggcaccggccagaagcagatctggagaatcgagggcagcaacaaggtgcccgtggaccccgccacctacggccagttctacggcggcgacagctacatcatcctgtacaactacagacacggcggcagacagggccagatcatctacaactggcagggcgcccagagcacccaggacgaggtggccgccagcgccatcctgaccgcccagctggacgaggagctgggcggcacccccgtgcagagcagagtggtgcagggcaaggagcccgcccacctgatgagcctgttcggcggcaagcccatgatcatctacaagggcggcaccagcagagagggcggccagaccgcccccgccagcaccagactgttccaggtgagagccaacagcgccggcgccaccagagccgtggaggtgctgcccaaggccggcgccctgaacagcaacgacgccttcgtgctgaagacccccagcgccgcctacctgtgggtgggcaccggcgccagcgaggccgagaagaccggcgcccaggagctgctgagagtgctgagagcccagcccgtgcaggtggccgagggcagcgagcccgacggcttctgggaggccctgggcggcaaggccgcctacagaaccagccccagactgaaggacaagaagatggacgcccacccccccagactgttcgcctgcagcaacaagatcggcagattcgtgatcgaggaggtgcccggcgagctgatgcaggaggacctggccaccgacgacgtgatgctgctggacacctgggaccaggtgttcgtgtgggtgggcaaggacagccaggaggaggagaagaccgaggccctgaccagcgccaagagatacatcgagaccgaccccgccaacagagacagaagaacccccatcaccgtggtgaagcagggcttcgagccccccagcttcgtgggctggttcctgggctgggacgacgactactggagcgtggaccccctggacagagccatggccgagctggccgcctag

SEQ ID NO: 82855 - DNA, 2229 bp, synthetic construct
  misc_feature 1..2229: note = Description of Artificial Sequence: Synthetic coding sequence
  source 1..2229: mol_type = other DNA
atggagaagctgttctgctgcttccccaacagcatggtggtggagcaccccgagttcctgaaggccggcaaggagcccggcctgcagatctggagagtggagaagttcgacctggtgcccgtgcccaccaacctgtacggcgacttcttcaccggcgacgcctacgtgatcctgaagaccgtgcagctgagaaacggcaacctgcagtacgacctgcactactggctgggcaacgagtgcagccaggacgagagcggcgccgccgccatcttcaccgtgcagctggacgactacctgaacggcagagccgtgcagcacagagaggtgcagggcttcgagagcgccaccttcctgggctacttcaagagcggcctgaagtacaagaagggcggcgtggccagcggcttcaagcacgtggtgcccaacgaggtggtggtgcagagactgttccaggtgaagggcagaagagtggtgagagccaccgaggtgcccgtgagctgggagagcttcaacaacggcgactgcttcatcctggacctgggcaacaacatccaccagtggtgcggcagcaacagcaacagatacgagagactgaaggccacccaggtgagcaagggcatcagagacaacgagagaagcggcagagccagagtgcacgtgagcgaggagggcaccgagcccgaggccatgctgcaggtgctgggccccaagcccgccctgcccgccggcaccgaggacaccgccaaggaggacgccgccaacagaaagctggccaagctgtacaaggtgagcaacggcgccggcaccatgagcgtgagcctggtggccgacgagaaccccttcgcccagggcgccctgaagagcgaggactgcttcatcctggaccacggcaaggacggcaagatcttcgtgtggaagggcaagcaggccaacaccgaggagagaaaggccgccctgaagaccgccagcgacttcatcaccaagatggactaccccaagcagacccaggtgagcgtgctgcccgagggcggcgagacccccctgttcaagcagttcttcaagaactggagagaccccgaccagaccgacggcctgggcctgagctacctgagcagccacatcgccaacgtggagagagtgcccttcgacgccgccaccctgcacaccagcaccgccatggccgcccagcacggcatggacgacgacggcaccggccagaagcagatctggagaatcgagggcagcaacaaggtgcccgtggaccccgccacctacggccagttctacggcggcgacagctacatcatcctgtacaactacagacacggcggcagacagggccagatcatctacaactggcagggcgcccagagcacccaggacgaggtggccgccagcgccatcctgaccgcccagctggacgaggagctgggcggcacccccgtgcagagcagagtggtgcagggcaaggagcccgcccacctgatgagcctgttcggcggcaagcccatgatcatctacaagggcggcaccagcagagagggcggccagaccgcccccgccagcaccagactgttccaggtgagagccaacagcgccggcgccaccagagccgtggaggtgctgcccaaggccggcgccctgaacagcaacgacgccttcgtgctgaagacccccagcgccgcctacctgtgggtgggcaccggcgccagcgaggccgagaagaccggcgcccaggagctgctgagagtgctgagagcccagcccgtgcaggtggccgagggcagcgagcccgacggcttctgggaggccctgggcggcaaggccgcctacagaaccagccccagactgaaggacaagaagatggacgcccacccccccagactgttcgcctgcagcaacaagatcggcagattcgtgatcgaggaggtgcccggcgagctgatgcaggaggacctggccaccgacgacgtgatgctgctggacacctgggaccaggtgttcgtgtgggtgggcaaggacagccaggaggaggagaagaccgaggccctgaccagcgccaagagatacatcgagaccgaccccgccaacagagacagaagaacccccatcaccgtggtgaagcagggcttcgagccccccagcttcgtgggctggttcctgggctgggacgacgactactggagcgtggaccccctggacagagccatggccgagctggccgcctag

SEQ ID NO: 82856 - DNA, 2196 bp, synthetic construct; identical to SEQ ID NO: 82850
  misc_feature 1..2196: note = Description of Artificial Sequence: Synthetic coding sequence
  source 1..2196: mol_type = other DNA

SEQ ID NO: 82857 - DNA, 783 bp, synthetic construct
  misc_feature 1..783: note = Description of Artificial Sequence: Synthetic coding sequence
  source 1..783: mol_type = other DNA
atggtggtggagcaccccgagttcctgaaggccggcaaggagcccggcctgcagatctggagagtggagaagttcgacctggtgcccgtgcccaccaacctgtacggcgacttcttcaccggcgacgcctacgtgatcctgaagaccgtgcagctgagaaacggcaacctgcagtacgacctgcactactggctgggcaacgagtgcagccaggacgagagcggcgccgccgccatcttcaccgtgcagctggacgactacctgaacggcagagccgtgcagcacagagaggtgcagggcttcgagagcgccaccttcctgggctacttcaagagcggcctgaagtacaagaagggcggcgtggccagcggcttcaagcacgtggtgcccaacgaggtggtggtgcagagactgttccaggtgaagggcagaagagtggtgagagccaccgaggtgcccgtgagctgggagagcttcaacaacggcgactgcttcatcctggacctgggcaacaacatccaccagtggtgcggcagcaacagcaacagatacgagagactgaaggccacccaggtgagcaagggcatcagagacaacgagagaagcggcagagccagagtgcacgtgagcgaggagggcaccgagcccgaggccatgctgcaggtgctgggccccaagcccgccctgcccgccggcaccgaggacaccgccaaggaggacgccgccaacagaaagctggccaagctgtacaaggtgagcaacggcgccggcaccatgagctag

SEQ ID NO: 82858 - DNA, 2229 bp, synthetic construct; identical to SEQ ID NO: 82855
  misc_feature 1..2229: note = Description of Artificial Sequence: Synthetic coding sequence
  source 1..2229: mol_type = other DNA

SEQ ID NO: 82859 - DNA, 2196 bp, synthetic construct; identical to SEQ ID NO: 82850
  misc_feature 1..2196: note = Description of Artificial Sequence: Synthetic coding sequence
  source 1..2196: mol_type = other DNA

SEQ ID NO: 82860 - DNA, 2118 bp, synthetic construct
  misc_feature 1..2118: note = Description of Artificial Sequence: Synthetic coding sequence
  source 1..2118: mol_type = other DNA
atggtggtggagcaccccgagttcctgaaggccggcaaggagcccggcctgcagatctggagagtggagaagttcgacctggtgcccgtgcccaccaacctgtacggcgacttcttcaccggcgacgcctacgtgatcctgaagaccgtgcagctgagaaacggcaacctgcagtacgacctgcactactggctgggcaacgagtgcagccaggacgagagcggcgccgccgccatcttcaccgtgcagctggacgactacctgaagtacaagaagggcggcgtggccagcggcttcaagcacgtggtgcccaacgaggtggtggtgcagagactgttccaggtgaagggcagaagagtggtgagagccaccgaggtgcccgtgagctgggagagcttcaacaacggcgactgcttcatcctggacctgggcaacaacatccaccagtggtgcggcagcaacagcaacagatacgagagactgaaggccacccaggtgagcaagggcatcagagacaacgagagaagcggcagagccagagtgcacgtgagcgaggagggcaccgagcccgaggccatgctgcaggtgctgggccccaagcccgccctgcccgccggcaccgaggacaccgccaaggaggacgccgccaacagaaagctggccaagctgtacaaggtgagcaacggcgccggcaccatgagcgtgagcctggtggccgacgagaaccccttcgcccagggcgccctgaagagcgaggactgcttcatcctggaccacggcaaggacggcaagatcttcgtgtggaagggcaagcaggccaacaccgaggagagaaaggccgccctgaagaccgccagcgacttcatcaccaagatggactaccccaagcagacccaggtgagcgtgctgcccgagggcggcgagacccccctgttcaagcagttcttcaagaactggagagaccccgaccagaccgacggcctgggcctgagctacctgagcagccacatcgccaacgtggagagagtgcccttcgacgccgccaccctgcacaccagcaccgccatggccgcccagcacggcatggacgacgacggcaccggccagaagcagatctggagaatcgagggcagcaacaaggtgcccgtggaccccgccacctacggccagttctacggcggcgacagctacatcatcctgtacaactacagacacggcggcagacagggccagatcatctacaactggcagggcgcccagagcacccaggacgaggtggccgccagcgccatcctgaccgcccagctggacgaggagctgggcggcacccccgtgcagagcagagtggtgcagggcaaggagcccgcccacctgatgagcctgttcggcggcaagcccatgatcatctacaagggcggcaccagcagagagggcggccagaccgcccccgccagcaccagactgttccaggtgagagccaacagcgccggcgccaccagagccgtggaggtgctgcccaaggccggcgccctgaacagcaacgacgccttcgtgctgaagacccccagcgccgcctacctgtgggtgggcaccggcgccagcgaggccgagaagaccggcgcccaggagctgctgagagtgctgagagcccagcccgtgcaggtggccgagggcagcgagcccgacggcttctgggaggccctgggcggcaaggccgcctacagaaccagccccagactgaaggacaagaagatggacgcccacccccccagactgttcgcctgcagcaacaagatcggcagattcgtgatcgaggaggtgcccggcgagctgatgcaggaggacctggccaccgacgacgtgatgctgctggacacctgggaccaggtgttcgtgtgggtgggcaaggacagccaggaggaggagaagaccgaggccctgaccagcgccaagagatacatcgagaccgaccccgccaacagagacagaagaacccccatcaccgtggtgaagcagggcttcgagccccccagcttcgtgggctggttcctgggctgggacgacgactactggagcgtggaccccctggacagagccatggccgagctggccgcctag

SEQ ID NO: 82861 - DNA, 2220 bp, synthetic construct
  misc_feature 1..2220: note = Description of Artificial Sequence: Synthetic coding sequence
  source 1..2220: mol_type = other DNA
atgcccctgtgcacccccaacagcatggtggtggagcaccccgagttcctgaaggccggcaaggagcccggcctgcagatctggagagtggagaagttcgacctggtgcccgtgcccaccaacctgtacggcgacttcttcaccggcgacgcctacgtgatcctgaagaccgtgcagctgagaaacggcaacctgcagtacgacctgcactactggctgggcaacgagtgcagccaggacgagagcggcgccgccgccatcttcaccgtgcagctggacgactacctgaacggcagagccgtgcagcacagagaggtgcagggcttcgagagcgccaccttcctgggctacttcaagagcggcctgaagtacaagaagggcggcgtggccagcggcttcaagcacgtggtgcccaacgaggtggtggtgcagagactgttccaggtgaagggcagaagagtggtgagagccaccgaggtgcccgtgagctgggagagcttcaacaacggcgactgcttcatcctggacctgggcaacaacatccaccagtggtgcggcagcaacagcaacagatacgagagactgaaggccacccaggtgagcaagggcatcagagacaacgagagaagcggcagagccagagtgcacgtgagcgaggagggcaccgagcccgaggccatgctgcaggtgctgggccccaagcccgccctgcccgccggcaccgaggacaccgccaaggaggacgccgccaacagaaagctggccaagctgtacaaggtgagcaacggcgccggcaccatgagcgtgagcctggtggccgacgagaaccccttcgcccagggcgccctgaagagcgaggactgcttcatcctggaccacggcaaggacggcaagatcttcgtgtggaagggcaagcaggccaacaccgaggagagaaaggccgccctgaagaccgccagcgacttcatcaccaagatggactaccccaagcagacccaggtgagcgtgctgcccgagggcggcgagacccccctgttcaagcagttcttcaagaactggagagaccccgaccagaccgacggcctgggcctgagctacctgagcagccacatcgccaacgtggagagagtgcccttcgacgccgccaccctgcacaccagcaccgccatggccgcccagcacggcatggacgacgacggcaccggccagaagcagatctggagaatcgagggcagcaacaaggtgcccgtggaccccgccacctacggccagttctacggcggcgacagctacatcatcctgtacaactacagacacggcggcagacagggccagatcatctacaactggcagggcgcccagagcacccaggacgaggtggccgccagcgccatcctgaccgcccagctggacgaggagctgggcggcacccccgtgcagagcagagtggtgcagggcaaggagcccgcccacctgatgagcctgttcggcggcaagcccatgatcatctacaagggcggcaccagcagagagggcggccagaccgcccccgccagcaccagactgttccaggtgagagccaacagcgccggcgccaccagagccgtggaggtgctgcccaaggccggcgccctgaacagcaacgacgccttcgtgctgaagacccccagcgccgcctacctgtgggtgggcaccggcgccagcgaggccgagaagaccggcgcccaggagctgctgagagtgctgagagcccagcccgtgcaggtggccgagggcagcgagcccgacggcttctgggaggccctgggcggcaaggccgcctacagaaccagccccagactgaaggacaagaagatggacgcccacccccccagactgttcgcctgcagcaacaagatcggcagattcgtgatcgaggaggtgcccggcgagctgatgcaggaggacctggccaccgacgacgtgatgctgctggacacctgggaccaggtgttcgtgtgggtgggcaaggacagccaggaggaggagaagaccgaggccctgaccagcgccaagagatacatcgagaccgaccccgccaacagagacagaagaacccccatcaccgtggtgaagcagggcttcgagccccccagcttcgtgggctggttcctgggctgggacgacgactactggagcgtggaccccctggacagagccatggccgagctggccgcctag

SEQ ID NO: 82862 - DNA, 4527 bp, synthetic construct
  misc_feature 1..4527: note = Description of Artificial Sequence: Synthetic coding sequence
  source 1..4527: mol_type = other DNA
atgggccaggagcccagaaccctgccccccagccccaactggtactgcgccagatgcagcgacgccgtgcccggcggcctgttcggcttcgccgccagaaccagcgtgttcctggtgagagtgggccccggcgccggcgagagccccggcaccccccccttcagagtgatcggcgagctggtgggccacaccgagagagtgagcggcttcaccttcagccaccaccccggccagtacaacctgtgcgccaccagcagcgacgacggcaccgtgaagatctgggacgtggagaccaagaccgtggtgaccgagcacgccctgcaccagcacaccatcagcaccctgcactggagccccagagtgaaggacctgatcgtgagcggcgacgagaagggcgtggtgttctgctactggttcaacagaaacgacagccagcacctgttcatcgagcccagaaccatcttctgcctgacctgcagcccccaccacgaggacctggtggccatcggctacaaggacggcatcgtggtgatcatcgacatcagcaagaagggcgaggtgatccacagactgagaggccacgacgacgagatccacagcatcgcctggtgccccctgcccggcgaggactgcctgagcatcaaccaggaggagaccagcgaggaggccgagatcaccaacggcaacgccgtggcccaggcccccgtgaccaagggctgctacctggccaccggcagcaaggaccagaccatcagaatctggagctgcagcagaggcagaggcgtgatgatcctgaagctgcccttcctgaagagaagaggcggcggcatcgaccccaccgtgaaggagagactgtggctgaccctgcactggcccagcaaccagcccacccagctggtgagcagctgcttcggcggcgagctgctgcagtgggacctgacccagagctggagaagaaagtacaccctgttcagcgccagcagcgagggccagaaccacagcagaatcgtgttcaacctgtgccccctgcagaccgaggacgacaagcagctgctgctgagcaccagcatggacagagacgtgaagtgctgggacatcgccaccctggagtgcagctggaccctgcccagcctgggcggcttcgcctacagcctggccttcagcagcgtggacatcggcagcctggccatcggcgtgggcgacggcatgatcagagtgtggaacaccctgagcatcaagaacaactacgacgtgaagaacttctggcagggcgtgaagagcaaggtgaccgccctgtgctggcaccccaccaaggagggctgcctggccttcggcaccgacgacggcaaggtgggcctgtacgacacctacagcaacaagcccccccagatcagcagcacctaccacaagaagaccgtgtacaccctggcctggggcccccccgtgccccccatgagcctgggcggcgagggcgacagacccagcctggccctgtacagctgcggcggcgagggcatcgtgctgcagcacaacccctggaagctgagcggcgaggccttcgacatcaacaagctgatcagagacaccaacagcatcaagtacaagctgcccgtgcacaccgagatcagctggaaggccgacggcaagatcatggccctgggcaacgaggacggcagcatcgagatcttccagatccccaacctgaagctgatctgcaccatccagcagcaccacaagctggtgaacaccatcagctggcaccacgagcacggcagccagcccgagctgagctacctgatggccagcggcagcaacaacgccgtgatctacgtgcacaacctgaagaccgtgatcgagagcagccccgagagccccgtgaccatcaccgagccctacagaaccctgagcggccacaccgccaagatcaccagcgtggcctggagcccccaccacgacggcagactggtgagcgccagctacgacggcaccgcccaggtgtgggacgccctgagagaggagcccctgtgcaacttcagaggccacagaggcagactgctgtgcgtggcctggagccccctggaccccgactgcatctacagcggcgccgacgacttctgcgtgcacaagtggctgaccagcatgcaggaccacagcagacccccccagggcaagaagagcatcgagctggagaagaagagactgagccagcccaaggccaagcccaagaagaagaagaagcccaccctgagaacccccgtgaagctggagagcatcgacggcaacgaggaggagagcatgaaggagaacagcggccccgtggagaacggcgtgagcgaccaggagggcgaggagcaggccagagagcccgagctgccctgcggcctggcccccgccgtgagcagagagcccgtgatctgcacccccgtgagcagcggcttcgagaagagcaaggtgaccatcaacaacaaggtgatcctgctgaagaaggagccccccaaggagaagcccgagaccctgatcaagaagagaaaggccagaagcctgctgcccctgagcaccagcctggaccacagaagcaaggaggagctgcaccaggactgcctggtgctggccaccgccaagcacagcagagagctgaacgaggacgtgagcgccgacgtggaggagagattccacctgggcctgttcaccgacagagccaccctgtacagaatgatcgacatcgagggcaagggccacctggagaacggccaccccgagctgttccaccagctgatgctgtggaagggcgacctgaagggcgtgctgcagaccgccgccgagagaggcgagctgaccgacaacctggtggccatggcccccgccgccggctaccacgtgtggctgtgggccgtggaggccttcgccaagcagctgtgcttccaggaccagtacgtgaaggccgccagccacctgctgagcatccacaaggtgtacgaggccgtggagctgctgaagagcaaccacttctacagagaggccatcgccatcgccaaggccagactgagacccgaggaccccgtgctgaaggacctgtacctgagctggggcaccgtgctggagagagacggccactacgccgtggccgccaagtgctacctgggcgccacctgcgcctacgacgccgccaaggtgctggccaagaagggcgacgccgccagcctgagaaccgccgccgagctggccgccatcgtgggcgaggacgagctgagcgccagcctggccctgagatgcgcccaggagctgctgctggccaacaactgggtgggcgcccaggaggccctgcagctgcacgagagcctgcagggccagagactggtgttctgcctgctggagctgctgagcagacacctggaggagaagcagctgagcgagggcaagagcagcagcagctaccacacctggaacaccggcaccgagggccccttcgtggagagagtgaccgccgtgtggaagagcatcttcagcctggacacccccgagcagtaccaggaggccttccagaagctgcagaacatcaagtaccccagcgccaccaacaacacccccgccaagcagctgctgctgcacatctgccacgacctgaccctggccgtgctgagccagcagatggccagctgggacgaggccgtgcaggccctgctgagagccgtggtgagaagctacgacagcggcagcttcaccatcatgcaggaggtgtacagcgccttcctgcccgacggctgcgaccacctgagagacaagctgggcgaccaccagagccccgccacccccgccttcaagagcctggaggccttcttcctgtacggcagactgtacgagttctggtggagcctgagcagaccctgccccaacagcagcgtgtgggtgagagccggccacagaaccctgagcgtggagcccagccagcagctggacaccgccagcaccgaggagaccgaccccgagaccagccagcccgagcccaacagacccagcgagctggacctgagactgaccgaggagggcgagagaatgctgagcaccttcaaggagctgttcagcgagaagcacgccagcctgcagaacagccagagaaccgtggccgaggtgcaggagaccctggccgagatgatcagacagcaccagaagagccagctgtgcaagagcaccgccaacggccccgacaagaacgagcccgaggtggaggccgagcagcccctgtgcagcagccagagccagtgcaaggaggagaagaacgagcccctgagcctgcccgagctgaccaagagactgaccgaggccaaccagagaatggccaagttccccgagagcatcaaggcctggcccttccccgacgtgctggagtgctgcctggtgctgctgctgatcagaagccacttccccggctgcctggcccaggagatgcagcagcaggcccaggagctgctgcagaagtacggcaacaccaagacctacagaagacactgccagaccttctgcatgtag

SEQ ID NO: 82863 - DNA, 396 bp, synthetic construct
  misc_feature 1..396: note = Description of Artificial Sequence: Synthetic coding sequence
  source 1..396: mol_type = other DNA
atgcagacccccgtgaacatccccgtgcccgtgctgagactgcccagaggccccgacggcttcagcagaggcttcgcccccgacggcagaagagcccccctgagacccgaggtgcccgagatccaggagtgccccatcgcccaggagagcctggagagccaggagcagagagccagagccgccctgagagagagatacctgagaagcctgctggccatggtgggccaccaggtgagcttcaccctgcacgagggcgtgagagtggccgcccacttcggcgccaccgacctggacgtggccaacttctacgtgagccagctgcagacccccatcggcgtgcaggccgaggccctgctgagatgcagcgacatcatcagctacaccttcaagccctag

SEQ ID NO: 82864 - DNA, 396 bp, synthetic construct; identical to SEQ ID NO: 82863
  misc_feature 1..396: note = Description of Artificial Sequence: Synthetic coding sequence
  source 1..396: mol_type = other DNA

SEQ ID NO: 82865 - DNA, 2913 bp, synthetic construct
  misc_feature 1..2913: note = Description of Artificial Sequence: Synthetic coding sequence
  source 1..2913: mol_type = other DNA
atggacgccgccgagcccggcctgccccccggccccgagggcagaaagagatacagcgacatcttcagaagcctggacaacctggagatcagcctgggcaacgtgaccctggagatgctggccggcgaccccctgctgagcgaggaccccgagcccgacaagacccccaccgccaccgtgaccaacgaggccagctgctggagcggccccagccccgagggccccgtgcccctgaccggcgaggagctggacctgagactgatcagaaccaagggcggcgtggacgccgccctggagtacgccaagacctggagcagatacgccaaggagctgctggcctggaccgagaagagagccagctacgagctggagttcgccaagagcaccatgaagatcgccgaggccggcaaggtgagcatccagcagcagagccacatgcccctgcagtacatctacaccctgttcctggagcacgacctgagcctgggcaccctggccatggagaccgtggcccagcagaagagagactactaccagcccctggccgccaagagaaccgagatcgagaagtggagaaaggagttcaaggagcagtggatgaaggagcagaagagaatgaacgaggccgtgcaggccctgagaagagcccagctgcagtacgtgcagagaagcgaggacctgagagccagaagccagggcagccccgaggacagcgccccccaggccagccccggccccagcaagcagcaggagagaagaagaagaagcagagaggaggcccaggccaaggcccaggaggccgaggccctgtaccaggcctgcgtgagagaggccaacgccagacagcaggacctggagatcgccaagcagagaatcgtgagccacgtgagaaagctggtgttccagggcgacgaggtgctgagaagagtgaccctgagcctgttcggcctgagaggcgcccaggccgagagaggccccagagccttcgccgccctggccgagtgctgcgcccccttcgagcccggccagagataccaggagttcgtgagagccctgagacccgaggccccccccccccccccccccgccttcagcttccaggagttcctgcccagcctgaacagcagccccctggacatcagaaagaagctgagcggccccctgccccccagactggacgagaacagcgccgagcccggcccctgggaggaccccggcaccggctggagatggcagggcacccccggccccacccccggcagcgacgtggacagcgtgggcggcggcagcgagagcagaagcctggacagccccaccagcagccccggcgccggcaccagacagctggtgaaggccagcagcaccggcaccgagagcagcgacgacttcgaggagagagaccccgacctgggcgacggcctggagaacggcctgggcagccccttcggcaagtggaccctgagcagcgccgcccagacccaccagctgagaagactgagaggccccgccaagtgcagagagtgcgaggccttcatggtgagcggcaccgagtgcgaggagtgcttcctgacctgccacaagagatgcctggagaccctgctgatcctgtgcggccacagaagactgcccgccagaacccccctgttcggcgtggacttcctgcagctgcccagagacttccccgaggaggtgcccttcgtggtgaccaagtgcaccgccgagatcgagcacagagccctggacgtgcagggcatctacagagtgagcggcagcagagtgagagtggagagactgtgccaggccttcgagaacggcagagccctggtggagctgagcggcaacagcccccacgacgtgagcagcgtgctgaagagattcctgcaggagctgaccgagcccgtgatccccttccacctgtacgacgccttcatcagcctggccaagaccctgcacgccgaccccggcgacgaccccggcacccccagccccagccccgaggtgatcagaagcctgaagaccctgctggtgcagctgcccgacagcaactacaacaccctgagacacctggtggcccacctgttcagagtggccgccagattcatggagaacaagatgagcgccaacaacctgggcatcgtgttcggccccaccctgctgagaccccccgacggccccagagccgccagcgccatccccgtgacctgcctgctggacagcggccaccaggcccagctggtggagttcctgatcgtgcactacgagcagatcttcggcatggacgagctgccccaggccaccgagccccccccccaggacagcagccccgcccccggccccctgaccaccagcagccagcccccccccccccacctggaccccgacagccagccccccgtgctggccagcgaccccggccccgacccccagcaccacagcaccctggagcagcaccccaccgccacccccaccgagatccccaccccccagagcgaccagagagaggacgtggccgaggacaccaaggacggcggcggcgaggtgagcagccagggccccgaggacagcctgctgggcacccagagcagaggccacttcagcagacagcccgtgaagtaccccagaggcggcgtgagacccgtgacccaccagctgagcagcctggccctggtggccagcaagctgtgcgaggagacccccatcaccagcgtgcccagaggcagcctgagaggcagaggccccagccccgccgccgccagccccgagggcagccccctgagaagaacccccctgcccaagcacttcgagatcacccaggagaccgccagactgctgagcaagctggacagcgaggccgtgcccagagccacctgctgccccgacgtgcagcccgaggaggccgaggaccacctgtag

SEQ ID NO: 82866 - DNA, 2826 bp, synthetic construct
  misc_feature 1..2826: note = Description of Artificial Sequence: Synthetic coding sequence
  source 1..2826: mol_type = other DNA
atggacgccgccgagcccggcctgccccccggccccgagggcagaaagagatacagcgacatcttcagaagcctggacaacctggagatcagcctgggcaacgtgaccctggagatgctggccggcgaccccctgctgagcgaggaccccgagcccgacaagacccccaccgccaccgtgaccaacgaggccagctgctggagcggccccagccccgagggccccgtgcccctgaccggcgaggagctggacctgagactgatcagaaccaagggcggcgtggacgccgccctggagtacgccaagacctggagcagatacgccaaggagctgctggcctggaccgagaagagagccagctacgagctggagttcgccaagagcaccatgaagatcgccgaggccggcaaggtgagcatccagcagcagagccacatgcccctgcagtacatctacaccctgttcctggagcacgacctgagcctgggcaccctggccatggagaccgtggcccagcagaagagagactactaccagcccctggccgccaagagaaccgagatcgagaagtggagaaaggagttcaaggagcagtggatgaaggagcagaagagaatgaacgaggccgtgcaggccctgagaagagcccagctgcagtacgtgcagagaagcgaggacctgagagccagaagccagggcagccccgaggacagcgccccccaggccagccccggccccagcaagcagcaggagagaagaagaagaagcagagaggaggcccaggccaaggcccaggaggccgaggccctgtaccaggcctgcgtgagagaggccaacgccagacagcaggacctggagatcgccaagcagagaatcgtgagccacgtgagaaagctggtgttccagggcgacgaggtgctgagaagagtgaccctgagcctgttcggcctgagaggcgcccaggccgagagaggccccagagccttcgccgccctggccgagtgctgcgcccccttcgagcccggccagagataccaggagttcgtgagagccctgagacccgaggccccccccccccccccccccgccttcagcttccaggagttcctgcccagcctgaacagcagccccctggacatcagaaagaagctgagcggccccctgccccccagactggacgagaacagcgccgagcccggcccctgggaggaccccggcaccggctggagatggcagggccccacccccggcagcgacgtggacagcgtgggcggcggcagcgagagcagaagcctggacagccccaccagcagccccgacctgggcgacggcctggagaacggcctgggcagccccttcggcaagtggaccctgagcagcgccgcccagacccaccagctgagaagactgagaggccccgccaagtgcagagagtgcgaggccttcatggtgagcggcaccgagtgcgaggagtgcttcctgacctgccacaagagatgcctggagaccctgctgatcctgtgcggccacagaagactgcccgccagaacccccctgttcggcgtggacttcctgcagctgcccagagacttccccgaggaggtgcccttcgtggtgaccaagtgcaccgccgagatcgagcacagagccctggacgtgcagggcatctacagagtgagcggcagcagagtgagagtggagagactgtgccaggccttcgagaacggcagagccctggtggagctgagcggcaacagcccccacgacgtgagcagcgtgctgaagagattcctgcaggagctgaccgagcccgtgatccccttccacctgtacgacgccttcatcagcctggccaagaccctgcacgccgaccccggcgacgaccccggcacccccagccccagccccgaggtgatcagaagcctgaagaccctgctggtgcagctgcccgacagcaactacaacaccctgagacacctggtggcccacctgttcagagtggccgccagattcatggagaacaagatgagcgccaacaacctgggcatcgtgttcggccccaccctgctgagaccccccgacggccccagagccgccagcgccatccccgtgacctgcctgctggacagcggccaccaggcccagctggtggagttcctgatcgtgcactacgagcagatcttcggcatggacgagctgccccaggccaccgagccccccccccaggacagcagccccgcccccggccccctgaccaccagcagccagcccccccccccccacctggaccccgacagccagccccccgtgctggccagcgaccccggccccgacccccagcaccacagcaccctggagcagcaccccaccgccacccccaccgagatccccaccccccagagcgaccagagagaggacgtggccgaggacaccaaggacggcggcggcgaggtgagcagccagggccccgaggacagcctgctgggcacccagagcagaggccacttcagcagacagcccgtgaagtaccccagaggcggcgtgagacccgtgacccaccagctgagcagcctggccctggtggccagcaagctgtgcgaggagacccccatcaccagcgtgcccagaggcagcctgagaggcagaggccccagccccgccgccgccagccccgagggcagccccctgagaagaacccccctgcccaagcacttcgagatcacccaggagaccgccagactgctgagcaagctggacagcgaggccgtgcccagagccacctgctgccccgacgtgcagcccgaggaggccgaggaccacctgtag

SEQ ID NO: 82867 - DNA, 1005 bp, synthetic construct
  misc_feature 1..1005: note = Description of Artificial Sequence: Synthetic coding sequence
  source 1..1005: mol_type = other DNA
atgaacaccatcctgccctgccaggaccagtacttcgtgggcggccagagctacaactgcccctacagcaccaccaccagcgagagcagcgtggacgtgagcaccgagacctgggtgagcttctgggccgccggcctgctggacaacagagagctgcagcaggccccccaggcccaggagagcttcagcgacagcaacttccccctgcccgacctgtgcagctgggaggaggcccagctgagcagccagctgtacagaaacaagcagctgcaggacaccctggtgcagaaggaggaggagctggccagactgcacgaggagaacaaccacctgagacagtacctgaacagcgccctggtgaagtgcctggaggagaaggccaagaagctgctgagcagcgacgagttcagcaaggcctacggcaagttcagaaagggcaagagaaagagcaaggagcagagatacagccccgccgagatcccccaccccaagaacgccaagagaaacctgagcagcgagttcgccaactgcgaggagcaggccggcccccccgtggacccctgggtgctgcagaccctgggcctgaaggacctggacaccatcgacgacaccagcagcgccaactacagcgccctggccagccaccccagaagagtggccagcaccttcagccagttccccgacgacgccgtggactacaagaacatccccagagaggacatgcccatcgactacagaggcgacagaaccacccccctgcacagcaccgccacccacggcgaggacttccacatcctgagccagctgagcaacccccccgtgggcctgaagaccctgccctactacaccgcccacgtgagccccaacaagaccgagatggccttcagcaccagcctgagcccccactgcaacgtgaagacccacagcttccaccagggccaggccttcgtgagaagagacgaggagggcggctggaagttcacctgggtgcccaagcagagctag

SEQ ID NO: 82868 - DNA, 2727 bp, synthetic construct
  misc_feature 1..2727: note = Description of Artificial Sequence: Synthetic coding sequence
  source 1..2727: mol_type = other DNA
atgggcgtgaacgacctgtggcagatcctggagcccgtgaagcagcacatccccctgagaaacctgggcggcaagaccatcgccgtggacctgagcctgtgggtgtgcgaggcccagaccgtgaagaagatgatgggcagcgtgatgaagccccacctgagaaacctgttcttcagaatcagctacctgacccagatggacgtgaagctggtgttcgtgatggagggcgagccccccaagctgaaggccgacgtgatcagcaagagaaaccagagcagatacggcagcagcggcaagagctggagccagaagaccggcagaagccacttcaagagcgtgctgagagagtgcctgcacatgctggagtgcctgggcatcccctgggtgcaggccgccggcgaggccgaggccatgtgcgcctacctgaacgccggcggccacgtggacggctgcctgaccaacgacggcgacaccttcctgtacggcgcccagaccgtgtacagaaacttcaccatgaacaccaaggacccccacgtggactgctacaccatgagcagcatcaagagcaagctgggcctggacagagacgccctggtgggcctggccatcctgctgggctgcgactacctgcccaagggcgtgcccggcgtgggcaaggagcaggccctgaagctgatccagatcctgaagggccagagcctgctgcagagattcaacagatggaacgagaccagctgcaacagcagcccccagctgctggtgaccaagaagctggcccactgcagcgtgtgcagccaccccggcagccccaaggaccacgagagaaacggctgcagactgtgcaagagcgacaagtactgcgagccccacgactacgagtactgctgcccctgcgagtggcacagaaccgagcacgacagacagctgagcgaggtggagaacaacatcaagaagaaggcctgctgctgcgagggcttccccttccacgaggtgatccaggagttcctgctgaacaaggacaagctggtgaaggtgatcagataccagagacccgacctgctgctgttccagagattcaccctggagaagatggagtggcccaaccactacgcctgcgagaagctgctggtgctgctgacccactacgacatgatcgagagaaagctgggcagcagaaacagcaaccagctgcagcccatcagaatcgtgaagaccagaatcagaaacggcgtgcactgcttcgagatcgagtgggagaagcccgagcactacgccatggaggacaagcagcacggcgagttcgccctgctgaccatcgaggaggagagcctgttcgaggccgcctaccccgagatcgtggccgtgtaccagaagcagaagctggagatcaagggcaagaagcagaagagaatcaagcccaaggagaacaacctgcccgagcccgacgaggtgatgagcttccagagccacatgaccctgaagcccacctgcgagatcttccacaagcagaacagcaagctgaacagcggcatcagccccgaccccaccctgccccaggagagcatcagcgccagcctgaacagcctgctgctgcccaagaacaccccctgcctgaacgcccaggagcagttcatgagcagcctgagacccctggccatccagcagatcaaggccgtgagcaagagcctgatcagcgagagcagccagcccaacaccagcagccacaacatcagcgtgatcgccgacctgcacctgagcaccatcgactgggagggcaccagcttcagcaacagccccgccatccagagaaacaccttcagccacgacctgaagagcgaggtggagagcgagctgagcgccatccccgacggcttcgagaacatccccgagcagctgagctgcgagagcgagagatacaccgccaacatcaagaaggtgctggacgaggacagcgacggcatcagccccgaggagcacctgctgagcggcatcaccgacctgtgcctgcaggacctgcccctgaaggagagaatcttcaccaagctgagctacccccaggacaacctgcagcccgacgtgaacctgaagaccctgagcatcctgagcgtgaaggagagctgcatcgccaacagcggcagcgactgcaccagccacctgagcaaggacctgcccggcatccccctgcagaacgagagcagagacagcaagatcctgaagggcgaccagctgctgcaggaggactacaaggtgaacaccagcgtgccctacagcgtgagcaacaccgtggtgaagacctgcaacgtgagaccccccaacaccgccctggaccacagcagaaaggtggacatgcagaccaccagaaagatcctgatgaagaagagcgtgtgcctggacagacacagcagcgacgagcagagcgcccccgtgttcggcaaggccaagtacaccacccagagaatgaagcacagcagccagaagcacaacagcagccacttcaaggagagcggccacaacaagctgagcagccccaagatccacatcaaggagaccgagcagtgcgtgagaagctacgagaccgccgagaacgaggagagctgcttccccgacagcaccaagagcagcctgagcagcctgcagtgccacaagaaggagaacaacagcggcacctgcctggacagccccctgcccctgagacagagactgaagctgagattccagagcacctag

SEQ ID NO: 82869 - DNA, 2727 bp, synthetic construct; identical to SEQ ID NO: 82868
  misc_feature 1..2727: note = Description of Artificial Sequence: Synthetic coding sequence
  source 1..2727: mol_type = other DNA

SEQ ID NO: 82870 - DNA, 381 bp, synthetic construct
  misc_feature 1..381: note = Description of Artificial Sequence: Synthetic coding sequence
  source 1..381: mol_type = other DNA
atgggcgtgaacgacctgtggcagatcctggagcccgtgaagcagcacatccccctgagaaacctgggcggcaagaccatcgccgtggacctgagcctgtgggtgtgcgaggcccagaccgtgaagaagatgatgggcagcgtgatgaagccccacctgagaaacctgttcttcagaatcagctacctgacccagatggacgtgaagctggtgttcgtgatggagggcgagccccccaagctgaaggccgacgtgatcagcaagagaaaccagagcagatacggcagcagcggcaagagctggagccagaagaccggcagaagccacttcaagagcgtgctgagagagtgcctgcacatgctggagtgcctgggcatctag

SEQ ID NO: 82871 - DNA, 282 bp, synthetic construct
  misc_feature 1..282: note = Description of Artificial Sequence: Synthetic coding sequence
  source 1..282: mol_type = other DNA
atgggcgtgaacgacctgtggcagatcctggagcccgtgaagcagcacatccccctgagaaacctgggcggcaagaccatcgccgtggacctgagcctgtgggtgtgcgaggcccagaccgtgaagaagatgatgggcagcgtgatgaagccccacctgagaaacctgttcttcagaatcagctacctgacccagatggacgtgaagctggtgttcgtgatggagggcgagccccccaagctgaaggccgacgtgatcagcaagagaaaccagagcagatag

SEQ ID NO: 82872 - DNA, 1431 bp, synthetic construct
  misc_feature 1..1431: note = Description of Artificial Sequence: Synthetic coding sequence
  source 1..1431: mol_type = other DNA
atggagtggcccaaccactacgcctgcgagaagctgctggtgctgctgacccactacgacatgatcgagagaaagctgggcagcagaaacagcaaccagctgcagcccatcagaatcgtgaagaccagaatcagaaacggcgtgcactgcttcgagatcgagtgggagaagcccgagcactacgccatggaggacaagcagcacggcgagttcgccctgctgaccatcgaggaggagagcctgttcgaggccgcctaccccgagatcgtggccgtgtaccagaagcagaagctggagatcaagggcaagaagcagaagagaatcaagcccaaggagaacaacctgcccgagcccgacgaggtgatgagcttccagagccacatgaccctgaagcccacctgcgagatcttccacaagcagaacagcaagctgaacagcggcatcagccccgaccccaccctgccccaggagagcatcagcgccagcctgaacagcctgctgctgcccaagaacaccccctgcctgaacgcccaggagcagttcatgagcagcctgagacccctggccatccagcagatcaaggccgtgagcaagagcctgatcagcgagagcagccagcccaacaccagcagccacaacatcagcgtgatcgccgacctgcacctgagcaccatcgactgggagggcaccagcttcagcaacagccccgccatccagagaaacaccttcagccacgacctgaagagcgaggtggagagcgagctgagcgccatccccgacggcttcgagaacatccccgagcagctgagctgcgagagcgagagatacaccgccaacatcaagaaggtgctggacgaggacagcgacggcatcagccccgaggagcacctgctgagcggcatcaccgacctgtgcctgcaggacctgcccctgaaggagagaatcttcaccaagctgagctacccccaggacaacctgcagcccgacgtgaacctgaagaccctgagcatcctgagcgtgaaggagagctgcatcgccaacagcggcagcgactgcaccagccacctgagcaaggacctgcccggcatccccctgcagaacgagagcagagacagcaagatcctgaagggcgaccagctgctgcaggaggactacaaggtgaacaccagcgtgccctacagcgtgagcaacaccgtggtgaagacctgcaacgtgagaccccccaacaccgccctggaccacagcagaaaggtggacatgcagaccaccagaaagatcctgatgaagaagagcgtgtgcctggacagacacagcagcgacgagcagagcgcccccgtgttcggcaaggccaagtacaccacccagagaatgaagcacagcagccagaagcacaacagcagccacttcaaggagagcggccacaacgagtag

SEQ ID NO: 82873 - DNA, 1437 bp, synthetic construct
  misc_feature 1..1437: note = Description of Artificial Sequence: Synthetic coding sequence
  source 1..1437: mol_type = other DNA
atggcctgcctgaaccccgtgcccaagctgtacagaagcgtgatcgaggacgtgatcgagggcgtgagaaacctgttcgccgaggagggcatcgaggagcaggtgctgaaggacctgaagcagctgtgggagaccaaggtgctgcagagcaaggccaccgaggacttcttcagaaacagcatccagagccccctgttcaccctgcagctgccccacagcctgcaccagaccctgcagagcagcaccgccagcctggtgatccccgccggcagaaccctgcccagcttcaccaccgccgagctgggcaccagcaacagcagcgccaacttcaccttccccggctaccccatccacgtgcccgccggcgtgaccctgcagaccgtgagcggccacctgtacaaggtgaacgtgcccatcatggtgaccgagaccagcggcagagccggcatcctgcagcaccccatccagcaggtgttccagcagctgggccagcccagcgtgatccagaccagcgtgccccagctgaacccctggagcctgcaggccaccaccgagaagagccagagaatcgagaccgtgctgcagcagcccgccatcctgcccagcggccccgtggacagaaagcacctggagaacgccaccagcgacatcctggtgagccccggcaacgagcacaagatcgtgcccgaggccctgctgtgccaccaggagagcagccactacatcagcctgcccggcgtggtgttcagcccccaggtgagccagaccaacagcaacgtggagagcgtgctgagcggcagcgccagcatggcccagaacctgcacgacgagagcctgagcaccagcccccacggcgccctgcaccagcacgtgaccgacatccagctgcacatcctgaagaacagaatgtacggctgcgacagcgtgaagcagcccagaaacatcgaggagcccagcaacatccccgtgagcgagaaggacagcaacagccaggtggacctgagcatcagagtgaccgacgacgacatcggcgagatcatccaggtggacggcagcggcgacaccagcagcaacgaggagatcggcagcaccagagacgccgacgagaacgagttcctgggcaacatcgacggcggcgacctgaaggtgcccgaggaggaggccgacagcatcagcaacgaggacagcgccaccaacagcagcgacaacgaggacccccaggtgaacatcgtggaggaggaccccctgaacagcggcgacgacgtgagcgagcaggacgtgcccgacctgttcgacaccgacaacgtgatcgtgtgccagtacgacaagatccacagaagcaagaacaagtggaagttctacctgaaggacggcgtgatgtgcttcggcggcagagactacgtgttcgccaaggccatcggcgacgccgagtggtag

SEQ ID NO: 82874 - DNA, 1335 bp, synthetic construct
  misc_feature 1..1335: note = Description of Artificial Sequence: Synthetic coding sequence
  source 1..1335: mol_type = other DNA
atggcctgcctgaaccccgtgctgtgggagaccaaggtgctgcagagcaaggccaccgaggacttcttcagaaacagcatccagagccccctgttcaccctgcagctgccccacagcctgcaccagaccctgcagagcagcaccgccagcctggtgatccccgccggcagaaccctgcccagcttcaccaccgccgagctgggcaccagcaacagcagcgccaacttcaccttccccggctaccccatccacgtgcccgccggcgtgaccctgcagaccgtgagcggccacctgtacaaggtgaacgtgcccatcatggtgaccgagaccagcggcagagccggcatcctgcagcaccccatccagcaggtgttccagcagctgggccagcccagcgtgatccagaccagcgtgccccagctgaacccctggagcctgcaggccaccaccgagaagagccagagaatcgagaccgtgctgcagcagcccgccatcctgcccagcggccccgtggacagaaagcacctggagaacgccaccagcgacatcctggtgagccccggcaacgagcacaagatcgtgcccgaggccctgctgtgccaccaggagagcagccactacatcagcctgcccggcgtggtgttcagcccccaggtgagccagaccaacagcaacgtggagagcgtgctgagcggcagcgccagcatggcccagaacctgcacgacgagagcctgagcaccagcccccacggcgccctgcaccagcacgtgaccgacatccagctgcacatcctgaagaacagaatgtacggctgcgacagcgtgaagcagcccagaaacatcgaggagcccagcaacatccccgtgagcgagaaggacagcaacagccaggtggacctgagcatcagagtgaccgacgacgacatcggcgagatcatccaggtggacggcagcggcgacaccagcagcaacgaggagatcggcagcaccagagacgccgacgagaacgagttcctgggcaacatcgacggcggcgacctgaaggtgcccgaggaggaggccgacagcatcagcaacgaggacagcgccaccaacagcagcgacaacgaggacccccaggtgaacatcgtggaggaggaccccctgaacagcggcgacgacgtgagcgagcaggacgtgcccgacctgttcgacaccgacaacgtgatcgtgtgccagtacgacaagatccacagaagcaagaacaagtggaagttctacctgaaggacggcgtgatgtgcttcggcggcagagactacgtgttcgccaaggccatcggcgacgccgagtggtag

SEQ ID NO: 82875 - DNA, 951 bp, synthetic construct
  misc_feature 1..951: note = Description of Artificial Sequence: Synthetic coding sequence
  source 1..951: mol_type = other DNA
atggccagcaccagcagactggacgccctgcccagagtgacctgccccaaccaccccgacgccatcctggtggaggactacagagccggcgacatgatctgccccgagtgcggcctggtggtgggcgacagagtgatcgacgtgggcagcgagtggagaaccttcagcaacgacaaggccaccaaggaccccagcagagtgggcgacagccagaaccccctgctgagcgacggcgacctgagcaccatgatcggcaagggcaccggcgccgccagcttcgacgagttcggcaacagcaagtaccagaacagaagaaccatgagcagcagcgacagagccatgatgaacgccttcaaggagatcaccaccatggccgacagaatcaacctgcccagaaacatcgtggacagaaccaacaacctgttcaagcaggtgtacgagcagaagagcctgaagggcagagccaacgacgccatcgccagcgcctgcctgtacatcgcctgcagacaggagggcgtgcccagaaccttcaaggagatctgcgccgtgagcagaatcagcaagaaggagatcggcagatgcttcaagctgatcctgaaggccctggagaccagcgtggacctgatcaccaccggcgacttcatgagcagattctgcagcaacctgtgcctgcccaagcaggtgcagatggccgccacccacatcgccagaaaggccgtggagctggacctggtgcccggcagaagccccatcagcgtggccgccgccgccatctacatggccagccaggccagcgccgagaagagaacccagaaggagatcggcgacatcgccggcgtggccgacgtgaccatcagacagagctacagactgatctaccccagagcccccgacctgttccccaccgacttcaagttcgacacccccgtggacaagctgccccagctgtag

SEQ ID NO: 82876 - DNA, 696 bp, synthetic construct
  misc_feature 1..696: note = Description of Artificial Sequence: Synthetic coding sequence
  source 1..696: mol_type = other DNA
atggccagcaccagcagactggacgccctgcccagagtgacctgccccaaccaccccgacgccatcctggtggaggactacagagccggcgacatgatctgccccgagtgcgacagagtgatcgacgtgggcagcgagtggagaaccttcagcaacgacaaggccaccaaggaccccagcagagtgggcgacagccagaaccccctgctgagcgacggcgacctgagcaccatgatcggcaagggcaccggcgccgccagcttcgacgagttcggcaacagcaagtaccagaacagaagaaccatgagcagcagcgacagagccatgatgaacgccttcaaggagatcaccaccatggccgacagaatcaacctgcccagaaacatcgtggacagaaccaacaacctgttcaagcaggtgtacgagcagaagagcctgaagggcagagccaacgacgccatcgccagcgcctgcctgtacatcgcctgcagacaggagggcgtgcccagaaccttcaaggagatctgcgccgtgagcagaatcagcaagaaggagatcggcagatgcttcaagctgatcctgaaggccctggagaccagcgtggacctgatcaccaccggcgacttcatgagcagattctgcagcaacctgtgcctgcccaagcaggtgcagatggccgccacccacatcgcctag

SEQ ID NO: 82877 - DNA, 675 bp, synthetic construct
  misc_feature 1..675: note = Description of Artificial Sequence: Synthetic coding sequence
  source 1..675: mol_type = other DNA
gccagcaccagcagactggacgccctgcccagagtgacctgccccaaccaccccgacgccatcctggtggaggactacagagccggcgacatgatctgccccgagtgcggcctggtggtgggcgacagagtgatcgacgtgggcagcgagtggagaaccttcagcaacgacaaggccaccaaggaccccagcagagtgggcgacagccagaaccccctgctgagcgacggcgacctgagcaccatgatcggcaagggcaccggcgccgccagcttcgacgagttcggcaacagcaagtaccagaacagaagaaccatgagcagcagcgacagagccatgatgaacgccttcaaggagatcaccaccatggccgacagaatcaacctgcccagaaacatcgtggacagaaccaacaacctgttcaagcaggtgtacgagcagaagagcctgaagggcagagccaacgacgccatcgccagcgcctgcctgtacatcgcctgcagacaggagggcgtgcccagaaccttcaaggagatctgcgccgtgagcagaatcagcaagaaggagatcggcagatgcttcaagctgatcctgaaggccctggagaccagcgtggacctgatcaccaccggcgacttcatgagcagaaactggagatactgctggtgctgctag

SEQ ID NO: 82878 - DNA, 876 bp, synthetic construct
  misc_feature 1..876: note = Description of Artificial Sequence: Synthetic coding sequence
  source 1..876: mol_type = other DNA
atggaccccagcctgctgagagagagagagctgttcaagaagagagccctgagcacccccgtggtggagaagagaagcgccagcagcgagagcagcagcagcagcagcaagaagaagaagaccaaggtggagcacggcggcagcagcggcagcaagcagaacagcgaccacagcaacggcagcttcaacctgaaggccctgagcggcagcagcggctacaagttcggcgtgctggccaagatcgtgaactacatgaagaccagacaccagagaggcgacacccaccccctgaccctggacgagatcctggacgagacccagcacctggacatcggcctgaagcagaagcagtggctgatgaccgaggccctggtgaacaaccccaagatcgaggtgatcgacggcaagtacgccttcaagcccaagtacaacgtgagagacaagaaggccctgctgagactgctggaccagcacgaccagagaggcctgggcggcatcctgctggaggacatcgaggaggccctgcccaacagccagaaggccgtgaaggccctgggcgaccagatcctgttcgtgaacagacccgacaagaagaagatcctgttcttcaacgacaagagctgccagttcagcgtggacgaggagttccagaagctgtggagaagcgtgaccgtggacagcatggacgaggagaagatcgaggagtacctgaagagacagggcatcagcagcatgcaggagagcggccccaagaaggtggcccccatccagagaagaaagaagcccgccagccagaagaagagaagattcaagacccacaacgagcacctggccggcgtgctgaaggactacagcgacatcaccagcagcaagtag

SEQ ID NO: 82879 - DNA, 381 bp, synthetic construct
  misc_feature 1..381: note = Description of Artificial Sequence: Synthetic coding sequence
  source 1..381: mol_type = other DNA
atggaccccagcctgctgagagagagagagctgttcaagaagagagccctgagcacccccgtggtggagaagagaagcgccagcagcgagagcagcagcagcagcagcaagaagaagaagaccaaggtggagcacggcggcagcagcggcagcaagcagaacagcgaccacagcaacggcagcttcaacctgaaggccctgagcggcagcagcggctacaagttcggcgtgctggccaagatcgtgaactacatgaagaccagacaccagagaggcgacacccaccccctgaccctggacgagatcctggacgagacccagcacctggacatcggcctgaagcagaagcagtggctgatgaccgaggccctggtgaactag

SEQ ID NO: 82880 - DNA, 597 bp, synthetic construct
  misc_feature 1..597: note = Description of Artificial Sequence: Synthetic coding sequence
  source 1..597: mol_type = other DNA
atggaccccagcctgctgagagagagagagctgttcaagaagagagccctgagcacccccgtggtggagaagagaagcgccagcagcgagagcagcagcagcagcagcaagaagaagaagaccaaggtggagcacggcggcagcagcggcagcaagcagaacagcgaccacagcaacggcagcttcaacctgaaggccctgagcggcagcagcggctacaagttcggcgtgctggccaagatcgtgaactacatgaagaccagacaccagagaggcgacacccaccccctgaccctggacgagatcctggacgagacccagcacctggacatcggcctgaagcagaagcagtggctgatgaccgaggccctggtgaacaaccccaagatcgaggtgatcgacggcaagtacgccttcaagcccaagtacaacgtgagagacaagaaggccctgctgagactgctggaccagcacgaccagagaggcctgggcggcatcctgctggaggacatcgaggaggccctgcccaacagccagaaggccgtgaaggccctgggcgaccagatcctgttcgtgaacagacccgacaagaagtag

SEQ ID NO: 82881 - DNA, 1554 bp, synthetic construct
  misc_feature 1..1554: note = Description of Artificial Sequence: Synthetic coding sequence
  source 1..1554: mol_type = other DNA
atggccgccctgggccccagcagccagaacgtgaccgagtacgtggtgagagtgcccaagaacaccaccaagaagtacaacatcatggccttcaacgccgccgacaaggtgaacttcgccacctggaaccaggccagactggagagagacctgagcaacaagaagatctaccaggaggaggagatgcccgagagcggcgccggcagcgagttcaacagaaagctgagagaggaggccagaagaaagaagtacggcatcgtgctgaaggagttcagacccgaggaccagccctggctgctgagagtgaacggcaagagcggcagaaagttcaagggcatcaagaagggcggcgtgaccgagaacaccagctactacatcttcacccagtgccccgacggcgccttcgaggccttccccgtgcacaactggtacaacttcacccccctggccagacacagaaccctgaccgccgaggaggccgaggaggagtgggagagaagaaacaaggtgctgaaccacttcagcatcatgcagcagagaagactgaaggaccaggaccaggacgaggacgaggaggagaaggagaagagaggcagaagaaaggccagcgagctgagaatccacgacctggaggacgacctggagatgagcagcgacgccagcgacgccagcggcgaggagggcggcagagtgcccaaggccaagaagaaggcccccctggccaagggcggcagaaagaagaagaagaagaagggcagcgacgacgaggccttcgaggacagcgacgacggcgacttcgagggccaggaggtggactacatgagcgacggcagcagcagcagccaggaggagcccgagagcaaggccaaggccccccagcaggaggagggccccaagggcgtggacgagcagagcgacagcagcgaggagagcgaggaggagaagccccccgaggaggacaaggaggaggaggaggagaagaaggcccccaccccccaggagaagaagagaagaaaggacagcagcgaggagagcgacagcagcgaggagagcgacatcgacagcgaggccagcagcgccctgttcatggccaagaagaagaccccccccaagagagagagaaagcccagcggcggcagcagcagaggcaacagcagacccggcacccccagcgccgagggcggcagcaccagcagcaccctgagagccgccgccagcaagctggagcagggcaagagagtgagcgagatgcccgccgccaagagactgagactggacaccggcccccagagcctgagcggcaagagcaccccccagccccccagcggcaagaccacccccaacagcggcgacgtgcaggtgaccgaggacgccgtgagaagatacctgaccagaaagcccatgaccaccaaggacctgctgaagaagttccagaccaagaagaccggcctgagcagcgagcagaccgtgaacgtgctggcccagatcctgaagagactgaaccccgagagaaagatgatcaacgacaagatgcacttcagcctgaaggagtag

SEQ ID NO: 82882 - DNA, 1299 bp, synthetic construct
  misc_feature 1..1299: note = Description of Artificial Sequence: Synthetic coding sequence
  source 1..1299: mol_type = other DNA
atggccttcaacgccgccgacaaggtgaacttcgccacctggaaccaggccagactggagagagacctgagcaacaagaagatctaccaggaggaggagatgcccgagagcggcgccggcagcgagttcaacagaaagctgagagaggaggccagaagaaagaagtacggcatcgtgctgaaggagttcagacccgaggaccagccctggctgctgagagtgaacggcaagagcggcagaaagagaaacaaggtgctgaaccacttcagcatcatgcagcagagaagactgaaggaccaggaccaggacgaggacgaggaggagaaggagaagagaggcagaagaaaggccagcgagctgagaatccacgacctggaggacgacctggagatgagcagcgacgccagcgacgccagcggcgaggagggcggcagagtgcccaaggccaagaagaaggcccccctggccaagggcggcagaaagaagaagaagaagaagggcagcgacgacgaggccttcgaggacagcgacgacggcgacttcgagggccaggaggtggactacatgagcgacggcagcagcagcagccaggaggagcccgagagcaaggccaaggccccccagcaggaggagggccccaagggcgtggacgagcagagcgacagcagcgaggagagcgaggaggagaagccccccgaggaggacaaggaggaggaggaggagaagaaggcccccaccccccaggagaagaagagaagaaaggacagcagcgaggagagcgacagcagcgaggagagcgacatcgacagcgaggccagcagcgccctgttcatggccaagaagaagaccccccccaagagagagagaaagcccagcggcggcagcagcagaggcaacagcagacccggcacccccagcgccgagggcggcagcaccagcagcaccctgagagccgccgccagcaagctggagcagggcaagagagtgagcgagatgcccgccgccaagagactgagactggacaccggcccccagagcctgagcggcaagagcaccccccagccccccagcggcaagaccacccccaacagcggcgacgtgcaggtgaccgaggacgccgtgagaagatacctgaccagaaagcccatgaccaccaaggacctgctgaagaagttccagaccaagaagaccggcctgagcagcgagcagaccgtgaacgtgctggcccagatcctgaagagactgaaccccgagagaaagatgatcaacgacaagatgcacttcagcctgaaggagtag

SEQ ID NO: 82883 - DNA, 384 bp, synthetic construct
  misc_feature 1..384: note = Description of Artificial Sequence: Synthetic coding sequence
  source 1..384: mol_type = other DNA
atggccgccctgggccccagcagccagaacgtgaccgagtacgtggtgagagtgcccaagaacaccaccaagaagtacaacatcatggccttcaacgccgccgacaaggtgaacttcgccacctggaaccaggccagactggagagagacctgagcaacaagaagatctaccaggaggaggagatgcccgagagcggcgccggcagcgagttcaacagaaagctgagagaggaggccagaagaaagaagtacggcatcgtgctgaaggagttcagacccgaggaccagccctggctgctgagagtgaacggcaagagcggcagaaagttcaagggcatcaagaagggcggcgtgaccgagaacaccagctactacatcttctag

SEQ ID NO: 82884 - DNA, 1647 bp, synthetic construct
  misc_feature 1..1647: note = Description of Artificial Sequence: Synthetic coding sequence
  source 1..1647: mol_type = other DNA
atggccaccagcagcgaggaggtgctgctgatcgtgaagaaggtgagacagaagaagcaggacggcgccctgtacctgatggccgagagaatcgcctgggcccccgagggcaaggacagattcaccatcagccacatgtacgccgacatcaagtgccagaagatcagccccgagggcaaggccaagatccagctgcagctggtgctgcacgccggcgacaccaccaacttccacttcagcaacgagagcaccgccgtgaaggagagagacgccgtgaaggacctgctgcagcagctgctgcccaagttcaagagaaaggccaacaaggagctggaggagaagaacagaatgctgcaggaggaccccgtgctgttccagctgtacaaggacctggtggtgagccaggtgatcagcgccgaggagttctgggccaacagactgaacgtgaacgccaccgacagcagcagcaccagcaaccacaagcaggacgtgggcatcagcgccgccttcctggccgacgtgagaccccagaccgacggctgcaacggcctgagatacaacctgaccagcgacatcatcgagagcatcttcagaacctaccccgccgtgaagatgaagtacgccgagaacgtgccccacaacatgaccgagaaggagttctggaccagattcttccagagccactacttccacagagacagactgaacaccggcagcaaggacctgttcgccgagtgcgccaagatcgacgagaagggcctgaagaccatggtgagcctgggcgtgaagaaccccctgctggacctgaccgccctggaggacaagcccctggacgagggctacggcatcagcagcgtgcccagcgccagcaacagcaagagcatcaaggagaacagcaacgccgccatcatcaagagattcaaccaccacagcgccatggtgctggccgccggcctgagaaagcaggaggcccagaacgagcagaccagcgagcccagcaacatggacggcaacagcggcgacgccgactgcttccagcccgccgtgaagagagccaagctgcaggagagcatcgagtacgaggacctgggcaagaacaacagcgtgaagaccatcgccctgaacctgaagaagagcgacagatactaccacggccccacccccatccagagcctgcagtacgccaccagccaggacatcatcaacagcttccagagcatcagacaggagatggaggcctacacccccaagctgacccaggtgctgagcagcagcgccgccagcagcaccatcaccgccctgagccccggcggcgccctgatgcagggcggcacccagcaggccatcaaccagatggtgcccaacgacatccagagcgagctgaagcacctgtacgtggccgtgggcgagctgctgagacacttctggagctgcttccccgtgaacacccccttcctggaggagaaggtggtgaagatgaagagcaacctggagagattccaggtgaccaagctgtgccccttccaggagaagatcagaagacagtacctgagcaccaacctggtgagccacatcgaggagatgctgcagaccgcctacaacaagctgcacacctggcagagcagaagactgatgaagaagacctag

SEQ ID NO: 82885 - DNA, 1647 bp, synthetic construct; identical to SEQ ID NO: 82884
  misc_feature 1..1647: note = Description of Artificial Sequence: Synthetic coding sequence
  source 1..1647: mol_type = other DNA

SEQ ID NO: 82886 - DNA, 288 bp, synthetic construct
  misc_feature 1..288: note = Description of Artificial Sequence: Synthetic coding sequence
  source 1..288: mol_type = other DNA
atggccaccagcagcgaggaggtgctgctgatcgtgaagaaggtgagacagaagaagcaggacggcgccctgtacctgatggccgagagaatcgcctgggcccccgagggcaaggacagattcaccatcagccacatgtacgccgacatcaagtgccagaagatcagccccgagggcaaggccaagatccagctgcagctggtgctgcacgccggcgacaccaccaacttccacttcagcaacgagagcaccgccgtgaaggagagagacgccgtgaaggacctgtag

SEQ ID NO: 82887 - DNA, 1299 bp, synthetic construct
  misc_feature 1..1299: note = Description of Artificial Sequence: Synthetic coding sequence
  source 1..1299: mol_type = other DNA
atgctgcaggaggaccccgtgctgttccagctgtacaaggacctggtggtgagccaggtgatcagcgccgaggagttctgggccaacagactgaacgtgaacgccaccgacagcagcagcaccagcaaccacaagcaggacgtgggcatcagcgccgccttcctggccgacgtgagaccccagaccgacggctgcaacggcctgagatacaacctgaccagcgacatcatcgagagcatcttcagaacctaccccgccgtgaagatgaagtacgccgagaacgtgccccacaacatgaccgagaaggagttctggaccagattcttccagagccactacttccacagagacagactgaacaccggcagcaaggacctgttcgccgagtgcgccaagatcgacgagaagggcctgaagaccatggtgagcctgggcgtgaagaaccccctgctggacctgaccgccctggaggacaagcccctggacgagggctacggcatcagcagcgtgcccagcgccagcaacagcaagagcatcaaggagaacagcaacgccgccatcatcaagagattcaaccaccacagcgccatggtgctggccgccggcctgagaaagcaggaggcccagaacgagcagaccagcgagcccagcaacatggacggcaacagcggcgacgccgactgcttccagcccgccgtgaagagagccaagctgcaggagagcatcgagtacgaggacctgggcaagaacaacagcgtgaagaccatcgccctgaacctgaagaagagcgacagatactaccacggccccacccccatccagagcctgcagtacgccaccagccaggacatcatcaacagcttccagagcatcagacaggagatggaggcctacacccccaagctgacccaggtgctgagcagcagcgccgccagcagcaccatcaccgccctgagccccggcggcgccctgatgcagggcggcacccagcaggccatcaaccagatggtgcccaacgacatccagagcgagctgaagcacctgtacgtggccgtgggcgagctgctgagacacttctggagctgcttccccgtgaacacccccttcctggaggagaaggtggtgaagatgaagagcaacctggagagattccaggtgaccaagctgtgccccttccaggagaagatcagaagacagtacctgagcaccaacctggtgagccacatcgaggagatgctgcagaccgcctacaacaagctgcacacctggcagagcagaagactgatgaagaagacctag

SEQ ID NO: 82888 - DNA, 1188 bp, synthetic construct
  misc_feature 1..1188: note = Description of Artificial Sequence: Synthetic coding sequence
  source 1..1188: mol_type = other DNA
atggacgaggagcccgagagaaccaagagatgggagggcggctacgagagaacctgggagatcctgaaggaggacgagagcggcagcctgaaggccaccatcgaggacatcctgttcaaggccaagagaaagagagtgttcgagcaccacggccaggtgagactgggcatgatgagacacctgtacgtggtggtggacggcagcagaaccatggaggaccaggacctgaagcccaacagactgacctgcaccctgaagctgctggagtacttcgtggaggagtacttcgaccagaaccccatcagccagatcggcatcatcgtgaccaagagcaagagagccgagaagctgaccgagctgagcggcaaccccagaaagcacatcaccagcctgaagaaggccgtggacatgacctgccacggcgagcccagcctgtacaacagcctgagcatcgccatgcagaccctgaagcacatgcccggccacaccagcagagaggtgctgatcatcttcagcagcctgaccacctgcgaccccagcaacatctacgacctgatcaagaccctgaaggccgccaagatcagagtgagcgtgatcggcctgagcgccgaggtgagagtgtgcaccgtgctggccagagagaccggcggcacctaccacgtgatcctggacgagagccactacaaggagctgctgacccaccacgtgagccccccccccgccagcagcagcagcgagtgcagcctgatcagaatgggcttcccccagcacaccatcgccagcctgagcgaccaggacgccaagcccagcttcagcatggcccacctggacggcaacaccgagcccggcctgaccctgggcggctacttctgcccccagtgcagagccaagtactgcgagctgcccgtggagtgcaagatctgcggcctgaccctggtgagcgccccccacctggccagaagctaccaccacctgttccccctggacgccttccaggagatccccctggaggagtacaacggcgagagattctgctacggctgccagggcgagctgaaggaccagcacgtgtacgtgtgcgccgtgtgccagaacgtgttctgcgtggactgcgacgtgttcgtgcacgacagcctgcactgctgccccggctgcatccacaagatccccgcccccagcggcgtgtag

SEQ ID NO: 82889 - DNA, 1188 bp, synthetic construct; identical to SEQ ID NO: 82888
  misc_feature 1..1188: note = Description of Artificial Sequence: Synthetic coding sequence
  source 1..1188: mol_type = other DNA

SEQ ID NO: 82890 - DNA, 1017 bp, synthetic construct
  misc_feature 1..1017: note = Description of Artificial Sequence: Synthetic coding sequence
  source 1..1017: mol_type = other DNA
atgagacacctgtacgtggtggtggacggcagcagaaccatggaggaccaggacctgaagcccaacagactgacctgcaccctgaagctgctggagtacttcgtggaggagtacttcgaccagaaccccatcagccagatcggcatcatcgtgaccaagagcaagagagccgagaagctgaccgagctgagcggcaaccccagaaagcacatcaccagcctgaagaaggccgtggacatgacctgccacggcgagcccagcctgtacaacagcctgagcatcgccatgcagaccctgaagcacatgcccggccacaccagcagagaggtgctgatcatcttcagcagcctgaccacctgcgaccccagcaacatctacgacctgatcaagaccctgaaggccgccaagatcagagtgagcgtgatcggcctgagcgccgaggtgagagtgtgcaccgtgctggccagagagaccggcggcacctaccacgtgatcctggacgagagccactacaaggagctgctgacccaccacgtgagccccccccccgccagcagcagcagcgagtgcagcctgatcagaatgggcttcccccagcacaccatcgccagcctgagcgaccaggacgccaagcccagcttcagcatggcccacctggacggcaacaccgagcccggcctgaccctgggcggctacttctgcccccagtgcagagccaagtactgcgagctgcccgtggagtgcaagatctgcggcctgaccctggtgagcgccccccacctggccagaagctaccaccacctgttccccctggacgccttccaggagatccccctggaggagtacaacggcgagagattctgctacggctgccagggcgagctgaaggaccagcacgtgtacgtgtgcgccgtgtgccagaacgtgttctgcgtggactgcgacgtgttcgtgcacgacagcctgcactgctgccccggctgcatccacaagatccccgcccccagcggcgtgtag

SEQ ID NO: 82891 - DNA, 1188 bp, synthetic construct; identical to SEQ ID NO: 82888
  misc_feature 1..1188: note = Description of Artificial Sequence: Synthetic coding sequence
  source 1..1188: mol_type = other DNA

SEQ ID NO: 82892 - DNA, 1389 bp, synthetic construct
  misc_feature 1..1389: note = Description of Artificial Sequence: Synthetic coding sequence
  source 1..1389: mol_type = other DNA
atggagagcacccccagcagaggcctgaacagagtgcacctgcagtgcagaaacctgcaggagttcctgggcggcctgagccccggcgtgctggacagactgtacggccaccccgccacctgcctggccgtgttcagagagctgcccagcctggccaagaactgggtgatgagaatgctgttcctggagcagcccctgccccaggccgccgtggccctgtgggtgaagaaggagttcagcaaggcccaggaggagagcaccggcctgctgagcggcctgagaatctggcacacccagctgctgcccggcggcctgcagggcctgatcctgaaccccatcttcagacagaacctgagaatcgccctgctgggcggcggcaaggcctggagcgacgacaccagccagctgggccccgacaagcacgccagagacgtgcccagcctggacaagtacgccgaggagagatgggaggtggtgctgcacttcatggtgggcagccccagcgccgccgtgagccaggacctggcccagctgctgagccaggccggcctgatgaagagcaccgagcccggcgagcccccctgcatcaccagcgccggcttccagttcctgctgctggacacccccgcccagctgtggtacttcatgctgcagtacctgcagaccgcccagagcagaggcatggacctggtggagatcctgagcttcctgttccagctgagcttcagcaccctgggcaaggactacagcgtggagggcatgagcgacagcctgctgaacttcctgcagcacctgagagagttcggcctggtgttccagagaaagagaaagagcagaagatactaccccaccagactggccatcaacctgagcagcggcgtgagcggcgccggcggcaccgtgcaccagcccggcttcatcgtggtggagaccaactacagactgtacgcctacaccgagagcgagctgcagatcgccctgatcgccctgttcagcgagatgctgtacagattccccaacatggtggtggcccaggtgaccagagagagcgtgcagcaggccatcgccagcggcatcaccgcccagcagatcatccacttcctgagaaccagagcccaccccgtgatgctgaagcagacccccgtgctgccccccaccatcaccgaccagatcagactgtgggagctggagagagacagactgagattcaccgagggcgtgctgtacaaccagttcctgagccaggtggacttcgagctgctgctggcccacgccagagagctgggcgtgctggtgttcgagaacagcgccaagagactgatggtggtgacccccgccggccacagcgacgtgaagagattctggaagagacagaagcacagcagctag

SEQ ID NO: 82893 - DNA, 1389 bp, synthetic construct; identical to SEQ ID NO: 82892
  misc_feature 1..1389: note = Description of Artificial Sequence: Synthetic coding sequence
  source 1..1389: mol_type = other DNA

SEQ ID NO: 82894 - DNA, 1389 bp, synthetic construct; identical to SEQ ID NO: 82892
  misc_feature 1..1389: note = Description of Artificial Sequence: Synthetic coding sequence
  source 1..1389: mol_type = other DNA

SEQ ID NO: 82895 - DNA, 1389 bp, synthetic construct; identical to SEQ ID NO: 82892
  misc_feature 1..1389: note = Description of Artificial Sequence: Synthetic coding sequence
  source 1..1389: mol_type = other DNA

SEQ ID NO: 82896 - DNA, 1389 bp, synthetic construct; identical to SEQ ID NO: 82892
  misc_feature 1..1389: note = Description of Artificial Sequence: Synthetic coding sequence
  source 1..1389: mol_type = other DNA

SEQ ID NO: 82897 - DNA, 417 bp, synthetic construct
  misc_feature 1..417: note = Description of Artificial Sequence: Synthetic coding sequence
  source 1..417: mol_type = other DNA
atggagagcacccccagcagaggcctgaacagagtgcacctgcagtgcagaaacctgcaggagttcctgggcggcctgagccccggcgtgctggacagactgtacggccaccccgccacctgcctggccgtgttcagagagctgcccagcctggccaagaactgggtgatgagaatgctgttcctggagcagcccctgccccaggccgccgtggccctgtgggtgaagaaggagttcagcaaggcccaggaggagagcaccggcctgctgagcggcctgagaatctggcacacccagctgctgcccggcggcctgcagggcctgatcctgaaccccatcttcagacagaacctgagaatcgccctgctgggcggcaccggcatcaccggcgtgagccactgcgcctggcccggctag

SEQ ID NO: 82898 - DNA, 1389 bp, synthetic construct; identical to SEQ ID NO: 82892
  misc_feature 1..1389: note = Description of Artificial Sequence: Synthetic coding sequence
  source 1..1389: mol_type = other DNA

SEQ ID NO: 82899 - DNA, 417 bp, synthetic construct; identical to SEQ ID NO: 82897
  misc_feature 1..417: note = Description of Artificial Sequence: Synthetic coding sequence
  source 1..417: mol_type = other DNA

SEQ ID NO: 82900 - DNA, 1389 bp, synthetic construct; identical to SEQ ID NO: 82892
  misc_feature 1..1389: note = Description of Artificial Sequence: Synthetic coding sequence
  source 1..1389: mol_type = other DNA

SEQ ID NO: 82901 - DNA, 417 bp, synthetic construct; identical to SEQ ID NO: 82897
  misc_feature 1..417: note = Description of Artificial Sequence: Synthetic coding sequence
  source 1..417: mol_type = other DNA

SEQ ID NO: 82902 - DNA, 1389 bp, synthetic construct; identical to SEQ ID NO: 82892
  misc_feature 1..1389: note = Description of Artificial Sequence: Synthetic coding sequence
  source 1..1389: mol_type = other DNA

SEQ ID NO: 82903 - DNA, 1389 bp, synthetic construct; identical to SEQ ID NO: 82892
  misc_feature 1..1389: note = Description of Artificial Sequence: Synthetic coding sequence
  source 1..1389: mol_type = other DNA

SEQ ID NO: 82904 - DNA, 1389 bp, synthetic construct; identical to SEQ ID NO: 82892
  misc_feature 1..1389: note = Description of Artificial Sequence: Synthetic coding sequence
  source 1..1389: mol_type = other DNA

SEQ ID NO: 82905 - DNA, 1389 bp, synthetic construct; identical to SEQ ID NO: 82892
  misc_feature 1..1389: note = Description of Artificial Sequence: Synthetic coding sequence
  source 1..1389: mol_type = other DNA

SEQ ID NO: 82906 - DNA, 417 bp, synthetic construct; identical to SEQ ID NO: 82897
  misc_feature 1..417: note = Description of Artificial Sequence: Synthetic coding sequence
  source 1..417: mol_type = other DNA

SEQ ID NO: 82907 - DNA, 417 bp, synthetic construct; identical to SEQ ID NO: 82897
  misc_feature 1..417: note = Description of Artificial Sequence: Synthetic coding sequence
  source 1..417: mol_type = other DNA

SEQ ID NO: 82908 - DNA, 417 bp, synthetic construct; identical to SEQ ID NO: 82897
  misc_feature 1..417: note = Description of Artificial Sequence: Synthetic coding sequence
  source 1..417: mol_type = other DNA

SEQ ID NO: 82909 - DNA, 1389 bp, synthetic construct; identical to SEQ ID NO: 82892
  misc_feature 1..1389: note = Description of Artificial Sequence: Synthetic coding sequence
  source 1..1389: mol_type = other DNA

SEQ ID NO: 82910 - DNA, 663 bp, synthetic construct
  misc_feature 1..663: note = Description of Artificial Sequence: Synthetic coding sequence
  source 1..663: mol_type = other DNA
atgagaatgctgttcctggagcagcccctgccccaggccgccgtggccctgtgggtgaagaaggagttcagcaaggcccaggaggagagcaccggcctgctgagcggcctgagaatctggcacacccagctgctgcccggcggcctgcagggcctgatcctgaaccccatcttcagacagaacctgagaatcgccctgctgggcggcggcaaggcctggagcgacgacaccagccagctgggccccgacaagcacgccagagacgtgcccagcctggacaagtacgccgaggagagatgggaggtggtgctgcacttcatggtgggcagccccagcgccgccgtgagccaggacctggcccagctgctgagccaggccggcctgatgaagagcaccgagcccggcgagcccccctgcatcaccagcgccggcttccagttcctgctgctggacacccccgcccagctgtggtacttcatgctgcagtacctgcagaccgcccagagcagaggcatggacctggtggagatcctgagcttcctgttccagctgagcttcagcaccctgggcaaggactacagcgtggagggcatgagcgacagcctgctgaacttcctgcagcacctgagagagttcggcctggtgttccagagaaaggtgtag

SEQ ID NO: 82911 - DNA, 663 bp, synthetic construct; identical to SEQ ID NO: 82910
  misc_feature 1..663: note = Description of Artificial Sequence: Synthetic coding sequence
  source 1..663: mol_type = other DNA

SEQ ID NO: 82912 - DNA, 663 bp, synthetic construct; identical to SEQ ID NO: 82910
  misc_feature 1..663: note = Description of Artificial Sequence: Synthetic coding sequence
  source 1..663: mol_type = other DNA

SEQ ID NO: 82913 - DNA, 663 bp, synthetic construct; identical to SEQ ID NO: 82910
  misc_feature 1..663: note = Description of Artificial Sequence: Synthetic coding sequence
  source 1..663: mol_type = other DNA

SEQ ID NO: 82914 - DNA, 663 bp, synthetic construct; identical to SEQ ID NO: 82910
  misc_feature 1..663: note = Description of Artificial Sequence: Synthetic coding sequence
  source 1..663: mol_type = other DNA

SEQ ID NO: 82915 - DNA, 663 bp, synthetic construct; identical to SEQ ID NO: 82910
  misc_feature 1..663: note = Description of Artificial Sequence: Synthetic coding sequence
  source 1..663: mol_type = other DNA

SEQ ID NO: 82916 - DNA, 216 bp, synthetic construct
  misc_feature 1..216: note = Description of Artificial Sequence: Synthetic coding sequence
  source 1..216: mol_type = other DNA
atggtgaacgtgctgaagggcgtgctgatcgagtgcgaccccgccatgaagcagttcctgctgtacctggacgagagcaacgccctgggcaagaagttcatcatccaggacatcgacgacacccacgtgttcgtgatcgccgagctggtgaacgtgctgcaggagagagtgggcgagctgatggaccagaacgccttcagcctgacccagaagtag

SEQ ID NO: 82917 - DNA, 2997 bp, synthetic construct
  misc_feature 1..2997: note = Description of Artificial Sequence: Synthetic coding sequence
  source 1..2997: mol_type = other DNA
atggcccaggtggccatgagcaccctgcccgtggaggacgaggagagcagcgagagcagaatggtggtgaccttcctgatgagcgccctggagagcatgtgcaaggagctggccaagagcaaggccgaggtggcctgcatcgccgtgtacgagaccgacgtgttcgtggtgggcaccgagagaggcagagccttcgtgaacaccagaaaggacttccagaaggacttcgtgaagtactgcgtggaggaggaggagaaggccgccgagatgcacaagatgaagagcaccacccaggccaacagaatgagcgtggacgccgtggagatcgagaccctgagaaagaccgtggaggactacttctgcttctgctacggcaaggccctgggcaagagcaccgtggtgcccgtgccctacgagaagatgctgagagaccagagcgccgtggtggtgcagggcctgcccgagggcgtggccttcaagcaccccgagaactacgacctggccaccctgaagtggatcctggagaacaaggccggcatcagcttcatcatcaagagacccttcctggagcccaagaagcacgtgggcggcagagtgatggtgaccgacgccgacagaagcatcctgagccccggcggcagctgcggccccatcaaggtgaagaccgagcccaccgaggacagcggcatcagcctggagatggccgccgtgaccgtgaaggaggagagcgaggaccccgactactaccagtacaacatccaggccggccccagcgagaccgacgacgtggacgagaagcagcccctgagcaagcccctgcagggcagccaccacagcagcgagggcaacgagggcaccgagatggaggtgcccgccgaggacagcacccagcacgtgcccagcgagaccagcgaggaccccgaggtggaggtgaccatcgaggacgacgactacagcccccccagcaagagacccaaggccaacgagctgccccagccccccgtgcccgagcccgccaacgccggcaagagaaaggtgagagagttcaacttcgagaagtggaacgccagaatcaccgacctgagaaagcaggtggaggagctgttcgagagaaagtacgcccaggccatcaaggccaagggccccgtgaccatcccctaccccctgttccagagccacgtggaggacctgtacgtggagggcctgcccgagggcatccccttcagaagacccagcacctacggcatccccagactggagagaatcctgctggccaaggagagaatcagattcgtgatcaagaagcacgagctgctgaacagcaccagagaggacctgcagctggacaagcccgccagcggcgtgaaggaggagtggtacgccagaatcaccaagctgagaaagatggtggaccagctgttctgcaagaagttcgccgaggccctgggcagcaccgaggccaaggccgtgccctaccagaagttcgaggcccaccccaacgacctgtacgtggagggcctgcccgagaacatccccttcagaagccccagctggtacggcatccccagactggagaagatcatccaggtgggcaacagaatcaagttcgtgatcaagagacccgagctgctgacccacagcaccaccgaggtgacccagcccagaaccaacacccccgtgaaggaggactggaacgtgagaatcaccaagctgagaaagcaggtggaggagatcttcaacctgaagttcgcccaggccctgggcctgaccgaggccgtgaaggtgccctaccccgtgttcgagagcaaccccgagttcctgtacgtggagggcctgcccgagggcatccccttcagaagccccacctggttcggcatccccagactggagagaatcgtgagaggcagcaacaagatcaagttcgtggtgaagaagcccgagctggtgatcagctacctgccccccggcatggccagcaagatcaacaccaaggccctgcagagccccaagagacccagaagccccggcagcaacagcaaggtgcccgagatcgaggtgaccgtggagggccccaacaacaacaacccccagaccagcgccgtgagaacccccacccagaccaacggcagcaacgtgcccttcaagcccagaggcagagagttcagcttcgaggcctggaacgccaagatcaccgacctgaagcagaaggtggagaacctgttcaacgagaagtgcggcgaggccctgggcctgaagcaggccgtgaaggtgcccttcgccctgttcgagagcttccccgaggacttctacgtggagggcctgcccgagggcgtgcccttcagaagacccagcaccttcggcatccccagactggagaagatcctgagaaacaaggccaagatcaagttcatcatcaagaagcccgagatgttcgagaccgccatcaaggagagcaccagcagcaagagcccccccagaaagatcaacagcagccccaacgtgaacaccaccgccagcggcgtggaggacctgaacatcatccaggtgaccatccccgacgacgacaacgagagactgagcaaggtggagaaggccagacagctgagagagcaggtgaacgacctgttcagcagaaagttcggcgaggccatcggcatgggcttccccgtgaaggtgccctacagaaagatcaccatcaaccccggctgcgtggtggtggacggcatgccccccggcgtgagcttcaaggcccccagctacctggagatcagcagcatgagaagaatcctggacagcgccgagttcatcaagttcaccgtgatcagacccttccccggcctggtgatcaacaaccagctggtggaccagagcgagagcgagggccccgtgatccaggagagcgccgagcccagccagctggaggtgcccgccaccgaggagatcaaggagaccgacggcagcagccagatcaagcaggagcccgaccccacctggtag

SEQ ID NO: 82918 - DNA, 2934 bp, synthetic construct
  misc_feature 1..2934: note = Description of Artificial Sequence: Synthetic coding sequence
  source 1..2934: mol_type = other DNA
atggcccaggtggccatgagcaccctgcccgtggaggacgaggagagcagcgagagcagaatggtggtgaccttcctgatgagcgccctggagagcatgtgcaaggagctggccaagagcaaggccgaggtggcctgcatcgccgtgtacgagaccgacgtgttcgtggtgggcaccgagagaggcagagccttcgtgaacaccagaaaggacttccagaaggacttcgtgaagtactgcgtggaggaggaggagaaggccgccgagatgcacaagatgaagagcaccacccaggccaacagaatgagcgtggacgccgtggagatcgagaccctgagaaagaccgtggaggactacttctgcttctgctacggcaaggccctgggcaagagcaccgtggtgcccgtgccctacgagaagatgctgagagaccagagcgccgtggtggtgcagggcctgcccgagggcgtggccttcaagcaccccgagaactacgacctggccaccctgaagtggatcctggagaacaaggccggcatcagcttcatcatcaagagacccttcctggagcccaagaagcacgtgggcggcagagtgatggtgaccgacgccgacagaagcatcctgagccccggcggcagctgcggccccatcaaggtgaagaccgagcccaccgaggacagcggcatcagcctggagatggccgccgtgaccgtgaaggaggagagcgaggaccccgactactaccagtacaacatccaggccggccccagcgagaccgacgacgtggacgagaagcagcccctgagcaagcccctgcagggcagccaccacagcagcgagggcaacgagggcaccgagatggaggtgcccgccgaggacgacgactacagcccccccagcaagagacccaaggccaacgagctgccccagccccccgtgcccgagcccgccaacgccggcaagagaaaggtgagagagttcaacttcgagaagtggaacgccagaatcaccgacctgagaaagcaggtggaggagctgttcgagagaaagtacgcccaggccatcaaggccaagggccccgtgaccatcccctaccccctgttccagagccacgtggaggacctgtacgtggagggcctgcccgagggcatccccttcagaagacccagcacctacggcatccccagactggagagaatcctgctggccaaggagagaatcagattcgtgatcaagaagcacgagctgctgaacagcaccagagaggacctgcagctggacaagcccgccagcggcgtgaaggaggagtggtacgccagaatcaccaagctgagaaagatggtggaccagctgttctgcaagaagttcgccgaggccctgggcagcaccgaggccaaggccgtgccctaccagaagttcgaggcccaccccaacgacctgtacgtggagggcctgcccgagaacatccccttcagaagccccagctggtacggcatccccagactggagaagatcatccaggtgggcaacagaatcaagttcgtgatcaagagacccgagctgctgacccacagcaccaccgaggtgacccagcccagaaccaacacccccgtgaaggaggactggaacgtgagaatcaccaagctgagaaagcaggtggaggagatcttcaacctgaagttcgcccaggccctgggcctgaccgaggccgtgaaggtgccctaccccgtgttcgagagcaaccccgagttcctgtacgtggagggcctgcccgagggcatccccttcagaagccccacctggttcggcatccccagactggagagaatcgtgagaggcagcaacaagatcaagttcgtggtgaagaagcccgagctggtgatcagctacctgccccccggcatggccagcaagatcaacaccaaggccctgcagagccccaagagacccagaagccccggcagcaacagcaaggtgcccgagatcgaggtgaccgtggagggccccaacaacaacaacccccagaccagcgccgtgagaacccccacccagaccaacggcagcaacgtgcccttcaagcccagaggcagagagttcagcttcgaggcctggaacgccaagatcaccgacctgaagcagaaggtggagaacctgttcaacgagaagtgcggcgaggccctgggcctgaagcaggccgtgaaggtgcccttcgccctgttcgagagcttccccgaggacttctacgtggagggcctgcccgagggcgtgcccttcagaagacccagcaccttcggcatccccagactggagaagatcctgagaaacaaggccaagatcaagttcatcatcaagaagcccgagatgttcgagaccgccatcaaggagagcaccagcagcaagagcccccccagaaagatcaacagcagccccaacgtgaacaccaccgccagcggcgtggaggacctgaacatcatccaggtgaccatccccgacgacgacaacgagagactgagcaaggtggagaaggccagacagctgagagagcaggtgaacgacctgttcagcagaaagttcggcgaggccatcggcatgggcttccccgtgaaggtgccctacagaaagatcaccatcaaccccggctgcgtggtggtggacggcatgccccccggcgtgagcttcaaggcccccagctacctggagatcagcagcatgagaagaatcctggacagcgccgagttcatcaagttcaccgtgatcagacccttccccggcctggtgatcaacaaccagctggtggaccagagcgagagcgagggccccgtgatccaggagagcgccgagcccagccagctggaggtgcccgccaccgaggagatcaaggagaccgacggcagcagccagatcaagcaggagcccgaccccacctggtag

SEQ ID NO: 82919 - DNA, 2937 bp, synthetic construct
  misc_feature 1..2937: note = Description of Artificial Sequence: Synthetic coding sequence
  source 1..2937: mol_type = other DNA
atggcccaggtggccatgagcaccctgcccgtggaggacgaggagagcagcgagagcagaatggtggtgaccttcctgatgagcgccctggagagcatgtgcaaggagctggccaagagcaaggccgaggtggcctgcatcgccgtgtacgagaccgacgtgttcgtggtgggcaccgagagaggcagagccttcgtgaacaccagaaaggacttccagaaggacttcgtgaagtactgcgtggaggaggaggagaaggccgccgagatgcacaagatgaagagcaccacccaggccaacagaatgagcgtggacgccgtggagatcgagaccctgagaaagaccgtggaggactacttctgcttctgctacggcaaggccctgggcaagagcaccgtggtgcccgtgccctacgagaagatgctgagagaccagagcgccgtggtggtgcagggcctgcccgagggcgtggccttcaagcaccccgagaactacgacctggccaccctgaagtggatcctggagaacaaggccggcatcagcttcatcatcaagagacccttcctggagcccaagaagcacgtgggcggcagagtgatggtgaccgacgccgacagaagcatcctgagccccggcggcagctgcggccccatcaaggtgaagaccgagcccaccgaggacagcggcatcagcctggagatggccgccgtgaccgtgaaggaggagagcgaggaccccgactactaccagtacaacatccagggcagccaccacagcagcgagggcaacgagggcaccgagatggaggtgcccgccgaggacagcacccagcacgtgcccagcgagaccagcgaggaccccgaggtggaggtgaccatcgaggacgacgactacagcccccccagcaagagacccaaggccaacgagctgccccagccccccgtgcccgagcccgccaacgccggcaagagaaaggtgagagagttcaacttcgagaagtggaacgccagaatcaccgacctgagaaagcaggtggaggagctgttcgagagaaagtacgcccaggccatcaaggccaagggccccgtgaccatcccctaccccctgttccagagccacgtggaggacctgtacgtggagggcctgcccgagggcatccccttcagaagacccagcacctacggcatccccagactggagagaatcctgctggccaaggagagaatcagattcgtgatcaagaagcacgagctgctgaacagcaccagagaggacctgcagctggacaagcccgccagcggcgtgaaggaggagtggtacgccagaatcaccaagctgagaaagatggtggaccagctgttctgcaagaagttcgccgaggccctgggcagcaccgaggccaaggccgtgccctaccagaagttcgaggcccaccccaacgacctgtacgtggagggcctgcccgagaacatccccttcagaagccccagctggtacggcatccccagactggagaagatcatccaggtgggcaacagaatcaagttcgtgatcaagagacccgagctgctgacccacagcaccaccgaggtgacccagcccagaaccaacacccccgtgaaggaggactggaacgtgagaatcaccaagctgagaaagcaggtggaggagatcttcaacctgaagttcgcccaggccctgggcctgaccgaggccgtgaaggtgccctaccccgtgttcgagagcaaccccgagttcctgtacgtggagggcctgcccgagggcatccccttcagaagccccacctggttcggcatccccagactggagagaatcgtgagaggcagcaacaagatcaagttcgtggtgaagaagcccgagctggtgatcagctacctgccccccggcatggccagcaagatcaacaccaaggccctgcagagccccaagagacccagaagccccggcagcaacagcaaggtgcccgagatcgaggtgaccgtggagggccccaacaacaacaacccccagaccagcgccgtgagaacccccacccagaccaacggcagcaacgtgcccttcaagcccagaggcagagagttcagcttcgaggcctggaacgccaagatcaccgacctgaagcagaaggtggagaacctgttcaacgagaagtgcggcgaggccctgggcctgaagcaggccgtgaaggtgcccttcgccctgttcgagagcttccccgaggacttctacgtggagggcctgcccgagggcgtgcccttcagaagacccagcaccttcggcatccccagactggagaagatcctgagaaacaaggccaagatcaagttcatcatcaagaagcccgagatgttcgagaccgccatcaaggagagcaccagcagcaagagcccccccagaaagatcaacagcagccccaacgtgaacaccaccgccagcggcgtggaggacctgaacatcatccaggtgaccatccccgacgacgacaacgagagactgagcaaggtggagaaggccagacagctgagagagcaggtgaacgacctgttcagcagaaagttcggcgaggccatcggcatgggcttccccgtgaaggtgccctacagaaagatcaccatcaaccccggctgcgtggtggtggacggcatgccccccggcgtgagcttcaaggcccccagctacctggagatcagcagcatgagaagaatcctggacagcgccgagttcatcaagttcaccgtgatcagacccttccccggcctggtgatcaacaaccagctggtggaccagagcgagagcgagggccccgtgatccaggagagcgccgagcccagccagctggaggtgcccgccaccgaggagatcaaggagaccgacggcagcagccagatcaagcaggagcccgaccccacctggtag

SEQ ID NO: 82920 - DNA, 2874 bp, synthetic construct
  misc_feature 1..2874: note = Description of Artificial Sequence: Synthetic coding sequence
  source 1..2874: mol_type = other DNA
atggcccaggtggccatgagcaccctgcccgtggaggacgaggagagcagcgagagcagaatggtggtgaccttcctgatgagcgccctggagagcatgtgcaaggagctggccaagagcaaggccgaggtggcctgcatcgccgtgtacgagaccgacgtgttcgtggtgggcaccgagagaggcagagccttcgtgaacaccagaaaggacttccagaaggacttcgtgaagtactgcgtggaggaggaggagaaggccgccgagatgcacaagatgaagagcaccacccaggccaacagaatgagcgtggacgccgtggagatcgagaccctgagaaagaccgtggaggactacttctgcttctgctacggcaaggccctgggcaagagcaccgtggtgcccgtgccctacgagaagatgctgagagaccagagcgccgtggtggtgcagggcctgcccgagggcgtggccttcaagcaccccgagaactacgacctggccaccctgaagtggatcctggagaacaaggccggcatcagcttcatcatcaagagacccttcctggagcccaagaagcacgtgggcggcagagtgatggtgaccgacgccgacagaagcatcctgagccccggcggcagctgcggccccatcaaggtgaagaccgagcccaccgaggacagcggcatcagcctggagatggccgccgtgaccgtgaaggaggagagcgaggaccccgactactaccagtacaacatccagggcagccaccacagcagcgagggcaacgagggcaccgagatggaggtgcccgccgaggacgacgactacagcccccccagcaagagacccaaggccaacgagctgccccagccccccgtgcccgagcccgccaacgccggcaagagaaaggtgagagagttcaacttcgagaagtggaacgccagaatcaccgacctgagaaagcaggtggaggagctgttcgagagaaagtacgcccaggccatcaaggccaagggccccgtgaccatcccctaccccctgttccagagccacgtggaggacctgtacgtggagggcctgcccgagggcatccccttcagaagacccagcacctacggcatccccagactggagagaatcctgctggccaaggagagaatcagattcgtgatcaagaagcacgagctgctgaacagcaccagagaggacctgcagctggacaagcccgccagcggcgtgaaggaggagtggtacgccagaatcaccaagctgagaaagatggtggaccagctgttctgcaagaagttcgccgaggccctgggcagcaccgaggccaaggccgtgccctaccagaagttcgaggcccaccccaacgacctgtacgtggagggcctgcccgagaacatccccttcagaagccccagctggtacggcatccccagactggagaagatcatccaggtgggcaacagaatcaagttcgtgatcaagagacccgagctgctgacccacagcaccaccgaggtgacccagcccagaaccaacacccccgtgaaggaggactggaacgtgagaatcaccaagctgagaaagcaggtggaggagatcttcaacctgaagttcgcccaggccctgggcctgaccgaggccgtgaaggtgccctaccccgtgttcgagagcaaccccgagttcctgtacgtggagggcctgcccgagggcatccccttcagaagccccacctggttcggcatccccagactggagagaatcgtgagaggcagcaacaagatcaagttcgtggtgaagaagcccgagctggtgatcagctacctgccccccggcatggccagcaagatcaacaccaaggccctgcagagccccaagagacccagaagccccggcagcaacagcaaggtgcccgagatcgaggtgaccgtggagggccccaacaacaacaacccccagaccagcgccgtgagaacccccacccagaccaacggcagcaacgtgcccttcaagcccagaggcagagagttcagcttcgaggcctggaacgccaagatcaccgacctgaagcagaaggtggagaacctgttcaacgagaagtgcggcgaggccctgggcctgaagcaggccgtgaaggtgcccttcgccctgttcgagagcttccccgaggacttctacgtggagggcctgcccgagggcgtgcccttcagaagacccagcaccttcggcatccccagactggagaagatcctgagaaacaaggccaagatcaagttcatcatcaagaagcccgagatgttcgagaccgccatcaaggagagcaccagcagcaagagcccccccagaaagatcaacagcagccccaacgtgaacaccaccgccagcggcgtggaggacctgaacatcatccaggtgaccatccccgacgacgacaacgagagactgagcaaggtggagaaggccagacagctgagagagcaggtgaacgacctgttcagcagaaagttcggcgaggccatcggcatgggcttccccgtgaaggtgccctacagaaagatcaccatcaaccccggctgcgtggtggtggacggcatgccccccggcgtgagcttcaaggcccccagctacctggagatcagcagcatgagaagaatcctggacagcgccgagttcatcaagttcaccgtgatcagacccttccccggcctggtgatcaacaaccagctggtggaccagagcgagagcgagggccccgtgatccaggagagcgccgagcccagccagctggaggtgcccgccaccgaggagatcaaggagaccgacggcagcagccagatcaagcaggagcccgaccccacctggtag

SEQ ID NO: 82921 - DNA, 321 bp, synthetic construct
  misc_feature 1..321: note = Description of Artificial Sequence: Synthetic coding sequence
  source 1..321: mol_type = other DNA
atggcccaggtggccatgagcaccctgcccgtggaggacgaggagagcagcgagagcagaatggtggtgaccttcctgatgagcgccctggagagcatgtgcaaggagctggccaagagcaaggccgaggtggcctgcatcgccgtgtacgagaccgacgtgttcgtggtgggcaccgagagaggcagagccttcgtgaacaccagaaaggacttccagaaggacttcgtgaagtactgcgtggaggaggaggagaaggccgccgagatgcacaagatgaagagcaccacccaggccaacagaatgagcgtggacgcctag

SEQ ID NO: 82922 - DNA, 825 bp, synthetic construct
  misc_feature 1..825: note = Description of Artificial Sequence: Synthetic coding sequence
  source 1..825: mol_type = other DNA
atggcccaggtggccatgagcaccctgcccgtggaggacgaggagagcagcgagagcagaatggtggtgaccttcctgatgagcgccctggagagcatgtgcaaggagctggccaagagcaaggccgaggtggcctgcatcgccgtgtacgagaccgacgtgttcgtggtgggcaccgagagaggcagagccttcgtgaacaccagaaaggacttccagaaggacttcgtgaagtactgcgtggaggaggaggagaaggccgccgagatgcacaagatgaagagcaccacccaggccaacagaatgagcgtggacgccgtggagatcgagaccctgagaaagaccgtggaggactacttctgcttctgctacggcaaggccctgggcaagagcaccgtggtgcccgtgccctacgagaagatgctgagagaccagagcgccgtggtggtgcagggcctgcccgagggcgtggccttcaagcaccccgagaactacgacctggccaccctgaagtggatcctggagaacaaggccggcatcagcttcatcatcaagagacccttcctggagcccaagaagcacgtgggcggcagagtgatggtgaccgacgccgacagaagcatcctgagccccggcggcagctgcggccccatcaaggtgaagaccgagcccaccgaggacagcggcatcagcctggagatggccgccgtgaccgtgaaggaggagagcgaggaccccgactactaccagtacaacatccagggcagccaccacagcagcgagggcaacgagggcaccgagatggaggtgcccgccgagggctag

SEQ ID NO: 82923 - DNA, 2982 bp, synthetic construct
  misc_feature 1..2982: note = Description of Artificial Sequence: Synthetic coding sequence
  source 1..2982: mol_type = other DNA
atgagcaccctgcccgtggaggacgaggagagcagcgagagcagaatggtggtgaccttcctgatgagcgccctggagagcatgtgcaaggagctggccaagagcaaggccgaggtggcctgcatcgccgtgtacgagaccgacgtgttcgtggtgggcaccgagagaggcagagccttcgtgaacaccagaaaggacttccagaaggacttcgtgaagtactgcgtggaggaggaggagaaggccgccgagatgcacaagatgaagagcaccacccaggccaacagaatgagcgtggacgccgtggagatcgagaccctgagaaagaccgtggaggactacttctgcttctgctacggcaaggccctgggcaagagcaccgtggtgcccgtgccctacgagaagatgctgagagaccagagcgccgtggtggtgcagggcctgcccgagggcgtggccttcaagcaccccgagaactacgacctggccaccctgaagtggatcctggagaacaaggccggcatcagcttcatcatcaagagacccttcctggagcccaagaagcacgtgggcggcagagtgatggtgaccgacgccgacagaagcatcctgagccccggcggcagctgcggccccatcaaggtgaagaccgagcccaccgaggacagcggcatcagcctggagatggccgccgtgaccgtgaaggaggagagcgaggaccccgactactaccagtacaacatccaggccggccccagcgagaccgacgacgtggacgagaagcagcccctgagcaagcccctgcagggcagccaccacagcagcgagggcaacgagggcaccgagatggaggtgcccgccgaggacagcacccagcacgtgcccagcgagaccagcgaggaccccgaggtggaggtgaccatcgaggacgacgactacagcccccccagcaagagacccaaggccaacgagctgccccagccccccgtgcccgagcccgccaacgccggcaagagaaaggtgagagagttcaacttcgagaagtggaacgccagaatcaccgacctgagaaagcaggtggaggagctgttcgagagaaagtacgcccaggccatcaaggccaagggccccgtgaccatcccctaccccctgttccagagccacgtggaggacctgtacgtggagggcctgcccgagggcatccccttcagaagacccagcacctacggcatccccagactggagagaatcctgctggccaaggagagaatcagattcgtgatcaagaagcacgagctgctgaacagcaccagagaggacctgcagctggacaagcccgccagcggcgtgaaggaggagtggtacgccagaatcaccaagctgagaaagatggtggaccagctgttctgcaagaagttcgccgaggccctgggcagcaccgaggccaaggccgtgccctaccagaagttcgaggcccaccccaacgacctgtacgtggagggcctgcccgagaacatccccttcagaagccccagctggtacggcatccccagactggagaagatcatccaggtgggcaacagaatcaagttcgtgatcaagagacccgagctgctgacccacagcaccaccgaggtgacccagcccagaaccaacacccccgtgaaggaggactggaacgtgagaatcaccaagctgagaaagcaggtggaggagatcttcaacctgaagttcgcccaggccctgggcctgaccgaggccgtgaaggtgccctaccccgtgttcgagagcaaccccgagttcctgtacgtggagggcctgcccgagggcatccccttcagaagccccacctggttcggcatccccagactggagagaatcgtgagaggcagcaacaagatcaagttcgtggtgaagaagcccgagctggtgatcagctacctgccccccggcatggccagcaagatcaacaccaaggccctgcagagccccaagagacccagaagccccggcagcaacagcaaggtgcccgagatcgaggtgaccgtggagggccccaacaacaacaacccccagaccagcgccgtgagaacccccacccagaccaacggcagcaacgtgcccttcaagcccagaggcagagagttcagcttcgaggcctggaacgccaagatcaccgacctgaagcagaaggtggagaacctgttcaacgagaagtgcggcgaggccctgggcctgaagcaggccgtgaaggtgcccttcgccctgttcgagagcttccccgaggacttctacgtggagggcctgcccgagggcgtgcccttcagaagacccagcaccttcggcatccccagactggagaagatcctgagaaacaaggccaagatcaagttcatcatcaagaagcccgagatgttcgagaccgccatcaaggagagcaccagcagcaagagcccccccagaaagatcaacagcagccccaacgtgaacaccaccgccagcggcgtggaggacctgaacatcatccaggtgaccatccccgacgacgacaacgagagactgagcaaggtggagaaggccagacagctgagagagcaggtgaacgacctgttcagcagaaagttcggcgaggccatcggcatgggcttccccgtgaaggtgccctacagaaagatcaccatcaaccccggctgcgtggtggtggacggcatgccccccggcgtgagcttcaaggcccccagctacctggagatcagcagcatgagaagaatcctggacagcgccgagttcatcaagttcaccgtgatcagacccttccccggcctggtgatcaacaaccagctggtggaccagagcgagagcgagggccccgtgatccaggagagcgccgagcccagccagctggaggtgcccgccaccgaggagatcaaggagaccgacggcagcagccagatcaagcaggagcccgaccccacctggtag

SEQ ID NO: 82924 - DNA, 642 bp, synthetic construct
  misc_feature 1..642: note = Description of Artificial Sequence: Synthetic coding sequence
  source 1..642: mol_type = other DNA
atggccgccgccgccgacgagagaagccccgaggacggcgaggacgaggaggaggaggagcagctggtgctggtggagctgagcggcatcatcgacagcgacttcctgagcaagtgcgagaacaagtgcaaggtgctgggcatcgacaccgagagacccatcctgcaggtggacagctgcgtgttcgccggcgagtacgaggacaccctgggcacctgcgtgatcttcgaggagaacgtggagcacgccgacaccgagggcaacaacaagaccgtgctgaagtacaagtgccacaccatgaagaagctgagcatgaccagaaccctgctgaccgagaagaaggagggcgaggagaacatcggcggcgtggagtggctgcagatcaaggacaacgacttcagctacagacccaacatgatctgcaacttcctgcacgagaacgaggacgaggaggtggtggccagcgcccccgacaagagcctggagctggaggaggaggagatccagatgaacgacagcagcaacctgagctgcgagcaggagaagcccatgcacctggagatcgaggacagcggccccctgatcgacatccccagcgagaccgagggcagcgtgttcatggagacccagatgctgccctag

SEQ ID NO: 82925 - DNA, 2118 bp, synthetic construct
  misc_feature 1..2118: note = Description of Artificial Sequence: Synthetic coding sequence
  source 1..2118: mol_type = other DNA
atggccaccgagggcatgatcctgaccaaccacgaccaccagatcagagtgggcgtgctgaccgtgagcgacagctgcttcagaaacctggccgaggacagaagcggcatcaacctgaaggacctggtgcaggaccccagcctgctgggcggcaccatcagcgcctacaagatcgtgcccgacgagatcgaggagatcaaggccaccaaggaggtgatcgagagagaggcccccggcatggccctggccatgctgatgggcagcctgaacgtgacccccctgggcatgctgagcagacccgtgtgcggcatcagaggcaagaccctgatcatcaacctgcccggcagcaagaagggcagccaggagtgcttccagttcatcctgcccgccctgccccacgccatcgacctgctgagagacgccatcgtgaaggtgaaggaggtgcacgacgagctggaggacctgcccagcccccccccccccctgagccccccccccaccaccagcccccacaagcagaccgaggacaagggcgtgcagtgcgaggaggaggaggaggagaagaaggacagcggcgtggccagcaccgaggacagcagcagcagccacatcaccgccgccgccatcgccgccaagatccccgacagcatcatcagcagaggcgtgcaggtgctgcccagagacaccgccagcctgagcaccacccccagcgagagccccagagcccaggccaccagcagactgagcaccgccagctgccccacccccaaggtgcagagcagatgcagcagcaaggagaacatcctgagagccagccacagcgccgtggacatcaccaaggtggccagaagacacagaatgagccccttccccctgaccagcatggacaaggccttcatcaccgtgctggagatgacccccgtgctgggcaccgagatcatcaactacagagacggcatgggcagagtgctggcccaggacgtgtacgccaaggacaacctgccccccttccccgccagcgtgaaggacggctacgccgtgagagccgccgacggccccggcgacagattcatcatcggcgagagccaggccggcgagcagcccacccagaccgtgatgcccggccaggtgatgagagtgaccaccggcgcccccatcccctgcggcgccgacgccgtggtgcaggtggaggacaccgagctgatcagagagagcgacgacggcaccgaggagctggaggtgagaatcctggtgcaggccagacccggccaggacatcagacccatcggccacgacatcaagagaggcgagtgcgtgctggccaagggcacccacatgggccccagcgagatcggcctgctggccaccgtgggcgtgaccgaggtggaggtgaacaagttccccgtggtggccgtgatgagcaccggcaacgagctgctgaaccccgaggacgacctgctgcccggcaagatcagagacagcaacagaagcaccctgctggccaccatccaggagcacggctaccccaccatcaacctgggcatcgtgggcgacaaccccgacgacctgctgaacgccctgaacgagggcatcagcagagccgacgtgatcatcaccagcggcggcgtgagcatgggcgagaaggactacctgaagcaggtgctggacatcgacctgcacgcccagatccacttcggcagagtgttcatgaagcccggcctgcccaccaccttcgccaccctggacatcgacggcgtgagaaagatcatcttcgccctgcccggcaaccccgtgagcgccgtggtgacctgcaacctgttcgtggtgcccgccctgagaaagatgcagggcatcctggaccccagacccaccatcatcaaggccagactgagctgcgacgtgaagctggaccccagacccgagtaccacagatgcatcctgacctggcaccaccaggagcccctgccctgggcccagagcaccggcaaccagatgagcagcagactgatgagcatgagaagcgccaacggcctgctgatgctgccccccaagaccgagcagtacgtggagctgcacaagggcgaggtggtggacgtgatggtgatcggcagactgtag

SEQ ID NO: 82926 - DNA, 2211 bp, synthetic construct
  misc_feature 1..2211: note = Description of Artificial Sequence: Synthetic coding sequence
  source 1..2211: mol_type = other DNA
atggccaccgagggcatgatcctgaccaaccacgaccaccagatcagagtgggcgtgctgaccgtgagcgacagctgcttcagaaacctggccgaggacagaagcggcatcaacctgaaggacctggtgcaggaccccagcctgctgggcggcaccatcagcgcctacaagatcgtgcccgacgagatcgaggagatcaaggagaccctgatcgactggtgcgacgagaaggagctgaacctgatcctgaccaccggcggcaccggcttcgcccccagagacgtgacccccgaggccaccaaggaggtgatcgagagagaggcccccggcatggccctggccatgctgatgggcagcctgaacgtgacccccctgggcatgctgagcagacccgtgtgcggcatcagaggcaagaccctgatcatcaacctgcccggcagcaagaagggcagccaggagtgcttccagttcatcctgcccgccctgccccacgccatcgacctgctgagagacgccatcgtgaaggtgaaggaggtgcacgacgagctggaggacctgcccagcccccccccccccctgagccccccccccaccaccagcccccacaagcagaccgaggacaagggcgtgcagtgcgaggaggaggaggaggagaagaaggacagcggcgtggccagcaccgaggacagcagcagcagccacatcaccgccgccgccatcgccgccaagatccccgacagcatcatcagcagaggcgtgcaggtgctgcccagagacaccgccagcctgagcaccacccccagcgagagccccagagcccaggccaccagcagactgagcaccgccagctgccccacccccaaggtgcagagcagatgcagcagcaaggagaacatcctgagagccagccacagcgccgtggacatcaccaaggtggccagaagacacagaatgagccccttccccctgaccagcatggacaaggccttcatcaccgtgctggagatgacccccgtgctgggcaccgagatcatcaactacagagacggcatgggcagagtgctggcccaggacgtgtacgccaaggacaacctgccccccttccccgccagcgtgaaggacggctacgccgtgagagccgccgacggccccggcgacagattcatcatcggcgagagccaggccggcgagcagcccacccagaccgtgatgcccggccaggtgatgagagtgaccaccggcgcccccatcccctgcggcgccgacgccgtggtgcaggtggaggacaccgagctgatcagagagagcgacgacggcaccgaggagctggaggtgagaatcctggtgcaggccagacccggccaggacatcagacccatcggccacgacatcaagagaggcgagtgcgtgctggccaagggcacccacatgggccccagcgagatcggcctgctggccaccgtgggcgtgaccgaggtggaggtgaacaagttccccgtggtggccgtgatgagcaccggcaacgagctgctgaaccccgaggacgacctgctgcccggcaagatcagagacagcaacagaagcaccctgctggccaccatccaggagcacggctaccccaccatcaacctgggcatcgtgggcgacaaccccgacgacctgctgaacgccctgaacgagggcatcagcagagccgacgtgatcatcaccagcggcggcgtgagcatgggcgagaaggactacctgaagcaggtgctggacatcgacctgcacgcccagatccacttcggcagagtgttcatgaagcccggcctgcccaccaccttcgccaccctggacatcgacggcgtgagaaagatcatcttcgccctgcccggcaaccccgtgagcgccgtggtgacctgcaacctgttcgtggtgcccgccctgagaaagatgcagggcatcctggaccccagacccaccatcatcaaggccagactgagctgcgacgtgaagctggaccccagacccgagtaccacagatgcatcctgacctggcaccaccaggagcccctgccctgggcccagagcaccggcaaccagatgagcagcagactgatgagcatgagaagcgccaacggcctgctgatgctgccccccaagaccgagcagtacgtggagctgcacaagggcgaggtggtggacgtgatggtgatcggcagactgtag

SEQ ID NO: 82927 - DNA, 2310 bp, synthetic construct
  misc_feature 1..2310: note = Description of Artificial Sequence: Synthetic coding sequence
  source 1..2310: mol_type = other DNA
atggccaccgagggcatgatcctgaccaaccacgaccaccagatcagagtgggcgtgctgaccgtgagcgacagctgcttcagaaacctggccgaggacagaagcggcatcaacctgaaggacctggtgcaggaccccagcctgctgggcggcaccatcagcgcctacaagatcgtgcccgacgagatcgaggagatcaaggagaccctgatcgactggtgcgacgagaaggagctgaacctgatcctgaccaccggcggcaccggcttcgcccccagagacgtgacccccgaggccaccaaggaggtgatcgagagagaggcccccggcatggccctggccatgctgatgggcagcctgaacgtgacccccctgggcatgctgagcagacccgtgtgcggcatcagaggcaagaccctgatcatcaacctgcccggcagcaagaagggcagccaggagtgcttccagttcatcctgcccgccctgccccacgccatcgacctgctgagagacgccatcgtgaaggtgaaggaggtgcacgacgagctggaggacctgcccagcccccccccccccctgagccccccccccaccaccagcccccacaagcagaccgaggacaagggcgtgcagtgcgaggaggaggaggaggagaagaaggacagcggcgtggccagcaccgaggacagcagcagcagccacatcaccgccgccgccatcgccgccaagaagcaccccttctacaccagccccgccgtggtgatggcccacggcgagcagcccatccccggcctgatcaactacagccaccacagcaccgacgagagaatccccgacagcatcatcagcagaggcgtgcaggtgctgcccagagacaccgccagcctgagcaccacccccagcgagagccccagagcccaggccaccagcagactgagcaccgccagctgccccacccccaaggtgcagagcagatgcagcagcaaggagaacatcctgagagccagccacagcgccgtggacatcaccaaggtggccagaagacacagaatgagccccttccccctgaccagcatggacaaggccttcatcaccgtgctggagatgacccccgtgctgggcaccgagatcatcaactacagagacggcatgggcagagtgctggcccaggacgtgtacgccaaggacaacctgccccccttccccgccagcgtgaaggacggctacgccgtgagagccgccgacggccccggcgacagattcatcatcggcgagagccaggccggcgagcagcccacccagaccgtgatgcccggccaggtgatgagagtgaccaccggcgcccccatcccctgcggcgccgacgccgtggtgcaggtggaggacaccgagctgatcagagagagcgacgacggcaccgaggagctggaggtgagaatcctggtgcaggccagacccggccaggacatcagacccatcggccacgacatcaagagaggcgagtgcgtgctggccaagggcacccacatgggccccagcgagatcggcctgctggccaccgtgggcgtgaccgaggtggaggtgaacaagttccccgtggtggccgtgatgagcaccggcaacgagctgctgaaccccgaggacgacctgctgcccggcaagatcagagacagcaacagaagcaccctgctggccaccatccaggagcacggctaccccaccatcaacctgggcatcgtgggcgacaaccccgacgacctgctgaacgccctgaacgagggcatcagcagagccgacgtgatcatcaccagcggcggcgtgagcatgggcgagaaggactacctgaagcaggtgctggacatcgacctgcacgcccagatccacttcggcagagtgttcatgaagcccggcctgcccaccaccttcgccaccctggacatcgacggcgtgagaaagatcatcttcgccctgcccggcaaccccgtgagcgccgtggtgacctgcaacctgttcgtggtgcccgccctgagaaagatgcagggcatcctggaccccagacccaccatcatcaaggccagactgagctgcgacgtgaagctggaccccagacccgagtaccacagatgcatcctgacctggcaccaccaggagcccctgccctgggcccagagcaccggcaaccagatgagcagcagactgatgagcatgagaagcgccaacggcctgctgatgctgccccccaagaccgagcagtacgtggagctgcacaagggcgaggtggtggacgtgatggtgatcggcagactgtag

SEQ ID NO: 82928 - DNA, 903 bp, synthetic construct
  misc_feature 1..903: note = Description of Artificial Sequence: Synthetic coding sequence
  source 1..903: mol_type = other DNA
atggagaagacccaggagaccgtgcagagaatcctgctggagccctacaagtacctgctgcagctgcccggcaagcaggtgagaaccaagctgagccaggccttcaaccactggctgaaggtgcccgaggacaagctgcagatcatcatcgaggtgaccgagatgctgcacaacgccagcctgctgatcgacgacatcgaggacaacagcaagctgagaagaggcttccccgtggcccacagcatctacggcatccccagcgtgatcaacagcgccaactacgtgtacttcctgggcctggagaaggtgctgaccctggaccaccccgacgccgtgaagctgttcaccagacagctgctggagctgcaccagggccagggcctggacatctactggagagacaactacacctgccccaccgaggaggagtacaaggccatggtgctgcagaagaccggcggcctgttcggcctggccgtgggcctgatgcagctgttcagcgactacaaggaggacctgaagcccctgctgaacaccctgggcctgttcttccagatcagagacgactacgccaacctgcacagcaaggagtacagcgagaacaagagcttctgcgaggacctgaccgagggcaagttcagcttccccaccatccacgccatctggagcagacccgagagcacccaggtgcagaacatcctgagacagagaaccgagaacatcgacatcaagaagtactgcgtgcactacctggaggacgtgggcagcttcgagtacaccagaaacaccctgaaggagctggaggccaaggcctacaagcagatcgacgccagaggcggcaaccccgagctggtggccctggtgaagcacctgagcaagatgttcaaggaggagaacgagtag

SEQ ID NO: 82929 - DNA, 903 bp, synthetic construct; identical to SEQ ID NO: 82928
  misc_feature 1..903: note = Description of Artificial Sequence: Synthetic coding sequence
  source 1..903: mol_type = other DNA

SEQ ID NO: 82930 - DNA, 729 bp, synthetic construct
  misc_feature 1..729: note = Description of Artificial Sequence: Synthetic coding sequence
  source 1..729: mol_type = other DNA
atggagaagacccaggagaccgtgcagagaatcctgctggagccctacaagtacctgctgcagctgcccggcaagcaggtgagaaccaagctgagccaggccttcaaccactggctgaaggtgcccgaggacaagctgcagatcatcatcgaggtgaccgagatgctgcacaacgccagcctgctgatcgacgacatcgaggacaacagcaagctgagaagaggcttccccgtggcccacagcatctacggcatccccagcgtgatcaacagcgccaactacgtgtacttcctgggcctggagaaggtgctgaccctggaccaccccgacgccgtgaagctgttcaccagacagctgctggagctgcaccagggccagggcctggacatctactggagagacaactacacctgccccaccgaggaggagtacaaggccatggtgctgcagaagaccggcggcctgttcggcctggccgtgggcctgatgcagctgttcagcgactacaaggaggacctgaagcccctgctgaacaccctgggcctgttcttccagatcagagacgactacgccaacctgcacagcaaggagtacagcgagaacaagagcttctgcgaggacctgaccgagggcaagttcagcttccccaccatccacgccatctggagcagacccgagagcacccaggtgcagaacatcctgagacagagaaccgagaacatcgactag

SEQ ID NO: 82931 - DNA, 903 bp, synthetic construct; identical to SEQ ID NO: 82928
  misc_feature 1..903: note = Description of Artificial Sequence: Synthetic coding sequence
  source 1..903: mol_type = other DNA

SEQ ID NO: 82932 - DNA, 903 bp, synthetic construct; identical to SEQ ID NO: 82928
  misc_feature 1..903: note = Description of Artificial Sequence: Synthetic coding sequence
  source 1..903: mol_type = other DNA

SEQ ID NO: 82933 - DNA, 693 bp, synthetic construct
  misc_feature 1..693: note = Description of Artificial Sequence: Synthetic coding sequence
  source 1..693: mol_type = other DNA
atggagaagacccaggagaccgtgcagagaatcctgctggagccctacaagtacctgctgcagctgcccggcaagcaggtgagaaccaagctgagccaggccttcaaccactggctgaaggtgcccgaggacaagctgcagatcatcatcgaggtgaccgagatgctgcacaacgccagcctgctgatcgacgacatcgaggacaacagcaagctgagaagaggcttccccgtggcccacagcatctacggcatccccagcgtgatcaacagcgccaactacgtgtacttcctgggcctggagaaggtgctgaccctggaccaccccgacgccgtgaagctgttcaccagacagctgctggagctgcaccagggccagggcctggacatctactggagagacaactacacctgccccaccgaggaggagtacaaggccatggtgctgcagaagaccggcggcctgttcggcctggccgtgggcctgatgcagctgttcagcgactacaaggaggacctgaagcccctgctgaacaccctgggcctgttcttccagatcagagacgactacgccaacctgcacagcaaggagtacagcgagaacaagagcttctgcgaggacctgaccgagggcaagttcagcttccccaccatccacgccatctggagcagacccgagagcacccaggtgtag

SEQ ID NO: 82934 - DNA, 537 bp, synthetic construct
  misc_feature 1..537: note = Description of Artificial Sequence: Synthetic coding sequence
  source 1..537: mol_type = other DNA
atgggcaacagcctgctgagagagaacagaagacagcagaacacccaggagatgccctggaacgtgagaatgcagagccccaagcagagaaccagcagatgctgggaccaccacatcgccgagggctgcttctgcctgccctggaagaagatcctgatcttcgagaagagacaggacagccagaacgagaacgagagaatgagcagcacccccatccaggacaacgtggaccagacctacagcgaggagctgtgctacaccctgatcaaccacagagtgctgtgcaccagacccagcggcaacagcgccgaggagtactacgagaacgtgccctgcaaggccgagagacccagagagagcctgggcggcaccgagaccgagtacagcctgctgcacatgcccagcaccgaccccagacacgccagaagccccgaggacgagtacgagctgctgatgccccacagaatcagcagccacttcctgcagcagcccagacccctgatggcccccagcgagacccagttcagccacctgtag

SEQ ID NO: 82935 - DNA, 492 bp, synthetic construct
  misc_feature 1..492: note = Description of Artificial Sequence: Synthetic coding sequence
  source 1..492: mol_type = other DNA
atgggcaacagcctgctgagagagaacagaagacagcagaacacccaggagatgccctggaacgtgagaatgcagagccccaagcagagaaccagcagaaagaagatcctgatcttcgagaagagacaggacagccagaacgagaacgagagaatgagcagcacccccatccaggacaacgtggaccagacctacagcgaggagctgtgctacaccctgatcaaccacagagtgctgtgcaccagacccagcggcaacagcgccgaggagtactacgagaacgtgccctgcaaggccgagagacccagagagagcctgggcggcaccgagaccgagtacagcctgctgcacatgcccagcaccgaccccagacacgccagaagccccgaggacgagtacgagctgctgatgccccacagaatcagcagccacttcctgcagcagcccagacccctgatggcccccagcgagacccagttcagccacctgtag

SEQ ID NO: 82936 - DNA, 543 bp, synthetic construct
  misc_feature 1..543: note = Description of Artificial Sequence: Synthetic coding sequence
  source 1..543: mol_type = other DNA
atgggcaacagcctgctgagagagaacagcttcagaagacagcagaacacccaggagatgccctggaacgtgagaatgcagagccccaagcagagaaccagcagatgctgggaccaccacatcgccgagggctgcttctgcctgccctggaagaagatcctgatcttcgagaagagacaggacagccagaacgagaacgagagaatgagcagcacccccatccaggacaacgtggaccagacctacagcgaggagctgtgctacaccctgatcaaccacagagtgctgtgcaccagacccagcggcaacagcgccgaggagtactacgagaacgtgccctgcaaggccgagagacccagagagagcctgggcggcaccgagaccgagtacagcctgctgcacatgcccagcaccgaccccagacacgccagaagccccgaggacgagtacgagctgctgatgccccacagaatcagcagccacttcctgcagcagcccagacccctgatggcccccagcgagacccagttcagccacctgtag

SEQ ID NO: 82937 - DNA, 351 bp, synthetic construct
  misc_feature 1..351: note = Description of Artificial Sequence: Synthetic coding sequence
  source 1..351: mol_type = other DNA
atgcccagccccggcaccgtgtgcagcctgctgctgctgggcatgctgtggctggacctggccatggccggcagcagcttcctgagccccgagcaccagagagtgcagagaaaggagagcaagaagccccccgccaagctgcagcccagagccctggccggctggctgagacccgaggacggcggccaggccgagggcgccgaggacgagctggaggtgagattcaacgcccccttcgacgtgggcatcaagctgagcggcgtgcagtaccagcagcacagccaggccctgggcaagttcctgcaggacatcctgtgggaggaggccaaggaggcccccgccgacaagtag

SEQ ID NO: 82938 - DNA, 354 bp, synthetic construct
  misc_feature 1..354: note = Description of Artificial Sequence: Synthetic coding sequence
  source 1..354: mol_type = other DNA
atgcccagccccggcaccgtgtgcagcctgctgctgctgggcatgctgtggctggacctggccatggccggcagcagcttcctgagccccgagcaccagagagtgcagcagagaaaggagagcaagaagccccccgccaagctgcagcccagagccctggccggctggctgagacccgaggacggcggccaggccgagggcgccgaggacgagctggaggtgagattcaacgcccccttcgacgtgggcatcaagctgagcggcgtgcagtaccagcagcacagccaggccctgggcaagttcctgcaggacatcctgtgggaggaggccaaggaggcccccgccgacaagtag

SEQ ID NO: 82939 - DNA, 276 bp, synthetic construct
  misc_feature 1..276: note = Description of Artificial Sequence: Synthetic coding sequence
  source 1..276: mol_type = other DNA
atgcccagccccggcaccgtgtgcagcctgctgctgctgggcatgctgtggctggacctggccatggccggcagcagcttcctgagccccgagcaccagagagtgcagcagagaaaggagagcaagaagccccccgccaagctgcagcccagagccctggccggctggctgagacccgaggacggcggccaggccgagggcgccgaggacgagctggaggtgagaagaccccagcccaccagcgacagaccccaggccctgctgaccagcctgtag

SEQ ID NO: 82940 - DNA, 102 bp, synthetic construct
  misc_feature 1..102: note = Description of Artificial Sequence: Synthetic coding sequence
  source 1..102: mol_type = other DNA
atgcccagccccggcaccgtgtgcagcctgctgctgctgggcatgctgtggctggacctggccatggccggcagcagcttcctgagccccgagcaccagtag

SEQ ID NO: 82941 - DNA, 354 bp, synthetic construct; identical to SEQ ID NO: 82938
  misc_feature 1..354: note = Description of Artificial Sequence: Synthetic coding sequence
  source 1..354: mol_type = other DNA

SEQ ID NO: 82942 - DNA, 351 bp, synthetic construct; identical to SEQ ID NO: 82937
  misc_feature 1..351: note = Description of Artificial Sequence: Synthetic coding sequence
  source 1..351: mol_type = other DNA

SEQ ID NO: 82943 - DNA, 318 bp, synthetic construct
  misc_feature 1..318: note = Description of Artificial Sequence: Synthetic coding sequence
  source 1..318: mol_type = other DNA
atgttcacctgctggtggagctacctgagaagcaccctggccgccgtgcccggcgaggccagcagagtgcagcagagaaaggagagcaagaagccccccgccaagctgcagcccagagccctggccggctggctgagacccgaggacggcggccaggccgagggcgccgaggacgagctggaggtgagattcaacgcccccttcgacgtgggcatcaagctgagcggcgtgcagtaccagcagcacagccaggccctgggcaagttcctgcaggacatcctgtgggaggaggccaaggaggcccccgccgacaagtag

SEQ ID NO: 82944 - DNA, 201 bp, synthetic construct
  misc_feature 1..201: note = Description of Artificial Sequence: Synthetic coding sequence
  source 1..201: mol_type = other DNA
atgttcacctgctggtggagctacctgagaagcaccctggccgccgtgcccggcgaggccagcagagtgcagttcaacgcccccttcgacgtgggcatcaagctgagcggcgtgcagtaccagcagcacagccaggccctgggcaagttcctgcaggacatcctgtgggaggaggccaaggaggcccccgccgacaagtag

SEQ ID NO: 82945 - DNA, 315 bp, synthetic construct
  misc_feature 1..315: note = Description of Artificial Sequence: Synthetic coding sequence
  source 1..315: mol_type = other DNA
atgttcacctgctggtggagctacctgagaagcaccctggccgccgtgcccggcgaggccagcagagtgcagagaaaggagagcaagaagccccccgccaagctgcagcccagagccctggccggctggctgagacccgaggacggcggccaggccgagggcgccgaggacgagctggaggtgagattcaacgcccccttcgacgtgggcatcaagctgagcggcgtgcagtaccagcagcacagccaggccctgggcaagttcctgcaggacatcctgtgggaggaggccaaggaggcccccgccgacaagtag

SEQ ID NO: 82946 - DNA, 351 bp, synthetic construct; identical to SEQ ID NO: 82937
  misc_feature 1..351: note = Description of Artificial Sequence: Synthetic coding sequence
  source 1..351: mol_type = other DNA

SEQ ID NO: 82947 - DNA, 354 bp, synthetic construct; identical to SEQ ID NO: 82938
  misc_feature 1..354: note = Description of Artificial Sequence: Synthetic coding sequence
  source 1..354: mol_type = other DNA

SEQ ID NO: 82948 - DNA, 354 bp, synthetic construct; identical to SEQ ID NO: 82938
  misc_feature 1..354: note = Description of Artificial Sequence: Synthetic coding sequence
  source 1..354: mol_type = other DNA

SEQ ID NO: 82949 - DNA, 1794 bp, synthetic construct
  misc_feature 1..1794: note = Description of Artificial Sequence: Synthetic coding sequence
  source 1..1794: mol_type = other DNA
atggccgagggcagcgccgtgagcgacccccagcacgccgccagactgctgagagccctgagcagcttcagagaggagagcagattctgcgacgcccacctggtgctggacggcgaggagatccccgtgcagaagaacatcctggccgccgccagcccctacatcagaaccaagctgaactacaacccccccaaggacgacggcagcacctacaagatcgagctggagggcatcagcgtgatggtgatgagagagatcctggactacatcttcagcggccagatcagactgaacgaggacaccatccaggacgtggtgcaggccgccgacctgctgctgctgaccgacctgaagaccctgtgctgcgagttcctggagggctgcatcgccgccgagaactgcatcggcatcagagacttcgccctgcactactgcctgcaccacgtgcactacctggccaccgagtacctggagacccacttcagagacgtgagcagcaccgaggagttcctggagctgagcccccagaagctgaaggaggtgatcagcctggagaagctgaacgtgggcaacgagagatacgtgttcgaggccgtgatcagatggatcgcccacgacaccgagatcagaaaggtgcacatgaaggacgtgatgagcgccctgtgggtgagcggcctggacagcagctacctgagagagcagatgctgaacgagcccctggtgagagagatcgtgaaggagtgcagcaacatccccctgagccagccccagcagggcgaggccatgctggccaacttcaagcccagaggctacagcgagtgcatcgtgaccgtgggcggcgaggagagagtgagcagaaagcccaccgccgccatgagatgcatgtgccccctgtacgaccccaacagacagctgtggatcgagctggcccccctgagcatgcccagaatcaaccacggcgtgctgagcgccgagggcttcctgttcgtgttcggcggccaggacgagaacaagcagaccctgagcagcggcgagaagtacgaccccgacgccaacacctggaccgccctgccccccatgaacgaggccagacacaacttcggcatcgtggagatcgacggcatgctgtacatcctgggcggcgaggacggcgagaaggagctgatcagcatggagtgctacgacatctacagcaagacctggaccaagcagcccgacctgaccatggtgagaaagatcggctgctacgccgccatgaagaagaagatctacgccatgggcggcggcagctacggcaagctgttcgagagcgtggagtgctacgaccccagaacccagcagtggaccgccatctgccccctgaaggagagaagattcggcgccgtggcctgcggcgtggccatggagctgtacgtgttcggcggcgtgagaagcagagaggacgcccagggcagcgagatggtgacctgcaagagcgagttctaccacgacgagttcaagagatggatctacctgaacgaccagaacctgtgcatccccgccagcagcagcttcgtgtacggcgccgtgcccatcggcgccagcatctacgtgatcggcgacctggacaccggcaccaactacgactacgtgagagagttcaagagaagcaccggcacctggcaccacaccaagcccctgctgcccagcgacctgagaagaaccggctgcgccgccctgagaatcgccaactgcaagctgttcagactgcagctgcagcagggcctgttcagaatcagagtgcacagcccctag

SEQ ID NO: 82950 - DNA, 591 bp, synthetic construct
  misc_feature 1..591: note = Description of Artificial Sequence: Synthetic coding sequence
  source 1..591: mol_type = other DNA
atgttctgcgagaaggccatggagctgatcagagagctgcacagagcccccgagggccagctgcccgccttcaacgaggacggcctgagacaggtgctggaggagatgaaggccctgtacgagcagaaccagagcgacgtgaacgaggccaagagcggcggcagaagcgacctgatccccaccatcaagttcagacactgcagcctgctgagaaacagaagatgcaccgtggcctacctgtacgacagactgctgagaatcagagccctgagatgggagtacggcagcgtgctgcccaacgccctgagattccacatggccgccgaggagatggagtggttcaacaactacaagagaagcctggccacctacatgagaagcctgggcggcgacgagggcctggacatcacccaggacatgaagccccccaagagcctgtacatcgaggtgagatgcctgaaggactacggcgagttcgaggtggacgacggcaccagcgtgctgctgaagaagaacagccagcacttcctgcccagatggaagtgcgagcagctgatcagacagggcgtgctggagcacatcctgagctag

SEQ ID NO: 82951 - DNA, 498 bp, synthetic construct
  misc_feature 1..498: note = Description of Artificial Sequence: Synthetic coding sequence
  source 1..498: mol_type = other DNA
atgttctgcgagaaggccatggagctgatcagagagctgcacagagcccccgagggccagctgcccgccttcaacgaggacggcctgagacaggtgctggaggagatgaaggccctgtacgagcagaaccagagcgacgtgaacgaggccaagagcggcggcagaagcgacctgatccccaccatcaagttcagacactgcagcctgctgagaaacagaagatgcaccgtggcctacctgtacgacagactgctgagaatcagagccctgagatgggagtacggcagcgtgctgcccaacgccctgagattccacatggccgccgaggagatggagagcagaagcgtggcccaggccggcgtgcagtggtgcatcctgtgcagcctgcagctgcccccccccggcttcaagcagttcagctgcctgagcctgcccagcagctgcgactacagatggagcggcctgatcatcatcaaggacctgctgctgctgatctag

SEQ ID NO: 82952 - DNA, 558 bp, synthetic construct
  misc_feature 1..558: note = Description of Artificial Sequence: Synthetic coding sequence
  source 1..558: mol_type = other DNA
atggacgccgccgaggtggagttcctggccgagaaggagctggtgaccatcatccccaacttcagcctggacaagatctacctgatcggcggcgacctgggccccttcaaccccggcctgcccgtggaggtgcccctgtggctggccatcaacctgaagcagagacagaagtgcagactgctgccccccgagtggatggacgtggagaagctggagaagatgagagaccacgagagaaaggaggagaccttcacccccatgcccagcccctactacatggagctgaccaagctgctgctgaaccacgccagcgacaacatccccaaggccgacgagatcagaaccctggtgaaggacatgtgggacaccagaatcgccaagctgagagtgagcgccgacagcttcgtgagacagcaggaggcccacgccaagctggacaacctgaccctgatggagatcaacaccagcggcaccttcctgacccaggccctgaaccacatgtacaagctgagaaccaacctgcagcccctggagagcacccagagccaggacttctag

SEQ ID NO: 82953 - DNA, 651 bp, synthetic construct
  misc_feature 1..651: note = Description of Artificial Sequence: Synthetic coding sequence
  source 1..651: mol_type = other DNA
atgagcgaggcctacttcagagtggagagcggcgccctgggccccgaggagaacttcctgagcctggacgacatcctgatgagccacgagaagctgcccgtgagaaccgagaccgccatgcccagactgggcgccttcttcctggagagaagcgccggcgccgagaccgacaacgccgtgccccagggcagcaagctggagctgcccctgtggctggccaagggcctgttcgacaacaagagaagaatcctgagcgtggagctgcccaagatctaccaggagggctggagaaccgtgttcagcgccgaccccaacgtggtggacctgcacaagatgggcccccacttctacggcttcggcagccagctgctgcacttcgacagccccgagaacgccgacatcagccagagcctgctgcagaccttcatcggcagattcagaagaatcatggacagcagccagaacgcctacaacgaggacaccagcgccctggtggccagactggacgagatggagagaggcctgttccagaccggccagaagggcctgaacgacttccagtgctgggagaagggccaggccagccagatcaccgccagcaacctggtgcagaactacaagaagagaaagttcaccgacatggaggactag

SEQ ID NO: 82954 - DNA, 417 bp, synthetic construct
  misc_feature 1..417: note = Description of Artificial Sequence: Synthetic coding sequence
  source 1..417: mol_type = other DNA
atgagcgaggcctacttcagagtggagagcggcgccctgggccccgaggagaacttcctgagcctggacgacatcctgatgagccacgagaagctgcccgtgagaaccgagaccgccatgcccagactgggcgccttcttcctggagagaagcgccggcgccgagaccgacaacgccgtgccccagaccttcatcggcagattcagaagaatcatggacagcagccagaacgcctacaacgaggacaccagcgccctggtggccagactggacgagatggagagaggcctgttccagaccggccagaagggcctgaacgacttccagtgctgggagaagggccaggccagccagatcaccgccagcaacctggtgcagaactacaagaagagaaagttcaccgacatggaggactag

SEQ ID NO: 82955 - DNA, 768 bp, synthetic construct
  misc_feature 1..768: note = Description of Artificial Sequence: Synthetic coding sequence
  source 1..768: mol_type = other DNA
atgagcgaggcctacttcagagtggagagcggcgccctgggccccgaggagaacttcctgagcctggacgacatcctgatgagccacgagaagctgcccgtgagaaccgagaccgccatgcccagactgggcgccttcttcctggagagaagcgccggcgccgagaccgacaacgccgtgccccagggcttcgccctgctgcccagactggagtgcagcggcgtgatctggctgaccgccgccctgaccagccaggcccccgagatcctgcccccccagccccccatgtggctggtgctgcagggcagcaagctggagctgcccctgtggctggccaagggcctgttcgacaacaagagaagaatcctgagcgtggagctgcccaagatctaccaggagggctggagaaccgtgttcagcgccgaccccaacgtggtggacctgcacaagatgggcccccacttctacggcttcggcagccagctgctgcacttcgacagccccgagaacgccgacatcagccagagcctgctgcagaccttcatcggcagattcagaagaatcatggacagcagccagaacgcctacaacgaggacaccagcgccctggtggccagactggacgagatggagagaggcctgttccagaccggccagaagggcctgaacgacttccagtgctgggagaagggccaggccagccagatcaccgccagcaacctggtgcagaactacaagaagagaaagttcaccgacatggaggactag

SEQ ID NO: 82956 - DNA, 672 bp, synthetic construct
  misc_feature 1..672: note = Description of Artificial Sequence: Synthetic coding sequence
  source 1..672: mol_type = other DNA
atgaccgaggaggtggacttcctgggccaggacagcgacggcggcagcgaggaggtggtgctgacccccgccgagctgatcgagagactggagcaggcctggatgaacgagaagttcgcccccgagctgctggagagcaagcccgagatcgtggagtgcgtgatggagcagctggagcacatggaggagaacctgagaagagccaagagagaggacctgaaggtgagcatccaccagatggagatggagagaatcagatacgtgctgagcagctacctgagatgcagactgatgaagatcgagaagttcttcccccacgtgctggagaaggagaagaccagacccgagggcgagcccagcagcctgagccccgaggagctggccttcgccagagagttcatggccaacaccgagagctacctgaagaacgtggccctgaagcacatgccccccaacctgcagaaggtggacctgttcagagccgtgcccaagcccgacctggacagctacgtgttcctgagagtgagagagagacaggagaacatcctggtggagcccgacaccgacgagcagagagactacgtgatcgacctggagaagggcagccagcacctgatcagatacaagaccatcgcccccctggtggccagcggcgccgtgcagctgatctag

SEQ ID NO: 82957 - DNA, 672 bp, synthetic construct; identical to SEQ ID NO: 82956
  misc_feature 1..672: note = Description of Artificial Sequence: Synthetic coding sequence
  source 1..672: mol_type = other DNA

SEQ ID NO: 82958 - DNA, 303 bp, synthetic construct
  misc_feature 1..303: note = Description of Artificial Sequence: Synthetic coding sequence
  source 1..303: mol_type = other DNA
atgaccgaggaggtggacttcctgggccaggacagcgacggcggcagcgaggaggtggtgctgacccccgccgagctgatcgagagactggagcaggcctggatgaacgagaagttcgcccccgagctgctggagagcaagcccgagatcgtggagtgcgtgatggagcagctggagcacatggaggagaacctgagaagagccaagagagaggacctgaaggtgagcatccaccagatggagatggagagaatcagatacgtgctgagcagctacctgagatgcagactgatgaaggtgtag

SEQ ID NO: 82959 - DNA, 939 bp, synthetic construct
  misc_feature 1..939: note = Description of Artificial Sequence: Synthetic coding sequence
  source 1..939: mol_type = other DNA
atggagggcgccgccgccagagaggccagaggcaccgagacccccagagccagcgcccccccccccgcccccagcgagccccccgccgcccccagagccagacccagactggtgttcagaacccagctggcccacggcagccccaccggcaagatcgagggcttcaccaacgtgagagagctgtacgccaagatcgccgaggccttcggcatcgcccccaccgagatcctgttctgcaccctgaacagccacaaggtggacatgcagaagctgctgggcggccagatcggcctggaggacttcatcttcgcccacgtgagaggcgagaccaaggaggtggaggtgaccaagaccgaggacgccctgggcctgaccatcaccgacaacggcgccggctacgccttcatcaagagaatcaaggagggcagcatcatcaacagaatcgaggccgtgtgcgtgggcgacagcatcgaggccatcaacgaccacagcatcgtgggctgcagacactacgaggtggccaagatgctgagagagctgcccaagagccagcccttcaccctgagactggtgcagcccaagagagccttcgacatgatcggccagagaagcagaagcagcaagtgccccgtggaggccaaggtgaccagcggcagagagaccctgagactgagaagcggcggcgccgccaccgtggaggaggcccccagcgagttcgaggaggaggccagcagaaaggtggacgacctgctggagagctacatgggcatcagagaccccgagctggccagcaccatggtggagaccagcaagaagaccgccagcgcccaggagttcgccagatgcctggacagcgtgctgggcgagttcgccttccccgacgagttcgtggtggaggtgtgggccgccatcggcgaggccagagaggcctgcggctag

SEQ ID NO: 82960 - DNA, 2097 bp, synthetic construct
  misc_feature 1..2097: note = Description of Artificial Sequence: Synthetic coding sequence
  source 1..2097: mol_type = other DNA
atgcccagcgagggcagatgctgggagaccctgaaggccctgagaagcagcgacaagggcagactgtgctactacagagactggctgctgagaagagaggacgtgctggaggagtgcatgagcctgcccaagctgagcagctacagcggctgggtggtggagcacgtgctgccccacatgcaggagaaccagcccctgagcgagaccagccccagcagcaccagcgccagcgccctggaccagcccagcttcgtgcccaagagccccgacgccagcagcgccttcagccccgccagccccgccacccccaacggcaccaagggcaaggacgagagccagcacaccgagagcatggtgctgcagagcagcagaggcatcaaggtggagggctgcgtgagaatgtacgagctggtgcacagaatgaagggcaccgagggcctgagactgtggcaggaggagcaggagagaaaggtgcaggccctgagcgagatggccagcgagcagctgaagagattcgacgagtggaaggagctgaagcagcacaaggagttccaggacctgagagaggtgatggagaagagcagcagagaggccctgggccaccaggagaagctgaaggccgagcacagacacagagccaagatcctgaacctgaagctgagagaggccgagcagcagagagtgaagcaggccgagcaggagagactgagaaaggaggagggccagatcagactgagagccctgtacgccctgcaggaggagatgctgcagctgagccagcagctggacgccagcgagcagcacaaggccctgctgaaggtggacctggccgccttccagaccagaggcaaccagctgtgcagcctgatcagcggcatcatcagagccagcagcgagagcagctaccccaccgccgagagccaggccgaggccgagagagccctgagagagatgagagacctgctgatgaacctgggccaggagatcaccagagcctgcgaggacaagagaagacaggacgaggaggaggcccaggtgaagctgcaggaggcccagatgcagcagggccccgaggcccacaaggagccccccgcccccagccagggccccggcggcaagcagaacgaggacctgcaggtgaaggtgcaggacatcaccatgcagtggtaccagcagctgcaggacgccagcatgcagtgcgtgctgaccttcgagggcctgaccaacagcaaggacagccaggccaagaagatcaagatggacctgcagaaggccgccaccatccccgtgagccagatcagcaccatcgccggcagcaagctgaaggagatcttcgacaagatccacagcctgctgagcggcaagcccgtgcagagcggcggcagaagcgtgagcgtgaccctgaacccccagggcctggacttcgtgcagtacaagctggccgagaagttcgtgaagcagggcgaggaggaggtggccagccaccacgaggccgccttccccatcgccgtggtggccagcggcatctgggagctgcaccccagagtgggcgacctgatcctggcccacctgcacaagaagtgcccctacagcgtgcccttctaccccaccttcaaggagggcatggccctggaggactaccagagaatgctgggctaccaggtgaaggacagcaaggtggagcagcaggacaacttcctgaagagaatgagcggcatgatcagactgtacgccgccatcatccagctgagatggccctacggcaacagacaggagatccacccccacggcctgaaccacggctggagatggctggcccagatcctgaacatggagcccctgagcgacgtgaccgccaccctgctgttcgacttcctggaggtgtgcggcaacgccctgatgaagcagtaccaggtgcagttctggaagatgctgatcctgatcaaggaggactacttccccagaatcgaggccatcaccagcagcggccagatgggcagcttcatcagactgaagcagttcctggagaagtgcctgcagcacaaggacatccccgtgcccaagggcttcctgaccagcagcttctggagaagctag

SEQ ID NO: 82961 - DNA, 1980 bp, synthetic construct
  misc_feature 1..1980: note = Description of Artificial Sequence: Synthetic coding sequence
  source 1..1980: mol_type = other DNA
atgcccagcgagggcagatgctgggagaccctgaaggccctgagaagcagcgacaagggcagactgtgctactacagagactggctgctgagaagagaggacgtgctggaggagtgcatgagcctgcccaagctgagcagctacagcggctgggtggtggagcacgtgctgccccacatgcaggagaaccagcccctgagcgagaccagccccagcagcaccagcgccagcgccctggaccagcccagcttcgtgcccaagagccccgacgccagcagcgccttcagccccgccagccccgccacccccaacggcaccaagggcaaggacgagagccagcacaccgagagcatggtgctgcagagcagcagaggcatcaaggtggagggctgcgtgagaatgtacgagctggtgcacagaatgaagggcaccgagggcctgagactgtggcaggaggagcaggagagaaaggtgcaggccctgagcgagatggccagcgagcagctgaagagattcgacgagtggaaggagctgaagcagcacaaggagttccaggacctgagagaggtgatggagaagagcagcagagaggccctgggccaccaggagaagctgaaggccgagcacagacacagagccaagatcctgaacctgaagctgagagaggccgagcagcagagagtgaagcaggccgagcaggagagactgagaaaggaggagggccagatcagactgagagccctgtacgccctgcaggaggagatgctgcagctgagccagcagctggacgccagcgagcagcacaaggccctgctgaaggtggacctggccgccttccagaccagaggcaaccagctgtgcagcctgatcagcggcatcatcagagccagcagcgagagcagctaccccaccgccgagagccaggccgaggccgagagagccctgagagagatgagagacctgctgatgaacctgggccaggagatcaccagagcctgcgaggacaagagaagacaggacgaggaggaggcccaggtgaagctgcaggaggcccagatgcagcagggccccgaggcccacaaggagccccccgcccccagccagggccccggcggcaagcagaacgaggacctgcaggtgaaggtgcaggacatcaccatgcagtggtaccagcagctgcaggacgccagcatgcagtgcgtgctgaccttcgagggcctgaccaacagcaaggacagccaggccaagaagatcaagatggacctgcagaaggccgccaccatccccgtgagccagatcagcaccatcgccggcagcaagctgaaggagatcttcgacaagatccacagcctgctgagcggcaagcccgtgcagagcggcggcagaagcgtgagcgtgaccctgaacccccagggcctggacttcgtgcagtacaagctggccgagaagttcgtgaagcagggcgaggaggaggtggccagccaccacgaggccgccttccccatcgccgtggtggccagcggcatctgggagctgcaccccagagtgggcgacctgatcctggcccacctgcacaagaagtgcccctacagcgtgcccttctaccccaccttcaaggagggcatggccctggaggactaccagagaatgctgggctaccaggtgaaggacagcaaggtggagcagcaggacaacttcctgaagagaatgagcggcatgatcagactgtacgccgccatcatccagctgagatggccctacggcaacagacaggagatccacccccacggcctgaaccacggctggagatggctggcccagatcctgaacatggagcccctgagcgacgtgaccgccaccctgctgttcgacttcctggaggtgtgcggcaacgccctgatgaagcagtaccaggtgcagttctggaagatgctgatcctgatcaaggaggactacttccccagataccaggcctgctag

SEQ ID NO: 82962 - DNA, 1335 bp, synthetic construct
  misc_feature 1..1335: note = Description of Artificial Sequence: Synthetic coding sequence
  source 1..1335: mol_type = other DNA
atgctgcagctgagccagcagctggacgccagcgagcagcacaaggccctgctgaaggtggacctggccgccttccagaccagaggcaaccagctgtgcagcctgatcagcggcatcatcagagccagcagcgagagcagctaccccaccgccgagagccaggccgaggccgagagagccctgagagagatgagagacctgctgatgaacctgggccaggagatcaccagagcctgcgaggacaagagaagacaggacgaggaggaggcccaggtgaagctgcaggaggcccagatgcagcagggccccgaggcccacaaggagccccccgcccccagccagggccccggcggcaagcagaacgaggacctgcaggtgaaggtgcaggacatcaccatgcagtggtaccagcagctgcaggacgccagcatgcagtgcgtgctgaccttcgagggcctgaccaacagcaaggacagccaggccaagaagatcaagatggacctgcagaaggccgccaccatccccgtgagccagatcagcaccatcgccggcagcaagctgaaggagatcttcgacaagatccacagcctgctgagcggcaagcccgtgcagagcggcggcagaagcgtgagcgtgaccctgaacccccagggcctggacttcgtgcagtacaagctggccgagaagttcgtgaagcagggcgaggaggaggtggccagccaccacgaggccgccttccccatcgccgtggtggccagcggcatctgggagctgcaccccagagtgggcgacctgatcctggcccacctgcacaagaagtgcccctacagcgtgcccttctaccccaccttcaaggagggcatggccctggaggactaccagagaatgctgggctaccaggtgaaggacagcaaggtggagcagcaggacaacttcctgaagagaatgagcggcatgatcagactgtacgccgccatcatccagctgagatggccctacggcaacagacaggagatccacccccacggcctgaaccacggctggagatggctggcccagatcctgaacatggagcccctgagcgacgtgaccgccaccctgctgttcgacttcctggaggtgtgcggcaacgccctgatgaagcagtaccaggtgcagttctggaagatgctgatcctgatcaaggaggactacttccccagaatcgaggccatcaccagcagcggccagatgggcagcttcatcagactgaagcagttcctggagaagtgcctgcagcacaaggacatccccgtgcccaagggcttcctgaccagcagcttctggagaagctag

SEQ ID NO: 82963 - DNA, 2490 bp, synthetic construct
  misc_feature 1..2490: note = Description of Artificial Sequence: Synthetic coding sequence
  source 1..2490: mol_type = other DNA
atggccctgaccagcatcaacgccacccccacccagctgagcagcagcagcaactgcctgagcgacaccaaccagaacaagcagagcagcgagagcgccgtgagcagcaccgtgaaccccgtggccatccacaagagaagcaaggtgaagaccgagcccgagggcctgagacccgccagccccctggccctgacccagggccaggtgagcggccacggcagctgcggctgcgccctgcccctgagccaggagcagctggccgacctgaaggaggacctggacagagacgactgcaagcaggaggccgaggtggtgatctacgagaccaactgccactgggaggactgcaccaaggagtacgacacccaggagcagctggtgcaccacatcaacaacgagcacatccacggcgagaagaaggagttcgtgtgcagatggcaggcctgcaccagagagcagaagcccttcaaggcccagtacatgctggtggtgcacatgagaagacacaccggcgagaagccccacaagtgcaccttcgagggctgcagcaaggcctacagcagactggagaacctgaagacccacctgagaagccacaccggcgagaagccctacgtgtgcgagcacgagggctgcaacaaggccttcagcaacgccagcgacagagccaagcaccagaacagaacccacagcaacgagaagccctacatctgcaagatccccggctgcaccaagagatacaccgaccccagcagcctgagaaagcacgtgaagaccgtgcacggccccgacgcccacgtgaccaagaagcagagaaacgacgtgcacctgagaacccccctgctgaaggagaacggcgacagcgaggccggcaccgagcccggcggccccgagagcaccgaggccagcagcaccagccaggccgtggaggactgcctgcacgtgagagccatcaagaccgagagcagcggcctgtgccagagcagccccggcgcccagagcagctgcagcagcgagcccagccccctgggcagcgcccccaacaacgacagcggcgtggagatgcccggcaccggccccggcagcctgggcgacctgaccgccctggacgacaccccccccggcgccgacaccagcgccctggccgcccccagcgccggcggcctgcagctgagaaagcacatgaccaccatgcacagattcgagcagctgaagaaggagaagctgaagagcctgaaggacagctgcagctgggccggccccaccccccacaccagaaacaccaagctgccccccctgcccggcagcggcagcatcctggagaacttcagcggcagcggcggcggcggccccgccggcctgctgcccaaccccagactgagcgagctgagcgccagcgaggtgaccatgctgagccagctgcaggagagaagagacagcagcaccagcaccgtgagcagcgcctacaccgtgagcagaagaagcagcggcatcagcccctacttcagcagcagaagaagcagcgaggccagccccctgggcgccggcagaccccacaacgccagcagcgccgacagctacgaccccatcagcaccgacgccagcagaagaagcagcgaggccagccagtgcagcggcggcagcggcctgctgaacctgacccccgcccagcagtacagcctgagagccaagtacgccgccgccaccggcggccccccccccacccccctgcccggcctggagagaatgagcctgagaaccagactggccctgctggacgcccccgagagaaccctgcccgccggctgccccagacccctgggccccagaagaggcagcgacggccccacctacggccacggccacgccggcgccgcccccgccttcccccacgaggcccccggcggcggcgccagaagagccagcgaccccgtgagaagacccgacgccctgagcctgcccagagtgcagagattccacagcacccacaacgtgaaccccggccccctgcccccctgcgccgacagaagaggcctgagactgcagagccaccccagcaccgacggcggcctggccagaggcgcctacagccccagaccccccagcatcagcgagaacgtggccatggaggccgtggccgccggcgtggacggcgccggccccgaggccgacctgggcctgcccgaggacgacctggtgctgcccgacgacgtggtgcagtacatcaaggcccacgccagcggcgccctggacgagggcaccggccaggtgtaccccaccgagagcaccggcttcagcgacaaccccagactgcccagccccggcctgcacggccagagaagaatggtggccgccgacagcaacgtgggccccagcgcccccatgctgggcggctgccagctgggcttcggcgcccccagcagcctgaacaagaacaacatgcccgtgcagtggaacgaggccagcgccacctggctgagcggcacctag

SEQ ID NO: 82964 - DNA, 4761 bp, synthetic construct
  misc_feature 1..4761: note = Description of Artificial Sequence: Synthetic coding sequence
  source 1..4761: mol_type = other DNA
atggagaccagcgccagcgccaccgccagcgagaagcaggaggccaagagcggcatcctggaggccgccggcttccccgaccccggcaagaaggccagccccctggtggtggccgccgccgccgccgccgccgtggccgcccagggcgtgccccagcacctgctgccccccttccacgcccccctgcccatcgacatgagacaccaggagggcagataccactacgagccccacagcgtgcacggcgtgcacggcccccccgccctgagcggcagccccgtgatcagcgacatcagcctgatcagactgagcccccaccccgccggccccggcgagagccccttcaacgccccccacccctacgtgaacccccacatggagcactacctgagaagcgtgcacagcagccccaccctgagcatgatcagcgccgccagaggcctgagccccgccgacgtggcccaggagcacctgaaggagagaggcctgttcggcctgcccgcccccggcaccacccccagcgactactaccaccagatgaccctggtggccggccaccccgccccctacggcgacctgctgatgcagagcggcggcgccgccagcgccccccacctgcacgactacctgaaccccgtggacgtgagcagattcagcagccccagagtgacccccagactgagcagaaagagagccctgagcatcagccccctgagcgacgccagcctggacctgcagagaatgatcagaaccagccccaacagcctggtggcctacatcaacaacagcagaagcagcagcgccgccagcggcagctacggccacctgagcgccggcgccctgagccccgccttcaccttcccccaccccatcaaccccgtggcctaccagcagatcctgagccagcagagaggcctgggcagcgccttcggccacaccccccccctgatccagcccagccccaccttcctggcccagcagcccatggccctgaccagcatcaacgccacccccacccagctgagcagcagcagcaactgcctgagcgacaccaaccagaacaagcagagcagcgagagcgccgtgagcagcaccgtgaaccccgtggccatccacaagagaagcaaggtgaagaccgagcccgagggcctgagacccgccagccccctggccctgacccagggccaggtgagcggccacggcagctgcggctgcgccctgcccctgagccaggagcagctggccgacctgaaggaggacctggacagagacgactgcaagcaggaggccgaggtggtgatctacgagaccaactgccactgggaggactgcaccaaggagtacgacacccaggagcagctggtgcaccacatcaacaacgagcacatccacggcgagaagaaggagttcgtgtgcagatggcaggcctgcaccagagagcagaagcccttcaaggcccagtacatgctggtggtgcacatgagaagacacaccggcgagaagccccacaagtgcaccttcgagggctgcagcaaggcctacagcagactggagaacctgaagacccacctgagaagccacaccggcgagaagccctacgtgtgcgagcacgagggctgcaacaaggccttcagcaacgccagcgacagagccaagcaccagaacagaacccacagcaacgagaagccctacatctgcaagatccccggctgcaccaagagatacaccgaccccagcagcctgagaaagcacgtgaagaccgtgcacggccccgacgcccacgtgaccaagaagcagagaaacgacgtgcacctgagaacccccctgctgaaggagaacggcgacagcgaggccggcaccgagcccggcggccccgagagcaccgaggccagcagcaccagccaggccgtggaggactgcctgcacgtgagagccatcaagaccgagagcagcggcctgtgccagagcagccccggcgcccagagcagctgcagcagcgagcccagccccctgggcagcgcccccaacaacgacagcggcgtggagatgcccggcaccggccccggcagcctgggcgacctgaccgccctggacgacaccccccccggcgccgacaccagcgccctggccgcccccagcgccggcggcctgcagctgagaaagcacatgaccaccatgcacagattcgagcagctgaagaaggagaagctgaagagcctgaaggacagctgcagctgggccggccccaccccccacaccagaaacaccaagctgccccccctgcccggcagcggcagcatcctggagaacttcagcggcagcggcggcggcggccccgccggcctgctgcccaaccccagactgagcgagctgagcgccagcgaggtgaccatgctgagccagctgcaggagagaagagacagcagcaccagcaccgtgagcagcgcctacaccgtgagcagaagaagcagcggcatcagcccctacttcagcagcagaagaagcagcgaggccagccccctgggcgccggcagaccccacaacgccagcagcgccgacagctacgaccccatcagcaccgacgccagcagaagaagcagcgaggccagccagtgcagcggcggcagcggcctgctgaacctgacccccgcccagcagtacagcctgagagccaagtacgccgccgccaccggcggccccccccccacccccctgcccggcctggagagaatgagcctgagaaccagactggccctgctggacgcccccgagagaaccctgcccgccggctgccccagacccctgggccccagaagaggcagcgacggccccacctacggccacggccacgccggcgccgcccccgccttcccccacgaggcccccggcggcggcgccagaagagccagcgaccccgtgagaagacccgacgccctgagcctgcccagagtgcagagattccacagcacccacaacgtgaaccccggccccctgcccccctgcgccgacagaagaggcctgagactgcagagccaccccagcaccgacggcggcctggccagaggcgcctacagccccagaccccccagcatcagcgagaacgtggccatggaggccgtggccgccggcgtggacggcgccggccccgaggccgacctgggcctgcccgaggacgacctggtgctgcccgacgacgtggtgcagtacatcaaggcccacgccagcggcgccctggacgagggcaccggccaggtgtaccccaccgagagcaccggcttcagcgacaaccccagactgcccagccccggcctgcacggccagagaagaatggtggccgccgacagcaacgtgggccccagcgcccccatgctgggcggctgccagctgggcttcggcgcccccagcagcctgaacaagaacaacatgcccgtgcagtggaacgaggtgagcagcggcaccgtggacgccctggccagccaggtgaagcccccccccttcccccagggcaacctggccgtggtgcagcagaagcccgccttcggccagtaccccggctacagcccccagggcctgcaggccagccccggcggcctggacagcacccagccccacctgcagcccagaagcggcgcccccagccagggcatccccagagtgaactacatgcagcagctgagacagcccgtggccggcagccagtgccccggcatgaccaccaccatgagcccccacgcctgctacggccaggtgcacccccagctgagccccagcaccatcagcggcgccctgaaccagttcccccagagctgcagcaacatgcccgccaagcccggccacctgggccacccccagcagaccgaggtggcccccgaccccaccaccatgggcaacagacacagagagctgggcgtgcccgacagcgccctggccggcgtgccccccccccaccccgtgcagagctacccccagcagagccaccacctggccgccagcatgagccaggagggctaccaccaggtgcccagcctgctgcccgccagacagcccggcttcatggagccccagaccggccccatgggcgtggccaccgccggcttcggcctggtgcagcccagaccccccctggagcccagccccaccggcagacacagaggcgtgagagccgtgcagcagcagctggcctacgccagagccaccggccacgccatggccgccatgcccagcagccaggagaccgccgaggccgtgcccaagggcgccatgggcaacatgggcagcgtgcccccccagccccccccccaggacgccggcggcgcccccgaccacagcatgctgtactactacggccagatccacatgtacgagcaggacggcggcctggagaacctgggcagctgccaggtgatgagaagccagcccccccagccccaggcctgccaggacagcatccagccccagcccctgcccagccccggcgtgaaccaggtgagcagcaccgtggacagccagctgctggaggccccccagatcgacttcgacgccatcatggacgacggcgaccacagcagcctgttcagcggcgccctgagccccagcctgctgcacagcctgagccagaacagcagcagactgaccacccccagaaacagcctgaccctgcccagcatccccgccggcatcagcaacatggccgtgggcgacatgagcagcatgctgaccagcctggccgaggagagcaagttcctgaacatgatgacctag

SEQ ID NO: 82965 - DNA, 249 bp, synthetic construct
  misc_feature 1..249: note = Description of Artificial Sequence: Synthetic coding sequence
  source 1..249: mol_type = other DNA
atggagaccagcgccagcgccaccgccagcgagaagcaggaggccaagagcggcatcctggaggccgccggcttccccgaccccggcaagaaggccagccccctggtggtggccgccgccgccgccgccgccgtggccgcccagggcgtgccccagcacctgctgccccccttccacgcccccctgcccatcgacatgagacaccaggagggcagataccactacgagccccacagcgtgcacggctag

SEQ ID NO: 82966 - DNA, 660 bp, synthetic construct
  misc_feature 1..660: note = Description of Artificial Sequence: Synthetic coding sequence
  source 1..660: mol_type = other DNA
atggagaccagcgccagcgccaccgccagcgagaagcaggaggccaagagcggcatcctggaggccgccggcttccccgaccccggcaagaaggccagccccctggtggtggccgccgccgccgccgccgccgtggccgcccagggcgtgccccagcacctgctgccccccttccacgcccccctgcccatcgacatgagacaccaggagggcagataccactacgagccccacagcgtgcacggcgtgcacggcgtgcccttcctgcagcccgccggcgacgccccccccgagccccaggccggcgccgtgcacctgcccaccctgagaagacagcccggccccgccgccgacgacccccacctgacccagctggccagcggcctgcaccagcagctgcccaagcagctgggcggccagagattcctgagagccagcgtgagcggctgcccccagcccagcctgcacctgccccccccccaccagcccagaggcctgcccgccgacagcgagcccgccgagggcagcggcgtgagcctgtggacccacaccacccccgaccccgccctgacccacctgcccggccccgccgcccacggcccccacctgcaccagtgccacgcccaccccgcccagcagcagcagcagctgagcgagtag

SEQ ID NO: 82967 - DNA, 4761 bp, synthetic construct; identical to SEQ ID NO: 82964
  misc_feature 1..4761: note = Description of Artificial Sequence: Synthetic coding sequence
  source 1..4761: mol_type = other DNA

SEQ ID NO: 82968 - DNA, 4743 bp, synthetic construct
  misc_feature 1..4743: note = Description of Artificial Sequence: Synthetic coding sequence
  source 1..4743: mol_type = other DNA
atggaggcccagagccacagcagcaccaccaccgagaagaagaaggtggagaacagcatcgtgaagtgcagcaccagaaccgacgtgagcgagaaggccgtggccagcagcaccaccagcaacgaggacgagagccccggccagacctaccacagagagagaagaaacgccatcaccatgcagccccagaacgtgcagggcctgagcaaggtgagcgaggagcccagcaccagcagcgacgagagagccagcctgatcaagaaggagatccacggcagcctgccccacgtggccgagcccagcgtgccctacagaggcaccgtgttcgccatggaccccagaaacggctacatggagccccactaccaccccccccacctgttccccgccttccacccccccgtgcccatcgacgccagacaccacgagggcagataccactacgaccccagccccatcccccccctgcacatgaccagcgccctgagcagcagccccacctaccccgacctgcccttcatcagaatcagcccccacagaaaccccaccgccgccagcgagagccccttcagccccccccacccctacatcaacccctacatggactacatcagaagcctgcacagcagccccagcctgagcatgatcagcgccaccagaggcctgagccccaccgacgccccccacgccggcgtgagccccgccgagtactaccaccagatggccctgctgaccggccagagaagcccctacgccgacatcatccccagcgccgccaccgccggcaccggcgccatccacatggagtacctgcacgccatggacagcaccagattcagcagccccagactgagcgccagacccagcagaaagagaaccctgagcatcagccccctgagcgaccacagcttcgacctgcagaccatgatcagaaccagccccaacagcctggtgaccatcctgaacaacagcagaagcagcagcagcgccagcggcagctacggccacctgagcgccagcgccatcagccccgccctgagcttcacctacagcagcgcccccgtgagcctgcacatgcaccagcagatcctgagcagacagcagagcctgggcagcgccttcggccacagcccccccctgatccaccccgcccccaccttccccacccagagacccatccccggcatccccaccgtgctgaaccccgtgcaggtgagcagcggccccagcgagagcagccagaacaagcccaccagcgagagcgccgtgagcagcaccggcgaccccatgcacaacaagagaagcaagatcaagcccgacgaggacctgcccagccccggcgccagaggccagcaggagcagcccgagggcaccaccctggtgaaggaggagggcgacaaggacgagagcaagcaggagcccgaggtgatctacgagaccaactgccactgggagggctgcgccagagagttcgacacccaggagcagctggtgcaccacatcaacaacgaccacatccacggcgagaagaaggagttcgtgtgcagatggctggactgcagcagagagcagaagcccttcaaggcccagtacatgctggtggtgcacatgagaagacacaccggcgagaagccccacaagtgcaccttcgagggctgcaccaaggcctacagcagactggagaacctgaagacccacctgagaagccacaccggcgagaagccctacgtgtgcgagcacgagggctgcaacaaggccttcagcaacgccagcgacagagccaagcaccagaacagaacccacagcaacgagaagccctacgtgtgcaagatccccggctgcaccaagagatacaccgaccccagcagcctgagaaagcacgtgaagaccgtgcacggccccgaggcccacgtgaccaagaagcagagaggcgacatccaccccagaccccccccccccagagacagcggcagccacagccagagcagaagccccggcagacccacccagggcgccctgggcgagcagcaggacctgagcaacaccaccagcaagagagaggagtgcctgcaggtgaagaccgtgaaggccgagaagcccatgaccagccagcccagccccggcggccagagcagctgcagcagccagcagagccccatcagcaactacagcaacagcggcctggagctgcccctgaccgacggcggcagcatcggcgacctgagcgccatcgacgagacccccatcatggacagcaccatcagcaccgccaccaccgccctggccctgcaggccagaagaaaccccgccggcaccaagtggatggagcacgtgaagctggagagactgaagcaggtgaacggcatgttccccagactgaaccccatcctgccccccaaggcccccgccgtgagccccctgatcggcaacggcacccagagcaacaacacctgcagcctgggcggccccatgaccctgctgcccggcagaagcgacctgagcggcgtggacgtgaccatgctgaacatgctgaacagaagagacagcagcgccagcaccatcagcagcgcctacctgagcagcagaagaagcagcggcatcagcccctgcttcagcagcagaagaagcagcgaggccagccaggccgagggcagaccccagaacgtgagcgtggccgacagctacgaccccatcagcaccgacgccagcagaagaagcagcgaggccagccagagcgacggcctgcccagcctgctgagcctgacccccgcccagcagtacagactgaaggccaagtacgccgccgccaccggcggccccccccccacccccctgcccaacatggagagaatgagcctgaagaccagactggccctgctgggcgacgccctggagcccggcgtggccctgccccccgtgcacgcccccagaagatgcagcgacggcggcgcccacggctacggcagaagacacctgcagccccacgacgcccccggccacggcgtgagaagagccagcgaccccgtgagaaccggcagcgagggcctggccctgcccagagtgcccagattcagcagcctgagcagctgcaacccccccgccatggccaccagcgccgagaagagaagcctggtgctgcagaactacaccagacccgagggcggccagagcagaaacttccacagcagcccctgcccccccagcatcaccgagaacgtgaccctggagagcctgaccatggacgccgacgccaacctgaacgacgaggacttcctgcccgacgacgtggtgcagtacctgaacagccagaaccaggccggctacgagcagcacttccccagcgccctgcccgacgacagcaaggtgccccacggccccggcgacttcgacgcccccggcctgcccgacagccacgccggccagcagttccacgccctggagcagccctgccccgagggcagcaagaccgacctgcccatccagtggaacgaggtgagcagcggcagcgccgacctgagcagcagcaagctgaagtgcggccccagacccgccgtgccccagaccagagccttcggcttctgcaacggcatggtggtgcacccccagaaccccctgagaagcggccccgccggcggctaccagaccctgggcgagaacagcaacccctacggcggccccgagcacctgatgctgcacaacagccccggcagcggcaccagcggcaacgccttccacgagcagccctgcaaggccccccagtacggcaactgcctgaacagacagcccgtggcccccggcgccctggacggcgcctgcggcgccggcatccaggccagcaagctgaagagcacccccatgcagggcagcggcggccagctgaacttcggcctgcccgtggcccccaacgagagcgccggcagcatggtgaacggcatgcagaaccaggaccccgtgggccagggctacctggcccaccagctgctgggcgacagcatgcagcaccccggcgccggcagacccggccagcagatgctgggccagatcagcgccaccagccacatcaacatctaccagggccccgagagctgcctgcccggcgcccacggcatgggcagccagcccagcagcctggccgtggtgagaggctaccagccctgcgccagcttcggcggcagcagaagacaggccatgcccagagacagcctggccctgcagagcggccagctgagcgacaccagccagacctgcagagtgaacggcatcaagatggagatgaagggccagccccaccccctgtgcagcaacctgcagaactacagcggccagttctacgaccagaccgtgggcttcagccagcaggacaccaaggccggcagcttcagcatcagcgacgccagctgcctgctgcagggcaccagcgccaagaacagcgagctgctgagccccggcgccaaccaggtgaccagcaccgtggacagcctggacagccacgacctggagggcgtgcagatcgacttcgacgccatcatcgacgacggcgaccacagcagcctgatgagcggcgccctgagccccagcatcatccagaacctgagccacagcagcagcagactgaccacccccagagccagcctgcccttccccgccctgagcatgagcaccaccaacatggccatcggcgacatgagcagcctgctgaccagcctggccgaggagagcaagttcctggccgtgatgcagtag

SEQ ID NO: 82969 - DNA, 543 bp, synthetic construct
  misc_feature 1..543: note = Description of Artificial Sequence: Synthetic coding sequence
  source 1..543: mol_type = other DNA
atggaggcccagagccacagcagcaccaccaccgagaagaagaaggtggagaacagcatcgtgaagtgcagcaccagaaccgacgtgagcgagaaggccgtggccagcagcaccaccagcaacgaggacgagagccccggccagacctaccacagagagagaagaaacgccatcaccatgcagccccagaacgtgcagggcctgagcaaggtgagcgaggagcccagcaccagcagcgacgagagagccagcctgatcaagaaggagatccacggcagcctgccccacgtggccgagcccagcgtgccctacagaggcaccgtgttcgccatggaccccagaaacggctacatggagccccactaccaccccccccacctgttccccgccttccacccccccgtgcccatcgacgccagacaccacgagggcagataccactacgaccccagccccatcccccccctgcacatgaccagcgccctgagcagcagccccacctaccccgacctgcccttcatcagaatcagcccccacagatag

SEQ ID NO: 82970 - DNA, 1131 bp, synthetic construct
  misc_feature 1..1131: note = Description of Artificial Sequence: Synthetic coding sequence
  source 1..1131: mol_type = other DNA
atggccgccctgggcgacatccaggagagccccagcgtgcccagccccgtgagcctgagcagccccggcacccccggcacccagcaccacgagccccagctgcacctgcacggccaccagcacggcagccccggcagcagccccaaggtgctgagccagcccagcgacctggacctgcaggacgtggaggaggtggagatcggcagagacaccttctggcccgacagcgagcccaagcccgagcaggcccccagaagccccggcagccaggcccccgacgagggcgccggcggcgccctgagaagcctgctgagaagcctgcccagaagagccagatgcagcgccggcttcggccccgagagcagcgccgagagacccgccggccagccccccggcgccgtgccctgcgcccagcccagaggcgcctggagagtgaccctggtgcagcaggccgccgccggccccgagggcgcccccgagagagccgccgagctgggcgtgaacttcggcagaagcagacagggcagcgccagaggcgccaagccccacagatgcgaggcctgcggcaagagcttcaagtacaacagcctgctgctgaagcaccagagaatccacaccggcgagaagccctacgcctgccacgagtgcggcaagagattcagaggctggagcggcttcatccagcaccacagaatccacaccggcgagaagccctacgagtgcggccagtgcggcagagccttcagccacagcagccacttcacccagcacctgagaatccacaacggcgagaagccctacaagtgcggcgagtgcggccaggccttcagccagagcagcaacctggtgagacaccagagactgcacaccggcgagaagccctacgcctgcagccagtgcggcaaggccttcatctggagcagcgtgctgatcgagcaccagagaatccacaccggcgagaagccctacgagtgcagcgactgcggcaaggccttcagaggcagaagccacttcttcagacacctgagaacccacaccggcgagaagcccttcgcctgcggcgcctgcggcaaggccttcggccagagcagccagctgatccagcaccagagagtgcactacagagagtag

SEQ ID NO: 82971 - DNA, 1131 bp, synthetic construct; identical to SEQ ID NO: 82970
  misc_feature 1..1131: note = Description of Artificial Sequence: Synthetic coding sequence
  source 1..1131: mol_type = other DNA

SEQ ID NO: 82972 - DNA, 801 bp, synthetic construct
  misc_feature 1..801: note = Description of Artificial Sequence: Synthetic coding sequence
  source 1..801: mol_type = other DNA
atgagagtgaccctggccaccatcgcctggatggtgagcttcgtgagcaactacagccacaccgccaacatcctgcccgacatcgagaacgaggacttcatcaaggactgcgtgagaatccacaacaagttcagaagcgaggtgaagcccaccgccagcgacatgctgtacatgacctgggaccccgccctggcccagatcgccaaggcctgggccagcaactgccagttcagccacaacaccagactgaagcccccccacaagctgcaccccaacttcaccagcctgggcgagaacatctggaccggcagcgtgcccatcttcagcgtgagcagcgccatcaccaactggtacgacgagatccaggactacgacttcaagaccagaatctgcaagaaggtgtgcggccactacacccaggtggtgtgggccgacagctacaaggtgggctgcgccgtgcagttctgccccaaggtgagcggcttcgacgccctgagcaacggcgcccacttcatctgcaactacggccccggcggcaactaccccacctggccctacaagagaggcgccacctgcagcgcctgccccaacaacgacaagtgcctggacaacctgtgcgtgaacagacagagagaccaggtgaagagatactacagcgtggtgtaccccggctggcccatctaccccagaaacagatacaccagcctgttcctgatcgtgaacagcgtgatcctgatcctgagcgtgatcatcaccatcctggtgcagcacaagtaccccaacctggtgctgctggactag

SEQ ID NO: 82973 - DNA, 429 bp, synthetic construct
  misc_feature 1..429: note = Description of Artificial Sequence: Synthetic coding sequence
  source 1..429: mol_type = other DNA
atgagcgacagcctggtggtgtgcgaggtggaccccgagctgaccgagaagctgagaaagttcagattcagaaaggagaccgacaacgccgccatcatcatgaaggtggacaaggacagacagatggtggtgctggaggaggagttccagaacatcagccccgaggagctgaagatggagctgcccgagagacagcccagattcgtggtgtacagctacaagtacgtgcacgacgacggcagagtgagctaccccctgtgcttcatcttcagcagccccgtgggctgcaagcccgagcagcagatgatgtacgccggcagcaagaacagactggtgcagaccgccgagctgaccaaggtgttcgagatcagaaccaccgacgacctgaccgaggcctggctgcaggagaagctgagcttcttcagatag

SEQ ID NO: 82974 - DNA, 429 bp, synthetic construct; identical to SEQ ID NO: 82973
  misc_feature 1..429: note = Description of Artificial Sequence: Synthetic coding sequence
  source 1..429: mol_type = other DNA

SEQ ID NO: 82975 - DNA, 1299 bp, synthetic construct
  misc_feature 1..1299: note = Description of Artificial Sequence: Synthetic coding sequence
  source 1..1299: mol_type = other DNA
atggagagaagaagaatcaccagcgccgccagaagaagctacgtgagcagcggcgagatgatggtgggcggcctggcccccggcagaagactgggccccggcaccagactgagcctggccagaatgcccccccccctgcccaccagagtggacttcagcctggccggcgccctgaacgccggcttcaaggagaccagagccagcgagagagccgagatgatggagctgaacgacagattcgccagctacatcgagaaggtgagattcctggagcagcagaacaaggccctggccgccgagctgaaccagctgagagccaaggagcccaccaagctggccgacgtgtaccaggccgagctgagagagctgagactgagactggaccagctgaccgccaacagcgccagactggaggtggagagagacaacctggcccaggacctggccaccgtgagacagaagctgcaggacgagaccaacctgagactggaggccgagaacaacctggccgcctacagacaggaggccgacgaggccaccctggccagactggacctggagagaaagatcgagagcctggaggaggagatcagattcctgagaaagatccacgaggaggaggtgagagagctgcaggagcagctggccagacagcaggtgcacgtggagctggacgtggccaagcccgacctgaccgccgccctgaaggagatcagaacccagtacgaggccatggccagcagcaacatgcacgaggccgaggagtggtacagaagcaagttcgccgacctgaccgacgccgccgccagaaacgccgagctgctgagacaggccaagcacgaggccaacgactacagaagacagctgcagagcctgacctgcgacctggagagcctgagaggcaccaacgagagcctggagagacagatgagagagcaggaggagagacacgtgagagaggccgccagctaccaggaggccctggccagactggaggaggagggccagagcctgaaggacgagatggccagacacctgcaggagtaccaggacctgctgaacgtgaagctggccctggacatcgagatcgccacctacagaaagctgctggagggcgaggagaacagaatcaccatccccgtgcagaccttcagcaacctgcagatcagagagaccagcctggacaccaagagcgtgagcgagggccacctgaagagaaacatcgtggtgaagaccgtggagatgagagacggcgaggtgatcaaggagagcaagcaggagcacaaggacgtgatgtag

SEQ ID NO: 82976 - DNA, 540 bp, synthetic construct
  misc_feature 1..540: note = Description of Artificial Sequence: Synthetic coding sequence
  source 1..540: mol_type = other DNA
atggagagaagaagaatcaccagcgccgccagaagaagctacgtgagcagcggcgagatgatggtgggcggcctggcccccggcagaagactgggccccggcaccagactgagcctggccagaatgcccccccccctgcccaccagagtggacttcagcctggccggcgccctgaacgccggcttcaaggagaccagagccagcgagagagccgagatgatggagctgaacgacagattcgccagctacatcgagaaggtgagattcctggagcagcagaacaaggccctggccgccgagctgaaccagctgagagccaaggagcccaccaagctggccgacgtgtaccaggccgagctgagagagctgagactgagactggaccagctgaccgccaacagcgccagactggaggtggagagagacaacctggcccaggacctggccaccgtgagacagaagaagcagatgaagcccccctggcccgtgtggatctggagaggcagactgagcagatggagaagaagaagcggcagctag

SEQ ID NO: 82977 - DNA, 1224 bp, synthetic construct
  misc_feature 1..1224: note = Description of Artificial Sequence: Synthetic coding sequence
  source 1..1224: mol_type = other DNA
atggagagaagaagaatcaccagcgccaccagactgagcctggccagaatgcccccccccctgcccaccagagtggacttcagcctggccggcgccctgaacgccggcttcaaggagaccagagccagcgagagagccgagatgatggagctgaacgacagattcgccagctacatcgagaaggtgagattcctggagcagcagaacaaggccctggccgccgagctgaaccagctgagagccaaggagcccaccaagctggccgacgtgtaccaggccgagctgagagagctgagactgagactggaccagctgaccgccaacagcgccagactggaggtggagagagacaacctggcccaggacctggccaccgtgagacagaagctgcaggacgagaccaacctgagactggaggccgagaacaacctggccgcctacagacaggaggccgacgaggccaccctggccagactggacctggagagaaagatcgagagcctggaggaggagatcagattcctgagaaagatccacgaggaggaggtgagagagctgcaggagcagctggccagacagcaggtgcacgtggagctggacgtggccaagcccgacctgaccgccgccctgaaggagatcagaacccagtacgaggccatggccagcagcaacatgcacgaggccgaggagtggtacagaagcaagttcgccgacctgaccgacgccgccgccagaaacgccgagctgctgagacaggccaagcacgaggccaacgactacagaagacagctgcagagcctgacctgcgacctggagagcctgagaggcaccaacgagagcctggagagacagatgagagagcaggaggagagacacgtgagagaggccgccagctaccaggaggccctggccagactggaggaggagggccagagcctgaaggacgagatggccagacacctgcaggagtaccaggacctgctgaacgtgaagctggccctggacatcgagatcgccacctacagaaagctgctggagggcgaggagaacagaatcaccatccccgtgcagaccttcagcaacctgcagatcagagagaccagcctggacaccaagagcgtgagcgagggccacctgaagagaaacatcgtggtgaagaccgtggagatgagagacggcgaggtgatcaaggagagcaagcaggagcacaaggacgtgatgtag

SEQ ID NO: 82978 - DNA, 1296 bp, synthetic construct
  misc_feature 1..1296: note = Description of Artificial Sequence: Synthetic coding sequence
  source 1..1296: mol_type = other DNA
atggagagaagaagaatcaccagcgccgccagaagaagctacgtgagcagcggcgagatgatggtgggcggcctggcccccggcagaagactgggccccggcaccagactgagcctggccagaatgcccccccccctgcccaccagagtggacttcagcctggccggcgccctgaacgccggcttcaaggagaccagagccagcgagagagccgagatgatggagctgaacgacagattcgccagctacatcgagaaggtgagattcctggagcagcagaacaaggccctggccgccgagctgaaccagctgagagccaaggagcccaccaagctggccgacgtgtaccaggccgagctgagagagctgagactgagactggaccagctgaccgccaacagcgccagactggaggtggagagagacaacctggcccaggacctggccaccgtgagacagaagctgcaggacgagaccaacctgagactggaggccgagaacaacctggccgcctacagacaggaggccgacgaggccaccctggccagactggacctggagagaaagatcgagagcctggaggaggagatcagattcctgagaaagatccacgaggaggaggtgagagagctgcaggagcagctggccagacagcaggtgcacgtggagctggacgtggccaagcccgacctgaccgccgccctgaaggagatcagaacccagtacgaggccatggccagcagcaacatgcacgaggccgaggagtggtacagaagcaagttcgccgacctgaccgacgccgccgccagaaacgccgagctgctgagacaggccaagcacgaggccaacgactacagaagacagctgcagagcctgacctgcgacctggagagcctgagaggcaccaacgagagcctggagagacagatgagagagcaggaggagagacacgtgagagaggccgccagctaccaggaggccctggccagactggaggaggagggccagagcctgaaggacgagatggccagacacctgcaggagtaccaggacctgctgaacgtgaagctggccctggacatcgagatcgccacctacagaaagctgctggagggcgaggagaacagaatcaccatccccgtgcagaccttcagcaacctgcagatcagaggcggcaagagcaccaaggacggcgagaaccacaaggtgaccagatacctgaagagcctgaccatcagagtgatccccatccaggcccaccagatcgtgaacggcaccccccccgccagaggctag

SEQ ID NO: 82979 - DNA, 1317 bp, synthetic construct
  misc_feature 1..1317: note = Description of Artificial Sequence: Synthetic coding sequence
  source 1..1317: mol_type = other DNA
atggagagaagaagaatcaccagcgccgccagaagaagctacgtgagcagcggcgagatgatggtgggcggcctggcccccggcagaagactgggccccggcaccagactgagcctggccagaatgcccccccccctgcccaccagagtggacttcagcctggccggcgccctgaacgccggcttcaaggagaccagagccagcgagagagccgagatgatggagctgaacgacagattcgccagctacatcgagaaggtgagattcctggagcagcagaacaaggccctggccgccgagctgaaccagctgagagccaaggagcccaccaagctggccgacgtgtaccaggccgagctgagagagctgagactgagactggaccagctgaccgccaacagcgccagactggaggtggagagagacaacctggcccaggacctggccaccgtgagacagaagctgcaggacgagaccaacctgagactggaggccgagaacaacctggccgcctacagacaggaggccgacgaggccaccctggccagactggacctggagagaaagatcgagagcctggaggaggagatcagattcctgagaaagatccacgaggaggaggtgagagagctgcaggagcagctggccagacagcaggtgcacgtggagctggacgtggccaagcccgacctgaccgccgccctgaaggagatcagaacccagtacgaggccatggccagcagcaacatgcacgaggccgaggagtggtacagaagcaagttcgccgacctgaccgacgccgccgccagaaacgccgagctgctgagacaggccaagcacgaggccaacgactacagaagacagctgcagagcctgacctgcgacctggagagcctgagaggcaccaacgagagcctggagagacagatgagagagcaggaggagagacacgtgagagaggccgccagctaccaggaggccctggccagactggaggaggagggccagagcctgaaggacgagatggccagacacctgcaggagtaccaggacctgctgaacgtgaagctggccctggacatcgagatcgccacctacagaaagctgctggagggcgaggagaacagaatcaccatccccgtgcagaccttcagcaacctgcagatcagaggccagtacagcagagccagctgggagggccactggagccccgcccccagcagcagagcctgcagactgctgcagaccggcaccgaggaccagggcaagggcatccagctgagcctgggcgccttcgtgaccctgcagagaagctag

SEQ ID NO: 82980 - DNA, 861 bp, synthetic construct
  misc_feature 1..861: note = Description of Artificial Sequence: Synthetic coding sequence
  source 1..861: mol_type = other DNA
atggccgccagagtgctgagagccagaggcgccgcctgggccggcggcctgctgcagagagccgccccctgcagcctgctgcccagactgagaacctggaccagcagcagcaacagaagcagagaggacagctggctgaagagcctgttcgtgagaaaggtggaccccagaaaggacgcccacagcaacctgctggccaagaaggagaccagcaacctgtacaagctgcagttccacaacgtgaagcccgagtgcctggaggcctacaacaagatctgccaggaggtgctgcccaagatccacgaggacaagcactacccctgcaccctggtgggcacctggaacacctggtacggcgagcaggaccaggccgtgcacctgtggagatacgagggcggctaccccgccctgaccgaggtgatgaacaagctgagagagaacaaggagttcctggagttcagaaaggccagaagcgacatgctgctgagcagaaagaaccagctgctgctggagttcagcttctggaacgagcccgtgcccagaagcggccccaacatctacgagctgagaagctaccagctgagacccggcaccatgatcgagtggggcaactactgggccagagccatcagattcagacaggacggcaacgaggccgtgggcggcttcttcagccagatcggccagctgtacatggtgcaccacctgtgggcctacagagacctgcagaccagagaggacatcagaaacgccgcctggcacaagcacggctgggaggagctggtgtactacaccgtgcccctgatccaggagatggagagcagaatcatgatccccctgaagaccagccccctgcagtag

SEQ ID NO: 82981 - DNA, 744 bp, synthetic construct
  misc_feature 1..744: note = Description of Artificial Sequence: Synthetic coding sequence
  source 1..744: mol_type = other DNA
atggccgccagagtgctgagagccagaggcgccgcctgggccggcggcctgctgcagagagccgccccctgcagcctgctgcccagactgagaacctggaccagcagcagcaacagaagcagagaggacagctggctgaagagcctgttcgtgagaaaggtggaccccagaaaggacgcccacagcaacctgctggccaagaaggagaccagcaacctgtacaagctgcagttcaagagatgctgccagagattcaccaagatcaacaccaccctggtgctgtggtggggcctgggcaccagaggcatggccagcagaaccaagctggagttcctggagttcagaaaggccagaagcgacatgctgctgagcagaaagaaccagctgctgctggagttcagcttctggaacgagcccgtgcccagaagcggccccaacatctacgagctgagaagctaccagctgagacccggcaccatgatcgagtggggcaactactgggccagagccatcagattcagacaggacggcaacgaggccgtgggcggcttcttcagccagatcggccagctgtacatggtgcaccacctgtgggcctacagagacctgcagaccagagaggacatcagaaacgccgcctggcacaagcacggctgggaggagctggtgtactacaccgtgcccctgatccaggagatggagagcagaatcatgatccccctgaagaccagccccctgcagtag

SEQ ID NO: 82982 - DNA, 4683 bp, synthetic construct
  misc_feature 1..4683: note = Description of Artificial Sequence: Synthetic coding sequence
  source 1..4683: mol_type = other DNA
atggacgacgaggacggcagatgcctgctggacgtgatctgcgacccccaggccctgaacgacttcctgcacggcagcgagaagctggacagcgacgacctgctggacaaccccggcgaggcccagagcgccttctacgagggccccggcctgcacgtgcaggaggccagcggcaaccacctgaaccccgagcccaaccagcccgcccccagcgtggacctggacttcctggaggacgacatcctgggcagccccgccaccggcggcggcggcggcggcagcggcggcgccgaccagccctgcgacatcctgcagcagagcctgcaggaggccaacatcaccgagcagaccctggaggccgaggccgagctggacctgggccccttccagctgcccaccctgcagcccgccgacggcggcgccggccccaccggcgccggcggcgccgccgccgtggccgccggcccccaggccctgttccccggcagcaccgacctgctgggcctgcagggcccccccaccgtgctgacccaccaggccctggtgcccccccaggacgtggtgaacaaggccctgagcgtgcagcccttcctgcagcccgtgggcctgggcaacgtgaccctgcagcccatccccggcctgcagggcctgcccaacggcagccccggcggcgccaccgccgccaccctgggcctggcccccatccaggtggtgggccagcccgtgatggccctgaacacccccaccagccagctgctggccaagcaggtgcccgtgagcggctacctggccagcgccgccggccccagcgagcccgtgaccctggccagcgccggcgtgagcccccagggcgccggcctggtgatccagaagaacctgagcgccgccgtggccaccaccctgaacggcaacagcgtgttcggcggcgccggcgccgccagcgcccccaccggcacccccagcggccagcccctggccgtggcccccggcctgggcagcagccccctggtgcccgcccccaacgtgatcctgcacagaacccccacccccatccagcccaagcccgccggcgtgctgccccccaagctgtaccagctgacccccaagcccttcgcccccgccggcgccaccctgaccatccagggcgagcccggcgccctgccccagcagcccaaggccccccagaacctgaccttcatggccgccggcaaggccggccagaacgtggtgctgagcggcttccccgcccccgccctgcaggccaacgtgttcaagcagccccccgccaccaccaccggcgccgcccccccccagccccccggcgccctgagcaagcccatgagcgtgcacctgctgaaccagggcagcagcatcgtgatccccgcccagcacatgctgcccggccagaaccagttcctgctgcccggcgcccccgccgtgcagctgccccagcagctgagcgccctgcccgccaacgtgggcggccagatcctggccgccgccgccccccacaccggcggccagctgatcgccaaccccatcctgaccaaccagaacctggccggccccctgagcctgggccccgtgctggccccccacagcggcgcccacagcgcccacatcctgagcgccgcccccatccaggtgggccagcccgccctgttccagatgcccgtgagcctggccgccggcagcctgcccacccagagccagcccgcccccgccggccccgccgccaccaccgtgctgcagggcgtgaccctgccccccagcgccgtggccatgctgaacacccccgacggcctggtgcagcccgccacccccgccgccgccaccggcgaggccgcccccgtgctgaccgtgcagcccgccccccaggccccccccgccgtgagcacccccctgcccctgggcctgcagcagccccaggcccagcagcccccccaggcccccaccccccaggccgccgcccccccccaggccaccaccccccagcccagccccggcctggccagcagccccgagaagatcgtgctgggccagccccccagcgccacccccaccgccatcctgacccaggacagcctgcagatgttcctgccccaggagagaagccagcagcccctgagcgccgagggcccccacctgagcgtgcccgccagcgtgatcgtgagcgcccccccccccgcccaggaccccgcccccgccacccccgtggccaagggcgccggcctgggcccccaggcccccgacagccaggccagccccgcccccgccccccagatccccgccgccgcccccctgaagggccccggccccagcagcagccccagcctgccccaccaggcccccctgggcgacagcccccacctgcccagcccccaccccaccagaccccccagcagaccccccagcagaccccagagcgtgagcagaccccccagcgagccccccctgcacccctgcccccccccccaggccccccccaccctgcccggcatcttcgtgatccagaaccagctgggcgtgcccccccccgccagcaaccccgcccccaccgcccccggccccccccagccccccctgagaccccagagccagccccccgagggccccctgccccccgccccccacctgccccccagcagcaccagcagcgccgtggccagcagcagcgagaccagcagcagactgcccgcccccacccccagcgacttccagctgcagttcccccccagccagggcccccacaagagccccacccccccccccaccctgcacctggtgcccgagcccgccgccccccccccccccccccccagaaccttccagatggtgaccacccccttccccgccctgccccagcccaaggccctgctggagagattccaccaggtgcccagcggcatcatcctgcagaacaaggccggcggcgcccccgccgccccccagaccagcaccagcctgggccccctgaccagccccgccgccagcgtgctggtgagcggccaggcccccagcggcacccccaccgcccccagccacgcccccgcccccgcccccatggccgccaccggcctgccccccctgctgcccgccgagaacaaggccttcgccagcaacctgcccaccctgaacgtggccaaggccgccagcagcggccccggcaagcccagcggcctgcagtacgagagcaagctgagcggcctgaagaagccccccaccctgcagcccagcaaggaggcctgcttcctggagcacctgcacaagcaccagggcagcgtgctgcaccccgactacaagaccgccttccccagcttcgaggacgccctgcacagactgctgccctaccacgtgtaccagggcgccctgcccagccccagcgactaccacaaggtggacgaggagttcgagaccgtgagcacccagctgctgaagagaacccaggccatgctgaacaagtacagactgctgctgctggaggagagcagaagagtgagccccagcgccgagatggtgatgatcgacagaatgttcatccaggaggagaagaccaccctggccctggacaagcagctggccaaggagaagcccgacgagtacgtgagcagcagcagaagcctgggcctgcccatcgccgccagcagcgagggccacagactgcccggccacggccccctgagcagcagcgcccccggcgccagcacccagccccccccccacctgcccaccaagctggtgatcagacacggcggcgccggcggcagccccagcgtgacctgggccagagccagcagcagcctgagcagcagcagcagcagcagcagcgccgccagcagcctggacgccgacgaggacggccccatgcccagcagaaacagaccccccatcaagacctacgaggccagaagcagaatcggcctgaagctgaagatcaagcaggaggccggcctgagcaaggtggtgcacaacaccgccctggaccccgtgcaccagcccccccccccccccgccaccctgaaggtggccgagcccccccccagacccccccccccccccccccccaccggccagatgaacggcaccgtggaccaccccccccccgccgcccccgagagaaagcccctgggcaccgccccccactgccccagactgcccctgagaaagacctacagagagaacgtgggcggccccggcgcccccgagggcacccccgccggcagagccagaggcggcagccccgcccccctgcccgccaaggtggacgaggccaccagcggcctgatcagagagctggccgccgtggaggacgagctgtaccagagaatgctgaagggccccccccccgagcccgccgccagcgccgcccagggcaccggcgaccccgactgggaggcccccggcctgccccccgccaagagaagaaagagcgagagccccgacgtggaccaggccagcttcagcagcgacagcccccaggacgacaccctgaccgagcacctgcagagcgccatcgacagcatcctgaacctgcagcaggcccccggcagaacccccgcccccagctacccccacgccgccagcgccggcacccccgccagccccccccccctgcacagacccgaggcctacccccccagcagccacaacggcggcctgggcgccagaaccctgaccagatag

SEQ ID NO: 82983 - DNA, 1437 bp, synthetic construct
  misc_feature 1..1437: note = Description of Artificial Sequence: Synthetic coding sequence
  source 1..1437: mol_type = other DNA
atggccgccggcggcagcggcgtgggcggcaagagaagcagcaagagcgacgccgacagcggcttcctgggcctgagacccaccagcgtggaccccgccctgagaagaagaagaagaggccccagaaacaagaagagaggctggagaagactggcccaggagcccctgggcctggaggtggaccagttcctggaggacgtgagactgcaggagagaaccagcggcggcctgctgagcgaggcccccaacgagaagctgttcttcgtggacaccggcagcaaggagaagggcctgaccaagaagagaaccaaggtgcagaagaagagcctgctgctgaagaagcccctgagagtggacctgatcctggagaacaccagcaaggtgcccgcccccaaggacgtgctggcccaccaggtgcccaacgccaagaagctgagaagaaaggagcagctgtgggagaagctggccaagcagggcgagctgcccagagaggtgagaagagcccaggccagactgctgaaccccagcgccaccagagccaagcccggcccccaggacaccgtggagagacccttctacgacctgtgggccagcgacaaccccctggacagacccctggtgggccaggacgagttcttcctggagcagaccaagaagaagggcgtgaagagacccgccagactgcacaccaagcccagccaggcccccgccgtggaggtggcccccgccggcgccagctacaaccccagcttcgaggaccaccagaccctgctgagcgccgcccacgaggtggagctgcagagacagaaggaggccgagaagctggagagacagctggccctgcccgccaccgagcaggccgccacccaggagagcaccttccaggagctgtgcgagggcctgctggaggagagcgacggcgagggcgagcccggccagggcgagggccccgaggccggcgacgccgaggtgtgccccacccccgccagactggccaccaccgagaagaagaccgagcagcagagaagaagagagaaggccgtgcacagactgagagtgcagcaggccgccctgagagccgccagactgagacaccaggagctgttcagactgagaggcatcaaggcccaggtggccctgagactggccgagctggccagaagacagagaagaagacaggccagaagagaggccgaggccgacaagcccagaagactgggcagactgaagtaccaggcccccgacatcgacgtgcagctgagcagcgagctgaccgacagcctgagaaccctgaagcccgagggcaacatcctgagagacagattcaagagcttccagagaagaaacatgatcgagcccagagagagagccaagttcaagagaaagtacaaggtgaagctggtggagaagagagccttcagagagatccagctgtag

SEQ ID NO: 82984 - DNA, 1419 bp, synthetic construct
  misc_feature 1..1419: note = Description of Artificial Sequence: Synthetic coding sequence
  source 1..1419: mol_type = other DNA
atggccgccggcggcagcggcgtgggcggcaagagaagcagcaagagcgacgccgacagcggcttcctgggcctgagacccaccagcgtggaccccgccctgagaagaagaagaagaggccccagaaacaagaagagaggctggagaagactggcccaggagcccctgggcctggaggtggaccagttcctggaggacgtgagactgcaggagagaaccagcggcggcctgctgagcgaggcccccaacgagaagctgttcttcgtggacaccggcagcaaggagaagggcctgaccaagaagagaaccaaggtgcagaagaagagcctgctgctgaagaagcccctgagagtggacctgatcctggagaacaccagcaaggtgcccgcccccaaggacgtgctggcccaccaggtgcccaacgccaagaagctgagaagaaaggagcagctgtgggagaagctggccaagcagggcgagctgcccagagaggtgagaagagcccaggccagactgctgaaccccagcgccaccagagccaagcccggcccccaggacaccgtggagagacccttctacgacctgtgggccagcgacaaccccctggacagacccctggtgggccaggacgagttcttcctggagcagaccaagaagaagggcgtgaagagacccgccagactgcacaccaagcccagccaggcccccgccgtggaggtggcccccgccggcgccagctacaaccccagcttcgaggaccaccagaccctgctgagcgccgcccacgaggtggagctgcagagacagaaggaggccgagaagctggagagacagctggccctgcccgccaccgagcaggccgccacccaggagagcaccttccaggagctgtgcgagggcctgctggaggagagcgacggcgagggcgagcccggccagggcgagggccccgaggccggcgacgccgaggtgtgccccacccccgccagacaccacagagaggaggacggcgccgccgccgccagaagactgtgcaccggctgcggctacagcagacccagatgcggcccccccggcagcggcaccagaagctgcagcggctgcgccggcagccccggcggccccgaggccggcggcgccagaagacagagaagaagacaggccagaagagaggccgaggccgacaagcccagaagactgggcagactgaagtaccaggcccccgacatcgacgtgcagctgagcagcgagctgaccgacagcctgagaaccctgaagcccgagggcaacatcctgagagacagattcaagagcttccagagaagaaacatgatcgagcccagagagagagccaagttcaagagaaagtacaaggtgaagctggtggagaagagagccttcagagagatccagctgtag

SEQ ID NO: 82985 - DNA, 792 bp, synthetic construct
  misc_feature 1..792: note = Description of Artificial Sequence: Synthetic coding sequence
  source 1..792: mol_type = other DNA
atggccgccggcggcagcggcgtgggcggcaagagaagcagcaagagcgacgccgacagcggcttcctgggcctgagacccaccagcgtggaccccgccctgagaagaagaagaagaggccccagaaacaagaagagaggctggagaagactggcccaggagcccctgggcctggaggtggaccagttcctggaggacgtgagactgcaggagagaaccagcggcggcctgctgagcgaggcccccaacgagaagctgttcttcgtggacaccggcagcaaggagaagggcctgaccaagaagagaaccaaggtgcagaagaagagcctgctgctgaagaagcccctgagagtggacctgatcctggagaacaccagcaaggtgcccgcccccaaggacgtgctggcccaccaggtgcccaacgccaagaagctgagaagaaaggagcagctgtgggccagcgacaaccccctggacagacccctggtgggccaggacgagttcttcctggagcagaccaagaagaagggcgtgaagagaagagaggccgaggccgacaagcccagaagactgggcagactgaagtaccaggcccccgacatcgacgtgcagctgagcagcgagctgaccgacagcctgagaaccctgaagcccgagggcaacatcctgagagacagattcaagagcttccagagaagaaacatgatcgagcccagagagagagccaagttcaagagaaagtacaaggtgaagctggtggagaagagagccttcagagagatccagctgtag

SEQ ID NO: 82986 - DNA, 1656 bp, synthetic construct
  misc_feature 1..1656: note = Description of Artificial Sequence: Synthetic coding sequence
  source 1..1656: mol_type = other DNA
atggccagaggcgccgagggcggcagaggcgacgccggctggggcctgagaggcgccctggccgccgtggccctgctgagcgccctgaacgccgccggcaccgtgttcgccctgtgccagtggagaggcctgagcagcgccctgagagccctggaggcccagagaggcagagagcagagagaggacagcgccctgagaagcttcctggccgagctgagcagagcccccagaggcgccagcgcccccccccaggaccccgccagcagcgccagaaacaagagaagccacagcggcgagcccgccccccacatcagagccgagagccacgacatgctgatgatgatgacctacagcatggtgcccatcagagtgatggtggacctgtgcaacagcaccaagggcatctgcctgaccggccccagcggcccccccggcccccccggcgccggcggcctgcccggccacaacggcctggacggccagcccggcccccagggccccaagggcgagaagggcgccaacggcaagagaggcaagatgggcatccccggcgccgccggcaaccccggcgagagaggcgagaagggcgaccacggcgagctgggcctgcagggcaacgagggcccccccggccagaagggcgagaagggcgacaagggcgacgtgagcaacgacgtgctgctggccggcgccaagggcgaccagggcccccccggcccccccggcccccccggcccccccggcccccccggcccccccggcagcagaagagccaagggccccagacagcccagcatgttcaacggccagtgccccggcgagacctgcgccatccccaacgacgacaccctggtgggcaaggccgacgagaaggccagcgagcaccacagcccccaggccgagagcatgatcaccagcatcggcaaccccgtgcaggtgctgaaggtgaccgagaccttcggcacctggatcagagagagcgccaacaagagcgacgacagaatctgggtgaccgagcacttcagcggcatcatggtgaaggagttcaaggaccagcccagcctgctgaacggcagctacaccttcatccacctgccctactacttccacggctgcggccacgtggtgtacaacaacagcctgtactaccacaagggcggcagcaacaccctggtgagattcgagttcggccaggagaccagccagaccctgaagctggagaacgccctgtacttcgacagaaagtacctgttcgccaacagcaagacctacttcaacctggccgtggacgagaagggcctgtggatcatctacgccagcagcgtggacggcagcagcatcctggtggcccagctggacgagagaaccttcagcgtggtgcagcacgtgaacaccacctaccccaagagcaaggccggcaacgccttcatcgccagaggcatcctgtacgtgaccgacaccaaggacatgagagtgaccttcgccttcgacctgctgggcggcaagcagatcaacgccaacttcgacctgagaaccagccagagcgtgctggccatgctggcctacaacatgagagaccagcacctgtacagctgggaggacggccacctgatgctgtaccccgtgcagttcctgagcaccaccctgaaccagtag

SEQ ID NO: 82987 - DNA, 1284 bp, synthetic construct
  misc_feature 1..1284: note = Description of Artificial Sequence: Synthetic coding sequence
  source 1..1284: mol_type = other DNA
atggtggacctgtgcaacagcaccaagggcatctgcctgaccggccccagcggcccccccggcccccccggcgccggcggcctgcccggccacaacggcctggacggccagcccggcccccagggccccaagggcgagaagggcgccaacggcaagagaggcaagatgggcatccccggcgccgccggcaaccccggcgagagaggcgagaagggcgaccacggcgagctgggcctgcagggcaacgagggcccccccggccagaagggcgagaagggcgacaagggcgacgtgagcaacgacgtgctgctggccggcgccaagggcgaccagggcccccccggcccccccggcccccccggcccccccggcccccccggcccccccggcagcagaagagccaagggccccagacagcccagcatgttcaacggccagtgccccggcgagacctgcgccatccccaacgacgacaccctggtgggcaaggccgacgagaaggccagcgagcaccacagcccccaggccgagagcatgatcaccagcatcggcaaccccgtgcaggtgctgaaggtgaccgagaccttcggcacctggatcagagagagcgccaacaagagcgacgacagaatctgggtgaccgagcacttcagcggcatcatggtgaaggagttcaaggaccagcccagcctgctgaacggcagctacaccttcatccacctgccctactacttccacggctgcggccacgtggtgtacaacaacagcctgtactaccacaagggcggcagcaacaccctggtgagattcgagttcggccaggagaccagccagaccctgaagctggagaacgccctgtacttcgacagaaagtacctgttcgccaacagcaagacctacttcaacctggccgtggacgagaagggcctgtggatcatctacgccagcagcgtggacggcagcagcatcctggtggcccagctggacgagagaaccttcagcgtggtgcagcacgtgaacaccacctaccccaagagcaaggccggcaacgccttcatcgccagaggcatcctgtacgtgaccgacaccaaggacatgagagtgaccttcgccttcgacctgctgggcggcaagcagatcaacgccaacttcgacctgagaaccagccagagcgtgctggccatgctggcctacaacatgagagaccagcacctgtacagctgggaggacggccacctgatgctgtaccccgtgcagttcctgagcaccaccctgaaccagtag

SEQ ID NO: 82988 - DNA, 1284 bp, synthetic construct; identical to SEQ ID NO: 82987
  misc_feature 1..1284: note = Description of Artificial Sequence: Synthetic coding sequence
  source 1..1284: mol_type = other DNA

SEQ ID NO: 82989 - DNA, 1575 bp, synthetic construct
  misc_feature 1..1575: note = Description of Artificial Sequence: Synthetic coding sequence
  source 1..1575: mol_type = other DNA
atgcacagcctggacgagcccctggacctgaagctgagcatcaccaagctgagagccgccagagagaagagagagagaaccctgggcgtggtgagacccagagccctgcacagagagctgggcctggtggacgacagccccacccccggcagccccggcagcccccccagcggcttcctgctgaacagcaagttccccgagaaggtggagggcagattcagcgccgcccccctggtggacctgagcctgagcccccccagcggcctggacagccccaacggcagcagcagcctgagccccgagagacagggcaacggcgacctgccccccgtgcccagcgccagcgacttccagcccctgagatacctggacggcgtgcccagcagcttccagttcttcctgcccctgggcagcggcggcgccctgcacctgcccgccagcagcttcctgaccccccccaaggacaagtgcctgagccccgacctgcccctgcccaagcagctggtgtgcagatgggccaagtgcaaccagctgttcgagctgctgcaggacctggtggaccacgtgaacgactaccacgtgaagcccgagaaggacgccggctactgctgccactgggagggctgcgccagacacggcagaggcttcaacgccagatacaagatgctgatccacatcagaacccacaccaacgagaagccccacagatgccccacctgcagcaagagcttcagcagactggagaacctgaagatccacaacagaagccacaccggcgagaagccctacgtgtgcccctacgagggctgcaacaagagatacagcaacagcagcgacagattcaagcacaccagaacccactacgtggacaagccctactactgcaagatgcccggctgccacaagagatacaccgaccccagcagcctgagaaagcacatcaaggcccacggccacttcgtgagccacgagcagcaggagctgctgcagctgagacccccccccaagccccccctgcccgcccccgacggcggcccctacgtgagcggcgcccagatcatcatccccaaccccgccgccctgttcggcggccccggcctgcccggcctgcccctgcccctggcccccggccccctggacctgagcgccctggcctgcggcaacggcggcggcagcggcggcggcggcggcatgggccccggcctgcccggccccgtgctgcccctgaacctggccaagaaccccctgctgcccagccccttcggcgccggcggcctgggcctgcccgtggtgagcctgctggccggcgccgccggcggcaaggccgagggcgagaagggcagaggcagcgtgcccaccagagccctgggcatggagggccacaagacccccctggagagaaccgagagcagctgcagcagacccagccccgacggcctgcccctgctgcccggcaccgtgctggacctgagcaccggcgtgaacagcgccgccagcagccccgaggccctggcccccggctgggtggtgatcccccccggcagcgtgctgctgaagcccgccgtggtgaactag

SEQ ID NO: 82990 - DNA, 1575 bp, synthetic construct; identical to SEQ ID NO: 82989
  misc_feature 1..1575: note = Description of Artificial Sequence: Synthetic coding sequence
  source 1..1575: mol_type = other DNA

SEQ ID NO: 82991 - DNA, 2328 bp, synthetic construct
  misc_feature 1..2328: note = Description of Artificial Sequence: Synthetic coding sequence
  source 1..2328: mol_type = other DNA
atgatggtgcagagactgggcctgatcagcccccccgccagccaggtgagcaccgcctgcaaccagatcagccccagcctgcagagagccatgaacgccgccaacctgaacatcccccccagcgacaccagaagcctgatcagcagagagagcctggccagcaccaccctgagcctgaccgagagccagagcgccagcagcatgaagcaggagtggagccagggctacagagccctgcccagcctgagcaaccacggcagccagaacggcctggacctgggcgacctgctgagcctgccccccggcaccagcatgagcagcaacagcgtgagcaacagcctgcccagctacctgttcggcaccgagagcagccacagcccctaccccagccccagacacagcagcaccagaagccacagcgccagaagcaagaagagagccctgagcctgagccccctgagcgacggcatcggcatcgacttcaacaccatcatcagaaccagccccaccagcctggtggcctacatcaacggcagcagagccagccccgccaacctgagcccccagcccgaggtgtacggccacttcctgggcgtgagaggcagctgcatcccccagcccagacccgtgcccggcagccagaagggcgtgctggtggcccccggcggcctggccctgcccgcctacggcgaggacggcgccctggagcacgagagaatgcagcagctggagcacggcggcctgcagcccggcctggtgaaccacatggtggtgcagcacggcctgcccggccccgacagccagagcgccggcctgttcaagaccgagagactggaggagttccccggcagcaccgtggacctgccccccgccccccccctgccccccctgccccccccccccggccccccccccccctaccacgcccacgcccacctgcaccaccccgagctgggcccccacgcccagcagctggccctgccccaggccaccctggacgacgacggcgagatggacggcatcggcggcaagcactgctgcagatggatcgactgcagcgccctgtacgaccagcaggaggagctggtgagacacatcgagaaggtgcacatcgaccagagaaagggcgaggacttcacctgcttctgggccggctgccccagaagatacaagcccttcaacgccagatacaagctgctgatccacatgagagtgcacagcggcgagaagcccaacaagtgcaccttcgagggctgcgagaaggccttcagcagactggagaacctgaagatccacctgagaagccacaccggcgagaagccctacctgtgccagcaccccggctgccagaaggccttcagcaacagcagcgacagagccaagcaccagagaacccacctggacaccaagccctacgcctgccagatccccggctgcaccaagagatacaccgaccccagcagcctgagaaagcacgtgaaggcccacagcagcaaggagcagcaggccagaaagaagctgagaagcagcaccgagctgcaccccgacctgctgaccgactgcctgaccgtgcagagcctgcagcccgccaccagccccagagacgccgccgccgagggcaccgtgggcagaagccccggccccggccccgacctgtacagcgcccccatcttcagcagcaactacagcagcagaagcggcaccgccgccggcgccgtgccccccccccaccccgtgagccaccccagccccggccacaacgtgcagggcagcccccacaaccccagcagccagctgccccccctgaccgccgtggacgccggcgccgagagattcgcccccagcgcccccagcccccaccacatcagccccagaagagtgcccgcccccagcagcatcctgcagagaacccagcccccctacacccagcagcccagcggcagccacctgaagagctaccagcccgagaccaacagcagcttccagcccaacggcatccacgtgcacggcttctacggccagctgcagaagttctgccccccccactaccccgacagccagagaatcgtgccccccgtgagcagctgcagcgtggtgcccagcttcgaggactgcctggtgcccaccagcatgggccaggccagcttcgacgtgttccacagagccttcagcacccacagcggcatcaccgtgtacgacctgcccagcagcagcagcagcctgttcggcgagagcctgagaagcggcgccgaggacgccaccttcctgcagatcagcaccgtggacagatgccccagccagctgagcagcgtgtacaccgagggctag

SEQ ID NO: 82992 - DNA, 2793 bp, synthetic construct
  misc_feature 1..2793: note = Description of Artificial Sequence: Synthetic coding sequence
  source 1..2793: mol_type = other DNA
atgaacggcagaagctgcagcatgagcctgcacagaaccagcggcaccccccagggccccagaatggtgagcggccaccacatccccgccatcagagcccacagcggcacccccggccccagcccctgcggcagcaccagcagccccaccatggccagcctggccaacaacctgcacctgaagatgcccagcggcggcggcatggccccccagaacaacgtggccgagagcagaatccacctgcccgccctgagccccagaagacagatgctgaccaacggcaagcccagattccaggtgacccaggccggcggcatgagcggcagccacaccctgaagcccaagcagcaggagttcggcagccccttcccccccaaccccggcaagggcgccctgggcttcggcccccagtgcaagagcatcggcaagggcagctgcaacaacctggtggtgaccagcagccccatgatggtgcagagactgggcctgatcagcccccccgccagccaggtgagcaccgcctgcaaccagatcagccccagcctgcagagagccatgaacgccgccaacctgaacatcccccccagcgacaccagaagcctgatcagcagagagagcctggccagcaccaccctgagcctgaccgagagccagagcgccagcagcatgaagcaggagtggagccagggctacagagccctgcccagcctgagcaaccacggcagccagaacggcctggacctgggcgacctgctgagcctgccccccggcaccagcatgagcagcaacagcgtgagcaacagcctgcccagctacctgttcggcaccgagagcagccacagcccctaccccagccccagacacagcagcaccagaagccacagcgccagaagcaagaagagagccctgagcctgagccccctgagcgacggcatcggcatcgacttcaacaccatcatcagaaccagccccaccagcctggtggcctacatcaacggcagcagagccagccccgccaacctgagcccccagcccgaggtgtacggccacttcctgggcgtgagaggcagctgcatcccccagcccagacccgtgcccggcagccagaagggcgtgctggtggcccccggcggcctggccctgcccgcctacggcgaggacggcgccctggagcacgagagaatgcagcagctggagcacggcggcctgcagcccggcctggtgaaccacatggtggtgcagcacggcctgcccggccccgacagccagagcgccggcctgttcaagaccgagagactggaggagttccccggcagcaccgtggacctgccccccgccccccccctgccccccctgccccccccccccggccccccccccccctaccacgcccacgcccacctgcaccaccccgagctgggcccccacgcccagcagctggccctgccccaggccaccctggacgacgacggcgagatggacggcatcggcggcaagcactgctgcagatggatcgactgcagcgccctgtacgaccagcaggaggagctggtgagacacatcgagaaggtgcacatcgaccagagaaagggcgaggacttcacctgcttctgggccggctgccccagaagatacaagcccttcaacgccagatacaagctgctgatccacatgagagtgcacagcggcgagaagcccaacaagtgcaccttcgagggctgcgagaaggccttcagcagactggagaacctgaagatccacctgagaagccacaccggcgagaagccctacctgtgccagcaccccggctgccagaaggccttcagcaacagcagcgacagagccaagcaccagagaacccacctggacaccaagccctacgcctgccagatccccggctgcaccaagagatacaccgaccccagcagcctgagaaagcacgtgaaggcccacagcagcaaggagcagcaggccagaaagaagctgagaagcagcaccgagctgcaccccgacctgctgaccgactgcctgaccgtgcagagcctgcagcccgccaccagccccagagacgccgccgccgagggcaccgtgggcagaagccccggccccggccccgacctgtacagcgcccccatcttcagcagcaactacagcagcagaagcggcaccgccgccggcgccgtgccccccccccaccccgtgagccaccccagccccggccacaacgtgcagggcagcccccacaaccccagcagccagctgccccccctgaccgccgtggacgccggcgccgagagattcgcccccagcgcccccagcccccaccacatcagccccagaagagtgcccgcccccagcagcatcctgcagagaacccagcccccctacacccagcagcccagcggcagccacctgaagagctaccagcccgagaccaacagcagcttccagcccaacggcatccacgtgcacggcttctacggccagctgcagaagttctgccccccccactaccccgacagccagagaatcgtgccccccgtgagcagctgcagcgtggtgcccagcttcgaggactgcctggtgcccaccagcatgggccaggccagcttcgacgtgttccacagagccttcagcacccacagcggcatcaccgtgtacgacctgcccagcagcagcagcagcctgttcggcgagagcctgagaagcggcgccgaggacgccaccttcctgcagatcagcaccgtggacagatgccccagccagctgagcagcgtgtacaccgagggctag

SEQ ID NO: 82993 - DNA, 270 bp, synthetic construct
  misc_feature 1..270: note = Description of Artificial Sequence: Synthetic coding sequence
  source 1..270: mol_type = other DNA
atgatggtgcagagactgggcctgatcagcccccccgccagccaggtgagcaccgcctgcaaccagatcagccccagcctgcagagagccatgaacgccgccaacctgaacatcccccccagcgacaccagaagcctgatcagcagagagagcctggccagcaccaccctgagcctgaccgagagccagagcgccagcagcatgaagcaggagtggagccagggctacagagccctgcccagcctgagcaaccacggcagccagaactag

SEQ ID NO: 82994 - DNA, 735 bp, synthetic construct
  misc_feature 1..735: note = Description of Artificial Sequence: Synthetic coding sequence
  source 1..735: mol_type = other DNA
atgaacggcagaagctgcagcatgagcctgcacagaaccagcggcaccccccagggccccagaatggtgagcggccaccacatccccgccatcagagcccacagcggcacccccggccccagcccctgcggcagcaccagcagccccaccatggccagcctggccaacaacctgcacctgaagatgcccagcggcggcggcatggccccccagaacaacgtggccgagagcagaatccacctgcccgccctgagccccagaagacagatgctgaccaacggcaagcccagattccaggtgacccaggccggcggcatgagcggcagccacaccctgaagcccaagcagcaggagttcggcagccccttcccccccaaccccggcaagggcgccctgggcttcggcccccagtgcaagagcatcggcaagggcagctgcaacaacctggtggtgaccagcagccccatgatggtgcagagactgggcctgatcagcccccccgccagccaggtgagcaccgcctgcaaccagatcagccccagcctgcagagagccatgaacgccgccaacctgaacatcccccccagcgacaccagaagcctgatcagcagagagagcctggccagcaccaccctgagcctgaccgagagccagagcgccagcagcatgaagcaggagtggagccagggctacagagccctgcccagcctgagcaaccacggcagccagaactag

SEQ ID NO: 82995 - DNA, 270 bp, synthetic construct; identical to SEQ ID NO: 82993
  misc_feature 1..270: note = Description of Artificial Sequence: Synthetic coding sequence
  source 1..270: mol_type = other DNA

SEQ ID NO: 82996 - DNA, 270 bp, synthetic construct; identical to SEQ ID NO: 82993
  misc_feature 1..270: note = Description of Artificial Sequence: Synthetic coding sequence
  source 1..270: mol_type = other DNA

SEQ ID NO: 82997 - DNA, 735 bp, synthetic construct; identical to SEQ ID NO: 82994
  misc_feature 1..735: note = Description of Artificial Sequence: Synthetic coding sequence
  source 1..735: mol_type = other DNA

SEQ ID NO: 82998 - DNA, 219 bp, synthetic construct
  misc_feature 1..219: note = Description of Artificial Sequence: Synthetic coding sequence
  source 1..219: mol_type = other DNA
atgcacagaagaagactggccctgggcctgggcttctgcctgctggccggcaccagcctgagcgtgctgtgggtgtacctggagaactggctgcccgtgagctacgtgccctactacctgccctgccccgagatcctgctggagtacagaggcgtgatcagcgcccactgcaacctgcacctgcccggcagcagcaactgccacgccagcgccacctag

SEQ ID NO: 82999 - DNA, 483 bp, synthetic construct
  misc_feature 1..483: note = Description of Artificial Sequence: Synthetic coding sequence
  source 1..483: mol_type = other DNA
atgcacagaagaagactggccctgggcctgggcttctgcctgctggccggcaccagcctgagcgtgctgtgggtgtacctggagaactggctgcccgtgagctacgtgccctactacctgccctgccccgagatcctgcccatgatgatggccctgagctgcctgtgccaccagcagcacgaggccgccctgcaggagggcgaggccacccccgccagaggcatggtgaccgtgcccagcgcccaggccgccggcgcccaggcccacaccgccgccgacacccacaccctggtgggcgcccacagactgagaggcaacctgcagcccagagccagcgccgcccacctgcccgccaccgagcccgaccactggggccacggcgtgtgcagaggcgaggtgcacagcttccaccccgtgctgcccggcgtgagcagaggcgtgctgcacgcctgggtgcccggcgccctgctgcacctgcactag

SEQ ID NO: 83000 - DNA, 1044 bp, synthetic construct
  misc_feature 1..1044: note = Description of Artificial Sequence: Synthetic coding sequence
  source 1..1044: mol_type = other DNA
atgcacagaagaagactggccctgggcctgggcttctgcctgctggccggcaccagcctgagcgtgctgtgggtgtacctggagaactggctgcccgtgagctacgtgccctactacctgccctgccccgagatcttcaacatgaagctgcactacaagagagagaagcccctgcagcccgtggtgtggagccagtacccccagcccaagctgctggagcacagacccacccagctgctgaccctgaccccctggctggcccccatcgtgagcgagggcaccttcaaccccgagctgctgcagcacatctaccagcccctgaacctgaccatcggcgtgaccgtgttcgccgtgggcaagtacacccacttcatccagagcttcctggagagcgccgaggagttcttcatgagaggctacagagtgcactactacatcttcaccgacaaccccgccgccgtgcccggcgtgcccctgggcccccacagactgctgagcagcatccccatccagggccacagccactgggaggagaccagcatgagaagaatggagaccatcagccagcacatcgccaagagagcccacagagaggtggactacctgttctgcctggacgtggacatggtgttcagaaacccctggggccccgagaccctgggcgacctggtggccgccatccaccccagctactacgccgtgcccagacagcagttcccctacgagagaagaagagtgagcaccgccttcgtggccgacagcgagggcgacttctactacggcggcgccgtgttcggcggccaggtggccagagtgtacgagttcaccagaggctgccacatggccatcctggccgacaaggccaacggcatcatggccgcctggagagaggagagccacctgaacagacacttcatcagcaacaagcccagcaaggtgctgagccccgagtacctgtgggacgacagaaagccccagccccccagcctgaagctgatcagattcagcaccctggacaaggacatcagctgcctgagaagctag

SEQ ID NO: 83001 - DNA, 885 bp, synthetic construct
  misc_feature 1..885: note = Description of Artificial Sequence: Synthetic coding sequence
  source 1..885: mol_type = other DNA
atgcacagaagaagactggccctgggcctgggcttctgcctgctggccggcaccagcctgagcgtgctgtgggtgtacctggagaactggctgcccgtgagctacgtgccctactacctgccctgccccgagatcttcaacatgaagctgcactacaagagagagaagcccctgcagcccgtggtgtggagccagtacccccagcccaagctgctggagcacagacccacccagctgctgaccctgaccccctggctggcccccatcgtgagcgagggcaccttcaaccccgagctgctgcagcacatctaccagcccctgaacctgaccatcggcgtgaccgtgttcgccgtgggcaaccccagctggagccagcccagaagcagcagctgcgtgggcaccggctgcaccaccaccagcagcctgaccaccctgcagcccttccccggcagcagatgggtgcccaccggcttcagcgcccccagccccagcagagtgacccccaccggcagaagacacccctgcgccggctggagacccagcgccagcaccctgctgagaggcctgaccggcagatggaccaccagcagcgccctgatgtggacctggtgcttcggcaccagaggcgccctgagaccctgggagacctggtggctgcccttcacccaggccaccacccccttccccgccagcagcagccccatgagcgccggcgtgttccccctgcccctgtggcagaccgccaagggcaccagcatcatggtgggccagagcagcggcggcagatggcccggctacatgagcctgctgggcgccgccacctggcccagctggagaaccagacccatggccagctggctgcccggcggcagaaaggccacctag

SEQ ID NO: 83002 - DNA, 993 bp, synthetic construct
  misc_feature 1..993: note = Description of Artificial Sequence: Synthetic coding sequence
  source 1..993: mol_type = other DNA
atgcacagaagaagactggccctgggcctgggcttctgcctgctggccggcaccagcctgagcgtgctgtgggtgtacctggagaactggctgcccgtgagctacgtgccctactacctgccctgccccgagatcctgagccagtacccccagcccaagctgctggagcacagacccacccagctgctgaccctgaccccctggctggcccccatcgtgagcgagggcaccttcaaccccgagctgctgcagcacatctaccagcccctgaacctgaccatcggcgtgaccgtgttcgccgtgggcaagtacacccacttcatccagagcttcctggagagcgccgaggagttcttcatgagaggctacagagtgcactactacatcttcaccgacaaccccgccgccgtgcccggcgtgcccctgggcccccacagactgctgagcagcatccccatccagggccacagccactgggaggagaccagcatgagaagaatggagaccatcagccagcacatcgccaagagagcccacagagaggtggactacctgttctgcctggacgtggacatggtgttcagaaacccctggggccccgagaccctgggcgacctggtggccgccatccaccccagctactacgccgtgcccagacagcagttcccctacgagagaagaagagtgagcaccgccttcgtggccgacagcgagggcgacttctactacggcggcgccgtgttcggcggccaggtggccagagtgtacgagttcaccagaggctgccacatggccatcctggccgacaaggccaacggcatcatggccgcctggagagaggagagccacctgaacagacacttcatcagcaacaagcccagcaaggtgctgagccccgagtacctgtgggacgacagaaagccccagccccccagcctgaagctgatcagattcagcaccctggacaaggacatcagctgcctgagaagctag

SEQ ID NO: 83003 - DNA, 1434 bp, synthetic construct
  misc_feature 1..1434: note = Description of Artificial Sequence: Synthetic coding sequence
  source 1..1434: mol_type = other DNA
atgcccccctgccagccccagagacccctgctgctgctgctgctgctgctggcctgccagccccaggtgcccagcgcccaggtgatggacttcctgttcgagaagtggaagctgtacggcgaccagtgccaccacaacctgagcctgctgcccccccccaccgagctggtgtgcaacagaaccttcgacaagtacagctgctggcccgacacccccgccaacaccaccgccaacatcagctgcccctggtacctgccctggcaccacaaggtgcagcacagattcgtgttcaagagatgcggccccgacggccagtgggtgagaggccccagaggccagccctggagagacgccagccagtgccagatggacggcgaggagatcgaggtgcagaaggaggtggccaagatgtacagcagcttccaggtgatgtacaccgtgggctacagcctgagcctgggcgccctgctgctggccctggccatcctgggcggcctgagcaagctgcactgcaccagaaacgccatccacgccaacctgttcgccagcttcgtgctgaaggccagcagcgtgctggtgatcgacggcctgctgagaaccagatacagccagaagatcggcgacgacctgagcgtgagcacctggctgagcgacggcgccgtggccggctgcagagtggccgccgtgttcatgcagtacggcatcgtggccaactactgctggctgctggtggagggcctgtacctgcacaacctgctgggcctggccaccctgcccgagagaagcttcttcagcctgtacctgggcatcggctggggcgcccccatgctgttcgtggtgccctgggccgtggtgaagtgcctgttcgagaacgtgcagtgctggaccagcaacgacaacatgggcttctggtggatcctgagattccccgtgttcctggccatcctgatcaacttcttcatcttcgtgagaatcgtgcagctgctggtggccaagctgagagccagacagatgcaccacaccgactacaagttcagactggccaagagcaccctgaccctgatccccctgctgggcgtgcacgaggtggtgttcgccttcgtgaccgacgagcacgcccagggcaccctgagaagcgccaagctgttcttcgacctgttcctgagcagcttccagggcctgctggtggccgtgctgtactgcttcctgaacaaggaggtgcagagcgagctgagaagaagatggcacagatggagactgggcaaggtgctgtgggaggagagaaacaccagcaaccacagagccagcagcagccccggccacggcccccccagcaaggagctgcagttcggcagaggcggcggcagccaggacagcagcgccgagacccccctggccggcggcctgcccagactggccgagagccccttctag

SEQ ID NO: 83004 - DNA, 1392 bp, synthetic construct
  misc_feature 1..1392: note = Description of Artificial Sequence: Synthetic coding sequence
  source 1..1392: mol_type = other DNA
atggccggcgcccccggccccctgagactggccctgctgctgctgggcatggtgggcagagccggccccagaccccagggcgccaccgtgagcctgtgggagaccgtgcagaagtggagagagtacagaagacagtgccagagaagcctgaccgaggaccccccccccgccaccgacctgttctgcaacagaaccttcgacgagtacgcctgctggcccgacggcgagcccggcagcttcgtgaacgtgagctgcccctggtacctgccctgggccagcagcgtgccccagggccacgtgtacagattctgcaccgccgagggcctgtggctgcagaaggacaacagcagcctgccctggagagacctgagcgagtgcgaggagagcaagagaggcgagagaagcagccccgaggagcagctgctgttcctgtacatcatctacaccgtgggctacgccctgagcttcagcgccctggtgatcgccagcgccatcctgctgggcttcagacacctgcactgcaccagaaactacatccacctgaacctgttcgccagcttcatcctgagagccctgagcgtgttcatcaaggacgccgccctgaagtggatgtacagcaccgccgcccagcagcaccagtgggacggcctgctgagctaccaggacagcctgagctgcagactggtgttcctgctgatgcagtactgcgtggccgccaactactactggctgctggtggagggcgtgtacctgtacaccctgctggccttcagcgtgctgagcgagcagtggatcttcagactgtacgtgagcatcggctggggcgtgcccctgctgttcgtggtgccctggggcatcgtgaagtacctgtacgaggacgagggctgctggaccagaaacagcaacatgaactactggctgatcatcagactgcccatcctgttcgccatcggcgtgaacttcctgatcttcgtgagagtgatctgcatcgtggtgagcaagctgaaggccaacctgatgtgcaagaccgacatcaagtgcagactggccaagagcaccctgaccctgatccccctgctgggcacccacgaggtgatcttcgccttcgtgatggacgagcacgccagaggcaccctgagattcatcaagctgttcaccgagctgagcttcaccagcttccagggcctgatggtggccatcctgtactgcttcgtgaacaacgaggtgcagctggagttcagaaagagctgggagagatggagactggagcacctgcacatccagagagacagcagcatgaagcccctgaagtgccccaccagcagcctgagcagcggcgccaccgccggcagcagcatgtacaccgccacctgccaggccagctgcagctag

SEQ ID NO: 83005 - DNA, 1662 bp, synthetic construct
  misc_feature 1..1662: note = Description of Artificial Sequence: Synthetic coding sequence
  source 1..1662: mol_type = other DNA
atgaagctgggcagcagcagagccggccccggcagaggcagcgccggcctgctgcccggcgtgcacgagctgcccatgggcatccccgccccctggggcaccagccccctgagcttccacagaaagtgcagcctgtgggcccccggcagacccttcctgaccctggtgctgctggtgagcatcaagcaggtgaccggcagcctgctggaggagaccaccagaaagtgggcccagtacaagcaggcctgcctgagagacctgctgaaggagcccagcggcatcttctgcaacggcaccttcgaccagtacgtgtgctggccccacagcagccccggcaacgtgagcgtgccctgccccagctacctgccctggtggagcgaggagagcagcggcagagcctacagacactgcctggcccagggcacctggcagaccatcgagaacgccaccgacatctggcaggacgacagcgagtgcagcgagaaccacagcttcaagcagaacgtggacagatacgccctgctgagcaccctgcagctgatgtacaccgtgggctacagcttcagcctgatcagcctgttcctggccctgaccctgctgctgttcctgagaaagctgcactgcaccagaaactacatccacatgaacctgttcgccagcttcatcctgagaaccctggccgtgctggtgaaggacgtggtgttctacaacagctacagcaagagacccgacaacgagaacggctggatgagctacctgagcgagatgagcaccagctgcagaagcgtgcaggtgctgctgcactacttcgtgggcgccaactacctgtggctgctggtggagggcctgtacctgcacaccctgctggagcccaccgtgctgcccgagagaagactgtggcccagatacctgctgctgggctgggccttccccgtgctgttcgtggtgccctggggcttcgccagagcccacctggagaacaccggctgctggaccaccaacggcaacaagaagatctggtggatcatcagaggccccatgatgctgtgcgtgaccgtgaacttcttcatcttcctgaagatcctgaagctgctgatcagcaagctgaaggcccaccagatgtgcttcagagactacaagtacagactggccaagagcaccctggtgctgatccccctgctgggcgtgcacgagatcctgttcagcttcatcaccgacgaccaggtggagggcttcgccaagctgatcagactgttcatccagctgaccctgagcagcttccacggcttcctggtggccctgcagtacggcttcgccaacggcgaggtgaaggccgagctgagaaagtactgggtgagattcctgctggccagacacagcggctgcagagcctgcgtgctgggcaaggacttcagattcctgggcaagtgccccaagaagctgagcgagggcgacggcgccgagaagctgagaaagctgcagcccagcctgaacagcggcagactgctgcacctggccatgagaggcctgggcgagctgggcgcccagccccagcaggaccacgccagatggcccagaggcagcagcctgagcgagtgcagcgagggcgacgtgaccatggccaacaccatggaggagatcctggaggagagcgagatctag

SEQ ID NO: 83006 - DNA, 1053 bp, synthetic construct
  misc_feature 1..1053: note = Description of Artificial Sequence: Synthetic coding sequence
  source 1..1053: mol_type = other DNA
atgggcatccccgccccctggggcaccagccccctgagcttccacagaaagtgcagcctgtgggcccccggcagacccttcctgaccctggtgctgctggtgagcatcaagcaggtgaccggcagcctgctggaggagaccaccagaaagtgggcccagtacaagcaggcctgcctgagagacctgctgaaggagcccagcggcatcttctgcaacggcaccttcgaccagtacgtgtgctggccccacagcagccccggcaacgtgagcgtgccctgccccagctacctgccctggtggagcgaggagagcagcggcagagcctacagacactgcctggcccagggcacctggcagaccatcgagaacgccaccgacatctggcaggacgacagcgagtgcagcgagaaccacagcttcaagcagaacgtggacagatacgccctgctgagcaccctgcagctgatgtacaccgtgggctacagcttcagcctgatcagcctgttcctggccctgaccctgctgctgttcctgagaaagctgcactgcaccagaaactacatccacatgaacctgttcgccagcttcatcctgagaaccctggccgtgctggtgaaggacgtggtgttctacaacagctacagcaagagacccgacaacgagaacggctggatgagctacctgagcgagatgagcaccagctgcagaagcgtgcaggtgctgctgcactacttcgtgggcgccaactacctgtggctgctggtggagggcctgtacctgcacaccctgctggagcccaccgtgctgcccgagagaagactgtggcccagatacctgctgctgggctgggccttccccgtgctgttcgtggtgccctggggcttcgccagagcccacctggagaacaccggctgctggaccaccaacggcaacaagaagatctggtggatcatcagaggccccatgatgctgtgcgtgaccgccctgggcctggaggagaccggcctgaagagaaacggcagcatccccttcggccacaaggaggacatctag

SEQ ID NO: 83007 - DNA, 1665 bp, synthetic construct
  misc_feature 1..1665: note = Description of Artificial Sequence: Synthetic coding sequence
  source 1..1665: mol_type = other DNA
atgaagctgggcagcagcagagccggccccggcagaggcagcgccggcctgctgcccggcgtgcacgagctgcccatgggcatccccgccccctggggcaccagccccctgagcttccacagaaagtgcagcctgtgggcccccggcagacccttcctgaccctggtgctgctggtgagcatcaagcaggtgaccggcagcctgctggaggagaccaccagaaagtgggcccagtacaagcaggcctgcctgagagacctgctgaaggagcccagcggcatcttctgcaacggcaccttcgaccagtacgtgtgctggccccacagcagccccggcaacgtgagcgtgccctgccccagctacctgccctggtggagcgaggagagcagcggcagagcctacagacactgcctggcccagggcacctggcagaccatcgagaacgccaccgacatctggcaggacgacagcgagtgcagcgagaaccacagcttcaagcagaacgtggacagatacgccctgctgagcaccctgcagctgatgtacaccgtgggctacagcttcagcctgatcagcctgttcctggccctgaccctgctgctgttcctgagaaagctgcactgcaccagaaactacatccacatgaacctgttcgccagcttcatcctgagaaccctggccgtgctggtgaaggacgtggtgttctacaacagctacagcaagagacccgacaacgagaacggctggatgagctacctgagcgagatgagcaccagctgcagaagcgtgcaggtgctgctgcactacttcgtgggcgccaactacctgtggctgctggtggagggcctgtacctgcacaccctgctggagcccaccgtgctgcccgagagaagactgtggcccagatacctgctgctgggctgggccttccccgtgctgttcgtggtgccctggggcttcgccagagcccacctggagaacaccggctgctggaccaccaacggcaacaagaagatctggtggatcatcagaggccccatgatgctgtgcgtgaccgtgaacttcttcatcttcctgaagatcctgaagctgctgatcagcaagctgaaggcccaccagatgtgcttcagagactacaagtacagactggccaagagcaccctggtgctgatccccctgctgggcgtgcacgagatcctgttcagcttcatcaccgacgaccaggtggagggcttcgccaagctgatcagactgttcatccagctgaccctgagcagcttccacggcttcctggtggccctgcagtacggcttcgccaacggcgaggtgaaggccgagctgagaaagtactgggtgagattcctgctggccagacacagcggctgcagagcctgcgtgctgggcaaggacttcagattcctgggcaagtgccccaagaagctgagcgagggcgacggcgccgagaagctgagaaagctgcagcccagcctgaacagcggcagactgctgcacctggccatgagaggcctgggcgagctgggcgcccagccccagcaggaccacgccagatggcccagaggcagcagcctgagcgagtgcagcgagggcgacgtgaccatggccaacaccatggaggagatcctggaggagaagagaagccagtag

SEQ ID NO: 83008 - DNA, 687 bp, synthetic construct
  misc_feature 1..687: note = Description of Artificial Sequence: Synthetic coding sequence
  source 1..687: mol_type = other DNA
tgagccaccgacatctggcaggacgacagcgagtgcagcgagaaccacagcttcaagcagaacgtggacagatacgccctgctgagcaccctgcagctgatgtacaccgtgggctacagcttcagcctgatcagcctgttcctggccctgaccctgctgctgttcctgagaaagctgcactgcaccagaaactacatccacatgaacctgttcgccagcttcatcctgagaaccctggccgtgctggtgaaggacgtggtgttctacaacagctacagcaagagacccgacaacgagaacggctggatgagctacctgagcgagatgagcaccagctgcagaagcgtgcaggtgctgctgcactacttcgtgggcgccaactacctgtggctgctggtggagggcctgtacctgcacaccctgctggagcccaccgtgctgcccgagagaagactgtggcccagatacctgctgctgggctgggccttccccgtgctgttcgtggtgccctggggcttcgccagagcccacctggagaacaccggctgctggaccaccaacggcaacaagaagatctggtggatcatcagaggccccatgatgctgtgcgtgaccgccctgggcctggaggagaccggcctgaagagaaacggcagcatccccttcggccacaaggaggacatctag

SEQ ID NO: 83009 - DNA, 1725 bp, synthetic construct
  misc_feature 1..1725: note = Description of Artificial Sequence: Synthetic coding sequence
  source 1..1725: mol_type = other DNA
atggagcccaccgagaacccctgccagggccccctgggccagaaggccggcgagaagcccctggccgccggccccggcgaggaggagctgctgagaggcagcgccccccacgcccaggacacccagagcgaggagctgccccccagctgcaccatcagcggcgagaagaagccccccgccgtgagcggcgaggccaccggcgccgacgccggcagactgtgccccccccccagaagcagagccccccacaaggacagaaccctggccagaagcagaccccagacccagggcgaggactgcagcctgcccgtgggcgaggtgaagatcggcaagagaagctacagccccgcccccggcaagcagaagaagcccaacgccatgggcctggcccccaccagcagccccggcgcccccaacagcgccagagccacccacaaccccgtgccctgcggcagcggcagaggcccctgccacctggccaacctgctgagcaccctggcccagagcaaccagaacagagaccacaagcagggcccccccgaggtgacctgccagatcagaaagaagaccagaaccctgtacagaagcgaccagctggaggagctggagaagatcttccaggaggaccactaccccgacagcgacaagagaagagagatcgcccagaccgtgggcgtgaccccccagagaatcatggtgtggttccagaacagaagagccaagtggagaaagatggagaagctgaacggcaaggagagcaaggacaaccccgccgcccccggccccgccagcagccagtgcagcagcgccgccgagatcctgcccgccgtgcccatggagcccaagcccgaccccttcccccaggagagccccctggacaccttccccgagccccccatgctgctgaccagcgaccagaccctggcccccacccagcccagcgagggcgcccagagagtggtgaccccccccctgttcagccccccccccgtgagaagagccgacctgcccttccccctgggccccgtgcacaccccccagctgatgcccctgctgatggacgtggccggcagcgacagcagccacaaggacggcccctgcggcagctggggcaccagcatcaccctgccccccccctgcagctacctggaggagctggagccccaggactaccagcagagcaaccagcccggccccttccagttcagccaggccccccagccccccctgttccagagcccccagcccaagctgccctacctgcccaccttccccttcagcatgcccagcagcctgaccctgcccccccccgaggacagcctgttcatgttcccctgcggccccagcggcggcaccagccagggctactgccccggcgccagcagcggccagatcctgatgcagccccccgccggcaacatcggcaccgccagctggagcgacccctgcctgcccgagctgcccttccccggccccttctgcccccaggccctgggccacccccccggcggcgacggctacttccccgacctgttccccaccccctgcccccaggccctgggcagacagcccagcagcgccctgagctggatgcccgagggcgccagacccggcaccggccccctgctgagcaaggccaaggaggagccccccgccgccagcctggaccagcccagcgccctggaggaggccagaggcgacgacaagaacagccacgtgccctag

SEQ ID NO: 83010 - DNA, 1722 bp, synthetic construct
  misc_feature 1..1722: note = Description of Artificial Sequence: Synthetic coding sequence
  source 1..1722: mol_type = other DNA
atggccaacgccgaggtgagcgtgcccgtgggcgacgtggtggtggtgcccaccgagggcaacgagggcgagaaccccgaggacaccaagacccaggtgatcctgcagctgcagcccgtgcagcagggcctgttcatcgacggccacttctacaacagaatctacgaggccggcagcgagaacaacaccgccgtggtggccgtggagacccacaccatccacaagatcgaggagggcatcgacaccggcaccatcgaggccaacgaggacatggagatcgcctaccccatcacctgcggcgagagcaaggccatcctgctgtggaagaagttcgtgtgccccggcatcaacgtgaagtgcgtgaagttcaacgaccagctgatcagccccaagcacttcgtgcacctggccggcaagagcaccctgaaggactggaagagagccatcagactgggcggcatcatgctgagaaagatgatggacagcggccagatcgacttctaccagcacgacaaggtgtgcagcaacacctgcagaagcaccaagttcgacctgctgatcagcagcgccagagcccccgtgcccggccagcagaccagcgtggtgcagacccccaccagcgccgacggcagcatcacccagatcgccatcagcgaggagagcatggaggaggccggcctggagtggaacagcgccctgaccgccgccgtgaccatggccaccgaggagggcgtgaagaaggacagcgaggagatcagcgaggacaccctgatgttctggaagggcatcgccgacgtgggcctgatggaggaggtggtgtgcaacatccagaaggagatcgaggagctgctgagaggcgtgcagcagagactgatccaggcccccttccaggtgaccgacgccgccgtgctgaacaacgtggcccacaccttcggcctgatggacaccgtgaagaaggtgctggacaacagaagaaaccaggtggagcagggcgaggagcagttcctgtacaccctgaccgacctggagagacagctggaggagcagaagaagcagggccaggaccacagactgaagagccagaccgtgcagaacgtggtgctgatgcccgtgagcacccccaagccccccaagagacccagactgcagagacccgccagcaccaccgtgctgagccccagcccccccgtgcagcagccccagttcaccgtgatcagccccatcaccatcacccccgtgggccagagcttcagcatgggcaacatccccgtggccaccctgagccagggcagcagccccgtgaccgtgcacaccctgcccagcggcccccagctgttcagatacgccaccgtggtgagcagcgccaagagcagcagccccgacaccgtgaccatccaccccagcagcagcctggccctgctgagcagcaccgccatgcaggacggcagcaccctgggcaacatgaccaccatggtgagccccgtggagctggtggccatggagagcggcctgaccagcgccatccaggccgtggagagcaccagcgaggacggccagaccatcatcgagatcgaccccgcccccgaccccgaggccgaggacaccgagggcaaggccgtgatcctggagaccgagctgagaaccgaggagaaggtggtggccgagatggaggagcaccagcaccaggtgcacaacgtggagatcgtggtgctggaggactag

SEQ ID NO: 83011 - DNA, 1692 bp, synthetic construct
  misc_feature 1..1692: note = Description of Artificial Sequence: Synthetic coding sequence
  source 1..1692: mol_type = other DNA
atggccaacgccgaggtgagcgtgcccgtgggcgacgtggtggtggtgcccaccgagggcaacgagggcgagaaccccgaggacaccaagacccaggtgatcctgcagctgcagcccgtgcagcagggcatctacgaggccggcagcgagaacaacaccgccgtggtggccgtggagacccacaccatccacaagatcgaggagggcatcgacaccggcaccatcgaggccaacgaggacatggagatcgcctaccccatcacctgcggcgagagcaaggccatcctgctgtggaagaagttcgtgtgccccggcatcaacgtgaagtgcgtgaagttcaacgaccagctgatcagccccaagcacttcgtgcacctggccggcaagagcaccctgaaggactggaagagagccatcagactgggcggcatcatgctgagaaagatgatggacagcggccagatcgacttctaccagcacgacaaggtgtgcagcaacacctgcagaagcaccaagttcgacctgctgatcagcagcgccagagcccccgtgcccggccagcagaccagcgtggtgcagacccccaccagcgccgacggcagcatcacccagatcgccatcagcgaggagagcatggaggaggccggcctggagtggaacagcgccctgaccgccgccgtgaccatggccaccgaggagggcgtgaagaaggacagcgaggagatcagcgaggacaccctgatgttctggaagggcatcgccgacgtgggcctgatggaggaggtggtgtgcaacatccagaaggagatcgaggagctgctgagaggcgtgcagcagagactgatccaggcccccttccaggtgaccgacgccgccgtgctgaacaacgtggcccacaccttcggcctgatggacaccgtgaagaaggtgctggacaacagaagaaaccaggtggagcagggcgaggagcagttcctgtacaccctgaccgacctggagagacagctggaggagcagaagaagcagggccaggaccacagactgaagagccagaccgtgcagaacgtggtgctgatgcccgtgagcacccccaagccccccaagagacccagactgcagagacccgccagcaccaccgtgctgagccccagcccccccgtgcagcagccccagttcaccgtgatcagccccatcaccatcacccccgtgggccagagcttcagcatgggcaacatccccgtggccaccctgagccagggcagcagccccgtgaccgtgcacaccctgcccagcggcccccagctgttcagatacgccaccgtggtgagcagcgccaagagcagcagccccgacaccgtgaccatccaccccagcagcagcctggccctgctgagcagcaccgccatgcaggacggcagcaccctgggcaacatgaccaccatggtgagccccgtggagctggtggccatggagagcggcctgaccagcgccatccaggccgtggagagcaccagcgaggacggccagaccatcatcgagatcgaccccgcccccgaccccgaggccgaggacaccgagggcaaggccgtgatcctggagaccgagctgagaaccgaggagaaggtggtggccgagatggaggagcaccagcaccaggtgcacaacgtggagatcgtggtgctggaggactag

SEQ ID NO: 83012 - DNA, 1692 bp, synthetic construct; identical to SEQ ID NO: 83011
  misc_feature 1..1692: note = Description of Artificial Sequence: Synthetic coding sequence
  source 1..1692: mol_type = other DNA

SEQ ID NO: 83013 - DNA, 1083 bp, synthetic construct
  misc_feature 1..1083: note = Description of Artificial Sequence: Synthetic coding sequence
  source 1..1083: mol_type = other DNA
atgctgagaagactgcccgccctggccgccagaagaccccccgccagaagaagaagaatctacgaggccggcagcgagaacaacaccgccgtggtggccgtggagacccacaccatccacaagatcgaggagggcatcgacaccggcaccatcgaggccaacgaggacatggagatcgcctaccccatcacctgcggcgagagcaaggccatcctgctgtggaagaagttcgtgtgccccggcatcaacgtgaagtgcgtgaagttcaacgaccagctgatcagccccaagcacttcgtgcacctggccggcaagagcaccctgaaggactggaagagagccatcagactgggcggcatcatgctgagaaagatgatggacagcggccagatcgacttctaccagcacgacaaggtgtgcagcaacacctgcagaagcaccaagttcgacctgctgatcagcagcgccagagcccccgtgcccggccagcagaccagcgtggtgcagacccccaccagcgccgacggcagcatcacccagatcgccatcagcgaggagagcatggaggaggccggcctggagtggaacagcgccctgaccgccgccgtgaccatggccaccgaggagggcgtgaagaaggacagcgaggagatcagcgaggacaccctgatgttctggaagggcatcgccgacgtgggcctgatggaggaggtggtgtgcaacatccagaaggagatcgaggagctgctgagaggcgtgcagcagagactgatccaggcccccttccaggtgaccgacgccgccgtgctgaacaacgtggcccacaccttcggcctgatggacaccgtgaagaaggtgctggacaacagaagaaaccaggtggagcagggcgaggagcagttcctgtacaccctgaccgacctggagagacagctggaggagcagaagaagcagggccaggaccacagactgaagagccagaccgtgcagaacgtggtgctgatgcccgtgagcacccccaagccccccaagagacccagactgcagagacccgccagcaccaccgtgctgagccccagctag

SEQ ID NO: 83014 - DNA, 1593 bp, synthetic construct
  misc_feature 1..1593: note = Description of Artificial Sequence: Synthetic coding sequence
  source 1..1593: mol_type = other DNA
atggccacccccgacgtgagcgtgcacatggaggaggtggtggtggtgaccacccccgacaccgccgtggacggcagcggcgtggagggcgtgaagaccgtgctggtgaccaccaacctggccccccacggcggcgacctgaccgaggacaacatggagaccgagaacgccgccgccgccgccgccgccgccttcaccgccagcagccagctgaaggaggccgtgctggtgaagatggccgaggagggcgagaacctggaggccgagatcgtgtaccccatcacctgcggcgacagcagagccaacctgatctggagaaagttcgtgtgccccggcatcaacgtgaagtgcgtgcagtacgacgagcacgtgatcagccccaaggagttcgtgcacctggccggcaagagcaccctgaaggactggaagagagccatcagaatgaacggcatcatgctgagaaagatcatggacagcggcgagctggacttctaccagcacgacaaggtgtgcagcaacacctgcagaagcaccaagatcgacctgagcggcgccagagtgagcctgagcagccccaccagcgccgagtacatccccctgacccccgccgccgccgacgtgaacggcagccccgccaccatcaccatcgagacctgcgaggaccccggcgactggaccgccgccatcggcgacgacaccttcaccttctggagaggcctgaaggacgccggcctgctggacgaggtgatccaggagttccaccaggagctggtggagaccatgagaggcctgcagcagagagtgcaggacccccccctgcagctgagagacgccgtgctgctgaacaacatcgtgcagaacttcggcatgctggacctggtgaagaaggtgctggccagccacaagtgccagatggacagaagcagagagcagtacgccagagacctggccgccctggagcagcagtgcgacgagcacagaagaagagccaaggagctgaagcacaagagccagcacctgagcaacgtgctgatgaccctgacccccgtgagcctgcccccccccgtgaagagacccagactggccagagccaccagcggccccgccgccatggccagccaggtgctgacccagagcgcccagctggccctgggccccggcgtgcccgtgccccagctgaccagcgtgcccctgggcaaggtggtgagcaccctgcccagcaccgtgctgggcaagggcagcctgcaggccccccccgccagcagccccgccagccccctgctgggcggctacaccgtgctggccagcagcggcagcacctaccccagcaccgtggagatccaccccgacgccagcagcctgaccgtgctgagcaccgccgccgtgcaggacggcagcaccgtgttcaaggtggtgagccccctgcagctgctgaccctgcccggcctgggccccaccctgcagaacgtggcccaggccagccccggcagcagcaccatcgtgaccgtgcccgccggcgccgcccccggccccgaggagcacaccgccaccatcgaggtggccgccatggccgaggaccacgagagaaagtag

SEQ ID NO: 83015 - DNA, 1440 bp, synthetic construct
  misc_feature 1..1440: note = Description of Artificial Sequence: Synthetic coding sequence
  source 1..1440: mol_type = other DNA
atggagaccgagaacgccgccgccgccgccgccgccgccttcaccgccagcagccagctgaaggaggccgtgctggtgaagatggccgaggagggcgagaacctggaggccgagatcgtgtaccccatcacctgcggcgacagcagagccaacctgatctggagaaagttcgtgtgccccggcatcaacgtgaagtgcgtgcagtacgacgagcacgtgatcagccccaaggagttcgtgcacctggccggcaagagcaccctgaaggactggaagagagccatcagaatgaacggcatcatgctgagaaagatcatggacagcggcgagctggacttctaccagcacgacaaggtgtgcagcaacacctgcagaagcaccaagatcgacctgagcggcgccagagtgagcctgagcagccccaccagcgccgagtacatccccctgacccccgccgccgccgacgtgaacggcagccccgccaccatcaccatcgagacctgcgaggaccccggcgactggaccgccgccatcggcgacgacaccttcaccttctggagaggcctgaaggacgccggcctgctggacgaggtgatccaggagttccaccaggagctggtggagaccatgagaggcctgcagcagagagtgcaggacccccccctgcagctgagagacgccgtgctgctgaacaacatcgtgcagaacttcggcatgctggacctggtgaagaaggtgctggccagccacaagtgccagatggacagaagcagagagcagtacgccagagacctggccgccctggagcagcagtgcgacgagcacagaagaagagccaaggagctgaagcacaagagccagcacctgagcaacgtgctgatgaccctgacccccgtgagcctgcccccccccgtgaagagacccagactggccagagccaccagcggccccgccgccatggccagccaggtgctgacccagagcgcccagctggccctgggccccggcgtgcccgtgccccagctgaccagcgtgcccctgggcaaggtggtgagcaccctgcccagcaccgtgctgggcaagggcagcctgcaggccccccccgccagcagccccgccagccccctgctgggcggctacaccgtgctggccagcagcggcagcacctaccccagcaccgtggagatccaccccgacgccagcagcctgaccgtgctgagcaccgccgccgtgcaggacggcagcaccgtgttcaaggtggtgagccccctgcagctgctgaccctgcccggcctgggccccaccctgcagaacgtggcccaggccagccccggcagcagcaccatcgtgaccgtgcccgccggcgccgcccccggccccgaggagcacaccgccaccatcgaggtggccgccatggccgaggaccacgagagaaagtag

SEQ ID NO: 83016 - DNA, 1593 bp, synthetic construct; identical to SEQ ID NO: 83014
  misc_feature 1..1593: note = Description of Artificial Sequence: Synthetic coding sequence
  source 1..1593: mol_type = other DNA

SEQ ID NO: 83017 - DNA, 1401 bp, synthetic construct
  misc_feature 1..1401: note = Description of Artificial Sequence: Synthetic coding sequence
  source 1..1401: mol_type = other DNA
atggccatggacgtgaccagaagccaggcccagaccgccctgaccctggtggagcagatcctggccgagttccagctgcaggaggaggacctgaagaaggtgatgagaagaatgcagaaggagatggacagaggcctgagactggagacccacgaggaggccagcgtgaagatgctgcccacctacgtgagaagcacccccgagggcagcgaggtgggcgacttcctgagcctggacctgggcggcaccaacttcagagtgatgctggtgaaggtgggcgagggcgaggagggccagtggagcgtgaagaccaagcaccagatgtacagcatccccgaggacgccatgaccggcaccgccgagatgctgttcgactacatcagcgagtgcatcagcgacttcctggacaagcaccagatgaagcacaagaagctgcccctgggcttcaccttcagcttccccgtgagacacgaggacatcgacaagggcatcctgctgaactggaccaagggcttcaaggccagcggcgccgagggcaacaacgtggtgggcctgctgagagacgccatcaagagaagaggcgacttcgagatggacgtggtggccatggtgaacgacaccgtggccaccatgatcagctgctactacgaggaccaccagtgcgaggtgggcatgatcgtgggcaccggctgcaacgcctgctacatggaggagatgcagaacgtggagctggtggagggcgacgagggcagaatgtgcgtgaacaccgagtggggcgccttcggcgacagcggcgagctggacgagttcctgctggagtacgacagactggtggacgagagcagcgccaaccccggccagcagctgtacgagaagctgatcggcggcaagtacatgggcgagctggtgagactggtgctgctgagactggtggacgagaacctgctgttccacggcgaggccagcgagcagctgagaaccagaggcgccttcgagaccagattcgtgagccaggtggagagcgacaccggcgacagaaagcagatctacaacatcctgagcaccctgggcctgagacccagcaccaccgactgcgacatcgtgagaagagcctgcgagagcgtgagcaccagagccgcccacatgtgcagcgccggcctggccggcgtgatcaacagaatgagagagagcagaagcgaggacgtgatgagaatcaccgtgggcgtggacggcagcgtgtacaagctgcaccccagcttcaaggagagattccacgccagcgtgagaagactgacccccagctgcgagatcaccttcatcgagagcgaggagggcagcggcagaggcgccgccctggtgagcgccgtggcctgcaagaaggcctgcatgctgggccagtag

SEQ ID NO: 83018 - DNA, 1395 bp, synthetic construct
  misc_feature 1..1395: note = Description of Artificial Sequence: Synthetic coding sequence
  source 1..1395: mol_type = other DNA
atgcccagacccagaagccagctgccccagcccaacagccaggtggagcagatcctggccgagttccagctgcaggaggaggacctgaagaaggtgatgagaagaatgcagaaggagatggacagaggcctgagactggagacccacgaggaggccagcgtgaagatgctgcccacctacgtgagaagcacccccgagggcagcgaggtgggcgacttcctgagcctggacctgggcggcaccaacttcagagtgatgctggtgaaggtgggcgagggcgaggagggccagtggagcgtgaagaccaagcaccagatgtacagcatccccgaggacgccatgaccggcaccgccgagatgctgttcgactacatcagcgagtgcatcagcgacttcctggacaagcaccagatgaagcacaagaagctgcccctgggcttcaccttcagcttccccgtgagacacgaggacatcgacaagggcatcctgctgaactggaccaagggcttcaaggccagcggcgccgagggcaacaacgtggtgggcctgctgagagacgccatcaagagaagaggcgacttcgagatggacgtggtggccatggtgaacgacaccgtggccaccatgatcagctgctactacgaggaccaccagtgcgaggtgggcatgatcgtgggcaccggctgcaacgcctgctacatggaggagatgcagaacgtggagctggtggagggcgacgagggcagaatgtgcgtgaacaccgagtggggcgccttcggcgacagcggcgagctggacgagttcctgctggagtacgacagactggtggacgagagcagcgccaaccccggccagcagctgtacgagaagctgatcggcggcaagtacatgggcgagctggtgagactggtgctgctgagactggtggacgagaacctgctgttccacggcgaggccagcgagcagctgagaaccagaggcgccttcgagaccagattcgtgagccaggtggagagcgacaccggcgacagaaagcagatctacaacatcctgagcaccctgggcctgagacccagcaccaccgactgcgacatcgtgagaagagcctgcgagagcgtgagcaccagagccgcccacatgtgcagcgccggcctggccggcgtgatcaacagaatgagagagagcagaagcgaggacgtgatgagaatcaccgtgggcgtggacggcagcgtgtacaagctgcaccccagcttcaaggagagattccacgccagcgtgagaagactgacccccagctgcgagatcaccttcatcgagagcgaggagggcagcggcagaggcgccgccctggtgagcgccgtggcctgcaagaaggcctgcatgctgggccagtag

SEQ ID NO: 83019 - DNA, 1398 bp, synthetic construct
  misc_feature 1..1398: note = Description of Artificial Sequence: Synthetic coding sequence
  source 1..1398: mol_type = other DNA
atgctggacgacagagccagaatggaggccgccaagaaggagaaggtggagcagatcctggccgagttccagctgcaggaggaggacctgaagaaggtgatgagaagaatgcagaaggagatggacagaggcctgagactggagacccacgaggaggccagcgtgaagatgctgcccacctacgtgagaagcacccccgagggcagcgaggtgggcgacttcctgagcctggacctgggcggcaccaacttcagagtgatgctggtgaaggtgggcgagggcgaggagggccagtggagcgtgaagaccaagcaccagatgtacagcatccccgaggacgccatgaccggcaccgccgagatgctgttcgactacatcagcgagtgcatcagcgacttcctggacaagcaccagatgaagcacaagaagctgcccctgggcttcaccttcagcttccccgtgagacacgaggacatcgacaagggcatcctgctgaactggaccaagggcttcaaggccagcggcgccgagggcaacaacgtggtgggcctgctgagagacgccatcaagagaagaggcgacttcgagatggacgtggtggccatggtgaacgacaccgtggccaccatgatcagctgctactacgaggaccaccagtgcgaggtgggcatgatcgtgggcaccggctgcaacgcctgctacatggaggagatgcagaacgtggagctggtggagggcgacgagggcagaatgtgcgtgaacaccgagtggggcgccttcggcgacagcggcgagctggacgagttcctgctggagtacgacagactggtggacgagagcagcgccaaccccggccagcagctgtacgagaagctgatcggcggcaagtacatgggcgagctggtgagactggtgctgctgagactggtggacgagaacctgctgttccacggcgaggccagcgagcagctgagaaccagaggcgccttcgagaccagattcgtgagccaggtggagagcgacaccggcgacagaaagcagatctacaacatcctgagcaccctgggcctgagacccagcaccaccgactgcgacatcgtgagaagagcctgcgagagcgtgagcaccagagccgcccacatgtgcagcgccggcctggccggcgtgatcaacagaatgagagagagcagaagcgaggacgtgatgagaatcaccgtgggcgtggacggcagcgtgtacaagctgcaccccagcttcaaggagagattccacgccagcgtgagaagactgacccccagctgcgagatcaccttcatcgagagcgaggagggcagcggcagaggcgccgccctggtgagcgccgtggcctgcaagaaggcctgcatgctgggccagtag

SEQ ID NO: 83020 - DNA, 1878 bp, synthetic construct
  misc_feature 1..1878: note = Description of Artificial Sequence: Synthetic coding sequence
  source 1..1878: mol_type = other DNA
atgcccggcaccaagagattccagcacgtgatcgagacccccgagcccggcaagtgggagctgagcggctacgaggccgccgtgcccatcaccgagaagagcaaccccctgacccaggacctggacaaggccgacgccgagaacatcgtgagactgctgggccagtgcgacgccgagatcttccaggaggagggccaggccctgagcacctaccagagactgtacagcgagagcatcctgaccaccatggtgcaggtggccggcaaggtgcaggaggtgctgaaggagcccgacggcggcctggtggtgctgagcggcggcggcaccagcggcagaatggccttcctgatgagcgtgagcttcaaccagctgatgaagggcctgggccagaagcccctgtacacctacctgatcgccggcggcgacagaagcgtggtggccagcagagagggcaccgaggacagcgccctgcacggcatcgaggagctgaagaaggtggccgccggcaagaagagagtgatcgtgatcggcatcagcgtgggcctgagcgcccccttcgtggccggccagatggactgctgcatgaacaacaccgccgtgttcctgcccgtgctggtgggcttcaaccccgtgagcatggccagaaacgaccccatcgaggactggagcagcaccttcagacaggtggccgagagaatgcagaagatgcaggagaagcagaaggccttcgtgctgaaccccgccatcggccccgagggcctgagcggcagcagcagaatgaagggcggcagcgccaccaagatcctgctggagaccctgctgctggccgcccacaagaccgtggaccagggcatcgccgccagccagagatgcctgctggagatcctgagaaccttcgagagagcccaccaggtgacctacagccagagccccaagatcgccaccctgatgaagagcgtgagcaccagcctggagaagaagggccacgtgtacctggtgggctggcagaccctgggcatcatcgccatcatggacggcgtggagtgcatccacaccttcggcgccgacttcagagacgtgagaggcttcctgatcggcgaccacagcgacatgttcaaccagaaggccgagctgaccaaccagggcccccagttcaccttcagccaggaggacttcctgaccagcatcctgcccagcctgaccgagatcgacaccgtggtgttcatcttcaccctggacgacaacctgaccgaggtgcagaccatcgtggagcaggtgaaggagaagaccaaccacatccaggccctggcccacagcaccgtgggccagaccctgctgatccccctgaagaagctgttccccagcatcatcagcatcacctggcccctgctgttcttcgagtacgagggcaacttcatccagaagttccagagagagctgagcaccaagtgggtgctgaacaccgtgagcaccggcgcccacgtgctgctgggcaagatcctgcagaaccacatgctggacctgagaatcagcaacagcaagctgttctggagagccctggccatgctgcagagattcagcggccagagcaaggccagatgcatcgagagcctgctgagagccatccacttcccccagcccctgagcgacgacatcagagccgcccccatcagctgccacgtgcaggtggcccacgagaaggagcaggtgatccccatcgccctgctgagcctgctgttcagatgcagcatcaccgaggcccaggcccacctggccgccgcccccagcgtgtgcgaggccgtgagaagcgccctggccggccccggccagaagagaaccgccgaccccctggagatcctggagcccgacgtgcagtag

SEQ ID NO: 83021 - DNA, 1308 bp, synthetic construct
  misc_feature 1..1308: note = Description of Artificial Sequence: Synthetic coding sequence
  source 1..1308: mol_type = other DNA
atggactgctgcatgaacaacaccgccgtgttcctgcccgtgctggtgggcttcaaccccgtgagcatggccagaaacgaccccatcgaggactggagcagcaccttcagacaggtggccgagagaatgcagaagatgcaggagaagcagaaggccttcgtgctgaaccccgccatcggccccgagggcctgagcggcagcagcagaatgaagggcggcagcgccaccaagatcctgctggagaccctgctgctggccgcccacaagaccgtggaccagggcatcgccgccagccagagatgcctgctggagatcctgagaaccttcgagagagcccaccaggtgacctacagccagagccccaagatcgccaccctgatgaagagcgtgagcaccagcctggagaagaagggccacgtgtacctggtgggctggcagaccctgggcatcatcgccatcatggacggcgtggagtgcatccacaccttcggcgccgacttcagagacgtgagaggcttcctgatcggcgaccacagcgacatgttcaaccagaaggccgagctgaccaaccagggcccccagttcaccttcagccaggaggacttcctgaccagcatcctgcccagcctgaccgagatcgacaccgtggtgttcatcttcaccctggacgacaacctgaccgaggtgcagaccatcgtggagcaggtgaaggagaagaccaaccacatccaggccctggcccacagcaccgtgggccagaccctgctgatccccctgaagaagctgttccccagcatcatcagcatcacctggcccctgctgttcttcgagtacgagggcaacttcatccagaagttccagagagagctgagcaccaagtgggtgctgaacaccgtgagcaccggcgcccacgtgctgctgggcaagatcctgcagaaccacatgctggacctgagaatcagcaacagcaagctgttctggagagccctggccatgctgcagagattcagcggccagagcaaggccagatgcatcgagagcctgctgagagccatccacttcccccagcccctgagcgacgacatcagagccgcccccatcagctgccacgtgcaggtggcccacgagaaggagcaggtgatccccatcgccctgctgagcctgctgttcagatgcagcatcaccgaggcccaggcccacctggccgccgcccccagcgtgtgcgaggccgtgagaagcgccctggccggccccggccagaagagaaccgccgaccccctggagatcctggagcccgacgtgcagtag

SEQ ID NO: 83022 - DNA, 1659 bp, synthetic construct
  misc_feature 1..1659: note = Description of Artificial Sequence: Synthetic coding sequence
  source 1..1659: mol_type = other DNA
atgagactgctgcccctggcccccggcagactgagaagaggcagccccagacacctgcccagctgcagccccgccctgctgctgctggtgctgggcggctgcctgggcgtgttcggcgtggccgccggcaccagaagacccaacgtggtgctgctgctgaccgacgaccaggacgaggtgctgggcggcatgacccccctgaagaagaccaaggccctgatcggcgagatgggcatgaccttcagcagcgcctacgtgcccagcgccctgtgctgccccagcagagccagcatcctgaccggcaagtacccccacaaccaccacgtggtgaacaacaccctggagggcaactgcagcagcaagagctggcagaagatccaggagcccaacaccttccccgccatcctgagaagcatgtgcggctaccagaccttcttcgccggcaagtacctgaacgagtacggcgcccccgacgccggcggcctggagcacgtgcccctgggctggagctactggtacgccctggagaagaacagcaagtactacaactacaccctgagcatcaacggcaaggccagaaagcacggcgagaactacagcgtggactacctgaccgacgtgctggccaacgtgagcctggacttcctggactacaagagcaacttcgagcccttcttcatgatgatcgccacccccgccccccacagcccctggaccgccgccccccagtaccagaaggccttccagaacgtgttcgcccccagaaacaagaacttcaacatccacggcaccaacaagcactggctgatcagacaggccaagacccccatgaccaacagcagcatccagttcctggacaacgccttcagaaagagatggcagaccctgctgagcgtggacgacctggtggagaagctggtgaagagactggagttcaccggcgagctgaacaacacctacatcttctacaccagcgacaacggctaccacaccggccagttcagcctgcccatcgacaagagacagctgtacgagttcgacatcaaggtgcccctgctggtgagaggccccggcatcaagcccaaccagaccagcaagatgctggtggccaacatcgacctgggccccaccatcctggacatcgccggctacgacctgaacaagacccagatggacggcatgagcctgctgcccatcctgagaggcgccagcaacctgacctggagaagcgacgtgctggtggagtaccagggcgagggcagaaacgtgaccgaccccacctgccccagcctgagccccggcgtgagccagtgcttccccgactgcgtgtgcgaggacgcctacaacaacacctacgcctgcgtgagaaccatgagcgccctgtggaacctgcagtactgcgagttcgacgaccaggaggtgttcgtggaggtgtacaacctgaccgccgaccccgaccagatcaccaacatcgccaagaccatcgaccccgagctgctgggcaagatgaactacagactgatgatgctgcagagctgcagcggccccacctgcagaacccccggcgtgttcgaccccggctacagattcgaccccagactgatgttcagcaacagaggcagcgtgagaaccagaagattcagcaagcacctgctgtag

SEQ ID NO: 83023 - DNA, 1410 bp, synthetic construct
  misc_feature 1..1410: note = Description of Artificial Sequence: Synthetic coding sequence
  source 1..1410: mol_type = other DNA
atgtacgtgcccagcgccctgtgctgccccagcagagccagcatcctgaccggcaagtacccccacaaccaccacgtggtgaacaacaccctggagggcaactgcagcagcaagagctggcagaagatccaggagcccaacaccttccccgccatcctgagaagcatgtgcggctaccagaccttcttcgccggcaagtacctgaacgagtacggcgcccccgacgccggcggcctggagcacgtgcccctgggctggagctactggtacgccctggagaagaacagcaagtactacaactacaccctgagcatcaacggcaaggccagaaagcacggcgagaactacagcgtggactacctgaccgacgtgctggccaacgtgagcctggacttcctggactacaagagcaacttcgagcccttcttcatgatgatcgccacccccgccccccacagcccctggaccgccgccccccagtaccagaaggccttccagaacgtgttcgcccccagaaacaagaacttcaacatccacggcaccaacaagcactggctgatcagacaggccaagacccccatgaccaacagcagcatccagttcctggacaacgccttcagaaagagatggcagaccctgctgagcgtggacgacctggtggagaagctggtgaagagactggagttcaccggcgagctgaacaacacctacatcttctacaccagcgacaacggctaccacaccggccagttcagcctgcccatcgacaagagacagctgtacgagttcgacatcaaggtgcccctgctggtgagaggccccggcatcaagcccaaccagaccagcaagatgctggtggccaacatcgacctgggccccaccatcctggacatcgccggctacgacctgaacaagacccagatggacggcatgagcctgctgcccatcctgagaggcgccagcaacctgacctggagaagcgacgtgctggtggagtaccagggcgagggcagaaacgtgaccgaccccacctgccccagcctgagccccggcgtgagccagtgcttccccgactgcgtgtgcgaggacgcctacaacaacacctacgcctgcgtgagaaccatgagcgccctgtggaacctgcagtactgcgagttcgacgaccaggaggtgttcgtggaggtgtacaacctgaccgccgaccccgaccagatcaccaacatcgccaagaccatcgaccccgagctgctgggcaagatgaactacagactgatgatgctgcagagctgcagcggccccacctgcagaacccccggcgtgttcgaccccggctacagattcgaccccagactgatgttcagcaacagaggcagcgtgagaaccagaagattcagcaagcacctgctgtag

SEQ ID NO: 83024 - DNA, 1599 bp, synthetic construct
  misc_feature 1..1599: note = Description of Artificial Sequence: Synthetic coding sequence
  source 1..1599: mol_type = other DNA
atgagactgctgcccctggcccccggcagactgagaagaggcagccccagacacctgcccagctgcagccccgccctgctgctgctggtgctgggcggctgcctgggcgtgttcggcgtggccgccggcaccagaagacccaacgtggtgctgctgctgaccgacgaccaggacgaggtgctgggcggcatgtacgtgcccagcgccctgtgctgccccagcagagccagcatcctgaccggcaagtacccccacaaccaccacgtggtgaacaacaccctggagggcaactgcagcagcaagagctggcagaagatccaggagcccaacaccttccccgccatcctgagaagcatgtgcggctaccagaccttcttcgccggcaagtacctgaacgagtacggcgcccccgacgccggcggcctggagcacgtgcccctgggctggagctactggtacgccctggagaagaacagcaagtactacaactacaccctgagcatcaacggcaaggccagaaagcacggcgagaactacagcgtggactacctgaccgacgtgctggccaacgtgagcctggacttcctggactacaagagcaacttcgagcccttcttcatgatgatcgccacccccgccccccacagcccctggaccgccgccccccagtaccagaaggccttccagaacgtgttcgcccccagaaacaagaacttcaacatccacggcaccaacaagcactggctgatcagacaggccaagacccccatgaccaacagcagcatccagttcctggacaacgccttcagaaagagatggcagaccctgctgagcgtggacgacctggtggagaagctggtgaagagactggagttcaccggcgagctgaacaacacctacatcttctacaccagcgacaacggctaccacaccggccagttcagcctgcccatcgacaagagacagctgtacgagttcgacatcaaggtgcccctgctggtgagaggccccggcatcaagcccaaccagaccagcaagatgctggtggccaacatcgacctgggccccaccatcctggacatcgccggctacgacctgaacaagacccagatggacggcatgagcctgctgcccatcctgagaggcgccagcaacctgacctggagaagcgacgtgctggtggagtaccagggcgagggcagaaacgtgaccgaccccacctgccccagcctgagccccggcgtgagccagtgcttccccgactgcgtgtgcgaggacgcctacaacaacacctacgcctgcgtgagaaccatgagcgccctgtggaacctgcagtactgcgagttcgacgaccaggaggtgttcgtggaggtgtacaacctgaccgccgaccccgaccagatcaccaacatcgccaagaccatcgaccccgagctgctgggcaagatgaactacagactgatgatgctgcagagctgcagcggccccacctgcagaacccccggcgtgttcgaccccggctacagattcgaccccagactgatgttcagcaacagaggcagcgtgagaaccagaagattcagcaagcacctgctgtag

SEQ ID NO: 83025 - DNA, 2154 bp, synthetic construct
  misc_feature 1..2154: note = Description of Artificial Sequence: Synthetic coding sequence
  source 1..2154: mol_type = other DNA
atgcccatcggcgactgcagcgtggccgccaagcccagaaagcagctgctgtgcagcctgttccagaccaccctgggctacagagccagagccagcggctggaagcccatggtgatctgcagaggcagccacgccttcaaggacctgatcaacacctacagaatgatcgagcaggacgacttcgacatcaacaccagactgcacaccatcgtgagaggcgaggacgaggccgccatggtggagagcgtgggcctggccctggtgaagctgcccgacgtgctgaacagactgaagcccgacatcatgatcgtgcacggcgacagattcgacgccctggccctggccaccagcgccgccctgatgaacatcagaatcctgcacatcgagggcggcgaggtgagcggcaccatcgacgacagcatcagacacgccatcaccaagctggcccactaccacgtgtgctgcaccagaagcgccgagcagcacctgatcagcatgtgcgaggaccacgacagaatcctgctggccggctgccccagctacgacaagctgctgagcgccaagaacaaggactacatgagcatcatcagaatgtggctgggcgacgacgtgaagagcaaggactacatcgtggccctgcagcaccccgtgaccaccgacatcaagcacagcatcaagatgttcgagctgaccctggacgccctgatcagcttcaacaagagaaccctggtgctgttccccaacatcgacgccggcagcaaggagatggtgagagtgatgagaaagaagggcatcgagcaccaccccaacttcagagccgtgaagcacgtgcccttcgaccagttcatccagctggtggcccacgccggctgcatgatcggcaacagcagctgcggcgtgagagaggtgggcgccttcggcacccccgtgatcaacctgggcaccagacagatcggcagagagaccggcgagaacgtgctgcacgtgagagacgccgacacccaggacaagatcctgcaggccctgcacctgcagttcggcaagcagtacccctgcagcaagatctacggcgacggcaacgccgtgcccagaatcctgaagttcctgaagagcatcgacctgcaggagcccctgcagaagaagttctgcttcccccccgtgaaggagaacatcagccaggacatcgaccacatcctggagaccctgagcgccctggccgtggacctgggcggcaccaacctgagagtggccatcgtgagcatgaagggcgagatcgtgaagaagtacacccagttcaaccccaagacctacgaggagagaatcaacctgatcctgcagatgtgcgtggaggccgccgccgaggccgtgaagctgaactgcagaatcctgggcgtgggcatcagcaccggcggcagagtgaaccccagagagggcatcgtgctgcacagcaccaagctgatccaggagtggaacagcgtggacctgagaacccccctgagcgacaccctgcacctgcccgtgtgggtggacaacgacggcaactgcgccgccctggccgagagaaagttcggccagggcaagggcctggagaacttcgtgaccctgatcaccggcaccggcatcggcggcggcatcatccaccagcacgagctgatccacggcagcagcttctgcgccgccgagctgggccacctggtggtgagcctggacggccccgactgcagctgcggcagccacggctgcatcgaggcctacgccagcggcatggccctgcagagagaggccaagaagctgcacgacgaggacctgctgctggtggagggcatgagcgtgcccaaggacgaggccgtgggcgccctgcacctgatccaggccgccaagctgggcaacgccaaggcccagagcatcctgagaaccgccggcaccgccctgggcctgggcgtggtgaacatcctgcacaccatgaaccccagcctggtgatcctgagcggcgtgctggccagccactacatccacatcgtgaaggacgtgatcagacagcaggccctgagcagcgtgcaggacgtggacgtggtggtgagcgacctggtggaccccgccctgctgggcgccgccagcatggtgctggactacaccaccagaagaatctactag

SEQ ID NO: 83026 - DNA, 2169 bp, synthetic construct
  misc_feature 1..2169: note = Description of Artificial Sequence: Synthetic coding sequence
  source 1..2169: mol_type = other DNA
atggagaagaacggcaacaacagaaagctgagagtgtgcgtggccacctgcaacagagccgactacagcaagctggcccccatcatgttcggcatcaagaccgagcccgagttcttcgagctggacgtggtggtgctgggcagccacctgatcgacgactacggcaacacctacagaatgatcgagcaggacgacttcgacatcaacaccagactgcacaccatcgtgagaggcgaggacgaggccgccatggtggagagcgtgggcctggccctggtgaagctgcccgacgtgctgaacagactgaagcccgacatcatgatcgtgcacggcgacagattcgacgccctggccctggccaccagcgccgccctgatgaacatcagaatcctgcacatcgagggcggcgaggtgagcggcaccatcgacgacagcatcagacacgccatcaccaagctggcccactaccacgtgtgctgcaccagaagcgccgagcagcacctgatcagcatgtgcgaggaccacgacagaatcctgctggccggctgccccagctacgacaagctgctgagcgccaagaacaaggactacatgagcatcatcagaatgtggctgggcgacgacgtgaagagcaaggactacatcgtggccctgcagcaccccgtgaccaccgacatcaagcacagcatcaagatgttcgagctgaccctggacgccctgatcagcttcaacaagagaaccctggtgctgttccccaacatcgacgccggcagcaaggagatggtgagagtgatgagaaagaagggcatcgagcaccaccccaacttcagagccgtgaagcacgtgcccttcgaccagttcatccagctggtggcccacgccggctgcatgatcggcaacagcagctgcggcgtgagagaggtgggcgccttcggcacccccgtgatcaacctgggcaccagacagatcggcagagagaccggcgagaacgtgctgcacgtgagagacgccgacacccaggacaagatcctgcaggccctgcacctgcagttcggcaagcagtacccctgcagcaagatctacggcgacggcaacgccgtgcccagaatcctgaagttcctgaagagcatcgacctgcaggagcccctgcagaagaagttctgcttcccccccgtgaaggagaacatcagccaggacatcgaccacatcctggagaccctgagcgccctggccgtggacctgggcggcaccaacctgagagtggccatcgtgagcatgaagggcgagatcgtgaagaagtacacccagttcaaccccaagacctacgaggagagaatcaacctgatcctgcagatgtgcgtggaggccgccgccgaggccgtgaagctgaactgcagaatcctgggcgtgggcatcagcaccggcggcagagtgaaccccagagagggcatcgtgctgcacagcaccaagctgatccaggagtggaacagcgtggacctgagaacccccctgagcgacaccctgcacctgcccgtgtgggtggacaacgacggcaactgcgccgccctggccgagagaaagttcggccagggcaagggcctggagaacttcgtgaccctgatcaccggcaccggcatcggcggcggcatcatccaccagcacgagctgatccacggcagcagcttctgcgccgccgagctgggccacctggtggtgagcctggacggccccgactgcagctgcggcagccacggctgcatcgaggcctacgccagcggcatggccctgcagagagaggccaagaagctgcacgacgaggacctgctgctggtggagggcatgagcgtgcccaaggacgaggccgtgggcgccctgcacctgatccaggccgccaagctgggcaacgccaaggcccagagcatcctgagaaccgccggcaccgccctgggcctgggcgtggtgaacatcctgcacaccatgaaccccagcctggtgatcctgagcggcgtgctggccagccactacatccacatcgtgaaggacgtgatcagacagcaggccctgagcagcgtgcaggacgtggacgtggtggtgagcgacctggtggaccccgccctgctgggcgccgccagcatggtgctggactacaccaccagaagaatctactag

SEQ ID NO: 83027 - DNA, 2262 bp, synthetic construct
  misc_feature 1..2262: note = Description of Artificial Sequence: Synthetic coding sequence
  source 1..2262: mol_type = other DNA
atggagacctacggctacctgcagagagagagctgcttccagggcccccacgagctgtacttcaagaacctgagcaagagaaacaagcagatcatggagaagaacggcaacaacagaaagctgagagtgtgcgtggccacctgcaacagagccgactacagcaagctggcccccatcatgttcggcatcaagaccgagcccgagttcttcgagctggacgtggtggtgctgggcagccacctgatcgacgactacggcaacacctacagaatgatcgagcaggacgacttcgacatcaacaccagactgcacaccatcgtgagaggcgaggacgaggccgccatggtggagagcgtgggcctggccctggtgaagctgcccgacgtgctgaacagactgaagcccgacatcatgatcgtgcacggcgacagattcgacgccctggccctggccaccagcgccgccctgatgaacatcagaatcctgcacatcgagggcggcgaggtgagcggcaccatcgacgacagcatcagacacgccatcaccaagctggcccactaccacgtgtgctgcaccagaagcgccgagcagcacctgatcagcatgtgcgaggaccacgacagaatcctgctggccggctgccccagctacgacaagctgctgagcgccaagaacaaggactacatgagcatcatcagaatgtggctgggcgacgacgtgaagagcaaggactacatcgtggccctgcagcaccccgtgaccaccgacatcaagcacagcatcaagatgttcgagctgaccctggacgccctgatcagcttcaacaagagaaccctggtgctgttccccaacatcgacgccggcagcaaggagatggtgagagtgatgagaaagaagggcatcgagcaccaccccaacttcagagccgtgaagcacgtgcccttcgaccagttcatccagctggtggcccacgccggctgcatgatcggcaacagcagctgcggcgtgagagaggtgggcgccttcggcacccccgtgatcaacctgggcaccagacagatcggcagagagaccggcgagaacgtgctgcacgtgagagacgccgacacccaggacaagatcctgcaggccctgcacctgcagttcggcaagcagtacccctgcagcaagatctacggcgacggcaacgccgtgcccagaatcctgaagttcctgaagagcatcgacctgcaggagcccctgcagaagaagttctgcttcccccccgtgaaggagaacatcagccaggacatcgaccacatcctggagaccctgagcgccctggccgtggacctgggcggcaccaacctgagagtggccatcgtgagcatgaagggcgagatcgtgaagaagtacacccagttcaaccccaagacctacgaggagagaatcaacctgatcctgcagatgtgcgtggaggccgccgccgaggccgtgaagctgaactgcagaatcctgggcgtgggcatcagcaccggcggcagagtgaaccccagagagggcatcgtgctgcacagcaccaagctgatccaggagtggaacagcgtggacctgagaacccccctgagcgacaccctgcacctgcccgtgtgggtggacaacgacggcaactgcgccgccctggccgagagaaagttcggccagggcaagggcctggagaacttcgtgaccctgatcaccggcaccggcatcggcggcggcatcatccaccagcacgagctgatccacggcagcagcttctgcgccgccgagctgggccacctggtggtgagcctggacggccccgactgcagctgcggcagccacggctgcatcgaggcctacgccagcggcatggccctgcagagagaggccaagaagctgcacgacgaggacctgctgctggtggagggcatgagcgtgcccaaggacgaggccgtgggcgccctgcacctgatccaggccgccaagctgggcaacgccaaggcccagagcatcctgagaaccgccggcaccgccctgggcctgggcgtggtgaacatcctgcacaccatgaaccccagcctggtgatcctgagcggcgtgctggccagccactacatccacatcgtgaaggacgtgatcagacagcaggccctgagcagcgtgcaggacgtggacgtggtggtgagcgacctggtggaccccgccctgctgggcgccgccagcatggtgctggactacaccaccagaagaatctactag

SEQ ID NO: 83028 - DNA, 399 bp, synthetic construct
  misc_feature 1..399: note = Description of Artificial Sequence: Synthetic coding sequence
  source 1..399: mol_type = other DNA
atgttcgagctgaccctggacgccctgatcagcttcaacaagagaaccctggtgctgttccccaacatcgacgccggcagcaaggagatggtgagagtgatgagaaagaagggcatcgagcaccaccccaacttcagagccgtgaagcacgtgcccttcgaccagttcatccagctggtggcccacgccggctgcatgatcggcaacagcagctgcggcgtgagagaggtgggcgccctgaccagactgtacacctacgtgagctgctacaagcacacccacacccacacccacacccaccccagcagcagcaaccccaagctgagaagccagaaggtgatccagagcgagaacagaggcaagagctaccaggagggcctgaagtacaccttcttctag

SEQ ID NO: 83029 - DNA, 2169 bp, synthetic construct; identical to SEQ ID NO: 83026
  misc_feature 1..2169: note = Description of Artificial Sequence: Synthetic coding sequence
  source 1..2169: mol_type = other DNA

SEQ ID NO: 83030 - DNA, 1947 bp, synthetic construct
  misc_feature 1..1947: note = Description of Artificial Sequence: Synthetic coding sequence
  source 1..1947: mol_type = other DNA
atggagaagaacggcaacaacagaaagctgagagtgtgcgtggccacctgcaacagagccgactacagcaagctggcccccatcatgttcggcatcaagaccgagcccgagttcttcgagctggacgtggtggtgctgggcagccacctgatcgacgactacggcaacacctacagaatgatcgagcaggacgacttcgacatcaacaccagactgcacaccatcgtgagaggcgaggacgaggccgccatggtggagagcgtgggcctggccctggtgaagctgcccgacgtgctgaacagactgaagcccgacatcatgatcgtgcacggcgacagattcgacgccctggccctggccaccagcgccgccctgatgaacatcagaatcctgcacatcgagggcggcgaggtgagcggcaccatcgacgacagcatcagacacgccatcaccaagctggcccactaccacgtgtgctgcaccagaagcgccgagcagcacctgatcagcatgtgcgaggaccacgacagaatcctgctggccggctgccccagctacgacaagctgctgagcgccaagaacaaggactacatgagcatcatcagaatgtggctgggcgacgacgtgaagagcaaggactacatcgtggccctgcagcaccccgtgaccaccgacatcaagcacagcatcaagatgttcgagctgaccctggacgccctgatcagcttcaacaagagaaccctggtgctgttccccaacatcgacgccggcagcaaggagatggtgagagtgatgagaaagaagggcatcgagcaccaccccaacttcagagccgtgaagcacgtgcccttcgaccagttcatccagctggtggcccacgccggctgcatgatcggcaacagcagctgcggcgtgagagaggtgggcgccttcggcacccccgtgatcaacctgggcaccagacagatcggcagagagaccggcgagaacgtgctgcacgtgagagacgccgacacccaggacaagatcctgcaggccctgcacctgcagttcggcaagcagtacccctgcagcaagatctacggcgacggcaacgccgtgcccagaatcctgaagttcctgaagagcatcgacctgcaggagcccctgcagaagaagttctgcttcccccccgtgaaggagaacatcagccaggacatcgaccacatcctggagaccctgagcgccctggccgtggacctgggcggcaccaacctgagagtggccatcgtgagcatgaagggcgagatcgtgaagaagtacacccagttcaaccccaagacctacgaggagagaatcaacctgatcctgcagatgtgcgtggaggccgccgccgaggccgtgaagctgaactgcagaatcctgggcgtgggcatcggcggcggcatcatccaccagcacgagctgatccacggcagcagcttctgcgccgccgagctgggccacctggtggtgagcctggacggccccgactgcagctgcggcagccacggctgcatcgaggcctacgccagcggcatggccctgcagagagaggccaagaagctgcacgacgaggacctgctgctggtggagggcatgagcgtgcccaaggacgaggccgtgggcgccctgcacctgatccaggccgccaagctgggcaacgccaaggcccagagcatcctgagaaccgccggcaccgccctgggcctgggcgtggtgaacatcctgcacaccatgaaccccagcctggtgatcctgagcggcgtgctggccagccactacatccacatcgtgaaggacgtgatcagacagcaggccctgagcagcgtgcaggacgtggacgtggtggtgagcgacctggtggaccccgccctgctgggcgccgccagcatggtgctggactacaccaccagaagaatctactag

SEQ ID NO: 83031 - DNA, 1839 bp, synthetic construct
  misc_feature 1..1839: note = Description of Artificial Sequence: Synthetic coding sequence
  source 1..1839: mol_type = other DNA
atgatcgagcaggacgacttcgacatcaacaccagactgcacaccatcgtgagaggcgaggacgaggccgccatggtggagagcgtgggcctggccctggtgaagctgcccgacgtgctgaacagactgaagcccgacatcatgatcgtgcacggcgacagattcgacgccctggccctggccaccagcgccgccctgatgaacatcagaatcctgcacatcgagggcggcgaggtgagcggcaccatcgacgacagcatcagacacgccatcaccaagctggcccactaccacgtgtgctgcaccagaagcgccgagcagcacctgatcagcatgtgcgaggaccacgacagaatcctgctggccggctgccccagctacgacaagctgctgagcgccaagaacaaggactacatgagcatcatcagaatgtggctgggcagcaaggagatggtgagagtgatgagaaagaagggcatcgagcaccaccccaacttcagagccgtgaagcacgtgcccttcgaccagttcatccagctggtggcccacgccggctgcatgatcggcaacagcagctgcggcgtgagagaggtgggcgccttcggcacccccgtgatcaacctgggcaccagacagatcggcagagagaccggcgagaacgtgctgcacgtgagagacgccgacacccaggacaagatcctgcaggccctgcacctgcagttcggcaagcagtacccctgcagcaagatctacggcgacggcaacgccgtgcccagaatcctgaagttcctgaagagcatcgacctgcaggagcccctgcagaagaagttctgcttcccccccgtgaaggagaacatcagccaggacatcgaccacatcctggagaccctgagcgccctggccgtggacctgggcggcaccaacctgagagtggccatcgtgagcatgaagggcgagatcgtgaagaagtacacccagttcaaccccaagacctacgaggagagaatcaacctgatcctgcagatgtgcgtggaggccgccgccgaggccgtgaagctgaactgcagaatcctgggcgtgggcatcagcaccggcggcagagtgaaccccagagagggcatcgtgctgcacagcaccaagctgatccaggagtggaacagcgtggacctgagaacccccctgagcgacaccctgcacctgcccgtgtgggtggacaacgacggcaactgcgccgccctggccgagagaaagttcggccagggcaagggcctggagaacttcgtgaccctgatcaccggcaccggcatcggcggcggcatcatccaccagcacgagctgatccacggcagcagcttctgcgccgccgagctgggccacctggtggtgagcctggacggccccgactgcagctgcggcagccacggctgcatcgaggcctacgccagcggcatggccctgcagagagaggccaagaagctgcacgacgaggacctgctgctggtggagggcatgagcgtgcccaaggacgaggccgtgggcgccctgcacctgatccaggccgccaagctgggcaacgccaaggcccagagcatcctgagaaccgccggcaccgccctgggcctgggcgtggtgaacatcctgcacaccatgaaccccagcctggtgatcctgagcggcgtgctggccagccactacatccacatcgtgaaggacgtgatcagacagcaggccctgagcagcgtgcaggacgtggacgtggtggtgagcgacctggtggaccccgccctgctgggcgccgccagcatggtgctggactacaccaccagaagaatctactag

SEQ ID NO: 83032 - DNA, 870 bp, synthetic construct
  misc_feature 1..870: note = Description of Artificial Sequence: Synthetic coding sequence
  source 1..870: mol_type = other DNA
atgaagctgatcatcctggagcactacagccaggccagcgagtgggccgccaagtacatcagaaacagaatcatccagttcaaccccggccccgagaagtacttcaccctgggcctgcccaccggcagcacccccctgggctgctacaagaagctgatcgagtactacaagaacggcgacctgagcttcaagtacgtgaagaccttcaacatggacgagtacgtgggcctgcccagagaccaccccgagagctaccacagcttcatgtggaacaacttcttcaagcacatcgacatccaccccgagaacacccacatcctggacggcaacgccgtggacctgcaggccgagtgcgacgccttcgaggagaagatcaaggccgccggcggcatcgagctgttcgtgggcggcatcggccccgacggccacatcgccttcaacgagcccggcagcagcctggtgagcagaaccagagtgaagaccctggccatggacaccatcctggccaacgccagattcttcgacggcgagctgaccaaggtgcccaccatggccctgaccgtgggcgtgggcaccgtgatggacgccagagaggtgatgatcctgatcaccggcgcccacaaggccttcgccctgtacaaggccatcgaggagggcgtgaaccacatgtggaccgtgagcgccttccagcagcaccccagaaccgtgttcgtgtgcgacgaggacgccaccctggagctgaaggtgaagaccgtgaagtacttcaagggcctgatgctggtgcacaacaagctggtggaccccctgtacagcatcaaggagaaggagaccgagaagagccagagcagcaagaagccctacagcgactag

SEQ ID NO: 83033 - DNA, 768 bp, synthetic construct
  misc_feature 1..768: note = Description of Artificial Sequence: Synthetic coding sequence
  source 1..768: mol_type = other DNA
atgaagctgatcatcctggagcactacagccaggccagcgagtgggccgccaagtacatcagaaacagaatcatccagttcaaccccggccccgagaagtacttcaccctgggcctgcccaccggcctgcccagagaccaccccgagagctaccacagcttcatgtggaacaacttcttcaagcacatcgacatccaccccgagaacacccacatcctggacggcaacgccgtggacctgcaggccgagtgcgacgccttcgaggagaagatcaaggccgccggcggcatcgagctgttcgtgggcggcatcggccccgacggccacatcgccttcaacgagcccggcagcagcctggtgagcagaaccagagtgaagaccctggccatggacaccatcctggccaacgccagattcttcgacggcgagctgaccaaggtgcccaccatggccctgaccgtgggcgtgggcaccgtgatggacgccagagaggtgatgatcctgatcaccggcgcccacaaggccttcgccctgtacaaggccatcgaggagggcgtgaaccacatgtggaccgtgagcgccttccagcagcaccccagaaccgtgttcgtgtgcgacgaggacgccaccctggagctgaaggtgaagaccgtgaagtacttcaagggcctgatgctggtgcacaacaagctggtggaccccctgtacagcatcaaggagaaggagaccgagaagagccagagcagcaagaagccctacagcgactag

SEQ ID NO: 83034 - DNA, 870 bp, synthetic construct; identical to SEQ ID NO: 83032
  misc_feature 1..870: note = Description of Artificial Sequence: Synthetic coding sequence
  source 1..870: mol_type = other DNA

SEQ ID NO: 83035 - DNA, 417 bp, synthetic construct
  misc_feature 1..417: note = Description of Artificial Sequence: Synthetic coding sequence
  source 1..417: mol_type = other DNA
atgaagctgatcatcctggagcactacagccaggccagcgagtgggccgccaagtacatcagaaacagaatcatccagttcaaccccggccccgagaagtacttcaccctgggcctgcccaccggcagcacccccctgggctgctacaagaagctgatcgagtactacaagaacggcgacctgagcttcaagtacgtgaagaccttcaacatggacgagtacgtgggcctgcccagagaccaccccgagagctaccacagcttcatgtggaacaacttcttcaagcacatcgacatccaccccgagaacacccacatcctggacggcaacgccgtggacctgcaggccgagtgcgacgccttcgaggagaagatcaaggccgccggcggcatcgagctgttcgtgggcggcatctag

SEQ ID NO: 83036 - DNA, 870 bp, synthetic construct; identical to SEQ ID NO: 83032
  misc_feature 1..870: note = Description of Artificial Sequence: Synthetic coding sequence
  source 1..870: mol_type = other DNA

SEQ ID NO: 83037 - DNA, 90 bp, synthetic construct
  misc_feature 1..90: note = Description of Artificial Sequence: Synthetic coding sequence
  source 1..90: mol_type = other DNA
atgaagctgatcatcctggagcactacagccaggccagcgagtgggccgccaagtacatcagaaacagaatcatccagttcaacccctag

SEQ ID NO: 83038 - DNA, 870 bp, synthetic construct; identical to SEQ ID NO: 83032
  misc_feature 1..870: note = Description of Artificial Sequence: Synthetic coding sequence
  source 1..870: mol_type = other DNA

SEQ ID NO: 83039 - DNA, 486 bp, synthetic construct
  misc_feature 1..486: note = Description of Artificial Sequence: Synthetic coding sequence
  source 1..486: mol_type = other DNA
atgaagctgatcatcctggagcactacagccaggccagcgagtgggccgccaagtacatcagaaacagaatcatccagttcaaccccggccccgagaagtacttcaccctgggcctgcccaccggcagcacccccctgggctgctacaagaagctgatcgagtactacaagaacggcgacctgagcttcaagtacgtgaagaccttcaacatggacgagtacgtgggcctgcccagagaccaccccgagagctaccacagcttcatgtggaacaacttcttcaagcacatcgacatccaccccgagaacacccacatcctggacggcaacgccgtggacctgcaggccgagtgcgacgccttcgaggagaagatcaaggccgccggcggcatcgagctgttcgtgggcggcatcggccccgacggccacatcgccttcaacgagcccggcagcagcctggtgagcagaaccagagtgaagacctag

SEQ ID NO: 83040 - DNA, 639 bp, synthetic construct
  misc_feature 1..639: note = Description of Artificial Sequence: Synthetic coding sequence
  source 1..639: mol_type = other DNA
atgaagctgatcatcctggagcactacagccaggccagcgagtgggccgccaagtacatcagaaacagaatcatccagttcaaccccggccccgagaagtacttcaccctgggcctgcccaccggcagcacccccctgggctgctacaagaagctgatcgagtactacaagaacggcgacctgagcttcaagtacgtgaagaccttcaacgagcccggcagcagcctggtgagcagaaccagagtgaagaccctggccatggacaccatcctggccaacgccagattcttcgacggcgagctgaccaaggtgcccaccatggccctgaccgtgggcgtgggcaccgtgatggacgccagagaggtgatgatcctgatcaccggcgcccacaaggccttcgccctgtacaaggccatcgaggagggcgtgaaccacatgtggaccgtgagcgccttccagcagcaccccagaaccgtgttcgtgtgcgacgaggacgccaccctggagctgaaggtgaagaccgtgaagtacttcaagggcctgatgctggtgcacaacaagctggtggaccccctgtacagcatcaaggagaaggagaccgagaagagccagagcagcaagaagccctacagcgactag

SEQ ID NO: 83041 - DNA, 831 bp, synthetic construct
  misc_feature 1..831: note = Description of Artificial Sequence: Synthetic coding sequence
  source 1..831: mol_type = other DNA
atgagactggtgatcctggacaactacgacctggccagcgagtgggccgccaagtacatctgcaacagaatcatccagttcaagcccggccaggacagatacttcaccctgggcctgcccaccggcagcacccccctgggctgctacaagaagctgatcgagtaccacaagaacggccacctgagcttcaagtacgtgaagaccttcaacatggacgagtacgtgggcctgcccagaaaccaccccgagagctaccacagctacatgtggaacaacttcttcaagcacatcgacatcgaccccaacaacgcccacatcctggacggcaacgccgccgacctgcaggccgagtgcgacgccttcgagaacaagatcaaggaggccggcggcatcgacctgttcgtgggcggcatcggccccgacggccacatcgccttcaacgagcccggcagcagcctggtgagcagaaccagactgaagaccctggccatggacaccatcctggccaacgccaagtacttcgacggcgacctgagcaaggtgcccaccatggccctgaccgtgggcgtgggcaccgtgatggacgccagagaggtgatgatcctgatcaccggcgcccacaaggccttcgccctgtacaaggccatcgaggagggcgtgaaccacatgtggaccgtgagcgccttccagcagcaccccagaaccatcttcgtgtgcgacgaggacgccaccctggagctgagagtgaagaccgtgaagtacttcaagggcctgatgcacgtgcacaacaagctggtggaccccctgttcagcatgaaggacggcaactag

SEQ ID NO: 83042 - DNA, 780 bp, synthetic construct
  misc_feature 1..780: note = Description of Artificial Sequence: Synthetic coding sequence
  source 1..780: mol_type = other DNA
atgagactggtgatcctggacaactacgacctggccagcgagtgggccgccaagtacatctgcaacagaatcatccagttcaagcccggccaggacagatacttcaccctgggcctgcccaccggcagcacccccctgggctgctacaagaagctgatcgagtaccacaagaacggccacctgagcttcaagtacgtgaagaccttcaacatggacgagtacgtgggcctgcccagaaaccaccccgagagctaccacagctacatgtggaacaacttcttcaagcacatcgacatcgaccccaacaacgcccacatcctggacggcaacgccgccgacctgcaggccgagtgcgacgccttcgagaacaagatcaaggaggccggcggcatcgacctgttcgtgggcggcatcggccccgacggccacatcgccttcaacgagcccggcagcagcctggtgagcagaaccagactgaagaccctggccatggacaccatcctggccaacgccaagtacttcgacggcgacctgagcaaggtgcccaccatggccctgaccgtgggcgtgggcaccgtgatggacgccagagaggtgatgatcctgatcaccggcgcccacaaggccttcgccctgtacaaggccatcgaggagggcgtgaaccacatgtggaccgtgagcgccttccagcagcaccccagaaccatcttcgtgtgcgacgaggacgccaccctggagctgagagtgaagaccgtgaagtacttcaagggcgagcactag

SEQ ID NO: 83043 - DNA, 729 bp, synthetic construct
  misc_feature 1..729: note = Description of Artificial Sequence: Synthetic coding sequence
  source 1..729: mol_type = other DNA
atgagactggtgatcctggacaactacgacctggccagcgagtgggccgccaagtacatctgcaacagaatcatccagttcaagcccggccaggacagatacttcaccctgggcctgcccaccggcctgcccagaaaccaccccgagagctaccacagctacatgtggaacaacttcttcaagcacatcgacatcgaccccaacaacgcccacatcctggacggcaacgccgccgacctgcaggccgagtgcgacgccttcgagaacaagatcaaggaggccggcggcatcgacctgttcgtgggcggcatcggccccgacggccacatcgccttcaacgagcccggcagcagcctggtgagcagaaccagactgaagaccctggccatggacaccatcctggccaacgccaagtacttcgacggcgacctgagcaaggtgcccaccatggccctgaccgtgggcgtgggcaccgtgatggacgccagagaggtgatgatcctgatcaccggcgcccacaaggccttcgccctgtacaaggccatcgaggagggcgtgaaccacatgtggaccgtgagcgccttccagcagcaccccagaaccatcttcgtgtgcgacgaggacgccaccctggagctgagagtgaagaccgtgaagtacttcaagggcctgatgcacgtgcacaacaagctggtggaccccctgttcagcatgaaggacggcaactag

SEQ ID NO: 83044 - DNA, 1287 bp, synthetic construct
  misc_feature 1..1287: note = Description of Artificial Sequence: Synthetic coding sequence
  source 1..1287: mol_type = other DNA
atgctgagaaccctgctgagaagaagactgttcagctaccccaccaagtactacttcatggtgctggtgctgagcctgatcaccttcagcgtgctgagaatccaccagaagcccgagttcgtgagcgtgagacacctggagctggccggcgagaaccccagcagcgacatcaactgcaccaaggtgctgcagggcgacgtgaacgagatccagaaggtgaagctggagatcctgaccgtgaagttcaagaagagacccagatggacccccgacgactacatcaacatgaccagcgactgcagcagcttcatcaagagaagaaagtacatcgtggagcccctgagcaaggaggaggccgagttccccatcgcctacagcatcgtggtgcaccacaagatcgagatgctggacagactgctgagagccatctacatgccccagaacttctactgcatccacgtggacaccaagagcgaggacagctacctggccgccgtgatgggcatcgccagctgcttcagcaacgtgttcgtggccagcagactggagagcgtggtgtacgccagctggagcagagtgcaggccgacctgaactgcatgaaggacctgtacgccatgagcgccaactggaagtacctgatcaacctgtgcggcatggacttccccatcaagaccaacctggagatcgtgagaaagctgaagctgctgatgggcgagaacaacctggagaccgagagaatgcccagccacaaggaggagagatggaagaagagatacgaggtggtgaacggcaagctgaccaacaccggcaccgtgaagatgctgccccccctggagacccccctgttcagcggcagcgcctacttcgtggtgagcagagagtacgtgggctacgtgctgcagaacgagaagatccagaagctgatggagtgggcccaggacacctacagccccgacgagtacctgtgggccaccatccagagaatccccgaggtgcccggcagcctgcccgccagccacaagtacgacctgagcgacatgcaggccgtggccagattcgtgaagtggcagtacttcgagggcgacgtgagcaagggcgccccctaccccccctgcgacggcgtgcacgtgagaagcgtgtgcatcttcggcgccggcgacctgaactggatgctgagaaagcaccacctgttcgccaacaagttcgacgtggacgtggacctgttcgccatccagtgcctggacgagcacctgagacacaaggccctggagaccctgaagcactag

SEQ ID NO: 83045 - DNA, 1287 bp, synthetic construct; identical to SEQ ID NO: 83044
  misc_feature 1..1287: note = Description of Artificial Sequence: Synthetic coding sequence
  source 1..1287: mol_type = other DNA

SEQ ID NO: 83046 - DNA, 1287 bp, synthetic construct; identical to SEQ ID NO: 83044
  misc_feature 1..1287: note = Description of Artificial Sequence: Synthetic coding sequence
  source 1..1287: mol_type = other DNA

SEQ ID NO: 83047 - DNA, 1287 bp, synthetic construct; identical to SEQ ID NO: 83044
  misc_feature 1..1287: note = Description of Artificial Sequence: Synthetic coding sequence
  source 1..1287: mol_type = other DNA

SEQ ID NO: 83048 - DNA, 1209 bp, synthetic construct
  misc_feature 1..1209: note = Description of Artificial Sequence: Synthetic coding sequence
  source 1..1209: mol_type = other DNA
atgaacttctggagatactgcttcttcgccttcaccctgctgagcgtggtgatcttcgtgagattctacagcagccagctgagcccccccaagagctacgagaagctgaacagcagcagcgagagatacttcagaaagaccgcctgcaaccacgccctggagaagatgcccgtgttcctgtgggagaacatcctgcccagccccctgagaagcgtgccctgcaaggactacctgacccagaaccactacatcaccagccccctgagcgaggaggaggccgccttccccctggcctacgtgatggtgatccacaaggacttcgacaccttcgagagactgttcagagccatctacatgccccagaacgtgtactgcgtgcacgtggacgagaaggcccccgccgagtacaaggagagcgtgagacagctgctgagctgcttccagaacgccttcatcgccagcaagaccgagagcgtggtgtacgccggcatcagcagactgcaggccgacctgaactgcctgaaggacctggtggccagcgaggtgccctggaagtacgtgatcaacacctgcggccaggacttccccctgaagaccaacagagagatcgtgcagcacctgaagggcttcaagggcaagaacatcacccccggcgtgctgccccccgaccacgccatcaagagaaccaagtacgtgcaccaggagcacaccgacaagggcggcttcttcgtgaagaacaccaacatcctgaagaccagccccccccaccagctgaccatctacttcggcaccgcctacgtggccctgaccagagacttcgtggacttcgtgctgagagaccagagagccatcgacctgctgcagtggagcaaggacacctacagccccgacgagcacttctgggtgaccctgaacagagtgagcggcgtgcccggcagcatgcccaacgccagctggaccggcaacctgagagccatcaagtggagcgacatggaggacagacacggcggctgccacggccactacgtgcacggcatctgcatctacggcaacggcgacctgaagtggctggtgaacagccccagcctgttcgccaacaagttcgagctgaacacctaccccctgaccgtggagtgcctggagctgagacacagagagagaaccctgaaccagagcgagaccgccatccagcccagctggtacttctag

SEQ ID NO: 83049 - DNA, 1203 bp, synthetic construct
  misc_feature 1..1203: note = Description of Artificial Sequence: Synthetic coding sequence
  source 1..1203: mol_type = other DNA
atgcccctgagcatgagatacctgttcatcatcagcgtgagcagcgtgatcatcttcatcgtgttcagcgtgttcaacttcggcggcgaccccagcttccagagactgaacatcagcgaccccctgagactgacccaggtgtgcaccagcttcatcaacggcaagaccagattcctgtggaagaacaagctgatgatccacgagaagagcagctgcaaggagtacctgacccagagccactacatcaccgcccccctgagcaaggaggaggccgacttccccctggcctacatcatggtgatccaccaccacttcgacaccttcgccagactgttcagagccatctacatgccccagaacatctactgcgtgcacgtggacgagaaggccaccaccgagttcaaggacgccgtggagcagctgctgagctgcttccccaacgccttcctggccagcaagatggagcccgtggtgtacggcggcatcagcagactgcaggccgacctgaactgcatcagagacctgagcgccttcgaggtgagctggaagtacgtgatcaacacctgcggccaggacttccccctgaagaccaacaaggagatcgtgcagtacctgaagggcttcaagggcaagaacatcacccccggcgtgctgccccccgcccacgccatcggcagaaccaagtacgtgcaccaggagcacctgggcaaggagctgagctacgtgatcagaaccaccgccctgaagcccccccccccccacaacctgaccatctacttcggcagcgcctacgtggccctgagcagagagttcgccaacttcgtgctgcacgaccccagagccgtggacctgctgcagtggagcaaggacaccttcagccccgacgagcacttctgggtgaccctgaacagaatccccggcgtgcccggcagcatgcccaacgccagctggaccggcaacctgagagccatcaagtggagcgacatggaggacagacacggcggctgccacggccactacgtgcacggcatctgcatctacggcaacggcgacctgaagtggctggtgaacagccccagcctgttcgccaacaagttcgagctgaacacctaccccctgaccgtggagtgcctggagctgagacacagagagagaaccctgaaccagagcgagaccgccatccagcccagctggtacttctag

SEQ ID NO: 83050 - DNA, 1209 bp, synthetic construct
  misc_feature 1..1209: note = Description of Artificial Sequence: Synthetic coding sequence
  source 1..1209: mol_type = other DNA
atgatgggcagctggaagcactgcctgttcagcgccagcctgatcagcgccctgatcttcgtgttcgtgtacaacaccgagctgtgggagaacaagagattcctgagagccgccctgagcaacgccagcctgctggccgaggcctgccaccagatcttcgagggcaaggtgttctaccccaccgagaacgccctgaagaccaccctggacgaggccacctgctacgagtacatggtgagaagccactacgtgaccgagaccctgagcgaggaggaggccggcttccccctggcctacaccgtgaccatccacaaggacttcggcaccttcgagagactgttcagagccatctacatgccccagaacgtgtactgcgtgcacctggaccagaaggccaccgacgccttcaagggcgccgtgaagcagctgctgagctgcttccccaacgccttcctggccagcaagaaggagagcgtggtgtacggcggcatcagcagactgcaggccgacctgaactgcctggaggacctggtggccagcgaggtgccctggaagtacgtgatcaacacctgcggccaggacttccccctgaagaccaacagagagatcgtgcagtacctgaagggcttcaagggcaagaacatcacccccggcgtgctgccccccgaccacgccgtgggcagaaccaagtacgtgcaccaggagctgctgaaccacaagaacagctacgtgatcaagaccaccaagctgaagaccccccccccccacgacatggtgatctacttcggcaccgcctacgtggccctgaccagagacttcgccaacttcgtgctgcaggaccagctggccctggacctgctgagctggagcaaggacacctacagccccgacgagcacttctgggtgaccctgaacagaatccccggcgtgcccggcagcatgcccaacgccagctggaccggcaacctgagagccatcaagtggagcgacatggaggacagacacggcggctgccacggccactacgtgcacggcatctgcatctacggcaacggcgacctgaagtggctggtgaacagccccagcctgttcgccaacaagttcgagctgaacacctaccccctgaccgtggagtgcctggagctgagacacagagagagaaccctgaaccagagcgagaccgccatccagcccagctggtacttctag

SEQ ID NO: 83051 - DNA, 1209 bp, synthetic construct; identical to SEQ ID NO: 83050
  misc_feature 1..1209: note = Description of Artificial Sequence: Synthetic coding sequence
  source 1..1209: mol_type = other DNA

SEQ ID NO: 83052 - DNA, 1317 bp, synthetic construct
  misc_feature 1..1317: note = Description of Artificial Sequence: Synthetic coding sequence
  source 1..1317: mol_type = other DNA
atggtgcagtggaagagactgtgccagctgcactacctgtgggccctgggctgctacatgctgctggccaccgtggccctgaagctgagcttcagactgaagtgcgacagcgaccacctgggcctggagagcagagagagccagagccagtactgcagaaacatcctgtacaacttcctgaagctgcccgccaagagaagcatcaactgcagcggcgtgaccagaggcgaccaggaggccgtgctgcaggccatcctgaacaacctggaggtgaagaagaagagagagcccttcaccgacacccactacctgagcctgaccagagactgcgagcacttcaaggccgagagaaagttcatccagttccccctgagcaaggaggaggtggagttccccatcgcctacagcatggtgatccacgagaagatcgagaacttcgagagactgctgagagccgtgtacgccccccagaacatctactgcgtgcacgtggacgagaagagccccgagaccttcaaggaggccgtgaaggccatcatcagctgcttccccaacgtgttcatcgccagcaagctggtgagagtggtgtacgccagctggagcagagtgcaggccgacctgaactgcatggaggacctgctgcagagcagcgtgccctggaagtacttcctgaacacctgcggcaccgacttccccatcaagagcaacgccgagatggtgcaggccctgaagatgctgaacggcagaaacagcatggagagcgaggtgccccccaagcacaaggagaccagatggaagtaccacttcgaggtggtgagagacaccctgcacctgaccaacaagaagaaggacccccccccctacaacctgaccatgttcaccggcaacgcctacatcgtggccagcagagacttcgtgcagcacgtgctgaagaaccccaagagccagcagctgatcgagtgggtgaaggacacctacagccccgacgagcacctgtgggccaccctgcagagagccagatggatgcccggcagcgtgcccaaccaccccaagtacgacatcagcgacatgaccagcatcgccagactggtgaagtggcagggccacgagggcgacatcgacaagggcgccccctacgccccctgcagcggcatccaccagagagccatctgcgtgtacggcgccggcgacctgaactggatgctgcagaaccaccacctgctggccaacaagttcgaccccaaggtggacgacaacgccctgcagtgcctggaggagtacctgagatacaaggccatctacggcaccgagctgtag

SEQ ID NO: 83053 - DNA, 264 bp, synthetic construct
  misc_feature 1..264: note = Description of Artificial Sequence: Synthetic coding sequence
  source 1..264: mol_type = other DNA
atggtgcagtggaagagactgtgccagctgcactacctgtgggccctgggctgctacatgctgctggccaccgtggccctgaagctgagcttcagactgaagtgcgacagcgaccacctgggcctggagagcagagagagccagagccagtactgcagaaacatcctgtacaacttcctgaagctgcccgccaagagaagcatcaactgcagcggcgtgaccagaggcgaccaggaggccgtgctgcaggccatcctgaactag

SEQ ID NO: 83054 - DNA, 462 bp, synthetic construct
  misc_feature 1..462: note = Description of Artificial Sequence: Synthetic coding sequence
  source 1..462: mol_type = other DNA
atggtgcagtggaagagactgtgccagctgcactacctgtgggccctgggctgctacatgctgctggccaccgtggccctgaagctgagcttcagactgaagtgcgacagcgaccacctgggcctggagagcagagagagccagagccagtactgcagaaacatcctgtacaacttcctgaagctgcccgccaagagaagcatcaactgcagcggcgtgaccagaggcgaccaggaggccgtgctgcaggccatcctgaacaacctggaggtgaagaagaagagagagcccttcaccgacacccactacctgagcctgaccagagactgcgagcacttcaaggccgagagaaagttcatccagttccccctgagcaaggaggaggtggagttccccatcgcctacagcatggtgatccacgagaagatcgagaacttcgagagactgctgagagccgtgtag

SEQ ID NO: 83055 - DNA, 162 bp, synthetic construct
  misc_feature 1..162: note = Description of Artificial Sequence: Synthetic coding sequence
  source 1..162: mol_type = other DNA
atggtgcagtggaagagactgtgccagctgcactacctgtgggccctgggctgctacatgctgctggccaccgtggccctgaagctgagcttcagactgaagtgcgacagcgaccacctgggcctggagagcagagagagccagagccagtactgcagatag

SEQ ID NO: 83056 - DNA, 1317 bp, synthetic construct; identical to SEQ ID NO: 83052
  misc_feature 1..1317: note = Description of Artificial Sequence: Synthetic coding sequence
  source 1..1317: mol_type = other DNA

SEQ ID NO: 83057 - DNA, 1041 bp, synthetic construct
  misc_feature 1..1041: note = Description of Artificial Sequence: Synthetic coding sequence
  source 1..1041: mol_type = other DNA
atggagagcaccctgggcgccggcatcgtgatcgccgaggccctgcagaaccagctggcctggctggagaacgtgtggctgtggatcaccttcctgggcgaccccaagatcctgttcctgttctacttccccgccgcctactacgccagcagaagagtgggcatcgccgtgctgtggatcagcctgatcaccgagtggctgaacctgatcttcaagtggttcctgttcggcgacagacccttctggtgggtgcacgagagcggctactacagccaggcccccgcccaggtgcaccagttccccagcagctgcgagaccggccccggcagccccagcggccactgcatgatcaccggcgccgccctgtggcccatcatgaccgccctgagcagccaggtggccaccagagccagaagcagatgggtgagagtgatgcccagcctggcctactgcaccttcctgctggccgtgggcctgagcagaatcttcatcctggcccacttcccccaccaggtgctggccggcctgatcaccggcgccgtgctgggctggctgatgacccccagagtgcccatggagagagagctgagcttctacggcctgaccgccctggccctgatgctgggcaccagcctgatctactggaccctgttcaccctgggcctggacctgagctggagcatcagcctggccttcaagtggtgcgagagacccgagtggatccacgtggacagcagacccttcgccagcctgagcagagacagcggcgccgccctgggcctgggcatcgccctgcacagcccctgctacgcccaggtgagaagagcccagctgggcaacggccagaagatcgcctgcctggtgctggccatgggcctgctgggccccctggactggctgggccaccccccccagatcagcctgttctacatcttcaacttcctgaagtacaccctgtggccctgcctggtgctggccctggtgccctgggccgtgcacatgttcagcgcccaggaggccccccccatccacagcagctag

SEQ ID NO: 83058 - DNA, 465 bp, synthetic construct
  misc_feature 1..465: note = Description of Artificial Sequence: Synthetic coding sequence
  source 1..465: mol_type = other DNA
atggacttcctgcacagaaacggcgtgctgatcatccagcacctgcagaaggactacagagcctactacaccttcctgaacttcatgagcaacgtgggcgaccccagaaacatcttcttcatctacttccccctgtgcttccagttcaaccagaccgtgggcaccaagatgatctgggtggccgtgatcggcgactggctgaacctgatcttcaagtggatcctgttcggccacagaccctactggtgggtgcaggagacccagatctaccccaaccacagcagcccctgcctggagcagttccccaccacctgcgagaccggccccggcagccccagcggccacgccatgggcgccagctgcgtgtggtacgtgatggtgaccgccgccctgagccacaccgtgtgcggcatggacaagttcagcatcaccctgcacagacacgccggcggcagaggcctgtag

SEQ ID NO: 83059 - DNA, 1068 bp, synthetic construct
  misc_feature 1..1068: note = Description of Artificial Sequence: Synthetic coding sequence
  source 1..1068: mol_type = other DNA
atggacttcctgcacagaaacggcgtgctgatcatccagcacctgcagaaggactacagagcctactacaccttcctgaacttcatgagcaacgtgggcgaccccagaaacatcttcttcatctacttccccctgtgcttccagttcaaccagaccgtgggcaccaagatgatctgggtggccgtgatcggcgactggctgaacctgatcttcaagtggatcctgttcggccacagaccctactggtgggtgcaggagacccagatctaccccaaccacagcagcccctgcctggagcagttccccaccacctgcgagaccggccccggcagccccagcggccacgccatgggcgccagctgcgtgtggtacgtgatggtgaccgccgccctgagccacaccgtgtgcggcatggacaagttcagcatcaccctgcacagactgacctggagcttcctgtggagcgtgttctggctgatccagatcagcgtgtgcatcagcagagtgttcatcgccacccacttcccccaccaggtgatcctgggcgtgatcggcggcatgctggtggccgaggccttcgagcacacccccggcatccagaccgccagcctgggcacctacctgaagaccaacctgttcctgttcctgttcgccgtgggcttctacctgctgctgagagtgctgaacatcgacctgctgtggagcgtgcccatcgccaagaagtggtgcgccaaccccgactggatccacatcgacaccacccccttcgccggcctggtgagaaacctgggcgtgctgttcggcctgggcttcgccatcaacagcgagatgttcctgctgagctgcagaggcggcaacaactacaccctgagcttcagactgctgtgcgccctgaccagcctgaccatcctgcagctgtaccacttcctgcagatccccacccacgaggagcacctgttctacgtgctgagcttctgcaagagcgccagcatccccctgaccgtggtggccttcatcccctacagcgtgcacatgctgatgaagcagagcggcaagaagagccagtag

SEQ ID NO: 83060 - DNA, 1677 bp, synthetic construct
  misc_feature 1..1677: note = Description of Artificial Sequence: Synthetic coding sequence
  source 1..1677: mol_type = other DNA
atggccgccctgaccagagacccccagttccagaagctgcagcagtggtacagagagcacagaagcgagctgaacctgagaagactgttcgacgccaacaaggacagattcaaccacttcagcctgaccctgaacaccaaccacggccacatcctggtggactacagcaagaacctggtgaccgaggacgtgatgagaatgctggtggacctggccaagagcagaggcgtggaggccgccagagagagaatgttcaacggcgagaagatcaactacaccgagggcagagccgtgctgcacgtggccctgagaaacagaagcaacacccccatcctggtggacggcaaggacgtgatgcccgaggtgaacaaggtgctggacaagatgaagagcttctgccagagagtgagaagcggcgactggaagggctacaccggcaagaccatcaccgacgtgatcaacatcggcatcggcggcagcgacctgggccccctgatggtgaccgaggccctgaagccctacagcagcggcggccccagagtgtggtacgtgagcaacatcgacggcacccacatcgccaagaccctggcccagctgaaccccgagagcagcctgttcatcatcgccagcaagaccttcaccacccaggagaccatcaccaacgccgagaccgccaaggagtggttcctgcaggccgccaaggaccccagcgccgtggccaagcacttcgtggccctgagcaccaacaccaccaaggtgaaggagttcggcatcgacccccagaacatgttcgagttctgggactgggtgggcggcagatacagcctgtggagcgccatcggcctgagcatcgccctgcacgtgggcttcgacaacttcgagcagctgctgagcggcgcccactggatggaccagcacttcagaaccacccccctggagaagaacgcccccgtgctgctggccctgctgggcatctggtacatcaactgcttcggctgcgagacccacgccatgctgccctacgaccagtacctgcacagattcgccgcctacttccagcagggcgacatggagagcaacggcaagtacatcaccaagagcggcaccagagtggaccaccagaccggccccatcgtgtggggcgagcccggcaccaacggccagcacgccttctaccagctgatccaccagggcaccaagatgatcccctgcgacttcctgatccccgtgcagacccagcaccccatcagaaagggcctgcaccacaagatcctgctggccaacttcctggcccagaccgaggccctgatgagaggcaagagcaccgaggaggccagaaaggagctgcaggccgccggcaagagccccgaggacctggagagactgctgccccacaaggtgttcgagggcaacagacccaccaacagcatcgtgttcaccaagctgacccccttcatgctgggcgccctggtggccatgtacgagcacaagatcttcgtgcagggcatcatctgggacatcaacagcttcgaccagtggggcgtggagctgggcaagcagctggccaagaagatcgagcccgagctggacggcagcgcccaggtgaccagccacgacgccagcaccaacggcctgatcaacttcatcaagcagcagagagaggccagagtgcagtag

SEQ ID NO: 83061 - DNA, 1563 bp, synthetic construct
  misc_feature 1..1563: note = Description of Artificial Sequence: Synthetic coding sequence
  source 1..1563: mol_type = other DNA
agcagacacggcagaagccaccccggcccccccgtgcccgaggccgccgccatggtgcccagagcccccctgagagccgagcccgccccccccctgagatgccagcagggccccctgcagcccctgcaggtgagagccggcagaagaagaggcctgcccagagccgcccccggcaccggccacgccggcctgggcagcggcggcggcggcagcggcgccagaggcccccagagccccaccagcagacccagaaccggcgcccaggccgagagcgccctgagaccctggagcctgctgggcgtgagaagctggggcctggccgccagccccggcgtgagcgcccccggcctgctgagatacgaggagaagagagcccccccctggggccacttccccagcagcagcccctgcagcagcggccacctgagcagaggcagcttcagaagctgcgaggagagaccctggctgacccagcaggccggcaagggctgccccttccccagcgcccccggccacatgagcctgggcgccagcgccggcagagccgccagagccggcgtgttcgagggcgccggctggaaggacggcgacgtgggcagagacagctgcagaagacacctgtgcaccaccggcaagtgggagggcgtgttcgagcagatcatgggcggcagcgccgccaagggcgccctgatcaccgacaccggcggcggcggcggcggcgagagactgtggctgagagccagaagacccgacggccacccctgccacctggacggctgcctgagcaacctgagacagaaggtggaggccctgggcagaggcggcccccccctgcagagcggcctgctgatccagggcctgcccgccagcaccgtgtgcgaggacggcttcttcctgtgggccgccgtggccgaccaccccggcggccccgccggcgacagacaccaccactgcgccggctggcccagacccctgtggggcgtgggccagggcggctgcttcttctgggagcagctgctgctgagagcctggctgcccgccagagagaccagagtgtggagcgccgccagccccagcttctgcagcctgaccctgaacaccaaccacggccacatcctggtggactacagcaagaacctggtgaccgaggacgtgatgagaatgctggtggacctggccaagagcagaggcgtggaggccgccagagagagaatgttcaacggcgagaagatcaactacaccgaggtgagcagaccccacatccccagcggcgccagcttcctgcccttcggcgtgtacctgaccgtgagcagaatcaccctgtgcctgcaccccttcagctgggccatgctgctgctgaacgagggccccgagggcctgttcccccccgcctgcagcagagccctgggctgcgccttccacaagatcggcctggtgagcagcctggagtggttccccgtgagcgcctgggaggagcacatcagctacccccagggcgagttcctgaaggccgacatcttcctggagaagctgaccctgatctacccccagtgcaagttctag

SEQ ID NO: 83062 - DNA, 1710 bp, synthetic construct
  misc_feature 1..1710: note = Description of Artificial Sequence: Synthetic coding sequence
  source 1..1710: mol_type = other DNA
atggtggccctgtgcagcctgcagcacctgggcagcagcgaccccagagccctgcccaccctgcccaccgccaccagcggccagagacccgccaagagaagaagaaagagccccgccatggccgccctgaccagagacccccagttccagaagctgcagcagtggtacagagagcacagaagcgagctgaacctgagaagactgttcgacgccaacaaggacagattcaaccacttcagcctgaccctgaacaccaaccacggccacatcctggtggactacagcaagaacctggtgaccgaggacgtgatgagaatgctggtggacctggccaagagcagaggcgtggaggccgccagagagagaatgttcaacggcgagaagatcaactacaccgagggcagagccgtgctgcacgtggccctgagaaacagaagcaacacccccatcctggtggacggcaaggacgtgatgcccgaggtgaacaaggtgctggacaagatgaagagcttctgccagggccccctgatggtgaccgaggccctgaagccctacagcagcggcggccccagagtgtggtacgtgagcaacatcgacggcacccacatcgccaagaccctggcccagctgaaccccgagagcagcctgttcatcatcgccagcaagaccttcaccacccaggagaccatcaccaacgccgagaccgccaaggagtggttcctgcaggccgccaaggaccccagcgccgtggccaagcacttcgtggccctgagcaccaacaccaccaaggtgaaggagttcggcatcgacccccagaacatgttcgagttctgggactgggtgggcggcagatacagcctgtggagcgccatcggcctgagcatcgccctgcacgtgggcttcgacaacttcgagcagctgctgagcggcgcccactggatggaccagcacttcagaaccacccccctggagaagaacgcccccgtgctgctggccctgctgggcatctggtacatcaactgcttcggctgcgagacccacgccatgctgccctacgaccagtacctgcacagattcgccgcctacttccagcagggcgacatggagagcaacggcaagtacatcaccaagagcggcaccagagtggaccaccagaccggccccatcgtgtggggcgagcccggcaccaacggccagcacgccttctaccagctgatccaccagggcaccaagatgatcccctgcgacttcctgatccccgtgcagacccagcaccccatcagaaagggcctgcaccacaagatcctgctggccaacttcctggcccagaccgaggccctgatgagaggcaagagcaccgaggaggccagaaaggagctgcaggccgccggcaagagccccgaggacctggagagactgctgccccacaaggtgttcgagggcaacagacccaccaacagcatcgtgttcaccaagctgacccccttcatgctgggcgccctggtggccatgtacgagcacaagatcttcgtgcagggcatcatctgggacatcaacagcttcgaccagtggggcgtggagctgggcaagcagctggccaagaagatcgagcccgagctggacggcagcgcccaggtgaccagccacgacgccagcaccaacggcctgatcaacttcatcaagcagcagagagaggccagagtgcagtag

SEQ ID NO: 83063 - DNA, 2901 bp, synthetic construct
  misc_feature 1..2901: note = Description of Artificial Sequence: Synthetic coding sequence
  source 1..2901: mol_type = other DNA
atggccgccgtggccgccgtggccgccagaagaagaagaagctgggccagcctggtgctggccttcctgggcgtgtgcctgggcatcaccctggccgtggacagaagcaacttcaagacctgcgaggagagcagcttctgcaagagacagagaagcatcagacccggcctgagcccctacagagccctgctggacagcctgcagctgggccccgacagcctgaccgtgcacctgatccacgaggtgaccaaggtgctgctggtgctggagctgcagggcctgcagaagaacatgaccagattcagaatcgacgagctggagcccagaagacccagatacagagtgcccgacgtgctggtggccgacccccccatcgccagactgagcgtgagcggcagagacgagaacagcgtggagctgaccatggccgagggcccctacaagatcatcctgaccgccagacccttcagactggacctgctggaggacagaagcctgctgctgagcgtgaacgccagaggcctgctggagttcgagcaccagagagcccccagagtgagcttcagcgacaaggtgaacctgaccctgggcagcatctgggacaagatcaagaacctgttcagcagacagggcagcaaggaccccgccgagggcgacggcgcccagcccgaggagacccccagagacggcgacaagcccgaggagacccagggcaaggccgagaaggacgagcccggcgcctgggaggagaccttcaagacccacagcgacagcaagccctacggccccatgagcgtgggcctggacttcagcctgcccggcatggagcacgtgtacggcatccccgagcacgccgacaacctgagactgaaggtgaccgagggcggcgagccctacagactgtacaacctggacgtgttccagtacgagctgtacaaccccatggccctgtacggcagcgtgcccgtgctgctggcccacaacccccacagagacctgggcatcttctggctgaacgccgccgagacctgggtggacatcagcagcaacaccgccggcaagaccctgttcggcaagatgatggactacctgcagggcagcggcgagaccccccagaccgacgtgagatggatgagcgagaccggcatcatcgacgtgttcctgctgctgggccccagcatcagcgacgtgttcagacagtacgccagcctgaccggcacccaggccctgccccccctgttcagcctgggctaccaccagagcagatggaactacagagacgaggccgacgtgctggaggtggaccagggcttcgacgaccacaacctgccctgcgacgtgatctggctggacatcgagcacgccgacggcaagagatacttcacctgggaccccagcagattcccccagcccagaaccatgctggagagactggccagcaagagaagaaagctggtggccatcgtggacccccacatcaaggtggacagcggctacagagtgcacgaggagctgagaaacctgggcctgtacgtgaagaccagagacggcagcgactacgagggctggtgctggcccggcagcgccggctaccccgacttcaccaaccccaccatgagagcctggtgggccaacatgttcagctacgacaactacgagggcagcgcccccaacctgttcgtgtggaacgacatgaacgagcccagcgtgttcaacggccccgaggtgaccatgctgaaggacgcccagcactacggcggctgggagcacagagacgtgcacaacatctacggcctgtacgtgcacatggccaccgccgacggcctgagacagagaagcggcggcatggagagacccttcgtgctggccagagccttcttcgccggcagccagagattcggcgccgtgtggaccggcgacaacaccgccgagtgggaccacctgaagatcagcatccccatgtgcctgagcctgggcctggtgggcctgagcttctgcggcgccgacgtgggcggcttcttcaagaaccccgagcccgagctgctggtgagatggtaccagatgggcgcctaccagcccttcttcagagcccacgcccacctggacaccggcagaagagagccctggctgctgcccagccagcacaacgacatcatcagagacgccctgggccagagatacagcctgctgcccttctggtacaccctgctgtaccaggcccacagagagggcatccccgtgatgagacccctgtgggtgcagtacccccaggacgtgaccaccttcaacatcgacgaccagtacctgctgggcgacgccctgctggtgcaccccgtgagcgacagcggcgcccacggcgtgcaggtgtacctgcccggccagggcgaggtgtggtacgacatccagagctaccagaagcaccacggcccccagaccctgtacctgcccgtgaccctgagcagcatccccgtgttccagagaggcggcaccatcgtgcccagatggatgagagtgagaagaagcagcgagtgcatgaaggacgaccccatcaccctgttcgtggccctgagcccccagggcaccgcccagggcgagctgttcctggacgacggccacaccttcaactaccagaccagacaggagttcctgctgagaagattcagcttcagcggcaacaccctggtgagcagcagcgccgaccccgagggccacttcgagacccccatctggatcgagagagtggtgatcatcggcgccggcaagcccgccgccgtggtgctgcagaccaagggcagccccgagagcagactgagcttccagcacgaccccgagaccagcgtgctggtgctgagaaagcccggcatcaacgtggccagcgactggagcatccacctgagatag

SEQ ID NO: 83064 - DNA, 2835 bp, synthetic construct
  misc_feature 1..2835: note = Description of Artificial Sequence: Synthetic coding sequence
  source 1..2835: mol_type = other DNA
atggccgccgtggccgccgtggccgccagaagaagaagaagctgggccagcctggtgctggccttcctgggcgtgtgcctgggcatcaccctggccgtggacagaagcaacttcaagacctgcgaggagagcagcttctgcaagagacagagaagcatcagacccggcctgagcccctacagagccctgctggacagcctgcagctgggccccgacagcctgaccgtgcacctgatccacgaggtgaccaaggtgctgctggtgctggagctgcagggcctgcagaagaacatgaccagattcagaatcgacgagctggagcccagaagacccagatacagagtgcccgacgtgctggtggccgacccccccatcgccagactgagcgtgagcggcagagacgagaacagcgtggagctgaccatggccgagggcccctacaagatcatcctgaccgccagacccttcagactggacctgctggaggacagaagcctgctgctgagcgtgaacgccagaggcctgctggagttcgagcaccagagagcccccagagtgagccagggcagcaaggaccccgccgagggcgacggcgcccagcccgaggagacccccagagacggcgacaagcccgaggagacccagggcaaggccgagaaggacgagcccggcgcctgggaggagaccttcaagacccacagcgacagcaagccctacggccccatgagcgtgggcctggacttcagcctgcccggcatggagcacgtgtacggcatccccgagcacgccgacaacctgagactgaaggtgaccgagggcggcgagccctacagactgtacaacctggacgtgttccagtacgagctgtacaaccccatggccctgtacggcagcgtgcccgtgctgctggcccacaacccccacagagacctgggcatcttctggctgaacgccgccgagacctgggtggacatcagcagcaacaccgccggcaagaccctgttcggcaagatgatggactacctgcagggcagcggcgagaccccccagaccgacgtgagatggatgagcgagaccggcatcatcgacgtgttcctgctgctgggccccagcatcagcgacgtgttcagacagtacgccagcctgaccggcacccaggccctgccccccctgttcagcctgggctaccaccagagcagatggaactacagagacgaggccgacgtgctggaggtggaccagggcttcgacgaccacaacctgccctgcgacgtgatctggctggacatcgagcacgccgacggcaagagatacttcacctgggaccccagcagattcccccagcccagaaccatgctggagagactggccagcaagagaagaaagctggtggccatcgtggacccccacatcaaggtggacagcggctacagagtgcacgaggagctgagaaacctgggcctgtacgtgaagaccagagacggcagcgactacgagggctggtgctggcccggcagcgccggctaccccgacttcaccaaccccaccatgagagcctggtgggccaacatgttcagctacgacaactacgagggcagcgcccccaacctgttcgtgtggaacgacatgaacgagcccagcgtgttcaacggccccgaggtgaccatgctgaaggacgcccagcactacggcggctgggagcacagagacgtgcacaacatctacggcctgtacgtgcacatggccaccgccgacggcctgagacagagaagcggcggcatggagagacccttcgtgctggccagagccttcttcgccggcagccagagattcggcgccgtgtggaccggcgacaacaccgccgagtgggaccacctgaagatcagcatccccatgtgcctgagcctgggcctggtgggcctgagcttctgcggcgccgacgtgggcggcttcttcaagaaccccgagcccgagctgctggtgagatggtaccagatgggcgcctaccagcccttcttcagagcccacgcccacctggacaccggcagaagagagccctggctgctgcccagccagcacaacgacatcatcagagacgccctgggccagagatacagcctgctgcccttctggtacaccctgctgtaccaggcccacagagagggcatccccgtgatgagacccctgtgggtgcagtacccccaggacgtgaccaccttcaacatcgacgaccagtacctgctgggcgacgccctgctggtgcaccccgtgagcgacagcggcgcccacggcgtgcaggtgtacctgcccggccagggcgaggtgtggtacgacatccagagctaccagaagcaccacggcccccagaccctgtacctgcccgtgaccctgagcagcatccccgtgttccagagaggcggcaccatcgtgcccagatggatgagagtgagaagaagcagcgagtgcatgaaggacgaccccatcaccctgttcgtggccctgagcccccagggcaccgcccagggcgagctgttcctggacgacggccacaccttcaactaccagaccagacaggagttcctgctgagaagattcagcttcagcggcaacaccctggtgagcagcagcgccgaccccgagggccacttcgagacccccatctggatcgagagagtggtgatcatcggcgccggcaagcccgccgccgtggtgctgcagaccaagggcagccccgagagcagactgagcttccagcacgaccccgagaccagcgtgctggtgctgagaaagcccggcatcaacgtggccagcgactggagcatccacctgagatag

SEQ ID NO: 83065 - DNA, 2544 bp, synthetic construct
  misc_feature 1..2544: note = Description of Artificial Sequence: Synthetic coding sequence
  source 1..2544: mol_type = other DNA
atgaccagattcagaatcgacgagctggagcccagaagacccagatacagagtgcccgacgtgctggtggccgacccccccatcgccagactgagcgtgagcggcagagacgagaacagcgtggagctgaccatggccgagggcccctacaagatcatcctgaccgccagacccttcagactggacctgctggaggacagaagcctgctgctgagcgtgaacgccagaggcctgctggagttcgagcaccagagagcccccagagtgagccagggcagcaaggaccccgccgagggcgacggcgcccagcccgaggagacccccagagacggcgacaagcccgaggagacccagggcaaggccgagaaggacgagcccggcgcctgggaggagaccttcaagacccacagcgacagcaagccctacggccccatgagcgtgggcctggacttcagcctgcccggcatggagcacgtgtacggcatccccgagcacgccgacaacctgagactgaaggtgaccgagggcggcgagccctacagactgtacaacctggacgtgttccagtacgagctgtacaaccccatggccctgtacggcagcgtgcccgtgctgctggcccacaacccccacagagacctgggcatcttctggctgaacgccgccgagacctgggtggacatcagcagcaacaccgccggcaagaccctgttcggcaagatgatggactacctgcagggcagcggcgagaccccccagaccgacgtgagatggatgagcgagaccggcatcatcgacgtgttcctgctgctgggccccagcatcagcgacgtgttcagacagtacgccagcctgaccggcacccaggccctgccccccctgttcagcctgggctaccaccagagcagatggaactacagagacgaggccgacgtgctggaggtggaccagggcttcgacgaccacaacctgccctgcgacgtgatctggctggacatcgagcacgccgacggcaagagatacttcacctgggaccccagcagattcccccagcccagaaccatgctggagagactggccagcaagagaagaaagctggtggccatcgtggacccccacatcaaggtggacagcggctacagagtgcacgaggagctgagaaacctgggcctgtacgtgaagaccagagacggcagcgactacgagggctggtgctggcccggcagcgccggctaccccgacttcaccaaccccaccatgagagcctggtgggccaacatgttcagctacgacaactacgagggcagcgcccccaacctgttcgtgtggaacgacatgaacgagcccagcgtgttcaacggccccgaggtgaccatgctgaaggacgcccagcactacggcggctgggagcacagagacgtgcacaacatctacggcctgtacgtgcacatggccaccgccgacggcctgagacagagaagcggcggcatggagagacccttcgtgctggccagagccttcttcgccggcagccagagattcggcgccgtgtggaccggcgacaacaccgccgagtgggaccacctgaagatcagcatccccatgtgcctgagcctgggcctggtgggcctgagcttctgcggcgccgacgtgggcggcttcttcaagaaccccgagcccgagctgctggtgagatggtaccagatgggcgcctaccagcccttcttcagagcccacgcccacctggacaccggcagaagagagccctggctgctgcccagccagcacaacgacatcatcagagacgccctgggccagagatacagcctgctgcccttctggtacaccctgctgtaccaggcccacagagagggcatccccgtgatgagacccctgtgggtgcagtacccccaggacgtgaccaccttcaacatcgacgaccagtacctgctgggcgacgccctgctggtgcaccccgtgagcgacagcggcgcccacggcgtgcaggtgtacctgcccggccagggcgaggtgtggtacgacatccagagctaccagaagcaccacggcccccagaccctgtacctgcccgtgaccctgagcagcatccccgtgttccagagaggcggcaccatcgtgcccagatggatgagagtgagaagaagcagcgagtgcatgaaggacgaccccatcaccctgttcgtggccctgagcccccagggcaccgcccagggcgagctgttcctggacgacggccacaccttcaactaccagaccagacaggagttcctgctgagaagattcagcttcagcggcaacaccctggtgagcagcagcgccgaccccgagggccacttcgagacccccatctggatcgagagagtggtgatcatcggcgccggcaagcccgccgccgtggtgctgcagaccaagggcagccccgagagcagactgagcttccagcacgaccccgagaccagcgtgctggtgctgagaaagcccggcatcaacgtggccagcgactggagcatccacctgagatag

SEQ ID NO: 83066 - DNA, 2745 bp, synthetic construct
  misc_feature 1..2745: note = Description of Artificial Sequence: Synthetic coding sequence
  source 1..2745: mol_type = other DNA
atggaggccgccgtgaaggaggagatcagcctggaggacgaggccgtggacaagaacatcttcagagactgcaacaagatcgccttctacagaagacagaagcagtggctgagcaagaagagcacctaccaggccctgctggacagcgtgaccaccgacgaggacagcaccagattccagatcatcaacgaggccagcaaggtgcccctgctggccgagatctacggcatcgagggcaacatcttcagactgaagatcaacgaggagacccccctgaagcccagattcgaggtgcccgacgtgctgaccagcaagcccagcaccgtgagactgatcagctgcagcggcgacaccggcagcctgatcctggccgacggcaagggcgacctgaagtgccacatcaccgccaaccccttcaaggtggacctggtgagcgaggaggaggtggtgatcagcatcaacagcctgggccagctgtacttcgagcacctgcagatcctgcacaagcagagagccgccaaggagaacgaggaggagaccagcgtggacaccagccaggagaaccaggaggacctgggcctgtgggaggagaagttcggcaagttcgtggacatcaaggccaacggccccagcagcatcggcctggacttcagcctgcacggcttcgagcacctgtacggcatcccccagcacgccgagagccaccagctgaagaacaccggcgacggcgacgcctacagactgtacaacctggacgtgtacggctaccagatctacgacaagatgggcatctacggcagcgtgccctacctgctggcccacaagctgggcagaaccatcggcatcttctggctgaacgccagcgagaccctggtggagatcaacaccgagcccgccgtggagtacaccctgacccagatgggccccgtggccgccaagcagaaggtgagaagcagaacccacgtgcactggatgagcgagagcggcatcatcgacgtgttcctgctgaccggccccacccccagcgacgtgttcaagcagtacagccacctgaccggcacccaggccatgccccccctgttcagcctgggctaccaccagtgcagatggaactacgaggacgagcaggacgtgaaggccgtggacgccggcttcgacgagcacgacatcccctacgacgccatgtggctggacatcgagcacaccgagggcaagagatacttcacctgggacaagaacagattccccaaccccaagagaatgcaggagctgctgagaagcaagaagagaaagctggtggtgatcagcgacccccacatcaagatcgaccccgactacagcgtgtacgtgaaggccaaggaccagggcttcttcgtgaagaaccaggagggcgaggacttcgagggcgtgtgctggcccggcctgagcagctacctggacttcaccaaccccaaggtgagagagtggtacagcagcctgttcgccttccccgtgtaccagggcagcaccgacatcctgttcctgtggaacgacatgaacgagcccagcgtgttcagaggccccgagcagaccatgcagaagaacgccatccaccacggcaactgggagcacagagagctgcacaacatctacggcttctaccaccagatggccaccgccgagggcctgatcaagagaagcaagggcaaggagagacccttcgtgctgaccagaagcttcttcgccggcagccagaagtacggcgccgtgtggaccggcgacaacaccgccgagtggagcaacctgaagatcagcatccccatgctgctgaccctgagcatcaccggcatcagcttctgcggcgccgacatcggcggcttcatcggcaaccccgagaccgagctgctggtgagatggtaccaggccggcgcctaccagcccttcttcagaggccacgccaccatgaacaccaagagaagagagccctggctgttcggcgaggagcacaccagactgatcagagaggccatcagagagagatacggcctgctgccctactggtacagcctgttctaccacgcccacgtggccagccagcccgtgatgagacccctgtgggtggagttccccgacgagctgaagaccttcgacatggaggacgagtacatgctgggcagcgccctgctggtgcaccccgtgaccgagcccaaggccaccaccgtggacgtgttcctgcccggcagcaacgaggtgtggtacgactacaagaccttcgcccactgggagggcggctgcaccgtgaagatccccgtggccctggacaccatccccgtgttccagagaggcggcagcgtgatccccatcaagaccaccgtgggcaagagcaccggctggatgaccgagagcagctacggcctgagagtggccctgagcaccaagggcagcagcgtgggcgagctgtacctggacgacggccacagcttccagtacctgcaccagaagcagttcctgcacagaaagttcagcttctgcagcagcgtgctgatcaacagcttcgccgaccagagaggccactaccccagcaagtgcgtggtggagaagatcctggtgctgggcttcagaaaggagcccagcagcgtgaccacccacagcagcgacggcaaggaccagcccgtggccttcacctactgcgccaagaccagcatcctgagcctggagaagctgagcctgaacatcgccaccgactgggaggtgagaatcatctag

SEQ ID NO: 83067 - DNA, 849 bp, synthetic construct
  misc_feature 1..849: note = Description of Artificial Sequence: Synthetic coding sequence
  source 1..849: mol_type = other DNA
atggaggccgccgtgaaggaggagatcagcctggaggacgaggccgtggacaagaacatcttcagagactgcaacaagatcgccttctacagaagacagaagcagtggctgagcaagaagagcacctaccaggccctgctggacagcgtgaccaccgacgaggacagcaccagattccagatcatcaacgaggccagcaaggtgagatgccaggaccagagccccaccaccctggacgccttcaagggcaaggagaccaccgtgcaggaggagacccaggacctgagcaccagacagcacctggcccagaaggaggccgaggagcccgacaagcagggccagatcacctgggacatcagcaacgtggcccccaagaccgagaacttcgaggacctgctggagcagaccccctgcagcgcctgcctgcagggcttcaccagagacaacaccagcagcagcttcagcgaggacgccggcatcagcctgagcaccagcgtgaagctgcccctggccagcagcagcaagcccaacgagaacgaggccctgcccaaccagccccccagccagcagatcagacacaactacagactgctggccagcaccgtgagcgccgagatggccagaaacagacagctgatctgggagctggccagacagagcgaggcccacctggacagacccgtggtgctgggcgagcaggccagcgcccagagagaggtggccagcatcctgtgcagaaagagcgtgctggccatcaaccagctggccgccaccgtggagggcaccatcagcgtgctgcagcagttcaacgagctgctggaccaccccctggaccccggcagaagctag

SEQ ID NO: 83068 - DNA, 1230 bp, synthetic construct
  misc_feature 1..1230: note = Description of Artificial Sequence: Synthetic coding sequence
  source 1..1230: mol_type = other DNA
atgagaagatacctgagagtggtggtgctgtgcgtggcctgcggcttctgcagcctgctgtacgccttcagccagctggccgtgagcctggaggagggcaccggcggcggcggcggcaagccccaggccgccgtggccagctggctggccggcggcggcagaggcgccgtgagaggcgccggcgtggccggccccgccgcccaccccggcgtgagcgacagatacagcctgaagatccagcccgtggagaagatgcacctggccgtggtggcctgcggcgagagactggaggagaccatgaccatgctgaagagcgccatcatcttcagcatcaagcccctgcagttccacatcttcgccgaggaccagctgcaccacagcttcaagggcagactggacaactggagcttcctgcagaccttcaactacaccctgtaccccatcaccttccccagcgagaacgccgccgagtggaagaagctgttcaagccctgcgccagccagagactgttcctgcccctgatcctgaaggaggtggacagcctgctgtacgtggacaccgacatcctgttcctgagacccgtggacgacatctggagcctgctgaagaagttcaacagcacccagatcgccgccatggcccccgagcacgaggagcccagaatcggctggtacaacagattcgccagacacccctactacggcaagaccggcgtgaacagcggcgtgatgctgatgaacatgaccagaatgagaagaaagtacttcaagaacgacatgaccaccgtgagactgcagtggggcgacatcctgatgcccctgctgaagaagtacaagctgaacatcacctggggcgaccaggacctgctgaacatcgtgttcttccacaaccccgagagcctgttcgtgttcccctgccagtggaactacagacccgaccactgcatctacggcagcaactgccaggaggccgaggagggcggcatcttcatcctgcacggcaacagaggcgtgtaccacgacgacaagcagcccgccttcagagccgtgtacgaggccctgagaaactgcagcttcgaggacgacaacatcagaagcctgctgaagcccctggagctggagctgcagaagaccgtgcacacctactgcggcaagatctacaagatcttcatcaagcagctggccaagagcgtgagagacagatacgccagaagccccaaggagaagtag

SEQ ID NO: 83069 - DNA, 1323 bp, synthetic construct
  misc_feature 1..1323: note = Description of Artificial Sequence: Synthetic coding sequence
  source 1..1323: mol_type = other DNA
atgagaagatacctgagagtggtggtgctgtgcgtggcctgcggcttctgcagcctgctgtacgccttcagccagctggccgtgagcctggaggagggcaccggcggcggcggcggcaagccccaggccgccgtggccagctggctggccggcggcggcagaggcgccgtgagaggcgccggcgtggccggccccgccgcccaccccggcgtgagcgacagatgcaaggacttcagcctgtgctactggaacccctactggatgctgcccagcgacgtgtgcggcatgaactgcttctgggaggccgccttcagatacagcctgaagatccagcccgtggagaagatgcacctggccgtggtggcctgcggcgagagactggaggagaccatgaccatgctgaagagcgccatcatcttcagcatcaagcccctgcagttccacatcttcgccgaggaccagctgcaccacagcttcaagggcagactggacaactggagcttcctgcagaccttcaactacaccctgtaccccatcaccttccccagcgagaacgccgccgagtggaagaagctgttcaagccctgcgccagccagagactgttcctgcccctgatcctgaaggaggtggacagcctgctgtacgtggacaccgacatcctgttcctgagacccgtggacgacatctggagcctgctgaagaagttcaacagcacccagatcgccgccatggcccccgagcacgaggagcccagaatcggctggtacaacagattcgccagacacccctactacggcaagaccggcgtgaacagcggcgtgatgctgatgaacatgaccagaatgagaagaaagtacttcaagaacgacatgaccaccgtgagactgcagtggggcgacatcctgatgcccctgctgaagaagtacaagctgaacatcacctggggcgaccaggacctgctgaacatcgtgttcttccacaaccccgagagcctgttcgtgttcccctgccagtggaactacagacccgaccactgcatctacggcagcaactgccaggaggccgaggagggcggcatcttcatcctgcacggcaacagaggcgtgtaccacgacgacaagcagcccgccttcagagccgtgtacgaggccctgagaaactgcagcttcgaggacgacaacatcagaagcctgctgaagcccctggagctggagctgcagaagaccgtgcacacctactgcggcaagatctacaagatcttcatcaagcagctggccaagagcgtgagagacagatacgccagaagccccaaggagaagtag

SEQ ID NO: 83070 - DNA, 1332 bp, synthetic construct
  misc_feature 1..1332: note = Description of Artificial Sequence: Synthetic coding sequence
  source 1..1332: mol_type = other DNA
atgaagctgagaagcaaggccgccgccctgctgctgctggccctggccgccctgctgctggccctgctgagcctgagagccggcagagccgagccccccgccctgcccgccagacccgccagcgccccccagagacaccccgcccccgtgcccgccagatggcccggccccggcgccctgcccggcgccagccccggcgtgagaagaagaagaccccccagacccagacccagagccggcagaagaggcgccgccagactggagaagctggccagaagacccggcgagcccagaagcttccaggccgtgctgccccccgagctgtggatccacctggccgtggtggcctgcggcaacagactggaggagaccctggtgatgctgaagagcgccgtgctgttcagccacagaaagatccagttccacatcttcaccgaggacagcctgaagcccgagttcgacaagcagctgagacagtggcccgacagctacaccaagaagttcgagcacagaatctaccccatcaccttcagcgtgggcaacccccaggagtggaagaagctgttcaagccctgcgccgcccagagactgttcctgcccgtgatcctgaaggacgtggacagcctgctgtacgtggacaccgacgtgctgttcctgagacccgtggacgacatctggaagctgctgagactgttcaacagcacccagctggccgccatggcccccgagcacgagatccccaagatcggctggtacagcagattcgccagacaccccttctacggcagcgccggcgtgaacagcggcgtgatgctgatgaacctgaccagaatcagaagcacccagttcaagaacagcatgatccccaccggcctggcctgggaggacatgctgtaccccctgtaccagaagtacaagaacgccatcacctggggcgaccaggacctgctgaacatcatcttctacttcaaccccgagtgcctgtacgtgttcccctgccagtggaactacagacccgaccactgcatgtacggcagcaactgcagagaggccgagcacgagggcgtgagcgtgctgcacggcaacagaggcgtgtaccacgacgacaagcagcccaccttcagagccctgtacgaggccatcagagacttccccttccaggacaacctgttccagagcatgtactaccccctgcagctgaagttcctggagaccgtgcacaccctgtgcggcagaatcccccaggtgttcctgaagcagatcgagaagaccatgaagagagcctacgagaagcacgtgatcatccacgtgggccccaaccagatgcactag

SEQ ID NO: 83071 - DNA, 1854 bp, synthetic construct
  misc_feature 1..1854: note = Description of Artificial Sequence: Synthetic coding sequence
  source 1..1854: mol_type = other DNA
atgagatgcctggccgccagagtgaactacaagaccctgatcatcatctgcgccctgttcaccctggtgaccgtgctgctgtggaacaagtgcagcagcgacaaggccatccagttccccagaagaagcagcagcggcttcagagtggacggcttcgagaagagagccgccgccagcgagagcaacaactacatgaaccacgtggccaagcagcagagcgaggaggccttcccccaggagcagcagaaggccccccccgtggtgggcggcttcaacagcaacgtgggcagcaaggtgctgggcctgaagtacgaggagatcgactgcctgatcaacgacgagcacaccatcaagggcagaagagagggcaacgaggtgttcctgcccttcacctgggtggagaagtacttcgacgtgtacggcaaggtggtgcagtacgacggctacgacagattcgagttcagccacagctacagcaaggtgtacgcccagagagccccctaccaccccgacggcgtgttcatgagcttcgagggctacaacgtggaggtgagagacagagtgaagtgcatcagcggcgtggagggcgtgcccctgagcacccagtggggcccccagggctacttctaccccatccagatcgcccagtacggcctgagccactacagcaagaacctgaccgagaagcccccccacatcgaggtgtacgagaccgccgaggacagagacaagaacaagcccaacgactggaccgtgcccaagggctgcttcatggccaacgtggccgacaagagcagattcaccaacgtgaagcagttcatcgcccccgagaccagcgagggcgtgagcctgcagctgggcaacaccaaggacttcatcatcagcttcgacctgaagttcctgaccaacggcagcgtgagcgtggtgctggagaccaccgagaagaaccagctgttcaccatccactacgtgagcaacgcccagctgatcgccttcaaggagagagacatctactacggcatcggccccagaaccagctggagcaccgtgaccagagacctggtgaccgacctgagaaagggcgtgggcctgagcaacaccaaggccgtgaagcccaccaagatcatgcccaagaaggtggtgagactgatcgccaagggcaagggcttcctggacaacatcaccatcagcaccaccgcccacatggccgccttcttcgccgccagcgactggctggtgagaaaccaggacgagaagggcggctggcccatcatggtgaccagaaagctgggcgagggcttcaagagcctggagcccggctggtacagcgccatggcccagggccaggccatcagcaccctggtgagagcctacctgctgaccaaggaccacatcttcctgaacagcgccctgagagccaccgccccctacaagttcctgagcgagcagcacggcgtgaaggccgtgttcatgaacaagcacgactggtacgaggagtaccccaccacccccagcagcttcgtgctgaacggcttcatgtacagcctgatcggcctgtacgacctgaaggagaccgccggcgagaagctgggcaaggaggccagaagcctgtacgagagaggcatggagagcctgaaggccatgctgcccctgtacgacaccggcagcggcaccatctacgacctgagacacttcatgctgggcatcgcccccaacctggccagatgggactaccacaccacccacatcaaccagctgcagctgctgagcaccatcgacgagagccccgtgttcaaggagttcgtgaagagatggaagagctacctgaagggcagcagagccaagcacaactag

SEQ ID NO: 83072 - DNA, 1662 bp, synthetic construct
  misc_feature 1..1662: note = Description of Artificial Sequence: Synthetic coding sequence
  source 1..1662: mol_type = other DNA
atgaaccacgtggccaagcagcagagcgaggaggccttcccccaggagcagcagaaggccccccccgtggtgggcggcttcaacagcaacgtgggcagcaaggtgctgggcctgaagtacgaggagatcgactgcctgatcaacgacgagcacaccatcaagggcagaagagagggcaacgaggtgttcctgcccttcacctgggtggagaagtacttcgacgtgtacggcaaggtggtgcagtacgacggctacgacagattcgagttcagccacagctacagcaaggtgtacgcccagagagccccctaccaccccgacggcgtgttcatgagcttcgagggctacaacgtggaggtgagagacagagtgaagtgcatcagcggcgtggagggcgtgcccctgagcacccagtggggcccccagggctacttctaccccatccagatcgcccagtacggcctgagccactacagcaagaacctgaccgagaagcccccccacatcgaggtgtacgagaccgccgaggacagagacaagaacaagcccaacgactggaccgtgcccaagggctgcttcatggccaacgtggccgacaagagcagattcaccaacgtgaagcagttcatcgcccccgagaccagcgagggcgtgagcctgcagctgggcaacaccaaggacttcatcatcagcttcgacctgaagttcctgaccaacggcagcgtgagcgtggtgctggagaccaccgagaagaaccagctgttcaccatccactacgtgagcaacgcccagctgatcgccttcaaggagagagacatctactacggcatcggccccagaaccagctggagcaccgtgaccagagacctggtgaccgacctgagaaagggcgtgggcctgagcaacaccaaggccgtgaagcccaccaagatcatgcccaagaaggtggtgagactgatcgccaagggcaagggcttcctggacaacatcaccatcagcaccaccgcccacatggccgccttcttcgccgccagcgactggctggtgagaaaccaggacgagaagggcggctggcccatcatggtgaccagaaagctgggcgagggcttcaagagcctggagcccggctggtacagcgccatggcccagggccaggccatcagcaccctggtgagagcctacctgctgaccaaggaccacatcttcctgaacagcgccctgagagccaccgccccctacaagttcctgagcgagcagcacggcgtgaaggccgtgttcatgaacaagcacgactggtacgaggagtaccccaccacccccagcagcttcgtgctgaacggcttcatgtacagcctgatcggcctgtacgacctgaaggagaccgccggcgagaagctgggcaaggaggccagaagcctgtacgagagaggcatggagagcctgaaggccatgctgcccctgtacgacaccggcagcggcaccatctacgacctgagacacttcatgctgggcatcgcccccaacctggccagatgggactaccacaccacccacatcaaccagctgcagctgctgagcaccatcgacgagagccccgtgttcaaggagttcgtgaagagatggaagagctacctgaagggcagcagagccaagcacaactag

SEQ ID NO: 83073 - DNA, 1956 bp, synthetic construct
  misc_feature 1..1956: note = Description of Artificial Sequence: Synthetic coding sequence
  source 1..1956: mol_type = other DNA
atggccagaggcagcgccgtggcctgggccgccctgggccccctgctgtggggctgcgccctgggcctgcagggcggcatgctgtacccccaggagagccccagcagagagtgcaaggagctggacggcctgtggagcttcagagccgacttcagcgacaacagaagaagaggcttcgaggagcagtggtacagaagacccctgtgggagagcggccccaccgtggacatgcccgtgcccagcagcttcaacgacatcagccaggactggagactgagacacttcgtgggctgggtgtggtacgagagagaggtgatcctgcccgagagatggacccaggacctgagaaccagagtggtgctgagaatcggcagcgcccacagctacgccatcgtgtgggtgaacggcgtggacaccctggagcacgagggcggctacctgcccttcgaggccgacatcagcaacctggtgcaggtgggccccctgcccagcagactgagaatcaccatcgccatcaacaacaccctgacccccaccaccctgccccccggcaccatccagtacctgaccgacaccagcaagtaccccaagggctacttcgtgcagaacacctacttcgacttcttcaactacgccggcctgcagagaagcgtgctgctgtacaccacccccaccacctacatcgacgacatcaccgtgaccaccagcgtggagcaggacagcggcctggtgaactaccagatcagcgtgaagggcagcaacctgttcaagctggaggtgagactgctggacgccgagaacaaggtggtggccaacggcaccggcacccagggccagctgaaggtgcccggcgtgagcctgtggtggccctacctgatgcacgagagacccgcctacctgtacagcctggaggtgcagctgaccgcccagaccagcctgggccccgtgagcgacttctacaccctgcccgtgggcatcagaaccgtggccgtgaccaagagccagttcctgatcaacggcaagcccttctacttccacggcgtgaacaagcacgaggacgccgacatcagaggcaagggcttcgactggcccctgctggtgaaggacttcaacctgctgagatggctgggcgccaacgccttcagaaccagccactacccctacgccgaggaggtgatgcagatgtgcgacagatacggcatcgtggtgatcgacgagtgccccggcgtgggcctggccctgccccagttcttcaacaacgtgagcctgcaccaccacatgcaggtgatggaggaggtggtgagaagagacaagaaccaccccgccgtggtgatgtggagcgtggccaacgagcccgccagccacctggagagcgccggctactacctgaagatggtgatcgcccacaccaagagcctggaccccagcagacccgtgaccttcgtgagcaacagcaactacgccgccgacaagggcgccccctacgtggacgtgatctgcctgaacagctactacagctggtaccacgactacggccacctggagctgatccagctgcagctggccacccagttcgagaactggtacaagaagtaccagaagcccatcatccagagcgagtacggcgccgagaccatcgccggcttccaccaggacccccccctgatgttcaccgaggagtaccagaagagcctgctggagcagtaccacctgggcctggaccagaagagaagaaagtacgtggtgggcgagctgatctggaacttcgccgacttcatgaccgagcagagccccaccagagtgctgggcaacaagaagggcatcttcaccagacagagacagcccaagagcgccgccttcctgctgagagagagatactggaagatcgccaacgagaccagatacccccacagcgtggccaagagccagtgcctggagaacagcctgttcacctag

SEQ ID NO: 83074 - DNA, 1803 bp, synthetic construct
  misc_feature 1..1803: note = Description of Artificial Sequence: Synthetic coding sequence
  source 1..1803: mol_type = other DNA
atggccagaggcagcgccgtggcctgggccgccctgggccccctgctgtggggctgcgccctgggcctgcagggcggcatgctgtacccccaggagagccccagcagagagtgcaaggagctggacggcctgtggagcttcagagccgacttcagcgacaacagaagaagaggcttcgaggagcagtggtacagaagacccctgtgggagagcggccccaccgtggacatgcccgtgcccagcagcttcaacgacatcagccaggactggagactgagacacttcgtgggctgggtgtggtacgagagagaggtgatcctgcccgagagatggacccaggacctgagaaccagagtggtgctgagaatcggcagcgcccacagctacgccatcgtgtgggtgaacggcgtggacaccctggagcacgagggcggctacctgcccttcgaggccgacatcagcaacctggtgcaggtgggccccctgcccagcagactgagaatcaccatcgccatcaacaacaccctgacccccaccaccctgccccccggcaccatccagtacctgaccgacaccagcaagtaccccaagggctacttcgtgcagaacacctacttcgacttcttcaactacgccggcctgcagagaagcgtgctgctgtacaccacccccaccacctacatcgacgacatcaccgtgaccaccagcgtggagcaggacagcggcctggtgaactaccagatcagcgtgaagggcagcaacctgttcaagctggaggtgagactgctggacgccgagaacaaggtggtggccaacggcaccggcacccagggccagctgaaggtgcccggcgtgagcctgtggtggccctacctgatgcacgagagacccgcctacctgtacagcctggagatcagaggcaagggcttcgactggcccctgctggtgaaggacttcaacctgctgagatggctgggcgccaacgccttcagaaccagccactacccctacgccgaggaggtgatgcagatgtgcgacagatacggcatcgtggtgatcgacgagtgccccggcgtgggcctggccctgccccagttcttcaacaacgtgagcctgcaccaccacatgcaggtgatggaggaggtggtgagaagagacaagaaccaccccgccgtggtgatgtggagcgtggccaacgagcccgccagccacctggagagcgccggctactacctgaagatggtgatcgcccacaccaagagcctggaccccagcagacccgtgaccttcgtgagcaacagcaactacgccgccgacaagggcgccccctacgtggacgtgatctgcctgaacagctactacagctggtaccacgactacggccacctggagctgatccagctgcagctggccacccagttcgagaactggtacaagaagtaccagaagcccatcatccagagcgagtacggcgccgagaccatcgccggcttccaccaggacccccccctgatgttcaccgaggagtaccagaagagcctgctggagcagtaccacctgggcctggaccagaagagaagaaagtacgtggtgggcgagctgatctggaacttcgccgacttcatgaccgagcagagccccaccagagtgctgggcaacaagaagggcatcttcaccagacagagacagcccaagagcgccgccttcctgctgagagagagatactggaagatcgccaacgagaccagatacccccacagcgtggccaagagccagtgcctggagaacagcctgttcacctag

SEQ ID NO: 83075 - DNA, 675 bp, synthetic construct
  misc_feature 1..675: note = Description of Artificial Sequence: Synthetic coding sequence
  source 1..675: mol_type = other DNA
atggccagcagcacccccagcagcagcgccaccagcagcaacgccggcgccgaccccaacaccaccaacctgagacccaccacctacgacacctggtgcggcgtggcccacggctgcaccagaaagctgggcctgaagatctgcggcttcctgcagagaaccaacagcctggaggagaagagcagactggtgagcgccttcaaggagagacagagcagcaagaacctgctgagctgcgagaacagcgacagagacgccagattcagaagaaccgagaccgacttcagcaacctgttcgccagagacctgctgcccgccaagaacggcgaggagcagaccgtgcagttcctgctggaggtggtggacatcctgctgaactacgtgagaaagaccttcgacagaagcaccaaggtgctggacttccaccacccccaccagctgctggagggcatggagggcttcaacctggagctgagcgaccaccccgagagcctggagcagatcctggtggactgcagagacaccctgaagtacggcgtgagaaccggccaccccagattcttcaaccagctgagcaccggcctggacatcatcggcctggccggcgagtggctgaccagcaccgccaacaccaacatgcccagcgacatgagagagtgctggctgctgagatag

SEQ ID NO: 83076 - DNA, 1785 bp, synthetic construct
  misc_feature 1..1785: note = Description of Artificial Sequence: Synthetic coding sequence
  source 1..1785: mol_type = other DNA
atggccagcagcacccccagcagcagcgccaccagcagcaacgccggcgccgaccccaacaccaccaacctgagacccaccacctacgacacctggtgcggcgtggcccacggctgcaccagaaagctgggcctgaagatctgcggcttcctgcagagaaccaacagcctggaggagaagagcagactggtgagcgccttcaaggagagacagagcagcaagaacctgctgagctgcgagaacagcgacagagacgccagattcagaagaaccgagaccgacttcagcaacctgttcgccagagacctgctgcccgccaagaacggcgaggagcagaccgtgcagttcctgctggaggtggtggacatcctgctgaactacgtgagaaagaccttcgacagaagcaccaaggtgctggacttccaccacccccaccagctgctggagggcatggagggcttcaacctggagctgagcgaccaccccgagagcctggagcagatcctggtggactgcagagacaccctgaagtacggcgtgagaaccggccaccccagattcttcaaccagctgagcaccggcctggacatcatcggcctggccggcgagtggctgaccagcaccgccaacaccaacatgttcacctacgagatcgcccccgtgttcgtgctgatggagcagatcaccctgaagaagatgagagagatcgtgggctggagcagcaaggacggcgacggcatcttcagccccggcggcgccatcagcaacatgtacagcatcatggccgccagatacaagtacttccccgaggtgaagaccaagggcatggccgccgtgcccaagctggtgctgttcaccagcgagcagagccactacagcatcaagaaggccggcgccgccctgggcttcggcaccgacaacgtgatcctgatcaagtgcaacgagagaggcaagatcatccccgccgacttcgaggccaagatcctggaggccaagcagaagggctacgtgcccttctacgtgaacgccaccgccggcaccaccgtgtacggcgccttcgaccccatccaggagatcgccgacatctgcgagaagtacaacctgtggctgcacgtggacgccgcctggggcggcggcctgctgatgagcagaaagcacagacacaagctgaacggcatcgagagagccaacagcgtgacctggaacccccacaagatgatgggcgtgctgctgcagtgcagcgccatcctggtgaaggagaagggcatcctgcagggctgcaaccagatgtgcgccggctacctgttccagcccgacaagcagtacgacgtgagctacgacaccggcgacaaggccatccagtgcggcagacacgtggacatcttcaagttctggctgatgtggaaggccaagggcaccgtgggcttcgagaaccagatcaacaagtgcctggagctggccgagtacctgtacgccaagatcaagaacagagaggagttcgagatggtgttcaacggcgagcccgagcacaccaacgtgtgcttctggtacatcccccagagcctgagaggcgtgcccgacagcccccagagaagagagaagctgcacaaggtggcccccaagatcaaggccctgatgatggagagcggcaccaccatggtgggctaccagccccagggcgacaaggccaacttcttcagaatggtgatcagcaaccccgccgccacccagagcgacatcgacttcctgatcgaggagatcgagagactgggccaggacctgtag

SEQ ID NO: 83077 - DNA, 675 bp, synthetic construct; identical to SEQ ID NO: 83075
  misc_feature 1..675: note = Description of Artificial Sequence: Synthetic coding sequence
  source 1..675: mol_type = other DNA

SEQ ID NO: 83078 - DNA, 114 bp, synthetic construct
  misc_feature 1..114: note = Description of Artificial Sequence: Synthetic coding sequence
  source 1..114: mol_type = other DNA
atggccagcagcacccccagcagcagcgccaccagcagcaacgccggcgccgaccccaacaccaccaacctgagacccaccacctacgacacctggtgcggcgtggcccactag

SEQ ID NO: 83079 - DNA, 258 bp, synthetic construct
  misc_feature 1..258: note = Description of Artificial Sequence: Synthetic coding sequence
  source 1..258: mol_type = other DNA
atggccagcagcacccccagcagcagcgccaccagcagcaacgccggcgccgaccccaacaccaccaacctgagacccaccacctacgacacctggtgcggcgtggcccacggctgcaccagaaagctgggcctgaagatctgcggcttcctgcagagaaccaacagcctggaggagaagagcagactggtgagcgccttcaaggagagacagagcagcaagaacctgctgagctgcgagaacagcgacagagactag

SEQ ID NO: 83080 - DNA, 348 bp, synthetic construct
  misc_feature 1..348: note = Description of Artificial Sequence: Synthetic coding sequence
  source 1..348: mol_type = other DNA
atggccagcagcacccccagcagcagcgccaccagcagcaacgccggcgccgaccccaacaccaccaacctgagacccaccacctacgacacctggtgcggcgtggcccacggctgcaccagaaagctgggcctgaagatctgcggcttcctgcagagaaccaacagcctggaggagaagagcagactggtgagcgccttcaaggagagacagagcagcaagaacctgctgagctgcgagaacagcgacagagacgccagattcagaagaaccgagaccgacttcagcaacctgttcgccagagacctgctgcccgccaagaacggcgaggagcagaccgtgcagtag

SEQ ID NO: 83081 - DNA, 366 bp, synthetic construct
  misc_feature 1..366: note = Description of Artificial Sequence: Synthetic coding sequence
  source 1..366: mol_type = other DNA
atggccagcagcacccccagcagcagcgccaccagcagcaacgccggcgccgaccccaacaccaccaacctgagacccaccacctacgacacctggtgcggcgtggcccacggctgcaccagaaagctgggcctgaagatctgcggcttcctgcagagaaccaacagcctggaggagaagagcagactggtgagcgccttcaaggagagacagagcagcaagaacctgctgagctgcgagaacagcgacagagacgccagattcagaagaaccgagaccgacttcagcaacctgttcgccagagacctgctgcccgccaagaacggcgaggagcagaccgtgcagttcctgctggaggtggtgtag

SEQ ID NO: 83082 - DNA, 1758 bp, synthetic construct
  misc_feature 1..1758: note = Description of Artificial Sequence: Synthetic coding sequence
  source 1..1758: mol_type = other DNA
atggccagccccggcagcggcttctggagcttcggcagcgaggacggcagcggcgacagcgagaaccccggcaccgccagagcctggtgccaggtggcccagaagttcaccggcggcatcggcaacaagctgtgcgccctgctgtacggcgacgccgagaagcccgccgagagcggcggcagccagccccccagagccgccgccagaaaggccgcctgcgcctgcgaccagaagccctgcagctgcagcaaggtggacgtgaactacgccttcctgcacgccaccgacctgctgcccgcctgcgacggcgagagacccaccctggccttcctgcaggacgtgatgaacatcctgctgcagtacgtggtgaagagcttcgacagaagcaccaaggtgatcgacttccactaccccaacgagctgctgcaggagtacaactgggagctggccgaccagccccagaacctggaggagatcctgatgcactgccagaccaccctgaagtacgccatcaagaccggccaccccagatacttcaaccagctgagcaccggcctggacatggtgggcctggccgccgactggctgaccagcaccgccaacaccaacatgttcacctacgagatcgcccccgtgttcgtgctgctggagtacgtgaccctgaagaagatgagagagatcatcggctggcccggcggcagcggcgacggcatcttcagccccggcggcgccatcagcaacatgtacgccatgatgatcgccagattcaagatgttccccgaggtgaaggagaagggcatggccgccctgcccagactgatcgccttcaccagcgagcacagccacttcagcctgaagaagggcgccgccgccctgggcatcggcaccgacagcgtgatcctgatcaagtgcgacgagagaggcaagatgatccccagcgacctggagagaagaatcctggaggccaagcagaagggcttcgtgcccttcctggtgagcgccaccgccggcaccaccgtgtacggcgccttcgaccccctgctggccgtggccgacatctgcaagaagtacaagatctggatgcacgtggacgccgcctggggcggcggcctgctgatgagcagaaagcacaagtggaagctgagcggcgtggagagagccaacagcgtgacctggaacccccacaagatgatgggcgtgcccctgcagtgcagcgccctgctggtgagagaggagggcctgatgcagaactgcaaccagatgcacgccagctacctgttccagcaggacaagcactacgacctgagctacgacaccggcgacaaggccctgcagtgcggcagacacgtggacgtgttcaagctgtggctgatgtggagagccaagggcaccaccggcttcgaggcccacgtggacaagtgcctggagctggccgagtacctgtacaacatcatcaagaacagagagggctacgagatggtgttcgacggcaagccccagcacaccaacgtgtgcttctggtacatcccccccagcctgagaaccctggaggacaacgaggagagaatgagcagactgagcaaggtggcccccgtgatcaaggccagaatgatggagtacggcaccaccatggtgagctaccagcccctgggcgacaaggtgaacttcttcagaatggtgatcagcaaccccgccgccacccaccaggacatcgacttcctgatcgaggagatcgagagactgggccaggacctgtag

SEQ ID NO: 83083 - DNA, 390 bp, synthetic construct
  misc_feature 1..390: note = Description of Artificial Sequence: Synthetic coding sequence
  source 1..390: mol_type = other DNA
atgaacatcctgctgcagtacgtggtgaagagcttcgacagaagcaccaaggtgatcgacttccactaccccaacgagctgctgcaggagtacaactgggagctggccgaccagccccagaacctggaggagatcctgatgcactgccagaccaccctgaagtacgccatcaagaccggccaccccagatacttcaaccagctgagcaccggcctggacatggtgggcctggccgccgactggctgaccagcaccgccaacaccaacatgttcacctacgagatcgcccccgtgttcgtgctgctggagtacgtgaccctgaagaagatgagagagatcatcggctggcccggcggcagcggcgacggcatcttcagccccggcacctag

SEQ ID NO: 83084 - DNA, 1758 bp, synthetic construct; identical to SEQ ID NO: 83082
  misc_feature 1..1758: note = Description of Artificial Sequence: Synthetic coding sequence
  source 1..1758: mol_type = other DNA

SEQ ID NO: 83085 - DNA, 567 bp, synthetic construct
  misc_feature 1..567: note = Description of Artificial Sequence: Synthetic coding sequence
  source 1..567: mol_type = other DNA
atggccagccccggcagcggcttctggagcttcggcagcgaggacggcagcggcgacagcgagaaccccggcaccgccagagcctggtgccaggtggcccagaagttcaccggcggcatcggcaacaagctgtgcgccctgctgtacggcgacgccgagaagcccgccgagagcggcggcagccagccccccagagccgccgccagaaaggccgcctgcgcctgcgaccagaagccctgcagctgcagcaaggtggacgtgaactacgccttcctgcacgccaccgacctgctgcccgcctgcgacggcgagagacccaccctggccttcctgcaggacgtgatgaacatcctgctgcagtacgtggtgaagagcttcgacagaagcaccaaggtgatcgacttccactaccccaacgagctgctgcaggagtacaactgggagctggccgaccagccccagaacctggaggagatcctgatgcactgccagaccaccctgaagtacgccatcaagaccggcatcgtgagcagcaagatcatcaagctgttcttcagactgcagtag

SEQ ID NO: 83086 - DNA, 1677 bp, synthetic construct
  misc_feature 1..1677: note = Description of Artificial Sequence: Synthetic coding sequence
  source 1..1677: mol_type = other DNA
atgtacagatacctgggcgaggccctgctgctgagcagagccggccccgccgccctgggcagcgccagcgccgacagcgccgccctgctgggctgggccagaggccagcccgccgccgccccccagcccggcctggccctggccgccagaagacactacagcgaggccgtggccgacagagaggacgaccccaacttcttcaagatggtggagggcttcttcgacagaggcgccagcatcgtggaggacaagctggtggaggacctgagaaccagagagagcgaggagcagaagagaaacagagtgagaggcatcctgagaatcatcaagccctgcaaccacgtgctgagcctgagcttccccatcagaagagacgacggcagctgggaggtgatcgagggctacagagcccagcacagccagcacagaaccccctgcaagggcggcatcagatacagcaccgacgtgagcgtggacgaggtgaaggccctggccagcctgatgacctacaagtgcgccgtggtggacgtgcccttcggcggcgccaaggccggcgtgaagatcaaccccaagaactacaccgacaacgagctggagaagatcaccagaagattcaccatggagctggccaagaagggcttcatcggccccggcatcgacgtgcccgcccccgacatgagcaccggcgagagagagatgagctggatcgccgacacctacgccagcaccatcggccactacgacatcaacgcccacgcctgcgtgaccggcaagcccatcagccagggcggcatccacggcagaatcagcgccaccggcagaggcgtgttccacggcatcgagaacttcatcaacgaggccagctacatgagcatcctgggcatgacccccggcttcggcgacaagaccttcgtggtgcagggcttcggcaacgtgggcctgcacagcatgagatacctgcacagattcggcgccaagtgcatcgccgtgggcgagagcgacggcagcatctggaaccccgacggcatcgaccccaaggagctggaggacttcaagctgcagcacggcagcatcctgggcttccccaaggccaagccctacgagggcagcatcctggaggccgactgcgacatcctgatccccgccgccagcgagaagcagctgaccaagagcaacgcccccagagtgaaggccaagatcatcgccgagggcgccaacggccccaccacccccgaggccgacaagatcttcctggagagaaacatcatggtgatccccgacctgtacctgaacgccggcggcgtgaccgtgagctacttcgagtggctgaagaacctgaaccacgtgagctacggcagactgaccttcaagtacgagagagacagcaactaccacctgctgatgagcgtgcaggagagcctggagagaaagttcggcaagcacggcggcaccatccccatcgtgcccaccgccgagttccaggacagaatcagcggcgccagcgagaaggacatcgtgcacagcggcctggcctacaccatggagagaagcgccagacagatcatgagaaccgccatgaagtacaacctgggcctggacctgagaaccgccgcctacgtgaacgccatcgagaaggtgttcaaggtgtacaacgaggccggcgtgaccttcacctag

SEQ ID NO: 83087 - DNA, 1548 bp, synthetic construct
  misc_feature 1..1548: note = Description of Artificial Sequence: Synthetic coding sequence
  source 1..1548: mol_type = other DNA
atgtacagatacctgggccccggcaccgccagaagaagacccgccgccggcgccggcatcggcagacccgcccccctgcagagaggcggcggcagacccagaggcagaccccagctgctgcaggacggcggcggcctgctgagaagcagaagacagcacagaggcggccaggccggcggcggccccgaggaccccggcgagagaggcgccgaggccgagcccggcgccagacaccccgccgaccaccaggccctgcagccctgcgccgagagcctgctgccccagcacagccagcacagaaccccctgcaagggcggcatcagatacagcaccgacgtgagcgtggacgaggtgaaggccctggccagcctgatgacctacaagtgcgccgtggtggacgtgcccttcggcggcgccaaggccggcgtgaagatcaaccccaagaactacaccgacaacgagctggagaagatcaccagaagattcaccatggagctggccaagaagggcttcatcggccccggcatcgacgtgcccgcccccgacatgagcaccggcgagagagagatgagctggatcgccgacacctacgccagcaccatcggccactacgacatcaacgcccacgcctgcgtgaccggcaagcccatcagccagggcggcatccacggcagaatcagcgccaccggcagaggcgtgttccacggcatcgagaacttcatcaacgaggccagctacatgagcatcctgggcatgacccccggcttcggcgacaagaccttcgtggtgcagggcttcggcaacgtgggcctgcacagcatgagatacctgcacagattcggcgccaagtgcatcgccgtgggcgagagcgacggcagcatctggaaccccgacggcatcgaccccaaggagctggaggacttcaagctgcagcacggcagcatcctgggcttccccaaggccaagccctacgagggcagcatcctggaggccgactgcgacatcctgatccccgccgccagcgagaagcagctgaccaagagcaacgcccccagagtgaaggccaagatcatcgccgagggcgccaacggccccaccacccccgaggccgacaagatcttcctggagagaaacatcatggtgatccccgacctgtacctgaacgccggcggcgtgaccgtgagctacttcgagtggctgaagaacctgaaccacgtgagctacggcagactgaccttcaagtacgagagagacagcaactaccacctgctgatgagcgtgcaggagagcctggagagaaagttcggcaagcacggcggcaccatccccatcgtgcccaccgccgagttccaggacagaatcagcggcgccagcgagaaggacatcgtgcacagcggcctggcctacaccatggagagaagcgccagacagatcatgagaaccgccatgaagtacaacctgggcctggacctgagaaccgccgcctacgtgaacgccatcgagaaggtgttcaaggtgtacaacgaggccggcgtgaccttcacctag

SEQ ID NO: 83088 - DNA, 1473 bp, synthetic construct
  misc_feature 1..1473: note = Description of Artificial Sequence: Synthetic coding sequence
  source 1..1473: mol_type = other DNA
atggtggagggcttcttcgacagaggcgccagcatcgtggaggacaagctggtggaggacctgagaaccagagagagcgaggagcagaagagaaacagagtgagaggcatcctgagaatcatcaagccctgcaaccacgtgctgagcctgagcttccccatcagaagagacgacggcagctgggaggtgatcgagggctacagagcccagcacagccagcacagaaccccctgcaagggcggcatcagatacagcaccgacgtgagcgtggacgaggtgaaggccctggccagcctgatgacctacaagtgcgccgtggtggacgtgcccttcggcggcgccaaggccggcgtgaagatcaaccccaagaactacaccgacaacgagctggagaagatcaccagaagattcaccatggagctggccaagaagggcttcatcggccccggcatcgacgtgcccgcccccgacatgagcaccggcgagagagagatgagctggatcgccgacacctacgccagcaccatcggccactacgacatcaacgcccacgcctgcgtgaccggcaagcccatcagccagggcggcatccacggcagaatcagcgccaccggcagaggcgtgttccacggcatcgagaacttcatcaacgaggccagctacatgagcatcctgggcatgacccccggcttcggcgacaagaccttcgtggtgcagggcttcggcaacgtgggcctgcacagcatgagatacctgcacagattcggcgccaagtgcatcgccgtgggcgagagcgacggcagcatctggaaccccgacggcatcgaccccaaggagctggaggacttcaagctgcagcacggcagcatcctgggcttccccaaggccaagccctacgagggcagcatcctggaggccgactgcgacatcctgatccccgccgccagcgagaagcagctgaccaagagcaacgcccccagagtgaaggccaagatcatcgccgagggcgccaacggccccaccacccccgaggccgacaagatcttcctggagagaaacatcatggtgatccccgacctgtacctgaacgccggcggcgtgaccgtgagctacttcgagtggctgaagaacctgaaccacgtgagctacggcagactgaccttcaagtacgagagagacagcaactaccacctgctgatgagcgtgcaggagagcctggagagaaagttcggcaagcacggcggcaccatccccatcgtgcccaccgccgagttccaggacagaatcagcggcgccagcgagaaggacatcgtgcacagcggcctggcctacaccatggagagaagcgccagacagatcatgagaaccgccatgaagtacaacctgggcctggacctgagaaccgccgcctacgtgaacgccatcgagaaggtgttcaaggtgtacaacgaggccggcgtgaccttcacctag

SEQ ID NO: 83089 - DNA, 774 bp, synthetic construct
  misc_feature 1..774: note = Description of Artificial Sequence: Synthetic coding sequence
  source 1..774: mol_type = other DNA
gagaacttcatcgtggagggcttcggcaacgtgggcctgcacagcatgagatacctgcacagattcggcgccaagtgcatcgccgtgggcgagagcgacggcagcatctggaaccccgacggcatcgaccccaaggagctggaggacttcaagctgcagcacggcagcatcctgggcttccccaaggccaagccctacgagggcagcatcctggaggccgactgcgacatcctgatccccgccgccagcgagaagcagctgaccaagagcaacgcccccagagtgaaggccaagatcatcgccgagggcgccaacggccccaccacccccgaggccgacaagatcttcctggagagaaacatcatggtgatccccgacctgtacctgaacgccggcggcgtgaccgtgagctacttcgagtggctgaagaacctgaaccacgtgagctacggcagactgaccttcaagtacgagagagacagcaactaccacctgctgatgagcgtgcaggagagcctggagagaaagttcggcaagcacggcggcaccatccccatcgtgcccaccgccgagttccaggacagaatcagcggcgccagcgagaaggacatcgtgcacagcggcctggcctacaccatggagagaagcgccagacagatcatgagaaccgccatgaagtacaacctgggcctggacctgagaaccgccgcctacgtgaacgccatcgagaaggtgttcaaggtgtacaacgaggccggcgtgaccttcacctag

SEQ ID NO: 83090 - DNA, 1176 bp, synthetic construct
  misc_feature 1..1176: note = Description of Artificial Sequence: Synthetic coding sequence
  source 1..1176: mol_type = other DNA
atgacctacaagtgcgccgtggtggacgtgcccttcggcggcgccaaggccggcgtgaagatcaaccccaagaactacaccgacaacgagctggagaagatcaccagaagattcaccatggagctggccaagaagggcttcatcggccccggcatcgacgtgcccgcccccgacatgagcaccggcgagagagagatgagctggatcgccgacacctacgccagcaccatcggccactacgacatcaacgcccacgcctgcgtgaccggcaagcccatcagccagggcggcatccacggcagaatcagcgccaccggcagaggcgtgttccacggcatcgagaacttcatcaacgaggccagctacatgagcatcctgggcatgacccccggcttcggcgacaagaccttcgtggtgcagggcttcggcaacgtgggcctgcacagcatgagatacctgcacagattcggcgccaagtgcatcgccgtgggcgagagcgacggcagcatctggaaccccgacggcatcgaccccaaggagctggaggacttcaagctgcagcacggcagcatcctgggcttccccaaggccaagccctacgagggcagcatcctggaggccgactgcgacatcctgatccccgccgccagcgagaagcagctgaccaagagcaacgcccccagagtgaaggccaagatcatcgccgagggcgccaacggccccaccacccccgaggccgacaagatcttcctggagagaaacatcatggtgatccccgacctgtacctgaacgccggcggcgtgaccgtgagctacttcgagtggctgaagaacctgaaccacgtgagctacggcagactgaccttcaagtacgagagagacagcaactaccacctgctgatgagcgtgcaggagagcctggagagaaagttcggcaagcacggcggcaccatccccatcgtgcccaccgccgagttccaggacagaatcagcggcgccagcgagaaggacatcgtgcacagcggcctggcctacaccatggagagaagcgccagacagatcatgagaaccgccatgaagtacaacctgggcctggacctgagaaccgccgcctacgtgaacgccatcgagaaggtgttcaaggtgtacaacgaggccggcgtgaccttcacctag

SEQ ID NO: 83091 - DNA, 1278 bp, synthetic construct
  misc_feature 1..1278: note = Description of Artificial Sequence: Synthetic coding sequence
  source 1..1278: mol_type = other DNA
atgacctgcccctgcgacaacgccagcagcgtgttcctgggcttctgcatcagatacagcaccgacgtgagcgtggacgaggtgaaggccctggccagcctgatgacctacaagtgcgccgtggtggacgtgcccttcggcggcgccaaggccggcgtgaagatcaaccccaagaactacaccgacaacgagctggagaagatcaccagaagattcaccatggagctggccaagaagggcttcatcggccccggcatcgacgtgcccgcccccgacatgagcaccggcgagagagagatgagctggatcgccgacacctacgccagcaccatcggccactacgacatcaacgcccacgcctgcgtgaccggcaagcccatcagccagggcggcatccacggcagaatcagcgccaccggcagaggcgtgttccacggcatcgagaacttcatcaacgaggccagctacatgagcatcctgggcatgacccccggcttcggcgacaagaccttcgtggtgcagggcttcggcaacgtgggcctgcacagcatgagatacctgcacagattcggcgccaagtgcatcgccgtgggcgagagcgacggcagcatctggaaccccgacggcatcgaccccaaggagctggaggacttcaagctgcagcacggcagcatcctgggcttccccaaggccaagccctacgagggcagcatcctggaggccgactgcgacatcctgatccccgccgccagcgagaagcagctgaccaagagcaacgcccccagagtgaaggccaagatcatcgccgagggcgccaacggccccaccacccccgaggccgacaagatcttcctggagagaaacatcatggtgatccccgacctgtacctgaacgccggcggcgtgaccgtgagctacttcgagtggctgaagaacctgaaccacgtgagctacggcagactgaccttcaagtacgagagagacagcaactaccacctgctgatgagcgtgcaggagagcctggagagaaagttcggcaagcacggcggcaccatccccatcgtgcccaccgccgagttccaggacagaatcagcggcgccagcgagaaggacatcgtgcacagcggcctggcctacaccatggagagaagcgccagacagatcatgagaaccgccatgaagtacaacctgggcctggacctgagaaccgccgcctacgtgaacgccatcgagaaggtgttcaaggtgtacaacgaggccggcgtgaccttcacctag

SEQ ID NO: 83092 - DNA, 1677 bp, synthetic construct
  misc_feature 1..1677: note = Description of Artificial Sequence: Synthetic coding sequence
  source 1..1677: mol_type = other DNA
atgtacagatacctggccaaggccctgctgcccagcagagccggccccgccgccctgggcagcgccgccaaccacagcgccgccctgctgggcagaggcagaggccagcccgccgccgccagccagcccggcctggccctggccgccagaagacactacagcgagctggtggccgacagagaggacgaccccaacttcttcaagatggtggagggcttcttcgacagaggcgccagcatcgtggaggacaagctggtgaaggacctgagaacccaggagagcgaggagcagaagagaaacagagtgagaggcatcctgagaatcatcaagccctgcaaccacgtgctgagcctgagcttccccatcagaagagacgacggcagctgggaggtgatcgagggctacagagcccagcacagccagcacagaaccccctgcaagggcggcatcagatacagcaccgacgtgagcgtggacgaggtgaaggccctggccagcctgatgacctacaagtgcgccgtggtggacgtgcccttcggcggcgccaaggccggcgtgaagatcaaccccaagaactacaccgagaacgagctggagaagatcaccagaagattcaccatggagctggccaagaagggcttcatcggccccggcgtggacgtgcccgcccccgacatgaacaccggcgagagagagatgagctggatcgccgacacctacgccagcaccatcggccactacgacatcaacgcccacgcctgcgtgaccggcaagcccatcagccagggcggcatccacggcagaatcagcgccaccggcagaggcgtgttccacggcatcgagaacttcatcaacgaggccagctacatgagcatcctgggcatgacccccggcttcagagacaagaccttcgtggtgcagggcttcggcaacgtgggcctgcacagcatgagatacctgcacagattcggcgccaagtgcatcgccgtgggcgagagcgacggcagcatctggaaccccgacggcatcgaccccaaggagctggaggacttcaagctgcagcacggcagcatcctgggcttccccaaggccaagccctacgagggcagcatcctggaggtggactgcgacatcctgatccccgccgccaccgagaagcagctgaccaagagcaacgcccccagagtgaaggccaagatcatcgccgagggcgccaacggccccaccacccccgaggccgacaagatcttcctggagagaaacatcctggtgatccccgacctgtacctgaacgccggcggcgtgaccgtgagctacttcgagtggctgaagaacctgaaccacgtgagctacggcagactgaccttcaagtacgagagagacagcaactaccacctgctgctgagcgtgcaggagagcctggagagaaagttcggcaagcacggcggcaccatccccatcgtgcccaccgccgagttccaggacagcatcagcggcgccagcgagaaggacatcgtgcacagcgccctggcctacaccatggagagaagcgccagacagatcatgcacaccgccatgaagtacaacctgggcctggacctgagaaccgccgcctacgtgaacgccatcgagaaggtgttcaaggtgtacagcgaggccggcgtgaccttcacctag

SEQ ID NO: 83093 - DNA, 3342 bp, synthetic construct
  misc_feature 1..3342: note = Description of Artificial Sequence: Synthetic coding sequence
  source 1..3342: mol_type = other DNA
atgatcgccgtgagcttcaagtgcagatgccagatcctgagaagactgaccaaggacgagagcccctacaccaagagcgccagccagaccaagccccccgacggcgccctggccgtgagaagacagagcatccccgaggagttcaagggcagcaccgtggtggagctgatgaagaaggagggcaccaccctgggcctgaccgtgagcggcggcatcgacaaggacggcaagcccagagtgagcaacctgagacagggcggcatcgccgccagaagcgaccagctggacgtgggcgactacatcaaggccgtgaacggcatcaacctggccaagttcagacacgacgagatcatcagcctgctgaagaacgtgggcgagagagtggtgctggaggtggagtacgagctgccccccgtgagcgtgcagggcagcagcgtgatcttcagaaccgtggaggtgaccctgcacaaggagggcaacaccttcggcttcgtgatcagaggcggcgcccacgacgacagaaacaagagcagacccgtggtgatcacctgcgtgagacccggcggccccgccgacagagagggcaccatcaagcccggcgacagactgctgagcgtggacggcatcagactgctgggcaccacccacgccgaggccatgagcatcctgaagcagtgcggccaggaggccgccctgctgatcgagtacgacgtgagcgtgatggacagcgtggccaccgccagcggccccctgctggtggaggtggccaagacccccggcgccagcctgggcgtggccctgaccaccagcatgtgctgcaacaagcaggtgatcgtgatcgacaagatcaagagcgccagcatcgccgacagatgcggcgccctgcacgtgggcgaccacatcctgagcatcgacggcaccagcatggagtactgcaccctggccgaggccacccagttcctggccaacaccaccgaccaggtgaagctggagatcctgccccaccaccagaccagactggccctgaagggccccgaccacgtgaagatccagagaagcgacagacagctgacctgggacagctgggccagcaaccacagcagcctgcacaccaaccaccactacaacacctaccaccccgaccactgcagagtgcccgccctgaccttccccaaggcccccccccccaacagcccccccgccctggtgagcagcagcttcagccccaccagcatgagcgcctacagcctgagcagcctgaacatgggcaccctgcccagaagcctgtacagcaccagccccagaggcaccatgatgagaagaagactgaagaagaaggacttcaagagcagcctgagcctggccagcagcaccgtgggcctggccggccaggtggtgcacaccgagaccaccgaggtggtgctgaccgccgaccccgtgaccggcttcggcatccagctgcagggcagcgtgttcgccaccgagaccctgagcagcccccccctgatcagctacatcgaggccgacagccccgccgagagatgcggcgtgctgcagatcggcgacagagtgatggccatcaacggcatccccaccgaggacagcaccttcgaggaggccagccagctgctgagagacagcagcatcaccagcaaggtgaccctggagatcgagttcgacgtggccgagagcgtgatccccagcagcggcaccttccacgtgaagctgcccaagaagcacaacgtggagctgggcatcaccatcagcagccccagcagcagaaagcccggcgaccccctggtgatcagcgacatcaagaagggcagcgtggcccacagaaccggcaccctggagctgggcgacaagctgctggccatcgacaacatcagactggacaactgcagcatggaggacgccgtgcagatcctgcagcagtgcgaggacctggtgaagctgaagatcagaaaggacgaggacaacagcgacgagcaggagagcagcggcgccatcatctacaccgtggagctgaagagatacggcggccccctgggcatcaccatcagcggcaccgaggagcccttcgaccccatcatcatcagcagcctgaccaagggcggcctggccgagagaaccggcgccatccacatcggcgacagaatcctggccatcaacagcagcagcctgaagggcaagcccctgagcgaggccatccacctgctgcagatggccggcgagaccgtgaccctgaagatcaagaagcagaccgacgcccagagcgccagcagccccaagaagttccccatcagcagccacctgagcgacctgggcgacgtggaggaggacagcagccccgcccagaagcccggcaagctgagcgacatgtaccccagcaccgtgcccagcgtggacagcgccgtggacagctgggacggcagcgccatcgacaccagctacggcacccagggcaccagcttccaggccagcggctacaacttcaacacctacgactggagaagccccaagcagagaggcagcctgagccccgtgaccaagcccagaagccagacctaccccgacgtgggcctgagctacgaggactgggacagaagcaccgccagcggcttcgccggcgccgccgacagcgccgagaccgagcaggaggagaacttctggagccaggccctggaggacctggagacctgcggccagagcggcatcctgagagagctggaggccaccatcatgagcggcagcaccatgagcctgaaccacgaggcccccacccccagaagccagctgggcagacaggccagcttccaggagagaagcagcagcagaccccactacagccagaccaccagaagcaacaccctgcccagcgacgtgggcagaaagagcgtgaccctgagaaagatgaagcaggagatcaaggagatcatgagccccacccccgtggagctgcacaaggtgaccctgtacaaggacagcgacatggaggacttcggcttcagcgtggccgacggcctgctggagaagggcgtgtacgtgaagaacatcagacccgccggccccggcgacctgggcggcctgaagccctacgacagactgctgcaggtgaaccacgtgagaaccagagacttcgactgctgcctggtggtgcccctgatcgccgagagcggcaacaagctggacctggtgatcagcagaaaccccctggccagccagaagagcatcgaccagcagagcctgcccggcgactggagcgagcagaacagcgccttcttccagcagcccagccacggcggcaacctggagaccagagagcccaccaacaccctgtag

SEQ ID NO: 83094 - DNA, 3387 bp, synthetic construct
  misc_feature 1..3387: note = Description of Artificial Sequence: Synthetic coding sequence
  source 1..3387: mol_type = other DNA
atgatcgccgtgagcttcaagtgcagatgccagatcctgagaagactgaccaaggacgagagcccctacaccaagagcgccagccagaccaagccccccgacggcgccctggccgtgagaagacagagcatccccgaggagttcaagggcagcaccgtggtggagctgatgaagaaggagggcaccaccctgggcctgaccgtgagcggcggcatcgacaaggacggcaagcccagagtgagcaacctgagacagggcggcatcgccgccagaagcgaccagctggacgtgggcgactacatcaaggccgtgaacggcatcaacctggccaagttcagacacgacgagatcatcagcctgctgaagaacgtgggcgagagagtggtgctggaggtggagtacgagctgccccccgtgagcgtgcagggcagcagcgtgatcttcagaaccgtggaggtgaccctgcacaaggagggcaacaccttcggcttcgtgatcagaggcggcgcccacgacgacagaaacaagagcagacccgtggtgatcacctgcgtgagacccggcggccccgccgacagagagggcaccatcaagcccggcgacagactgctgagcgtggacggcatcagactgctgggcaccacccacgccgaggccatgagcatcctgaagcagtgcggccaggaggccgccctgctgatcgagtacgacgtgagcgtgatggacagcgtggccaccgccagcggccccctgctggtggaggtggccaagacccccggcgccagcctgggcgtggccctgaccaccagcatgtgctgcaacaagcaggtgatcgtgatcgacaagatcaagagcgccagcatcgccgacagatgcggcgccctgcacgtgggcgaccacatcctgagcatcgacggcaccagcatggagtactgcaccctggccgaggccacccagttcctggccaacaccaccgaccaggtgaagctggagatcctgccccaccaccagaccagactggccctgaagggccccgaccacgtgaagatccagagaagcgacagacagctgacctgggacagctgggccagcaaccacagcagcctgcacaccaaccaccactacaacacctaccaccccgaccactgcagagtgcccgccctgaccttccccaaggcccccccccccaacagcccccccgccctggtgagcagcagcttcagccccaccagcatgagcgcctacagcctgagcagcctgaacatgggcaccctgcccagaagcctgtacagcaccagccccagaggcaccatgatgagaagaagactgaagaagaaggacttcaagagcagcctgagcctggccagcagcaccgtgggcctggccggccaggtggtgcacaccgagaccaccgaggtggtgctgaccgccgaccccgtgaccggcttcggcatccagctgcagggcagcgtgttcgccaccgagaccctgagcagcccccccctgatcagctacatcgaggccgacagccccgccgagagatgcggcgtgctgcagatcggcgacagagtgatggccatcaacggcatccccaccgaggacagcaccttcgaggaggccagccagctgctgagagacagcagcatcaccagcaaggtgaccctggagatcgagttcgacgtggccgagagcgtgatccccagcagcggcaccttccacgtgaagctgcccaagaagcacaacgtggagctgggcatcaccatcagcagccccagcagcagaaagcccggcgaccccctggtgatcagcgacatcaagaagggcagcgtggcccacagaaccggcaccctggagctgggcgacaagctgctggccatcgacaacatcagactggacaactgcagcatggaggacgccgtgcagatcctgcagcagtgcgaggacctggtgaagctgaagatcagaaaggacgaggacaacagcgacgagcaggagagcagcggcgccatcatctacaccgtggagctgaagagatacggcggccccctgggcatcaccatcagcggcaccgaggagcccttcgaccccatcatcatcagcagcctgaccaagggcggcctggccgagagaaccggcgccatccacatcggcgacagaatcctggccatcaacagcagcagcctgaagggcaagcccctgagcgaggccatccacctgctgcagatggccggcgagaccgtgaccctgaagatcaagaagcagaccgacgcccagagcgccagcagccccaagaagttccccatcagcagccacctgagcgacctgggcgacgtggaggaggacagcagccccgcccagaagcccggcaagctgagcgacatgtaccccagcaccgtgcccagcgtggacagcgccgtggacagctgggacggcagcgccatcgacaccagctacggcacccagggcaccagcttccaggccagcggctacaacttcaacacctacgactggagaagccccaagcagagaggcagcctgagccccgtgaccaagcccagaagccagacctaccccgacgtgggcctgagctacgaggactgggacagaagcaccgccagcggcttcgccggcgccgccgacagcgccgagaccgagcaggaggagaacttctggagccaggccctggaggacctggagacctgcggccagagcggcatcctgagagagctggaggagaaggccgacagaagagtgagcctgagaaacatgaccctgctggccaccatcatgagcggcagcaccatgagcctgaaccacgaggcccccacccccagaagccagctgggcagacaggccagcttccaggagagaagcagcagcagaccccactacagccagaccaccagaagcaacaccctgcccagcgacgtgggcagaaagagcgtgaccctgagaaagatgaagcaggagatcaaggagatcatgagccccacccccgtggagctgcacaaggtgaccctgtacaaggacagcgacatggaggacttcggcttcagcgtggccgacggcctgctggagaagggcgtgtacgtgaagaacatcagacccgccggccccggcgacctgggcggcctgaagccctacgacagactgctgcaggtgaaccacgtgagaaccagagacttcgactgctgcctggtggtgcccctgatcgccgagagcggcaacaagctggacctggtgatcagcagaaaccccctggccagccagaagagcatcgaccagcagagcctgcccggcgactggagcgagcagaacagcgccttcttccagcagcccagccacggcggcaacctggagaccagagagcccaccaacaccctgtag

SEQ ID NO: 83095 - DNA, 3231 bp, synthetic construct
  misc_feature 1..3231: note = Description of Artificial Sequence: Synthetic coding sequence
  source 1..3231: mol_type = other DNA
atgatcgccgtgagcttcaagtgcagatgccagatcctgagaagactgaccaaggacgagagcccctacaccaagagcgccagccagaccaagccccccgacggcgccctggccgtgagaagacagagcatccccgaggagttcaagggcagcaccgtggtggagctgatgaagaaggagggcaccaccctgggcctgaccgtgagcggcggcatcgacaaggacggcaagcccagagtgagcaacctgagacagggcggcatcgccgccagaagcgaccagctggacgtgggcgactacatcaaggccgtgaacggcatcaacctggccaagttcagacacgacgagatcatcagcctgctgaagaacgtgggcgagagagtggtgctggaggtggagtacgagctgccccccgtgagcgtgcagggcagcagcgtgatcttcagaaccgtggaggtgaccctgcacaaggagggcaacaccttcggcttcgtgatcagaggcggcgcccacgacgacagaaacaagagcagacccgtggtgatcacctgcgtgagacccggcggccccgccgacagagagggcaccatcaagcccggcgacagactgctgagcgtggacggcatcagactgctgggcaccacccacgccgaggccatgagcatcctgaagcagtgcggccaggaggccgccctgctgatcgagtacgacgtgagcgtgatggacagcgtggccaccgccagcggccccctgctggtggaggtggccaagacccccggcgccagcctgggcgtggccctgaccaccagcatgtgctgcaacaagcaggtgatcgtgatcgacaagatcaagagcgccagcatcgccgacagatgcggcgccctgcacgtgggcgaccacatcctgagcatcgacggcaccagcatggagtactgcaccctggccgaggccacccagttcctggccaacaccaccgaccaggtgaagctggagatcctgccccaccaccagaccagactggccctgaagggccccgaccacgccgccctggtgagcagcagcttcagccccaccagcatgagcgcctacagcctgagcagcctgaacatgggcaccctgcccagaagcctgtacagcaccagccccagaggcaccatgatgagaagaagactgaagaagaaggacttcaagagcagcctgagcctggccagcagcaccgtgggcctggccggccaggtggtgcacaccgagaccaccgaggtggtgctgaccgccgaccccgtgaccggcttcggcatccagctgcagggcagcgtgttcgccaccgagaccctgagcagcccccccctgatcagctacatcgaggccgacagccccgccgagagatgcggcgtgctgcagatcggcgacagagtgatggccatcaacggcatccccaccgaggacagcaccttcgaggaggccagccagctgctgagagacagcagcatcaccagcaaggtgaccctggagatcgagttcgacgtggccgagagcgtgatccccagcagcggcaccttccacgtgaagctgcccaagaagcacaacgtggagctgggcatcaccatcagcagccccagcagcagaaagcccggcgaccccctggtgatcagcgacatcaagaagggcagcgtggcccacagaaccggcaccctggagctgggcgacaagctgctggccatcgacaacatcagactggacaactgcagcatggaggacgccgtgcagatcctgcagcagtgcgaggacctggtgaagctgaagatcagaaaggacgaggacaacagcgacgagcaggagagcagcggcgccatcatctacaccgtggagctgaagagatacggcggccccctgggcatcaccatcagcggcaccgaggagcccttcgaccccatcatcatcagcagcctgaccaagggcggcctggccgagagaaccggcgccatccacatcggcgacagaatcctggccatcaacagcagcagcctgaagggcaagcccctgagcgaggccatccacctgctgcagatggccggcgagaccgtgaccctgaagatcaagaagcagaccgacgcccagagcgccagcagccccaagaagttccccatcagcagccacctgagcgacctgggcgacgtggaggaggacagcagccccgcccagaagcccggcaagctgagcgacatgtaccccagcaccgtgcccagcgtggacagcgccgtggacagctgggacggcagcgccatcgacaccagctacggcacccagggcaccagcttccaggccagcggctacaacttcaacacctacgactggagaagccccaagcagagaggcagcctgagccccgtgaccaagcccagaagccagacctaccccgacgtgggcctgagctacgaggactgggacagaagcaccgccagcggcttcgccggcgccgccgacagcgccgagaccgagcaggaggagaacttctggagccaggccctggaggacctggagacctgcggccagagcggcatcctgagagagctggaggagaaggccgacagaagagtgagcctgagaaacatgaccctgctggccaccatcatgagcggcagcaccatgagcctgaaccacgaggcccccacccccagaagccagctgggcagacaggccagcttccaggagagaagcagcagcagaccccactacagccagaccaccagaagcaacaccctgcccagcgacgtgggcagaaagagcgtgaccctgagaaagatgaagcaggagatcaaggagatcatgagccccacccccgtggagctgcacaaggtgaccctgtacaaggacagcgacatggaggacttcggcttcagcgtggccgacggcctgctggagaagggcgtgtacgtgaagaacatcagacccgccggccccggcgacctgggcggcctgaagccctacgacagactgctgcaggtgaaccacgtgagaaccagagacttcgactgctgcctggtggtgcccctgatcgccgagagcggcaacaagctggacctggtgatcagcagaaaccccctggccagccagaagagcatcgaccagcagagcctgcccggcgactggagcgagcagaacagcgccttcttccagcagcccagccacggcggcaacctggagaccagagagcccaccaacaccctgtag

SEQ ID NO: 83096 - DNA, 2511 bp, synthetic construct
  misc_feature 1..2511: note = Description of Artificial Sequence: Synthetic coding sequence
  source 1..2511: mol_type = other DNA
atggtgcagttcagcaccagcgagttcagactgaccccccacatcgacaacctggaggtggccaacagcttcgccgtgaccaacgccttctgcagccagttcagcagaggcgtgtacgccatcttcggcttctacgacaagaagagcgtgaacaccatcaccagcttctgcggcaccctgcacgtgagcttcatcacccccagcttccccaccgacggcacccaccccttcgtgatccagatgagacccgacctgaagggcgccctgctgagcctgatcgagtactaccagtgggacaagttcgcctacctgtacgacagcgacagaggcctgagcaccctgcaggccgtgctggacagcgccgccgagaagaagtggcaggtgaccgccatcaacgtgggcaacatcaacaacgacaagaaggacgagatgtacagaagcctgttccaggacctggagctgaagaaggagagaagagtgatcctggactgcgagagagacaaggtgaacgacatcgtggaccaggtgatcaccatcggcaagcacgtgaagggctaccactacatcatcgccaacctgggcttcaccgacggcgacctgctgaagatccagttcggcggcgccaacgtgagcggcttccagatcgtggactacgacgacagcctggtgagcaagttcatcgagagatggagcaccctggaggagaaggagtaccccggcgcccacaccaccaccatcaagtacaccagcgccctgacctacgacgccgtgcaggtgatgaccgaggccttcagaaacctgagaaagcagagaatcgagatcagcagaagaggcaacgccggcgactgcctggccaaccccgccgtgccctggggccagggcgtggagatcgagagagccctgaagcaggtgcaggtggagggcctgagcggcaacatcaagttcgaccagaacggcaagagaatcaactacaccatcaacatcatggagctgaagaccaacggccccagaaagatcggctactggagcgaggtggacaagatggtggtgaccctgaccgagctgcccagcggcaacgacaccagcggcctggagaacaagaccgtggtggtgaccaccatcctggagagcccctacgtgatgatgaagaagaaccacgagatgctggagggcaacgagagatacgagggctactgcgtggacctggccgccgagatcgccaagcactgcggcttcaagtacaagctgaccatcgtgggcgacggcaagtacggcgccagagacgccgacaccaagatctggaacggcatggtgggcgagctggtgtacggcaaggccgacatcgccatcgcccccctgaccatcaccctggtgagagaggaggtgatcgacttcagcaagcccttcatgagcctgggcatcagcatcatgatcaagaagccccagaagagcaagcccggcgtgttcagcttcctggaccccctggcctacgagatctggatgtgcatcgtgttcgcctacatcggcgtgagcgtggtgctgttcctggtgagcagattcagcccctacgagtggcacaccgaggagttcgaggacggcagagagacccagagcagcgagagcaccaacgagttcggcatcttcaacagcctgtggttcagcctgggcgccttcatgcagcagggctgcgacatcagccccagaagcctgagcggcagaatcgtgggcggcgtgtggtggttcttcaccctgatcatcatcagcagctacaccgccaacctggccgccttcctgaccgtggagagaatggtgagccccatcgagagcgccgaggacctgagcaagcagaccgagatcgcctacggcaccctggacagcggcagcaccaaggagttcttcagaagaagcaagatcgccgtgttcgacaagatgtggacctacatgagaagcgccgagcccagcgtgttcgtgagaaccaccgccgagggcgtggccagagtgagaaagagcaagggcaagtacgcctacctgctggagagcaccatgaacgagtacatcgagcagagaaagccctgcgacaccatgaaggtgggcggcaacctggacagcaagggctacggcatcgccacccccaagggcagcagcctgagaacccccgtgaacctggccgtgctgaagctgagcgagcagggcgtgctggacaagctgaagaacaagtggtggtacgacaagggcgagtgcggcgccaaggacagcggcagcaaggagaagaccagcgccctgagcctgagcaacgtggccggcgtgttctacatcctggtgggcggcctgggcctggccatgctggtggccctgatcgagttctgctacaagagcagagccgaggccaagagaatgaaggtggccaagaacgcccagaacatcaaccccagcagcagccagaacagccagaacttcgccacctacaaggagggctacaacgtgtacggcatcgagagcgtgaagatctag

SEQ ID NO: 83097 - DNA, 2706 bp, synthetic construct
  misc_feature 1..2706: note = Description of Artificial Sequence: Synthetic coding sequence
  source 1..2706: mol_type = other DNA
atgagcaccatgagactgctgaccctggccctgctgttcagctgcagcgtggccagagccgcctgcgaccccaagatcgtgaacatcggcgccgtgctgagcaccagaaagcacgagcagatgttcagagaggccgtgaaccaggccaacaagagacacggcagctggaagatccagctgaacgccaccagcgtgacccacaagcccaacgccatccagatggccctgagcgtgtgcgaggacctgatcagcagccaggtgtacgccatcctggtgagccacccccccacccccaacgaccacttcacccccacccccgtgagctacaccgccggcttctacagaatccccgtgctgggcctgaccaccagaatgagcatctacagcgacaagagcatccacctgagcttcctgagaaccgtgcccccctacagccaccagagcagcgtgtggttcgagatgatgagagtgtacagctggaaccacatcatcctgctggtgagcgacgaccacgagggcagagccgcccagaagagactggagaccctgctggaggagagagagagcaaggccgagaaggtgctgcagttcgaccccggcaccaagaacgtgaccgccctgctgatggaggccaaggagctggaggccagagtgatcatcctgagcgccagcgaggacgacgccgccaccgtgtacagagccgccgccatgctgaacatgaccggcagcggctacgtgtggctggtgggcgagagagagatcagcggcaacgccctgagatacgcccccgacggcatcctgggcctgcagctgatcaacggcaagaacgagagcgcccacatcagcgacgccgtgggcgtggtggcccaggccgtgcacgagctgctggagaaggagaacatcaccgacccccccagaggctgcgtgggcaacaccaacatctggaagaccggccccctgttcaagagagtgctgatgagcagcaagtacgccgacggcgtgaccggcagagtggagttcaacgaggacggcgacagaaagttcgccaactacagcatcatgaacctgcagaacagaaagctggtgcaggtgggcatctacaacggcacccacgtgatccccaacgacagaaagatcatctggcccggcggcgagaccgagaagcccagaggctaccagatgagcaccagactgaagatcgtgaccatccaccaggagcccttcgtgtacgtgaagcccaccctgagcgacggcacctgcaaggaggagttcaccgtgaacggcgaccccgtgaagaaggtgatctgcaccggccccaacgacaccagccccggcagccccagacacaccgtgccccagtgctgctacggcttctgcatcgacctgctgatcaagctggccagaaccatgaacttcacctacgaggtgcacctggtggccgacggcaagttcggcacccaggagagagtgaacaacagcaacaagaaggagtggaacggcatgatgggcgagctgctgagcggccaggccgacatgatcgtggcccccctgaccatcaacaacgagagagcccagtacatcgagttcagcaagcccttcaagtaccagggcctgaccatcctggtgaagaaggagatccccagaagcaccctggacagcttcatgcagcccttccagagcaccctgtggctgctggtgggcctgagcgtgcacgtggtggccgtgatgctgtacctgctggacagattcagccccttcggcagattcaaggtgaacagcgaggaggaggaggaggacgccctgaccctgagcagcgccatgtggttcagctggggcgtgctgctgaacagcggcatcggcgagggcgcccccagaagcttcagcgccagaatcctgggcatggtgtgggccggcttcgccatgatcatcgtggccagctacaccgccaacctggccgccttcctggtgctggacagacccgaggagagaatcaccggcatcaacgaccccagactgagaaaccccagcgacaagttcatctacgccaccgtgaagcagagcagcgtggacatctacttcagaagacaggtggagctgagcaccatgtacagacacatggagaagcacaactacgagagcgccgccgaggccatccaggccgtgagagacaacaagctgcacgccttcatctgggacagcgccgtgctggagttcgaggccagccagaagtgcgacctggtgaccaccggcgagctgttcttcagaagcggcttcggcatcggcatgagaaaggacagcccctggaagcagaacgtgagcctgagcatcctgaagagccacgagaacggcttcatggaggacctggacaagacctgggtgagataccaggagtgcgacagcagaagcaacgcccccgccaccctgaccttcgagaacatggccggcgtgttcatgctggtggccggcggcatcgtggccggcatcttcctgatcttcatcgagatcgcctacaagagacacaaggacgccagaagaaagcagatgcagctggccttcgccgccgtgaacgtgtggagaaagaacctgcagagcaccggcggcggcagaggcgccctgcagaaccagaaggacaccgtgctgcccagaagagccatcgagagagaggagggccagctgcagctgtgcagcagacacagagagagctag

SEQ ID NO: 83098 - DNA, 2658 bp, synthetic construct
  misc_feature 1..2658: note = Description of Artificial Sequence: Synthetic coding sequence
  source 1..2658: mol_type = other DNA
atgagcaccatgagactgctgaccctggccctgctgttcagctgcagcgtggccagagccgcctgcgaccccaagatcgtgaacatcggcgccgtgctgagcaccagaaagcacgagcagatgttcagagaggccgtgaaccaggccaacaagagacacggcagctggaagatccagctgaacgccaccagcgtgacccacaagcccaacgccatccagatggccctgagcgtgtgcgaggacctgatcagcagccaggtgtacgccatcctggtgagccacccccccacccccaacgaccacttcacccccacccccgtgagctacaccgccggcttctacagaatccccgtgctgggcctgaccaccagaatgagcatctacagcgacaagagcatccacctgagcttcctgagaaccgtgcccccctacagccaccagagcagcgtgtggttcgagatgatgagagtgtacagctggaaccacatcatcctgctggtgagcgacgaccacgagggcagagccgcccagaagagactggagaccctgctggaggagagagagagcaaggccgagaaggtgctgcagttcgaccccggcaccaagaacgtgaccgccctgctgatggaggccaaggagctggaggccagagtgatcatcctgagcgccagcgaggacgacgccgccaccgtgtacagagccgccgccatgctgaacatgaccggcagcggctacgtgtggctggtgggcgagagagagatcagcggcaacgccctgagatacgcccccgacggcatcctgggcctgcagctgatcaacggcaagaacgagagcgcccacatcagcgacgccgtgggcgtggtggcccaggccgtgcacgagctgctggagaaggagaacatcaccgacccccccagaggctgcgtgggcaacaccaacatctggaagaccggccccctgttcaagagagtgctgatgagcagcaagtacgccgacggcgtgaccggcagagtggagttcaacgaggacggcgacagaaagttcgccaactacagcatcatgaacctgcagaacagaaagctggtgcaggtgggcatctacaacggcacccacgtgatccccaacgacagaaagatcatctggcccggcggcgagaccgagaagcccagaggctaccagatgagcaccagactgaagatcgtgaccatccaccaggagcccttcgtgtacgtgaagcccaccctgagcgacggcacctgcaaggaggagttcaccgtgaacggcgaccccgtgaagaaggtgatctgcaccggccccaacgacaccagccccggcagccccagacacaccgtgccccagtgctgctacggcttctgcatcgacctgctgatcaagctggccagaaccatgaacttcacctacgaggtgcacctggtggccgacggcaagttcggcacccaggagagagtgaacaacagcaacaagaaggagtggaacggcatgatgggcgagctgctgagcggccaggccgacatgatcgtggcccccctgaccatcaacaacgagagagcccagtacatcgagttcagcaagcccttcaagtaccagggcctgaccatcctggtgaagaaggagatccccagaagcaccctggacagcttcatgcagcccttccagagcaccctgtggctgctggtgggcctgagcgtgcacgtggtggccgtgatgctgtacctgctggacagattcagccccttcggcagattcaaggtgaacagcgaggaggaggaggaggacgccctgaccctgagcagcgccatgtggttcagctggggcgtgctgctgaacagcggcatcggcgagggcgcccccagaagcttcagcgccagaatcctgggcatggtgtgggccggcttcgccatgatcatcgtggccagctacaccgccaacctggccgccttcctggtgctggacagacccgaggagagaatcaccggcatcaacgaccccagactgagaaaccccagcgacaagttcatctacgccaccgtgaagcagagcagcgtggacatctacttcagaagacaggtggagctgagcaccatgtacagacacatggagaagcacaactacgagagcgccgccgaggccatccaggccgtgagagacaacaagctgcacgccttcatctgggacagcgccgtgctggagttcgaggccagccagaagtgcgacctggtgaccaccggcgagctgttcttcagaagcggcttcggcatcggcatgagaaaggacagcccctggaagcagaacgtgagcctgagcatcctgaagagccacgagaacggcttcatggaggacctggacaagacctgggtgagataccaggagtgcgacagcagaagcaacgcccccgccaccctgaccttcgagaacatggccggcgtgttcatgctggtggccggcggcatcgtggccggcatcttcctgatcttcatcgagatcgcctacaagagacacaaggacgccagaagaaagcagatgcagctggccttcgccgccgtgaacgtgtggagaaagaacctgcagcagtaccaccccaccgacatcaccggccccctgaacctgagcgaccccagcgtgagcaccgtggtgtag

SEQ ID NO: 83099 - DNA, 2769 bp, synthetic construct
  misc_feature 1..2769: note = Description of Artificial Sequence: Synthetic coding sequence
  source 1..2769: mol_type = other DNA
atggtgcagctgagaaagctgctgagagtgctgaccctgatgaagttcccctgctgcgtgctggaggtgctgctgtgcgccctggccgccgccgccagaggccaggagatgtacgccccccacagcatcagaatcgagggcgacgtgaccctgggcggcctgttccccgtgcacgccaagggccccagcggcgtgccctgcggcgacatcaagagagagaacggcatccacagactggaggccatgctgtacgccctggaccagatcaacagcgaccccaacctgctgcccaacgtgaccctgggcgccagaatcctggacacctgcagcagagacacctacgccctggagcagagcctgaccttcgtgcaggccctgatccagaaggacaccagcgacgtgagatgcaccaacggcgagccccccgtgttcgtgaagcccgagaaggtggtgggcgtgatcggcgccagcggcagcagcgtgagcatcatggtggccaacatcctgagactgttccagatcccccagatcagctacgccagcaccgcccccgagctgagcgacgacagaagatacgacttcttcagcagagtggtgccccccgacagcttccaggcccaggccatggtggacatcgtgaaggccctgggctggaactacgtgagcaccctggccagcgagggcagctacggcgagaagggcgtggagagcttcacccagatcagcaaggaggccggcggcctgtgcatcgcccagagcgtgagaatcccccaggagagaaaggacagaaccatcgacttcgacagaatcatcaagcagctgctggacacccccaacagcagagccgtggtgatcttcgccaacgacgaggacatcaagcagatcctggccgccgccaagagagccgaccaggtgggccacttcctgtgggtgggcagcgacagctggggcagcaagatcaaccccctgcaccagcacgaggacatcgccgagggcgccatcaccatccagcccaagagagccaccgtggagggcttcgacgcctacttcaccagcagaaccctggagaacaacagaagaaacgtgtggttcgccgagtactgggaggagaacttcaactgcaagctgaccatcagcggcagcaagaaggaggacaccgacagaaagtgcaccggccaggagagaatcggcaaggacagcaactacgagcaggagggcaaggtgcagttcgtgatcgacgccgtgtacgccatggcccacgccctgcaccacatgaacaaggacctgtgcgccgactacagaggcgtgtgccccgagatggagcaggccggcggcaagaagctgctgaagtacatcagaaacgtgaacttcaacggcagcgccggcacccccgtgatgttcaacaagaacggcgacgcccccggcagatacgacatcttccagtaccagaccaccaacaccagcaaccccggctacagactgatcggccagtggaccgacgagctgcagctgaacatcgaggacatgcagtggggcaagggcgtgagagagatccccgccagcgtgtgcaccctgccctgcaagcccggccagagaaagaagacccagaagggcaccccctgctgctggacctgcgagccctgcgacggctaccagtaccagttcgacgagatgacctgccagcactgcccctacgaccagagacccaacgagaacagaaccggctgccaggacatccccatcatcaagctggagtggcacagcccctgggccgtgatccccgtgttcctggccatgctgggcatcatcgccaccatcttcgtgatggccaccttcatcagatacaacgacacccccatcgtgagagccagcggcagagagctgagctacgtgctgctgaccggcatcttcctgtgctacatcatcaccttcctgatgatcgccaagcccgacgtggccgtgtgcagcttcagaagagtgttcctgggcctgggcatgtgcatcagctacgccgccctgctgaccaagaccaacagaatctacagaatcttcgagcagggcaagaagagcgtgaccgcccccagactgatcagccccaccagccagctggccatcaccagcagcctgatcagcgtgcagctgctgggcgtgttcatctggttcggcgtggacccccccaacatcatcatcgactacgacgagcacaagaccatgaaccccgagcaggccagaggcgtgctgaagtgcgacatcaccgacctgcagatcatctgcagcctgggctacagcatcctgctgatggtgacctgcaccgtgtacgccatcaagaccagaggcgtgcccgagaacttcaacgaggccaagcccatcggcttcaccatgtacaccacctgcatcgtgtggctggccttcatccccatcttcttcggcaccgcccagagcgccgagaagctgtacatccagaccaccaccctgaccatcagcatgaacctgagcgccagcgtggccctgggcatgctgtacatgcccaaggtgtacatcatcatcttccaccccgagctgaacgtgcagaagagaaagagaagcttcaaggccgtggtgaccgccgccaccatgagcagcagactgagccacaagcccagcgacagacccaacggcgaggccaagaccgagctgtgcgagaacgtggaccccaacaactgcatcccccccgtgagaaagagcgtgcagaagagcgtgacctggtacaccatcccccccaccgtgtag

SEQ ID NO: 83100 - DNA, 2685 bp, synthetic construct
  misc_feature 1..2685: note = Description of Artificial Sequence: Synthetic coding sequence
  source 1..2685: mol_type = other DNA
atggccagacagaagaagatgggccagagcgtgctgagagccgtgttcttcctggtgctgggcctgctgggccacagccacggcggcttccccaacaccatcagcatcggcggcctgttcatgagaaacaccgtgcaggagcacagcgccttcagattcgccgtgcagctgtacaacaccaaccagaacaccaccgagaagcccttccacctgaactaccacgtggaccacctggacagcagcaacagcttcagcgtgaccaacgccttctgcagccagttcagcagaggcgtgtacgccatcttcggcttctacgaccagatgagcatgaacaccctgaccagcttctgcggcgccctgcacaccagcttcgtgacccccagcttccccaccgacgccgacgtgcagttcgtgatccagatgagacccgccctgaagggcgccatcctgagcctgctgggccactacaagtgggagaagttcgtgtacctgtacgacaccgagagaggcttcagcatcctgcaggccatcatggaggccgccgtgcagaacaactggcaggtgaccgccagaagcgtgggcaacatcaaggacgtgcaggagttcagaagaatcatcgaggagatggacagaagacaggagaagagatacctgatcgactgcgaggtggagagaatcaacaccatcctggagcaggtggtgatcctgggcaagcacagcagaggctaccactacatgctggccaacctgggcttcaccgacatcctgctggagagagtgatgcacggcggcgccaacatcaccggcttccagatcgtgaacaacgagaaccccatggtgcagcagttcatccagagatgggtgagactggacgagagagagttccccgaggccaagaacgcccccctgaagtacaccagcgccctgacccacgacgccatcctggtgatcgccgaggccttcagatacctgagaagacagagagtggacgtgagcagaagaggcagcgccggcgactgcctggccaaccccgccgtgccctggagccagggcatcgacatcgagagagccctgaagatggtgcaggtgcagggcatgaccggcaacatccagttcgacacctacggcagaagaaccaactacaccatcgacgtgtacgagatgaaggtgagcggcagcagaaaggccggctactggaacgagtacgagagattcgtgcccttcagcgaccagcagatcagcaacgacagcgccagcagcgagaacagaaccatcgtggtgaccaccatcctggagagcccctacgtgatgtacaagaagaaccacgagcagctggagggcaacgagagatacgagggctactgcgtggacctggcctacgagatcgccaagcacgtgagaatcaagtacaagctgagcatcgtgggcgacggcaagtacggcgccagagaccccgagaccaagatctggaacggcatggtgggcgagctggtgtacggcagagccgacatcgccgtggcccccctgaccatcaccctggtgagagaggaggtgatcgacttcagcaagcccttcatgagcctgggcatcagcatcatgatcaagaagccccagaagagcaagcccggcgtgttcagcttcctggaccccctggcctacgagatctggatgtgcatcgtgttcgcctacatcggcgtgagcgtggtgctgttcctggtgagcagattcagcccctacgagtggcacctggaggacaacaacgaggagcccagagacccccagagcccccccgacccccccaacgagttcggcatcttcaacagcctgtggttcagcctgggcgccttcatgcagcagggctgcgacatcagccccagaagcctgagcggcagaatcgtgggcggcgtgtggtggttcttcaccctgatcatcatcagcagctacaccgccaacctggccgccttcctgaccgtggagagaatggtgagccccatcgagagcgccgaggacctggccaagcagaccgagatcgcctacggcaccctggacagcggcagcaccaaggagttcttcagaagaagcaagatcgccgtgtacgagaagatgtggagctacatgaagagcgccgagcccagcgtgttcaccaagaccaccgccgacggcgtggccagagtgagaaagagcaagggcaagttcgccttcctgctggagagcaccatgaacgagtacatcgagcagagaaagccctgcgacaccatgaaggtgggcggcaacctggacagcaagggctacggcgtggccacccccaagggcagcgccctgagaaacgccgtgaacctggccgtgctgaagctgaacgagcagggcctgctggacaagctgaagaacaagtggtggtacgacaagggcgagtgcggcagcggcggcggcgacagcaaggacaagaccagcgccctgagcctgagcaacgtggccggcgtgttctacatcctggtgggcggcctgggcctggccatgatggtggccctgatcgagttctgctacaagagcagagccgagagcaagagaatgaagctgaccaagaacacccagaacttcaagcccgcccccgccaccaacacccagaactacgccacctacagagagggctacaacgtgtacggcaccgagagcgtgaagatctag

SEQ ID NO: 83101 - DNA, 432 bp, synthetic construct
  misc_feature 1..432: note = Description of Artificial Sequence: Synthetic coding sequence
  source 1..432: mol_type = other DNA
atggccagacagaagaagatgggccagagcgtgctgagagccgtgttcttcctggtgctgggcctgctgggccacagccacggcggcttccccaacaccatcagcatcggcggcctgttcatgagaaacaccgtgcaggagcacagcgccttcagattcgccgtgcagctgtacaacaccaaccagaacaccaccgagaagcccttccacctgaactaccacgtggaccacctggacagcagcaacagcttcagcgtgaccaacgcctgccccgccgagagagactacctgccctggcccggcagcatcagagagaacaactggaccgccctgccctgctgcaaggaccacggcctgctgcacctgaagtgcagccccggcggcagacagaactgggcctactgcatctggggcgtgaccggcgagctgtag

SEQ ID NO: 83102 - DNA, 2685 bp, synthetic construct; identical to SEQ ID NO: 83100
  misc_feature 1..2685: note = Description of Artificial Sequence: Synthetic coding sequence
  source 1..2685: mol_type = other DNA

SEQ ID NO: 83103 - DNA, 2685 bp, synthetic construct
  misc_feature 1..2685: note = Description of Artificial Sequence: Synthetic coding sequence
  source 1..2685: mol_type = other DNA
atggccagacagaagaagatgggccagagcgtgctgagagccgtgttcttcctggtgctgggcctgctgggccacagccacggcggcttccccaacaccatcagcatcggcggcctgttcatgagaaacaccgtgcaggagcacagcgccttcagattcgccgtgcagctgtacaacaccaaccagaacaccaccgagaagcccttccacctgaactaccacgtggaccacctggacagcagcaacagcttcagcgtgaccaacgccttctgcagccagttcagcagaggcgtgtacgccatcttcggcttctacgaccagatgagcatgaacaccctgaccagcttctgcggcgccctgcacaccagcttcgtgacccccagcttccccaccgacgccgacgtgcagttcgtgatccagatgagacccgccctgaagggcgccatcctgagcctgctgggccactacaagtgggagaagttcgtgtacctgtacgacaccgagagaggcttcagcatcctgcaggccatcatggaggccgccgtgcagaacaactggcaggtgaccgccagaagcgtgggcaacatcaaggacgtgcaggagttcagaagaatcatcgaggagatggacagaagacaggagaagagatacctgatcgactgcgaggtggagagaatcaacaccatcctggagcaggtggtgatcctgggcaagcacagcagaggctaccactacatgctggccaacctgggcttcaccgacatcctgctggagagagtgatgcacggcggcgccaacatcaccggcttccagatcgtgaacaacgagaaccccatggtgcagcagttcatccagagatgggtgagactggacgagagagagttccccgaggccaagaacgcccccctgaagtacaccagcgccctgacccacgacgccatcctggtgatcgccgaggccttcagatacctgagaagacagagagtggacgtgagcagaagaggcagcgccggcgactgcctggccaaccccgccgtgccctggagccagggcatcgacatcgagagagccctgaagatggtgcaggtgcagggcatgaccggcaacatccagttcgacacctacggcagaagaaccaactacaccatcgacgtgtacgagatgaaggtgagcggcagcagaaaggccggctactggaacgagtacgagagattcgtgcccttcagcgaccagcagatcagcaacgacagcgccagcagcgagaacagaaccatcgtggtgaccaccatcctggagagcccctacgtgatgtacaagaagaaccacgagcagctggagggcaacgagagatacgagggctactgcgtggacctggcctacgagatcgccaagcacgtgagaatcaagtacaagctgagcatcgtgggcgacggcaagtacggcgccagagaccccgagaccaagatctggaacggcatggtgggcgagctggtgtacggcagagccgacatcgccgtggcccccctgaccatcaccctggtgagagaggaggtgatcgacttcagcaagcccttcatgagcctgggcatcagcatcatgatcaagaagccccagaagagcaagcccggcgtgttcagcttcctggaccccctggcctacgagatctggatgtgcatcgtgttcgcctacatcggcgtgagcgtggtgctgttcctggtgagcagattcagcccctacgagtggcacctggaggacaacaacgaggagcccagagacccccagagcccccccgacccccccaacgagttcggcatcttcaacagcctgtggttcagcctgggcgccttcatgcagcagggctgcgacatcagccccagaagcctgagcggcagaatcgtgggcggcgtgtggtggttcttcaccctgatcatcatcagcagctacaccgccaacctggccgccttcctgaccgtggagagaatggtgagccccatcgagagcgccgaggacctggccaagcagaccgagatcgcctacggcaccctggacagcggcagcaccaaggagttcttcagaagaagcaagatcgccgtgtacgagaagatgtggagctacatgaagagcgccgagcccagcgtgttcaccaagaccaccgccgacggcgtggccagagtgagaaagagcaagggcaagttcgccttcctgctggagagcaccatgaacgagtacatcgagcagagaaagccctgcgacaccatgaaggtgggcggcaacctggacagcaagggctacggcgtggccacccccaagggcagcgccctgagaacccccgtgaacctggccgtgctgaagctgagcgagcagggcatcctggacaagctgaagaacaagtggtggtacgacaagggcgagtgcggcgccaaggacagcggcagcaaggacaagaccagcgccctgagcctgagcaacgtggccggcgtgttctacatcctggtgggcggcctgggcctggccatgatggtggccctgatcgagttctgctacaagagcagagccgagagcaagagaatgaagctgaccaagaacacccagaacttcaagcccgcccccgccaccaacacccagaactacgccacctacagagagggctacaacgtgtacggcaccgagagcgtgaagatctag

SEQ ID NO: 83104 - DNA, 495 bp, synthetic construct
  misc_feature 1..495: note = Description of Artificial Sequence: Synthetic coding sequence
  source 1..495: mol_type = other DNA
atggccagacagaagaagatgggccagagcgtgctgagagccgtgttcttcctggtgctgggcctgctgggccacagccacggcggcttccccaacaccatcagcatcggcggcctgttcatgagaaacaccgtgcaggagcacagcgccttcagattcgccgtgcagctgtacaacaccaaccagaacaccaccgagaagcccttccacctgaactaccacgtggaccacctggacagcagcaacagcttcagcgtgaccaacgcctgccccgccgagagagactacctgccctggcccggcagcatcagagagaacaactggaccgccctgccctgctgcaaggaccacggcctgctgcacctgaagtgcagccccggcggccccgccaagaccggccccatcgtgagcggcgccctgcaggtgaactgcaagatgagaaccagaagccaggtgagcaccaccagcagcctgctggagttcagcaccgagtag
